United States Patent Application Publication US 2019/0048337 A1 - sequence listing, part 7

SEQ ID NO: 204121 - RNA, 22 nt, Artificial Sequence
  Synthetic
caaagaagucccaugucuccca

SEQ ID NO: 204122 - RNA, 23 nt, Artificial Sequence
  Synthetic
gcaaagaagucccaugucuccca

SEQ ID NO: 204123 - RNA, 24 nt, Artificial Sequence
  Synthetic
ggcaaagaagucccaugucuccca

SEQ ID NO: 204124 - RNA, 18 nt, Artificial Sequence
  Synthetic
uauuaaaaacuucuccca

SEQ ID NO: 204125 - RNA, 19 nt, Artificial Sequence
  Synthetic
guauuaaaaacuucuccca

SEQ ID NO: 204126 - RNA, 20 nt, Artificial Sequence
  Synthetic
gguauuaaaaacuucuccca

SEQ ID NO: 204127 - RNA, 21 nt, Artificial Sequence
  Synthetic
ugguauuaaaaacuucuccca

SEQ ID NO: 204128 - RNA, 22 nt, Artificial Sequence
  Synthetic
uugguauuaaaaacuucuccca

SEQ ID NO: 204129 - RNA, 23 nt, Artificial Sequence
  Synthetic
auugguauuaaaaacuucuccca

SEQ ID NO: 204130 - RNA, 24 nt, Artificial Sequence
  Synthetic
aauugguauuaaaaacuucuccca

SEQ ID NO: 204131 - RNA, 18 nt, Artificial Sequence
  Synthetic
gcauuuuuuuuucuccca

SEQ ID NO: 204132 - RNA, 19 nt, Artificial Sequence
  Synthetic
ugcauuuuuuuuucuccca

SEQ ID NO: 204133 - RNA, 20 nt, Artificial Sequence
  Synthetic
augcauuuuuuuuucuccca

SEQ ID NO: 204134 - RNA, 21 nt, Artificial Sequence
  Synthetic
uaugcauuuuuuuuucuccca

SEQ ID NO: 204135 - RNA, 22 nt, Artificial Sequence
  Synthetic
uuaugcauuuuuuuuucuccca

SEQ ID NO: 204136 - RNA, 23 nt, Artificial Sequence
  Synthetic
cuuaugcauuuuuuuuucuccca

SEQ ID NO: 204137 - RNA, 24 nt, Artificial Sequence
  Synthetic
gcuuaugcauuuuuuuuucuccca

SEQ ID NO: 204138 - RNA, 18 nt, Artificial Sequence
  Synthetic
uucuggcaagcaguccca

SEQ ID NO: 204139 - RNA, 19 nt, Artificial Sequence
  Synthetic
uuucuggcaagcaguccca

SEQ ID NO: 204140 - RNA, 20 nt, Artificial Sequence
  Synthetic
cuuucuggcaagcaguccca

SEQ ID NO: 204141 - RNA, 21 nt, Artificial Sequence
  Synthetic
ccuuucuggcaagcaguccca

SEQ ID NO: 204142 - RNA, 22 nt, Artificial Sequence
  Synthetic
accuuucuggcaagcaguccca

SEQ ID NO: 204143 - RNA, 23 nt, Artificial Sequence
  Synthetic
caccuuucuggcaagcaguccca

SEQ ID NO: 204144 - RNA, 24 nt, Artificial Sequence
  Synthetic
gcaccuuucuggcaagcaguccca

SEQ ID NO: 204145 - RNA, 18 nt, Artificial Sequence
  Synthetic
gauuauaacaagguccca

SEQ ID NO: 204146 - RNA, 19 nt, Artificial Sequence
  Synthetic
agauuauaacaagguccca

SEQ ID NO: 204147 - RNA, 20 nt, Artificial Sequence
  Synthetic
cagauuauaacaagguccca

SEQ ID NO: 204148 - RNA, 21 nt, Artificial Sequence
  Synthetic
gcagauuauaacaagguccca

SEQ ID NO: 204149 - RNA, 22 nt, Artificial Sequence
  Synthetic
agcagauuauaacaagguccca

SEQ ID NO: 204150 - RNA, 23 nt, Artificial Sequence
  Synthetic
aagcagauuauaacaagguccca

SEQ ID NO: 204151 - RNA, 24 nt, Artificial Sequence
  Synthetic
aaagcagauuauaacaagguccca

SEQ ID NO: 204152 - RNA, 18 nt, Artificial Sequence
  Synthetic
aguuaggaaaauguccca

SEQ ID NO: 204153 - RNA, 19 nt, Artificial Sequence
  Synthetic
aaguuaggaaaauguccca

SEQ ID NO: 204154 - RNA, 20 nt, Artificial Sequence
  Synthetic
uaaguuaggaaaauguccca

SEQ ID NO: 204155 - RNA, 21 nt, Artificial Sequence
  Synthetic
auaaguuaggaaaauguccca

SEQ ID NO: 204156 - RNA, 22 nt, Artificial Sequence
  Synthetic
aauaaguuaggaaaauguccca

SEQ ID NO: 204157 - RNA, 23 nt, Artificial Sequence
  Synthetic
aaauaaguuaggaaaauguccca

SEQ ID NO: 204158 - RNA, 24 nt, Artificial Sequence
  Synthetic
gaaauaaguuaggaaaauguccca

SEQ ID NO: 204159 - RNA, 18 nt, Artificial Sequence
  Synthetic
uucgauguuaauguccca

SEQ ID NO: 204160 - RNA, 19 nt, Artificial Sequence
  Synthetic
uuucgauguuaauguccca

SEQ ID NO: 204161 - RNA, 20 nt, Artificial Sequence
  Synthetic
cuuucgauguuaauguccca

SEQ ID NO: 204162 - RNA, 21 nt, Artificial Sequence
  Synthetic
ucuuucgauguuaauguccca

SEQ ID NO: 204163 - RNA, 22 nt, Artificial Sequence
  Synthetic
uucuuucgauguuaauguccca

SEQ ID NO: 204164 - RNA, 23 nt, Artificial Sequence
  Synthetic
uuucuuucgauguuaauguccca

SEQ ID NO: 204165 - RNA, 24 nt, Artificial Sequence
  Synthetic
cuuucuuucgauguuaauguccca

SEQ ID NO: 204166 - RNA, 18 nt, Artificial Sequence
  Synthetic
cagaacaguguuguccca

SEQ ID NO: 204167 - RNA, 19 nt, Artificial Sequence
  Synthetic
ccagaacaguguuguccca

SEQ ID NO: 204168 - RNA, 20 nt, Artificial Sequence
  Synthetic
uccagaacaguguuguccca

SEQ ID NO: 204169 - RNA, 21 nt, Artificial Sequence
  Synthetic
guccagaacaguguuguccca

SEQ ID NO: 204170 - RNA, 22 nt, Artificial Sequence
  Synthetic
uguccagaacaguguuguccca

SEQ ID NO: 204171 - RNA, 23 nt, Artificial Sequence
  Synthetic
auguccagaacaguguuguccca

SEQ ID NO: 204172 - RNA, 24 nt, Artificial Sequence
  Synthetic
aauguccagaacaguguuguccca

SEQ ID NO: 204173 - RNA, 18 nt, Artificial Sequence
  Synthetic
agccacauuaaauuccca

SEQ ID NO: 204174 - RNA, 19 nt, Artificial Sequence
  Synthetic
cagccacauuaaauuccca

SEQ ID NO: 204175 - RNA, 20 nt, Artificial Sequence
  Synthetic
gcagccacauuaaauuccca

SEQ ID NO: 204176 - RNA, 21 nt, Artificial Sequence
  Synthetic
agcagccacauuaaauuccca

SEQ ID NO: 204177 - RNA, 22 nt, Artificial Sequence
  Synthetic
cagcagccacauuaaauuccca

SEQ ID NO: 204178 - RNA, 23 nt, Artificial Sequence
  Synthetic
ucagcagccacauuaaauuccca

SEQ ID NO: 204179 - RNA, 24 nt, Artificial Sequence
  Synthetic
aucagcagccacauuaaauuccca

SEQ ID NO: 204180 - RNA, 18 nt, Artificial Sequence
  Synthetic
gugaucugggaauuccca

SEQ ID NO: 204181 - RNA, 19 nt, Artificial Sequence
  Synthetic
ugugaucugggaauuccca

SEQ ID NO: 204182 - RNA, 20 nt, Artificial Sequence
  Synthetic
uugugaucugggaauuccca

SEQ ID NO: 204183 - RNA, 21 nt, Artificial Sequence
  Synthetic
uuugugaucugggaauuccca

SEQ ID NO: 204184 - RNA, 22 nt, Artificial Sequence
  Synthetic
auuugugaucugggaauuccca

SEQ ID NO: 204185 - RNA, 23 nt, Artificial Sequence
  Synthetic
aauuugugaucugggaauuccca

SEQ ID NO: 204186 - RNA, 24 nt, Artificial Sequence
  Synthetic
caauuugugaucugggaauuccca

SEQ ID NO: 204187 - RNA, 18 nt, Artificial Sequence
  Synthetic
cuuauuguuuacuuccca

SEQ ID NO: 204188 - RNA, 19 nt, Artificial Sequence
  Synthetic
ccuuauuguuuacuuccca

SEQ ID NO: 204189 - RNA, 20 nt, Artificial Sequence
  Synthetic
cccuuauuguuuacuuccca

SEQ ID NO: 204190 - RNA, 21 nt, Artificial Sequence
  Synthetic
ucccuuauuguuuacuuccca

SEQ ID NO: 204191 - RNA, 22 nt, Artificial Sequence
  Synthetic
uucccuuauuguuuacuuccca

SEQ ID NO: 204192 - RNA, 23 nt, Artificial Sequence
  Synthetic
uuucccuuauuguuuacuuccca

SEQ ID NO: 204193 - RNA, 24 nt, Artificial Sequence
  Synthetic
uuuucccuuauuguuuacuuccca

SEQ ID NO: 204194 - RNA, 18 nt, Artificial Sequence
  Synthetic
uuucagcuccccuuccca

SEQ ID NO: 204195 - RNA, 19 nt, Artificial Sequence
  Synthetic
uuuucagcuccccuuccca

SEQ ID NO: 204196 - RNA, 20 nt, Artificial Sequence
  Synthetic
cuuuucagcuccccuuccca

SEQ ID NO: 204197 - RNA, 21 nt, Artificial Sequence
  Synthetic
ccuuuucagcuccccuuccca

SEQ ID NO: 204198 - RNA, 22 nt, Artificial Sequence
  Synthetic
cccuuuucagcuccccuuccca

SEQ ID NO: 204199 - RNA, 23 nt, Artificial Sequence
  Synthetic
ccccuuuucagcuccccuuccca

SEQ ID NO: 204200 - RNA, 24 nt, Artificial Sequence
  Synthetic
uccccuuuucagcuccccuuccca

SEQ ID NO: 204201 - RNA, 18 nt, Artificial Sequence
  Synthetic
uaggauucuaucuuccca

SEQ ID NO: 204202 - RNA, 19 nt, Artificial Sequence
  Synthetic
uuaggauucuaucuuccca

SEQ ID NO: 204203 - RNA, 20 nt, Artificial Sequence
  Synthetic
guuaggauucuaucuuccca

SEQ ID NO: 204204 - RNA, 21 nt, Artificial Sequence
  Synthetic
aguuaggauucuaucuuccca

SEQ ID NO: 204205 - RNA, 22 nt, Artificial Sequence
  Synthetic
aaguuaggauucuaucuuccca

SEQ ID NO: 204206 - RNA, 23 nt, Artificial Sequence
  Synthetic
gaaguuaggauucuaucuuccca

SEQ ID NO: 204207 - RNA, 24 nt, Artificial Sequence
  Synthetic
ugaaguuaggauucuaucuuccca

SEQ ID NO: 204208 - RNA, 18 nt, Artificial Sequence
  Synthetic
aggggagaggucuuccca

SEQ ID NO: 204209 - RNA, 19 nt, Artificial Sequence
  Synthetic
gaggggagaggucuuccca

SEQ ID NO: 204210 - RNA, 20 nt, Artificial Sequence
  Synthetic
ggaggggagaggucuuccca

SEQ ID NO: 204211 - RNA, 21 nt, Artificial Sequence
  Synthetic
uggaggggagaggucuuccca

SEQ ID NO: 204212 - RNA, 22 nt, Artificial Sequence
  Synthetic
uuggaggggagaggucuuccca

SEQ ID NO: 204213 - RNA, 23 nt, Artificial Sequence
  Synthetic
auuggaggggagaggucuuccca

SEQ ID NO: 204214 - RNA, 24 nt, Artificial Sequence
  Synthetic
gauuggaggggagaggucuuccca

SEQ ID NO: 204215 - RNA, 18 nt, Artificial Sequence
  Synthetic
cuguauugauucuuccca

SEQ ID NO: 204216 - RNA, 19 nt, Artificial Sequence
  Synthetic
ucuguauugauucuuccca

SEQ ID NO: 204217 - RNA, 20 nt, Artificial Sequence
  Synthetic
aucuguauugauucuuccca

SEQ ID NO: 204218 - RNA, 21 nt, Artificial Sequence
  Synthetic
uaucuguauugauucuuccca

SEQ ID NO: 204219 - RNA, 22 nt, Artificial Sequence
  Synthetic
cuaucuguauugauucuuccca

SEQ ID NO: 204220 - RNA, 23 nt, Artificial Sequence
  Synthetic
acuaucuguauugauucuuccca

SEQ ID NO: 204221 - RNA, 24 nt, Artificial Sequence
  Synthetic
gacuaucuguauugauucuuccca

SEQ ID NO: 204222 - RNA, 18 nt, Artificial Sequence
  Synthetic
ugggaaauguaguuccca

SEQ ID NO: 204223 - RNA, 19 nt, Artificial Sequence
  Synthetic
cugggaaauguaguuccca

SEQ ID NO: 204224 - RNA, 20 nt, Artificial Sequence
  Synthetic
ucugggaaauguaguuccca

SEQ ID NO: 204225 - RNA, 21 nt, Artificial Sequence
  Synthetic
gucugggaaauguaguuccca

SEQ ID NO: 204226 - RNA, 22 nt, Artificial Sequence
  Synthetic
agucugggaaauguaguuccca

SEQ ID NO: 204227 - RNA, 23 nt, Artificial Sequence
  Synthetic
gagucugggaaauguaguuccca

SEQ ID NO: 204228 - RNA, 24 nt, Artificial Sequence
  Synthetic
ugagucugggaaauguaguuccca

SEQ ID NO: 204229 - RNA, 18 nt, Artificial Sequence
  Synthetic
cuuuuuuauucguuccca

SEQ ID NO: 204230 - RNA, 19 nt, Artificial Sequence
  Synthetic
ucuuuuuuauucguuccca

SEQ ID NO: 204231 - RNA, 20 nt, Artificial Sequence
  Synthetic
aucuuuuuuauucguuccca

SEQ ID NO: 204232 - RNA, 21 nt, Artificial Sequence
  Synthetic
uaucuuuuuuauucguuccca

SEQ ID NO: 204233 - RNA, 22 nt, Artificial Sequence
  Synthetic
uuaucuuuuuuauucguuccca

SEQ ID NO: 204234 - RNA, 23 nt, Artificial Sequence
  Synthetic
auuaucuuuuuuauucguuccca

SEQ ID NO: 204235 - RNA, 24 nt, Artificial Sequence
  Synthetic
cauuaucuuuuuuauucguuccca

SEQ ID NO: 204236 - RNA, 18 nt, Artificial Sequence
  Synthetic
aauuguucuuuguuccca

SEQ ID NO: 204237 - RNA, 19 nt, Artificial Sequence
  Synthetic
uaauuguucuuuguuccca

SEQ ID NO: 204238 - RNA, 20 nt, Artificial Sequence
  Synthetic
cuaauuguucuuuguuccca

SEQ ID NO: 204239 - RNA, 21 nt, Artificial Sequence
  Synthetic
gcuaauuguucuuuguuccca

SEQ ID NO: 204240 - RNA, 22 nt, Artificial Sequence
  Synthetic
ggcuaauuguucuuuguuccca

SEQ ID NO: 204241 - RNA, 23 nt, Artificial Sequence
  Synthetic
aggcuaauuguucuuuguuccca

SEQ ID NO: 204242 - RNA, 24 nt, Artificial Sequence
  Synthetic
aaggcuaauuguucuuuguuccca

SEQ ID NO: 204243 - RNA, 18 nt, Artificial Sequence
  Synthetic
gacauaaaucauuuccca

SEQ ID NO: 204244 - RNA, 19 nt, Artificial Sequence
  Synthetic
agacauaaaucauuuccca

SEQ ID NO: 204245 - RNA, 20 nt, Artificial Sequence
  Synthetic
gagacauaaaucauuuccca

SEQ ID NO: 204246 - RNA, 21 nt, Artificial Sequence
  Synthetic
agagacauaaaucauuuccca

SEQ ID NO: 204247 - RNA, 22 nt, Artificial Sequence
  Synthetic
aagagacauaaaucauuuccca

SEQ ID NO: 204248 - RNA, 23 nt, Artificial Sequence
  Synthetic
uaagagacauaaaucauuuccca

SEQ ID NO: 204249 - RNA, 24 nt, Artificial Sequence
  Synthetic
guaagagacauaaaucauuuccca

SEQ ID NO: 204250 - RNA, 18 nt, Artificial Sequence
  Synthetic
cugaagacuuauuuccca

SEQ ID NO: 204251 - RNA, 19 nt, Artificial Sequence
  Synthetic
ccugaagacuuauuuccca

SEQ ID NO: 204252 - RNA, 20 nt, Artificial Sequence
  Synthetic
accugaagacuuauuuccca

SEQ ID NO: 204253 - RNA, 21 nt, Artificial Sequence
  Synthetic
uaccugaagacuuauuuccca

SEQ ID NO: 204254 - RNA, 22 nt, Artificial Sequence
  Synthetic
cuaccugaagacuuauuuccca

SEQ ID NO: 204255 - RNA, 23 nt, Artificial Sequence
  Synthetic
acuaccugaagacuuauuuccca

SEQ ID NO: 204256 - RNA, 24 nt, Artificial Sequence
  Synthetic
uacuaccugaagacuuauuuccca

SEQ ID NO: 204257 - RNA, 18 nt, Artificial Sequence
  Synthetic
uuguuacuuuauuuccca

SEQ ID NO: 204258 - RNA, 19 nt, Artificial Sequence
  Synthetic
uuuguuacuuuauuuccca

SEQ ID NO: 204259 - RNA, 20 nt, Artificial Sequence
  Synthetic
cuuuguuacuuuauuuccca

SEQ ID NO: 204260 - RNA, 21 nt, Artificial Sequence
  Synthetic
ucuuuguuacuuuauuuccca

SEQ ID NO: 204261 - RNA, 22 nt, Artificial Sequence
  Synthetic
aucuuuguuacuuuauuuccca

SEQ ID NO: 204262 - RNA, 23 nt, Artificial Sequence
  Synthetic
aaucuuuguuacuuuauuuccca

SEQ ID NO: 204263 - RNA, 24 nt, Artificial Sequence
  Synthetic
uaaucuuuguuacuuuauuuccca

SEQ ID NO: 204264 - RNA, 18 nt, Artificial Sequence
  Synthetic
gagagcuucacuuuccca

SEQ ID NO: 204265 - RNA, 19 nt, Artificial Sequence
  Synthetic
ggagagcuucacuuuccca

SEQ ID NO: 204266 - RNA, 20 nt, Artificial Sequence
  Synthetic
aggagagcuucacuuuccca

SEQ ID NO: 204267 - RNA, 21 nt, Artificial Sequence
  Synthetic
gaggagagcuucacuuuccca

SEQ ID NO: 204268 - RNA, 22 nt, Artificial Sequence
  Synthetic
ugaggagagcuucacuuuccca

SEQ ID NO: 204269 - RNA, 23 nt, Artificial Sequence
  Synthetic
uugaggagagcuucacuuuccca

SEQ ID NO: 204270 - RNA, 24 nt, Artificial Sequence
  Synthetic
cuugaggagagcuucacuuuccca

SEQ ID NO: 204271 - RNA, 18 nt, Artificial Sequence
  Synthetic
augcagaaggcuuuccca

SEQ ID NO: 204272 - RNA, 19 nt, Artificial Sequence
  Synthetic
gaugcagaaggcuuuccca

SEQ ID NO: 204273 - RNA, 20 nt, Artificial Sequence
  Synthetic
ggaugcagaaggcuuuccca

SEQ ID NO: 204274 - RNA, 21 nt, Artificial Sequence
  Synthetic
aggaugcagaaggcuuuccca

SEQ ID NO: 204275 - RNA, 22 nt, Artificial Sequence
  Synthetic
caggaugcagaaggcuuuccca

SEQ ID NO: 204276 - RNA, 23 nt, Artificial Sequence
  Synthetic
gcaggaugcagaaggcuuuccca

SEQ ID NO: 204277 - RNA, 24 nt, Artificial Sequence
  Synthetic
ggcaggaugcagaaggcuuuccca

SEQ ID NO: 204278 - RNA, 18 nt, Artificial Sequence
  Synthetic
gaacagacuucuuuccca

SEQ ID NO: 204279 - RNA, 19 nt, Artificial Sequence
  Synthetic
cgaacagacuucuuuccca

SEQ ID NO: 204280 - RNA, 20 nt, Artificial Sequence
  Synthetic
gcgaacagacuucuuuccca

SEQ ID NO: 204281 - RNA, 21 nt, Artificial Sequence
  Synthetic
agcgaacagacuucuuuccca

SEQ ID NO: 204282 - RNA, 22 nt, Artificial Sequence
  Synthetic
aagcgaacagacuucuuuccca

SEQ ID NO: 204283 - RNA, 23 nt, Artificial Sequence
  Synthetic
aaagcgaacagacuucuuuccca

SEQ ID NO: 204284 - RNA, 24 nt, Artificial Sequence
  Synthetic
caaagcgaacagacuucuuuccca

SEQ ID NO: 204285 - RNA, 18 nt, Artificial Sequence
  Synthetic
uauagaaacauuuuccca

SEQ ID NO: 204286 - RNA, 19 nt, Artificial Sequence
  Synthetic
uuauagaaacauuuuccca

SEQ ID NO: 204287 - RNA, 20 nt, Artificial Sequence
  Synthetic
auuauagaaacauuuuccca

SEQ ID NO: 204288 - RNA, 21 nt, Artificial Sequence
  Synthetic
gauuauagaaacauuuuccca

SEQ ID NO: 204289 - RNA, 22 nt, Artificial Sequence
  Synthetic
ggauuauagaaacauuuuccca

SEQ ID NO: 204290 - RNA, 23 nt, Artificial Sequence
  Synthetic
aggauuauagaaacauuuuccca

SEQ ID NO: 204291 - RNA, 24 nt, Artificial Sequence
  Synthetic
uaggauuauagaaacauuuuccca

SEQ ID NO: 204292 - RNA, 18 nt, Artificial Sequence
  Synthetic
gggaaaccaguuuuccca

SEQ ID NO: 204293 - RNA, 19 nt, Artificial Sequence
  Synthetic
agggaaaccaguuuuccca

SEQ ID NO: 204294 - RNA, 20 nt, Artificial Sequence
  Synthetic
aagggaaaccaguuuuccca

SEQ ID NO: 204295 - RNA, 21 nt, Artificial Sequence
  Synthetic
caagggaaaccaguuuuccca

SEQ ID NO: 204296 - RNA, 22 nt, Artificial Sequence
  Synthetic
ucaagggaaaccaguuuuccca

SEQ ID NO: 204297 - RNA, 23 nt, Artificial Sequence
  Synthetic
uucaagggaaaccaguuuuccca

SEQ ID NO: 204298 - RNA, 24 nt, Artificial Sequence
  Synthetic
guucaagggaaaccaguuuuccca

SEQ ID NO: 204299 - RNA, 18 nt, Artificial Sequence
  Synthetic
gaucuuaauuaaaagcca

SEQ ID NO: 204300 - RNA, 19 nt, Artificial Sequence
  Synthetic
agaucuuaauuaaaagcca

SEQ ID NO: 204301 - RNA, 20 nt, Artificial Sequence
  Synthetic
gagaucuuaauuaaaagcca

SEQ ID NO: 204302 - RNA, 21 nt, Artificial Sequence
  Synthetic
agagaucuuaauuaaaagcca

SEQ ID NO: 204303 - RNA, 22 nt, Artificial Sequence
  Synthetic
gagagaucuuaauuaaaagcca

SEQ ID NO: 204304 - RNA, 23 nt, Artificial Sequence
  Synthetic
agagagaucuuaauuaaaagcca

SEQ ID NO: 204305 - RNA, 24 nt, Artificial Sequence
  Synthetic
gagagagaucuuaauuaaaagcca

SEQ ID NO: 204306 - RNA, 18 nt, Artificial Sequence
  Synthetic
agugggaaaggaaagcca

SEQ ID NO: 204307 - RNA, 19 nt, Artificial Sequence
  Synthetic
cagugggaaaggaaagcca

SEQ ID NO: 204308 - RNA, 20 nt, Artificial Sequence
  Synthetic
acagugggaaaggaaagcca

SEQ ID NO: 204309 - RNA, 21 nt, Artificial Sequence
  Synthetic
aacagugggaaaggaaagcca

SEQ ID NO: 204310 - RNA, 22 nt, Artificial Sequence
  Synthetic
gaacagugggaaaggaaagcca

SEQ ID NO: 204311 - RNA, 23 nt, Artificial Sequence
  Synthetic
agaacagugggaaaggaaagcca

SEQ ID NO: 204312 - RNA, 24 nt, Artificial Sequence
  Synthetic
uagaacagugggaaaggaaagcca

SEQ ID NO: 204313 - RNA, 18 nt, Artificial Sequence
  Synthetic
aaggguaauugaaagcca

SEQ ID NO: 204314 - RNA, 19 nt, Artificial Sequence
  Synthetic
gaaggguaauugaaagcca

SEQ ID NO: 204315 - RNA, 20 nt, Artificial Sequence
  Synthetic
ugaaggguaauugaaagcca

SEQ ID NO: 204316 - RNA, 21 nt, Artificial Sequence
  Synthetic
uugaaggguaauugaaagcca

SEQ ID NO: 204317 - RNA, 22 nt, Artificial Sequence
  Synthetic
uuugaaggguaauugaaagcca

SEQ ID NO: 204318 - RNA, 23 nt, Artificial Sequence
  Synthetic
auuugaaggguaauugaaagcca

SEQ ID NO: 204319 - RNA, 24 nt, Artificial Sequence
  Synthetic
uauuugaaggguaauugaaagcca

SEQ ID NO: 204320 - RNA, 18 nt, Artificial Sequence
  Synthetic
gauuguugcauaaagcca

SEQ ID NO: 204321 - RNA, 19 nt, Artificial Sequence
  Synthetic
ugauuguugcauaaagcca

SEQ ID NO: 204322 - RNA, 20 nt, Artificial Sequence
  Synthetic
augauuguugcauaaagcca

SEQ ID NO: 204323 - RNA, 21 nt, Artificial Sequence
  Synthetic
aaugauuguugcauaaagcca

SEQ ID NO: 204324 - RNA, 22 nt, Artificial Sequence
  Synthetic
aaaugauuguugcauaaagcca

SEQ ID NO: 204325 - RNA, 23 nt, Artificial Sequence
  Synthetic
gaaaugauuguugcauaaagcca

SEQ ID NO: 204326 - RNA, 24 nt, Artificial Sequence
  Synthetic
agaaaugauuguugcauaaagcca

SEQ ID NO: 204327 - RNA, 18 nt, Artificial Sequence
  Synthetic
aauuaaccacuaaagcca

SEQ ID NO: 204328 - RNA, 19 nt, Artificial Sequence
  Synthetic
gaauuaaccacuaaagcca

SEQ ID NO: 204329 - RNA, 20 nt, Artificial Sequence
  Synthetic
ugaauuaaccacuaaagcca

SEQ ID NO: 204330 - RNA, 21 nt, Artificial Sequence
  Synthetic
uugaauuaaccacuaaagcca

SEQ ID NO: 204331 - RNA, 22 nt, Artificial Sequence
  Synthetic
uuugaauuaaccacuaaagcca

SEQ ID NO: 204332 - RNA, 23 nt, Artificial Sequence
  Synthetic
cuuugaauuaaccacuaaagcca

SEQ ID NO: 204333 - RNA, 24 nt, Artificial Sequence
  Synthetic
ucuuugaauuaaccacuaaagcca

SEQ ID NO: 204334 - RNA, 18 nt, Artificial Sequence
  Synthetic
gucauaggaguaaagcca

SEQ ID NO: 204335 - RNA, 19 nt, Artificial Sequence
  Synthetic
ggucauaggaguaaagcca

SEQ ID NO: 204336 - RNA, 20 nt, Artificial Sequence
  Synthetic
gggucauaggaguaaagcca

SEQ ID NO: 204337 - RNA, 21 nt, Artificial Sequence
  Synthetic
ugggucauaggaguaaagcca

SEQ ID NO: 204338 - RNA, 22 nt, Artificial Sequence
  Synthetic
cugggucauaggaguaaagcca

SEQ ID NO: 204339 - RNA, 23 nt, Artificial Sequence
  Synthetic
ccugggucauaggaguaaagcca

SEQ ID NO: 204340 - RNA, 24 nt, Artificial Sequence
  Synthetic
cccugggucauaggaguaaagcca

SEQ ID NO: 204341 - RNA, 18 nt, Artificial Sequence
  Synthetic
cugaagcaaaacaagcca

SEQ ID NO: 204342 - RNA, 19 nt, Artificial Sequence
  Synthetic
gcugaagcaaaacaagcca

SEQ ID NO: 204343 - RNA, 20 nt, Artificial Sequence
  Synthetic
ggcugaagcaaaacaagcca

SEQ ID NO: 204344 - RNA, 21 nt, Artificial Sequence
  Synthetic
uggcugaagcaaaacaagcca

SEQ ID NO: 204345 - RNA, 22 nt, Artificial Sequence
  Synthetic
guggcugaagcaaaacaagcca

SEQ ID NO: 204346 - RNA, 23 nt, Artificial Sequence
  Synthetic
aguggcugaagcaaaacaagcca

SEQ ID NO: 204347 - RNA, 24 nt, Artificial Sequence
  Synthetic
aaguggcugaagcaaaacaagcca

SEQ ID NO: 204348 - RNA, 18 nt, Artificial Sequence
  Synthetic
aauaauuaaaacaagcca

SEQ ID NO: 204349 - RNA, 19 nt, Artificial Sequence
  Synthetic
uaauaauuaaaacaagcca

SEQ ID NO: 204350 - RNA, 20 nt, Artificial Sequence
  Synthetic
cuaauaauuaaaacaagcca

SEQ ID NO: 204351 - RNA, 21 nt, Artificial Sequence
  Synthetic
ccuaauaauuaaaacaagcca

SEQ ID NO: 204352 - RNA, 22 nt, Artificial Sequence
  Synthetic
cccuaauaauuaaaacaagcca

SEQ ID NO: 204353 - RNA, 23 nt, Artificial Sequence
  Synthetic
acccuaauaauuaaaacaagcca

SEQ ID NO: 204354 - RNA, 24 nt, Artificial Sequence
  Synthetic
aacccuaauaauuaaaacaagcca

SEQ ID NO: 204355 - RNA, 18 nt, Artificial Sequence
  Synthetic
ucaagguagaacaagcca

SEQ ID NO: 204356 - RNA, 19 nt, Artificial Sequence
  Synthetic
aucaagguagaacaagcca

SEQ ID NO: 204357 - RNA, 20 nt, Artificial Sequence
  Synthetic
uaucaagguagaacaagcca

SEQ ID NO: 204358 - RNA, 21 nt, Artificial Sequence
  Synthetic
cuaucaagguagaacaagcca

SEQ ID NO: 204359 - RNA, 22 nt, Artificial Sequence
  Synthetic
ucuaucaagguagaacaagcca

SEQ ID NO: 204360 - RNA, 23 nt, Artificial Sequence
  Synthetic
uucuaucaagguagaacaagcca

SEQ ID NO: 204361 - RNA, 24 nt, Artificial Sequence
  Synthetic
guucuaucaagguagaacaagcca

SEQ ID NO: 204362 - RNA, 18 nt, Artificial Sequence
  Synthetic
uuccucuuugccaagcca

SEQ ID NO: 204363 - RNA, 19 nt, Artificial Sequence
  Synthetic
uuuccucuuugccaagcca

SEQ ID NO: 204364 - RNA, 20 nt, Artificial Sequence
  Synthetic
uuuuccucuuugccaagcca

SEQ ID NO: 204365 - RNA, 21 nt, Artificial Sequence
  Synthetic
cuuuuccucuuugccaagcca

SEQ ID NO: 204366 - RNA, 22 nt, Artificial Sequence
  Synthetic
gcuuuuccucuuugccaagcca

SEQ ID NO: 204367 - RNA, 23 nt, Artificial Sequence
  Synthetic
ugcuuuuccucuuugccaagcca

SEQ ID NO: 204368 - RNA, 24 nt, Artificial Sequence
  Synthetic
gugcuuuuccucuuugccaagcca

SEQ ID NO: 204369 - RNA, 18 nt, Artificial Sequence
  Synthetic
aaauucggcaagaagcca

SEQ ID NO: 204370 - RNA, 19 nt, Artificial Sequence
  Synthetic
aaaauucggcaagaagcca

SEQ ID NO: 204371 - RNA, 20 nt, Artificial Sequence
  Synthetic
uaaaauucggcaagaagcca

SEQ ID NO: 204372 - RNA, 21 nt, Artificial Sequence
  Synthetic
auaaaauucggcaagaagcca

SEQ ID NO: 204373 - RNA, 22 nt, Artificial Sequence
  Synthetic
uauaaaauucggcaagaagcca

SEQ ID NO: 204374 - RNA, 23 nt, Artificial Sequence
  Synthetic
uuauaaaauucggcaagaagcca

SEQ ID NO: 204375 - RNA, 24 nt, Artificial Sequence
  Synthetic
auuauaaaauucggcaagaagcca

SEQ ID NO: 204376 - RNA, 18 nt, Artificial Sequence
  Synthetic
uggccagagcagaagcca

SEQ ID NO: 204377 - RNA, 19 nt, Artificial Sequence
  Synthetic
auggccagagcagaagcca

SEQ ID NO: 204378 - RNA, 20 nt, Artificial Sequence
  Synthetic
cauggccagagcagaagcca

SEQ ID NO: 204379 - RNA, 21 nt, Artificial Sequence
  Synthetic
acauggccagagcagaagcca

SEQ ID NO: 204380 - RNA, 22 nt, Artificial Sequence
  Synthetic
cacauggccagagcagaagcca

SEQ ID NO: 204381 - RNA, 23 nt, Artificial Sequence
  Synthetic
ucacauggccagagcagaagcca

SEQ ID NO: 204382 - RNA, 24 nt, Artificial Sequence
  Synthetic
gucacauggccagagcagaagcca

SEQ ID NO: 204383 - RNA, 18 nt, Artificial Sequence
  Synthetic
ccucgaaaucagaagcca

SEQ ID NO: 204384 - RNA, 19 nt, Artificial Sequence
  Synthetic
gccucgaaaucagaagcca

SEQ ID NO: 204385 - RNA, 20 nt, Artificial Sequence
  Synthetic
ggccucgaaaucagaagcca

SEQ ID NO: 204386 - RNA, 21 nt, Artificial Sequence
  Synthetic
uggccucgaaaucagaagcca

SEQ ID NO: 204387 - RNA, 22 nt, Artificial Sequence
  Synthetic
uuggccucgaaaucagaagcca

SEQ ID NO: 204388 - RNA, 23 nt, Artificial Sequence
  Synthetic
guuggccucgaaaucagaagcca

SEQ ID NO: 204389 - RNA, 24 nt, Artificial Sequence
  Synthetic
cguuggccucgaaaucagaagcca

SEQ ID NO: 204390 - RNA, 18 nt, Artificial Sequence
  Synthetic
caccagacagagaagcca

SEQ ID NO: 204391 - RNA, 19 nt, Artificial Sequence
  Synthetic
acaccagacagagaagcca

SEQ ID NO: 204392 - RNA, 20 nt, Artificial Sequence
  Synthetic
aacaccagacagagaagcca

SEQ ID NO: 204393 - RNA, 21 nt, Artificial Sequence
  Synthetic
uaacaccagacagagaagcca

SEQ ID NO: 204394 - RNA, 22 nt, Artificial Sequence
  Synthetic
auaacaccagacagagaagcca

SEQ ID NO: 204395 - RNA, 23 nt, Artificial Sequence
  Synthetic
cauaacaccagacagagaagcca

SEQ ID NO: 204396 - RNA, 24 nt, Artificial Sequence
  Synthetic
acauaacaccagacagagaagcca

SEQ ID NO: 204397 - RNA, 18 nt, Artificial Sequence
  Synthetic
ucucuuugggagaagcca

SEQ ID NO: 204398 - RNA, 19 nt, Artificial Sequence
  Synthetic
uucucuuugggagaagcca

SEQ ID NO: 204399 - RNA, 20 nt, Artificial Sequence
  Synthetic
uuucucuuugggagaagcca

SEQ ID NO: 204400 - RNA, 21 nt, Artificial Sequence
  Synthetic
auuucucuuugggagaagcca

SEQ ID NO: 204401 - RNA, 22 nt, Artificial Sequence
  Synthetic
uauuucucuuugggagaagcca

SEQ ID NO: 204402 - RNA, 23 nt, Artificial Sequence
  Synthetic
cuauuucucuuugggagaagcca

SEQ ID NO: 204403 - RNA, 24 nt, Artificial Sequence
  Synthetic
ccuauuucucuuugggagaagcca

SEQ ID NO: 204404 - RNA, 18 nt, Artificial Sequence
  Synthetic
aaaagaaggaggaagcca

SEQ ID NO: 204405 - RNA, 19 nt, Artificial Sequence
  Synthetic
gaaaagaaggaggaagcca

SEQ ID NO: 204406 - RNA, 20 nt, Artificial Sequence
  Synthetic
agaaaagaaggaggaagcca

SEQ ID NO: 204407 - RNA, 21 nt, Artificial Sequence
  Synthetic
aagaaaagaaggaggaagcca

SEQ ID NO: 204408 - RNA, 22 nt, Artificial Sequence
  Synthetic
aaagaaaagaaggaggaagcca

SEQ ID NO: 204409 - RNA, 23 nt, Artificial Sequence
  Synthetic
gaaagaaaagaaggaggaagcca

SEQ ID NO: 204410 - RNA, 24 nt, Artificial Sequence
  Synthetic
ugaaagaaaagaaggaggaagcca

SEQ ID NO: 204411 - RNA, 18 nt, Artificial Sequence
  Synthetic
acaucaacauggaagcca

SEQ ID NO: 204412 - RNA, 19 nt, Artificial Sequence
  Synthetic
gacaucaacauggaagcca

SEQ ID NO: 204413 - RNA, 20 nt, Artificial Sequence
  Synthetic
ggacaucaacauggaagcca

SEQ ID NO: 204414 - RNA, 21 nt, Artificial Sequence
  Synthetic
aggacaucaacauggaagcca

SEQ ID NO: 204415 - RNA, 22 nt, Artificial Sequence
  Synthetic
aaggacaucaacauggaagcca

SEQ ID NO: 204416 - RNA, 23 nt, Artificial Sequence
  Synthetic
gaaggacaucaacauggaagcca

SEQ ID NO: 204417 - RNA, 24 nt, Artificial Sequence
  Synthetic
ugaaggacaucaacauggaagcca

SEQ ID NO: 204418 - RNA, 18 nt, Artificial Sequence
  Synthetic
aaauuaaauguuaagcca

SEQ ID NO: 204419 - RNA, 19 nt, Artificial Sequence
  Synthetic
uaaauuaaauguuaagcca

SEQ ID NO: 204420 - RNA, 20 nt, Artificial Sequence
  Synthetic
auaaauuaaauguuaagcca

SEQ ID NO: 204421 - RNA, 21 nt, Artificial Sequence
  Synthetic
uauaaauuaaauguuaagcca

SEQ ID NO: 204422 - RNA, 22 nt, Artificial Sequence
  Synthetic
uuauaaauuaaauguuaagcca

SEQ ID NO: 204423 - RNA, 23 nt, Artificial Sequence
  Synthetic
uuuauaaauuaaauguuaagcca

SEQ ID NO: 204424 - RNA, 24 nt, Artificial Sequence
  Synthetic
guuuauaaauuaaauguuaagcca

SEQ ID NO: 204425 - RNA, 18 nt, Artificial Sequence
  Synthetic
ggcugcgaugaacagcca

SEQ ID NO: 204426 - RNA, 19 nt, Artificial Sequence
  Synthetic
uggcugcgaugaacagcca

SEQ ID NO: 204427 - RNA, 20 nt, Artificial Sequence
  Synthetic
guggcugcgaugaacagcca

SEQ ID NO: 204428 - RNA, 21 nt, Artificial Sequence
  Synthetic
uguggcugcgaugaacagcca

SEQ ID NO: 204429 - RNA, 22 nt, Artificial Sequence
  Synthetic
auguggcugcgaugaacagcca

SEQ ID NO: 204430 - RNA, 23 nt, Artificial Sequence
  Synthetic
aauguggcugcgaugaacagcca

SEQ ID NO: 204431 - RNA, 24 nt, Artificial Sequence
  Synthetic
aaauguggcugcgaugaacagcca

SEQ ID NO: 204432 - RNA, 18 nt, Artificial Sequence
  Synthetic
aaaaaccgguaccagcca

SEQ ID NO: 204433 - RNA, 19 nt, Artificial Sequence
  Synthetic
gaaaaaccgguaccagcca

SEQ ID NO: 204434 - RNA, 20 nt, Artificial Sequence
  Synthetic
ggaaaaaccgguaccagcca

SEQ ID NO: 204435 - RNA, 21 nt, Artificial Sequence
  Synthetic
aggaaaaaccgguaccagcca

SEQ ID NO: 204436 - RNA, 22 nt, Artificial Sequence
  Synthetic
aaggaaaaaccgguaccagcca

SEQ ID NO: 204437 - RNA, 23 nt, Artificial Sequence
  Synthetic
aaaggaaaaaccgguaccagcca

SEQ ID NO: 204438 - RNA, 24 nt, Artificial Sequence
  Synthetic
gaaaggaaaaaccgguaccagcca

SEQ ID NO: 204439 - RNA, 18 nt, Artificial Sequence
  Synthetic
uucuucucaguccagcca

SEQ ID NO: 204440 - RNA, 19 nt, Artificial Sequence
  Synthetic
cuucuucucaguccagcca

SEQ ID NO: 204441 - RNA, 20 nt, Artificial Sequence
  Synthetic
gcuucuucucaguccagcca

SEQ ID NO: 204442 - RNA, 21 nt, Artificial Sequence
  Synthetic
agcuucuucucaguccagcca

SEQ ID NO: 204443 - RNA, 22 nt, Artificial Sequence
  Synthetic
gagcuucuucucaguccagcca

SEQ ID NO: 204444 - RNA, 23 nt, Artificial Sequence
  Synthetic
ggagcuucuucucaguccagcca

SEQ ID NO: 204445 - RNA, 24 nt, Artificial Sequence
  Synthetic
uggagcuucuucucaguccagcca

SEQ ID NO: 204446 - RNA, 18 nt, Artificial Sequence
  Synthetic
aguuucacaaagcagcca

SEQ ID NO: 204447 - RNA, 19 nt, Artificial Sequence
  Synthetic
uaguuucacaaagcagcca

SEQ ID NO: 204448 - RNA, 20 nt, Artificial Sequence
  Synthetic
guaguuucacaaagcagcca

SEQ ID NO: 204449 - RNA, 21 nt, Artificial Sequence
  Synthetic
uguaguuucacaaagcagcca

SEQ ID NO: 204450 - RNA, 22 nt, Artificial Sequence
  Synthetic
auguaguuucacaaagcagcca

SEQ ID NO: 204451 - RNA, 23 nt, Artificial Sequence
  Synthetic
gauguaguuucacaaagcagcca

SEQ ID NO: 204452 - RNA, 24 nt, Artificial Sequence
  Synthetic
agauguaguuucacaaagcagcca

SEQ ID NO: 204453 - RNA, 18 nt, Artificial Sequence
  Synthetic
aaauguuaagggcagcca

SEQ ID NO: 204454 - RNA, 19 nt, Artificial Sequence
  Synthetic
aaaauguuaagggcagcca

SEQ ID NO: 204455 - RNA, 20 nt, Artificial Sequence
  Synthetic
aaaaauguuaagggcagcca

SEQ ID NO: 204456 - RNA, 21 nt, Artificial Sequence
  Synthetic
aaaaaauguuaagggcagcca

SEQ ID NO: 204457 - RNA, 22 nt, Artificial Sequence
  Synthetic
gaaaaaauguuaagggcagcca

SEQ ID NO: 204458 - RNA, 23 nt, Artificial Sequence
  Synthetic
ggaaaaaauguuaagggcagcca

SEQ ID NO: 204459 - RNA, 24 nt, Artificial Sequence
  Synthetic
aggaaaaaauguuaagggcagcca

SEQ ID NO: 204460 - RNA, 18 nt, Artificial Sequence
  Synthetic
uaauguuaggggcagcca

SEQ ID NO: 204461 - RNA, 19 nt, Artificial Sequence
  Synthetic
guaauguuaggggcagcca

SEQ ID NO: 204462 - RNA, 20 nt, Artificial Sequence
  Synthetic
cguaauguuaggggcagcca

SEQ ID NO: 204463 - RNA, 21 nt, Artificial Sequence
  Synthetic
ucguaauguuaggggcagcca

SEQ ID NO: 204464 - RNA, 22 nt, Artificial Sequence
  Synthetic
cucguaauguuaggggcagcca

SEQ ID NO: 204465 - RNA, 23 nt, Artificial Sequence
  Synthetic
gcucguaauguuaggggcagcca

SEQ ID NO: 204466 - RNA, 24 nt, Artificial Sequence
  Synthetic
ugcucguaauguuaggggcagcca

SEQ ID NO: 204467 - RNA, 18 nt, Artificial Sequence
  Synthetic
ggcuaggugaugcagcca

SEQ ID NO: 204468 - RNA, 19 nt, Artificial Sequence
  Synthetic
uggcuaggugaugcagcca

SEQ ID NO: 204469 - RNA, 20 nt, Artificial Sequence
  Synthetic
auggcuaggugaugcagcca

SEQ ID NO: 204470 - RNA, 21 nt, Artificial Sequence
  Synthetic
uauggcuaggugaugcagcca

SEQ ID NO: 204471 - RNA, 22 nt, Artificial Sequence
  Synthetic
uuauggcuaggugaugcagcca

SEQ ID NO: 204472 - RNA, 23 nt, Artificial Sequence
  Synthetic
cuuauggcuaggugaugcagcca

SEQ ID NO: 204473 - RNA, 24 nt, Artificial Sequence
  Synthetic
acuuauggcuaggugaugcagcca

SEQ ID NO: 204474 - RNA, 18 nt, Artificial Sequence
  Synthetic
aaaccagccacucagcca

SEQ ID NO: 204475 - RNA, 19 nt, Artificial Sequence
  Synthetic
aaaaccagccacucagcca

SEQ ID NO: 204476 - RNA, 20 nt, Artificial Sequence
  Synthetic
aaaaaccagccacucagcca

SEQ ID NO: 204477 - RNA, 21 nt, Artificial Sequence
  Synthetic
gaaaaaccagccacucagcca

SEQ ID NO: 204478 - RNA, 22 nt, Artificial Sequence
  Synthetic
ggaaaaaccagccacucagcca

SEQ ID NO: 204479 - RNA, 23 nt, Artificial Sequence
  Synthetic
aggaaaaaccagccacucagcca

SEQ ID NO: 204480 - RNA, 24 nt, Artificial Sequence
  Synthetic
aaggaaaaaccagccacucagcca

SEQ ID NO: 204481 - RNA, 18 nt, Artificial Sequence
  Synthetic
auguacuucacagagcca

SEQ ID NO: 204482 - RNA, 19 nt, Artificial Sequence
  Synthetic
gauguacuucacagagcca

SEQ ID NO: 204483 - RNA, 20 nt, Artificial Sequence
  Synthetic
ugauguacuucacagagcca

SEQ ID NO: 204484 - RNA, 21 nt, Artificial Sequence
  Synthetic
gugauguacuucacagagcca

SEQ ID NO: 204485 - RNA, 22 nt, Artificial Sequence
  Synthetic
ugugauguacuucacagagcca

SEQ ID NO: 204486 - RNA, 23 nt, Artificial Sequence
  Synthetic
augugauguacuucacagagcca

SEQ ID NO: 204487 - RNA, 24 nt, Artificial Sequence
  Synthetic
aaugugauguacuucacagagcca

SEQ ID NO: 204488 - RNA, 18 nt, Artificial Sequence
  Synthetic
ugaaggauuuuagagcca

SEQ ID NO: 204489 - RNA, 19 nt, Artificial Sequence
  Synthetic
uugaaggauuuuagagcca

SEQ ID NO: 204490 - RNA, 20 nt, Artificial Sequence
  Synthetic
cuugaaggauuuuagagcca

SEQ ID NO: 204491 - RNA, 21 nt, Artificial Sequence
  Synthetic
acuugaaggauuuuagagcca

SEQ ID NO: 204492 - RNA, 22 nt, Artificial Sequence
  Synthetic
uacuugaaggauuuuagagcca

SEQ ID NO: 204493 - RNA, 23 nt, Artificial Sequence
  Synthetic
auacuugaaggauuuuagagcca

SEQ ID NO: 204494 - RNA, 24 nt, Artificial Sequence
  Synthetic
cauacuugaaggauuuuagagcca

SEQ ID NO: 204495 - RNA, 18 nt, Artificial Sequence
  Synthetic
gaaggggaacuugagcca

SEQ ID NO: 204496 - RNA, 19 nt, Artificial Sequence
  Synthetic
ugaaggggaacuugagcca

SEQ ID NO: 204497 - RNA, 20 nt, Artificial Sequence
  Synthetic
uugaaggggaacuugagcca

SEQ ID NO: 204498 - RNA, 21 nt, Artificial Sequence
  Synthetic
cuugaaggggaacuugagcca

SEQ ID NO: 204499 - RNA, 22 nt, Artificial Sequence
  Synthetic
ucuugaaggggaacuugagcca

SEQ ID NO: 204500 - RNA, 23 nt, Artificial Sequence
  Synthetic
uucuugaaggggaacuugagcca

SEQ ID NO: 204501 - RNA, 24 nt, Artificial Sequence
  Synthetic
auucuugaaggggaacuugagcca

SEQ ID NO: 204502 - RNA, 18 nt, Artificial Sequence
  Synthetic
cacacucuuaaauagcca

SEQ ID NO: 204503 - RNA, 19 nt, Artificial Sequence
  Synthetic
acacacucuuaaauagcca

SEQ ID NO: 204504 - RNA, 20 nt, Artificial Sequence
  Synthetic
aacacacucuuaaauagcca

SEQ ID NO: 204505 - RNA, 21 nt, Artificial Sequence
  Synthetic
caacacacucuuaaauagcca

SEQ ID NO: 204506 - RNA, 22 nt, Artificial Sequence
  Synthetic
acaacacacucuuaaauagcca

SEQ ID NO: 204507 - RNA, 23 nt, Artificial Sequence
  Synthetic
uacaacacacucuuaaauagcca

SEQ ID NO: 204508 - RNA, 24 nt, Artificial Sequence
  Synthetic
auacaacacacucuuaaauagcca

SEQ ID NO: 204509 - RNA, 18 nt, Artificial Sequence
  Synthetic
acuuuucagcaauagcca

SEQ ID NO: 204510 - RNA, 19 nt, Artificial Sequence
  Synthetic
gacuuuucagcaauagcca

SEQ ID NO: 204511 - RNA, 20 nt, Artificial Sequence
  Synthetic
ggacuuuucagcaauagcca

SEQ ID NO: 204512 - RNA, 21 nt, Artificial Sequence
  Synthetic
uggacuuuucagcaauagcca

SEQ ID NO: 204513 - RNA, 22 nt, Artificial Sequence
  Synthetic
uuggacuuuucagcaauagcca

SEQ ID NO: 204514 - RNA, 23 nt, Artificial Sequence
  Synthetic
uuuggacuuuucagcaauagcca

SEQ ID NO: 204515 - RNA, 24 nt, Artificial Sequence
  Synthetic
cuuuggacuuuucagcaauagcca

SEQ ID NO: 204516 - RNA, 18 nt, Artificial Sequence
  Synthetic
auccuaaaugaauagcca

SEQ ID NO: 204517 - RNA, 19 nt, Artificial Sequence
  Synthetic
uauccuaaaugaauagcca

SEQ ID NO: 204518 - RNA, 20 nt, Artificial Sequence
  Synthetic
auauccuaaaugaauagcca

SEQ ID NO: 204519 - RNA, 21 nt, Artificial Sequence
  Synthetic
gauauccuaaaugaauagcca

SEQ ID NO: 204520 - RNA, 22 nt, Artificial Sequence
  Synthetic
ggauauccuaaaugaauagcca

SEQ ID NO: 204521 - RNA, 23 nt, Artificial Sequence
  Synthetic
aggauauccuaaaugaauagcca

SEQ ID NO: 204522 - RNA, 24 nt, Artificial Sequence
  Synthetic
aaggauauccuaaaugaauagcca

SEQ ID NO: 204523 - RNA, 18 nt, Artificial Sequence
  Synthetic
uuauaaaagucauagcca

SEQ ID NO: 204524 - RNA, 19 nt, Artificial Sequence
  Synthetic
auuauaaaagucauagcca

SEQ ID NO: 204525 - RNA, 20 nt, Artificial Sequence
  Synthetic
uauuauaaaagucauagcca

SEQ ID NO: 204526 - RNA, 21 nt, Artificial Sequence
  Synthetic
cuauuauaaaagucauagcca

SEQ ID NO: 204527 - RNA, 22 nt, Artificial Sequence
  Synthetic
acuauuauaaaagucauagcca

SEQ ID NO: 204528 - RNA, 23 nt, Artificial Sequence
  Synthetic
uacuauuauaaaagucauagcca

SEQ ID NO: 204529 - RNA, 24 nt, Artificial Sequence
  Synthetic
guacuauuauaaaagucauagcca

SEQ ID NO: 204530 - RNA, 18 nt, Artificial Sequence
  Synthetic
aguaggaauuuauagcca

SEQ ID NO: 204531 - RNA, 19 nt, Artificial Sequence
  Synthetic
aaguaggaauuuauagcca

SEQ ID NO: 204532 - RNA, 20 nt, Artificial Sequence
  Synthetic
gaaguaggaauuuauagcca

SEQ ID NO: 204533 - RNA, 21 nt, Artificial Sequence
  Synthetic
ggaaguaggaauuuauagcca

SEQ ID NO: 204534 - RNA, 22 nt, Artificial Sequence
  Synthetic
uggaaguaggaauuuauagcca

SEQ ID NO: 204535 - RNA, 23 nt, Artificial Sequence
  Synthetic
guggaaguaggaauuuauagcca

SEQ ID NO: 204536 - RNA, 24 nt, Artificial Sequence
  Synthetic
aguggaaguaggaauuuauagcca

SEQ ID NO: 204537 - RNA, 18 nt, Artificial Sequence
  Synthetic
gacagagagaccuagcca

SEQ ID NO: 204538 - RNA, 19 nt, Artificial Sequence
  Synthetic
ggacagagagaccuagcca

SEQ ID NO: 204539 - RNA, 20 nt, Artificial Sequence
  Synthetic
aggacagagagaccuagcca

SEQ ID NO: 204540 - RNA, 21 nt, Artificial Sequence
  Synthetic
gaggacagagagaccuagcca

SEQ ID NO: 204541 - RNA, 22 nt, Artificial Sequence
  Synthetic
ggaggacagagagaccuagcca

SEQ ID NO: 204542 - RNA, 23 nt, Artificial Sequence
  Synthetic
aggaggacagagagaccuagcca

SEQ ID NO: 204543 - RNA, 24 nt, Artificial Sequence
  Synthetic
caggaggacagagagaccuagcca

SEQ ID NO: 204544 - RNA, 18 nt, Artificial Sequence
  Synthetic
gcaucugagcccuagcca

SEQ ID NO: 204545 - RNA, 19 nt, Artificial Sequence
  Synthetic
ugcaucugagcccuagcca

SEQ ID NO: 204546 - RNA, 20 nt, Artificial Sequence
  Synthetic
augcaucugagcccuagcca

SEQ ID NO: 204547 - RNA, 21 nt, Artificial Sequence
  Synthetic
uaugcaucugagcccuagcca

SEQ ID NO: 204548 - RNA, 22 nt, Artificial Sequence
  Synthetic
auaugcaucugagcccuagcca

SEQ ID NO: 204549 - RNA, 23 nt, Artificial Sequence
  Synthetic
aauaugcaucugagcccuagcca

SEQ ID NO: 204550 - RNA, 24 nt, Artificial Sequence
  Synthetic
gaauaugcaucugagcccuagcca

SEQ ID NO: 204551 - RNA, 18 nt, Artificial Sequence
  Synthetic
gcaauuucugauuagcca

SEQ ID NO: 204552 - RNA, 19 nt, Artificial Sequence
  Synthetic
agcaauuucugauuagcca

SEQ ID NO: 204553 - RNA, 20 nt, Artificial Sequence
  Synthetic
aagcaauuucugauuagcca

SEQ ID NO: 204554 - RNA, 21 nt, Artificial Sequence
  Synthetic
aaagcaauuucugauuagcca

SEQ ID NO: 204555 - RNA, 22 nt, Artificial Sequence
  Synthetic
uaaagcaauuucugauuagcca

SEQ ID NO: 204556 - RNA, 23 nt, Artificial Sequence
  Synthetic
auaaagcaauuucugauuagcca

SEQ ID NO: 204557 - RNA, 24 nt, Artificial Sequence
  Synthetic
gauaaagcaauuucugauuagcca

SEQ ID NO: 204558 - RNA, 18 nt, Artificial Sequence
  Synthetic
gaugauucucuuuagcca

SEQ ID NO: 204559 - RNA, 19 nt, Artificial Sequence
  Synthetic
agaugauucucuuuagcca

SEQ ID NO: 204560 - RNA, 20 nt, Artificial Sequence
  Synthetic
aagaugauucucuuuagcca

SEQ ID NO: 204561 - RNA, 21 nt, Artificial Sequence
  Synthetic
caagaugauucucuuuagcca

SEQ ID NO: 204562 - RNA, 22 nt, Artificial Sequence
  Synthetic
gcaagaugauucucuuuagcca

SEQ ID NO: 204563 - RNA, 23 nt, Artificial Sequence
  Synthetic
agcaagaugauucucuuuagcca

SEQ ID NO: 204564 - RNA, 24 nt, Artificial Sequence
  Synthetic
uagcaagaugauucucuuuagcca

SEQ ID NO: 204565 - RNA, 18 nt, Artificial Sequence
  Synthetic
aucauguuguuuuagcca

SEQ ID NO: 204566 - RNA, 19 nt, Artificial Sequence
  Synthetic
caucauguuguuuuagcca

SEQ ID NO: 204567 - RNA, 20 nt, Artificial Sequence
  Synthetic
ccaucauguuguuuuagcca

SEQ ID NO: 204568 - RNA, 21 nt, Artificial Sequence
  Synthetic
uccaucauguuguuuuagcca

SEQ ID NO: 204569 - RNA, 22 nt, Artificial Sequence
  Synthetic
uuccaucauguuguuuuagcca

SEQ ID NO: 204570 - RNA, 23 nt, Artificial Sequence
  Synthetic
uuuccaucauguuguuuuagcca

SEQ ID NO: 204571 - RNA, 24 nt, Artificial Sequence
  Synthetic
guuuccaucauguuguuuuagcca

SEQ ID NO: 204572 - RNA, 18 nt, Artificial Sequence
  Synthetic
acuuuaauguuagcgcca

SEQ ID NO: 204573 - RNA, 19 nt, Artificial Sequence
  Synthetic
uacuuuaauguuagcgcca

SEQ ID NO: 204574 - RNA, 20 nt, Artificial Sequence
  Synthetic
auacuuuaauguuagcgcca

SEQ ID NO: 204575 - RNA, 21 nt, Artificial Sequence
  Synthetic
cauacuuuaauguuagcgcca

SEQ ID NO: 204576 - RNA, 22 nt, Artificial Sequence
  Synthetic
ucauacuuuaauguuagcgcca

SEQ ID NO: 204577 - RNA, 23 nt, Artificial Sequence
  Synthetic
uucauacuuuaauguuagcgcca

SEQ ID NO: 204578 - RNA, 24 nt, Artificial Sequence
  Synthetic
uuucauacuuuaauguuagcgcca

SEQ ID NO: 204579 - RNA, 18 nt, Artificial Sequence
  Synthetic
uacagucucaaaaggcca

SEQ ID NO: 204580 - RNA, 19 nt, Artificial Sequence
  Synthetic
auacagucucaaaaggcca

SEQ ID NO: 204581 - RNA, 20 nt, Artificial Sequence
  Synthetic
aauacagucucaaaaggcca

SEQ ID NO: 204582 - RNA, 21 nt, Artificial Sequence
  Synthetic
uaauacagucucaaaaggcca

SEQ ID NO: 204583 - RNA, 22 nt, Artificial Sequence
  Synthetic
auaauacagucucaaaaggcca

SEQ ID NO: 204584 - RNA, 23 nt, Artificial Sequence
  Synthetic
cauaauacagucucaaaaggcca

SEQ ID NO: 204585 - RNA, 24 nt, Artificial Sequence
  Synthetic
acauaauacagucucaaaaggcca

SEQ ID NO: 204586 - RNA, 18 nt, Artificial Sequence
  Synthetic
cuuacagggaaaaggcca

SEQ ID NO: 204587 - RNA, 19 nt, Artificial Sequence
  Synthetic
acuuacagggaaaaggcca

SEQ ID NO: 204588 - RNA, 20 nt, Artificial Sequence
  Synthetic
uacuuacagggaaaaggcca

SEQ ID NO: 204589 - RNA, 21 nt, Artificial Sequence
  Synthetic
auacuuacagggaaaaggcca

SEQ ID NO: 204590 - RNA, 22 nt, Artificial Sequence
  Synthetic
uauacuuacagggaaaaggcca

SEQ ID NO: 204591 - RNA, 23 nt, Artificial Sequence
  Synthetic
auauacuuacagggaaaaggcca

SEQ ID NO: 204592 - RNA, 24 nt, Artificial Sequence
  Synthetic
cauauacuuacagggaaaaggcca

SEQ ID NO: 204593 - RNA, 18 nt, Artificial Sequence
  Synthetic
uccagagucuaaaggcca

SEQ ID NO: 204594 - RNA, 19 nt, Artificial Sequence
  Synthetic
auccagagucuaaaggcca

SEQ ID NO: 204595 - RNA, 20 nt, Artificial Sequence
  Synthetic
uauccagagucuaaaggcca

SEQ ID NO: 204596 - RNA, 21 nt, Artificial Sequence
  Synthetic
auauccagagucuaaaggcca

SEQ ID NO: 204597 - RNA, 22 nt, Artificial Sequence
  Synthetic
uauauccagagucuaaaggcca

SEQ ID NO: 204598 - RNA, 23 nt, Artificial Sequence
  Synthetic
auauauccagagucuaaaggcca

SEQ ID NO: 204599 - RNA, 24 nt, Artificial Sequence
  Synthetic
cauauauccagagucuaaaggcca

SEQ ID NO: 204600 - RNA, 18 nt, Artificial Sequence
  Synthetic
ccauaacucacaaggcca

SEQ ID NO: 204601 - RNA, 19 nt, Artificial Sequence
  Synthetic
accauaacucacaaggcca

SEQ ID NO: 204602 - RNA, 20 nt, Artificial Sequence
  Synthetic
uaccauaacucacaaggcca

SEQ ID NO: 204603 - RNA, 21 nt, Artificial Sequence
  Synthetic
uuaccauaacucacaaggcca

SEQ ID NO: 204604 - RNA, 22 nt, Artificial Sequence
  Synthetic
uuuaccauaacucacaaggcca

SEQ ID NO: 204605 - RNA, 23 nt, Artificial Sequence
  Synthetic
cuuuaccauaacucacaaggcca

SEQ ID NO: 204606 - RNA, 24 nt, Artificial Sequence
  Synthetic
ucuuuaccauaacucacaaggcca

SEQ ID NO: 204607 - RNA, 18 nt, Artificial Sequence
  Synthetic
cagagcugcccaaggcca

SEQ ID NO: 204608 - RNA, 19 nt, Artificial Sequence
  Synthetic
gcagagcugcccaaggcca

SEQ ID NO: 204609 - RNA, 20 nt, Artificial Sequence
  Synthetic
ggcagagcugcccaaggcca

SEQ ID NO: 204610 - RNA, 21 nt, Artificial Sequence
  Synthetic
gggcagagcugcccaaggcca

SEQ ID NO: 204611 - RNA, 22 nt, Artificial Sequence
  Synthetic
agggcagagcugcccaaggcca

SEQ ID NO: 204612 - RNA, 23 nt, Artificial Sequence
  Synthetic
aagggcagagcugcccaaggcca

SEQ ID NO: 204613 - RNA, 24 nt, Artificial Sequence
  Synthetic
caagggcagagcugcccaaggcca

SEQ ID NO: 204614 - RNA, 18 nt, Artificial Sequence
  Synthetic
ucuaguuuugcaaggcca

SEQ ID NO: 204615 - RNA, 19 nt, Artificial Sequence
  Synthetic
aucuaguuuugcaaggcca

SEQ ID NO: 204616 - RNA, 20 nt, Artificial Sequence
  Synthetic
caucuaguuuugcaaggcca

SEQ ID NO: 204617 - RNA, 21 nt, Artificial Sequence
  Synthetic
acaucuaguuuugcaaggcca

SEQ ID NO: 204618 - RNA, 22 nt, Artificial Sequence
  Synthetic
gacaucuaguuuugcaaggcca

SEQ ID NO: 204619 - RNA, 23 nt, Artificial Sequence
  Synthetic
agacaucuaguuuugcaaggcca

SEQ ID NO: 204620 - RNA, 24 nt, Artificial Sequence
  Synthetic
uagacaucuaguuuugcaaggcca

SEQ ID NO: 204621 - RNA, 18 nt, Artificial Sequence
  Synthetic
agcauauaggccaggcca

SEQ ID NO: 204622 - RNA, 19 nt, Artificial Sequence
  Synthetic
uagcauauaggccaggcca

SEQ ID NO: 204623 - RNA, 20 nt, Artificial Sequence
  Synthetic
auagcauauaggccaggcca

SEQ ID NO: 204624 - RNA, 21 nt, Artificial Sequence
  Synthetic
cauagcauauaggccaggcca

SEQ ID NO: 204625 - RNA, 22 nt, Artificial Sequence
  Synthetic
gcauagcauauaggccaggcca

SEQ ID NO: 204626 - RNA, 23 nt, Artificial Sequence
  Synthetic
agcauagcauauaggccaggcca

SEQ ID NO: 204627 - RNA, 24 nt, Artificial Sequence
  Synthetic
uagcauagcauauaggccaggcca

SEQ ID NO: 204628 - RNA, 18 nt, Artificial Sequence
  Synthetic
gucuaaugugccaggcca

SEQ ID NO: 204629 - RNA, 19 nt, Artificial Sequence
  Synthetic
ggucuaaugugccaggcca

SEQ ID NO: 204630 - RNA, 20 nt, Artificial Sequence
  Synthetic
uggucuaaugugccaggcca

SEQ ID NO: 204631 - RNA, 21 nt, Artificial Sequence
  Synthetic
auggucuaaugugccaggcca

SEQ ID NO: 204632 - RNA, 22 nt, Artificial Sequence
  Synthetic
gauggucuaaugugccaggcca

SEQ ID NO: 204633 - RNA, 23 nt, Artificial Sequence
  Synthetic
agauggucuaaugugccaggcca

SEQ ID NO: 204634 - RNA, 24 nt, Artificial Sequence
  Synthetic
aagauggucuaaugugccaggcca

SEQ ID NO: 204635 - RNA, 18 nt, Artificial Sequence
  Synthetic
caccugcugcucaggcca

SEQ ID NO: 204636 - RNA, 19 nt, Artificial Sequence
  Synthetic
gcaccugcugcucaggcca

SEQ ID NO: 204637 - RNA, 20 nt, Artificial Sequence
  Synthetic
agcaccugcugcucaggcca

SEQ ID NO: 204638 - RNA, 21 nt, Artificial Sequence
  Synthetic
cagcaccugcugcucaggcca

SEQ ID NO: 204639 - RNA, 22 nt, Artificial Sequence
  Synthetic
ccagcaccugcugcucaggcca

SEQ ID NO: 204640 - RNA, 23 nt, Artificial Sequence
  Synthetic
accagcaccugcugcucaggcca

SEQ ID NO: 204641 - RNA, 24 nt, Artificial Sequence
  Synthetic
caccagcaccugcugcucaggcca

SEQ ID NO: 204642 - RNA, 18 nt, Artificial Sequence
  Synthetic
uacuggaaguucaggcca

SEQ ID NO: 204643 - RNA, 19 nt, Artificial Sequence
  Synthetic
guacuggaaguucaggcca

SEQ ID NO: 204644 - RNA, 20 nt, Artificial Sequence
  Synthetic
uguacuggaaguucaggcca

SEQ ID NO: 204645 - RNA, 21 nt, Artificial Sequence
  Synthetic
uuguacuggaaguucaggcca

SEQ ID NO: 204646 - RNA, 22 nt, Artificial Sequence
  Synthetic
auuguacuggaaguucaggcca

SEQ ID NO: 204647 - RNA, 23 nt, Artificial Sequence
  Synthetic
uauuguacuggaaguucaggcca

SEQ ID NO: 204648 - RNA, 24 nt, Artificial Sequence
  Synthetic
guauuguacuggaaguucaggcca

SEQ ID NO: 204649 - RNA, 18 nt, Artificial Sequence
  Synthetic
uguuuucggaagaggcca

SEQ ID NO: 204650 - RNA, 19 nt, Artificial Sequence
  Synthetic
auguuuucggaagaggcca

SEQ ID NO: 204651 - RNA, 20 nt, Artificial Sequence
  Synthetic
uauguuuucggaagaggcca

SEQ ID NO: 204652 - RNA, 21 nt, Artificial Sequence
  Synthetic
uuauguuuucggaagaggcca

SEQ ID NO: 204653 - RNA, 22 nt, Artificial Sequence
  Synthetic
cuuauguuuucggaagaggcca

SEQ ID NO: 204654 - RNA, 23 nt, Artificial Sequence
  Synthetic
gcuuauguuuucggaagaggcca

SEQ ID NO: 204655 - RNA, 24 nt, Artificial Sequence
  Synthetic
ugcuuauguuuucggaagaggcca

SEQ ID NO: 204656 - RNA, 18 nt, Artificial Sequence
  Synthetic
aaggugccucagaggcca

SEQ ID NO: 204657 - RNA, 19 nt, Artificial Sequence
  Synthetic
caaggugccucagaggcca

SEQ ID NO: 204658 - RNA, 20 nt, Artificial Sequence
  Synthetic
gcaaggugccucagaggcca

SEQ ID NO: 204659 - RNA, 21 nt, Artificial Sequence
  Synthetic
ugcaaggugccucagaggcca

SEQ ID NO: 204660 - RNA, 22 nt, Artificial Sequence
  Synthetic
cugcaaggugccucagaggcca

SEQ ID NO: 204661 - RNA, 23 nt, Artificial Sequence
  Synthetic
ucugcaaggugccucagaggcca

SEQ ID NO: 204662 - RNA, 24 nt, Artificial Sequence
  Synthetic
uucugcaaggugccucagaggcca

SEQ ID NO: 204663 - RNA, 18 nt, Artificial Sequence
  Synthetic
aagggccuuaggaggcca

SEQ ID NO: 204664 - RNA, 19 nt, Artificial Sequence
  Synthetic
uaagggccuuaggaggcca

SEQ ID NO: 204665 - RNA, 20 nt, Artificial Sequence
  Synthetic
auaagggccuuaggaggcca

SEQ ID NO: 204666 - RNA, 21 nt, Artificial Sequence
  Synthetic
cauaagggccuuaggaggcca

SEQ ID NO: 204667 - RNA, 22 nt, Artificial Sequence
  Synthetic
ucauaagggccuuaggaggcca

SEQ ID NO: 204668 - RNA, 23 nt, Artificial Sequence
  Synthetic
gucauaagggccuuaggaggcca

SEQ ID NO: 204669 - RNA, 24 nt, Artificial Sequence
  Synthetic
agucauaagggccuuaggaggcca

SEQ ID NO: 204670 - RNA, 18 nt, Artificial Sequence
  Synthetic
cagcacuuugggaggcca

SEQ ID NO: 204671 - RNA, 19 nt, Artificial Sequence
  Synthetic
ccagcacuuugggaggcca

SEQ ID NO: 204672 - RNA, 20 nt, Artificial Sequence
  Synthetic
cccagcacuuugggaggcca

SEQ ID NO: 204673 - RNA, 21 nt, Artificial Sequence
  Synthetic
ucccagcacuuugggaggcca

SEQ ID NO: 204674 - RNA, 22 nt, Artificial Sequence
  Synthetic
aucccagcacuuugggaggcca

SEQ ID NO: 204675 - RNA, 23 nt, Artificial Sequence
  Synthetic
aaucccagcacuuugggaggcca

SEQ ID NO: 204676 - RNA, 24 nt, Artificial Sequence
  Synthetic
uaaucccagcacuuugggaggcca

SEQ ID NO: 204677 - RNA, 18 nt, Artificial Sequence
  Synthetic
auccuucucaugaggcca

SEQ ID NO: 204678 - RNA, 19 nt, Artificial Sequence
  Synthetic
cauccuucucaugaggcca

SEQ ID NO: 204679 - RNA, 20 nt, Artificial Sequence
  Synthetic
ucauccuucucaugaggcca

SEQ ID NO: 204680 - RNA, 21 nt, Artificial Sequence
  Synthetic
cucauccuucucaugaggcca

SEQ ID NO: 204681 - RNA, 22 nt, Artificial Sequence
  Synthetic
ucucauccuucucaugaggcca

SEQ ID NO: 204682 - RNA, 23 nt, Artificial Sequence
  Synthetic
uucucauccuucucaugaggcca

SEQ ID NO: 204683 - RNA, 24 nt, Artificial Sequence
  Synthetic
uuucucauccuucucaugaggcca

SEQ ID NO: 204684 - RNA, 18 nt, Artificial Sequence
  Synthetic
aaccaugagaguaggcca

SEQ ID NO: 204685 - RNA, 19 nt, Artificial Sequence
  Synthetic
aaaccaugagaguaggcca

SEQ ID NO: 204686 - RNA, 20 nt, Artificial Sequence
  Synthetic
aaaaccaugagaguaggcca

SEQ ID NO: 204687 - RNA, 21 nt, Artificial Sequence
  Synthetic
uaaaaccaugagaguaggcca

SEQ ID NO: 204688 - RNA, 22 nt, Artificial Sequence
  Synthetic
uuaaaaccaugagaguaggcca

SEQ ID NO: 204689 - RNA, 23 nt, Artificial Sequence
  Synthetic
cuuaaaaccaugagaguaggcca

SEQ ID NO: 204690 - RNA, 24 nt, Artificial Sequence
  Synthetic
acuuaaaaccaugagaguaggcca

SEQ ID NO: 204691 - RNA, 18 nt, Artificial Sequence
  Synthetic
caauacagguuuaggcca

SEQ ID NO: 204692 - RNA, 19 nt, Artificial Sequence
  Synthetic
acaauacagguuuaggcca

SEQ ID NO: 204693 - RNA, 20 nt, Artificial Sequence
  Synthetic
uacaauacagguuuaggcca

SEQ ID NO: 204694 - RNA, 21 nt, Artificial Sequence
  Synthetic
uuacaauacagguuuaggcca

SEQ ID NO: 204695 - RNA, 22 nt, Artificial Sequence
  Synthetic
guuacaauacagguuuaggcca

SEQ ID NO: 204696 - RNA, 23 nt, Artificial Sequence
  Synthetic
uguuacaauacagguuuaggcca

SEQ ID NO: 204697 - RNA, 24 nt, Artificial Sequence
  Synthetic
cuguuacaauacagguuuaggcca

SEQ ID NO: 204698 - RNA, 18 nt, Artificial Sequence
  Synthetic
uuugggguuaaagggcca

SEQ ID NO: 204699 - RNA, 19 nt, Artificial Sequence
  Synthetic
cuuugggguuaaagggcca

SEQ ID NO: 204700 - RNA, 20 nt, Artificial Sequence
  Synthetic
gcuuugggguuaaagggcca

SEQ ID NO: 204701 - RNA, 21 nt, Artificial Sequence
  Synthetic
ugcuuugggguuaaagggcca

SEQ ID NO: 204702 - RNA, 22 nt, Artificial Sequence
  Synthetic
cugcuuugggguuaaagggcca

SEQ ID NO: 204703 - RNA, 23 nt, Artificial Sequence
  Synthetic
acugcuuugggguuaaagggcca

SEQ ID NO: 204704 - RNA, 24 nt, Artificial Sequence
  Synthetic
aacugcuuugggguuaaagggcca

SEQ ID NO: 204705 - RNA, 18 nt, Artificial Sequence
  Synthetic
aacugguauacagggcca

SEQ ID NO: 204706 - RNA, 19 nt, Artificial Sequence
  Synthetic
gaacugguauacagggcca

SEQ ID NO: 204707 - RNA, 20 nt, Artificial Sequence
  Synthetic
agaacugguauacagggcca

SEQ ID NO: 204708 - RNA, 21 nt, Artificial Sequence
  Synthetic
aagaacugguauacagggcca

SEQ ID NO: 204709 - RNA, 22 nt, Artificial Sequence
  Synthetic
aaagaacugguauacagggcca

SEQ ID NO: 204710 - RNA, 23 nt, Artificial Sequence
  Synthetic
uaaagaacugguauacagggcca

SEQ ID NO: 204711 - RNA, 24 nt, Artificial Sequence
  Synthetic
auaaagaacugguauacagggcca

SEQ ID NO: 204712 - RNA, 18 nt, Artificial Sequence
  Synthetic
ggauuaggccuggggcca

SEQ ID NO: 204713 - RNA, 19 nt, Artificial Sequence
  Synthetic
uggauuaggccuggggcca

SEQ ID NO: 204714 - RNA, 20 nt, Artificial Sequence
  Synthetic
uuggauuaggccuggggcca

SEQ ID NO: 204715 - RNA, 21 nt, Artificial Sequence
  Synthetic
guuggauuaggccuggggcca

SEQ ID NO: 204716 - RNA, 22 nt, Artificial Sequence
  Synthetic
uguuggauuaggccuggggcca

SEQ ID NO: 204717 - RNA, 23 nt, Artificial Sequence
  Synthetic
uuguuggauuaggccuggggcca

SEQ ID NO: 204718 - RNA, 24 nt, Artificial Sequence
  Synthetic
auuguuggauuaggccuggggcca

SEQ ID NO: 204719 - RNA, 18 nt, Artificial Sequence
  Synthetic
aguuauugcuuugggcca

SEQ ID NO: 204720 - RNA, 19 nt, Artificial Sequence
  Synthetic
uaguuauugcuuugggcca

SEQ ID NO: 204721 - RNA, 20 nt, Artificial Sequence
  Synthetic
cuaguuauugcuuugggcca

SEQ ID NO: 204722 - RNA, 21 nt, Artificial Sequence
  Synthetic
acuaguuauugcuuugggcca

SEQ ID NO: 204723 - RNA, 22 nt, Artificial Sequence
  Synthetic
aacuaguuauugcuuugggcca

SEQ ID NO: 204724 - RNA, 23 nt, Artificial Sequence
  Synthetic
gaacuaguuauugcuuugggcca

SEQ ID NO: 204725 - RNA, 24 nt, Artificial Sequence
  Synthetic
ggaacuaguuauugcuuugggcca

SEQ ID NO: 204726 - RNA, 18 nt, Artificial Sequence
  Synthetic
uaauucccuaaauggcca

SEQ ID NO: 204727 - RNA, 19 nt, Artificial Sequence
  Synthetic
cuaauucccuaaauggcca

SEQ ID NO: 204728 - RNA, 20 nt, Artificial Sequence
  Synthetic
ccuaauucccuaaauggcca

SEQ ID NO: 204729 - RNA, 21 nt, Artificial Sequence
  Synthetic
accuaauucccuaaauggcca

SEQ ID NO: 204730 - RNA, 22 nt, Artificial Sequence
  Synthetic
gaccuaauucccuaaauggcca

SEQ ID NO: 204731 - RNA, 23 nt, Artificial Sequence
  Synthetic
agaccuaauucccuaaauggcca

SEQ ID NO: 204732 - RNA, 24 nt, Artificial Sequence
  Synthetic
aagaccuaauucccuaaauggcca

SEQ ID NO: 204733 - RNA, 18 nt, Artificial Sequence
  Synthetic
acauaucuuccauggcca

SEQ ID NO: 204734 - RNA, 19 nt, Artificial Sequence
  Synthetic
aacauaucuuccauggcca

SEQ ID NO: 204735 - RNA, 20 nt, Artificial Sequence
  Synthetic
caacauaucuuccauggcca

SEQ ID NO: 204736 - RNA, 21 nt, Artificial Sequence
  Synthetic
acaacauaucuuccauggcca

SEQ ID NO: 204737 - RNA, 22 nt, Artificial Sequence
  Synthetic
cacaacauaucuuccauggcca

SEQ ID NO: 204738 - RNA, 23 nt, Artificial Sequence
  Synthetic
ucacaacauaucuuccauggcca

SEQ ID NO: 204739 - RNA, 24 nt, Artificial Sequence
  Synthetic
aucacaacauaucuuccauggcca

SEQ ID NO: 204740 - RNA, 18 nt, Artificial Sequence
  Synthetic
gugcaauagguauggcca

SEQ ID NO: 204741 - RNA, 19 nt, Artificial Sequence
  Synthetic
ugugcaauagguauggcca

SEQ ID NO: 204742 - RNA, 20 nt, Artificial Sequence
  Synthetic
cugugcaauagguauggcca

SEQ ID NO: 204743 - RNA, 21 nt, Artificial Sequence
  Synthetic
ucugugcaauagguauggcca

SEQ ID NO: 204744 - RNA, 22 nt, Artificial Sequence
  Synthetic
uucugugcaauagguauggcca

SEQ ID NO: 204745 - RNA, 23 nt, Artificial Sequence
  Synthetic
cuucugugcaauagguauggcca

SEQ ID NO: 204746 - RNA, 24 nt, Artificial Sequence
  Synthetic
ucuucugugcaauagguauggcca

SEQ ID NO: 204747 - RNA, 18 nt, Artificial Sequence
  Synthetic
uuuaauuuuuuauggcca

SEQ ID NO: 204748 - RNA, 19 nt, Artificial Sequence
  Synthetic
cuuuaauuuuuuauggcca

SEQ ID NO: 204749 - RNA, 20 nt, Artificial Sequence
  Synthetic
ucuuuaauuuuuuauggcca

SEQ ID NO: 204750 - RNA, 21 nt, Artificial Sequence
  Synthetic
aucuuuaauuuuuuauggcca

SEQ ID NO: 204751 - RNA, 22 nt, Artificial Sequence
  Synthetic
aaucuuuaauuuuuuauggcca

SEQ ID NO: 204752 - RNA, 23 nt, Artificial Sequence
  Synthetic
uaaucuuuaauuuuuuauggcca

SEQ ID NO: 204753 - RNA, 24 nt, Artificial Sequence
  Synthetic
uuaaucuuuaauuuuuuauggcca

SEQ ID NO: 204754 - RNA, 18 nt, Artificial Sequence
  Synthetic
ugcaguauaauguggcca

SEQ ID NO: 204755 - RNA, 19 nt, Artificial Sequence
  Synthetic
augcaguauaauguggcca

SEQ ID NO: 204756 - RNA, 20 nt, Artificial Sequence
  Synthetic
aaugcaguauaauguggcca

SEQ ID NO: 204757 - RNA, 21 nt, Artificial Sequence
  Synthetic
aaaugcaguauaauguggcca

SEQ ID NO: 204758 - RNA, 22 nt, Artificial Sequence
  Synthetic
gaaaugcaguauaauguggcca

SEQ ID NO: 204759 - RNA, 23 nt, Artificial Sequence
  Synthetic
agaaaugcaguauaauguggcca

SEQ ID NO: 204760 - RNA, 24 nt, Artificial Sequence
  Synthetic
uagaaaugcaguauaauguggcca

SEQ ID NO: 204761 - RNA, 18 nt, Artificial Sequence
  Synthetic
uaguagguaucuuggcca

SEQ ID NO: 204762 - RNA, 19 nt, Artificial Sequence
  Synthetic
auaguagguaucuuggcca

SEQ ID NO: 204763 - RNA, 20 nt, Artificial Sequence
  Synthetic
uauaguagguaucuuggcca

SEQ ID NO: 204764 - RNA, 21 nt, Artificial Sequence
  Synthetic
uuauaguagguaucuuggcca

SEQ ID NO: 204765 - RNA, 22 nt, Artificial Sequence
  Synthetic
auuauaguagguaucuuggcca

SEQ ID NO: 204766 - RNA, 23 nt, Artificial Sequence
  Synthetic
aauuauaguagguaucuuggcca

SEQ ID NO: 204767 - RNA, 24 nt, Artificial Sequence
  Synthetic
aaauuauaguagguaucuuggcca

SEQ ID NO: 204768 - RNA, 18 nt, Artificial Sequence
  Synthetic
aaaaaaaaaaaaaugcca

SEQ ID NO: 204769 - RNA, 19 nt, Artificial Sequence
  Synthetic
aaaaaaaaaaaaaaugcca

SEQ ID NO: 204770 - RNA, 20 nt, Artificial Sequence
  Synthetic
aaaaaaaaaaaaaaaugcca

SEQ ID NO: 204771 - RNA, 21 nt, Artificial Sequence
  Synthetic
caaaaaaaaaaaaaaaugcca

SEQ ID NO: 204772 - RNA, 22 nt, Artificial Sequence
  Synthetic
gcaaaaaaaaaaaaaaaugcca

SEQ ID NO: 204773 - RNA, 23 nt, Artificial Sequence
  Synthetic
ugcaaaaaaaaaaaaaaaugcca

SEQ ID NO: 204774 - RNA, 24 nt, Artificial Sequence
  Synthetic
uugcaaaaaaaaaaaaaaaugcca

SEQ ID NO: 204775 - RNA, 18 nt, Artificial Sequence
  Synthetic
aaauaugggcaaaugcca

SEQ ID NO: 204776 - RNA, 19 nt, Artificial Sequence
  Synthetic
aaaauaugggcaaaugcca

SEQ ID NO: 204777 - RNA, 20 nt, Artificial Sequence
  Synthetic
gaaaauaugggcaaaugcca

SEQ ID NO: 204778 - RNA, 21 nt, Artificial Sequence
  Synthetic
ugaaaauaugggcaaaugcca

SEQ ID NO: 204779 - RNA, 22 nt, Artificial Sequence
  Synthetic
uugaaaauaugggcaaaugcca

SEQ ID NO: 204780 - RNA, 23 nt, Artificial Sequence
  Synthetic
auugaaaauaugggcaaaugcca

SEQ ID NO: 204781 - RNA, 24 nt, Artificial Sequence
  Synthetic
aauugaaaauaugggcaaaugcca

SEQ ID NO: 204782 - RNA, 18 nt, Artificial Sequence
  Synthetic
gugcugugaagaaugcca

SEQ ID NO: 204783 - RNA, 19 nt, Artificial Sequence
  Synthetic
ggugcugugaagaaugcca

SEQ ID NO: 204784 - RNA, 20 nt, Artificial Sequence
  Synthetic
aggugcugugaagaaugcca

SEQ ID NO: 204785 - RNA, 21 nt, Artificial Sequence
  Synthetic
caggugcugugaagaaugcca

SEQ ID NO: 204786 - RNA, 22 nt, Artificial Sequence
  Synthetic
ccaggugcugugaagaaugcca

SEQ ID NO: 204787 - RNA, 23 nt, Artificial Sequence
  Synthetic
gccaggugcugugaagaaugcca

SEQ ID NO: 204788 - RNA, 24 nt, Artificial Sequence
  Synthetic
ugccaggugcugugaagaaugcca

SEQ ID NO: 204789 - RNA, 18 nt, Artificial Sequence
  Synthetic
ugaauguaucuaaugcca

SEQ ID NO: 204790 - RNA, 19 nt, Artificial Sequence
  Synthetic
gugaauguaucuaaugcca

SEQ ID NO: 204791 - RNA, 20 nt, Artificial Sequence
  Synthetic
ugugaauguaucuaaugcca

SEQ ID NO: 204792 - RNA, 21 nt, Artificial Sequence
  Synthetic
augugaauguaucuaaugcca

SEQ ID NO: 204793 - RNA, 22 nt, Artificial Sequence
  Synthetic
caugugaauguaucuaaugcca

SEQ ID NO: 204794 - RNA, 23 nt, Artificial Sequence
  Synthetic
ccaugugaauguaucuaaugcca

SEQ ID NO: 204795 - RNA, 24 nt, Artificial Sequence
  Synthetic
uccaugugaauguaucuaaugcca

SEQ ID NO: 204796 - RNA, 18 nt, Artificial Sequence
  Synthetic
gaguaaauggacaugcca

SEQ ID NO: 204797 - RNA, 19 nt, Artificial Sequence
  Synthetic
agaguaaauggacaugcca

SEQ ID NO: 204798 - RNA, 20 nt, Artificial Sequence
  Synthetic
aagaguaaauggacaugcca

SEQ ID NO: 204799 - RNA, 21 nt, Artificial Sequence
  Synthetic
gaagaguaaauggacaugcca

SEQ ID NO: 204800 - RNA, 22 nt, Artificial Sequence
  Synthetic
ugaagaguaaauggacaugcca

SEQ ID NO: 204801 - RNA, 23 nt, Artificial Sequence
  Synthetic
augaagaguaaauggacaugcca

SEQ ID NO: 204802 - RNA, 24 nt, Artificial Sequence
  Synthetic
aaugaagaguaaauggacaugcca

SEQ ID NO: 204803 - RNA, 18 nt, Artificial Sequence
  Synthetic
uuuaauguugccaugcca

SEQ ID NO: 204804 - RNA, 19 nt, Artificial Sequence
  Synthetic
cuuuaauguugccaugcca

SEQ ID NO: 204805 - RNA, 20 nt, Artificial Sequence
  Synthetic
acuuuaauguugccaugcca

SEQ ID NO: 204806 - RNA, 21 nt, Artificial Sequence
  Synthetic
gacuuuaauguugccaugcca

SEQ ID NO: 204807 - RNA, 22 nt, Artificial Sequence
  Synthetic
ggacuuuaauguugccaugcca

SEQ ID NO: 204808 - RNA, 23 nt, Artificial Sequence
  Synthetic
aggacuuuaauguugccaugcca

SEQ ID NO: 204809 - RNA, 24 nt, Artificial Sequence
  Synthetic
gaggacuuuaauguugccaugcca

SEQ ID NO: 204810 - RNA, 18 nt, Artificial Sequence
  Synthetic
auuuauuugaauaugcca

SEQ ID NO: 204811 - RNA, 19 nt, Artificial Sequence
  Synthetic
uauuuauuugaauaugcca

SEQ ID NO: 204812 - RNA, 20 nt, Artificial Sequence
  Synthetic
cuauuuauuugaauaugcca

SEQ ID NO: 204813 - RNA, 21 nt, Artificial Sequence
  Synthetic
gcuauuuauuugaauaugcca

SEQ ID NO: 204814 - RNA, 22 nt, Artificial Sequence
  Synthetic
agcuauuuauuugaauaugcca

SEQ ID NO: 204815 - RNA, 23 nt, Artificial Sequence
  Synthetic
cagcuauuuauuugaauaugcca

SEQ ID NO: 204816 - RNA, 24 nt, Artificial Sequence
  Synthetic
acagcuauuuauuugaauaugcca

SEQ ID NO: 204817 - RNA, 18 nt, Artificial Sequence
  Synthetic
uugcuuggaacuaugcca

SEQ ID NO: 204818 - RNA, 19 nt, Artificial Sequence
  Synthetic
uuugcuuggaacuaugcca

SEQ ID NO: 204819 - RNA, 20 nt, Artificial Sequence
  Synthetic
guuugcuuggaacuaugcca

SEQ ID NO: 204820 - RNA, 21 nt, Artificial Sequence
  Synthetic
uguuugcuuggaacuaugcca

SEQ ID NO: 204821 - RNA, 22 nt, Artificial Sequence
  Synthetic
guguuugcuuggaacuaugcca

SEQ ID NO: 204822 - RNA, 23 nt, Artificial Sequence
  Synthetic
uguguuugcuuggaacuaugcca

SEQ ID NO: 204823 - RNA, 24 nt, Artificial Sequence
  Synthetic
auguguuugcuuggaacuaugcca

SEQ ID NO: 204824 - RNA, 18 nt, Artificial Sequence
  Synthetic
auuccgagagcuaugcca

SEQ ID NO: 204825 - RNA, 19 nt, Artificial Sequence
  Synthetic
uauuccgagagcuaugcca

SEQ ID NO: 204826 - RNA, 20 nt, Artificial Sequence
  Synthetic
auauuccgagagcuaugcca

SEQ ID NO: 204827 - RNA, 21 nt, Artificial Sequence
  Synthetic
aauauuccgagagcuaugcca

SEQ ID NO: 204828 - RNA, 22 nt, Artificial Sequence
  Synthetic
uaauauuccgagagcuaugcca

SEQ ID NO: 204829 - RNA, 23 nt, Artificial Sequence
  Synthetic
guaauauuccgagagcuaugcca

SEQ ID NO: 204830 - RNA, 24 nt, Artificial Sequence
  Synthetic
aguaauauuccgagagcuaugcca

SEQ ID NO: 204831 - RNA, 18 nt, Artificial Sequence
  Synthetic
cauuagaaauguaugcca

SEQ ID NO: 204832 - RNA, 19 nt, Artificial Sequence
  Synthetic
acauuagaaauguaugcca

SEQ ID NO: 204833 - RNA, 20 nt, Artificial Sequence
  Synthetic
cacauuagaaauguaugcca

SEQ ID NO: 204834 - RNA, 21 nt, Artificial Sequence
  Synthetic
acacauuagaaauguaugcca

SEQ ID NO: 204835 - RNA, 22 nt, Artificial Sequence
  Synthetic
cacacauuagaaauguaugcca

SEQ ID NO: 204836 - RNA, 23 nt, Artificial Sequence
  Synthetic
ucacacauuagaaauguaugcca

SEQ ID NO: 204837 - RNA, 24 nt, Artificial Sequence
  Synthetic
uucacacauuagaaauguaugcca

SEQ ID NO: 204838 - RNA, 18 nt, Artificial Sequence
  Synthetic
caggcuugccuuaugcca

SEQ ID NO: 204839 - RNA, 19 nt, Artificial Sequence
  Synthetic
acaggcuugccuuaugcca

SEQ ID NO: 204840 - RNA, 20 nt, Artificial Sequence
  Synthetic
uacaggcuugccuuaugcca

SEQ ID NO: 204841 - RNA, 21 nt, Artificial Sequence
  Synthetic
auacaggcuugccuuaugcca

SEQ ID NO: 204842 - RNA, 22 nt, Artificial Sequence
  Synthetic
uauacaggcuugccuuaugcca

SEQ ID NO: 204843 - RNA, 23 nt, Artificial Sequence
  Synthetic
auauacaggcuugccuuaugcca

SEQ ID NO: 204844 - RNA, 24 nt, Artificial Sequence
  Synthetic
cauauacaggcuugccuuaugcca

SEQ ID NO: 204845 - RNA, 18 nt, Artificial Sequence
  Synthetic
gucaguguguuuaugcca

SEQ ID NO: 204846 - RNA, 19 nt, Artificial Sequence
  Synthetic
agucaguguguuuaugcca

SEQ ID NO: 204847 - RNA, 20 nt, Artificial Sequence
  Synthetic
cagucaguguguuuaugcca

SEQ ID NO: 204848 - RNA, 21 nt, Artificial Sequence
  Synthetic
ccagucaguguguuuaugcca

SEQ ID NO: 204849 - RNA, 22 nt, Artificial Sequence
  Synthetic
uccagucaguguguuuaugcca

SEQ ID NO: 204850 - RNA, 23 nt, Artificial Sequence
  Synthetic
guccagucaguguguuuaugcca

SEQ ID NO: 204851 - RNA, 24 nt, Artificial Sequence
  Synthetic
uguccagucaguguguuuaugcca

SEQ ID NO: 204852 - RNA, 18 nt, Artificial Sequence
  Synthetic
aaaauacauucacugcca

SEQ ID NO: 204853 - RNA, 19 nt, Artificial Sequence
  Synthetic
aaaaauacauucacugcca

SEQ ID NO: 204854 - RNA, 20 nt, Artificial Sequence
  Synthetic
aaaaaauacauucacugcca

SEQ ID NO: 204855 - RNA, 21 nt, Artificial Sequence
  Synthetic
aaaaaaauacauucacugcca

SEQ ID NO: 204856 - RNA, 22 nt, Artificial Sequence
  Synthetic
aaaaaaaauacauucacugcca

SEQ ID NO: 204857 - RNA, 23 nt, Artificial Sequence
  Synthetic
gaaaaaaaauacauucacugcca

SEQ ID NO: 204858 - RNA, 24 nt, Artificial Sequence
  Synthetic
ggaaaaaaaauacauucacugcca

SEQ ID NO: 204859 - RNA, 18 nt, Artificial Sequence
  Synthetic
cuguacugaauccugcca

SEQ ID NO: 204860 - RNA, 19 nt, Artificial Sequence
  Synthetic
acuguacugaauccugcca

SEQ ID NO: 204861 - RNA, 20 nt, Artificial Sequence
  Synthetic
aacuguacugaauccugcca

SEQ ID NO: 204862 - RNA, 21 nt, Artificial Sequence
  Synthetic
uaacuguacugaauccugcca

SEQ ID NO: 204863 - RNA, 22 nt, Artificial Sequence
  Synthetic
cuaacuguacugaauccugcca

SEQ ID NO: 204864 - RNA, 23 nt, Artificial Sequence
  Synthetic
ccuaacuguacugaauccugcca

SEQ ID NO: 204865 - RNA, 24 nt, Artificial Sequence
  Synthetic
gccuaacuguacugaauccugcca

SEQ ID NO: 204866 - RNA, 18 nt, Artificial Sequence
  Synthetic
auuaagcucuugcugcca

SEQ ID NO: 204867 - RNA, 19 nt, Artificial Sequence
  Synthetic
uauuaagcucuugcugcca

SEQ ID NO: 204868 - RNA, 20 nt, Artificial Sequence
  Synthetic
auauuaagcucuugcugcca

SEQ ID NO: 204869 - RNA, 21 nt, Artificial Sequence
  Synthetic
gauauuaagcucuugcugcca

SEQ ID NO: 204870 - RNA, 22 nt, Artificial Sequence
  Synthetic
agauauuaagcucuugcugcca

SEQ ID NO: 204871 - RNA, 23 nt, Artificial Sequence
  Synthetic
cagauauuaagcucuugcugcca

SEQ ID NO: 204872 - RNA, 24 nt, Artificial Sequence
  Synthetic
ucagauauuaagcucuugcugcca

SEQ ID NO: 204873 - RNA, 18 nt, Artificial Sequence
  Synthetic
uuaucuauucaucugcca

SEQ ID NO: 204874 - RNA, 19 nt, Artificial Sequence
  Synthetic
uuuaucuauucaucugcca

SEQ ID NO: 204875 - RNA, 20 nt, Artificial Sequence
  Synthetic
auuuaucuauucaucugcca

SEQ ID NO: 204876 - RNA, 21 nt, Artificial Sequence
  Synthetic
cauuuaucuauucaucugcca

SEQ ID NO: 204877 - RNA, 22 nt, Artificial Sequence
  Synthetic
acauuuaucuauucaucugcca

SEQ ID NO: 204878 - RNA, 23 nt, Artificial Sequence
  Synthetic
cacauuuaucuauucaucugcca

SEQ ID NO: 204879 - RNA, 24 nt, Artificial Sequence
  Synthetic
ccacauuuaucuauucaucugcca

SEQ ID NO: 204880 - RNA, 18 nt, Artificial Sequence
  Synthetic
cuaaguuucacucugcca

SEQ ID NO: 204881 - RNA, 19 nt, Artificial Sequence
  Synthetic
ucuaaguuucacucugcca

SEQ ID NO: 204882 - RNA, 20 nt, Artificial Sequence
  Synthetic
cucuaaguuucacucugcca

SEQ ID NO: 204883 - RNA, 21 nt, Artificial Sequence
  Synthetic
ucucuaaguuucacucugcca

SEQ ID NO: 204884 - RNA, 22 nt, Artificial Sequence
  Synthetic
uucucuaaguuucacucugcca

SEQ ID NO: 204885 - RNA, 23 nt, Artificial Sequence
  Synthetic
auucucuaaguuucacucugcca

SEQ ID NO: 204886 - RNA, 24 nt, Artificial Sequence
  Synthetic
cauucucuaaguuucacucugcca

SEQ ID NO: 204887 - RNA, 18 nt, Artificial Sequence
  Synthetic
ucauuauaguuucugcca

SEQ ID NO: 204888 - RNA, 19 nt, Artificial Sequence
  Synthetic
uucauuauaguuucugcca

SEQ ID NO: 204889 - RNA, 20 nt, Artificial Sequence
  Synthetic
uuucauuauaguuucugcca

SEQ ID NO: 204890 - RNA, 21 nt, Artificial Sequence
  Synthetic
uuuucauuauaguuucugcca

SEQ ID NO: 204891 - RNA, 22 nt, Artificial Sequence
  Synthetic
auuuucauuauaguuucugcca

SEQ ID NO: 204892 - RNA, 23 nt, Artificial Sequence
  Synthetic
cauuuucauuauaguuucugcca

SEQ ID NO: 204893 - RNA, 24 nt, Artificial Sequence
  Synthetic
gcauuuucauuauaguuucugcca

SEQ ID NO: 204894 - RNA, 18 nt, Artificial Sequence
  Synthetic
acugguagaaaagugcca

SEQ ID NO: 204895 - RNA, 19 nt, Artificial Sequence
  Synthetic
cacugguagaaaagugcca

SEQ ID NO: 204896 - RNA, 20 nt, Artificial Sequence
  Synthetic
gcacugguagaaaagugcca

SEQ ID NO: 204897 - RNA, 21 nt, Artificial Sequence
  Synthetic
ugcacugguagaaaagugcca

SEQ ID NO: 204898 - RNA, 22 nt, Artificial Sequence
  Synthetic
gugcacugguagaaaagugcca

SEQ ID NO: 204899 - RNA, 23 nt, Artificial Sequence
  Synthetic
ugugcacugguagaaaagugcca

SEQ ID NO: 204900 - RNA, 24 nt, Artificial Sequence
  Synthetic
augugcacugguagaaaagugcca

SEQ ID NO: 204901 - RNA, 18 nt, Artificial Sequence
  Synthetic
uggaagguaauggugcca

SEQ ID NO: 204902 - RNA, 19 nt, Artificial Sequence
  Synthetic
guggaagguaauggugcca

SEQ ID NO: 204903 - RNA, 20 nt, Artificial Sequence
  Synthetic
uguggaagguaauggugcca

SEQ ID NO: 204904 - RNA, 21 nt, Artificial Sequence
  Synthetic
uuguggaagguaauggugcca

SEQ ID NO: 204905 - RNA, 22 nt, Artificial Sequence
  Synthetic
cuuguggaagguaauggugcca

SEQ ID NO: 204906 - RNA, 23 nt, Artificial Sequence
  Synthetic
ucuuguggaagguaauggugcca

SEQ ID NO: 204907 - RNA, 24 nt, Artificial Sequence
  Synthetic
gucuuguggaagguaauggugcca

SEQ ID NO: 204908 - RNA, 18 nt, Artificial Sequence
  Synthetic
uucuccaaaaaugugcca

SEQ ID NO: 204909 - RNA, 19 nt, Artificial Sequence
  Synthetic
guucuccaaaaaugugcca

SEQ ID NO: 204910 - RNA, 20 nt, Artificial Sequence
  Synthetic
aguucuccaaaaaugugcca

SEQ ID NO: 204911 - RNA, 21 nt, Artificial Sequence
  Synthetic
caguucuccaaaaaugugcca

SEQ ID NO: 204912 - RNA, 22 nt, Artificial Sequence
  Synthetic
ccaguucuccaaaaaugugcca

SEQ ID NO: 204913 - RNA, 23 nt, Artificial Sequence
  Synthetic
uccaguucuccaaaaaugugcca

SEQ ID NO: 204914 - RNA, 24 nt, Artificial Sequence
  Synthetic
guccaguucuccaaaaaugugcca

SEQ ID NO: 204915 - RNA, 18 nt, Artificial Sequence
  Synthetic
uacaacuuucaugugcca

SEQ ID NO: 204916 - RNA, 19 nt, Artificial Sequence
  Synthetic
auacaacuuucaugugcca

SEQ ID NO: 204917 - RNA, 20 nt, Artificial Sequence
  Synthetic
uauacaacuuucaugugcca

SEQ ID NO: 204918 - RNA, 21 nt, Artificial Sequence
  Synthetic
auauacaacuuucaugugcca

SEQ ID NO: 204919 - RNA, 22 nt, Artificial Sequence
  Synthetic
gauauacaacuuucaugugcca

SEQ ID NO: 204920 - RNA, 23 nt, Artificial Sequence
  Synthetic
agauauacaacuuucaugugcca

SEQ ID NO: 204921 - RNA, 24 nt, Artificial Sequence
  Synthetic
aagauauacaacuuucaugugcca

SEQ ID NO: 204922 - RNA, 18 nt, Artificial Sequence
  Synthetic
ucauauaaagaugugcca

SEQ ID NO: 204923 - RNA, 19 nt, Artificial Sequence
  Synthetic
uucauauaaagaugugcca

SEQ ID NO: 204924 - RNA, 20 nt, Artificial Sequence
  Synthetic
auucauauaaagaugugcca

SEQ ID NO: 204925 - RNA, 21 nt, Artificial Sequence
  Synthetic
uauucauauaaagaugugcca

SEQ ID NO: 204926 - RNA, 22 nt, Artificial Sequence
  Synthetic
uuauucauauaaagaugugcca

SEQ ID NO: 204927 - RNA, 23 nt, Artificial Sequence
  Synthetic
guuauucauauaaagaugugcca

SEQ ID NO: 204928 - RNA, 24 nt, Artificial Sequence
  Synthetic
cguuauucauauaaagaugugcca

SEQ ID NO: 204929 - RNA, 18 nt, Artificial Sequence
  Synthetic
gaagccuaguuugugcca

SEQ ID NO: 204930 - RNA, 19 nt, Artificial Sequence
  Synthetic
agaagccuaguuugugcca

SEQ ID NO: 204931 - RNA, 20 nt, Artificial Sequence
  Synthetic
gagaagccuaguuugugcca

SEQ ID NO: 204932 - RNA, 21 nt, Artificial Sequence
  Synthetic
agagaagccuaguuugugcca

SEQ ID NO: 204933 - RNA, 22 nt, Artificial Sequence
  Synthetic
aagagaagccuaguuugugcca

SEQ ID NO: 204934 - RNA, 23 nt, Artificial Sequence
  Synthetic
gaagagaagccuaguuugugcca

SEQ ID NO: 204935 - RNA, 24 nt, Artificial Sequence
  Synthetic
agaagagaagccuaguuugugcca

SEQ ID NO: 204936 - RNA, 18 nt, Artificial Sequence
  Synthetic
acuagauguuaauugcca

SEQ ID NO: 204937 - RNA, 19 nt, Artificial Sequence
  Synthetic
gacuagauguuaauugcca

SEQ ID NO: 204938 - RNA, 20 nt, Artificial Sequence
  Synthetic
agacuagauguuaauugcca

SEQ ID NO: 204939 - RNA, 21 nt, Artificial Sequence
  Synthetic
aagacuagauguuaauugcca

SEQ ID NO: 204940 - RNA, 22 nt, Artificial Sequence
  Synthetic
caagacuagauguuaauugcca

SEQ ID NO: 204941 - RNA, 23 nt, Artificial Sequence
  Synthetic
ccaagacuagauguuaauugcca

SEQ ID NO: 204942 - RNA, 24 nt, Artificial Sequence
  Synthetic
accaagacuagauguuaauugcca

SEQ ID NO: 204943 - RNA, 18 nt, Artificial Sequence
  Synthetic
ggcuucaacagauugcca

SEQ ID NO: 204944 - RNA, 19 nt, Artificial Sequence
  Synthetic
aggcuucaacagauugcca

SEQ ID NO: 204945 - RNA, 20 nt, Artificial Sequence
  Synthetic
caggcuucaacagauugcca

SEQ ID NO: 204946 - RNA, 21 nt, Artificial Sequence
  Synthetic
ucaggcuucaacagauugcca

SEQ ID NO: 204947 - RNA, 22 nt, Artificial Sequence
  Synthetic
gucaggcuucaacagauugcca

SEQ ID NO: 204948 - RNA, 23 nt, Artificial Sequence
  Synthetic
ugucaggcuucaacagauugcca

SEQ ID NO: 204949 - RNA, 24 nt, Artificial Sequence
  Synthetic
augucaggcuucaacagauugcca

SEQ ID NO: 204950 - RNA, 18 nt, Artificial Sequence
  Synthetic
cauuaagugauauugcca

SEQ ID NO: 204951 - RNA, 19 nt, Artificial Sequence
  Synthetic
ccauuaagugauauugcca

SEQ ID NO: 204952 - RNA, 20 nt, Artificial Sequence
  Synthetic
accauuaagugauauugcca

SEQ ID NO: 204953 - RNA, 21 nt, Artificial Sequence
  Synthetic
aaccauuaagugauauugcca

SEQ ID NO: 204954 - RNA, 22 nt, Artificial Sequence
  Synthetic
caaccauuaagugauauugcca

SEQ ID NO: 204955 - RNA, 23 nt, Artificial Sequence
  Synthetic
ccaaccauuaagugauauugcca

SEQ ID NO: 204956 - RNA, 24 nt, Artificial Sequence
  Synthetic
cccaaccauuaagugauauugcca

SEQ ID NO: 204957 - RNA, 18 nt, Artificial Sequence
  Synthetic
auaaguaaauuauugcca

SEQ ID NO: 204958 - RNA, 19 nt, Artificial Sequence
  Synthetic
aauaaguaaauuauugcca

SEQ ID NO: 204959 - RNA, 20 nt, Artificial Sequence
  Synthetic
caauaaguaaauuauugcca

SEQ ID NO: 204960 - RNA, 21 nt, Artificial Sequence
  Synthetic
ucaauaaguaaauuauugcca

SEQ ID NO: 204961 - RNA, 22 nt, Artificial Sequence
  Synthetic
uucaauaaguaaauuauugcca

SEQ ID NO: 204962 - RNA, 23 nt, Artificial Sequence
  Synthetic
auucaauaaguaaauuauugcca

SEQ ID NO: 204963 - RNA, 24 nt, Artificial Sequence
  Synthetic
cauucaauaaguaaauuauugcca

SEQ ID NO: 204964 - RNA, 18 nt, Artificial Sequence
  Synthetic
aaucauccugacuugcca

SEQ ID NO: 204965 - RNA, 19 nt, Artificial Sequence
  Synthetic
aaaucauccugacuugcca

SEQ ID NO: 204966 - RNA, 20 nt, Artificial Sequence
  Synthetic
aaaaucauccugacuugcca

SEQ ID NO: 204967 - RNA, 21 nt, Artificial Sequence
  Synthetic
aaaaaucauccugacuugcca

SEQ ID NO: 204968 - RNA, 22 nt, Artificial Sequence
  Synthetic
uaaaaaucauccugacuugcca

SEQ ID NO: 204969 - RNA, 23 nt, Artificial Sequence
  Synthetic
uuaaaaaucauccugacuugcca

SEQ ID NO: 204970 - RNA, 24 nt, Artificial Sequence
  Synthetic
guuaaaaaucauccugacuugcca

SEQ ID NO: 204971 - RNA, 18 nt, Artificial Sequence
  Synthetic
uuugaaauacauuugcca

SEQ ID NO: 204972 - RNA, 19 nt, Artificial Sequence
  Synthetic
auuugaaauacauuugcca

SEQ ID NO: 204973 - RNA, 20 nt, Artificial Sequence
  Synthetic
uauuugaaauacauuugcca

SEQ ID NO: 204974 - RNA, 21 nt, Artificial Sequence
  Synthetic
guauuugaaauacauuugcca

SEQ ID NO: 204975 - RNA, 22 nt, Artificial Sequence
  Synthetic
gguauuugaaauacauuugcca

SEQ ID NO: 204976 - RNA, 23 nt, Artificial Sequence
  Synthetic
ugguauuugaaauacauuugcca

SEQ ID NO: 204977 - RNA, 24 nt, Artificial Sequence
  Synthetic
gugguauuugaaauacauuugcca

SEQ ID NO: 204978 - RNA, 18 nt, Artificial Sequence
  Synthetic
auuuuccuucauuugcca

SEQ ID NO: 204979 - RNA, 19 nt, Artificial Sequence
  Synthetic
gauuuuccuucauuugcca

SEQ ID NO: 204980 - RNA, 20 nt, Artificial Sequence
  Synthetic
ugauuuuccuucauuugcca

SEQ ID NO: 204981 - RNA, 21 nt, Artificial Sequence
  Synthetic
gugauuuuccuucauuugcca

SEQ ID NO: 204982 - RNA, 22 nt, Artificial Sequence
  Synthetic
ugugauuuuccuucauuugcca

SEQ ID NO: 204983 - RNA, 23 nt, Artificial Sequence
  Synthetic
gugugauuuuccuucauuugcca

SEQ ID NO: 204984 - RNA, 24 nt, Artificial Sequence
  Synthetic
ugugugauuuuccuucauuugcca

SEQ ID NO: 204985 - RNA, 18 nt, Artificial Sequence
  Synthetic
uaauugaaauauuugcca

SEQ ID NO: 204986 - RNA, 19 nt, Artificial Sequence
  Synthetic
guaauugaaauauuugcca

SEQ ID NO: 204987 - RNA, 20 nt, Artificial Sequence
  Synthetic
aguaauugaaauauuugcca

SEQ ID NO: 204988 - RNA, 21 nt, Artificial Sequence
  Synthetic
caguaauugaaauauuugcca

SEQ ID NO: 204989 - RNA, 22 nt, Artificial Sequence
  Synthetic
gcaguaauugaaauauuugcca

SEQ ID NO: 204990 - RNA, 23 nt, Artificial Sequence
  Synthetic
ugcaguaauugaaauauuugcca

SEQ ID NO: 204991 - RNA, 24 nt, Artificial Sequence
  Synthetic
gugcaguaauugaaauauuugcca

SEQ ID NO: 204992 - RNA, 18 nt, Artificial Sequence
  Synthetic
ucuguccauuauuugcca

SEQ ID NO: 204993 - RNA, 19 nt, Artificial Sequence
  Synthetic
cucuguccauuauuugcca

SEQ ID NO: 204994 - RNA, 20 nt, Artificial Sequence
  Synthetic
ucucuguccauuauuugcca

SEQ ID NO: 204995 - RNA, 21 nt, Artificial Sequence
  Synthetic
gucucuguccauuauuugcca

SEQ ID NO: 204996 - RNA, 22 nt, Artificial Sequence
  Synthetic
ugucucuguccauuauuugcca

SEQ ID NO: 204997 - RNA, 23 nt, Artificial Sequence
  Synthetic
uugucucuguccauuauuugcca

SEQ ID NO: 204998 - RNA, 24 nt, Artificial Sequence
  Synthetic
auugucucuguccauuauuugcca

SEQ ID NO: 204999 - RNA, 18 nt, Artificial Sequence
  Synthetic
agcaccuauacuuugcca

SEQ ID NO: 205000 - RNA, 19 nt, Artificial Sequence
  Synthetic
cagcaccuauacuuugcca

SEQ ID NO: 205001 - RNA, 20 nt, Artificial Sequence
  Synthetic
ccagcaccuauacuuugcca

SEQ ID NO: 205002 - RNA, 21 nt, Artificial Sequence
  Synthetic
cccagcaccuauacuuugcca

SEQ ID NO: 205003 - RNA, 22 nt, Artificial Sequence
  Synthetic
acccagcaccuauacuuugcca

SEQ ID NO: 205004 - RNA, 23 nt, Artificial Sequence
  Synthetic
uacccagcaccuauacuuugcca

SEQ ID NO: 205005 - RNA, 24 nt, Artificial Sequence
  Synthetic
auacccagcaccuauacuuugcca

SEQ ID NO: 205006 - RNA, 18 nt, Artificial Sequence
  Synthetic
gcuucuuccgcuuugcca

SEQ ID NO: 205007 - RNA, 19 nt, Artificial Sequence
  Synthetic
agcuucuuccgcuuugcca

SEQ ID NO: 205008 - RNA, 20 nt, Artificial Sequence
  Synthetic
uagcuucuuccgcuuugcca

SEQ ID NO: 205009 - RNA, 21 nt, Artificial Sequence
  Synthetic
cuagcuucuuccgcuuugcca

SEQ ID NO: 205010 - RNA, 22 nt, Artificial Sequence
  Synthetic
ucuagcuucuuccgcuuugcca

SEQ ID NO: 205011 - RNA, 23 nt, Artificial Sequence
  Synthetic
uucuagcuucuuccgcuuugcca

SEQ ID NO: 205012 - RNA, 24 nt, Artificial Sequence
  Synthetic
uuucuagcuucuuccgcuuugcca

SEQ ID NO: 205013 - RNA, 18 nt, Artificial Sequence
  Synthetic
aguuauguaucuuugcca

SEQ ID NO: 205014 - RNA, 19 nt, Artificial Sequence
  Synthetic
gaguuauguaucuuugcca

SEQ ID NO: 205015 - RNA, 20 nt, Artificial Sequence
  Synthetic
agaguuauguaucuuugcca

SEQ ID NO: 205016 - RNA, 21 nt, Artificial Sequence
  Synthetic
cagaguuauguaucuuugcca

SEQ ID NO: 205017 - RNA, 22 nt, Artificial Sequence
  Synthetic
gcagaguuauguaucuuugcca

SEQ ID NO: 205018 - RNA, 23 nt, Artificial Sequence
  Synthetic
ggcagaguuauguaucuuugcca

SEQ ID NO: 205019 - RNA, 24 nt, Artificial Sequence
  Synthetic
uggcagaguuauguaucuuugcca

SEQ ID NO: 205020 - RNA, 18 nt, Artificial Sequence
  Synthetic
cuucauuggcuuuugcca

SEQ ID NO: 205021 - RNA, 19 nt, Artificial Sequence
  Synthetic
ucuucauuggcuuuugcca

SEQ ID NO: 205022 - RNA, 20 nt, Artificial Sequence
  Synthetic
uucuucauuggcuuuugcca

SEQ ID NO: 205023 - RNA, 21 nt, Artificial Sequence
  Synthetic
uuucuucauuggcuuuugcca

SEQ ID NO: 205024 - RNA, 22 nt, Artificial Sequence
  Synthetic
uuuucuucauuggcuuuugcca

SEQ ID NO: 205025 - RNA, 23 nt, Artificial Sequence
  Synthetic
auuuucuucauuggcuuuugcca

SEQ ID NO: 205026 - RNA, 24 nt, Artificial Sequence
  Synthetic
gauuuucuucauuggcuuuugcca

SEQ ID NO: 205027 - RNA, 18 nt, Artificial Sequence
  Synthetic
ccacauuuuuuuuugcca

SEQ ID NO: 205028 - RNA, 19 nt, Artificial Sequence
  Synthetic
cccacauuuuuuuuugcca

SEQ ID NO: 205029 - RNA, 20 nt, Artificial Sequence
  Synthetic
ccccacauuuuuuuuugcca

SEQ ID NO: 205030 - RNA, 21 nt, Artificial Sequence
  Synthetic
cccccacauuuuuuuuugcca

SEQ ID NO: 205031 - RNA, 22 nt, Artificial Sequence
  Synthetic
ucccccacauuuuuuuuugcca

SEQ ID NO: 205032 - RNA, 23 nt, Artificial Sequence
  Synthetic
cucccccacauuuuuuuuugcca

SEQ ID NO: 205033 - RNA, 24 nt, Artificial Sequence
  Synthetic
ccucccccacauuuuuuuuugcca

SEQ ID NO: 205034 - RNA, 18 nt, Artificial Sequence
  Synthetic
ccaugcaugucaaaucca

SEQ ID NO: 205035 - RNA, 19 nt, Artificial Sequence
  Synthetic
uccaugcaugucaaaucca

SEQ ID NO: 205036 - RNA, 20 nt, Artificial Sequence
  Synthetic
cuccaugcaugucaaaucca

SEQ ID NO: 205037 - RNA, 21 nt, Artificial Sequence
  Synthetic
gcuccaugcaugucaaaucca

SEQ ID NO: 205038 - RNA, 22 nt, Artificial Sequence
  Synthetic
ggcuccaugcaugucaaaucca

SEQ ID NO: 205039 - RNA, 23 nt, Artificial Sequence
  Synthetic
aggcuccaugcaugucaaaucca

SEQ ID NO: 205040 - RNA, 24 nt, Artificial Sequence
  Synthetic
caggcuccaugcaugucaaaucca

SEQ ID NO: 205041 - RNA, 18 nt, Artificial Sequence
  Synthetic
aaauuuuuuagaaaucca

SEQ ID NO: 205042 - RNA, 19 nt, Artificial Sequence
  Synthetic
gaaauuuuuuagaaaucca

SEQ ID NO: 205043 - RNA, 20 nt, Artificial Sequence
  Synthetic
agaaauuuuuuagaaaucca

SEQ ID NO: 205044 - RNA, 21 nt, Artificial Sequence
  Synthetic
gagaaauuuuuuagaaaucca

SEQ ID NO: 205045 - RNA, 22 nt, Artificial Sequence
  Synthetic
ggagaaauuuuuuagaaaucca

SEQ ID NO: 205046 - RNA, 23 nt, Artificial Sequence
  Synthetic
aggagaaauuuuuuagaaaucca

SEQ ID NO: 205047 - RNA, 24 nt, Artificial Sequence
  Synthetic
gaggagaaauuuuuuagaaaucca

SEQ ID NO: 205048 - RNA, 18 nt, Artificial Sequence
  Synthetic
uucuuguaguuaaaucca

SEQ ID NO: 205049 - RNA, 19 nt, Artificial Sequence
  Synthetic
uuucuuguaguuaaaucca

SEQ ID NO: 205050 - RNA, 20 nt, Artificial Sequence
  Synthetic
auuucuuguaguuaaaucca

SEQ ID NO: 205051 - RNA, 21 nt, Artificial Sequence
  Synthetic
gauuucuuguaguuaaaucca

SEQ ID NO: 205052 - RNA, 22 nt, Artificial Sequence
  Synthetic
ugauuucuuguaguuaaaucca

SEQ ID NO: 205053 - RNA, 23 nt, Artificial Sequence
  Synthetic
augauuucuuguaguuaaaucca

SEQ ID NO: 205054 - RNA, 24 nt, Artificial Sequence
  Synthetic
aaugauuucuuguaguuaaaucca

SEQ ID NO: 205055 - RNA, 18 nt, Artificial Sequence
  Synthetic
augggauaauccaaucca

SEQ ID NO: 205056 - RNA, 19 nt, Artificial Sequence
  Synthetic
aaugggauaauccaaucca

SEQ ID NO: 205057 - RNA, 20 nt, Artificial Sequence
  Synthetic
aaaugggauaauccaaucca

SEQ ID NO: 205058 - RNA, 21 nt, Artificial Sequence
  Synthetic
uaaaugggauaauccaaucca

SEQ ID NO: 205059 - RNA, 22 nt, Artificial Sequence
  Synthetic
guaaaugggauaauccaaucca

SEQ ID NO: 205060 - RNA, 23 nt, Artificial Sequence
  Synthetic
gguaaaugggauaauccaaucca

SEQ ID NO: 205061 - RNA, 24 nt, Artificial Sequence
  Synthetic
agguaaaugggauaauccaaucca

SEQ ID NO: 205062 - RNA, 18 nt, Artificial Sequence
  Synthetic
gugaugucacagaaucca

SEQ ID NO: 205063 - RNA, 19 nt, Artificial Sequence
  Synthetic
ugugaugucacagaaucca

SEQ ID NO: 205064 - RNA, 20 nt, Artificial Sequence
  Synthetic
gugugaugucacagaaucca

SEQ ID NO: 205065 - RNA, 21 nt, Artificial Sequence
  Synthetic
cgugugaugucacagaaucca

SEQ ID NO: 205066 - RNA, 22 nt, Artificial Sequence
  Synthetic
ucgugugaugucacagaaucca

SEQ ID NO: 205067 - RNA, 23 nt, Artificial Sequence
  Synthetic
uucgugugaugucacagaaucca

SEQ ID NO: 205068 - RNA, 24 nt, Artificial Sequence
  Synthetic
guucgugugaugucacagaaucca

SEQ ID NO: 205069 - RNA, 18 nt, Artificial Sequence
  Synthetic
auauuuccuacgaaucca

SEQ ID NO: 205070 - RNA, 19 nt, Artificial Sequence
  Synthetic
gauauuuccuacgaaucca

SEQ ID NO: 205071 - RNA, 20 nt, Artificial Sequence
  Synthetic
ugauauuuccuacgaaucca

SEQ ID NO: 205072 - RNA, 21 nt, Artificial Sequence
  Synthetic
augauauuuccuacgaaucca

SEQ ID NO: 205073 - RNA, 22 nt, Artificial Sequence
  Synthetic
aaugauauuuccuacgaaucca

SEQ ID NO: 205074 - RNA, 23 nt, Artificial Sequence
  Synthetic
aaaugauauuuccuacgaaucca

SEQ ID NO: 205075 - RNA, 24 nt, Artificial Sequence
  Synthetic
aaaaugauauuuccuacgaaucca

SEQ ID NO: 205076 - RNA, 18 nt, Artificial Sequence
  Synthetic
uucucauuuaauaaucca

SEQ ID NO: 205077 - RNA, 19 nt, Artificial Sequence
  Synthetic
cuucucauuuaauaaucca

SEQ ID NO: 205078 - RNA, 20 nt, Artificial Sequence
  Synthetic
ccuucucauuuaauaaucca

SEQ ID NO: 205079 - RNA, 21 nt, Artificial Sequence
  Synthetic
cccuucucauuuaauaaucca

SEQ ID NO: 205080 - RNA, 22 nt, Artificial Sequence
  Synthetic
acccuucucauuuaauaaucca

SEQ ID NO: 205081 - RNA, 23 nt, Artificial Sequence
  Synthetic
gacccuucucauuuaauaaucca

SEQ ID NO: 205082 - RNA, 24 nt, Artificial Sequence
  Synthetic
agacccuucucauuuaauaaucca

SEQ ID NO: 205083 - RNA, 18 nt, Artificial Sequence
  Synthetic
cgagggccuuguaaucca

SEQ ID NO: 205084 - RNA, 19 nt, Artificial Sequence
  Synthetic
ucgagggccuuguaaucca

SEQ ID NO: 205085 - RNA, 20 nt, Artificial Sequence
  Synthetic
uucgagggccuuguaaucca

SEQ ID NO: 205086 - RNA, 21 nt, Artificial Sequence
  Synthetic
auucgagggccuuguaaucca

SEQ ID NO: 205087 - RNA, 22 nt, Artificial Sequence
  Synthetic
uauucgagggccuuguaaucca

SEQ ID NO: 205088 - RNA, 23 nt, Artificial Sequence
  Synthetic
auauucgagggccuuguaaucca

SEQ ID NO: 205089 - RNA, 24 nt, Artificial Sequence
  Synthetic
uauauucgagggccuuguaaucca

SEQ ID NO: 205090 - RNA, 18 nt, Artificial Sequence
  Synthetic
cagaaugcuuuuaaucca

SEQ ID NO: 205091 - RNA, 19 nt, Artificial Sequence
  Synthetic
acagaaugcuuuuaaucca

SEQ ID NO: 205092 - RNA, 20 nt, Artificial Sequence
  Synthetic
cacagaaugcuuuuaaucca

SEQ ID NO: 205093 - RNA, 21 nt, Artificial Sequence
  Synthetic
gcacagaaugcuuuuaaucca

SEQ ID NO: 205094 - RNA, 22 nt, Artificial Sequence
  Synthetic
ugcacagaaugcuuuuaaucca

SEQ ID NO: 205095 - RNA, 23 nt, Artificial Sequence
  Synthetic
cugcacagaaugcuuuuaaucca

SEQ ID NO: 205096 - RNA, 24 nt, Artificial Sequence
  Synthetic
acugcacagaaugcuuuuaaucca

SEQ ID NO: 205097 - RNA, 18 nt, Artificial Sequence
  Synthetic
uguacuaugacacaucca

SEQ ID NO: 205098 - RNA, 19 nt, Artificial Sequence
  Synthetic
auguacuaugacacaucca

SEQ ID NO: 205099 - RNA, 20 nt, Artificial Sequence
  Synthetic
aauguacuaugacacaucca

SEQ ID NO: 205100 - RNA, 21 nt, Artificial Sequence
  Synthetic
gaauguacuaugacacaucca

SEQ ID NO: 205101 - RNA, 22 nt, Artificial Sequence
  Synthetic
agaauguacuaugacacaucca

SEQ ID NO: 205102 - RNA, 23 nt, Artificial Sequence
  Synthetic
uagaauguacuaugacacaucca

SEQ ID NO: 205103 - RNA, 24 nt, Artificial Sequence
  Synthetic
cuagaauguacuaugacacaucca

SEQ ID NO: 205104 - RNA, 18 nt, Artificial Sequence
  Synthetic
ucuuucauuacacaucca

SEQ ID NO: 205105 - RNA, 19 nt, Artificial Sequence
  Synthetic
uucuuucauuacacaucca

SEQ ID NO: 205106 - RNA, 20 nt, Artificial Sequence
  Synthetic
uuucuuucauuacacaucca

SEQ ID NO: 205107 - RNA, 21 nt, Artificial Sequence
  Synthetic
uuuucuuucauuacacaucca

SEQ ID NO: 205108 - RNA, 22 nt, Artificial Sequence
  Synthetic
auuuucuuucauuacacaucca

SEQ ID NO: 205109 - RNA, 23 nt, Artificial Sequence
  Synthetic
cauuuucuuucauuacacaucca

SEQ ID NO: 205110 - RNA, 24 nt, Artificial Sequence
  Synthetic
ucauuuucuuucauuacacaucca

SEQ ID NO: 205111 - RNA, 18 nt, Artificial Sequence
  Synthetic
ugcaguuucagacaucca

SEQ ID NO: 205112 - RNA, 19 nt, Artificial Sequence
  Synthetic
cugcaguuucagacaucca

SEQ ID NO: 205113 - RNA, 20 nt, Artificial Sequence
  Synthetic
ucugcaguuucagacaucca

SEQ ID NO: 205114 - RNA, 21 nt, Artificial Sequence
  Synthetic
aucugcaguuucagacaucca

SEQ ID NO: 205115 - RNA, 22 nt, Artificial Sequence
  Synthetic
uaucugcaguuucagacaucca

SEQ ID NO: 205116 - RNA, 23 nt, Artificial Sequence
  Synthetic
cuaucugcaguuucagacaucca

SEQ ID NO: 205117 - RNA, 24 nt, Artificial Sequence
  Synthetic
acuaucugcaguuucagacaucca

SEQ ID NO: 205118 - RNA, 18 nt, Artificial Sequence
  Synthetic
aaaugcaacugacaucca

SEQ ID NO: 205119 - RNA, 19 nt, Artificial Sequence
  Synthetic
uaaaugcaacugacaucca

SEQ ID NO: 205120 - RNA, 20 nt, Artificial Sequence
  Synthetic
uuaaaugcaacugacaucca

SEQ ID NO: 205121 - RNA, 21 nt, Artificial Sequence
  Synthetic
uuuaaaugcaacugacaucca

SEQ ID NO: 205122 - RNA, 22 nt, Artificial Sequence
  Synthetic
auuuaaaugcaacugacaucca

SEQ ID NO: 205123 - RNA, 23 nt, Artificial Sequence
  Synthetic
uauuuaaaugcaacugacaucca

SEQ ID NO: 205124 - RNA, 24 nt, Artificial Sequence
  Synthetic
auauuuaaaugcaacugacaucca

SEQ ID NO: 205125 - RNA, 18 nt, Artificial Sequence
  Synthetic
cuaaguacacaccaucca

SEQ ID NO: 205126 - RNA, 19 nt, Artificial Sequence
  Synthetic
acuaaguacacaccaucca

SEQ ID NO: 205127 - RNA, 20 nt, Artificial Sequence
  Synthetic
aacuaaguacacaccaucca

SEQ ID NO: 205128 - RNA, 21 nt, Artificial Sequence
  Synthetic
aaacuaaguacacaccaucca

SEQ ID NO: 205129 - RNA, 22 nt, Artificial Sequence
  Synthetic
aaaacuaaguacacaccaucca

SEQ ID NO: 205130 - RNA, 23 nt, Artificial Sequence
  Synthetic
uaaaacuaaguacacaccaucca

SEQ ID NO: 205131 - RNA, 24 nt, Artificial Sequence
  Synthetic
uuaaaacuaaguacacaccaucca

SEQ ID NO: 205132 - RNA, 18 nt, Artificial Sequence
  Synthetic
uuaccaaagguccaucca

SEQ ID NO: 205133 - RNA, 19 nt, Artificial Sequence
  Synthetic
uuuaccaaagguccaucca

SEQ ID NO: 205134 - RNA, 20 nt, Artificial Sequence
  Synthetic
auuuaccaaagguccaucca

SEQ ID NO: 205135 - RNA, 21 nt, Artificial Sequence
  Synthetic
aauuuaccaaagguccaucca

SEQ ID NO: 205136 - RNA, 22 nt, Artificial Sequence
  Synthetic
aaauuuaccaaagguccaucca

SEQ ID NO: 205137 - RNA, 23 nt, Artificial Sequence
  Synthetic
gaaauuuaccaaagguccaucca

SEQ ID NO: 205138 - RNA, 24 nt, Artificial Sequence
  Synthetic
ugaaauuuaccaaagguccaucca

SEQ ID NO: 205139 - RNA, 18 nt, Artificial Sequence
  Synthetic
auugacguauuccaucca

SEQ ID NO: 205140 - RNA, 19 nt, Artificial Sequence
  Synthetic
cauugacguauuccaucca

SEQ ID NO: 205141 - RNA, 20 nt, Artificial Sequence
  Synthetic
acauugacguauuccaucca

SEQ ID NO: 205142 - RNA, 21 nt, Artificial Sequence
  Synthetic
cacauugacguauuccaucca

SEQ ID NO: 205143 - RNA, 22 nt, Artificial Sequence
  Synthetic
acacauugacguauuccaucca

SEQ ID NO: 205144 - RNA, 23 nt, Artificial Sequence
  Synthetic
cacacauugacguauuccaucca

SEQ ID NO: 205145 - RNA, 24 nt, Artificial Sequence
  Synthetic
ccacacauugacguauuccaucca

SEQ ID NO: 205146 - RNA, 18 nt, Artificial Sequence
  Synthetic
caucugggcuggcaucca

SEQ ID NO: 205147 - RNA, 19 nt, Artificial Sequence
  Synthetic
ucaucugggcuggcaucca

SEQ ID NO: 205148 - RNA, 20 nt, Artificial Sequence
  Synthetic
gucaucugggcuggcaucca

SEQ ID NO: 205149 - RNA, 21 nt, Artificial Sequence
  Synthetic
ugucaucugggcuggcaucca

SEQ ID NO: 205150 - RNA, 22 nt, Artificial Sequence
  Synthetic
uugucaucugggcuggcaucca

SEQ ID NO: 205151 - RNA, 23 nt, Artificial Sequence
  Synthetic
guugucaucugggcuggcaucca

SEQ ID NO: 205152 - RNA, 24 nt, Artificial Sequence
  Synthetic
aguugucaucugggcuggcaucca

SEQ ID NO: 205153 - RNA, 18 nt, Artificial Sequence
  Synthetic
auuucacuucaucaucca

SEQ ID NO: 205154 - RNA, 19 nt, Artificial Sequence
  Synthetic
cauuucacuucaucaucca

SEQ ID NO: 205155 - RNA, 20 nt, Artificial Sequence
  Synthetic
ucauuucacuucaucaucca

SEQ ID NO: 205156 - RNA, 21 nt, Artificial Sequence
  Synthetic
uucauuucacuucaucaucca

SEQ ID NO: 205157 - RNA, 22 nt, Artificial Sequence
  Synthetic
uuucauuucacuucaucaucca

SEQ ID NO: 205158 - RNA, 23 nt, Artificial Sequence
  Synthetic
uuuucauuucacuucaucaucca

SEQ ID NO: 205159 - RNA, 24 nt, Artificial Sequence
  Synthetic
auuuucauuucacuucaucaucca

SEQ ID NO: 205160 - RNA, 18 nt, Artificial Sequence
  Synthetic
agcugguggagucaucca

SEQ ID NO: 205161 - RNA, 19 nt, Artificial Sequence
  Synthetic
gagcugguggagucaucca

SEQ ID NO: 205162 - RNA, 20 nt, Artificial Sequence
  Synthetic
ggagcugguggagucaucca

SEQ ID NO: 205163 - RNA, 21 nt, Artificial Sequence
  Synthetic
gggagcugguggagucaucca

SEQ ID NO: 205164 - RNA, 22 nt, Artificial Sequence
  Synthetic
cgggagcugguggagucaucca

SEQ ID NO: 205165 - RNA, 23 nt, Artificial Sequence
  Synthetic
ccgggagcugguggagucaucca

SEQ ID NO: 205166 - RNA, 24 nt, Artificial Sequence
  Synthetic
accgggagcugguggagucaucca

SEQ ID NO: 205167 - RNA, 18 nt, Artificial Sequence
  Synthetic
guagcaacucuucaucca

SEQ ID NO: 205168 - RNA, 19 nt, Artificial Sequence
  Synthetic
aguagcaacucuucaucca

SEQ ID NO: 205169 - RNA, 20 nt, Artificial Sequence
  Synthetic
aaguagcaacucuucaucca

SEQ ID NO: 205170 - RNA, 21 nt, Artificial Sequence
  Synthetic
uaaguagcaacucuucaucca

SEQ ID NO: 205171 - RNA, 22 nt, Artificial Sequence
  Synthetic
auaaguagcaacucuucaucca

SEQ ID NO: 205172 - RNA, 23 nt, Artificial Sequence
  Synthetic
uauaaguagcaacucuucaucca

SEQ ID NO: 205173 - RNA, 24 nt, Artificial Sequence
  Synthetic
cuauaaguagcaacucuucaucca

SEQ ID NO: 205174 - RNA, 18 nt, Artificial Sequence
  Synthetic
gaagaguaauuucaucca

SEQ ID NO: 205175 - RNA, 19 nt, Artificial Sequence
  Synthetic
ggaagaguaauuucaucca

SEQ ID NO: 205176 - RNA, 20 nt, Artificial Sequence
  Synthetic
gggaagaguaauuucaucca

SEQ ID NO: 205177 - RNA, 21 nt, Artificial Sequence
  Synthetic
agggaagaguaauuucaucca

SEQ ID NO: 205178 - RNA, 22 nt, Artificial Sequence
  Synthetic
gagggaagaguaauuucaucca

SEQ ID NO: 205179 - RNA, 23 nt, Artificial Sequence
  Synthetic
ugagggaagaguaauuucaucca

SEQ ID NO: 205180 - RNA, 24 nt, Artificial Sequence
  Synthetic
augagggaagaguaauuucaucca

SEQ ID NO: 205181 - RNA, 18 nt, Artificial Sequence
  Synthetic
auguaaauacaggaucca

SEQ ID NO: 205182 - RNA, 19 nt, Artificial Sequence
  Synthetic
aauguaaauacaggaucca

SEQ ID NO: 205183 - RNA, 20 nt, Artificial Sequence
  Synthetic
gaauguaaauacaggaucca

SEQ ID NO: 205184 - RNA, 21 nt, Artificial Sequence
  Synthetic
ugaauguaaauacaggaucca

SEQ ID NO: 205185 - RNA, 22 nt, Artificial Sequence
  Synthetic
augaauguaaauacaggaucca

SEQ ID NO: 205186 - RNA, 23 nt, Artificial Sequence
  Synthetic
caugaauguaaauacaggaucca

SEQ ID NO: 205187 - RNA, 24 nt, Artificial Sequence
  Synthetic
ucaugaauguaaauacaggaucca

SEQ ID NO: 205188 - RNA, 18 nt, Artificial Sequence
  Synthetic
uguugugggagggaucca

SEQ ID NO: 205189 - RNA, 19 nt, Artificial Sequence
  Synthetic
uuguugugggagggaucca

SEQ ID NO: 205190 - RNA, 20 nt, Artificial Sequence
  Synthetic
cuuguugugggagggaucca

SEQ ID NO: 205191 - RNA, 21 nt, Artificial Sequence
  Synthetic
acuuguugugggagggaucca

SEQ ID NO: 205192 - RNA, 22 nt, Artificial Sequence
  Synthetic
uacuuguugugggagggaucca

SEQ ID NO: 205193 - RNA, 23 nt, Artificial Sequence
  Synthetic
cuacuuguugugggagggaucca

SEQ ID NO: 205194 - RNA, 24 nt, Artificial Sequence
  Synthetic
ccuacuuguugugggagggaucca

SEQ ID NO: 205195 - RNA, 18 nt, Artificial Sequence
  Synthetic
ccacccgccccugaucca

SEQ ID NO: 205196 - RNA, 19 nt, Artificial Sequence
  Synthetic
cccacccgccccugaucca

SEQ ID NO: 205197 - RNA, 20 nt, Artificial Sequence
  Synthetic
ccccacccgccccugaucca

SEQ ID NO: 205198 - RNA, 21 nt, Artificial Sequence
  Synthetic
accccacccgccccugaucca

SEQ ID NO: 205199 - RNA, 22 nt, Artificial Sequence
  Synthetic
aaccccacccgccccugaucca

SEQ ID NO: 205200 - RNA, 23 nt, Artificial Sequence
  Synthetic
caaccccacccgccccugaucca

SEQ ID NO: 205201 - RNA, 24 nt, Artificial Sequence
  Synthetic
acaaccccacccgccccugaucca

SEQ ID NO: 205202 - RNA, 18 nt, Artificial Sequence
  Synthetic
cacauugugucugaucca

SEQ ID NO: 205203 - RNA, 19 nt, Artificial Sequence
  Synthetic
ucacauugugucugaucca

SEQ ID NO: 205204 - RNA, 20 nt, Artificial Sequence
  Synthetic
cucacauugugucugaucca

SEQ ID NO: 205205 - RNA, 21 nt, Artificial Sequence
  Synthetic
ccucacauugugucugaucca

SEQ ID NO: 205206 - RNA, 22 nt, Artificial Sequence
  Synthetic
accucacauugugucugaucca

SEQ ID NO: 205207 - RNA, 23 nt, Artificial Sequence
  Synthetic
aaccucacauugugucugaucca

SEQ ID NO: 205208 - RNA, 24 nt, Artificial Sequence
  Synthetic
aaaccucacauugugucugaucca

SEQ ID NO: 205209 - RNA, 18 nt, Artificial Sequence
  Synthetic
cccaccuccaaauaucca

SEQ ID NO: 205210 - RNA, 19 nt, Artificial Sequence
  Synthetic
ccccaccuccaaauaucca

SEQ ID NO: 205211 - RNA, 20 nt, Artificial Sequence
  Synthetic
gccccaccuccaaauaucca

SEQ ID NO: 205212 - RNA, 21 nt, Artificial Sequence
  Synthetic
ggccccaccuccaaauaucca

SEQ ID NO: 205213 - RNA, 22 nt, Artificial Sequence
  Synthetic
aggccccaccuccaaauaucca

SEQ ID NO: 205214 - RNA, 23 nt, Artificial Sequence
  Synthetic
aaggccccaccuccaaauaucca

SEQ ID NO: 205215 - RNA, 24 nt, Artificial Sequence
  Synthetic
aaaggccccaccuccaaauaucca

SEQ ID NO: 205216 - RNA, 18 nt, Artificial Sequence
  Synthetic
auccaaucagaauaucca

SEQ ID NO: 205217 - RNA, 19 nt, Artificial Sequence
  Synthetic
uauccaaucagaauaucca

SEQ ID NO: 205218 - RNA, 20 nt, Artificial Sequence
  Synthetic
auauccaaucagaauaucca

SEQ ID NO: 205219 - RNA, 21 nt, Artificial Sequence
  Synthetic
uauauccaaucagaauaucca

SEQ ID NO: 205220 - RNA, 22 nt, Artificial Sequence
  Synthetic
auauauccaaucagaauaucca

SEQ ID NO: 205221 - RNA, 23 nt, Artificial Sequence
  Synthetic
gauauauccaaucagaauaucca

SEQ ID NO: 205222 - RNA, 24 nt, Artificial Sequence
  Synthetic
ugauauauccaaucagaauaucca

SEQ ID NO: 205223 - RNA, 18 nt, Artificial Sequence
  Synthetic
agcaaaagucacuaucca

SEQ ID NO: 205224 - RNA, 19 nt, Artificial Sequence
  Synthetic
uagcaaaagucacuaucca

SEQ ID NO: 205225 - RNA, 20 nt, Artificial Sequence
  Synthetic
uuagcaaaagucacuaucca

SEQ ID NO: 205226 - RNA, 21 nt, Artificial Sequence
  Synthetic
guuagcaaaagucacuaucca

SEQ ID NO: 205227 - RNA, 22 nt, Artificial Sequence
  Synthetic
uguuagcaaaagucacuaucca

SEQ ID NO: 205228 - RNA, 23 nt, Artificial Sequence
  Synthetic
guguuagcaaaagucacuaucca

SEQ ID NO: 205229 - RNA, 24 nt, Artificial Sequence
  Synthetic
aguguuagcaaaagucacuaucca

SEQ ID NO: 205230 - RNA, 18 nt, Artificial Sequence
  Synthetic
cuuugauaacucuaucca

SEQ ID NO: 205231 - RNA, 19 nt, Artificial Sequence
  Synthetic
acuuugauaacucuaucca

SEQ ID NO: 205232 - RNA, 20 nt, Artificial Sequence
  Synthetic
uacuuugauaacucuaucca

SEQ ID NO: 205233 - RNA, 21 nt, Artificial Sequence
  Synthetic
cuacuuugauaacucuaucca

SEQ ID NO: 205234 - RNA, 22 nt, Artificial Sequence
  Synthetic
ucuacuuugauaacucuaucca

SEQ ID NO: 205235 - RNA, 23 nt, Artificial Sequence
  Synthetic
gucuacuuugauaacucuaucca

SEQ ID NO: 205236 - RNA, 24 nt, Artificial Sequence
  Synthetic
agucuacuuugauaacucuaucca

SEQ ID NO: 205237 - RNA, 18 nt, Artificial Sequence
  Synthetic
gcuuuguaauaguaucca

SEQ ID NO: 205238 - RNA, 19 nt, Artificial Sequence
  Synthetic
agcuuuguaauaguaucca

SEQ ID NO: 205239 - RNA, 20 nt, Artificial Sequence
  Synthetic
gagcuuuguaauaguaucca

SEQ ID NO: 205240 - RNA, 21 nt, Artificial Sequence
  Synthetic
ugagcuuuguaauaguaucca

SEQ ID NO: 205241 - RNA, 22 nt, Artificial Sequence
  Synthetic
uugagcuuuguaauaguaucca

SEQ ID NO: 205242 - RNA, 23 nt, Artificial Sequence
  Synthetic
uuugagcuuuguaauaguaucca

SEQ ID NO: 205243 - RNA, 24 nt, Artificial Sequence
  Synthetic
cuuugagcuuuguaauaguaucca

SEQ ID NO: 205244 - RNA, 18 nt, Artificial Sequence
  Synthetic
gcuggcuaaccguaucca

SEQ ID NO: 205245 - RNA, 19 nt, Artificial Sequence
  Synthetic
agcuggcuaaccguaucca

SEQ ID NO: 205246 - RNA, 20 nt, Artificial Sequence
  Synthetic
uagcuggcuaaccguaucca

SEQ ID NO: 205247 - RNA, 21 nt, Artificial Sequence
  Synthetic
auagcuggcuaaccguaucca

SEQ ID NO: 205248 - RNA, 22 nt, Artificial Sequence
  Synthetic
gauagcuggcuaaccguaucca

SEQ ID NO: 205249 - RNA, 23 nt, Artificial Sequence
  Synthetic
ggauagcuggcuaaccguaucca

SEQ ID NO: 205250 - RNA, 24 nt, Artificial Sequence
  Synthetic
gggauagcuggcuaaccguaucca

SEQ ID NO: 205251 - RNA, 18 nt, Artificial Sequence
  Synthetic
ugguacaauuuguaucca

SEQ ID NO: 205252 - RNA, 19 nt, Artificial Sequence
  Synthetic
cugguacaauuuguaucca

SEQ ID NO: 205253 - RNA, 20 nt, Artificial Sequence
  Synthetic
gcugguacaauuuguaucca

SEQ ID NO: 205254 - RNA, 21 nt, Artificial Sequence
  Synthetic
ugcugguacaauuuguaucca

SEQ ID NO: 205255 - RNA, 22 nt, Artificial Sequence
  Synthetic
augcugguacaauuuguaucca

SEQ ID NO: 205256 - RNA, 23 nt, Artificial Sequence
  Synthetic
caugcugguacaauuuguaucca

SEQ ID NO: 205257 - RNA, 24 nt, Artificial Sequence
  Synthetic
gcaugcugguacaauuuguaucca

SEQ ID NO: 205258 - RNA, 18 nt, Artificial Sequence
  Synthetic
ccccauaacaguuaucca

SEQ ID NO: 205259 - RNA, 19 nt, Artificial Sequence
  Synthetic
gccccauaacaguuaucca

SEQ ID NO: 205260 - RNA, 20 nt, Artificial Sequence
  Synthetic
ggccccauaacaguuaucca

SEQ ID NO: 205261 - RNA, 21 nt, Artificial Sequence
  Synthetic
uggccccauaacaguuaucca

SEQ ID NO: 205262 - RNA, 22 nt, Artificial Sequence
  Synthetic
cuggccccauaacaguuaucca

SEQ ID NO: 205263 - RNA, 23 nt, Artificial Sequence
  Synthetic
acuggccccauaacaguuaucca

SEQ ID NO: 205264 - RNA, 24 nt, Artificial Sequence
  Synthetic
uacuggccccauaacaguuaucca

SEQ ID NO: 205265 - RNA, 18 nt, Artificial Sequence
  Synthetic
cuacugggcauuuaucca

SEQ ID NO: 205266 - RNA, 19 nt, Artificial Sequence
  Synthetic
acuacugggcauuuaucca

SEQ ID NO: 205267 - RNA, 20 nt, Artificial Sequence
  Synthetic
cacuacugggcauuuaucca

SEQ ID NO: 205268 - RNA, 21 nt, Artificial Sequence
  Synthetic
ccacuacugggcauuuaucca

SEQ ID NO: 205269 - RNA, 22 nt, Artificial Sequence
  Synthetic
cccacuacugggcauuuaucca

SEQ ID NO: 205270 - RNA, 23 nt, Artificial Sequence
  Synthetic
ucccacuacugggcauuuaucca

SEQ ID NO: 205271 - RNA, 24 nt, Artificial Sequence
  Synthetic
aucccacuacugggcauuuaucca

SEQ ID NO: 205272 - RNA, 18 nt, Artificial Sequence
  Synthetic
cucuuuugaagaacucca

SEQ ID NO: 205273 - RNA, 19 nt, Artificial Sequence
  Synthetic
ccucuuuugaagaacucca

SEQ ID NO: 205274 - RNA, 20 nt, Artificial Sequence
  Synthetic
accucuuuugaagaacucca

SEQ ID NO: 205275 - RNA, 21 nt, Artificial Sequence
  Synthetic
aaccucuuuugaagaacucca

SEQ ID NO: 205276 - RNA, 22 nt, Artificial Sequence
  Synthetic
caaccucuuuugaagaacucca

SEQ ID NO: 205277 - RNA, 23 nt, Artificial Sequence
  Synthetic
gcaaccucuuuugaagaacucca

SEQ ID NO: 205278 - RNA, 24 nt, Artificial Sequence
  Synthetic
agcaaccucuuuugaagaacucca

SEQ ID NO: 205279 - RNA, 18 nt, Artificial Sequence
  Synthetic
cuacauugcagaacucca

SEQ ID NO: 205280 - RNA, 19 nt, Artificial Sequence
  Synthetic
gcuacauugcagaacucca

SEQ ID NO: 205281 - RNA, 20 nt, Artificial Sequence
  Synthetic
ugcuacauugcagaacucca

SEQ ID NO: 205282 - RNA, 21 nt, Artificial Sequence
  Synthetic
uugcuacauugcagaacucca

SEQ ID NO: 205283 - RNA, 22 nt, Artificial Sequence
  Synthetic
cuugcuacauugcagaacucca

SEQ ID NO: 205284 - RNA, 23 nt, Artificial Sequence
  Synthetic
gcuugcuacauugcagaacucca

SEQ ID NO: 205285 - RNA, 24 nt, Artificial Sequence
  Synthetic
agcuugcuacauugcagaacucca

SEQ ID NO: 205286 - RNA, 18 nt, Artificial Sequence
  Synthetic
ugagagucaggaacucca

SEQ ID NO: 205287 - RNA, 19 nt, Artificial Sequence
  Synthetic
cugagagucaggaacucca

SEQ ID NO: 205288 - RNA, 20 nt, Artificial Sequence
  Synthetic
acugagagucaggaacucca

SEQ ID NO: 205289 - RNA, 21 nt, Artificial Sequence
  Synthetic
cacugagagucaggaacucca

SEQ ID NO: 205290 - RNA, 22 nt, Artificial Sequence
  Synthetic
gcacugagagucaggaacucca

SEQ ID NO: 205291 - RNA, 23 nt, Artificial Sequence
  Synthetic
agcacugagagucaggaacucca

SEQ ID NO: 205292 - RNA, 24 nt, Artificial Sequence
  Synthetic
cagcacugagagucaggaacucca

SEQ ID NO: 205293 - RNA, 18 nt, Artificial Sequence
  Synthetic
ccaacaauauucacucca

SEQ ID NO: 205294 - RNA, 19 nt, Artificial Sequence
  Synthetic
accaacaauauucacucca

SEQ ID NO: 205295 - RNA, 20 nt, Artificial Sequence
  Synthetic
caccaacaauauucacucca

SEQ ID NO: 205296 - RNA, 21 nt, Artificial Sequence
  Synthetic
ccaccaacaauauucacucca

SEQ ID NO: 205297 - RNA, 22 nt, Artificial Sequence
  Synthetic
gccaccaacaauauucacucca

SEQ ID NO: 205298 - RNA, 23 nt, Artificial Sequence
  Synthetic
agccaccaacaauauucacucca

SEQ ID NO: 205299 - RNA, 24 nt, Artificial Sequence
  Synthetic
aagccaccaacaauauucacucca

SEQ ID NO: 205300 - RNA, 18 nt, Artificial Sequence
  Synthetic
ucuugaucucugacucca

SEQ ID NO: 205301 - RNA, 19 nt, Artificial Sequence
  Synthetic
aucuugaucucugacucca

SEQ ID NO: 205302 - RNA, 20 nt, Artificial Sequence
  Synthetic
caucuugaucucugacucca

SEQ ID NO: 205303 - RNA, 21 nt, Artificial Sequence
  Synthetic
ccaucuugaucucugacucca

SEQ ID NO: 205304 - RNA, 22 nt, Artificial Sequence
  Synthetic
uccaucuugaucucugacucca

SEQ ID NO: 205305 - RNA, 23 nt, Artificial Sequence
  Synthetic
uuccaucuugaucucugacucca

SEQ ID NO: 205306 - RNA, 24 nt, Artificial Sequence
  Synthetic
uuuccaucuugaucucugacucca

SEQ ID NO: 205307 - RNA, 18 nt, Artificial Sequence
  Synthetic
aaaauuggaaauacucca

SEQ ID NO: 205308 - RNA, 19 nt, Artificial Sequence
  Synthetic
caaaauuggaaauacucca

SEQ ID NO: 205309 - RNA, 20 nt, Artificial Sequence
  Synthetic
ucaaaauuggaaauacucca

SEQ ID NO: 205310 - RNA, 21 nt, Artificial Sequence
  Synthetic
uucaaaauuggaaauacucca

SEQ ID NO: 205311 - RNA, 22 nt, Artificial Sequence
  Synthetic
auucaaaauuggaaauacucca

SEQ ID NO: 205312 - RNA, 23 nt, Artificial Sequence
  Synthetic
aauucaaaauuggaaauacucca

SEQ ID NO: 205313 - RNA, 24 nt, Artificial Sequence
  Synthetic
aaauucaaaauuggaaauacucca

SEQ ID NO: 205314 - RNA, 18 nt, Artificial Sequence
  Synthetic
uauuucauuuaaccucca

SEQ ID NO: 205315 - RNA, 19 nt, Artificial Sequence
  Synthetic
uuauuucauuuaaccucca

SEQ ID NO: 205316 - RNA, 20 nt, Artificial Sequence
  Synthetic
cuuauuucauuuaaccucca

SEQ ID NO: 205317 - RNA, 21 nt, Artificial Sequence
  Synthetic
ccuuauuucauuuaaccucca

SEQ ID NO: 205318 - RNA, 22 nt, Artificial Sequence
  Synthetic
accuuauuucauuuaaccucca

SEQ ID NO: 205319 - RNA, 23 nt, Artificial Sequence
  Synthetic
aaccuuauuucauuuaaccucca

SEQ ID NO: 205320 - RNA, 24 nt, Artificial Sequence
  Synthetic
aaaccuuauuucauuuaaccucca

SEQ ID NO: 205321 - RNA, 18 nt, Artificial Sequence
  Synthetic
uaucauugggcaccucca

SEQ ID NO: 205322 - RNA, 19 nt, Artificial Sequence
  Synthetic
auaucauugggcaccucca

SEQ ID NO: 205323 - RNA, 20 nt, Artificial Sequence
  Synthetic
aauaucauugggcaccucca

SEQ ID NO: 205324 - RNA, 21 nt, Artificial Sequence
  Synthetic
uaauaucauugggcaccucca

SEQ ID NO: 205325 - RNA, 22 nt, Artificial Sequence
  Synthetic
auaauaucauugggcaccucca

SEQ ID NO: 205326 - RNA, 23 nt, Artificial Sequence
  Synthetic
uauaauaucauugggcaccucca

SEQ ID NO: 205327 - RNA, 24 nt, Artificial Sequence
  Synthetic
uuauaauaucauugggcaccucca

SEQ ID NO: 205328 - RNA, 18 nt, Artificial Sequence
  Synthetic
gcgaagaaaaacccucca

SEQ ID NO: 205329 - RNA, 19 nt, Artificial Sequence
  Synthetic
ggcgaagaaaaacccucca

SEQ ID NO: 205330 - RNA, 20 nt, Artificial Sequence
  Synthetic
aggcgaagaaaaacccucca

SEQ ID NO: 205331 - RNA, 21 nt, Artificial Sequence
  Synthetic
gaggcgaagaaaaacccucca

SEQ ID NO: 205332 - RNA, 22 nt, Artificial Sequence
  Synthetic
ggaggcgaagaaaaacccucca

SEQ ID NO: 205333 - RNA, 23 nt, Artificial Sequence
  Synthetic
aggaggcgaagaaaaacccucca

SEQ ID NO: 205334 - RNA, 24 nt, Artificial Sequence
  Synthetic
gaggaggcgaagaaaaacccucca

SEQ ID NO: 205335 - RNA, 18 nt, Artificial Sequence
  Synthetic
uuauuucaguacccucca

SEQ ID NO: 205336 - RNA, 19 nt, Artificial Sequence
  Synthetic
uuuauuucaguacccucca

SEQ ID NO: 205337 - RNA, 20 nt, Artificial Sequence
  Synthetic
auuuauuucaguacccucca

SEQ ID NO: 205338 - RNA, 21 nt, Artificial Sequence
  Synthetic
aauuuauuucaguacccucca

SEQ ID NO: 205339 - RNA, 22 nt, Artificial Sequence
  Synthetic
gaauuuauuucaguacccucca

SEQ ID NO: 205340 - RNA, 23 nt, Artificial Sequence
  Synthetic
agaauuuauuucaguacccucca

SEQ ID NO: 205341 - RNA, 24 nt, Artificial Sequence
  Synthetic
uagaauuuauuucaguacccucca

SEQ ID NO: 205342 - RNA, 18 nt, Artificial Sequence
  Synthetic
ugaggcuucugcccucca

SEQ ID NO: 205343 - RNA, 19 nt, Artificial Sequence
  Synthetic
cugaggcuucugcccucca

SEQ ID NO: 205344 - RNA, 20 nt, Artificial Sequence
  Synthetic
ucugaggcuucugcccucca

SEQ ID NO: 205345 - RNA, 21 nt, Artificial Sequence
  Synthetic
uucugaggcuucugcccucca

SEQ ID NO: 205346 - RNA, 22 nt, Artificial Sequence
  Synthetic
cuucugaggcuucugcccucca

SEQ ID NO: 205347 - RNA, 23 nt, Artificial Sequence
  Synthetic
acuucugaggcuucugcccucca

SEQ ID NO: 205348 - RNA, 24 nt, Artificial Sequence
  Synthetic
uacuucugaggcuucugcccucca

SEQ ID NO: 205349 - RNA, 18 nt, Artificial Sequence
  Synthetic
gcuugcacacucccucca

SEQ ID NO: 205350 - RNA, 19 nt, Artificial Sequence
  Synthetic
ugcuugcacacucccucca

SEQ ID NO: 205351 - RNA, 20 nt, Artificial Sequence
  Synthetic
uugcuugcacacucccucca

SEQ ID NO: 205352 - RNA, 21 nt, Artificial Sequence
  Synthetic
uuugcuugcacacucccucca

SEQ ID NO: 205353 - RNA, 22 nt, Artificial Sequence
  Synthetic
guuugcuugcacacucccucca

SEQ ID NO: 205354 - RNA, 23 nt, Artificial Sequence
  Synthetic
cguuugcuugcacacucccucca

SEQ ID NO: 205355 - RNA, 24 nt, Artificial Sequence
  Synthetic
ucguuugcuugcacacucccucca

SEQ ID NO: 205356 - RNA, 18 nt, Artificial Sequence
  Synthetic
gcuccuaaaaauccucca

SEQ ID NO: 205357 - RNA, 19 nt, Artificial Sequence
  Synthetic
agcuccuaaaaauccucca

SEQ ID NO: 205358 - RNA, 20 nt, Artificial Sequence
  Synthetic
aagcuccuaaaaauccucca

SEQ ID NO: 205359 - RNA, 21 nt, Artificial Sequence
  Synthetic
gaagcuccuaaaaauccucca

SEQ ID NO: 205360 - RNA, 22 nt, Artificial Sequence
  Synthetic
ugaagcuccuaaaaauccucca

SEQ ID NO: 205361 - RNA, 23 nt, Artificial Sequence
  Synthetic
gugaagcuccuaaaaauccucca

SEQ ID NO: 205362 - RNA, 24 nt, Artificial Sequence
  Synthetic
ugugaagcuccuaaaaauccucca

SEQ ID NO: 205363 - RNA, 18 nt, Artificial Sequence
  Synthetic
cagagguggaauccucca

SEQ ID NO: 205364 - RNA, 19 nt, Artificial Sequence
  Synthetic
gcagagguggaauccucca

SEQ ID NO: 205365 - RNA, 20 nt, Artificial Sequence
  Synthetic
agcagagguggaauccucca

SEQ ID NO: 205366 - RNA, 21 nt, Artificial Sequence
  Synthetic
uagcagagguggaauccucca

SEQ ID NO: 205367 - RNA, 22 nt, Artificial Sequence
  Synthetic
guagcagagguggaauccucca

SEQ ID NO: 205368 - RNA, 23 nt, Artificial Sequence
  Synthetic
uguagcagagguggaauccucca

SEQ ID NO: 205369 - RNA, 24 nt, Artificial Sequence
  Synthetic
auguagcagagguggaauccucca

SEQ ID NO: 205370 - RNA, 18 nt, Artificial Sequence
  Synthetic
agaggacuggcuccucca

SEQ ID NO: 205371 - RNA, 19 nt, Artificial Sequence
  Synthetic
cagaggacuggcuccucca

SEQ ID NO: 205372 - RNA, 20 nt, Artificial Sequence
  Synthetic
acagaggacuggcuccucca

SEQ ID NO: 205373 - RNA, 21 nt, Artificial Sequence
  Synthetic
uacagaggacuggcuccucca

SEQ ID NO: 205374 - RNA, 22 nt, Artificial Sequence
  Synthetic
auacagaggacuggcuccucca

SEQ ID NO: 205375 - RNA, 23 nt, Artificial Sequence
  Synthetic
aauacagaggacuggcuccucca

SEQ ID NO: 205376 - RNA, 24 nt, Artificial Sequence
  Synthetic
caauacagaggacuggcuccucca

SEQ ID NO: 205377 - RNA, 18 nt, Artificial Sequence
  Synthetic
uuccuacuuaguccucca

SEQ ID NO: 205378 - RNA, 19 nt, Artificial Sequence
  Synthetic
uuuccuacuuaguccucca

SEQ ID NO: 205379 - RNA, 20 nt, Artificial Sequence
  Synthetic
uuuuccuacuuaguccucca

SEQ ID NO: 205380 - RNA, 21 nt, Artificial Sequence
  Synthetic
uuuuuccuacuuaguccucca

SEQ ID NO: 205381 - RNA, 22 nt, Artificial Sequence
  Synthetic
uuuuuuccuacuuaguccucca

SEQ ID NO: 205382 - RNA, 23 nt, Artificial Sequence
  Synthetic
cuuuuuuccuacuuaguccucca

SEQ ID NO: 205383 - RNA, 24 nt, Artificial Sequence
  Synthetic
ccuuuuuuccuacuuaguccucca

SEQ ID NO: 205384 - RNA, 18 nt, Artificial Sequence
  Synthetic
gaaaagacaauuccucca

SEQ ID NO: 205385 - RNA, 19 nt, Artificial Sequence
  Synthetic
ggaaaagacaauuccucca

SEQ ID NO: 205386 - RNA, 20 nt, Artificial Sequence
  Synthetic
aggaaaagacaauuccucca

SEQ ID NO: 205387 - RNA, 21 nt, Artificial Sequence
  Synthetic
caggaaaagacaauuccucca

SEQ ID NO: 205388 - RNA, 22 nt, Artificial Sequence
  Synthetic
gcaggaaaagacaauuccucca

SEQ ID NO: 205389 - RNA, 23 nt, Artificial Sequence
  Synthetic
ggcaggaaaagacaauuccucca

SEQ ID NO: 205390 - RNA, 24 nt, Artificial Sequence
  Synthetic
aggcaggaaaagacaauuccucca

SEQ ID NO: 205391 - RNA, 18 nt, Artificial Sequence
  Synthetic
uucuuaaggcuuccucca

SEQ ID NO: 205392 - RNA, 19 nt, Artificial Sequence
  Synthetic
cuucuuaaggcuuccucca

SEQ ID NO: 205393 - RNA, 20 nt, Artificial Sequence
  Synthetic
ucuucuuaaggcuuccucca

SEQ ID NO: 205394 - RNA, 21 nt, Artificial Sequence
  Synthetic
aucuucuuaaggcuuccucca

SEQ ID NO: 205395 - RNA, 22 nt, Artificial Sequence
  Synthetic
aaucuucuuaaggcuuccucca

SEQ ID NO: 205396 - RNA, 23 nt, Artificial Sequence
  Synthetic
uaaucuucuuaaggcuuccucca

SEQ ID NO: 205397 - RNA, 24 nt, Artificial Sequence
  Synthetic
cuaaucuucuuaaggcuuccucca

SEQ ID NO: 205398 - RNA, 18 nt, Artificial Sequence
  Synthetic
ucuaaacgaguuccucca

SEQ ID NO: 205399 - RNA, 19 nt, Artificial Sequence
  Synthetic
cucuaaacgaguuccucca

SEQ ID NO: 205400 - RNA, 20 nt, Artificial Sequence
  Synthetic
ccucuaaacgaguuccucca

SEQ ID NO: 205401 - RNA, 21 nt, Artificial Sequence
  Synthetic
cccucuaaacgaguuccucca

SEQ ID NO: 205402 - RNA, 22 nt, Artificial Sequence
  Synthetic
ucccucuaaacgaguuccucca

SEQ ID NO: 205403 - RNA, 23 nt, Artificial Sequence
  Synthetic
uucccucuaaacgaguuccucca

SEQ ID NO: 205404 - RNA, 24 nt, Artificial Sequence
  Synthetic
uuucccucuaaacgaguuccucca

SEQ ID NO: 205405 - RNA, 18 nt, Artificial Sequence
  Synthetic
cuuaguucuaaagcucca

SEQ ID NO: 205406 - RNA, 19 nt, Artificial Sequence
  Synthetic
gcuuaguucuaaagcucca

SEQ ID NO: 205407 - RNA, 20 nt, Artificial Sequence
  Synthetic
ugcuuaguucuaaagcucca

SEQ ID NO: 205408 - RNA, 21 nt, Artificial Sequence
  Synthetic
augcuuaguucuaaagcucca

SEQ ID NO: 205409 - RNA, 22 nt, Artificial Sequence
  Synthetic
gaugcuuaguucuaaagcucca

SEQ ID NO: 205410 - RNA, 23 nt, Artificial Sequence
  Synthetic
ugaugcuuaguucuaaagcucca

SEQ ID NO: 205411 - RNA, 24 nt, Artificial Sequence
  Synthetic
augaugcuuaguucuaaagcucca

SEQ ID NO: 205412 - RNA, 18 nt, Artificial Sequence
  Synthetic
ucucaaacuuuagcucca

SEQ ID NO: 205413 - RNA, 19 nt, Artificial Sequence
  Synthetic
uucucaaacuuuagcucca

SEQ ID NO: 205414 - RNA, 20 nt, Artificial Sequence
  Synthetic
guucucaaacuuuagcucca

SEQ ID NO: 205415 - RNA, 21 nt, Artificial Sequence
  Synthetic
gguucucaaacuuuagcucca

SEQ ID NO: 205416 - RNA, 22 nt, Artificial Sequence
  Synthetic
ugguucucaaacuuuagcucca

SEQ ID NO: 205417 - RNA, 23 nt, Artificial Sequence
  Synthetic
gugguucucaaacuuuagcucca

SEQ ID NO: 205418 - RNA, 24 nt, Artificial Sequence
  Synthetic
agugguucucaaacuuuagcucca

SEQ ID NO: 205419 - RNA, 18 nt, Artificial Sequence
  Synthetic
cuguauaauagggcucca

SEQ ID NO: 205420 - RNA, 19 nt, Artificial Sequence
  Synthetic
acuguauaauagggcucca

SEQ ID NO: 205421 - RNA, 20 nt, Artificial Sequence
  Synthetic
gacuguauaauagggcucca

SEQ ID NO: 205422 - RNA, 21 nt, Artificial Sequence
  Synthetic
ugacuguauaauagggcucca

SEQ ID NO: 205423 - RNA, 22 nt, Artificial Sequence
  Synthetic
augacuguauaauagggcucca

SEQ ID NO: 205424 - RNA, 23 nt, Artificial Sequence
  Synthetic
aaugacuguauaauagggcucca

SEQ ID NO: 205425 - RNA, 24 nt, Artificial Sequence
  Synthetic
gaaugacuguauaauagggcucca

SEQ ID NO: 205426 - RNA, 18 nt, Artificial Sequence
  Synthetic
agaugguggcaaucucca

SEQ ID NO: 205427 - RNA, 19 nt, Artificial Sequence
  Synthetic
gagaugguggcaaucucca

SEQ ID NO: 205428 - RNA, 20 nt, Artificial Sequence
  Synthetic
agagaugguggcaaucucca

SEQ ID NO: 205429 - RNA, 21 nt, Artificial Sequence
  Synthetic
uagagaugguggcaaucucca

SEQ ID NO: 205430 - RNA, 22 nt, Artificial Sequence
  Synthetic
guagagaugguggcaaucucca

SEQ ID NO: 205431 - RNA, 23 nt, Artificial Sequence
  Synthetic
uguagagaugguggcaaucucca

SEQ ID NO: 205432 - RNA, 24 nt, Artificial Sequence
  Synthetic
auguagagaugguggcaaucucca

SEQ ID NO: 205433 - RNA, 18 nt, Artificial Sequence
  Synthetic
uuccuuaggaccucucca

SEQ ID NO: 205434 - RNA, 19 nt, Artificial Sequence
  Synthetic
uuuccuuaggaccucucca

SEQ ID NO: 205435 - RNA, 20 nt, Artificial Sequence
  Synthetic
guuuccuuaggaccucucca

SEQ ID NO: 205436 - RNA, 21 nt, Artificial Sequence
  Synthetic
gguuuccuuaggaccucucca

SEQ ID NO: 205437 - RNA, 22 nt, Artificial Sequence
  Synthetic
agguuuccuuaggaccucucca

SEQ ID NO: 205438 - RNA, 23 nt, Artificial Sequence
  Synthetic
cagguuuccuuaggaccucucca

SEQ ID NO: 205439 - RNA, 24 nt, Artificial Sequence
  Synthetic
ccagguuuccuuaggaccucucca

SEQ ID NO: 205440 - RNA, 18 nt, Artificial Sequence
  Synthetic
uucauguggaccucucca

SEQ ID NO: 205441 - RNA, 19 nt, Artificial Sequence
  Synthetic
cuucauguggaccucucca

SEQ ID NO: 205442 - RNA, 20 nt, Artificial Sequence
  Synthetic
ucuucauguggaccucucca

SEQ ID NO: 205443 - RNA, 21 nt, Artificial Sequence
  Synthetic
uucuucauguggaccucucca

SEQ ID NO: 205444 - RNA, 22 nt, Artificial Sequence
  Synthetic
uuucuucauguggaccucucca

SEQ ID NO: 205445 - RNA, 23 nt, Artificial Sequence
  Synthetic
uuuucuucauguggaccucucca

SEQ ID NO: 205446 - RNA, 24 nt, Artificial Sequence
  Synthetic
uuuuucuucauguggaccucucca

SEQ ID NO: 205447 - RNA, 18 nt, Artificial Sequence
  Synthetic
gguagguaauccucucca

SEQ ID NO: 205448 - RNA, 19 nt, Artificial Sequence
  Synthetic
ggguagguaauccucucca

SEQ ID NO: 205449 - RNA, 20 nt, Artificial Sequence
  Synthetic
uggguagguaauccucucca

SEQ ID NO: 205450 - RNA, 21 nt, Artificial Sequence
  Synthetic
uuggguagguaauccucucca

SEQ ID NO: 205451 - RNA, 22 nt, Artificial Sequence
  Synthetic
uuuggguagguaauccucucca

SEQ ID NO: 205452 - RNA, 23 nt, Artificial Sequence
  Synthetic
cuuuggguagguaauccucucca

SEQ ID NO: 205453 - RNA, 24 nt, Artificial Sequence
  Synthetic
gcuuuggguagguaauccucucca

SEQ ID NO: 205454 - RNA, 18 nt, Artificial Sequence
  Synthetic
uggguccucagcucucca

SEQ ID NO: 205455 - RNA, 19 nt, Artificial Sequence
  Synthetic
cuggguccucagcucucca

SEQ ID NO: 205456 - RNA, 20 nt, Artificial Sequence
  Synthetic
ccuggguccucagcucucca

SEQ ID NO: 205457 - RNA, 21 nt, Artificial Sequence
  Synthetic
accuggguccucagcucucca

SEQ ID NO: 205458 - RNA, 22 nt, Artificial Sequence
  Synthetic
uaccuggguccucagcucucca

SEQ ID NO: 205459 - RNA, 23 nt, Artificial Sequence
  Synthetic
cuaccuggguccucagcucucca

SEQ ID NO: 205460 - RNA, 24 nt, Artificial Sequence
  Synthetic
ccuaccuggguccucagcucucca

SEQ ID NO: 205461 - RNA, 18 nt, Artificial Sequence
  Synthetic
guaacaugauucucucca

SEQ ID NO: 205462 - RNA, 19 nt, Artificial Sequence
  Synthetic
aguaacaugauucucucca

SEQ ID NO: 205463 - RNA, 20 nt, Artificial Sequence
  Synthetic
aaguaacaugauucucucca

SEQ ID NO: 205464 - RNA, 21 nt, Artificial Sequence
  Synthetic
aaaguaacaugauucucucca

SEQ ID NO: 205465 - RNA, 22 nt, Artificial Sequence
  Synthetic
uaaaguaacaugauucucucca

SEQ ID NO: 205466 - RNA, 23 nt, Artificial Sequence
  Synthetic
auaaaguaacaugauucucucca

SEQ ID NO: 205467 - RNA, 24 nt, Artificial Sequence
  Synthetic
cauaaaguaacaugauucucucca

SEQ ID NO: 205468 - RNA, 18 nt, Artificial Sequence
  Synthetic
ucaccugaccugucucca

SEQ ID NO: 205469 - RNA, 19 nt, Artificial Sequence
  Synthetic
uucaccugaccugucucca

SEQ ID NO: 205470 - RNA, 20 nt, Artificial Sequence
  Synthetic
uuucaccugaccugucucca

SEQ ID NO: 205471 - RNA, 21 nt, Artificial Sequence
  Synthetic
uuuucaccugaccugucucca

SEQ ID NO: 205472 - RNA, 22 nt, Artificial Sequence
  Synthetic
guuuucaccugaccugucucca

SEQ ID NO: 205473 - RNA, 23 nt, Artificial Sequence
  Synthetic
gguuuucaccugaccugucucca

SEQ ID NO: 205474 - RNA, 24 nt, Artificial Sequence
  Synthetic
agguuuucaccugaccugucucca

SEQ ID NO: 205475 - RNA, 18 nt, Artificial Sequence
  Synthetic
caaaugucuccuucucca

SEQ ID NO: 205476 - RNA, 19 nt, Artificial Sequence
  Synthetic
ucaaaugucuccuucucca

SEQ ID NO: 205477 - RNA, 20 nt, Artificial Sequence
  Synthetic
cucaaaugucuccuucucca

SEQ ID NO: 205478 - RNA, 21 nt, Artificial Sequence
  Synthetic
gcucaaaugucuccuucucca

SEQ ID NO: 205479 - RNA, 22 nt, Artificial Sequence
  Synthetic
ugcucaaaugucuccuucucca

SEQ ID NO: 205480 - RNA, 23 nt, Artificial Sequence
  Synthetic
uugcucaaaugucuccuucucca

SEQ ID NO: 205481 - RNA, 24 nt, Artificial Sequence
  Synthetic
uuugcucaaaugucuccuucucca

SEQ ID NO: 205482 - RNA, 18 nt, Artificial Sequence
  Synthetic
uucucagugauuucucca

SEQ ID NO: 205483 - RNA, 19 nt, Artificial Sequence
  Synthetic
uuucucagugauuucucca

SEQ ID NO: 205484 - RNA, 20 nt, Artificial Sequence
  Synthetic
auuucucagugauuucucca

SEQ ID NO: 205485 - RNA, 21 nt, Artificial Sequence
  Synthetic
uauuucucagugauuucucca

SEQ ID NO: 205486 - RNA, 22 nt, Artificial Sequence
  Synthetic
guauuucucagugauuucucca

SEQ ID NO: 205487 - RNA, 23 nt, Artificial Sequence
  Synthetic
aguauuucucagugauuucucca

SEQ ID NO: 205488 - RNA, 24 nt, Artificial Sequence
  Synthetic
caguauuucucagugauuucucca

SEQ ID NO: 205489 - RNA, 18 nt, Artificial Sequence
  Synthetic
uaaauauauauuucucca

SEQ ID NO: 205490 - RNA, 19 nt, Artificial Sequence
  Synthetic
uuaaauauauauuucucca

SEQ ID NO: 205491 - RNA, 20 nt, Artificial Sequence
  Synthetic
uuuaaauauauauuucucca

SEQ ID NO: 205492 - RNA, 21 nt, Artificial Sequence
  Synthetic
auuuaaauauauauuucucca

SEQ ID NO: 205493 - RNA, 22 nt, Artificial Sequence
  Synthetic
uauuuaaauauauauuucucca

SEQ ID NO: 205494 - RNA, 23 nt, Artificial Sequence
  Synthetic
auauuuaaauauauauuucucca

SEQ ID NO: 205495 - RNA, 24 nt, Artificial Sequence
  Synthetic
aauauuuaaauauauauuucucca

SEQ ID NO: 205496 - RNA, 18 nt, Artificial Sequence
  Synthetic
gguuaaauauuuucucca

SEQ ID NO: 205497 - RNA, 19 nt, Artificial Sequence
  Synthetic
ugguuaaauauuuucucca

SEQ ID NO: 205498 - RNA, 20 nt, Artificial Sequence
  Synthetic
uugguuaaauauuuucucca

SEQ ID NO: 205499 - RNA, 21 nt, Artificial Sequence
  Synthetic
auugguuaaauauuuucucca

SEQ ID NO: 205500 - RNA, 22 nt, Artificial Sequence
  Synthetic
uauugguuaaauauuuucucca

SEQ ID NO: 205501 - RNA, 23 nt, Artificial Sequence
  Synthetic
cuauugguuaaauauuuucucca

SEQ ID NO: 205502 - RNA, 24 nt, Artificial Sequence
  Synthetic
ccuauugguuaaauauuuucucca

SEQ ID NO: 205503 - RNA, 18 nt, Artificial Sequence
  Synthetic
uggccucuguuuucucca

SEQ ID NO: 205504 - RNA, 19 nt, Artificial Sequence
  Synthetic
uuggccucuguuuucucca

SEQ ID NO: 205505 - RNA, 20 nt, Artificial Sequence
  Synthetic
cuuggccucuguuuucucca

SEQ ID NO: 205506 - RNA, 21 nt, Artificial Sequence
  Synthetic
acuuggccucuguuuucucca

SEQ ID NO: 205507 - RNA, 22 nt, Artificial Sequence
  Synthetic
uacuuggccucuguuuucucca

SEQ ID NO: 205508 - RNA, 23 nt, Artificial Sequence
  Synthetic
uuacuuggccucuguuuucucca

SEQ ID NO: 205509 - RNA, 24 nt, Artificial Sequence
  Synthetic
auuacuuggccucuguuuucucca

SEQ ID NO: 205510 - RNA, 18 nt, Artificial Sequence
  Synthetic
acucaguuuuugagucca

SEQ ID NO: 205511 - RNA, 19 nt, Artificial Sequence
  Synthetic
aacucaguuuuugagucca

SEQ ID NO: 205512 - RNA, 20 nt, Artificial Sequence
  Synthetic
aaacucaguuuuugagucca

SEQ ID NO: 205513 - RNA, 21 nt, Artificial Sequence
  Synthetic
caaacucaguuuuugagucca

SEQ ID NO: 205514 - RNA, 22 nt, Artificial Sequence
  Synthetic
gcaaacucaguuuuugagucca

SEQ ID NO: 205515 - RNA, 23 nt, Artificial Sequence
  Synthetic
ugcaaacucaguuuuugagucca

SEQ ID NO: 205516 - RNA, 24 nt, Artificial Sequence
  Synthetic
cugcaaacucaguuuuugagucca

SEQ ID NO: 205517 - RNA, 18 nt, Artificial Sequence
  Synthetic
agagggagcagccgucca

SEQ ID NO: 205518 - RNA, 19 nt, Artificial Sequence
  Synthetic
cagagggagcagccgucca

SEQ ID NO: 205519 - RNA, 20 nt, Artificial Sequence
  Synthetic
acagagggagcagccgucca

SEQ ID NO: 205520 - RNA, 21 nt, Artificial Sequence
  Synthetic
uacagagggagcagccgucca

SEQ ID NO: 205521 - RNA, 22 nt, Artificial Sequence
  Synthetic
uuacagagggagcagccgucca

SEQ ID NO: 205522 - RNA, 23 nt, Artificial Sequence
  Synthetic
auuacagagggagcagccgucca

SEQ ID NO: 205523 - RNA, 24 nt, Artificial Sequence
  Synthetic
aauuacagagggagcagccgucca

SEQ ID NO: 205524 - RNA, 18 nt, Artificial Sequence
  Synthetic
auggauauggaaggucca

SEQ ID NO: 205525 - RNA, 19 nt, Artificial Sequence
  Synthetic
gauggauauggaaggucca

SEQ ID NO: 205526 - RNA, 20 nt, Artificial Sequence
  Synthetic
ugauggauauggaaggucca

SEQ ID NO: 205527 - RNA, 21 nt, Artificial Sequence
  Synthetic
augauggauauggaaggucca

SEQ ID NO: 205528 - RNA, 22 nt, Artificial Sequence
  Synthetic
aaugauggauauggaaggucca

SEQ ID NO: 205529 - RNA, 23 nt, Artificial Sequence
  Synthetic
gaaugauggauauggaaggucca

SEQ ID NO: 205530 - RNA, 24 nt, Artificial Sequence
  Synthetic
agaaugauggauauggaaggucca

SEQ ID NO: 205531 - RNA, 18 nt, Artificial Sequence
  Synthetic
cacaaggcagcaggucca

SEQ ID NO: 205532 - RNA, 19 nt, Artificial Sequence
  Synthetic
ucacaaggcagcaggucca

SEQ ID NO: 205533 - RNA, 20 nt, Artificial Sequence
  Synthetic
cucacaaggcagcaggucca

SEQ ID NO: 205534 - RNA, 21 nt, Artificial Sequence
  Synthetic
ccucacaaggcagcaggucca

SEQ ID NO: 205535 - RNA, 22 nt, Artificial Sequence
  Synthetic
accucacaaggcagcaggucca

SEQ ID NO: 205536 - RNA, 23 nt, Artificial Sequence
  Synthetic
aaccucacaaggcagcaggucca

SEQ ID NO: 205537 - RNA, 24 nt, Artificial Sequence
  Synthetic
uaaccucacaaggcagcaggucca

SEQ ID NO: 205538 - RNA, 18 nt, Artificial Sequence
  Synthetic
ccugcacuagacggucca

SEQ ID NO: 205539 - RNA, 19 nt, Artificial Sequence
  Synthetic
gccugcacuagacggucca

SEQ ID NO: 205540 - RNA, 20 nt, Artificial Sequence
  Synthetic
agccugcacuagacggucca

SEQ ID NO: 205541 - RNA, 21 nt, Artificial Sequence
  Synthetic
aagccugcacuagacggucca

SEQ ID NO: 205542 - RNA, 22 nt, Artificial Sequence
  Synthetic
caagccugcacuagacggucca

SEQ ID NO: 205543 - RNA, 23 nt, Artificial Sequence
  Synthetic
ccaagccugcacuagacggucca

SEQ ID NO: 205544 - RNA, 24 nt, Artificial Sequence
  Synthetic
accaagccugcacuagacggucca

SEQ ID NO: 205545 - RNA, 18 nt, Artificial Sequence
  Synthetic
auccuccaacccggucca

SEQ ID NO: 205546 - RNA, 19 nt, Artificial Sequence
  Synthetic
cauccuccaacccggucca

SEQ ID NO: 205547 - RNA, 20 nt, Artificial Sequence
  Synthetic
ccauccuccaacccggucca

SEQ ID NO: 205548 - RNA, 21 nt, Artificial Sequence
  Synthetic
accauccuccaacccggucca

SEQ ID NO: 205549 - RNA, 22 nt, Artificial Sequence
  Synthetic
aaccauccuccaacccggucca

SEQ ID NO: 205550 - RNA, 23 nt, Artificial Sequence
  Synthetic
aaaccauccuccaacccggucca

SEQ ID NO: 205551 - RNA, 24 nt, Artificial Sequence
  Synthetic
gaaaccauccuccaacccggucca

SEQ ID NO: 205552 - RNA, 18 nt, Artificial Sequence
  Synthetic
uacacacaguggggucca

SEQ ID NO: 205553 - RNA, 19 nt, Artificial Sequence
  Synthetic
cuacacacaguggggucca

SEQ ID NO: 205554 - RNA, 20 nt, Artificial Sequence
  Synthetic
gcuacacacaguggggucca

SEQ ID NO: 205555 - RNA, 21 nt, Artificial Sequence
  Synthetic
ugcuacacacaguggggucca

SEQ ID NO: 205556 - RNA, 22 nt, Artificial Sequence
  Synthetic
uugcuacacacaguggggucca

SEQ ID NO: 205557 - RNA, 23 nt, Artificial Sequence
  Synthetic
uuugcuacacacaguggggucca

SEQ ID NO: 205558 - RNA, 24 nt, Artificial Sequence
  Synthetic
auuugcuacacacaguggggucca

SEQ ID NO: 205559 - RNA, 18 nt, Artificial Sequence
  Synthetic
auuugaaauuggggucca

SEQ ID NO: 205560 - RNA, 19 nt, Artificial Sequence
  Synthetic
uauuugaaauuggggucca

SEQ ID NO: 205561 - RNA, 20 nt, Artificial Sequence
  Synthetic
uuauuugaaauuggggucca

SEQ ID NO: 205562 - RNA, 21 nt, Artificial Sequence
  Synthetic
uuuauuugaaauuggggucca

SEQ ID NO: 205563 - RNA, 22 nt, Artificial Sequence
  Synthetic
uuuuauuugaaauuggggucca

SEQ ID NO: 205564 - RNA, 23 nt, Artificial Sequence
  Synthetic
cuuuuauuugaaauuggggucca

SEQ ID NO: 205565 - RNA, 24 nt, Artificial Sequence
  Synthetic
ucuuuuauuugaaauuggggucca

SEQ ID NO: 205566 - RNA, 18 nt, Artificial Sequence
  Synthetic
gacuagaccucuggucca

SEQ ID NO: 205567 - RNA, 19 nt, Artificial Sequence
  Synthetic
agacuagaccucuggucca

SEQ ID NO: 205568 - RNA, 20 nt, Artificial Sequence
  Synthetic
cagacuagaccucuggucca

SEQ ID NO: 205569 - RNA, 21 nt, Artificial Sequence
  Synthetic
ucagacuagaccucuggucca

SEQ ID NO: 205570 - RNA, 22 nt, Artificial Sequence
  Synthetic
uucagacuagaccucuggucca

SEQ ID NO: 205571 - RNA, 23 nt, Artificial Sequence
  Synthetic
cuucagacuagaccucuggucca

SEQ ID NO: 205572 - RNA, 24 nt, Artificial Sequence
  Synthetic
acuucagacuagaccucuggucca

SEQ ID NO: 205573 - RNA, 18 nt, Artificial Sequence
  Synthetic
caaauauguauuggucca

SEQ ID NO: 205574 - RNA, 19 nt, Artificial Sequence
  Synthetic
ccaaauauguauuggucca

SEQ ID NO: 205575 - RNA, 20 nt, Artificial Sequence
  Synthetic
accaaauauguauuggucca

SEQ ID NO: 205576 - RNA, 21 nt, Artificial Sequence
  Synthetic
aaccaaauauguauuggucca

SEQ ID NO: 205577 - RNA, 22 nt, Artificial Sequence
  Synthetic
uaaccaaauauguauuggucca

SEQ ID NO: 205578 - RNA, 23 nt, Artificial Sequence
  Synthetic
auaaccaaauauguauuggucca

SEQ ID NO: 205579 - RNA, 24 nt, Artificial Sequence
  Synthetic
uauaaccaaauauguauuggucca

SEQ ID NO: 205580 - RNA, 18 nt, Artificial Sequence
  Synthetic
ucaaaugugaaaugucca

SEQ ID NO: 205581 - RNA, 19 nt, Artificial Sequence
  Synthetic
cucaaaugugaaaugucca

SEQ ID NO: 205582 - RNA, 20 nt, Artificial Sequence
  Synthetic
ucucaaaugugaaaugucca

SEQ ID NO: 205583 - RNA, 21 nt, Artificial Sequence
  Synthetic
uucucaaaugugaaaugucca

SEQ ID NO: 205584 - RNA, 22 nt, Artificial Sequence
  Synthetic
uuucucaaaugugaaaugucca

SEQ ID NO: 205585 - RNA, 23 nt, Artificial Sequence
  Synthetic
uuuucucaaaugugaaaugucca

SEQ ID NO: 205586 - RNA, 24 nt, Artificial Sequence
  Synthetic
cuuuucucaaaugugaaaugucca

SEQ ID NO: 205587 - RNA, 18 nt, Artificial Sequence
  Synthetic
cacauacaugcaugucca

SEQ ID NO: 205588 - RNA, 19 nt, Artificial Sequence
  Synthetic
ccacauacaugcaugucca

SEQ ID NO: 205589 - RNA, 20 nt, Artificial Sequence
  Synthetic
uccacauacaugcaugucca

SEQ ID NO: 205590 - RNA, 21 nt, Artificial Sequence
  Synthetic
uuccacauacaugcaugucca

SEQ ID NO: 205591 - RNA, 22 nt, Artificial Sequence
  Synthetic
uuuccacauacaugcaugucca

SEQ ID NO: 205592 - RNA, 23 nt, Artificial Sequence
  Synthetic
guuuccacauacaugcaugucca

SEQ ID NO: 205593 - RNA, 24 nt, Artificial Sequence
  Synthetic
gguuuccacauacaugcaugucca

SEQ ID NO: 205594 - RNA, 18 nt, Artificial Sequence
  Synthetic
gugacuauuucaugucca

SEQ ID NO: 205595 - RNA, 19 nt, Artificial Sequence
  Synthetic
ggugacuauuucaugucca

SEQ ID NO: 205596 - RNA, 20 nt, Artificial Sequence
  Synthetic
aggugacuauuucaugucca

SEQ ID NO: 205597 - RNA, 21 nt, Artificial Sequence
  Synthetic
caggugacuauuucaugucca

SEQ ID NO: 205598 - RNA, 22 nt, Artificial Sequence
  Synthetic
ccaggugacuauuucaugucca

SEQ ID NO: 205599 - RNA, 23 nt, Artificial Sequence
  Synthetic
uccaggugacuauuucaugucca

SEQ ID NO: 205600 - RNA, 24 nt, Artificial Sequence
  Synthetic
uuccaggugacuauuucaugucca

SEQ ID NO: 205601 - RNA, 18 nt, Artificial Sequence
  Synthetic
aaucauucuagaugucca

SEQ ID NO: 205602 - RNA, 19 nt, Artificial Sequence
  Synthetic
aaaucauucuagaugucca

SEQ ID NO: 205603 - RNA, 20 nt, Artificial Sequence
  Synthetic
aaaaucauucuagaugucca

SEQ ID NO: 205604 - RNA, 21 nt, Artificial Sequence
  Synthetic
aaaaaucauucuagaugucca

SEQ ID NO: 205605 - RNA, 22 nt, Artificial Sequence
  Synthetic
gaaaaaucauucuagaugucca

SEQ ID NO: 205606 - RNA, 23 nt, Artificial Sequence
  Synthetic
agaaaaaucauucuagaugucca

SEQ ID NO: 205607 - RNA, 24 nt, Artificial Sequence
  Synthetic
aagaaaaaucauucuagaugucca

SEQ ID NO: 205608 - RNA, 18 nt, Artificial Sequence
  Synthetic
cccugaggaauaugucca

SEQ ID NO: 205609 - RNA, 19 nt, Artificial Sequence
  Synthetic
gcccugaggaauaugucca

SEQ ID NO: 205610 - RNA, 20 nt, Artificial Sequence
  Synthetic
agcccugaggaauaugucca

SEQ ID NO: 205611 - RNA, 21 nt, Artificial Sequence
  Synthetic
gagcccugaggaauaugucca

SEQ ID NO: 205612 - RNA, 22 nt, Artificial Sequence
  Synthetic
agagcccugaggaauaugucca

SEQ ID NO: 205613 - RNA, 23 nt, Artificial Sequence
  Synthetic
aagagcccugaggaauaugucca

SEQ ID NO: 205614 - RNA, 24 nt, Artificial Sequence
  Synthetic
caagagcccugaggaauaugucca

SEQ ID NO: 205615 - RNA, 18 nt, Artificial Sequence
  Synthetic
uggagaaugaggugucca

SEQ ID NO: 205616 - RNA, 19 nt, Artificial Sequence
  Synthetic
cuggagaaugaggugucca

SEQ ID NO: 205617 - RNA, 20 nt, Artificial Sequence
  Synthetic
ucuggagaaugaggugucca

SEQ ID NO: 205618 - RNA, 21 nt, Artificial Sequence
  Synthetic
cucuggagaaugaggugucca

SEQ ID NO: 205619 - RNA, 22 nt, Artificial Sequence
  Synthetic
gcucuggagaaugaggugucca

SEQ ID NO: 205620 - RNA, 23 nt, Artificial Sequence
  Synthetic
agcucuggagaaugaggugucca

SEQ ID NO: 205621 - RNA, 24 nt, Artificial Sequence
  Synthetic
aagcucuggagaaugaggugucca

SEQ ID NO: 205622 - RNA, 18 nt, Artificial Sequence
  Synthetic
caacuaauaaugugucca

SEQ ID NO: 205623 - RNA, 19 nt, Artificial Sequence
  Synthetic
acaacuaauaaugugucca

SEQ ID NO: 205624 - RNA, 20 nt, Artificial Sequence
  Synthetic
aacaacuaauaaugugucca

SEQ ID NO: 205625 - RNA, 21 nt, Artificial Sequence
  Synthetic
uaacaacuaauaaugugucca

SEQ ID NO: 205626 - RNA, 22 nt, Artificial Sequence
  Synthetic
auaacaacuaauaaugugucca

SEQ ID NO: 205627 - RNA, 23 nt, Artificial Sequence
  Synthetic
aauaacaacuaauaaugugucca

SEQ ID NO: 205628 - RNA, 24 nt, Artificial Sequence
  Synthetic
aaauaacaacuaauaaugugucca

SEQ ID NO: 205629 - RNA, 18 nt, Artificial Sequence
  Synthetic
auaugacuauugugucca

SEQ ID NO: 205630 - RNA, 19 nt, Artificial Sequence
  Synthetic
uauaugacuauugugucca

SEQ ID NO: 205631 - RNA, 20 nt, Artificial Sequence
  Synthetic
guauaugacuauugugucca

SEQ ID NO: 205632 - RNA, 21 nt, Artificial Sequence
  Synthetic
uguauaugacuauugugucca

SEQ ID NO: 205633 - RNA, 22 nt, Artificial Sequence
  Synthetic
auguauaugacuauugugucca

SEQ ID NO: 205634 - RNA, 23 nt, Artificial Sequence
  Synthetic
cauguauaugacuauugugucca

SEQ ID NO: 205635 - RNA, 24 nt, Artificial Sequence
  Synthetic
acauguauaugacuauugugucca

SEQ ID NO: 205636 - RNA, 18 nt, Artificial Sequence
  Synthetic
aaagaaauuuugugucca

SEQ ID NO: 205637 - RNA, 19 nt, Artificial Sequence
  Synthetic
gaaagaaauuuugugucca

SEQ ID NO: 205638 - RNA, 20 nt, Artificial Sequence
  Synthetic
agaaagaaauuuugugucca

SEQ ID NO: 205639 - RNA, 21 nt, Artificial Sequence
  Synthetic
cagaaagaaauuuugugucca

SEQ ID NO: 205640 - RNA, 22 nt, Artificial Sequence
  Synthetic
acagaaagaaauuuugugucca

SEQ ID NO: 205641 - RNA, 23 nt, Artificial Sequence
  Synthetic
uacagaaagaaauuuugugucca

SEQ ID NO: 205642 - RNA, 24 nt, Artificial Sequence
  Synthetic
auacagaaagaaauuuugugucca

SEQ ID NO: 205643 - RNA, 18 nt, Artificial Sequence
  Synthetic
cuaaacaauaauugucca

SEQ ID NO: 205644 - RNA, 19 nt, Artificial Sequence
  Synthetic
acuaaacaauaauugucca

SEQ ID NO: 205645 - RNA, 20 nt, Artificial Sequence
  Synthetic
cacuaaacaauaauugucca

SEQ ID NO: 205646 - RNA, 21 nt, Artificial Sequence
  Synthetic
ccacuaaacaauaauugucca

SEQ ID NO: 205647 - RNA, 22 nt, Artificial Sequence
  Synthetic
accacuaaacaauaauugucca

SEQ ID NO: 205648 - RNA, 23 nt, Artificial Sequence
  Synthetic
aaccacuaaacaauaauugucca

SEQ ID NO: 205649 - RNA, 24 nt, Artificial Sequence
  Synthetic
caaccacuaaacaauaauugucca

SEQ ID NO: 205650 - RNA, 18 nt, Artificial Sequence
  Synthetic
ccaugaaucuauugucca

SEQ ID NO: 205651 - RNA, 19 nt, Artificial Sequence
  Synthetic
cccaugaaucuauugucca

SEQ ID NO: 205652 - RNA, 20 nt, Artificial Sequence
  Synthetic
acccaugaaucuauugucca

SEQ ID NO: 205653 - RNA, 21 nt, Artificial Sequence
  Synthetic
uacccaugaaucuauugucca

SEQ ID NO: 205654 - RNA, 22 nt, Artificial Sequence
  Synthetic
cuacccaugaaucuauugucca

SEQ ID NO: 205655 - RNA, 23 nt, Artificial Sequence
  Synthetic
ccuacccaugaaucuauugucca

SEQ ID NO: 205656 - RNA, 24 nt, Artificial Sequence
  Synthetic
uccuacccaugaaucuauugucca

SEQ ID NO: 205657 - RNA, 18 nt, Artificial Sequence
  Synthetic
uuaaagugguguugucca

SEQ ID NO: 205658 - RNA, 19 nt, Artificial Sequence
  Synthetic
uuuaaagugguguugucca

SEQ ID NO: 205659 - RNA, 20 nt, Artificial Sequence
  Synthetic
guuuaaagugguguugucca

SEQ ID NO: 205660 - RNA, 21 nt, Artificial Sequence
  Synthetic
uguuuaaagugguguugucca

SEQ ID NO: 205661 - RNA, 22 nt, Artificial Sequence
  Synthetic
guguuuaaagugguguugucca

SEQ ID NO: 205662 - RNA, 23 nt, Artificial Sequence
  Synthetic
aguguuuaaagugguguugucca

SEQ ID NO: 205663 - RNA, 24 nt, Artificial Sequence
  Synthetic
gaguguuuaaagugguguugucca

SEQ ID NO: 205664 - RNA, 18 nt, Artificial Sequence
  Synthetic
uaaacuucaccaauucca

SEQ ID NO: 205665 - RNA, 19 nt, Artificial Sequence
  Synthetic
auaaacuucaccaauucca

SEQ ID NO: 205666 - RNA, 20 nt, Artificial Sequence
  Synthetic
aauaaacuucaccaauucca

SEQ ID NO: 205667 - RNA, 21 nt, Artificial Sequence
  Synthetic
aaauaaacuucaccaauucca

SEQ ID NO: 205668 - RNA, 22 nt, Artificial Sequence
  Synthetic
aaaauaaacuucaccaauucca

SEQ ID NO: 205669 - RNA, 23 nt, Artificial Sequence
  Synthetic
uaaaauaaacuucaccaauucca

SEQ ID NO: 205670 - RNA, 24 nt, Artificial Sequence
  Synthetic
guaaaauaaacuucaccaauucca

SEQ ID NO: 205671 - RNA, 18 nt, Artificial Sequence
  Synthetic
augaaguaacuaauucca

SEQ ID NO: 205672 - RNA, 19 nt, Artificial Sequence
  Synthetic
uaugaaguaacuaauucca

SEQ ID NO: 205673 - RNA, 20 nt, Artificial Sequence
  Synthetic
uuaugaaguaacuaauucca

SEQ ID NO: 205674 - RNA, 21 nt, Artificial Sequence
  Synthetic
cuuaugaaguaacuaauucca

SEQ ID NO: 205675 - RNA, 22 nt, Artificial Sequence
  Synthetic
ucuuaugaaguaacuaauucca

SEQ ID NO: 205676 - RNA, 23 nt, Artificial Sequence
  Synthetic
gucuuaugaaguaacuaauucca

SEQ ID NO: 205677 - RNA, 24 nt, Artificial Sequence
  Synthetic
ugucuuaugaaguaacuaauucca

SEQ ID NO: 205678 - RNA, 18 nt, Artificial Sequence
  Synthetic
aacacuaacgccauucca

SEQ ID NO: 205679 - RNA, 19 nt, Artificial Sequence
  Synthetic
aaacacuaacgccauucca

SEQ ID NO: 205680 - RNA, 20 nt, Artificial Sequence
  Synthetic
gaaacacuaacgccauucca

SEQ ID NO: 205681 - RNA, 21 nt, Artificial Sequence
  Synthetic
agaaacacuaacgccauucca

SEQ ID NO: 205682 - RNA, 22 nt, Artificial Sequence
  Synthetic
cagaaacacuaacgccauucca

SEQ ID NO: 205683 - RNA, 23 nt, Artificial Sequence
  Synthetic
acagaaacacuaacgccauucca

SEQ ID NO: 205684 - RNA, 24 nt, Artificial Sequence
  Synthetic
aacagaaacacuaacgccauucca

SEQ ID NO: 205685 - RNA, 18 nt, Artificial Sequence
  Synthetic
guagaaggugagauucca

SEQ ID NO: 205686 - RNA, 19 nt, Artificial Sequence
  Synthetic
uguagaaggugagauucca

SEQ ID NO: 205687 - RNA, 20 nt, Artificial Sequence
  Synthetic
cuguagaaggugagauucca

SEQ ID NO: 205688 - RNA, 21 nt, Artificial Sequence
  Synthetic
ccuguagaaggugagauucca

SEQ ID NO: 205689 - RNA, 22 nt, Artificial Sequence
  Synthetic
uccuguagaaggugagauucca

SEQ ID NO: 205690 - RNA, 23 nt, Artificial Sequence
  Synthetic
cuccuguagaaggugagauucca

SEQ ID NO: 205691 - RNA, 24 nt, Artificial Sequence
  Synthetic
ucuccuguagaaggugagauucca

SEQ ID NO: 205692 - RNA, 18 nt, Artificial Sequence
  Synthetic
gcaaggagugggauucca

SEQ ID NO: 205693 - RNA, 19 nt, Artificial Sequence
  Synthetic
agcaaggagugggauucca

SEQ ID NO: 205694 - RNA, 20 nt, Artificial Sequence
  Synthetic
cagcaaggagugggauucca

SEQ ID NO: 205695 - RNA, 21 nt, Artificial Sequence
  Synthetic
gcagcaaggagugggauucca

SEQ ID NO: 205696 - RNA, 22 nt, Artificial Sequence
  Synthetic
ugcagcaaggagugggauucca

SEQ ID NO: 205697 - RNA, 23 nt, Artificial Sequence
  Synthetic
gugcagcaaggagugggauucca

SEQ ID NO: 205698 - RNA, 24 nt, Artificial Sequence
  Synthetic
ugugcagcaaggagugggauucca

SEQ ID NO: 205699 - RNA, 18 nt, Artificial Sequence
  Synthetic
cuaccacagaugauucca

SEQ ID NO: 205700 - RNA, 19 nt, Artificial Sequence
  Synthetic
ucuaccacagaugauucca

SEQ ID NO: 205701 - RNA, 20 nt, Artificial Sequence
  Synthetic
cucuaccacagaugauucca

SEQ ID NO: 205702 - RNA, 21 nt, Artificial Sequence
  Synthetic
ucucuaccacagaugauucca

SEQ ID NO: 205703 - RNA, 22 nt, Artificial Sequence
  Synthetic
uucucuaccacagaugauucca

SEQ ID NO: 205704 - RNA, 23 nt, Artificial Sequence
  Synthetic
cuucucuaccacagaugauucca

SEQ ID NO: 205705 - RNA, 24 nt, Artificial Sequence
  Synthetic
gcuucucuaccacagaugauucca

SEQ ID NO: 205706 - RNA, 18 nt, Artificial Sequence
  Synthetic
gucuugaauuugauucca

SEQ ID NO: 205707 - RNA, 19 nt, Artificial Sequence
  Synthetic
ggucuugaauuugauucca

SEQ ID NO: 205708 - RNA, 20 nt, Artificial Sequence
  Synthetic
uggucuugaauuugauucca

SEQ ID NO: 205709 - RNA, 21 nt, Artificial Sequence
  Synthetic
uuggucuugaauuugauucca

SEQ ID NO: 205710 - RNA, 22 nt, Artificial Sequence
  Synthetic
cuuggucuugaauuugauucca

SEQ ID NO: 205711 - RNA, 23 nt, Artificial Sequence
  Synthetic
ccuuggucuugaauuugauucca

SEQ ID NO: 205712 - RNA, 24 nt, Artificial Sequence
  Synthetic
accuuggucuugaauuugauucca

SEQ ID NO: 205713 - RNA, 18 nt, Artificial Sequence
  Synthetic
uaauguauucauauucca

SEQ ID NO: 205714 - RNA, 19 nt, Artificial Sequence
  Synthetic
auaauguauucauauucca

SEQ ID NO: 205715 - RNA, 20 nt, Artificial Sequence
  Synthetic
uauaauguauucauauucca

SEQ ID NO: 205716 - RNA, 21 nt, Artificial Sequence
  Synthetic
auauaauguauucauauucca

SEQ ID NO: 205717 - RNA, 22 nt, Artificial Sequence
  Synthetic
uauauaauguauucauauucca

SEQ ID NO: 205718 - RNA, 23 nt, Artificial Sequence
  Synthetic
cuauauaauguauucauauucca

SEQ ID NO: 205719 - RNA, 24 nt, Artificial Sequence
  Synthetic
ucuauauaauguauucauauucca

SEQ ID NO: 205720 - RNA, 18 nt, Artificial Sequence
  Synthetic
aauuauaaugcuauucca

SEQ ID NO: 205721 - RNA, 19 nt, Artificial Sequence
  Synthetic
aaauuauaaugcuauucca

SEQ ID NO: 205722 - RNA, 20 nt, Artificial Sequence
  Synthetic
aaaauuauaaugcuauucca

SEQ ID NO: 205723 - RNA, 21 nt, Artificial Sequence
  Synthetic
uaaaauuauaaugcuauucca

SEQ ID NO: 205724 - RNA, 22 nt, Artificial Sequence
  Synthetic
uuaaaauuauaaugcuauucca

SEQ ID NO: 205725 - RNA, 23 nt, Artificial Sequence
  Synthetic
auuaaaauuauaaugcuauucca

SEQ ID NO: 205726 - RNA, 24 nt, Artificial Sequence
  Synthetic
uauuaaaauuauaaugcuauucca

SEQ ID NO: 205727 - RNA, 18 nt, Artificial Sequence
  Synthetic
ucacguucuuguauucca

SEQ ID NO: 205728 - RNA, 19 nt, Artificial Sequence
  Synthetic
uucacguucuuguauucca

SEQ ID NO: 205729 - RNA, 20 nt, Artificial Sequence
  Synthetic
guucacguucuuguauucca

SEQ ID NO: 205730 - RNA, 21 nt, Artificial Sequence
  Synthetic
uguucacguucuuguauucca

SEQ ID NO: 205731 - RNA, 22 nt, Artificial Sequence
  Synthetic
cuguucacguucuuguauucca

SEQ ID NO: 205732 - RNA, 23 nt, Artificial Sequence
  Synthetic
ucuguucacguucuuguauucca

SEQ ID NO: 205733 - RNA, 24 nt, Artificial Sequence
  Synthetic
cucuguucacguucuuguauucca

SEQ ID NO: 205734 - RNA, 18 nt, Artificial Sequence
  Synthetic
uauauauacauuauucca

SEQ ID NO: 205735 - RNA, 19 nt, Artificial Sequence
  Synthetic
auauauauacauuauucca

SEQ ID NO: 205736 - RNA, 20 nt, Artificial Sequence
  Synthetic
aauauauauacauuauucca

SEQ ID NO: 205737 - RNA, 21 nt, Artificial Sequence
  Synthetic
aaauauauauacauuauucca

SEQ ID NO: 205738 - RNA, 22 nt, Artificial Sequence
  Synthetic
gaaauauauauacauuauucca

SEQ ID NO: 205739 - RNA, 23 nt, Artificial Sequence
  Synthetic
agaaauauauauacauuauucca

SEQ ID NO: 205740 - RNA, 24 nt, Artificial Sequence
  Synthetic
gagaaauauauauacauuauucca

SEQ ID NO: 205741 - RNA, 18 nt, Artificial Sequence
  Synthetic
ucuggagaaaaacuucca

SEQ ID NO: 205742 - RNA, 19 nt, Artificial Sequence
  Synthetic
gucuggagaaaaacuucca

SEQ ID NO: 205743 - RNA, 20 nt, Artificial Sequence
  Synthetic
ggucuggagaaaaacuucca

SEQ ID NO: 205744 - RNA, 21 nt, Artificial Sequence
  Synthetic
aggucuggagaaaaacuucca

SEQ ID NO: 205745 - RNA, 22 nt, Artificial Sequence
  Synthetic
uaggucuggagaaaaacuucca

SEQ ID NO: 205746 - RNA, 23 nt, Artificial Sequence
  Synthetic
auaggucuggagaaaaacuucca

SEQ ID NO: 205747 - RNA, 24 nt, Artificial Sequence
  Synthetic
cauaggucuggagaaaaacuucca

SEQ ID NO: 205748 - RNA, 18 nt, Artificial Sequence
  Synthetic
uguuuugacaaacuucca

SEQ ID NO: 205749 - RNA, 19 nt, Artificial Sequence
  Synthetic
uuguuuugacaaacuucca

SEQ ID NO: 205750 - RNA, 20 nt, Artificial Sequence
  Synthetic
uuuguuuugacaaacuucca

SEQ ID NO: 205751 - RNA, 21 nt, Artificial Sequence
  Synthetic
uuuuguuuugacaaacuucca

SEQ ID NO: 205752 - RNA, 22 nt, Artificial Sequence
  Synthetic
guuuuguuuugacaaacuucca

SEQ ID NO: 205753 - RNA, 23 nt, Artificial Sequence
  Synthetic
gguuuuguuuugacaaacuucca

SEQ ID NO: 205754 - RNA, 24 nt, Artificial Sequence
  Synthetic
ggguuuuguuuugacaaacuucca

SEQ ID NO: 205755 - RNA, 18 nt, Artificial Sequence
  Synthetic
cacuugucugcacuucca

SEQ ID NO: 205756 - RNA, 19 nt, Artificial Sequence
  Synthetic
acacuugucugcacuucca

SEQ ID NO: 205757 - RNA, 20 nt, Artificial Sequence
  Synthetic
aacacuugucugcacuucca

SEQ ID NO: 205758 - RNA, 21 nt, Artificial Sequence
  Synthetic
aaacacuugucugcacuucca

SEQ ID NO: 205759 - RNA, 22 nt, Artificial Sequence
  Synthetic
aaaacacuugucugcacuucca

SEQ ID NO: 205760 - RNA, 23 nt, Artificial Sequence
  Synthetic
caaaacacuugucugcacuucca

SEQ ID NO: 205761 - RNA, 24 nt, Artificial Sequence
  Synthetic
acaaaacacuugucugcacuucca

SEQ ID NO: 205762 - RNA, 18 nt, Artificial Sequence
  Synthetic
ggagaaugguuacuucca

SEQ ID NO: 205763 - RNA, 19 nt, Artificial Sequence
  Synthetic
aggagaaugguuacuucca

SEQ ID NO: 205764 - RNA, 20 nt, Artificial Sequence
  Synthetic
caggagaaugguuacuucca

SEQ ID NO: 205765 - RNA, 21 nt, Artificial Sequence
  Synthetic
ucaggagaaugguuacuucca

SEQ ID NO: 205766 - RNA, 22 nt, Artificial Sequence
  Synthetic
uucaggagaaugguuacuucca

SEQ ID NO: 205767 - RNA, 23 nt, Artificial Sequence
  Synthetic
auucaggagaaugguuacuucca

SEQ ID NO: 205768 - RNA, 24 nt, Artificial Sequence
  Synthetic
aauucaggagaaugguuacuucca

SEQ ID NO: 205769 - RNA, 18 nt, Artificial Sequence
  Synthetic
acuaggcuaaaccuucca

SEQ ID NO: 205770 - RNA, 19 nt, Artificial Sequence
  Synthetic
gacuaggcuaaaccuucca

SEQ ID NO: 205771 - RNA, 20 nt, Artificial Sequence
  Synthetic
agacuaggcuaaaccuucca

SEQ ID NO: 205772 - RNA, 21 nt, Artificial Sequence
  Synthetic
aagacuaggcuaaaccuucca

SEQ ID NO: 205773 - RNA, 22 nt, Artificial Sequence
  Synthetic
gaagacuaggcuaaaccuucca

SEQ ID NO: 205774 - RNA, 23 nt, Artificial Sequence
  Synthetic
agaagacuaggcuaaaccuucca

SEQ ID NO: 205775 - RNA, 24 nt, Artificial Sequence
  Synthetic
cagaagacuaggcuaaaccuucca

SEQ ID NO: 205776 - RNA, 18 nt, Artificial Sequence
  Synthetic
aaucauuauuuccuucca

SEQ ID NO: 205777 - RNA, 19 nt, Artificial Sequence
  Synthetic
gaaucauuauuuccuucca

SEQ ID NO: 205778 - RNA, 20 nt, Artificial Sequence
  Synthetic
agaaucauuauuuccuucca

SEQ ID NO: 205779 - RNA, 21 nt, Artificial Sequence
  Synthetic
uagaaucauuauuuccuucca

SEQ ID NO: 205780 - RNA, 22 nt, Artificial Sequence
  Synthetic
auagaaucauuauuuccuucca

SEQ ID NO: 205781 - RNA, 23 nt, Artificial Sequence
  Synthetic
gauagaaucauuauuuccuucca

SEQ ID NO: 205782 - RNA, 24 nt, Artificial Sequence
  Synthetic
agauagaaucauuauuuccuucca

SEQ ID NO: 205783 - RNA, 18 nt, Artificial Sequence
  Synthetic
uucaguuaaaagcuucca

SEQ ID NO: 205784 - RNA, 19 nt, Artificial Sequence
  Synthetic
cuucaguuaaaagcuucca

SEQ ID NO: 205785 - RNA, 20 nt, Artificial Sequence
  Synthetic
acuucaguuaaaagcuucca

SEQ ID NO: 205786 - RNA, 21 nt, Artificial Sequence
  Synthetic
cacuucaguuaaaagcuucca

SEQ ID NO: 205787 - RNA, 22 nt, Artificial Sequence
  Synthetic
acacuucaguuaaaagcuucca

SEQ ID NO: 205788 - RNA, 23 nt, Artificial Sequence
  Synthetic
uacacuucaguuaaaagcuucca

SEQ ID NO: 205789 - RNA, 24 nt, Artificial Sequence
  Synthetic
uuacacuucaguuaaaagcuucca

SEQ ID NO: 205790 - RNA, 18 nt, Artificial Sequence
  Synthetic
gauaguuuaaagcuucca

SEQ ID NO: 205791 - RNA, 19 nt, Artificial Sequence
  Synthetic
ugauaguuuaaagcuucca

SEQ ID NO: 205792 - RNA, 20 nt, Artificial Sequence
  Synthetic
cugauaguuuaaagcuucca

SEQ ID NO: 205793 - RNA, 21 nt, Artificial Sequence
  Synthetic
acugauaguuuaaagcuucca

SEQ ID NO: 205794 - RNA, 22 nt, Artificial Sequence
  Synthetic
aacugauaguuuaaagcuucca

SEQ ID NO: 205795 - RNA, 23 nt, Artificial Sequence
  Synthetic
uaacugauaguuuaaagcuucca

SEQ ID NO: 205796 - RNA, 24 nt, Artificial Sequence
  Synthetic
uuaacugauaguuuaaagcuucca

SEQ ID NO: 205797 - RNA, 18 nt, Artificial Sequence
  Synthetic
ucugggaugaagcuucca

SEQ ID NO: 205798 - RNA, 19 nt, Artificial Sequence
  Synthetic
cucugggaugaagcuucca

SEQ ID NO: 205799 - RNA, 20 nt, Artificial Sequence
  Synthetic
ccucugggaugaagcuucca

SEQ ID NO: 205800 - RNA, 21 nt, Artificial Sequence
  Synthetic
cccucugggaugaagcuucca

SEQ ID NO: 205801 - RNA, 22 nt, Artificial Sequence
  Synthetic
ccccucugggaugaagcuucca

SEQ ID NO: 205802 - RNA, 23 nt, Artificial Sequence
  Synthetic
gccccucugggaugaagcuucca

SEQ ID NO: 205803 - RNA, 24 nt, Artificial Sequence
  Synthetic
ugccccucugggaugaagcuucca

SEQ ID NO: 205804 - RNA, 18 nt, Artificial Sequence
  Synthetic
uaagguggagagcuucca

SEQ ID NO: 205805 - RNA, 19 nt, Artificial Sequence
  Synthetic
uuaagguggagagcuucca

SEQ ID NO: 205806 - RNA, 20 nt, Artificial Sequence
  Synthetic
uuuaagguggagagcuucca

SEQ ID NO: 205807 - RNA, 21 nt, Artificial Sequence
  Synthetic
cuuuaagguggagagcuucca

SEQ ID NO: 205808 - RNA, 22 nt, Artificial Sequence
  Synthetic
acuuuaagguggagagcuucca

SEQ ID NO: 205809 - RNA, 23 nt, Artificial Sequence
  Synthetic
cacuuuaagguggagagcuucca

SEQ ID NO: 205810 - RNA, 24 nt, Artificial Sequence
  Synthetic
ccacuuuaagguggagagcuucca

SEQ ID NO: 205811 - RNA, 18 nt, Artificial Sequence
  Synthetic
uuccaaacauagcuucca

SEQ ID NO: 205812 - RNA, 19 nt, Artificial Sequence
  Synthetic
cuuccaaacauagcuucca

SEQ ID NO: 205813 - RNA, 20 nt, Artificial Sequence
  Synthetic
ccuuccaaacauagcuucca

SEQ ID NO: 205814 - RNA, 21 nt, Artificial Sequence
  Synthetic
gccuuccaaacauagcuucca

SEQ ID NO: 205815 - RNA, 22 nt, Artificial Sequence
  Synthetic
agccuuccaaacauagcuucca

SEQ ID NO: 205816 - RNA, 23 nt, Artificial Sequence
  Synthetic
cagccuuccaaacauagcuucca

SEQ ID NO: 205817 - RNA, 24 nt, Artificial Sequence
  Synthetic
ucagccuuccaaacauagcuucca

SEQ ID NO: 205818 - RNA, 18 nt, Artificial Sequence
  Synthetic
gguuuaggacugcuucca

SEQ ID NO: 205819 - RNA, 19 nt, Artificial Sequence
  Synthetic
ugguuuaggacugcuucca

SEQ ID NO: 205820 - RNA, 20 nt, Artificial Sequence
  Synthetic
uugguuuaggacugcuucca

SEQ ID NO: 205821 - RNA, 21 nt, Artificial Sequence
  Synthetic
auugguuuaggacugcuucca

SEQ ID NO: 205822 - RNA, 22 nt, Artificial Sequence
  Synthetic
cauugguuuaggacugcuucca

SEQ ID NO: 205823 - RNA, 23 nt, Artificial Sequence
  Synthetic
ucauugguuuaggacugcuucca

SEQ ID NO: 205824 - RNA, 24 nt, Artificial Sequence
  Synthetic
gucauugguuuaggacugcuucca

SEQ ID NO: 205825 - RNA, 18 nt, Artificial Sequence
  Synthetic
acugcuuaaacucuucca

SEQ ID NO: 205826 - RNA, 19 nt, Artificial Sequence
  Synthetic
aacugcuuaaacucuucca

SEQ ID NO: 205827 - RNA, 20 nt, Artificial Sequence
  Synthetic
aaacugcuuaaacucuucca

SEQ ID NO: 205828 - RNA, 21 nt, Artificial Sequence
  Synthetic
aaaacugcuuaaacucuucca

SEQ ID NO: 205829 - RNA, 22 nt, Artificial Sequence
  Synthetic
gaaaacugcuuaaacucuucca

SEQ ID NO: 205830 - RNA, 23 nt, Artificial Sequence
  Synthetic
ugaaaacugcuuaaacucuucca

SEQ ID NO: 205831 - RNA, 24 nt, Artificial Sequence
  Synthetic
augaaaacugcuuaaacucuucca

SEQ ID NO: 205832 - RNA, 18 nt, Artificial Sequence
  Synthetic
cuauagauaggucuucca

SEQ ID NO: 205833 - RNA, 19 nt, Artificial Sequence
  Synthetic
acuauagauaggucuucca

SEQ ID NO: 205834 - RNA, 20 nt, Artificial Sequence
  Synthetic
aacuauagauaggucuucca

SEQ ID NO: 205835 - RNA, 21 nt, Artificial Sequence
  Synthetic
uaacuauagauaggucuucca

SEQ ID NO: 205836 - RNA, 22 nt, Artificial Sequence
  Synthetic
uuaacuauagauaggucuucca

SEQ ID NO: 205837 - RNA, 23 nt, Artificial Sequence
  Synthetic
cuuaacuauagauaggucuucca

SEQ ID NO: 205838 - RNA, 24 nt, Artificial Sequence
  Synthetic
gcuuaacuauagauaggucuucca

SEQ ID NO: 205839 - RNA, 18 nt, Artificial Sequence
  Synthetic
aucuugucacuucuucca

SEQ ID NO: 205840 - RNA, 19 nt, Artificial Sequence
  Synthetic
aaucuugucacuucuucca

SEQ ID NO: 205841 - RNA, 20 nt, Artificial Sequence
  Synthetic
gaaucuugucacuucuucca

SEQ ID NO: 205842 - RNA, 21 nt, Artificial Sequence
  Synthetic
ugaaucuugucacuucuucca

SEQ ID NO: 205843 - RNA, 22 nt, Artificial Sequence
  Synthetic
augaaucuugucacuucuucca

SEQ ID NO: 205844 - RNA, 23 nt, Artificial Sequence
  Synthetic
uaugaaucuugucacuucuucca

SEQ ID NO: 205845 - RNA, 24 nt, Artificial Sequence
  Synthetic
uuaugaaucuugucacuucuucca

SEQ ID NO: 205846 - RNA, 18 nt, Artificial Sequence
  Synthetic
ucuugaauucuucuucca

SEQ ID NO: 205847 - RNA, 19 nt, Artificial Sequence
  Synthetic
aucuugaauucuucuucca

SEQ ID NO: 205848 - RNA, 20 nt, Artificial Sequence
  Synthetic
caucuugaauucuucuucca

SEQ ID NO: 205849 - RNA, 21 nt, Artificial Sequence
  Synthetic
ccaucuugaauucuucuucca

SEQ ID NO: 205850 - RNA, 22 nt, Artificial Sequence
  Synthetic
cccaucuugaauucuucuucca

SEQ ID NO: 205851 - RNA, 23 nt, Artificial Sequence
  Synthetic
acccaucuugaauucuucuucca

SEQ ID NO: 205852 - RNA, 24 nt, Artificial Sequence
  Synthetic
gacccaucuugaauucuucuucca

SEQ ID NO: 205853 - RNA, 18 nt, Artificial Sequence
  Synthetic
gaaaagguuguucuucca

SEQ ID NO: 205854 - RNA, 19 nt, Artificial Sequence
  Synthetic
ggaaaagguuguucuucca

SEQ ID NO: 205855 - RNA, 20 nt, Artificial Sequence
  Synthetic
aggaaaagguuguucuucca

SEQ ID NO: 205856 - RNA, 21 nt, Artificial Sequence
  Synthetic
gaggaaaagguuguucuucca

SEQ ID NO: 205857 - RNA, 22 nt, Artificial Sequence
  Synthetic
agaggaaaagguuguucuucca

SEQ ID NO: 205858 - RNA, 23 nt, Artificial Sequence
  Synthetic
gagaggaaaagguuguucuucca

SEQ ID NO: 205859 - RNA, 24 nt, Artificial Sequence
  Synthetic
ggagaggaaaagguuguucuucca

SEQ ID NO: 205860 - RNA, 18 nt, Artificial Sequence
  Synthetic
auaguuuuauaaguucca

SEQ ID NO: 205861 - RNA, 19 nt, Artificial Sequence
  Synthetic
cauaguuuuauaaguucca

SEQ ID NO: 205862 - RNA, 20 nt, Artificial Sequence
  Synthetic
ccauaguuuuauaaguucca

SEQ ID NO: 205863 - RNA, 21 nt, Artificial Sequence
  Synthetic
uccauaguuuuauaaguucca

SEQ ID NO: 205864 - RNA, 22 nt, Artificial Sequence
  Synthetic
guccauaguuuuauaaguucca

SEQ ID NO: 205865 - RNA, 23 nt, Artificial Sequence
  Synthetic
uguccauaguuuuauaaguucca

SEQ ID NO: 205866 - RNA, 24 nt, Artificial Sequence
  Synthetic
guguccauaguuuuauaaguucca

SEQ ID NO: 205867 - RNA, 18 nt, Artificial Sequence
  Synthetic
ccuguuagcgcaguucca

SEQ ID NO: 205868 - RNA, 19 nt, Artificial Sequence
  Synthetic
accuguuagcgcaguucca

SEQ ID NO: 205869 - RNA, 20 nt, Artificial Sequence
  Synthetic
aaccuguuagcgcaguucca

SEQ ID NO: 205870 - RNA, 21 nt, Artificial Sequence
  Synthetic
aaaccuguuagcgcaguucca

SEQ ID NO: 205871 - RNA, 22 nt, Artificial Sequence
  Synthetic
uaaaccuguuagcgcaguucca

SEQ ID NO: 205872 - RNA, 23 nt, Artificial Sequence
  Synthetic
uuaaaccuguuagcgcaguucca

SEQ ID NO: 205873 - RNA, 24 nt, Artificial Sequence
  Synthetic
uuuaaaccuguuagcgcaguucca

SEQ ID NO: 205874 - RNA, 18 nt, Artificial Sequence
  Synthetic
guaacucauucaguucca

SEQ ID NO: 205875 - RNA, 19 nt, Artificial Sequence
  Synthetic
aguaacucauucaguucca

SEQ ID NO: 205876 - RNA, 20 nt, Artificial Sequence
  Synthetic
caguaacucauucaguucca

SEQ ID NO: 205877 - RNA, 21 nt, Artificial Sequence
  Synthetic
acaguaacucauucaguucca

SEQ ID NO: 205878 - RNA, 22 nt, Artificial Sequence
  Synthetic
aacaguaacucauucaguucca

SEQ ID NO: 205879 - RNA, 23 nt, Artificial Sequence
  Synthetic
aaacaguaacucauucaguucca

SEQ ID NO: 205880 - RNA, 24 nt, Artificial Sequence
  Synthetic
gaaacaguaacucauucaguucca

SEQ ID NO: 205881 - RNA, 18 nt, Artificial Sequence
  Synthetic
agggaccagauaguucca

SEQ ID NO: 205882 - RNA, 19 nt, Artificial Sequence
  Synthetic
cagggaccagauaguucca

SEQ ID NO: 205883 - RNA, 20 nt, Artificial Sequence
  Synthetic
gcagggaccagauaguucca

SEQ ID NO: 205884 - RNA, 21 nt, Artificial Sequence
  Synthetic
agcagggaccagauaguucca

SEQ ID NO: 205885 - RNA, 22 nt, Artificial Sequence
  Synthetic
uagcagggaccagauaguucca

SEQ ID NO: 205886 - RNA, 23 nt, Artificial Sequence
  Synthetic
uuagcagggaccagauaguucca

SEQ ID NO: 205887 - RNA, 24 nt, Artificial Sequence
  Synthetic
cuuagcagggaccagauaguucca

SEQ ID NO: 205888 - RNA, 18 nt, Artificial Sequence
  Synthetic
ucacuacacaagguucca

SEQ ID NO: 205889 - RNA, 19 nt, Artificial Sequence
  Synthetic
uucacuacacaagguucca

SEQ ID NO: 205890 - RNA, 20 nt, Artificial Sequence
  Synthetic
auucacuacacaagguucca

SEQ ID NO: 205891 - RNA, 21 nt, Artificial Sequence
  Synthetic
gauucacuacacaagguucca

SEQ ID NO: 205892 - RNA, 22 nt, Artificial Sequence
  Synthetic
ugauucacuacacaagguucca

SEQ ID NO: 205893 - RNA, 23 nt, Artificial Sequence
  Synthetic
cugauucacuacacaagguucca

SEQ ID NO: 205894 - RNA, 24 nt, Artificial Sequence
  Synthetic
ucugauucacuacacaagguucca

SEQ ID NO: 205895 - RNA, 18 nt, Artificial Sequence
  Synthetic
ccuggaccagagguucca

SEQ ID NO: 205896 - RNA, 19 nt, Artificial Sequence
  Synthetic
uccuggaccagagguucca

SEQ ID NO: 205897 - RNA, 20 nt, Artificial Sequence
  Synthetic
auccuggaccagagguucca

SEQ ID NO: 205898 - RNA, 21 nt, Artificial Sequence
  Synthetic
aauccuggaccagagguucca

SEQ ID NO: 205899 - RNA, 22 nt, Artificial Sequence
  Synthetic
gaauccuggaccagagguucca

SEQ ID NO: 205900 - RNA, 23 nt, Artificial Sequence
  Synthetic
ugaauccuggaccagagguucca

SEQ ID NO: 205901 - RNA, 24 nt, Artificial Sequence
  Synthetic
uugaauccuggaccagagguucca

SEQ ID NO: 205902 - RNA, 18 nt, Artificial Sequence
  Synthetic
aacuaaaaacauguucca

SEQ ID NO: 205903 - RNA, 19 nt, Artificial Sequence
  Synthetic
uaacuaaaaacauguucca

SEQ ID NO: 205904 - RNA, 20 nt, Artificial Sequence
  Synthetic
guaacuaaaaacauguucca

SEQ ID NO: 205905 - RNA, 21 nt, Artificial Sequence
  Synthetic
gguaacuaaaaacauguucca

SEQ ID NO: 205906 - RNA, 22 nt, Artificial Sequence
  Synthetic
ugguaacuaaaaacauguucca

SEQ ID NO: 205907 - RNA, 23 nt, Artificial Sequence
  Synthetic
uugguaacuaaaaacauguucca

SEQ ID NO: 205908 - RNA, 24 nt, Artificial Sequence
  Synthetic
uuugguaacuaaaaacauguucca

SEQ ID NO: 205909 - RNA, 18 nt, Artificial Sequence
  Synthetic
uugaguggcacuguucca

SEQ ID NO: 205910 - RNA, 19 nt, Artificial Sequence
  Synthetic
auugaguggcacuguucca

SEQ ID NO: 205911 - RNA, 20 nt, Artificial Sequence
  Synthetic
cauugaguggcacuguucca

SEQ ID NO: 205912 - RNA, 21 nt, Artificial Sequence
  Synthetic
ccauugaguggcacuguucca

SEQ ID NO: 205913 - RNA, 22 nt, Artificial Sequence
  Synthetic
accauugaguggcacuguucca

SEQ ID NO: 205914 - RNA, 23 nt, Artificial Sequence
  Synthetic
aaccauugaguggcacuguucca

SEQ ID NO: 205915 - RNA, 24 nt, Artificial Sequence
  Synthetic
gaaccauugaguggcacuguucca

SEQ ID NO: 205916 - RNA, 18 nt, Artificial Sequence
  Synthetic
gaauuaugugguguucca

SEQ ID NO: 205917 - RNA, 19 nt, Artificial Sequence
  Synthetic
ggaauuaugugguguucca

SEQ ID NO: 205918 - RNA, 20 nt, Artificial Sequence
  Synthetic
aggaauuaugugguguucca

SEQ ID NO: 205919 - RNA, 21 nt, Artificial Sequence
  Synthetic
uaggaauuaugugguguucca

SEQ ID NO: 205920 - RNA, 22 nt, Artificial Sequence
  Synthetic
cuaggaauuaugugguguucca

SEQ ID NO: 205921 - RNA, 23 nt, Artificial Sequence
  Synthetic
gcuaggaauuaugugguguucca

SEQ ID NO: 205922 - RNA, 24 nt, Artificial Sequence
  Synthetic
ggcuaggaauuaugugguguucca

SEQ ID NO: 205923 - RNA, 18 nt, Artificial Sequence
  Synthetic
uauuuuauuaaauuucca

SEQ ID NO: 205924 - RNA, 19 nt, Artificial Sequence
  Synthetic
uuauuuuauuaaauuucca

SEQ ID NO: 205925 - RNA, 20 nt, Artificial Sequence
  Synthetic
auuauuuuauuaaauuucca

SEQ ID NO: 205926 - RNA, 21 nt, Artificial Sequence
  Synthetic
cauuauuuuauuaaauuucca

SEQ ID NO: 205927 - RNA, 22 nt, Artificial Sequence
  Synthetic
ucauuauuuuauuaaauuucca

SEQ ID NO: 205928 - RNA, 23 nt, Artificial Sequence
  Synthetic
aucauuauuuuauuaaauuucca

SEQ ID NO: 205929 - RNA, 24 nt, Artificial Sequence
  Synthetic
caucauuauuuuauuaaauuucca

SEQ ID NO: 205930 - RNA, 18 nt, Artificial Sequence
  Synthetic
aacauauuuaaauuucca

SEQ ID NO: 205931 - RNA, 19 nt, Artificial Sequence
  Synthetic
uaacauauuuaaauuucca

SEQ ID NO: 205932 - RNA, 20 nt, Artificial Sequence
  Synthetic
uuaacauauuuaaauuucca

SEQ ID NO: 205933 - RNA, 21 nt, Artificial Sequence
  Synthetic
guuaacauauuuaaauuucca

SEQ ID NO: 205934 - RNA, 22 nt, Artificial Sequence
  Synthetic
uguuaacauauuuaaauuucca

SEQ ID NO: 205935 - RNA, 23 nt, Artificial Sequence
  Synthetic
auguuaacauauuuaaauuucca

SEQ ID NO: 205936 - RNA, 24 nt, Artificial Sequence
  Synthetic
aauguuaacauauuuaaauuucca

SEQ ID NO: 205937 - RNA, 18 nt, Artificial Sequence
  Synthetic
agcugaaggcaauuucca

SEQ ID NO: 205938 - RNA, 19 nt, Artificial Sequence
  Synthetic
cagcugaaggcaauuucca

SEQ ID NO: 205939 - RNA, 20 nt, Artificial Sequence
  Synthetic
acagcugaaggcaauuucca

SEQ ID NO: 205940 - RNA, 21 nt, Artificial Sequence
  Synthetic
uacagcugaaggcaauuucca

SEQ ID NO: 205941 - RNA, 22 nt, Artificial Sequence
  Synthetic
cuacagcugaaggcaauuucca

SEQ ID NO: 205942 - RNA, 23 nt, Artificial Sequence
  Synthetic
ccuacagcugaaggcaauuucca

SEQ ID NO: 205943 - RNA, 24 nt, Artificial Sequence
  Synthetic
accuacagcugaaggcaauuucca

SEQ ID NO: 205944 - RNA, 18 nt, Artificial Sequence
  Synthetic
augaauaaaacauuucca

SEQ ID NO: 205945 - RNA, 19 nt, Artificial Sequence
  Synthetic
gaugaauaaaacauuucca

SEQ ID NO: 205946 - RNA, 20 nt, Artificial Sequence
  Synthetic
ugaugaauaaaacauuucca

SEQ ID NO: 205947 - RNA, 21 nt, Artificial Sequence
  Synthetic
cugaugaauaaaacauuucca

SEQ ID NO: 205948 - RNA, 22 nt, Artificial Sequence
  Synthetic
ucugaugaauaaaacauuucca

SEQ ID NO: 205949 - RNA, 23 nt, Artificial Sequence
  Synthetic
uucugaugaauaaaacauuucca

SEQ ID NO: 205950 - RNA, 24 nt, Artificial Sequence
  Synthetic
cuucugaugaauaaaacauuucca

SEQ ID NO: 205951 - RNA, 18 nt, Artificial Sequence
  Synthetic
cuaaguccuucauuucca

SEQ ID NO: 205952 - RNA, 19 nt, Artificial Sequence
  Synthetic
acuaaguccuucauuucca

SEQ ID NO: 205953 - RNA, 20 nt, Artificial Sequence
  Synthetic
aacuaaguccuucauuucca

SEQ ID NO: 205954 - RNA, 21 nt, Artificial Sequence
  Synthetic
gaacuaaguccuucauuucca

SEQ ID NO: 205955 - RNA, 22 nt, Artificial Sequence
  Synthetic
ggaacuaaguccuucauuucca

SEQ ID NO: 205956 - RNA, 23 nt, Artificial Sequence
  Synthetic
gggaacuaaguccuucauuucca

SEQ ID NO: 205957 - RNA, 24 nt, Artificial Sequence
  Synthetic
ggggaacuaaguccuucauuucca

SEQ ID NO: 205958 - RNA, 18 nt, Artificial Sequence
  Synthetic
ggaauuucuagauuucca

SEQ ID NO: 205959 - RNA, 19 nt, Artificial Sequence
  Synthetic
aggaauuucuagauuucca

SEQ ID NO: 205960 - RNA, 20 nt, Artificial Sequence
  Synthetic
uaggaauuucuagauuucca

SEQ ID NO: 205961 - RNA, 21 nt, Artificial Sequence
  Synthetic
uuaggaauuucuagauuucca

SEQ ID NO: 205962 - RNA, 22 nt, Artificial Sequence
  Synthetic
cuuaggaauuucuagauuucca

SEQ ID NO: 205963 - RNA, 23 nt, Artificial Sequence
  Synthetic
ccuuaggaauuucuagauuucca

SEQ ID NO: 205964 - RNA, 24 nt, Artificial Sequence
  Synthetic
gccuuaggaauuucuagauuucca

SEQ ID NO: 205965 - RNA, 18 nt, Artificial Sequence
  Synthetic
cuugaaguuguauuucca

SEQ ID NO: 205966 - RNA, 19 nt, Artificial Sequence
  Synthetic
ccuugaaguuguauuucca

SEQ ID NO: 205967 - RNA, 20 nt, Artificial Sequence
  Synthetic
uccuugaaguuguauuucca

SEQ ID NO: 205968 - RNA, 21 nt, Artificial Sequence
  Synthetic
auccuugaaguuguauuucca

SEQ ID NO: 205969 - RNA, 22 nt, Artificial Sequence
  Synthetic
aauccuugaaguuguauuucca

SEQ ID NO: 205970 - RNA, 23 nt, Artificial Sequence
  Synthetic
uaauccuugaaguuguauuucca

SEQ ID NO: 205971 - RNA, 24 nt, Artificial Sequence
  Synthetic
auaauccuugaaguuguauuucca

SEQ ID NO: 205972 - RNA, 18 nt, Artificial Sequence
  Synthetic
aaacuccaacacuuucca

SEQ ID NO: 205973 - RNA, 19 nt, Artificial Sequence
  Synthetic
uaaacuccaacacuuucca

SEQ ID NO: 205974 - RNA, 20 nt, Artificial Sequence
  Synthetic
auaaacuccaacacuuucca

SEQ ID NO: 205975 - RNA, 21 nt, Artificial Sequence
  Synthetic
aauaaacuccaacacuuucca

SEQ ID NO: 205976 - RNA, 22 nt, Artificial Sequence
  Synthetic
caauaaacuccaacacuuucca

SEQ ID NO: 205977 - RNA, 23 nt, Artificial Sequence
  Synthetic
gcaauaaacuccaacacuuucca

SEQ ID NO: 205978 - RNA, 24 nt, Artificial Sequence
  Synthetic
agcaauaaacuccaacacuuucca

SEQ ID NO: 205979 - RNA, 18 nt, Artificial Sequence
  Synthetic
auaaacuccaccuuucca

SEQ ID NO: 205980 - RNA, 19 nt, Artificial Sequence
  Synthetic
cauaaacuccaccuuucca

SEQ ID NO: 205981 - RNA, 20 nt, Artificial Sequence
  Synthetic
acauaaacuccaccuuucca

SEQ ID NO: 205982 - RNA, 21 nt, Artificial Sequence
  Synthetic
aacauaaacuccaccuuucca

SEQ ID NO: 205983 - RNA, 22 nt, Artificial Sequence
  Synthetic
gaacauaaacuccaccuuucca

SEQ ID NO: 205984 - RNA, 23 nt, Artificial Sequence
  Synthetic
agaacauaaacuccaccuuucca

SEQ ID NO: 205985 - RNA, 24 nt, Artificial Sequence
  Synthetic
gagaacauaaacuccaccuuucca

SEQ ID NO: 205986 - RNA, 18 nt, Artificial Sequence
  Synthetic
ugguuucaccccuuucca

SEQ ID NO: 205987 - RNA, 19 nt, Artificial Sequence
  Synthetic
augguuucaccccuuucca

SEQ ID NO: 205988 - RNA, 20 nt, Artificial Sequence
  Synthetic
caugguuucaccccuuucca

SEQ ID NO: 205989 - RNA, 21 nt, Artificial Sequence
  Synthetic
ucaugguuucaccccuuucca

SEQ ID NO: 205990 - RNA, 22 nt, Artificial Sequence
  Synthetic
cucaugguuucaccccuuucca

SEQ ID NO: 205991 - RNA, 23 nt, Artificial Sequence
  Synthetic
ccucaugguuucaccccuuucca

SEQ ID NO: 205992 - RNA, 24 nt, Artificial Sequence
  Synthetic
gccucaugguuucaccccuuucca

SEQ ID NO: 205993 - RNA, 18 nt, Artificial Sequence
  Synthetic
aguuuuuaguucuuucca

SEQ ID NO: 205994 - RNA, 19 nt, Artificial Sequence
  Synthetic
aaguuuuuaguucuuucca

SEQ ID NO: 205995 - RNA, 20 nt, Artificial Sequence
  Synthetic
aaaguuuuuaguucuuucca

SEQ ID NO: 205996 - RNA, 21 nt, Artificial Sequence
  Synthetic
aaaaguuuuuaguucuuucca

SEQ ID NO: 205997 - RNA, 22 nt, Artificial Sequence
  Synthetic
uaaaaguuuuuaguucuuucca

SEQ ID NO: 205998 - RNA, 23 nt, Artificial Sequence
  Synthetic
guaaaaguuuuuaguucuuucca

SEQ ID NO: 205999 - RNA, 24 nt, Artificial Sequence
  Synthetic
gguaaaaguuuuuaguucuuucca

SEQ ID NO: 206000 - RNA, 18 nt, Artificial Sequence
  Synthetic
ccccaugggugguuucca

SEQ ID NO: 206001 - RNA, 19 nt, Artificial Sequence
  Synthetic
accccaugggugguuucca

SEQ ID NO: 206002 - RNA, 20 nt, Artificial Sequence
  Synthetic
aaccccaugggugguuucca

SEQ ID NO: 206003 - RNA, 21 nt, Artificial Sequence
  Synthetic
aaaccccaugggugguuucca

SEQ ID NO: 206004 - RNA, 22 nt, Artificial Sequence
  Synthetic
gaaaccccaugggugguuucca

SEQ ID NO: 206005 - RNA, 23 nt, Artificial Sequence
  Synthetic
agaaaccccaugggugguuucca

SEQ ID NO: 206006 - RNA, 24 nt, Artificial Sequence
  Synthetic
gagaaaccccaugggugguuucca

SEQ ID NO: 206007 - RNA, 18 nt, Artificial Sequence
  Synthetic
ccuuuauugugguuucca

SEQ ID NO: 206008 - RNA, 19 nt, Artificial Sequence
  Synthetic
cccuuuauugugguuucca

SEQ ID NO: 206009 - RNA, 20 nt, Artificial Sequence
  Synthetic
acccuuuauugugguuucca

SEQ ID NO: 206010 - RNA, 21 nt, Artificial Sequence
  Synthetic
aacccuuuauugugguuucca

SEQ ID NO: 206011 - RNA, 22 nt, Artificial Sequence
  Synthetic
aaacccuuuauugugguuucca

SEQ ID NO: 206012 - RNA, 23 nt, Artificial Sequence
  Synthetic
caaacccuuuauugugguuucca

SEQ ID NO: 206013 - RNA, 24 nt, Artificial Sequence
  Synthetic
ccaaacccuuuauugugguuucca

SEQ ID NO: 206014 - RNA, 18 nt, Artificial Sequence
  Synthetic
aaagccucuugguuucca

SEQ ID NO: 206015 - RNA, 19 nt, Artificial Sequence
  Synthetic
gaaagccucuugguuucca

SEQ ID NO: 206016 - RNA, 20 nt, Artificial Sequence
  Synthetic
agaaagccucuugguuucca

SEQ ID NO: 206017 - RNA, 21 nt, Artificial Sequence
  Synthetic
aagaaagccucuugguuucca

SEQ ID NO: 206018 - RNA, 22 nt, Artificial Sequence
  Synthetic
uaagaaagccucuugguuucca

SEQ ID NO: 206019 - RNA, 23 nt, Artificial Sequence
  Synthetic
cuaagaaagccucuugguuucca

SEQ ID NO: 206020 - RNA, 24 nt, Artificial Sequence
  Synthetic
ucuaagaaagccucuugguuucca

SEQ ID NO: 206021 - RNA, 18 nt, Artificial Sequence
  Synthetic
accagucaaguguuucca

SEQ ID NO: 206022 - RNA, 19 nt, Artificial Sequence
  Synthetic
uaccagucaaguguuucca

SEQ ID NO: 206023 - RNA, 20 nt, Artificial Sequence
  Synthetic
uuaccagucaaguguuucca

SEQ ID NO: 206024 - RNA, 21 nt, Artificial Sequence
  Synthetic
cuuaccagucaaguguuucca

SEQ ID NO: 206025 - RNA, 22 nt, Artificial Sequence
  Synthetic
ccuuaccagucaaguguuucca

SEQ ID NO: 206026 - RNA, 23 nt, Artificial Sequence
  Synthetic
cccuuaccagucaaguguuucca

SEQ ID NO: 206027 - RNA, 24 nt, Artificial Sequence
  Synthetic
ucccuuaccagucaaguguuucca

SEQ ID NO: 206028 - RNA, 18 nt, Artificial Sequence
  Synthetic
uuaaaguuaguguuucca

SEQ ID NO: 206029 - RNA, 19 nt, Artificial Sequence
  Synthetic
cuuaaaguuaguguuucca

SEQ ID NO: 206030 - RNA, 20 nt, Artificial Sequence
  Synthetic
ucuuaaaguuaguguuucca

SEQ ID NO: 206031 - RNA, 21 nt, Artificial Sequence
  Synthetic
aucuuaaaguuaguguuucca

SEQ ID NO: 206032 - RNA, 22 nt, Artificial Sequence
  Synthetic
caucuuaaaguuaguguuucca

SEQ ID NO: 206033 - RNA, 23 nt, Artificial Sequence
  Synthetic
ucaucuuaaaguuaguguuucca

SEQ ID NO: 206034 - RNA, 24 nt, Artificial Sequence
  Synthetic
uucaucuuaaaguuaguguuucca

SEQ ID NO: 206035 - RNA, 18 nt, Artificial Sequence
  Synthetic
auuuuuuuauuguuucca

SEQ ID NO: 206036 - RNA, 19 nt, Artificial Sequence
  Synthetic
gauuuuuuuauuguuucca

SEQ ID NO: 206037 - RNA, 20 nt, Artificial Sequence
  Synthetic
ugauuuuuuuauuguuucca

SEQ ID NO: 206038 - RNA, 21 nt, Artificial Sequence
  Synthetic
cugauuuuuuuauuguuucca

SEQ ID NO: 206039 - RNA, 22 nt, Artificial Sequence
  Synthetic
ccugauuuuuuuauuguuucca

SEQ ID NO: 206040 - RNA, 23 nt, Artificial Sequence
  Synthetic
cccugauuuuuuuauuguuucca

SEQ ID NO: 206041 - RNA, 24 nt, Artificial Sequence
  Synthetic
gcccugauuuuuuuauuguuucca

SEQ ID NO: 206042 - RNA, 18 nt, Artificial Sequence
  Synthetic
uaaaucgauuauuuucca

SEQ ID NO: 206043 - RNA, 19 nt, Artificial Sequence
  Synthetic
auaaaucgauuauuuucca

SEQ ID NO: 206044 - RNA, 20 nt, Artificial Sequence
  Synthetic
aauaaaucgauuauuuucca

SEQ ID NO: 206045 - RNA, 21 nt, Artificial Sequence
  Synthetic
aaauaaaucgauuauuuucca

SEQ ID NO: 206046 - RNA, 22 nt, Artificial Sequence
  Synthetic
aaaauaaaucgauuauuuucca

SEQ ID NO: 206047 - RNA, 23 nt, Artificial Sequence
  Synthetic
uaaaauaaaucgauuauuuucca

SEQ ID NO: 206048 - RNA, 24 nt, Artificial Sequence
  Synthetic
auaaaauaaaucgauuauuuucca

SEQ ID NO: 206049 - RNA, 18 nt, Artificial Sequence
  Synthetic
uaccugaaucuuuuucca

SEQ ID NO: 206050 - RNA, 19 nt, Artificial Sequence
  Synthetic
uuaccugaaucuuuuucca

SEQ ID NO: 206051 - RNA, 20 nt, Artificial Sequence
  Synthetic
uuuaccugaaucuuuuucca

SEQ ID NO: 206052 - RNA, 21 nt, Artificial Sequence
  Synthetic
guuuaccugaaucuuuuucca

SEQ ID NO: 206053 - RNA, 22 nt, Artificial Sequence
  Synthetic
aguuuaccugaaucuuuuucca

SEQ ID NO: 206054 - RNA, 23 nt, Artificial Sequence
  Synthetic
aaguuuaccugaaucuuuuucca

SEQ ID NO: 206055 - RNA, 24 nt, Artificial Sequence
  Synthetic
aaaguuuaccugaaucuuuuucca

SEQ ID NO: 206056 - RNA, 18 nt, Artificial Sequence
  Synthetic
augaauccaaaaaaagca

SEQ ID NO: 206057 - RNA, 19 nt, Artificial Sequence
  Synthetic
gaugaauccaaaaaaagca

SEQ ID NO: 206058 - RNA, 20 nt, Artificial Sequence
  Synthetic
ugaugaauccaaaaaaagca

SEQ ID NO: 206059 - RNA, 21 nt, Artificial Sequence
  Synthetic
cugaugaauccaaaaaaagca

SEQ ID NO: 206060 - RNA, 22 nt, Artificial Sequence
  Synthetic
ucugaugaauccaaaaaaagca

SEQ ID NO: 206061 - RNA, 23 nt, Artificial Sequence
  Synthetic
aucugaugaauccaaaaaaagca

SEQ ID NO: 206062 - RNA, 24 nt, Artificial Sequence
  Synthetic
aaucugaugaauccaaaaaaagca

SEQ ID NO: 206063 - RNA, 18 nt, Artificial Sequence
  Synthetic
aaaaaaaagaaaaaagca

SEQ ID NO: 206064 - RNA, 19 nt, Artificial Sequence
  Synthetic
aaaaaaaaagaaaaaagca

SEQ ID NO: 206065 - RNA, 20 nt, Artificial Sequence
  Synthetic
aaaaaaaaaagaaaaaagca

SEQ ID NO: 206066 - RNA, 21 nt, Artificial Sequence
  Synthetic
gaaaaaaaaaagaaaaaagca

SEQ ID NO: 206067 - RNA, 22 nt, Artificial Sequence
  Synthetic
agaaaaaaaaaagaaaaaagca

SEQ ID NO: 206068 - RNA, 23 nt, Artificial Sequence
  Synthetic
aagaaaaaaaaaagaaaaaagca

SEQ ID NO: 206069 - RNA, 24 nt, Artificial Sequence
  Synthetic
aaagaaaaaaaaaagaaaaaagca

SEQ ID NO: 206070 - RNA, 18 nt, Artificial Sequence
  Synthetic
aagcacucauaaaaagca

SEQ ID NO: 206071 - RNA, 19 nt, Artificial Sequence
  Synthetic
uaagcacucauaaaaagca

SEQ ID NO: 206072 - RNA, 20 nt, Artificial Sequence
  Synthetic
auaagcacucauaaaaagca

SEQ ID NO: 206073 - RNA, 21 nt, Artificial Sequence
  Synthetic
uauaagcacucauaaaaagca

SEQ ID NO: 206074 - RNA, 22 nt, Artificial Sequence
  Synthetic
uuauaagcacucauaaaaagca

SEQ ID NO: 206075 - RNA, 23 nt, Artificial Sequence
  Synthetic
guuauaagcacucauaaaaagca

SEQ ID NO: 206076 - RNA, 24 nt, Artificial Sequence
  Synthetic
uguuauaagcacucauaaaaagca

SEQ ID NO: 206077 - RNA, 18 nt, Artificial Sequence
  Synthetic
uaugggugauaaaaagca

SEQ ID NO: 206078 - RNA, 19 nt, Artificial Sequence
  Synthetic
uuaugggugauaaaaagca

SEQ ID NO: 206079 - RNA, 20 nt, Artificial Sequence
  Synthetic
cuuaugggugauaaaaagca

SEQ ID NO: 206080 - RNA, 21 nt, Artificial Sequence
  Synthetic
acuuaugggugauaaaaagca

SEQ ID NO: 206081 - RNA, 22 nt, Artificial Sequence
  Synthetic
aacuuaugggugauaaaaagca

SEQ ID NO: 206082 - RNA, 23 nt, Artificial Sequence
  Synthetic
aaacuuaugggugauaaaaagca

SEQ ID NO: 206083 - RNA, 24 nt, Artificial Sequence
  Synthetic
caaacuuaugggugauaaaaagca

SEQ ID NO: 206084 - RNA, 18 nt, Artificial Sequence
  Synthetic
aacacaaguuaaaaagca

SEQ ID NO: 206085 - RNA, 19 nt, Artificial Sequence
  Synthetic
uaacacaaguuaaaaagca

SEQ ID NO: 206086 - RNA, 20 nt, Artificial Sequence
  Synthetic
cuaacacaaguuaaaaagca

SEQ ID NO: 206087 - RNA, 21 nt, Artificial Sequence
  Synthetic
ccuaacacaaguuaaaaagca

SEQ ID NO: 206088 - RNA, 22 nt, Artificial Sequence
  Synthetic
gccuaacacaaguuaaaaagca

SEQ ID NO: 206089 - RNA, 23 nt, Artificial Sequence
  Synthetic
ugccuaacacaaguuaaaaagca

SEQ ID NO: 206090 - RNA, 24 nt, Artificial Sequence
  Synthetic
uugccuaacacaaguuaaaaagca

SEQ ID NO: 206091 - RNA, 18 nt, Artificial Sequence
  Synthetic
uauaaauagccaaaagca

SEQ ID NO: 206092 - RNA, 19 nt, Artificial Sequence
  Synthetic
guauaaauagccaaaagca

SEQ ID NO: 206093 - RNA, 20 nt, Artificial Sequence
  Synthetic
aguauaaauagccaaaagca

SEQ ID NO: 206094 - RNA, 21 nt, Artificial Sequence
  Synthetic
caguauaaauagccaaaagca

SEQ ID NO: 206095 - RNA, 22 nt, Artificial Sequence
  Synthetic
gcaguauaaauagccaaaagca

SEQ ID NO: 206096 - RNA, 23 nt, Artificial Sequence
  Synthetic
agcaguauaaauagccaaaagca

SEQ ID NO: 206097 - RNA, 24 nt, Artificial Sequence
  Synthetic
aagcaguauaaauagccaaaagca

SEQ ID NO: 206098 - RNA, 18 nt, Artificial Sequence
  Synthetic
caaauuugugcaaaagca

SEQ ID NO: 206099 - RNA, 19 nt, Artificial Sequence
  Synthetic
acaaauuugugcaaaagca

SEQ ID NO: 206100 - RNA, 20 nt, Artificial Sequence
  Synthetic
aacaaauuugugcaaaagca

SEQ ID NO: 206101 - RNA, 21 nt, Artificial Sequence
  Synthetic
aaacaaauuugugcaaaagca

SEQ ID NO: 206102 - RNA, 22 nt, Artificial Sequence
  Synthetic
uaaacaaauuugugcaaaagca

SEQ ID NO: 206103 - RNA, 23 nt, Artificial Sequence
  Synthetic
auaaacaaauuugugcaaaagca

SEQ ID NO: 206104 - RNA, 24 nt, Artificial Sequence
  Synthetic
aauaaacaaauuugugcaaaagca

SEQ ID NO: 206105 - RNA, 18 nt, Artificial Sequence
  Synthetic
guacaaaauucaaaagca

SEQ ID NO: 206106 - RNA, 19 nt, Artificial Sequence
  Synthetic
aguacaaaauucaaaagca

SEQ ID NO: 206107 - RNA, 20 nt, Artificial Sequence
  Synthetic
caguacaaaauucaaaagca

SEQ ID NO: 206108 - RNA, 21 nt, Artificial Sequence
  Synthetic
ccaguacaaaauucaaaagca

SEQ ID NO: 206109 - RNA, 22 nt, Artificial Sequence
  Synthetic
uccaguacaaaauucaaaagca

SEQ ID NO: 206110 - RNA, 23 nt, Artificial Sequence
  Synthetic
uuccaguacaaaauucaaaagca

SEQ ID NO: 206111 - RNA, 24 nt, Artificial Sequence
  Synthetic
cuuccaguacaaaauucaaaagca

SEQ ID NO: 206112 - RNA, 18 nt, Artificial Sequence
  Synthetic
ccuuaaaacugaaaagca

SEQ ID NO: 206113 - RNA, 19 nt, Artificial Sequence
  Synthetic
accuuaaaacugaaaagca

SEQ ID NO: 206114 - RNA, 20 nt, Artificial Sequence
  Synthetic
uaccuuaaaacugaaaagca

SEQ ID NO: 206115 - RNA, 21 nt, Artificial Sequence
  Synthetic
auaccuuaaaacugaaaagca

SEQ ID NO: 206116 - RNA, 22 nt, Artificial Sequence
  Synthetic
aauaccuuaaaacugaaaagca

SEQ ID NO: 206117 - RNA, 23 nt, Artificial Sequence
  Synthetic
gaauaccuuaaaacugaaaagca

SEQ ID NO: 206118 - RNA, 24 nt, Artificial Sequence
  Synthetic
ugaauaccuuaaaacugaaaagca

SEQ ID NO: 206119 - RNA, 18 nt, Artificial Sequence
  Synthetic
ugugaagguugaaaagca

SEQ ID NO: 206120 - RNA, 19 nt, Artificial Sequence
  Synthetic
gugugaagguugaaaagca

SEQ ID NO: 206121 - RNA, 20 nt, Artificial Sequence
  Synthetic
agugugaagguugaaaagca

SEQ ID NO: 206122 - RNA, 21 nt, Artificial Sequence
  Synthetic
aagugugaagguugaaaagca

SEQ ID NO: 206123 - RNA, 22 nt, Artificial Sequence
  Synthetic
gaagugugaagguugaaaagca

SEQ ID NO: 206124 - RNA, 23 nt, Artificial Sequence
  Synthetic
ggaagugugaagguugaaaagca

SEQ ID NO: 206125 - RNA, 24 nt, Artificial Sequence
  Synthetic
cggaagugugaagguugaaaagca

SEQ ID NO: 206126 - RNA, 18 nt, Artificial Sequence
  Synthetic
ucuggcacuauaaaagca

SEQ ID NO: 206127 - RNA, 19 nt, Artificial Sequence
  Synthetic
gucuggcacuauaaaagca

SEQ ID NO: 206128 - RNA, 20 nt, Artificial Sequence
  Synthetic
ugucuggcacuauaaaagca

SEQ ID NO: 206129 - RNA, 21 nt, Artificial Sequence
  Synthetic
gugucuggcacuauaaaagca

SEQ ID NO: 206130 - RNA, 22 nt, Artificial Sequence
  Synthetic
ugugucuggcacuauaaaagca

SEQ ID NO: 206131 - RNA, 23 nt, Artificial Sequence
  Synthetic
augugucuggcacuauaaaagca

SEQ ID NO: 206132 - RNA, 24 nt, Artificial Sequence
  Synthetic
gaugugucuggcacuauaaaagca

SEQ ID NO: 206133 - RNA, 18 nt, Artificial Sequence
  Synthetic
agauuggguuuaaaagca

SEQ ID NO: 206134 - RNA, 19 nt, Artificial Sequence
  Synthetic
uagauuggguuuaaaagca

SEQ ID NO: 206135 - RNA, 20 nt, Artificial Sequence
  Synthetic
guagauuggguuuaaaagca

SEQ ID NO: 206136 - RNA, 21 nt, Artificial Sequence
  Synthetic
uguagauuggguuuaaaagca

SEQ ID NO: 206137 - RNA, 22 nt, Artificial Sequence
  Synthetic
uuguagauuggguuuaaaagca

SEQ ID NO: 206138 - RNA, 23 nt, Artificial Sequence
  Synthetic
auuguagauuggguuuaaaagca

SEQ ID NO: 206139 - RNA, 24 nt, Artificial Sequence
  Synthetic
aauuguagauuggguuuaaaagca

SEQ ID NO: 206140 - RNA, 18 nt, Artificial Sequence
  Synthetic
aaucaaugccacaaagca

SEQ ID NO: 206141 - RNA, 19 nt, Artificial Sequence
  Synthetic
aaaucaaugccacaaagca

SEQ ID NO: 206142 - RNA, 20 nt, Artificial Sequence
  Synthetic
caaaucaaugccacaaagca

SEQ ID NO: 206143 - RNA, 21 nt, Artificial Sequence
  Synthetic
ucaaaucaaugccacaaagca

SEQ ID NO: 206144 - RNA, 22 nt, Artificial Sequence
  Synthetic
aucaaaucaaugccacaaagca

SEQ ID NO: 206145 - RNA, 23 nt, Artificial Sequence
  Synthetic
uaucaaaucaaugccacaaagca

SEQ ID NO: 206146 - RNA, 24 nt, Artificial Sequence
  Synthetic
uuaucaaaucaaugccacaaagca

SEQ ID NO: 206147 - RNA, 18 nt, Artificial Sequence
  Synthetic
uuugagcaucacaaagca

SEQ ID NO: 206148 - RNA, 19 nt, Artificial Sequence
  Synthetic
uuuugagcaucacaaagca

SEQ ID NO: 206149 - RNA, 20 nt, Artificial Sequence
  Synthetic
auuuugagcaucacaaagca

SEQ ID NO: 206150 - RNA, 21 nt, Artificial Sequence
  Synthetic
uauuuugagcaucacaaagca

SEQ ID NO: 206151 - RNA, 22 nt, Artificial Sequence
  Synthetic
guauuuugagcaucacaaagca

SEQ ID NO: 206152 - RNA, 23 nt, Artificial Sequence
  Synthetic
aguauuuugagcaucacaaagca

SEQ ID NO: 206153 - RNA, 24 nt, Artificial Sequence
  Synthetic
uaguauuuugagcaucacaaagca

SEQ ID NO: 206154 - RNA, 18 nt, Artificial Sequence
  Synthetic
gaucaaaacuacaaagca

SEQ ID NO: 206155 - RNA, 19 nt, Artificial Sequence
  Synthetic
agaucaaaacuacaaagca

SEQ ID NO: 206156 - RNA, 20 nt, Artificial Sequence
  Synthetic
aagaucaaaacuacaaagca

SEQ ID NO: 206157 - RNA, 21 nt, Artificial Sequence
  Synthetic
caagaucaaaacuacaaagca

SEQ ID NO: 206158 - RNA, 22 nt, Artificial Sequence
  Synthetic
ccaagaucaaaacuacaaagca

SEQ ID NO: 206159 - RNA, 23 nt, Artificial Sequence
  Synthetic
gccaagaucaaaacuacaaagca

SEQ ID NO: 206160 - RNA, 24 nt, Artificial Sequence
  Synthetic
ugccaagaucaaaacuacaaagca

SEQ ID NO: 206161 - RNA, 18 nt, Artificial Sequence
  Synthetic
ccucagcuucccaaagca

SEQ ID NO: 206162 - RNA, 19 nt, Artificial Sequence
  Synthetic
uccucagcuucccaaagca

SEQ ID NO: 206163 - RNA, 20 nt, Artificial Sequence
  Synthetic
cuccucagcuucccaaagca

SEQ ID NO: 206164 - RNA, 21 nt, Artificial Sequence
  Synthetic
ccuccucagcuucccaaagca

SEQ ID NO: 206165 - RNA, 22 nt, Artificial Sequence
  Synthetic
cccuccucagcuucccaaagca

SEQ ID NO: 206166 - RNA, 23 nt, Artificial Sequence
  Synthetic
acccuccucagcuucccaaagca

SEQ ID NO: 206167 - RNA, 24 nt, Artificial Sequence
  Synthetic
cacccuccucagcuucccaaagca

SEQ ID NO: 206168 - RNA, 18 nt, Artificial Sequence
  Synthetic
ugucucuuuugcaaagca

SEQ ID NO: 206169 - RNA, 19 nt, Artificial Sequence
  Synthetic
cugucucuuuugcaaagca

SEQ ID NO: 206170 - RNA, 20 nt, Artificial Sequence
  Synthetic
ucugucucuuuugcaaagca

SEQ ID NO: 206171 - RNA, 21 nt, Artificial Sequence
  Synthetic
aucugucucuuuugcaaagca

SEQ ID NO: 206172 - RNA, 22 nt, Artificial Sequence
  Synthetic
uaucugucucuuuugcaaagca

SEQ ID NO: 206173 - RNA, 23 nt, Artificial Sequence
  Synthetic
cuaucugucucuuuugcaaagca

SEQ ID NO: 206174 - RNA, 24 nt, Artificial Sequence
  Synthetic
acuaucugucucuuuugcaaagca

SEQ ID NO: 206175 - RNA, 18 nt, Artificial Sequence
  Synthetic
acacauaggcucaaagca

SEQ ID NO: 206176 - RNA, 19 nt, Artificial Sequence
  Synthetic
cacacauaggcucaaagca

SEQ ID NO: 206177 - RNA, 20 nt, Artificial Sequence
  Synthetic
acacacauaggcucaaagca

SEQ ID NO: 206178 - RNA, 21 nt, Artificial Sequence
  Synthetic
cacacacauaggcucaaagca

SEQ ID NO: 206179 - RNA, 22 nt, Artificial Sequence
  Synthetic
acacacacauaggcucaaagca

SEQ ID NO: 206180 - RNA, 23 nt, Artificial Sequence
  Synthetic
aacacacacauaggcucaaagca

SEQ ID NO: 206181 - RNA, 24 nt, Artificial Sequence
  Synthetic
aaacacacacauaggcucaaagca

SEQ ID NO: 206182 - RNA, 18 nt, Artificial Sequence
  Synthetic
agagcaagaaagaaagca

SEQ ID NO: 206183 - RNA, 19 nt, Artificial Sequence
  Synthetic
aagagcaagaaagaaagca

SEQ ID NO: 206184 - RNA, 20 nt, Artificial Sequence
  Synthetic
caagagcaagaaagaaagca

SEQ ID NO: 206185 - RNA, 21 nt, Artificial Sequence
  Synthetic
gcaagagcaagaaagaaagca

SEQ ID NO: 206186 - RNA, 22 nt, Artificial Sequence
  Synthetic
agcaagagcaagaaagaaagca

SEQ ID NO: 206187 - RNA, 23 nt, Artificial Sequence
  Synthetic
gagcaagagcaagaaagaaagca

SEQ ID NO: 206188 - RNA, 24 nt, Artificial Sequence
  Synthetic
agagcaagagcaagaaagaaagca

SEQ ID NO: 206189 - RNA, 18 nt, Artificial Sequence
  Synthetic
guggaagccaagaaagca

SEQ ID NO: 206190 - RNA, 19 nt, Artificial Sequence
  Synthetic
aguggaagccaagaaagca

SEQ ID NO: 206191 - RNA, 20 nt, Artificial Sequence
  Synthetic
gaguggaagccaagaaagca

SEQ ID NO: 206192 - RNA, 21 nt, Artificial Sequence
  Synthetic
agaguggaagccaagaaagca

SEQ ID NO: 206193 - RNA, 22 nt, Artificial Sequence
  Synthetic
aagaguggaagccaagaaagca

SEQ ID NO: 206194 - RNA, 23 nt, Artificial Sequence
  Synthetic
aaagaguggaagccaagaaagca

SEQ ID NO: 206195 - RNA, 24 nt, Artificial Sequence
  Synthetic
aaaagaguggaagccaagaaagca

SEQ ID NO: 206196 - RNA, 18 nt, Artificial Sequence
  Synthetic
uuucacauggcgaaagca

SEQ ID NO: 206197 - RNA, 19 nt, Artificial Sequence
  Synthetic
auuucacauggcgaaagca

SEQ ID NO: 206198 - RNA, 20 nt, Artificial Sequence
  Synthetic
cauuucacauggcgaaagca

SEQ ID NO: 206199 - RNA, 21 nt, Artificial Sequence
  Synthetic
gcauuucacauggcgaaagca

SEQ ID NO: 206200 - RNA, 22 nt, Artificial Sequence
  Synthetic
ggcauuucacauggcgaaagca

SEQ ID NO: 206201 - RNA, 23 nt, Artificial Sequence
  Synthetic
aggcauuucacauggcgaaagca

SEQ ID NO: 206202 - RNA, 24 nt, Artificial Sequence
  Synthetic
uaggcauuucacauggcgaaagca

SEQ ID NO: 206203 - RNA, 18 nt, Artificial Sequence
  Synthetic
uaaucaugguggaaagca

SEQ ID NO: 206204 - RNA, 19 nt, Artificial Sequence
  Synthetic
auaaucaugguggaaagca

SEQ ID NO: 206205 - RNA, 20 nt, Artificial Sequence
  Synthetic
uauaaucaugguggaaagca

SEQ ID NO: 206206 - RNA, 21 nt, Artificial Sequence
  Synthetic
uuauaaucaugguggaaagca

SEQ ID NO: 206207 - RNA, 22 nt, Artificial Sequence
  Synthetic
cuuauaaucaugguggaaagca

SEQ ID NO: 206208 - RNA, 23 nt, Artificial Sequence
  Synthetic
acuuauaaucaugguggaaagca

SEQ ID NO: 206209 - RNA, 24 nt, Artificial Sequence
  Synthetic
aacuuauaaucaugguggaaagca

SEQ ID NO: 206210 - RNA, 18 nt, Artificial Sequence
  Synthetic
agguagaaaaugaaagca

SEQ ID NO: 206211 - RNA, 19 nt, Artificial Sequence
  Synthetic
cagguagaaaaugaaagca

SEQ ID NO: 206212 - RNA, 20 nt, Artificial Sequence
  Synthetic
acagguagaaaaugaaagca

SEQ ID NO: 206213 - RNA, 21 nt, Artificial Sequence
  Synthetic
aacagguagaaaaugaaagca

SEQ ID NO: 206214 - RNA, 22 nt, Artificial Sequence
  Synthetic
caacagguagaaaaugaaagca

SEQ ID NO: 206215 - RNA, 23 nt, Artificial Sequence
  Synthetic
ccaacagguagaaaaugaaagca

SEQ ID NO: 206216 - RNA, 24 nt, Artificial Sequence
  Synthetic
accaacagguagaaaaugaaagca

SEQ ID NO: 206217 - RNA, 18 nt, Artificial Sequence
  Synthetic
aaaugaagaaugaaagca

SEQ ID NO: 206218 - RNA, 19 nt, Artificial Sequence
  Synthetic
aaaaugaagaaugaaagca

SEQ ID NO: 206219 - RNA, 20 nt, Artificial Sequence
  Synthetic
caaaaugaagaaugaaagca

SEQ ID NO: 206220 - RNA, 21 nt, Artificial Sequence
  Synthetic
ccaaaaugaagaaugaaagca

SEQ ID NO: 206221 - RNA, 22 nt, Artificial Sequence
  Synthetic
cccaaaaugaagaaugaaagca

SEQ ID NO: 206222 - RNA, 23 nt, Artificial Sequence
  Synthetic
ucccaaaaugaagaaugaaagca

SEQ ID NO: 206223 - RNA, 24 nt, Artificial Sequence
  Synthetic
gucccaaaaugaagaaugaaagca

SEQ ID NO: 206224 - RNA, 18 nt, Artificial Sequence
  Synthetic
gcuuugccuuugaaagca

SEQ ID NO: 206225 - RNA, 19 nt, Artificial Sequence
  Synthetic
agcuuugccuuugaaagca

SEQ ID NO: 206226 - RNA, 20 nt, Artificial Sequence
  Synthetic
gagcuuugccuuugaaagca

SEQ ID NO: 206227 - RNA, 21 nt, Artificial Sequence
  Synthetic
agagcuuugccuuugaaagca

SEQ ID NO: 206228 - RNA, 22 nt, Artificial Sequence
  Synthetic
cagagcuuugccuuugaaagca

SEQ ID NO: 206229 - RNA, 23 nt, Artificial Sequence
  Synthetic
ucagagcuuugccuuugaaagca

SEQ ID NO: 206230 - RNA, 24 nt, Artificial Sequence
  Synthetic
aucagagcuuugccuuugaaagca

SEQ ID NO: 206231 - RNA, 18 nt, Artificial Sequence
  Synthetic
cugcuugaaaauaaagca

SEQ ID NO: 206232 - RNA, 19 nt, Artificial Sequence
  Synthetic
ucugcuugaaaauaaagca

SEQ ID NO: 206233 - RNA, 20 nt, Artificial Sequence
  Synthetic
uucugcuugaaaauaaagca

SEQ ID NO: 206234 - RNA, 21 nt, Artificial Sequence
  Synthetic
uuucugcuugaaaauaaagca

SEQ ID NO: 206235 - RNA, 22 nt, Artificial Sequence
  Synthetic
uuuucugcuugaaaauaaagca

SEQ ID NO: 206236 - RNA, 23 nt, Artificial Sequence
  Synthetic
guuuucugcuugaaaauaaagca

SEQ ID NO: 206237 - RNA, 24 nt, Artificial Sequence
  Synthetic
uguuuucugcuugaaaauaaagca

SEQ ID NO: 206238 - RNA, 18 nt, Artificial Sequence
  Synthetic
agacacuacaauaaagca

SEQ ID NO: 206239 - RNA, 19 nt, Artificial Sequence
  Synthetic
cagacacuacaauaaagca

SEQ ID NO: 206240 - RNA, 20 nt, Artificial Sequence
  Synthetic
ccagacacuacaauaaagca

SEQ ID NO: 206241 - RNA, 21 nt, Artificial Sequence
  Synthetic
uccagacacuacaauaaagca

SEQ ID NO: 206242 - RNA, 22 nt, Artificial Sequence
  Synthetic
uuccagacacuacaauaaagca

SEQ ID NO: 206243 - RNA, 23 nt, Artificial Sequence
  Synthetic
guuccagacacuacaauaaagca

SEQ ID NO: 206244 - RNA, 24 nt, Artificial Sequence
  Synthetic
aguuccagacacuacaauaaagca

SEQ ID NO: 206245 - RNA, 18 nt, Artificial Sequence
  Synthetic
uaguccuuuaauaaagca

SEQ ID NO: 206246 - RNA, 19 nt, Artificial Sequence
  Synthetic
cuaguccuuuaauaaagca

SEQ ID NO: 206247 - RNA, 20 nt, Artificial Sequence
  Synthetic
ccuaguccuuuaauaaagca

SEQ ID NO: 206248 - RNA, 21 nt, Artificial Sequence
  Synthetic
accuaguccuuuaauaaagca

SEQ ID NO: 206249 - RNA, 22 nt, Artificial Sequence
  Synthetic
aaccuaguccuuuaauaaagca

SEQ ID NO: 206250 - RNA, 23 nt, Artificial Sequence
  Synthetic
aaaccuaguccuuuaauaaagca

SEQ ID NO: 206251 - RNA, 24 nt, Artificial Sequence
  Synthetic
aaaaccuaguccuuuaauaaagca

SEQ ID NO: 206252 - RNA, 18 nt, Artificial Sequence
  Synthetic
agggauggggcuaaagca

SEQ ID NO: 206253 - RNA, 19 nt, Artificial Sequence
  Synthetic
cagggauggggcuaaagca

SEQ ID NO: 206254 - RNA, 20 nt, Artificial Sequence
  Synthetic
gcagggauggggcuaaagca

SEQ ID NO: 206255 - RNA, 21 nt, Artificial Sequence
  Synthetic
agcagggauggggcuaaagca

SEQ ID NO: 206256 - RNA, 22 nt, Artificial Sequence
  Synthetic
uagcagggauggggcuaaagca

SEQ ID NO: 206257 - RNA, 23 nt, Artificial Sequence
  Synthetic
cuagcagggauggggcuaaagca

SEQ ID NO: 206258 - RNA, 24 nt, Artificial Sequence
  Synthetic
ucuagcagggauggggcuaaagca

SEQ ID NO: 206259 - RNA, 18 nt, Artificial Sequence
  Synthetic
aaaggcuaaucuaaagca

SEQ ID NO: 206260 - RNA, 19 nt, Artificial Sequence
  Synthetic
aaaaggcuaaucuaaagca

SEQ ID NO: 206261 - RNA, 20 nt, Artificial Sequence
  Synthetic
caaaaggcuaaucuaaagca

SEQ ID NO: 206262 - RNA, 21 nt, Artificial Sequence
  Synthetic
gcaaaaggcuaaucuaaagca

SEQ ID NO: 206263 - RNA, 22 nt, Artificial Sequence
  Synthetic
agcaaaaggcuaaucuaaagca

SEQ ID NO: 206264 - RNA, 23 nt, Artificial Sequence
  Synthetic
aagcaaaaggcuaaucuaaagca

SEQ ID NO: 206265 - RNA, 24 nt, Artificial Sequence
  Synthetic
uaagcaaaaggcuaaucuaaagca

SEQ ID NO: 206266 - RNA, 18 nt, Artificial Sequence
  Synthetic
ggcacaacgucuaaagca

SEQ ID NO: 206267 - RNA, 19 nt, Artificial Sequence
  Synthetic
aggcacaacgucuaaagca

SEQ ID NO: 206268 - RNA, 20 nt, Artificial Sequence
  Synthetic
aaggcacaacgucuaaagca

SEQ ID NO: 206269 - RNA, 21 nt, Artificial Sequence
  Synthetic
uaaggcacaacgucuaaagca

SEQ ID NO: 206270 - RNA, 22 nt, Artificial Sequence
  Synthetic
uuaaggcacaacgucuaaagca

SEQ ID NO: 206271 - RNA, 23 nt, Artificial Sequence
  Synthetic
cuuaaggcacaacgucuaaagca

SEQ ID NO: 206272 - RNA, 24 nt, Artificial Sequence
  Synthetic
ucuuaaggcacaacgucuaaagca

SEQ ID NO: 206273 - RNA, 18 nt, Artificial Sequence
  Synthetic
gauuuuuauuuuaaagca

SEQ ID NO: 206274 - RNA, 19 nt, Artificial Sequence
  Synthetic
ggauuuuuauuuuaaagca

SEQ ID NO: 206275 - RNA, 20 nt, Artificial Sequence
  Synthetic
uggauuuuuauuuuaaagca

SEQ ID NO: 206276 - RNA, 21 nt, Artificial Sequence
  Synthetic
auggauuuuuauuuuaaagca

SEQ ID NO: 206277 - RNA, 22 nt, Artificial Sequence
  Synthetic
aauggauuuuuauuuuaaagca

SEQ ID NO: 206278 - RNA, 23 nt, Artificial Sequence
  Synthetic
aaauggauuuuuauuuuaaagca

SEQ ID NO: 206279 - RNA, 24 nt, Artificial Sequence
  Synthetic
aaaauggauuuuuauuuuaaagca

SEQ ID NO: 206280 - RNA, 18 nt, Artificial Sequence
  Synthetic
accugacaaaaacaagca

SEQ ID NO: 206281 - RNA, 19 nt, Artificial Sequence
  Synthetic
aaccugacaaaaacaagca

SEQ ID NO: 206282 - RNA, 20 nt, Artificial Sequence
  Synthetic
aaaccugacaaaaacaagca

SEQ ID NO: 206283 - RNA, 21 nt, Artificial Sequence
  Synthetic
caaaccugacaaaaacaagca

SEQ ID NO: 206284 - RNA, 22 nt, Artificial Sequence
  Synthetic
acaaaccugacaaaaacaagca

SEQ ID NO: 206285 - RNA, 23 nt, Artificial Sequence
  Synthetic
gacaaaccugacaaaaacaagca

SEQ ID NO: 206286 - RNA, 24 nt, Artificial Sequence
  Synthetic
ugacaaaccugacaaaaacaagca

SEQ ID NO: 206287 - RNA, 18 nt, Artificial Sequence
  Synthetic
accugagaaaaacaagca

SEQ ID NO: 206288 - RNA, 19 nt, Artificial Sequence
  Synthetic
aaccugagaaaaacaagca

SEQ ID NO: 206289 - RNA, 20 nt, Artificial Sequence
  Synthetic
aaaccugagaaaaacaagca

SEQ ID NO: 206290 - RNA, 21 nt, Artificial Sequence
  Synthetic
caaaccugagaaaaacaagca

SEQ ID NO: 206291 - RNA, 22 nt, Artificial Sequence
  Synthetic
acaaaccugagaaaaacaagca

SEQ ID NO: 206292 - RNA, 23 nt, Artificial Sequence
  Synthetic
aacaaaccugagaaaaacaagca

SEQ ID NO: 206293 - RNA, 24 nt, Artificial Sequence
  Synthetic
uaacaaaccugagaaaaacaagca

SEQ ID NO: 206294 - RNA, 18 nt, Artificial Sequence
  Synthetic
accugaggaaaacaagca

SEQ ID NO: 206295 - RNA, 19 nt, Artificial Sequence
  Synthetic
aaccugaggaaaacaagca

SEQ ID NO: 206296 - RNA, 20 nt, Artificial Sequence
  Synthetic
aaaccugaggaaaacaagca

SEQ ID NO: 206297 - RNA, 21 nt, Artificial Sequence
  Synthetic
caaaccugaggaaaacaagca

SEQ ID NO: 206298 - RNA, 22 nt, Artificial Sequence
  Synthetic
acaaaccugaggaaaacaagca

SEQ ID NO: 206299 - RNA, 23 nt, Artificial Sequence
  Synthetic
gacaaaccugaggaaaacaagca

SEQ ID NO: 206300 - RNA, 24 nt, Artificial Sequence
  Synthetic
ugacaaaccugaggaaaacaagca

SEQ ID NO: 206301 - RNA, 18 nt, Artificial Sequence
  Synthetic
gucguuuacaaacaagca

SEQ ID NO: 206302 - RNA, 19 nt, Artificial Sequence
  Synthetic
cgucguuuacaaacaagca

SEQ ID NO: 206303 - RNA, 20 nt, Artificial Sequence
  Synthetic
gcgucguuuacaaacaagca

SEQ ID NO: 206304 - RNA, 21 nt, Artificial Sequence
  Synthetic
ugcgucguuuacaaacaagca

SEQ ID NO: 206305 - RNA, 22 nt, Artificial Sequence
  Synthetic
cugcgucguuuacaaacaagca

SEQ ID NO: 206306 - RNA, 23 nt, Artificial Sequence
  Synthetic
acugcgucguuuacaaacaagca

SEQ ID NO: 206307 - RNA, 24 nt, Artificial Sequence
  Synthetic
gacugcgucguuuacaaacaagca

SEQ ID NO: 206308 - RNA, 18 nt, Artificial Sequence
  Synthetic
uaaguuuuuuaacaagca

SEQ ID NO: 206309 - RNA, 19 nt, Artificial Sequence
  Synthetic
guaaguuuuuuaacaagca

SEQ ID NO: 206310 - RNA, 20 nt, Artificial Sequence
  Synthetic
aguaaguuuuuuaacaagca

SEQ ID NO: 206311 - RNA, 21 nt, Artificial Sequence
  Synthetic
aaguaaguuuuuuaacaagca

SEQ ID NO: 206312 - RNA, 22 nt, Artificial Sequence
  Synthetic
gaaguaaguuuuuuaacaagca

SEQ ID NO: 206313 - RNA, 23 nt, Artificial Sequence
  Synthetic
cgaaguaaguuuuuuaacaagca

SEQ ID NO: 206314 - RNA, 24 nt, Artificial Sequence
  Synthetic
ucgaaguaaguuuuuuaacaagca

SEQ ID NO: 206315 - RNA, 18 nt, Artificial Sequence
  Synthetic
aaauuagagguacaagca

SEQ ID NO: 206316 - RNA, 19 nt, Artificial Sequence
  Synthetic
uaaauuagagguacaagca

SEQ ID NO: 206317 - RNA, 20 nt, Artificial Sequence
  Synthetic
auaaauuagagguacaagca

SEQ ID NO: 206318 - RNA, 21 nt, Artificial Sequence
  Synthetic
cauaaauuagagguacaagca

SEQ ID NO: 206319 - RNA, 22 nt, Artificial Sequence
  Synthetic
gcauaaauuagagguacaagca

SEQ ID NO: 206320 - RNA, 23 nt, Artificial Sequence
  Synthetic
agcauaaauuagagguacaagca

SEQ ID NO: 206321 - RNA, 24 nt, Artificial Sequence
  Synthetic
aagcauaaauuagagguacaagca

SEQ ID NO: 206322 - RNA, 18 nt, Artificial Sequence
  Synthetic
ggacaguuuuuacaagca

SEQ ID NO: 206323 - RNA, 19 nt, Artificial Sequence
  Synthetic
gggacaguuuuuacaagca

SEQ ID NO: 206324 - RNA, 20 nt, Artificial Sequence
  Synthetic
ugggacaguuuuuacaagca

SEQ ID NO: 206325 - RNA, 21 nt, Artificial Sequence
  Synthetic
uugggacaguuuuuacaagca

SEQ ID NO: 206326 - RNA, 22 nt, Artificial Sequence
  Synthetic
uuugggacaguuuuuacaagca

SEQ ID NO: 206327 - RNA, 23 nt, Artificial Sequence
  Synthetic
cuuugggacaguuuuuacaagca

SEQ ID NO: 206328 - RNA, 24 nt, Artificial Sequence
  Synthetic
ucuuugggacaguuuuuacaagca

SEQ ID NO: 206329 - RNA, 18 nt, Artificial Sequence
  Synthetic
uggugccucauccaagca

SEQ ID NO: 206330 - RNA, 19 nt, Artificial Sequence
  Synthetic
guggugccucauccaagca

SEQ ID NO: 206331 - RNA, 20 nt, Artificial Sequence
  Synthetic
cguggugccucauccaagca

SEQ ID NO: 206332 - RNA, 21 nt, Artificial Sequence
  Synthetic
acguggugccucauccaagca

SEQ ID NO: 206333 - RNA, 22 nt, Artificial Sequence
  Synthetic
gacguggugccucauccaagca

SEQ ID NO: 206334 - RNA, 23 nt, Artificial Sequence
  Synthetic
agacguggugccucauccaagca

SEQ ID NO: 206335 - RNA, 24 nt, Artificial Sequence
  Synthetic
gagacguggugccucauccaagca

SEQ ID NO: 206336 - RNA, 18 nt, Artificial Sequence
  Synthetic
uauauaaaacuccaagca

SEQ ID NO: 206337 - RNA, 19 nt, Artificial Sequence
  Synthetic
auauauaaaacuccaagca

SEQ ID NO: 206338 - RNA, 20 nt, Artificial Sequence
  Synthetic
gauauauaaaacuccaagca

SEQ ID NO: 206339 - RNA, 21 nt, Artificial Sequence
  Synthetic
ggauauauaaaacuccaagca

SEQ ID NO: 206340 - RNA, 22 nt, Artificial Sequence
  Synthetic
uggauauauaaaacuccaagca

SEQ ID NO: 206341 - RNA, 23 nt, Artificial Sequence
  Synthetic
guggauauauaaaacuccaagca

SEQ ID NO: 206342 - RNA, 24 nt, Artificial Sequence
  Synthetic
aguggauauauaaaacuccaagca

SEQ ID NO: 206343 - RNA, 18 nt, Artificial Sequence
  Synthetic
caaaacacaaaucaagca

SEQ ID NO: 206344 - RNA, 19 nt, Artificial Sequence
  Synthetic
acaaaacacaaaucaagca

SEQ ID NO: 206345 - RNA, 20 nt, Artificial Sequence
  Synthetic
cacaaaacacaaaucaagca

SEQ ID NO: 206346 - RNA, 21 nt, Artificial Sequence
  Synthetic
ucacaaaacacaaaucaagca

SEQ ID NO: 206347 - RNA, 22 nt, Artificial Sequence
  Synthetic
cucacaaaacacaaaucaagca

SEQ ID NO: 206348 - RNA, 23 nt, Artificial Sequence
  Synthetic
acucacaaaacacaaaucaagca

SEQ ID NO: 206349 - RNA, 24 nt, Artificial Sequence
  Synthetic
aacucacaaaacacaaaucaagca

SEQ ID NO: 206350 - RNA, 18 nt, Artificial Sequence
  Synthetic
guacaaacucaucaagca

SEQ ID NO: 206351 - RNA, 19 nt, Artificial Sequence
  Synthetic
gguacaaacucaucaagca

SEQ ID NO: 206352 - RNA, 20 nt, Artificial Sequence
  Synthetic
agguacaaacucaucaagca

SEQ ID NO: 206353 - RNA, 21 nt, Artificial Sequence
  Synthetic
cagguacaaacucaucaagca

SEQ ID NO: 206354 - RNA, 22 nt, Artificial Sequence
  Synthetic
ccagguacaaacucaucaagca

SEQ ID NO: 206355 - RNA, 23 nt, Artificial Sequence
  Synthetic
gccagguacaaacucaucaagca

SEQ ID NO: 206356 - RNA, 24 nt, Artificial Sequence
  Synthetic
agccagguacaaacucaucaagca

SEQ ID NO: 206357 - RNA, 18 nt, Artificial Sequence
  Synthetic
gauaccuaaaaagaagca

SEQ ID NO: 206358 - RNA, 19 nt, Artificial Sequence
  Synthetic
agauaccuaaaaagaagca

SEQ ID NO: 206359 - RNA, 20 nt, Artificial Sequence
  Synthetic
uagauaccuaaaaagaagca

SEQ ID NO: 206360 - RNA, 21 nt, Artificial Sequence
  Synthetic
cuagauaccuaaaaagaagca

SEQ ID NO: 206361 - RNA, 22 nt, Artificial Sequence
  Synthetic
gcuagauaccuaaaaagaagca

SEQ ID NO: 206362 - RNA, 23 nt, Artificial Sequence
  Synthetic
agcuagauaccuaaaaagaagca

SEQ ID NO: 206363 - RNA, 24 nt, Artificial Sequence
  Synthetic
uagcuagauaccuaaaaagaagca

SEQ ID NO: 206364 - RNA, 18 nt, Artificial Sequence
  Synthetic
cuuauuaaguaagaagca

SEQ ID NO: 206365 - RNA, 19 nt, Artificial Sequence
  Synthetic
gcuuauuaaguaagaagca

SEQ ID NO: 206366 - RNA, 20 nt, Artificial Sequence
  Synthetic
agcuuauuaaguaagaagca

SEQ ID NO: 206367 - RNA, 21 nt, Artificial Sequence
  Synthetic
aagcuuauuaaguaagaagca

SEQ ID NO: 206368 - RNA, 22 nt, Artificial Sequence
  Synthetic
aaagcuuauuaaguaagaagca

SEQ ID NO: 206369 - RNA, 23 nt, Artificial Sequence
  Synthetic
aaaagcuuauuaaguaagaagca

SEQ ID NO: 206370 - RNA, 24 nt, Artificial Sequence
  Synthetic
gaaaagcuuauuaaguaagaagca

SEQ ID NO: 206371 - RNA, 18 nt, Artificial Sequence
  Synthetic
acuucaugaucagaagca

SEQ ID NO: 206372 - RNA, 19 nt, Artificial Sequence
  Synthetic
gacuucaugaucagaagca

SEQ ID NO: 206373 - RNA, 20 nt, Artificial Sequence
  Synthetic
ggacuucaugaucagaagca

SEQ ID NO: 206374 - RNA, 21 nt, Artificial Sequence
  Synthetic
cggacuucaugaucagaagca

SEQ ID NO: 206375 - RNA, 22 nt, Artificial Sequence
  Synthetic
acggacuucaugaucagaagca

SEQ ID NO: 206376 - RNA, 23 nt, Artificial Sequence
  Synthetic
aacggacuucaugaucagaagca

SEQ ID NO: 206377 - RNA, 24 nt, Artificial Sequence
  Synthetic
aaacggacuucaugaucagaagca

SEQ ID NO: 206378 - RNA, 18 nt, Artificial Sequence
  Synthetic
cggccaucauuagaagca

SEQ ID NO: 206379 - RNA, 19 nt, Artificial Sequence
  Synthetic
acggccaucauuagaagca

SEQ ID NO: 206380 - RNA, 20 nt, Artificial Sequence
  Synthetic
aacggccaucauuagaagca

SEQ ID NO: 206381 - RNA, 21 nt, Artificial Sequence
  Synthetic
uaacggccaucauuagaagca

SEQ ID NO: 206382 - RNA, 22 nt, Artificial Sequence
  Synthetic
uuaacggccaucauuagaagca

SEQ ID NO: 206383 - RNA, 23 nt, Artificial Sequence
  Synthetic
auuaacggccaucauuagaagca

SEQ ID NO: 206384 - RNA, 24 nt, Artificial Sequence
  Synthetic
gauuaacggccaucauuagaagca

SEQ ID NO: 206385 - RNA, 18 nt, Artificial Sequence
  Synthetic
guuuugaaggaggaagca

SEQ ID NO: 206386 - RNA, 19 nt, Artificial Sequence
  Synthetic
uguuuugaaggaggaagca

SEQ ID NO: 206387 - RNA, 20 nt, Artificial Sequence
  Synthetic
guguuuugaaggaggaagca

SEQ ID NO: 206388 - RNA, 21 nt, Artificial Sequence
  Synthetic
uguguuuugaaggaggaagca

SEQ ID NO: 206389 - RNA, 22 nt, Artificial Sequence
  Synthetic
auguguuuugaaggaggaagca

SEQ ID NO: 206390 - RNA, 23 nt, Artificial Sequence
  Synthetic
gauguguuuugaaggaggaagca

SEQ ID NO: 206391 - RNA, 24 nt, Artificial Sequence
  Synthetic
ugauguguuuugaaggaggaagca

SEQ ID NO: 206392 - RNA, 18 nt, Artificial Sequence
  Synthetic
auuuagacaagggaagca

SEQ ID NO: 206393 - RNA, 19 nt, Artificial Sequence
  Synthetic
uauuuagacaagggaagca

SEQ ID NO: 206394 - RNA, 20 nt, Artificial Sequence
  Synthetic
uuauuuagacaagggaagca

SEQ ID NO: 206395 - RNA, 21 nt, Artificial Sequence
  Synthetic
uuuauuuagacaagggaagca

SEQ ID NO: 206396 - RNA, 22 nt, Artificial Sequence
  Synthetic
uuuuauuuagacaagggaagca

SEQ ID NO: 206397 - RNA, 23 nt, Artificial Sequence
  Synthetic
cuuuuauuuagacaagggaagca

SEQ ID NO: 206398 - RNA, 24 nt, Artificial Sequence
  Synthetic
gcuuuuauuuagacaagggaagca

SEQ ID NO: 206399 - RNA, 18 nt, Artificial Sequence
  Synthetic
gagagagggagggaagca

SEQ ID NO: 206400 - RNA, 19 nt, Artificial Sequence
  Synthetic
ggagagagggagggaagca

SEQ ID NO: 206401 - RNA, 20 nt, Artificial Sequence
  Synthetic
gggagagagggagggaagca

SEQ ID NO: 206402 - RNA, 21 nt, Artificial Sequence
  Synthetic
agggagagagggagggaagca

SEQ ID NO: 206403 - RNA, 22 nt, Artificial Sequence
  Synthetic
aagggagagagggagggaagca

SEQ ID NO: 206404 - RNA, 23 nt, Artificial Sequence
  Synthetic
gaagggagagagggagggaagca

SEQ ID NO: 206405 - RNA, 24 nt, Artificial Sequence
  Synthetic
ggaagggagagagggagggaagca

SEQ ID NO: 206406 - RNA, 18 nt, Artificial Sequence
  Synthetic
cacaguauucgggaagca

SEQ ID NO: 206407 - RNA, 19 nt, Artificial Sequence
  Synthetic
ucacaguauucgggaagca

SEQ ID NO: 206408 - RNA, 20 nt, Artificial Sequence
  Synthetic
uucacaguauucgggaagca

SEQ ID NO: 206409 - RNA, 21 nt, Artificial Sequence
  Synthetic
uuucacaguauucgggaagca

SEQ ID NO: 206410 - RNA, 22 nt, Artificial Sequence
  Synthetic
uuuucacaguauucgggaagca

SEQ ID NO: 206411 - RNA, 23 nt, Artificial Sequence
  Synthetic
cuuuucacaguauucgggaagca

SEQ ID NO: 206412 - RNA, 24 nt, Artificial Sequence
  Synthetic
acuuuucacaguauucgggaagca

SEQ ID NO: 206413 - RNA, 18 nt, Artificial Sequence
  Synthetic
auauuuacuauggaagca

SEQ ID NO: 206414 - RNA, 19 nt, Artificial Sequence
  Synthetic
uauauuuacuauggaagca

SEQ ID NO: 206415 - RNA, 20 nt, Artificial Sequence
  Synthetic
cuauauuuacuauggaagca

SEQ ID NO: 206416 - RNA, 21 nt, Artificial Sequence
  Synthetic
acuauauuuacuauggaagca

SEQ ID NO: 206417 - RNA, 22 nt, Artificial Sequence
  Synthetic
aacuauauuuacuauggaagca

SEQ ID NO: 206418 - RNA, 23 nt, Artificial Sequence
  Synthetic
uaacuauauuuacuauggaagca

SEQ ID NO: 206419 - RNA, 24 nt, Artificial Sequence
  Synthetic
cuaacuauauuuacuauggaagca

SEQ ID NO: 206420 - RNA, 18 nt, Artificial Sequence
  Synthetic
caguagcaacuggaagca

SEQ ID NO: 206421 - RNA, 19 nt, Artificial Sequence
  Synthetic
acaguagcaacuggaagca

SEQ ID NO: 206422 - RNA, 20 nt, Artificial Sequence
  Synthetic
aacaguagcaacuggaagca

SEQ ID NO: 206423 - RNA, 21 nt, Artificial Sequence
  Synthetic
aaacaguagcaacuggaagca

SEQ ID NO: 206424 - RNA, 22 nt, Artificial Sequence
  Synthetic
caaacaguagcaacuggaagca

SEQ ID NO: 206425 - RNA, 23 nt, Artificial Sequence
  Synthetic
gcaaacaguagcaacuggaagca

SEQ ID NO: 206426 - RNA, 24 nt, Artificial Sequence
  Synthetic
agcaaacaguagcaacuggaagca

SEQ ID NO: 206427 - RNA, 18 nt, Artificial Sequence
  Synthetic
accaucauucuggaagca

SEQ ID NO: 206428 - RNA, 19 nt, Artificial Sequence
  Synthetic
caccaucauucuggaagca

SEQ ID NO: 206429 - RNA, 20 nt, Artificial Sequence
  Synthetic
gcaccaucauucuggaagca

SEQ ID NO: 206430 - RNA, 21 nt, Artificial Sequence
  Synthetic
cgcaccaucauucuggaagca

SEQ ID NO: 206431 - RNA, 22 nt, Artificial Sequence
  Synthetic
gcgcaccaucauucuggaagca

SEQ ID NO: 206432 - RNA, 23 nt, Artificial Sequence
  Synthetic
ugcgcaccaucauucuggaagca

SEQ ID NO: 206433 - RNA, 24 nt, Artificial Sequence
  Synthetic
cugcgcaccaucauucuggaagca

SEQ ID NO: 206434 - RNA, 18 nt, Artificial Sequence
  Synthetic
gacaagaaauuggaagca

SEQ ID NO: 206435 - RNA, 19 nt, Artificial Sequence
  Synthetic
agacaagaaauuggaagca

SEQ ID NO: 206436 - RNA, 20 nt, Artificial Sequence
  Synthetic
aagacaagaaauuggaagca

SEQ ID NO: 206437 - RNA, 21 nt, Artificial Sequence
  Synthetic
uaagacaagaaauuggaagca

SEQ ID NO: 206438 - RNA, 22 nt, Artificial Sequence
  Synthetic
guaagacaagaaauuggaagca

SEQ ID NO: 206439 - RNA, 23 nt, Artificial Sequence
  Synthetic
uguaagacaagaaauuggaagca

SEQ ID NO: 206440 - RNA, 24 nt, Artificial Sequence
  Synthetic
auguaagacaagaaauuggaagca

SEQ ID NO: 206441 - RNA, 18 nt, Artificial Sequence
  Synthetic
uauacuguuaaugaagca

SEQ ID NO: 206442 - RNA, 19 nt, Artificial Sequence
  Synthetic
uuauacuguuaaugaagca

SEQ ID NO: 206443 - RNA, 20 nt, Artificial Sequence
  Synthetic
auuauacuguuaaugaagca

SEQ ID NO: 206444 - RNA, 21 nt, Artificial Sequence
  Synthetic
uauuauacuguuaaugaagca

SEQ ID NO: 206445 - RNA, 22 nt, Artificial Sequence
  Synthetic
guauuauacuguuaaugaagca

SEQ ID NO: 206446 - RNA, 23 nt, Artificial Sequence
  Synthetic
uguauuauacuguuaaugaagca

SEQ ID NO: 206447 - RNA, 24 nt, Artificial Sequence
  Synthetic
auguauuauacuguuaaugaagca

SEQ ID NO: 206448 - RNA, 18 nt, Artificial Sequence
  Synthetic
guauuaccguaugaagca

SEQ ID NO: 206449 - RNA, 19 nt, Artificial Sequence
  Synthetic
aguauuaccguaugaagca

SEQ ID NO: 206450 - RNA, 20 nt, Artificial Sequence
  Synthetic
gaguauuaccguaugaagca

SEQ ID NO: 206451 - RNA, 21 nt, Artificial Sequence
  Synthetic
agaguauuaccguaugaagca

SEQ ID NO: 206452 - RNA, 22 nt, Artificial Sequence
  Synthetic
uagaguauuaccguaugaagca

SEQ ID NO: 206453 - RNA, 23 nt, Artificial Sequence
  Synthetic
uuagaguauuaccguaugaagca

SEQ ID NO: 206454 - RNA, 24 nt, Artificial Sequence
  Synthetic
uuuagaguauuaccguaugaagca

SEQ ID NO: 206455 - RNA, 18 nt, Artificial Sequence
  Synthetic
gaugaagaaacugaagca

SEQ ID NO: 206456 - RNA, 19 nt, Artificial Sequence
  Synthetic
agaugaagaaacugaagca

SEQ ID NO: 206457 - RNA, 20 nt, Artificial Sequence
  Synthetic
cagaugaagaaacugaagca

SEQ ID NO: 206458 - RNA, 21 nt, Artificial Sequence
  Synthetic
ucagaugaagaaacugaagca

SEQ ID NO: 206459 - RNA, 22 nt, Artificial Sequence
  Synthetic
uucagaugaagaaacugaagca

SEQ ID NO: 206460 - RNA, 23 nt, Artificial Sequence
  Synthetic
cuucagaugaagaaacugaagca

SEQ ID NO: 206461 - RNA, 24 nt, Artificial Sequence
  Synthetic
ccuucagaugaagaaacugaagca

SEQ ID NO: 206462 - RNA, 18 nt, Artificial Sequence
  Synthetic
gagugagauucugaagca

SEQ ID NO: 206463 - RNA, 19 nt, Artificial Sequence
  Synthetic
ugagugagauucugaagca

SEQ ID NO: 206464 - RNA, 20 nt, Artificial Sequence
  Synthetic
augagugagauucugaagca

SEQ ID NO: 206465 - RNA, 21 nt, Artificial Sequence
  Synthetic
caugagugagauucugaagca

SEQ ID NO: 206466 - RNA, 22 nt, Artificial Sequence
  Synthetic
acaugagugagauucugaagca

SEQ ID NO: 206467 - RNA, 23 nt, Artificial Sequence
  Synthetic
aacaugagugagauucugaagca

SEQ ID NO: 206468 - RNA, 24 nt, Artificial Sequence
  Synthetic
caacaugagugagauucugaagca

SEQ ID NO: 206469 - RNA, 18 nt, Artificial Sequence
  Synthetic
ucuucuaaaauugaagca

SEQ ID NO: 206470 - RNA, 19 nt, Artificial Sequence
  Synthetic
aucuucuaaaauugaagca

SEQ ID NO: 206471 - RNA, 20 nt, Artificial Sequence
  Synthetic
uaucuucuaaaauugaagca

SEQ ID NO: 206472 - RNA, 21 nt, Artificial Sequence
  Synthetic
auaucuucuaaaauugaagca

SEQ ID NO: 206473 - RNA, 22 nt, Artificial Sequence
  Synthetic
uauaucuucuaaaauugaagca

SEQ ID NO: 206474 - RNA, 23 nt, Artificial Sequence
  Synthetic
uuauaucuucuaaaauugaagca

SEQ ID NO: 206475 - RNA, 24 nt, Artificial Sequence
  Synthetic
uuuauaucuucuaaaauugaagca

SEQ ID NO: 206476 - RNA, 18 nt, Artificial Sequence
  Synthetic
agaguaccuauugaagca

SEQ ID NO: 206477 - RNA, 19 nt, Artificial Sequence
  Synthetic
aagaguaccuauugaagca

SEQ ID NO: 206478 - RNA, 20 nt, Artificial Sequence
  Synthetic
uaagaguaccuauugaagca

SEQ ID NO: 206479 - RNA, 21 nt, Artificial Sequence
  Synthetic
guaagaguaccuauugaagca

SEQ ID NO: 206480 - RNA, 22 nt, Artificial Sequence
  Synthetic
aguaagaguaccuauugaagca

SEQ ID NO: 206481 - RNA, 23 nt, Artificial Sequence
  Synthetic
gaguaagaguaccuauugaagca

SEQ ID NO: 206482 - RNA, 24 nt, Artificial Sequence
  Synthetic
agaguaagaguaccuauugaagca

SEQ ID NO: 206483 - RNA, 18 nt, Artificial Sequence
  Synthetic
gcauugaaacuugaagca

SEQ ID NO: 206484 - RNA, 19 nt, Artificial Sequence
  Synthetic
ggcauugaaacuugaagca

SEQ ID NO: 206485 - RNA, 20 nt, Artificial Sequence
  Synthetic
aggcauugaaacuugaagca

SEQ ID NO: 206486 - RNA, 21 nt, Artificial Sequence
  Synthetic
uaggcauugaaacuugaagca

SEQ ID NO: 206487 - RNA, 22 nt, Artificial Sequence
  Synthetic
auaggcauugaaacuugaagca

SEQ ID NO: 206488 - RNA, 23 nt, Artificial Sequence
  Synthetic
uauaggcauugaaacuugaagca

SEQ ID NO: 206489 - RNA, 24 nt, Artificial Sequence
  Synthetic
guauaggcauugaaacuugaagca

SEQ ID NO: 206490 - RNA, 18 nt, Artificial Sequence
  Synthetic
ucaacaaaaaaauaagca

SEQ ID NO: 206491 - RNA, 19 nt, Artificial Sequence
  Synthetic
gucaacaaaaaaauaagca

SEQ ID NO: 206492 - RNA, 20 nt, Artificial Sequence
  Synthetic
agucaacaaaaaaauaagca

SEQ ID NO: 206493 - RNA, 21 nt, Artificial Sequence
  Synthetic
aagucaacaaaaaaauaagca

SEQ ID NO: 206494 - RNA, 22 nt, Artificial Sequence
  Synthetic
aaagucaacaaaaaaauaagca

SEQ ID NO: 206495 - RNA, 23 nt, Artificial Sequence
  Synthetic
caaagucaacaaaaaaauaagca

SEQ ID NO: 206496 - RNA, 24 nt, Artificial Sequence
  Synthetic
acaaagucaacaaaaaaauaagca

SEQ ID NO: 206497 - RNA, 18 nt, Artificial Sequence
  Synthetic
agauuuccucaauaagca

SEQ ID NO: 206498 - RNA, 19 nt, Artificial Sequence
  Synthetic
aagauuuccucaauaagca

SEQ ID NO: 206499 - RNA, 20 nt, Artificial Sequence
  Synthetic
gaagauuuccucaauaagca

SEQ ID NO: 206500 - RNA, 21 nt, Artificial Sequence
  Synthetic
agaagauuuccucaauaagca

SEQ ID NO: 206501 - RNA, 22 nt, Artificial Sequence
  Synthetic
aagaagauuuccucaauaagca

SEQ ID NO: 206502 - RNA, 23 nt, Artificial Sequence
  Synthetic
gaagaagauuuccucaauaagca

SEQ ID NO: 206503 - RNA, 24 nt, Artificial Sequence
  Synthetic
ugaagaagauuuccucaauaagca

SEQ ID NO: 206504 - RNA, 18 nt, Artificial Sequence
  Synthetic
aucaacaacuaauaagca

SEQ ID NO: 206505 - RNA, 19 nt, Artificial Sequence
  Synthetic
aaucaacaacuaauaagca

SEQ ID NO: 206506 - RNA, 20 nt, Artificial Sequence
  Synthetic
uaaucaacaacuaauaagca

SEQ ID NO: 206507 - RNA, 21 nt, Artificial Sequence
  Synthetic
uuaaucaacaacuaauaagca

SEQ ID NO: 206508 - RNA, 22 nt, Artificial Sequence
  Synthetic
auuaaucaacaacuaauaagca

SEQ ID NO: 206509 - RNA, 23 nt, Artificial Sequence
  Synthetic
aauuaaucaacaacuaauaagca

SEQ ID NO: 206510 - RNA, 24 nt, Artificial Sequence
  Synthetic
aaauuaaucaacaacuaauaagca

SEQ ID NO: 206511 - RNA, 18 nt, Artificial Sequence
  Synthetic
aacuaaguuucauaagca

SEQ ID NO: 206512 - RNA, 19 nt, Artificial Sequence
  Synthetic
aaacuaaguuucauaagca

SEQ ID NO: 206513 - RNA, 20 nt, Artificial Sequence
  Synthetic
caaacuaaguuucauaagca

SEQ ID NO: 206514 - RNA, 21 nt, Artificial Sequence
  Synthetic
ccaaacuaaguuucauaagca

SEQ ID NO: 206515 - RNA, 22 nt, Artificial Sequence
  Synthetic
gccaaacuaaguuucauaagca

SEQ ID NO: 206516 - RNA, 23 nt, Artificial Sequence
  Synthetic
agccaaacuaaguuucauaagca

SEQ ID NO: 206517 - RNA, 24 nt, Artificial Sequence
  Synthetic
cagccaaacuaaguuucauaagca

SEQ ID NO: 206518 - RNA, 18 nt, Artificial Sequence
  Synthetic
cugaaaacuagauaagca

SEQ ID NO: 206519 - RNA, 19 nt, Artificial Sequence
  Synthetic
ccugaaaacuagauaagca

SEQ ID NO: 206520 - RNA, 20 nt, Artificial Sequence
  Synthetic
gccugaaaacuagauaagca

SEQ ID NO: 206521 - RNA, 21 nt, Artificial Sequence
  Synthetic
ugccugaaaacuagauaagca

SEQ ID NO: 206522 - RNA, 22 nt, Artificial Sequence
  Synthetic
uugccugaaaacuagauaagca

SEQ ID NO: 206523 - RNA, 23 nt, Artificial Sequence
  Synthetic
uuugccugaaaacuagauaagca

SEQ ID NO: 206524 - RNA, 24 nt, Artificial Sequence
  Synthetic
guuugccugaaaacuagauaagca

SEQ ID NO: 206525 - RNA, 18 nt, Artificial Sequence
  Synthetic
aguguguagugauaagca

SEQ ID NO: 206526 - RNA, 19 nt, Artificial Sequence
  Synthetic
gaguguguagugauaagca

SEQ ID NO: 206527 - RNA, 20 nt, Artificial Sequence
  Synthetic
agaguguguagugauaagca

SEQ ID NO: 206528 - RNA, 21 nt, Artificial Sequence
  Synthetic
uagaguguguagugauaagca

SEQ ID NO: 206529 - RNA, 22 nt, Artificial Sequence
  Synthetic
auagaguguguagugauaagca

SEQ ID NO: 206530 - RNA, 23 nt, Artificial Sequence
  Synthetic
cauagaguguguagugauaagca

SEQ ID NO: 206531 - RNA, 24 nt, Artificial Sequence
  Synthetic
acauagaguguguagugauaagca

SEQ ID NO: 206532 - RNA, 18 nt, Artificial Sequence
  Synthetic
acagagaacaacuaagca

SEQ ID NO: 206533 - RNA, 19 nt, Artificial Sequence
  Synthetic
uacagagaacaacuaagca

SEQ ID NO: 206534 - RNA, 20 nt, Artificial Sequence
  Synthetic
uuacagagaacaacuaagca

SEQ ID NO: 206535 - RNA, 21 nt, Artificial Sequence
  Synthetic
auuacagagaacaacuaagca

SEQ ID NO: 206536 - RNA, 22 nt, Artificial Sequence
  Synthetic
cauuacagagaacaacuaagca

SEQ ID NO: 206537 - RNA, 23 nt, Artificial Sequence
  Synthetic
ccauuacagagaacaacuaagca

SEQ ID NO: 206538 - RNA, 24 nt, Artificial Sequence
  Synthetic
accauuacagagaacaacuaagca

SEQ ID NO: 206539 - RNA, 18 nt, Artificial Sequence
  Synthetic
uagagaaucuccuaagca

SEQ ID NO: 206540 - RNA, 19 nt, Artificial Sequence
  Synthetic
uuagagaaucuccuaagca

SEQ ID NO: 206541 - RNA, 20 nt, Artificial Sequence
  Synthetic
uuuagagaaucuccuaagca

SEQ ID NO: 206542 - RNA, 21 nt, Artificial Sequence
  Synthetic
cuuuagagaaucuccuaagca

SEQ ID NO: 206543 - RNA, 22 nt, Artificial Sequence
  Synthetic
gcuuuagagaaucuccuaagca

SEQ ID NO: 206544 - RNA, 23 nt, Artificial Sequence
  Synthetic
cgcuuuagagaaucuccuaagca

SEQ ID NO: 206545 - RNA, 24 nt, Artificial Sequence
  Synthetic
gcgcuuuagagaaucuccuaagca

SEQ ID NO: 206546 - RNA, 18 nt, Artificial Sequence
  Synthetic
auagccuaguucuaagca

SEQ ID NO: 206547 - RNA, 19 nt, Artificial Sequence
  Synthetic
cauagccuaguucuaagca

SEQ ID NO: 206548 - RNA, 20 nt, Artificial Sequence
  Synthetic
ucauagccuaguucuaagca

SEQ ID NO: 206549 - RNA, 21 nt, Artificial Sequence
  Synthetic
gucauagccuaguucuaagca

SEQ ID NO: 206550 - RNA, 22 nt, Artificial Sequence
  Synthetic
agucauagccuaguucuaagca

SEQ ID NO: 206551 - RNA, 23 nt, Artificial Sequence
  Synthetic
aagucauagccuaguucuaagca

SEQ ID NO: 206552 - RNA, 24 nt, Artificial Sequence
  Synthetic
uaagucauagccuaguucuaagca

SEQ ID NO: 206553 - RNA, 18 nt, Artificial Sequence
  Synthetic
uuccucauaagguaagca

SEQ ID NO: 206554 - RNA, 19 nt, Artificial Sequence
  Synthetic
auuccucauaagguaagca

SEQ ID NO: 206555 - RNA, 20 nt, Artificial Sequence
  Synthetic
uauuccucauaagguaagca

SEQ ID NO: 206556 - RNA, 21 nt, Artificial Sequence
  Synthetic
guauuccucauaagguaagca

SEQ ID NO: 206557 - RNA, 22 nt, Artificial Sequence
  Synthetic
uguauuccucauaagguaagca

SEQ ID NO: 206558 - RNA, 23 nt, Artificial Sequence
  Synthetic
uuguauuccucauaagguaagca

SEQ ID NO: 206559 - RNA, 24 nt, Artificial Sequence
  Synthetic
uuuguauuccucauaagguaagca

SEQ ID NO: 206560 - RNA, 18 nt, Artificial Sequence
  Synthetic
guacuuuugggguaagca

SEQ ID NO: 206561 - RNA, 19 nt, Artificial Sequence
  Synthetic
uguacuuuugggguaagca

SEQ ID NO: 206562 - RNA, 20 nt, Artificial Sequence
  Synthetic
guguacuuuugggguaagca

SEQ ID NO: 206563 - RNA, 21 nt, Artificial Sequence
  Synthetic
uguguacuuuugggguaagca

SEQ ID NO: 206564 - RNA, 22 nt, Artificial Sequence
  Synthetic
auguguacuuuugggguaagca

SEQ ID NO: 206565 - RNA, 23 nt, Artificial Sequence
  Synthetic
aauguguacuuuugggguaagca

SEQ ID NO: 206566 - RNA, 24 nt, Artificial Sequence
  Synthetic
caauguguacuuuugggguaagca

SEQ ID NO: 206567 - RNA, 18 nt, Artificial Sequence
  Synthetic
ggaugaagaugguaagca

SEQ ID NO: 206568 - RNA, 19 nt, Artificial Sequence
  Synthetic
cggaugaagaugguaagca

SEQ ID NO: 206569 - RNA, 20 nt, Artificial Sequence
  Synthetic
acggaugaagaugguaagca

SEQ ID NO: 206570 - RNA, 21 nt, Artificial Sequence
  Synthetic
gacggaugaagaugguaagca

SEQ ID NO: 206571 - RNA, 22 nt, Artificial Sequence
  Synthetic
ugacggaugaagaugguaagca

SEQ ID NO: 206572 - RNA, 23 nt, Artificial Sequence
  Synthetic
augacggaugaagaugguaagca

SEQ ID NO: 206573 - RNA, 24 nt, Artificial Sequence
  Synthetic
gaugacggaugaagaugguaagca

SEQ ID NO: 206574 - RNA, 18 nt, Artificial Sequence
  Synthetic
aagagugagauguaagca

SEQ ID NO: 206575 - RNA, 19 nt, Artificial Sequence
  Synthetic
aaagagugagauguaagca

SEQ ID NO: 206576 - RNA, 20 nt, Artificial Sequence
  Synthetic
uaaagagugagauguaagca

SEQ ID NO: 206577 - RNA, 21 nt, Artificial Sequence
  Synthetic
guaaagagugagauguaagca

SEQ ID NO: 206578 - RNA, 22 nt, Artificial Sequence
  Synthetic
gguaaagagugagauguaagca

SEQ ID NO: 206579 - RNA, 23 nt, Artificial Sequence
  Synthetic
ugguaaagagugagauguaagca

SEQ ID NO: 206580 - RNA, 24 nt, Artificial Sequence
  Synthetic
gugguaaagagugagauguaagca

SEQ ID NO: 206581 - RNA, 18 nt, Artificial Sequence
  Synthetic
aagguucuguguuaagca

SEQ ID NO: 206582 - RNA, 19 nt, Artificial Sequence
  Synthetic
aaagguucuguguuaagca

SEQ ID NO: 206583 - RNA, 20 nt, Artificial Sequence
  Synthetic
uaaagguucuguguuaagca

SEQ ID NO: 206584 - RNA, 21 nt, Artificial Sequence
  Synthetic
cuaaagguucuguguuaagca

SEQ ID NO: 206585 - RNA, 22 nt, Artificial Sequence
  Synthetic
acuaaagguucuguguuaagca

SEQ ID NO: 206586 - RNA, 23 nt, Artificial Sequence
  Synthetic
cacuaaagguucuguguuaagca

SEQ ID NO: 206587 - RNA, 24 nt, Artificial Sequence
  Synthetic
ccacuaaagguucuguguuaagca

SEQ ID NO: 206588 - RNA, 18 nt, Artificial Sequence
  Synthetic
auacuuugucuuuaagca

SEQ ID NO: 206589 - RNA, 19 nt, Artificial Sequence
  Synthetic
aauacuuugucuuuaagca

SEQ ID NO: 206590 - RNA, 20 nt, Artificial Sequence
  Synthetic
aaauacuuugucuuuaagca

SEQ ID NO: 206591 - RNA, 21 nt, Artificial Sequence
  Synthetic
caaauacuuugucuuuaagca

SEQ ID NO: 206592 - RNA, 22 nt, Artificial Sequence
  Synthetic
acaaauacuuugucuuuaagca

SEQ ID NO: 206593 - RNA, 23 nt, Artificial Sequence
  Synthetic
aacaaauacuuugucuuuaagca

SEQ ID NO: 206594 - RNA, 24 nt, Artificial Sequence
  Synthetic
uaacaaauacuuugucuuuaagca

SEQ ID NO: 206595 - RNA, 18 nt, Artificial Sequence
  Synthetic
ucacaugggaaaacagca

SEQ ID NO: 206596 - RNA, 19 nt, Artificial Sequence
  Synthetic
aucacaugggaaaacagca

SEQ ID NO: 206597 - RNA, 20 nt, Artificial Sequence
  Synthetic
uaucacaugggaaaacagca

SEQ ID NO: 206598 - RNA, 21 nt, Artificial Sequence
  Synthetic
cuaucacaugggaaaacagca

SEQ ID NO: 206599 - RNA, 22 nt, Artificial Sequence
  Synthetic
acuaucacaugggaaaacagca

SEQ ID NO: 206600 - RNA, 23 nt, Artificial Sequence
  Synthetic
cacuaucacaugggaaaacagca

SEQ ID NO: 206601 - RNA, 24 nt, Artificial Sequence
  Synthetic
ucacuaucacaugggaaaacagca

SEQ ID NO: 206602 - RNA, 18 nt, Artificial Sequence
  Synthetic
agagcauccccaacagca

SEQ ID NO: 206603 - RNA, 19 nt, Artificial Sequence
  Synthetic
cagagcauccccaacagca

SEQ ID NO: 206604 - RNA, 20 nt, Artificial Sequence
  Synthetic
ucagagcauccccaacagca

SEQ ID NO: 206605 - RNA, 21 nt, Artificial Sequence
  Synthetic
cucagagcauccccaacagca

SEQ ID NO: 206606 - RNA, 22 nt, Artificial Sequence
  Synthetic
ccucagagcauccccaacagca

SEQ ID NO: 206607 - RNA, 23 nt, Artificial Sequence
  Synthetic
uccucagagcauccccaacagca

SEQ ID NO: 206608 - RNA, 24 nt, Artificial Sequence
  Synthetic
auccucagagcauccccaacagca

SEQ ID NO: 206609 - RNA, 18 nt, Artificial Sequence
  Synthetic
acuaucacgagaacagca

SEQ ID NO: 206610 - RNA, 19 nt, Artificial Sequence
  Synthetic
uacuaucacgagaacagca

SEQ ID NO: 206611 - RNA, 20 nt, Artificial Sequence
  Synthetic
uuacuaucacgagaacagca

SEQ ID NO: 206612 - RNA, 21 nt, Artificial Sequence
  Synthetic
uuuacuaucacgagaacagca

SEQ ID NO: 206613 - RNA, 22 nt, Artificial Sequence
  Synthetic
auuuacuaucacgagaacagca

SEQ ID NO: 206614 - RNA, 23 nt, Artificial Sequence
  Synthetic
aauuuacuaucacgagaacagca

SEQ ID NO: 206615 - RNA, 24 nt, Artificial Sequence
  Synthetic
uaauuuacuaucacgagaacagca

SEQ ID NO: 206616 - RNA, 18 nt, Artificial Sequence
  Synthetic
acuaucaggagaacagca

SEQ ID NO: 206617 - RNA, 19 nt, Artificial Sequence
  Synthetic
cacuaucaggagaacagca

SEQ ID NO: 206618 - RNA, 20 nt, Artificial Sequence
  Synthetic
ucacuaucaggagaacagca

SEQ ID NO: 206619 - RNA, 21 nt, Artificial Sequence
  Synthetic
uucacuaucaggagaacagca

SEQ ID NO: 206620 - RNA, 22 nt, Artificial Sequence
  Synthetic
auucacuaucaggagaacagca

SEQ ID NO: 206621 - RNA, 23 nt, Artificial Sequence
  Synthetic
uauucacuaucaggagaacagca

SEQ ID NO: 206622 - RNA, 24 nt, Artificial Sequence
  Synthetic
uuauucacuaucaggagaacagca

SEQ ID NO: 206623 - RNA, 18 nt, Artificial Sequence
  Synthetic
acuaucaugagaacagca

SEQ ID NO: 206624 - RNA, 19 nt, Artificial Sequence
  Synthetic
cacuaucaugagaacagca

SEQ ID NO: 206625 - RNA, 20 nt, Artificial Sequence
  Synthetic
ucacuaucaugagaacagca

SEQ ID NO: 206626 - RNA, 21 nt, Artificial Sequence
  Synthetic
cucacuaucaugagaacagca

SEQ ID NO: 206627 - RNA, 22 nt, Artificial Sequence
  Synthetic
acucacuaucaugagaacagca

SEQ ID NO: 206628 - RNA, 23 nt, Artificial Sequence
  Synthetic
cacucacuaucaugagaacagca

SEQ ID NO: 206629 - RNA, 24 nt, Artificial Sequence
  Synthetic
ucacucacuaucaugagaacagca

SEQ ID NO: 206630 - RNA, 18 nt, Artificial Sequence
  Synthetic
gcuaucaugagaacagca

SEQ ID NO: 206631 - RNA, 19 nt, Artificial Sequence
  Synthetic
cgcuaucaugagaacagca

SEQ ID NO: 206632 - RNA, 20 nt, Artificial Sequence
  Synthetic
ccgcuaucaugagaacagca

SEQ ID NO: 206633 - RNA, 21 nt, Artificial Sequence
  Synthetic
cccgcuaucaugagaacagca

SEQ ID NO: 206634 - RNA, 22 nt, Artificial Sequence
  Synthetic
ucccgcuaucaugagaacagca

SEQ ID NO: 206635 - RNA, 23 nt, Artificial Sequence
  Synthetic
aucccgcuaucaugagaacagca

SEQ ID NO: 206636 - RNA, 24 nt, Artificial Sequence
  Synthetic
gaucccgcuaucaugagaacagca

SEQ ID NO: 206637 - RNA, 18 nt, Artificial Sequence
  Synthetic
acaaucacuagaacagca

SEQ ID NO: 206638 - RNA, 19 nt, Artificial Sequence
  Synthetic
cacaaucacuagaacagca

SEQ ID NO: 206639 - RNA, 20 nt, Artificial Sequence
  Synthetic
ucacaaucacuagaacagca

SEQ ID NO: 206640 - RNA, 21 nt, Artificial Sequence
  Synthetic
uucacaaucacuagaacagca

SEQ ID NO: 206641 - RNA, 22 nt, Artificial Sequence
  Synthetic
auucacaaucacuagaacagca

SEQ ID NO: 206642 - RNA, 23 nt, Artificial Sequence
  Synthetic
uauucacaaucacuagaacagca

SEQ ID NO: 206643 - RNA, 24 nt, Artificial Sequence
  Synthetic
uuauucacaaucacuagaacagca

SEQ ID NO: 206644 - RNA, 18 nt, Artificial Sequence
  Synthetic
gcuguuccaggaacagca

SEQ ID NO: 206645 - RNA, 19 nt, Artificial Sequence
  Synthetic
ugcuguuccaggaacagca

SEQ ID NO: 206646 - RNA, 20 nt, Artificial Sequence
  Synthetic
augcuguuccaggaacagca

SEQ ID NO: 206647 - RNA, 21 nt, Artificial Sequence
  Synthetic
uaugcuguuccaggaacagca

SEQ ID NO: 206648 - RNA, 22 nt, Artificial Sequence
  Synthetic
auaugcuguuccaggaacagca

SEQ ID NO: 206649 - RNA, 23 nt, Artificial Sequence
  Synthetic
aauaugcuguuccaggaacagca

SEQ ID NO: 206650 - RNA, 24 nt, Artificial Sequence
  Synthetic
gaauaugcuguuccaggaacagca

SEQ ID NO: 206651 - RNA, 18 nt, Artificial Sequence
  Synthetic
aagguaauaugaacagca

SEQ ID NO: 206652 - RNA, 19 nt, Artificial Sequence
  Synthetic
uaagguaauaugaacagca

SEQ ID NO: 206653 - RNA, 20 nt, Artificial Sequence
  Synthetic
auaagguaauaugaacagca

SEQ ID NO: 206654 - RNA, 21 nt, Artificial Sequence
  Synthetic
gauaagguaauaugaacagca

SEQ ID NO: 206655 - RNA, 22 nt, Artificial Sequence
  Synthetic
cgauaagguaauaugaacagca

SEQ ID NO: 206656 - RNA, 23 nt, Artificial Sequence
  Synthetic
acgauaagguaauaugaacagca

SEQ ID NO: 206657 - RNA, 24 nt, Artificial Sequence
  Synthetic
aacgauaagguaauaugaacagca

SEQ ID NO: 206658 - RNA, 18 nt, Artificial Sequence
  Synthetic
uggccacauguaacagca

SEQ ID NO: 206659 - RNA, 19 nt, Artificial Sequence
  Synthetic
guggccacauguaacagca

SEQ ID NO: 206660 - RNA, 20 nt, Artificial Sequence
  Synthetic
uguggccacauguaacagca

SEQ ID NO: 206661 - RNA, 21 nt, Artificial Sequence
  Synthetic
cuguggccacauguaacagca

SEQ ID NO: 206662 - RNA, 22 nt, Artificial Sequence
  Synthetic
ccuguggccacauguaacagca

SEQ ID NO: 206663 - RNA, 23 nt, Artificial Sequence
  Synthetic
cccuguggccacauguaacagca

SEQ ID NO: 206664 - RNA, 24 nt, Artificial Sequence
  Synthetic
gcccuguggccacauguaacagca

SEQ ID NO: 206665 - RNA, 18 nt, Artificial Sequence
  Synthetic
ucaguuaucuuaacagca

SEQ ID NO: 206666 - RNA, 19 nt, Artificial Sequence
  Synthetic
uucaguuaucuuaacagca

SEQ ID NO: 206667 - RNA, 20 nt, Artificial Sequence
  Synthetic
cuucaguuaucuuaacagca

SEQ ID NO: 206668 - RNA, 21 nt, Artificial Sequence
  Synthetic
acuucaguuaucuuaacagca

SEQ ID NO: 206669 - RNA, 22 nt, Artificial Sequence
  Synthetic
uacuucaguuaucuuaacagca

SEQ ID NO: 206670 - RNA, 23 nt, Artificial Sequence
  Synthetic
uuacuucaguuaucuuaacagca

SEQ ID NO: 206671 - RNA, 24 nt, Artificial Sequence
  Synthetic
uuuacuucaguuaucuuaacagca

SEQ ID NO: 206672 - RNA, 18 nt, Artificial Sequence
  Synthetic
auacaucaaaagacagca

SEQ ID NO: 206673 - RNA, 19 nt, Artificial Sequence
  Synthetic
uauacaucaaaagacagca

SEQ ID NO: 206674 - RNA, 20 nt, Artificial Sequence
  Synthetic
cuauacaucaaaagacagca

SEQ ID NO: 206675 - RNA, 21 nt, Artificial Sequence
  Synthetic
ucuauacaucaaaagacagca

SEQ ID NO: 206676 - RNA, 22 nt, Artificial Sequence
  Synthetic
aucuauacaucaaaagacagca

SEQ ID NO: 206677 - RNA, 23 nt, Artificial Sequence
  Synthetic
caucuauacaucaaaagacagca

SEQ ID NO: 206678 - RNA, 24 nt, Artificial Sequence
  Synthetic
acaucuauacaucaaaagacagca

SEQ ID NO: 206679 - RNA, 18 nt, Artificial Sequence
  Synthetic
uuccaagugcugacagca

SEQ ID NO: 206680 - RNA, 19 nt, Artificial Sequence
  Synthetic
guuccaagugcugacagca

SEQ ID NO: 206681 - RNA, 20 nt, Artificial Sequence
  Synthetic
uguuccaagugcugacagca

SEQ ID NO: 206682 - RNA, 21 nt, Artificial Sequence
  Synthetic
cuguuccaagugcugacagca

SEQ ID NO: 206683 - RNA, 22 nt, Artificial Sequence
  Synthetic
gcuguuccaagugcugacagca

SEQ ID NO: 206684 - RNA, 23 nt, Artificial Sequence
  Synthetic
ugcuguuccaagugcugacagca

SEQ ID NO: 206685 - RNA, 24 nt, Artificial Sequence
  Synthetic
gugcuguuccaagugcugacagca

SEQ ID NO: 206686 - RNA, 18 nt, Artificial Sequence
  Synthetic
ugaaaaucuuugacagca

SEQ ID NO: 206687 - RNA, 19 nt, Artificial Sequence
  Synthetic
augaaaaucuuugacagca

SEQ ID NO: 206688 - RNA, 20 nt, Artificial Sequence
  Synthetic
aaugaaaaucuuugacagca

SEQ ID NO: 206689 - RNA, 21 nt, Artificial Sequence
  Synthetic
caaugaaaaucuuugacagca

SEQ ID NO: 206690 - RNA, 22 nt, Artificial Sequence
  Synthetic
gcaaugaaaaucuuugacagca

SEQ ID NO: 206691 - RNA, 23 nt, Artificial Sequence
  Synthetic
ugcaaugaaaaucuuugacagca

SEQ ID NO: 206692 - RNA, 24 nt, Artificial Sequence
  Synthetic
cugcaaugaaaaucuuugacagca

SEQ ID NO: 206693 - RNA, 18 nt, Artificial Sequence
  Synthetic
ugcucccaaaauacagca

SEQ ID NO: 206694 - RNA, 19 nt, Artificial Sequence
  Synthetic
cugcucccaaaauacagca

SEQ ID NO: 206695 - RNA, 20 nt, Artificial Sequence
  Synthetic
ucugcucccaaaauacagca

SEQ ID NO: 206696 - RNA, 21 nt, Artificial Sequence
  Synthetic
aucugcucccaaaauacagca

SEQ ID NO: 206697 - RNA, 22 nt, Artificial Sequence
  Synthetic
caucugcucccaaaauacagca

SEQ ID NO: 206698 - RNA, 23 nt, Artificial Sequence
  Synthetic
ucaucugcucccaaaauacagca

SEQ ID NO: 206699 - RNA, 24 nt, Artificial Sequence
  Synthetic
cucaucugcucccaaaauacagca

SEQ ID NO: 206700 - RNA, 18 nt, Artificial Sequence
  Synthetic
gcugcuggaauuacagca

SEQ ID NO: 206701 - RNA, 19 nt, Artificial Sequence
  Synthetic
agcugcuggaauuacagca

SEQ ID NO: 206702 - RNA, 20 nt, Artificial Sequence
  Synthetic
uagcugcuggaauuacagca

SEQ ID NO: 206703 - RNA, 21 nt, Artificial Sequence
  Synthetic
cuagcugcuggaauuacagca

SEQ ID NO: 206704 - RNA, 22 nt, Artificial Sequence
  Synthetic
ucuagcugcuggaauuacagca

SEQ ID NO: 206705 - RNA, 23 nt, Artificial Sequence
  Synthetic
uucuagcugcuggaauuacagca

SEQ ID NO: 206706 - RNA, 24 nt, Artificial Sequence
  Synthetic
guucuagcugcuggaauuacagca

SEQ ID NO: 206707 - RNA, 18 nt, Artificial Sequence
  Synthetic
uuuccugucauuacagca

SEQ ID NO: 206708 - RNA, 19 nt, Artificial Sequence
  Synthetic
guuuccugucauuacagca

SEQ ID NO: 206709 - RNA, 20 nt, Artificial Sequence
  Synthetic
cguuuccugucauuacagca

SEQ ID NO: 206710 - RNA, 21 nt, Artificial Sequence
  Synthetic
acguuuccugucauuacagca

SEQ ID NO: 206711 - RNA, 22 nt, Artificial Sequence
  Synthetic
cacguuuccugucauuacagca

SEQ ID NO: 206712 - RNA, 23 nt, Artificial Sequence
  Synthetic
ccacguuuccugucauuacagca

SEQ ID NO: 206713 - RNA, 24 nt, Artificial Sequence
  Synthetic
accacguuuccugucauuacagca

SEQ ID NO: 206714 - RNA, 18 nt, Artificial Sequence
  Synthetic
agauccagcaacccagca

SEQ ID NO: 206715 - RNA, 19 nt, Artificial Sequence
  Synthetic
cagauccagcaacccagca

SEQ ID NO: 206716 - RNA, 20 nt, Artificial Sequence
  Synthetic
acagauccagcaacccagca

SEQ ID NO: 206717 - RNA, 21 nt, Artificial Sequence
  Synthetic
cacagauccagcaacccagca

SEQ ID NO: 206718 - RNA, 22 nt, Artificial Sequence
  Synthetic
acacagauccagcaacccagca

SEQ ID NO: 206719 - RNA, 23 nt, Artificial Sequence
  Synthetic
uacacagauccagcaacccagca

SEQ ID NO: 206720 - RNA, 24 nt, Artificial Sequence
  Synthetic
auacacagauccagcaacccagca

SEQ ID NO: 206721 - RNA, 18 nt, Artificial Sequence
  Synthetic
ugggauauauacccagca

SEQ ID NO: 206722 - RNA, 19 nt, Artificial Sequence
  Synthetic
uugggauauauacccagca

SEQ ID NO: 206723 - RNA, 20 nt, Artificial Sequence
  Synthetic
uuugggauauauacccagca

SEQ ID NO: 206724 - RNA, 21 nt, Artificial Sequence
  Synthetic
cuuugggauauauacccagca

SEQ ID NO: 206725 - RNA, 22 nt, Artificial Sequence
  Synthetic
ucuuugggauauauacccagca

SEQ ID NO: 206726 - RNA, 23 nt, Artificial Sequence
  Synthetic
uucuuugggauauauacccagca

SEQ ID NO: 206727 - RNA, 24 nt, Artificial Sequence
  Synthetic
uuucuuugggauauauacccagca

SEQ ID NO: 206728 - RNA, 18 nt, Artificial Sequence
  Synthetic
uuggguauauacccagca

SEQ ID NO: 206729 - RNA, 19 nt, Artificial Sequence
  Synthetic
uuuggguauauacccagca

SEQ ID NO: 206730 - RNA, 20 nt, Artificial Sequence
  Synthetic
cuuuggguauauacccagca

SEQ ID NO: 206731 - RNA, 21 nt, Artificial Sequence
  Synthetic
ucuuuggguauauacccagca

SEQ ID NO: 206732 - RNA, 22 nt, Artificial Sequence
  Synthetic
uucuuuggguauauacccagca

SEQ ID NO: 206733 - RNA, 23 nt, Artificial Sequence
  Synthetic
uuucuuuggguauauacccagca

SEQ ID NO: 206734 - RNA, 24 nt, Artificial Sequence
  Synthetic
cuuucuuuggguauauacccagca

SEQ ID NO: 206735 - RNA, 20 nt, Artificial Sequence
  Synthetic
uuuuggguauauacccagca

SEQ ID NO: 206736 - RNA, 21 nt, Artificial Sequence
  Synthetic
cuuuuggguauauacccagca

SEQ ID NO: 206737 - RNA, 22 nt, Artificial Sequence
  Synthetic
ucuuuuggguauauacccagca

SEQ ID NO: 206738 - RNA, 23 nt, Artificial Sequence
  Synthetic
uucuuuuggguauauacccagca

SEQ ID NO: 206739 - RNA, 24 nt, Artificial Sequence
  Synthetic
uuucuuuuggguauauacccagca

SEQ ID NO: 206740 - RNA, 18 nt, Artificial Sequence
  Synthetic
gaagagagguucccagca

SEQ ID NO: 206741 - RNA, 19 nt, Artificial Sequence
  Synthetic
ugaagagagguucccagca

SEQ ID NO: 206742 - RNA, 20 nt, Artificial Sequence
  Synthetic
augaagagagguucccagca

SEQ ID NO: 206743 - RNA, 21 nt, Artificial Sequence
  Synthetic
uaugaagagagguucccagca

SEQ ID NO: 206744 - RNA, 22 nt, Artificial Sequence
  Synthetic
auaugaagagagguucccagca

SEQ ID NO: 206745 - RNA, 23 nt, Artificial Sequence
  Synthetic
aauaugaagagagguucccagca

SEQ ID NO: 206746 - RNA, 24 nt, Artificial Sequence
  Synthetic
aaauaugaagagagguucccagca

SEQ ID NO: 206747 - RNA, 18 nt, Artificial Sequence
  Synthetic
gcuucacauuucccagca

SEQ ID NO: 206748 - RNA, 19 nt, Artificial Sequence
  Synthetic
ugcuucacauuucccagca

SEQ ID NO: 206749 - RNA, 20 nt, Artificial Sequence
  Synthetic
cugcuucacauuucccagca

SEQ ID NO: 206750 - RNA, 21 nt, Artificial Sequence
  Synthetic
ccugcuucacauuucccagca

SEQ ID NO: 206751 - RNA, 22 nt, Artificial Sequence
  Synthetic
uccugcuucacauuucccagca

SEQ ID NO: 206752 - RNA, 23 nt, Artificial Sequence
  Synthetic
cuccugcuucacauuucccagca

SEQ ID NO: 206753 - RNA, 24 nt, Artificial Sequence
  Synthetic
acuccugcuucacauuucccagca

SEQ ID NO: 206754 - RNA, 18 nt, Artificial Sequence
  Synthetic
gaaauaagagauccagca

SEQ ID NO: 206755 - RNA, 19 nt, Artificial Sequence
  Synthetic
ggaaauaagagauccagca

SEQ ID NO: 206756 - RNA, 20 nt, Artificial Sequence
  Synthetic
aggaaauaagagauccagca

SEQ ID NO: 206757 - RNA, 21 nt, Artificial Sequence
  Synthetic
caggaaauaagagauccagca

SEQ ID NO: 206758 - RNA, 22 nt, Artificial Sequence
  Synthetic
ccaggaaauaagagauccagca

SEQ ID NO: 206759 - RNA, 23 nt, Artificial Sequence
  Synthetic
uccaggaaauaagagauccagca

SEQ ID NO: 206760 - RNA, 24 nt, Artificial Sequence
  Synthetic
uuccaggaaauaagagauccagca

SEQ ID NO: 206761 - RNA, 18 nt, Artificial Sequence
  Synthetic
gaugagaaggauccagca

SEQ ID NO: 206762 - RNA, 19 nt, Artificial Sequence
  Synthetic
ggaugagaaggauccagca

SEQ ID NO: 206763 - RNA, 20 nt, Artificial Sequence
  Synthetic
aggaugagaaggauccagca

SEQ ID NO: 206764 - RNA, 21 nt, Artificial Sequence
  Synthetic
caggaugagaaggauccagca

SEQ ID NO: 206765 - RNA, 22 nt, Artificial Sequence
  Synthetic
ucaggaugagaaggauccagca

SEQ ID NO: 206766 - RNA, 23 nt, Artificial Sequence
  Synthetic
aucaggaugagaaggauccagca

SEQ ID NO: 206767 - RNA, 24 nt, Artificial Sequence
  Synthetic
gaucaggaugagaaggauccagca

SEQ ID NO: 206768 - RNA, 18 nt, Artificial Sequence
  Synthetic
cacaacuccucuccagca

SEQ ID NO: 206769 - RNA, 19 nt, Artificial Sequence
  Synthetic
ucacaacuccucuccagca

SEQ ID NO: 206770 - RNA, 20 nt, Artificial Sequence
  Synthetic
aucacaacuccucuccagca

SEQ ID NO: 206771 - RNA, 21 nt, Artificial Sequence
  Synthetic
gaucacaacuccucuccagca

SEQ ID NO: 206772 - RNA, 22 nt, Artificial Sequence
  Synthetic
ugaucacaacuccucuccagca

SEQ ID NO: 206773 - RNA, 23 nt, Artificial Sequence
  Synthetic
augaucacaacuccucuccagca

SEQ ID NO: 206774 - RNA, 24 nt, Artificial Sequence
  Synthetic
aaugaucacaacuccucuccagca

SEQ ID NO: 206775 - RNA, 18 nt, Artificial Sequence
  Synthetic
acccuacaauguccagca

SEQ ID NO: 206776 - RNA, 19 nt, Artificial Sequence
  Synthetic
uacccuacaauguccagca

SEQ ID NO: 206777 - RNA, 20 nt, Artificial Sequence
  Synthetic
guacccuacaauguccagca

SEQ ID NO: 206778 - RNA, 21 nt, Artificial Sequence
  Synthetic
gguacccuacaauguccagca

SEQ ID NO: 206779 - RNA, 22 nt, Artificial Sequence
  Synthetic
agguacccuacaauguccagca

SEQ ID NO: 206780 - RNA, 23 nt, Artificial Sequence
  Synthetic
cagguacccuacaauguccagca

SEQ ID NO: 206781 - RNA, 24 nt, Artificial Sequence
  Synthetic
gcagguacccuacaauguccagca

SEQ ID NO: 206782 - RNA, 18 nt, Artificial Sequence
  Synthetic
aucauaagaacagcagca

SEQ ID NO: 206783 - RNA, 19 nt, Artificial Sequence
  Synthetic
uaucauaagaacagcagca

SEQ ID NO: 206784 - RNA, 20 nt, Artificial Sequence
  Synthetic
cuaucauaagaacagcagca

SEQ ID NO: 206785 - RNA, 21 nt, Artificial Sequence
  Synthetic
acuaucauaagaacagcagca

SEQ ID NO: 206786 - RNA, 22 nt, Artificial Sequence
  Synthetic
cacuaucauaagaacagcagca

SEQ ID NO: 206787 - RNA, 23 nt, Artificial Sequence
  Synthetic
ucacuaucauaagaacagcagca

SEQ ID NO: 206788 - RNA, 24 nt, Artificial Sequence
  Synthetic
cucacuaucauaagaacagcagca

SEQ ID NO: 206789 - RNA, 18 nt, Artificial Sequence
  Synthetic
agcaguaggugagcagca

SEQ ID NO: 206790 - RNA, 19 nt, Artificial Sequence
  Synthetic
aagcaguaggugagcagca

SEQ ID NO: 206791 - RNA, 20 nt, Artificial Sequence
  Synthetic
aaagcaguaggugagcagca

SEQ ID NO: 206792 - RNA, 21 nt, Artificial Sequence
  Synthetic
caaagcaguaggugagcagca

SEQ ID NO: 206793 - RNA, 22 nt, Artificial Sequence
  Synthetic
gcaaagcaguaggugagcagca

SEQ ID NO: 206794 - RNA, 23 nt, Artificial Sequence
  Synthetic
cgcaaagcaguaggugagcagca

SEQ ID NO: 206795 - RNA, 24 nt, Artificial Sequence
  Synthetic
ucgcaaagcaguaggugagcagca

SEQ ID NO: 206796 - RNA, 18 nt, Artificial Sequence
  Synthetic
ggcagagggagggcagca

SEQ ID NO: 206797 - RNA, 19 nt, Artificial Sequence
  Synthetic
uggcagagggagggcagca

SEQ ID NO: 206798 - RNA, 20 nt, Artificial Sequence
  Synthetic
guggcagagggagggcagca

SEQ ID NO: 206799 - RNA, 21 nt, Artificial Sequence
  Synthetic
uguggcagagggagggcagca

SEQ ID NO: 206800 - RNA, 22 nt, Artificial Sequence
  Synthetic
cuguggcagagggagggcagca

SEQ ID NO: 206801 - RNA, 23 nt, Artificial Sequence
  Synthetic
acuguggcagagggagggcagca

SEQ ID NO: 206802 - RNA, 24 nt, Artificial Sequence
  Synthetic
aacuguggcagagggagggcagca

SEQ ID NO: 206803 - RNA, 18 nt, Artificial Sequence
  Synthetic
augaggcugagggcagca

SEQ ID NO: 206804 - RNA, 19 nt, Artificial Sequence
  Synthetic
uaugaggcugagggcagca

SEQ ID NO: 206805 - RNA, 20 nt, Artificial Sequence
  Synthetic
auaugaggcugagggcagca

SEQ ID NO: 206806 - RNA, 21 nt, Artificial Sequence
  Synthetic
aauaugaggcugagggcagca

SEQ ID NO: 206807 - RNA, 22 nt, Artificial Sequence
  Synthetic
gaauaugaggcugagggcagca

SEQ ID NO: 206808 - RNA, 23 nt, Artificial Sequence
  Synthetic
ugaauaugaggcugagggcagca

SEQ ID NO: 206809 - RNA, 24 nt, Artificial Sequence
  Synthetic
cugaauaugaggcugagggcagca

SEQ ID NO: 206810 - RNA, 18 nt, Artificial Sequence
  Synthetic
aacgcguguggggcagca

SEQ ID NO: 206811 - RNA, 19 nt, Artificial Sequence
  Synthetic
uaacgcguguggggcagca

SEQ ID NO: 206812 - RNA, 20 nt, Artificial Sequence
  Synthetic
cuaacgcguguggggcagca

SEQ ID NO: 206813 - RNA, 21 nt, Artificial Sequence
  Synthetic
gcuaacgcguguggggcagca

SEQ ID NO: 206814 - RNA, 22 nt, Artificial Sequence
  Synthetic
ugcuaacgcguguggggcagca

SEQ ID NO: 206815 - RNA, 23 nt, Artificial Sequence
  Synthetic
gugcuaacgcguguggggcagca

SEQ ID NO: 206816 - RNA, 24 nt, Artificial Sequence
  Synthetic
agugcuaacgcguguggggcagca

SEQ ID NO: 206817 - RNA, 18 nt, Artificial Sequence
  Synthetic
uaaauuuuccuggcagca

SEQ ID NO: 206818 - RNA, 19 nt, Artificial Sequence
  Synthetic
uuaaauuuuccuggcagca

SEQ ID NO: 206819 - RNA, 20 nt, Artificial Sequence
  Synthetic
auuaaauuuuccuggcagca

SEQ ID NO: 206820 - RNA, 21 nt, Artificial Sequence
  Synthetic
cauuaaauuuuccuggcagca

SEQ ID NO: 206821 - RNA, 22 nt, Artificial Sequence
  Synthetic
acauuaaauuuuccuggcagca

SEQ ID NO: 206822 - RNA, 23 nt, Artificial Sequence
  Synthetic
aacauuaaauuuuccuggcagca

SEQ ID NO: 206823 - RNA, 24 nt, Artificial Sequence
  Synthetic
aaacauuaaauuuuccuggcagca

SEQ ID NO: 206824 - RNA, 18 nt, Artificial Sequence
  Synthetic
uuuagagugcaugcagca

SEQ ID NO: 206825 - RNA, 19 nt, Artificial Sequence
  Synthetic
uuuuagagugcaugcagca

SEQ ID NO: 206826 - RNA, 20 nt, Artificial Sequence
  Synthetic
cuuuuagagugcaugcagca

SEQ ID NO: 206827 - RNA, 21 nt, Artificial Sequence
  Synthetic
acuuuuagagugcaugcagca

SEQ ID NO: 206828 - RNA, 22 nt, Artificial Sequence
  Synthetic
aacuuuuagagugcaugcagca

SEQ ID NO: 206829 - RNA, 23 nt, Artificial Sequence
  Synthetic
gaacuuuuagagugcaugcagca

SEQ ID NO: 206830 - RNA, 24 nt, Artificial Sequence
  Synthetic
ggaacuuuuagagugcaugcagca

SEQ ID NO: 206831 - RNA, 18 nt, Artificial Sequence
  Synthetic
ggucaaaaagaugcagca

SEQ ID NO: 206832 - RNA, 19 nt, Artificial Sequence
  Synthetic
aggucaaaaagaugcagca

SEQ ID NO: 206833 - RNA, 20 nt, Artificial Sequence
  Synthetic
aaggucaaaaagaugcagca

SEQ ID NO: 206834 - RNA, 21 nt, Artificial Sequence
  Synthetic
uaaggucaaaaagaugcagca

SEQ ID NO: 206835 - RNA, 22 nt, Artificial Sequence
  Synthetic
cuaaggucaaaaagaugcagca

SEQ ID NO: 206836 - RNA, 23 nt, Artificial Sequence
  Synthetic
acuaaggucaaaaagaugcagca

SEQ ID NO: 206837 - RNA, 24 nt, Artificial Sequence
  Synthetic
aacuaaggucaaaaagaugcagca

SEQ ID NO: 206838 - RNA, 18 nt, Artificial Sequence
  Synthetic
auauagcuuacugcagca

SEQ ID NO: 206839 - RNA, 19 nt, Artificial Sequence
  Synthetic
gauauagcuuacugcagca

SEQ ID NO: 206840 - RNA, 20 nt, Artificial Sequence
  Synthetic
ggauauagcuuacugcagca

SEQ ID NO: 206841 - RNA, 21 nt, Artificial Sequence
  Synthetic
gggauauagcuuacugcagca

SEQ ID NO: 206842 - RNA, 22 nt, Artificial Sequence
  Synthetic
ggggauauagcuuacugcagca

SEQ ID NO: 206843 - RNA, 23 nt, Artificial Sequence
  Synthetic
gggggauauagcuuacugcagca

SEQ ID NO: 206844 - RNA, 24 nt, Artificial Sequence
  Synthetic
ugggggauauagcuuacugcagca

SEQ ID NO: 206845 - RNA, 18 nt, Artificial Sequence
  Synthetic
cuucguuuaucugcagca

SEQ ID NO: 206846 - RNA, 19 nt, Artificial Sequence
  Synthetic
ccuucguuuaucugcagca

SEQ ID NO: 206847 - RNA, 20 nt, Artificial Sequence
  Synthetic
gccuucguuuaucugcagca

SEQ ID NO: 206848 - RNA, 21 nt, Artificial Sequence
  Synthetic
ggccuucguuuaucugcagca

SEQ ID NO: 206849 - RNA, 22 nt, Artificial Sequence
  Synthetic
uggccuucguuuaucugcagca

SEQ ID NO: 206850 - RNA, 23 nt, Artificial Sequence
  Synthetic
auggccuucguuuaucugcagca

SEQ ID NO: 206851 - RNA, 24 nt, Artificial Sequence
  Synthetic
aauggccuucguuuaucugcagca

SEQ ID NO: 206852 - RNA, 18 nt, Artificial Sequence
  Synthetic
auugggaauagugcagca

SEQ ID NO: 206853 - RNA, 19 nt, Artificial Sequence
  Synthetic
uauugggaauagugcagca

SEQ ID NO: 206854 - RNA, 20 nt, Artificial Sequence
  Synthetic
guauugggaauagugcagca

SEQ ID NO: 206855 - RNA, 21 nt, Artificial Sequence
  Synthetic
gguauugggaauagugcagca

SEQ ID NO: 206856 - RNA, 22 nt, Artificial Sequence
  Synthetic
ugguauugggaauagugcagca

SEQ ID NO: 206857 - RNA, 23 nt, Artificial Sequence
  Synthetic
uugguauugggaauagugcagca

SEQ ID NO: 206858 - RNA, 24 nt, Artificial Sequence
  Synthetic
uuugguauugggaauagugcagca

SEQ ID NO: 206859 - RNA, 18 nt, Artificial Sequence
  Synthetic
ccuugacuaauugcagca

SEQ ID NO: 206860 - RNA, 19 nt, Artificial Sequence
  Synthetic
uccuugacuaauugcagca

SEQ ID NO: 206861 - RNA, 20 nt, Artificial Sequence
  Synthetic
auccuugacuaauugcagca

SEQ ID NO: 206862 - RNA, 21 nt, Artificial Sequence
  Synthetic
cauccuugacuaauugcagca

SEQ ID NO: 206863 - RNA, 22 nt, Artificial Sequence
  Synthetic
ucauccuugacuaauugcagca

SEQ ID NO: 206864 - RNA, 23 nt, Artificial Sequence
  Synthetic
aucauccuugacuaauugcagca

SEQ ID NO: 206865 - RNA, 24 nt, Artificial Sequence
  Synthetic
uaucauccuugacuaauugcagca

SEQ ID NO: 206866 - RNA, 18 nt, Artificial Sequence
  Synthetic
uuguccugaguugcagca

SEQ ID NO: 206867 - RNA, 19 nt, Artificial Sequence
  Synthetic
auuguccugaguugcagca

SEQ ID NO: 206868 - RNA, 20 nt, Artificial Sequence
  Synthetic
aauuguccugaguugcagca

SEQ ID NO: 206869 - RNA, 21 nt, Artificial Sequence
  Synthetic
gaauuguccugaguugcagca

SEQ ID NO: 206870 - RNA, 22 nt, Artificial Sequence
  Synthetic
agaauuguccugaguugcagca

SEQ ID NO: 206871 - RNA, 23 nt, Artificial Sequence
  Synthetic
cagaauuguccugaguugcagca

SEQ ID NO: 206872 - RNA, 24 nt, Artificial Sequence
  Synthetic
ucagaauuguccugaguugcagca

SEQ ID NO: 206873 - RNA, 18 nt, Artificial Sequence
  Synthetic
ggaagacgaauaucagca

SEQ ID NO: 206874 - RNA, 19 nt, Artificial Sequence
  Synthetic
uggaagacgaauaucagca

SEQ ID NO: 206875 - RNA, 20 nt, Artificial Sequence
  Synthetic
guggaagacgaauaucagca

SEQ ID NO: 206876 - RNA, 21 nt, Artificial Sequence
  Synthetic
gguggaagacgaauaucagca

SEQ ID NO: 206877 - RNA, 22 nt, Artificial Sequence
  Synthetic
ggguggaagacgaauaucagca

SEQ ID NO: 206878 - RNA, 23 nt, Artificial Sequence
  Synthetic
gggguggaagacgaauaucagca

SEQ ID NO: 206879 - RNA, 24 nt, Artificial Sequence
  Synthetic
ugggguggaagacgaauaucagca

SEQ ID NO: 206880 - RNA, 18 nt, Artificial Sequence
  Synthetic
uauuuagcucccucagca

SEQ ID NO: 206881 - RNA, 19 nt, Artificial Sequence
  Synthetic
guauuuagcucccucagca

SEQ ID NO: 206882 - RNA, 20 nt, Artificial Sequence
  Synthetic
aguauuuagcucccucagca

SEQ ID NO: 206883 - RNA, 21 nt, Artificial Sequence
  Synthetic
aaguauuuagcucccucagca

SEQ ID NO: 206884 - RNA, 22 nt, Artificial Sequence
  Synthetic
caaguauuuagcucccucagca

SEQ ID NO: 206885 - RNA, 23 nt, Artificial Sequence
  Synthetic
acaaguauuuagcucccucagca

SEQ ID NO: 206886 - RNA, 24 nt, Artificial Sequence
  Synthetic
cacaaguauuuagcucccucagca

SEQ ID NO: 206887 - RNA, 18 nt, Artificial Sequence
  Synthetic
uuucucuauuucucagca

SEQ ID NO: 206888 - RNA, 19 nt, Artificial Sequence
  Synthetic
auuucucuauuucucagca

SEQ ID NO: 206889 - RNA, 20 nt, Artificial Sequence
  Synthetic
uauuucucuauuucucagca

SEQ ID NO: 206890 - RNA, 21 nt, Artificial Sequence
  Synthetic
guauuucucuauuucucagca

SEQ ID NO: 206891 - RNA, 22 nt, Artificial Sequence
  Synthetic
uguauuucucuauuucucagca

SEQ ID NO: 206892 - RNA, 23 nt, Artificial Sequence
  Synthetic
auguauuucucuauuucucagca

SEQ ID NO: 206893 - RNA, 24 nt, Artificial Sequence
  Synthetic
uauguauuucucuauuucucagca

SEQ ID NO: 206894 - RNA, 18 nt, Artificial Sequence
  Synthetic
auagaacauaugucagca

SEQ ID NO: 206895 - RNA, 19 nt, Artificial Sequence
  Synthetic
aauagaacauaugucagca

SEQ ID NO: 206896 - RNA, 20 nt, Artificial Sequence
  Synthetic
caauagaacauaugucagca

SEQ ID NO: 206897 - RNA, 21 nt, Artificial Sequence
  Synthetic
ucaauagaacauaugucagca

SEQ ID NO: 206898 - RNA, 22 nt, Artificial Sequence
  Synthetic
uucaauagaacauaugucagca

SEQ ID NO: 206899 - RNA, 23 nt, Artificial Sequence
  Synthetic
guucaauagaacauaugucagca

SEQ ID NO: 206900 - RNA, 24 nt, Artificial Sequence
  Synthetic
uguucaauagaacauaugucagca

SEQ ID NO: 206901 - RNA, 18 nt, Artificial Sequence
  Synthetic
ggggugcagucuucagca

SEQ ID NO: 206902 - RNA, 19 nt, Artificial Sequence
  Synthetic
uggggugcagucuucagca

SEQ ID NO: 206903 - RNA, 20 nt, Artificial Sequence
  Synthetic
guggggugcagucuucagca

SEQ ID NO: 206904 - RNA, 21 nt, Artificial Sequence
  Synthetic
aguggggugcagucuucagca

SEQ ID NO: 206905 - RNA, 22 nt, Artificial Sequence
  Synthetic
caguggggugcagucuucagca

SEQ ID NO: 206906 - RNA, 23 nt, Artificial Sequence
  Synthetic
gcaguggggugcagucuucagca

SEQ ID NO: 206907 - RNA, 24 nt, Artificial Sequence
  Synthetic
agcaguggggugcagucuucagca

SEQ ID NO: 206908 - RNA, 18 nt, Artificial Sequence
  Synthetic
agauuuuaaaguucagca

SEQ ID NO: 206909 - RNA, 19 nt, Artificial Sequence
  Synthetic
aagauuuuaaaguucagca

SEQ ID NO: 206910 - RNA, 20 nt, Artificial Sequence
  Synthetic
aaagauuuuaaaguucagca

SEQ ID NO: 206911 - RNA, 21 nt, Artificial Sequence
  Synthetic
gaaagauuuuaaaguucagca

SEQ ID NO: 206912 - RNA, 22 nt, Artificial Sequence
  Synthetic
agaaagauuuuaaaguucagca

SEQ ID NO: 206913 - RNA, 23 nt, Artificial Sequence
  Synthetic
gagaaagauuuuaaaguucagca

SEQ ID NO: 206914 - RNA, 24 nt, Artificial Sequence
  Synthetic
ggagaaagauuuuaaaguucagca

SEQ ID NO: 206915 - RNA, 18 nt, Artificial Sequence
  Synthetic
uuuuuaauauaaagagca

SEQ ID NO: 206916 - RNA, 19 nt, Artificial Sequence
  Synthetic
auuuuuaauauaaagagca

SEQ ID NO: 206917 - RNA, 20 nt, Artificial Sequence
  Synthetic
uauuuuuaauauaaagagca

SEQ ID NO: 206918 - RNA, 21 nt, Artificial Sequence
  Synthetic
uuauuuuuaauauaaagagca

SEQ ID NO: 206919 - RNA, 22 nt, Artificial Sequence
  Synthetic
auuauuuuuaauauaaagagca

SEQ ID NO: 206920 - RNA, 23 nt, Artificial Sequence
  Synthetic
aauuauuuuuaauauaaagagca

SEQ ID NO: 206921 - RNA, 24 nt, Artificial Sequence
  Synthetic
aaauuauuuuuaauauaaagagca

SEQ ID NO: 206922 - RNA, 18 nt, Artificial Sequence
  Synthetic
cuauugagaccaagagca

SEQ ID NO: 206923 - RNA, 19 nt, Artificial Sequence
  Synthetic
gcuauugagaccaagagca

SEQ ID NO: 206924 - RNA, 20 nt, Artificial Sequence
  Synthetic
ggcuauugagaccaagagca

SEQ ID NO: 206925 - RNA, 21 nt, Artificial Sequence
  Synthetic
aggcuauugagaccaagagca

SEQ ID NO: 206926 - RNA, 22 nt, Artificial Sequence
  Synthetic
aaggcuauugagaccaagagca

SEQ ID NO: 206927 - RNA, 23 nt, Artificial Sequence
  Synthetic
gaaggcuauugagaccaagagca

SEQ ID NO: 206928 - RNA, 24 nt, Artificial Sequence
  Synthetic
ggaaggcuauugagaccaagagca

SEQ ID NO: 206929 - RNA, 18 nt, Artificial Sequence
  Synthetic
cacaccauccacagagca

SEQ ID NO: 206930 - RNA, 19 nt, Artificial Sequence
  Synthetic
acacaccauccacagagca

SEQ ID NO: 206931 - RNA, 20 nt, Artificial Sequence
  Synthetic
uacacaccauccacagagca

SEQ ID NO: 206932 - RNA, 21 nt, Artificial Sequence
  Synthetic
guacacaccauccacagagca

SEQ ID NO: 206933 - RNA, 22 nt, Artificial Sequence
  Synthetic
aguacacaccauccacagagca

SEQ ID NO: 206934 - RNA, 23 nt, Artificial Sequence
  Synthetic
aaguacacaccauccacagagca

SEQ ID NO: 206935 - RNA, 24 nt, Artificial Sequence
  Synthetic
uaaguacacaccauccacagagca

SEQ ID NO: 206936 - RNA, 18 nt, Artificial Sequence
  Synthetic
aaaauaccuuccagagca

SEQ ID NO: 206937 - RNA, 19 nt, Artificial Sequence
  Synthetic
caaaauaccuuccagagca

SEQ ID NO: 206938 - RNA, 20 nt, Artificial Sequence
  Synthetic
acaaaauaccuuccagagca

SEQ ID NO: 206939 - RNA, 21 nt, Artificial Sequence
  Synthetic
cacaaaauaccuuccagagca

SEQ ID NO: 206940 - RNA, 22 nt, Artificial Sequence
  Synthetic
ccacaaaauaccuuccagagca

SEQ ID NO: 206941 - RNA, 23 nt, Artificial Sequence
  Synthetic
gccacaaaauaccuuccagagca

SEQ ID NO: 206942 - RNA, 24 nt, Artificial Sequence
  Synthetic
agccacaaaauaccuuccagagca

SEQ ID NO: 206943 - RNA, 18 nt, Artificial Sequence
  Synthetic
uauggcaucugcagagca

SEQ ID NO: 206944 - RNA, 19 nt, Artificial Sequence
  Synthetic
auauggcaucugcagagca

SEQ ID NO: 206945 - RNA, 20 nt, Artificial Sequence
  Synthetic
cauauggcaucugcagagca

SEQ ID NO: 206946 - RNA, 21 nt, Artificial Sequence
  Synthetic
acauauggcaucugcagagca

SEQ ID NO: 206947 - RNA, 22 nt, Artificial Sequence
  Synthetic
uacauauggcaucugcagagca

SEQ ID NO: 206948 - RNA, 23 nt, Artificial Sequence
  Synthetic
uuacauauggcaucugcagagca

SEQ ID NO: 206949 - RNA, 24 nt, Artificial Sequence
  Synthetic
auuacauauggcaucugcagagca

SEQ ID NO: 206950 - RNA, 18 nt, Artificial Sequence
  Synthetic
uaggaggcacagagagca

SEQ ID NO: 206951 - RNA, 19 nt, Artificial Sequence
  Synthetic
uuaggaggcacagagagca

SEQ ID NO: 206952 - RNA, 20 nt, Artificial Sequence
  Synthetic
uuuaggaggcacagagagca

SEQ ID NO: 206953 - RNA, 21 nt, Artificial Sequence
  Synthetic
uuuuaggaggcacagagagca

SEQ ID NO: 206954 - RNA, 22 nt, Artificial Sequence
  Synthetic
guuuuaggaggcacagagagca

SEQ ID NO: 206955 - RNA, 23 nt, Artificial Sequence
  Synthetic
uguuuuaggaggcacagagagca

SEQ ID NO: 206956 - RNA, 24 nt, Artificial Sequence
  Synthetic
auguuuuaggaggcacagagagca

SEQ ID NO: 206957 - RNA, 18 nt, Artificial Sequence
  Synthetic
cagaaaauuuagagagca

SEQ ID NO: 206958 - RNA, 19 nt, Artificial Sequence
  Synthetic
ucagaaaauuuagagagca

SEQ ID NO: 206959 - RNA, 20 nt, Artificial Sequence
  Synthetic
gucagaaaauuuagagagca

SEQ ID NO: 206960 - RNA, 21 nt, Artificial Sequence
  Synthetic
ggucagaaaauuuagagagca

SEQ ID NO: 206961 - RNA, 22 nt, Artificial Sequence
  Synthetic
cggucagaaaauuuagagagca

SEQ ID NO: 206962 - RNA, 23 nt, Artificial Sequence
  Synthetic
ccggucagaaaauuuagagagca

SEQ ID NO: 206963 - RNA, 24 nt, Artificial Sequence
  Synthetic
cccggucagaaaauuuagagagca

SEQ ID NO: 206964 - RNA, 18 nt, Artificial Sequence
  Synthetic
gcgaggggagggagagca

SEQ ID NO: 206965 - RNA, 19 nt, Artificial Sequence
  Synthetic
ggcgaggggagggagagca

SEQ ID NO: 206966 - RNA, 20 nt, Artificial Sequence
  Synthetic
gggcgaggggagggagagca

SEQ ID NO: 206967 - RNA, 21 nt, Artificial Sequence
  Synthetic
ggggcgaggggagggagagca

SEQ ID NO: 206968 - RNA, 22 nt, Artificial Sequence
  Synthetic
uggggcgaggggagggagagca

SEQ ID NO: 206969 - RNA, 23 nt, Artificial Sequence
  Synthetic
guggggcgaggggagggagagca

SEQ ID NO: 206970 - RNA, 24 nt, Artificial Sequence
  Synthetic
gguggggcgaggggagggagagca

SEQ ID NO: 206971 - RNA, 18 nt, Artificial Sequence
  Synthetic
acugcacauaugagagca

SEQ ID NO: 206972 - RNA, 19 nt, Artificial Sequence
  Synthetic
gacugcacauaugagagca

SEQ ID NO: 206973 - RNA, 20 nt, Artificial Sequence
  Synthetic
ugacugcacauaugagagca

SEQ ID NO: 206974 - RNA, 21 nt, Artificial Sequence
  Synthetic
augacugcacauaugagagca

SEQ ID NO: 206975 - RNA, 22 nt, Artificial Sequence
  Synthetic
aaugacugcacauaugagagca

SEQ ID NO: 206976 - RNA, 23 nt, Artificial Sequence
  Synthetic
aaaugacugcacauaugagagca

SEQ ID NO: 206977 - RNA, 24 nt, Artificial Sequence
  Synthetic
aaaaugacugcacauaugagagca

SEQ ID NO: 206978 - RNA, 18 nt, Artificial Sequence
  Synthetic
uugcuggaacugagagca

SEQ ID NO: 206979 - RNA, 19 nt, Artificial Sequence
  Synthetic
uuugcuggaacugagagca

SEQ ID NO: 206980 - RNA, 20 nt, Artificial Sequence
  Synthetic
uuuugcuggaacugagagca

SEQ ID NO: 206981 - RNA, 21 nt, Artificial Sequence
  Synthetic
guuuugcuggaacugagagca

SEQ ID NO: 206982 - RNA, 22 nt, Artificial Sequence
  Synthetic
uguuuugcuggaacugagagca

SEQ ID NO: 206983 - RNA, 23 nt, Artificial Sequence
  Synthetic
uuguuuugcuggaacugagagca

SEQ ID NO: 206984 - RNA, 24 nt, Artificial Sequence
  Synthetic
guuguuuugcuggaacugagagca

SEQ ID NO: 206985 - RNA, 18 nt, Artificial Sequence
  Synthetic
agugaggaguugagagca

SEQ ID NO: 206986 - RNA, 19 nt, Artificial Sequence
  Synthetic
cagugaggaguugagagca

SEQ ID NO: 206987 - RNA, 20 nt, Artificial Sequence
  Synthetic
ccagugaggaguugagagca

SEQ ID NO: 206988 - RNA, 21 nt, Artificial Sequence
  Synthetic
uccagugaggaguugagagca

SEQ ID NO: 206989 - RNA, 22 nt, Artificial Sequence
  Synthetic
cuccagugaggaguugagagca

SEQ ID NO: 206990 - RNA, 23 nt, Artificial Sequence
  Synthetic
ccuccagugaggaguugagagca

SEQ ID NO: 206991 - RNA, 24 nt, Artificial Sequence
  Synthetic
cccuccagugaggaguugagagca

SEQ ID NO: 206992 - RNA, 18 nt, Artificial Sequence
  Synthetic
gaugcaagagauagagca

SEQ ID NO: 206993 - RNA, 19 nt, Artificial Sequence
  Synthetic
agaugcaagagauagagca

SEQ ID NO: 206994 - RNA, 20 nt, Artificial Sequence
  Synthetic
aagaugcaagagauagagca

SEQ ID NO: 206995 - RNA, 21 nt, Artificial Sequence
  Synthetic
caagaugcaagagauagagca

SEQ ID NO: 206996 - RNA, 22 nt, Artificial Sequence
  Synthetic
gcaagaugcaagagauagagca

SEQ ID NO: 206997 - RNA, 23 nt, Artificial Sequence
  Synthetic
ugcaagaugcaagagauagagca

SEQ ID NO: 206998 - RNA, 24 nt, Artificial Sequence
  Synthetic
gugcaagaugcaagagauagagca

SEQ ID NO: 206999 - RNA, 18 nt, Artificial Sequence
  Synthetic
gguacuugguauagagca

SEQ ID NO: 207000 - RNA, 19 nt, Artificial Sequence
  Synthetic
ugguacuugguauagagca

SEQ ID NO: 207001 - RNA, 20 nt, Artificial Sequence
  Synthetic
uugguacuugguauagagca

SEQ ID NO: 207002 - RNA, 21 nt, Artificial Sequence
  Synthetic
auugguacuugguauagagca

SEQ ID NO: 207003 - RNA, 22 nt, Artificial Sequence
  Synthetic
aauugguacuugguauagagca

SEQ ID NO: 207004 - RNA, 23 nt, Artificial Sequence
  Synthetic
uaauugguacuugguauagagca

SEQ ID NO: 207005 - RNA, 24 nt, Artificial Sequence
  Synthetic
guaauugguacuugguauagagca

SEQ ID NO: 207006 - RNA, 18 nt, Artificial Sequence
  Synthetic
aauucuuaugguagagca

SEQ ID NO: 207007 - RNA, 19 nt, Artificial Sequence
  Synthetic
uaauucuuaugguagagca

SEQ ID NO: 207008 - RNA, 20 nt, Artificial Sequence
  Synthetic
guaauucuuaugguagagca

SEQ ID NO: 207009 - RNA, 21 nt, Artificial Sequence
  Synthetic
uguaauucuuaugguagagca

SEQ ID NO: 207010 - RNA, 22 nt, Artificial Sequence
  Synthetic
uuguaauucuuaugguagagca

SEQ ID NO: 207011 - RNA, 23 nt, Artificial Sequence
  Synthetic
uuuguaauucuuaugguagagca

SEQ ID NO: 207012 - RNA, 24 nt, Artificial Sequence
  Synthetic
auuuguaauucuuaugguagagca

SEQ ID NO: 207013 - RNA, 18 nt, Artificial Sequence
  Synthetic
auagacuguuguagagca

SEQ ID NO: 207014 - RNA, 19 nt, Artificial Sequence
  Synthetic
gauagacuguuguagagca

SEQ ID NO: 207015 - RNA, 20 nt, Artificial Sequence
  Synthetic
ugauagacuguuguagagca

SEQ ID NO: 207016 - RNA, 21 nt, Artificial Sequence
  Synthetic
cugauagacuguuguagagca

SEQ ID NO: 207017 - RNA, 22 nt, Artificial Sequence
  Synthetic
gcugauagacuguuguagagca

SEQ ID NO: 207018 - RNA, 23 nt, Artificial Sequence
  Synthetic
agcugauagacuguuguagagca

SEQ ID NO: 207019 - RNA, 24 nt, Artificial Sequence
  Synthetic
uagcugauagacuguuguagagca

SEQ ID NO: 207020 - RNA, 18 nt, Artificial Sequence
  Synthetic
gccaacaaacuuagagca

SEQ ID NO: 207021 - RNA, 19 nt, Artificial Sequence
  Synthetic
ugccaacaaacuuagagca

SEQ ID NO: 207022 - RNA, 20 nt, Artificial Sequence
  Synthetic
augccaacaaacuuagagca

SEQ ID NO: 207023 - RNA, 21 nt, Artificial Sequence
  Synthetic
aaugccaacaaacuuagagca

SEQ ID NO: 207024 - RNA, 22 nt, Artificial Sequence
  Synthetic
aaaugccaacaaacuuagagca

SEQ ID NO: 207025 - RNA, 23 nt, Artificial Sequence
  Synthetic
gaaaugccaacaaacuuagagca

SEQ ID NO: 207026 - RNA, 24 nt, Artificial Sequence
  Synthetic
ugaaaugccaacaaacuuagagca

SEQ ID NO: 207027 - RNA, 18 nt, Artificial Sequence
  Synthetic
cauagcaguuuuagagca

SEQ ID NO: 207028 - RNA, 19 nt, Artificial Sequence
  Synthetic
gcauagcaguuuuagagca

SEQ ID NO: 207029 - RNA, 20 nt, Artificial Sequence
  Synthetic
ugcauagcaguuuuagagca

SEQ ID NO: 207030 - RNA, 21 nt, Artificial Sequence
  Synthetic
augcauagcaguuuuagagca

SEQ ID NO: 207031 - RNA, 22 nt, Artificial Sequence
  Synthetic
uaugcauagcaguuuuagagca

SEQ ID NO: 207032 - RNA, 23 nt, Artificial Sequence
  Synthetic
guaugcauagcaguuuuagagca

SEQ ID NO: 207033 - RNA, 24 nt, Artificial Sequence
  Synthetic
gguaugcauagcaguuuuagagca

SEQ ID NO: 207034 - RNA, 18 nt, Artificial Sequence
  Synthetic
aaggagaagugccgagca

SEQ ID NO: 207035 - RNA, 19 nt, Artificial Sequence
  Synthetic
gaaggagaagugccgagca

SEQ ID NO: 207036 - RNA, 20 nt, Artificial Sequence
  Synthetic
agaaggagaagugccgagca

SEQ ID NO: 207037 - RNA, 21 nt, Artificial Sequence
  Synthetic
aagaaggagaagugccgagca

SEQ ID NO: 207038 - RNA, 22 nt, Artificial Sequence
  Synthetic
caagaaggagaagugccgagca

SEQ ID NO: 207039 - RNA, 23 nt, Artificial Sequence
  Synthetic
gcaagaaggagaagugccgagca

SEQ ID NO: 207040 - RNA, 24 nt, Artificial Sequence
  Synthetic
ggcaagaaggagaagugccgagca

SEQ ID NO: 207041 - RNA, 18 nt, Artificial Sequence
  Synthetic
uaggcaaagaaaggagca

SEQ ID NO: 207042 - RNA, 19 nt, Artificial Sequence
  Synthetic
uuaggcaaagaaaggagca

SEQ ID NO: 207043 - RNA, 20 nt, Artificial Sequence
  Synthetic
uuuaggcaaagaaaggagca

SEQ ID NO: 207044 - RNA, 21 nt, Artificial Sequence
  Synthetic
auuuaggcaaagaaaggagca

SEQ ID NO: 207045 - RNA, 22 nt, Artificial Sequence
  Synthetic
cauuuaggcaaagaaaggagca

SEQ ID NO: 207046 - RNA, 23 nt, Artificial Sequence
  Synthetic
ucauuuaggcaaagaaaggagca

SEQ ID NO: 207047 - RNA, 24 nt, Artificial Sequence
  Synthetic
uucauuuaggcaaagaaaggagca

SEQ ID NO: 207048 - RNA, 18 nt, Artificial Sequence
  Synthetic
guacuugauaaaggagca

SEQ ID NO: 207049 - RNA, 19 nt, Artificial Sequence
  Synthetic
aguacuugauaaaggagca

SEQ ID NO: 207050 - RNA, 20 nt, Artificial Sequence
  Synthetic
aaguacuugauaaaggagca

SEQ ID NO: 207051 - RNA, 21 nt, Artificial Sequence
  Synthetic
caaguacuugauaaaggagca

SEQ ID NO: 207052 - RNA, 22 nt, Artificial Sequence
  Synthetic
ccaaguacuugauaaaggagca

SEQ ID NO: 207053 - RNA, 23 nt, Artificial Sequence
  Synthetic
cccaaguacuugauaaaggagca

SEQ ID NO: 207054 - RNA, 24 nt, Artificial Sequence
  Synthetic
ucccaaguacuugauaaaggagca

SEQ ID NO: 207055 - RNA, 18 nt, Artificial Sequence
  Synthetic
aaaugagacuugggagca

SEQ ID NO: 207056 - RNA, 19 nt, Artificial Sequence
  Synthetic
gaaaugagacuugggagca

SEQ ID NO: 207057 - RNA, 20 nt, Artificial Sequence
  Synthetic
agaaaugagacuugggagca

SEQ ID NO: 207058 - RNA, 21 nt, Artificial Sequence
  Synthetic
aagaaaugagacuugggagca

SEQ ID NO: 207059 - RNA, 22 nt, Artificial Sequence
  Synthetic
uaagaaaugagacuugggagca

SEQ ID NO: 207060 - RNA, 23 nt, Artificial Sequence
  Synthetic
guaagaaaugagacuugggagca

SEQ ID NO: 207061 - RNA, 24 nt, Artificial Sequence
  Synthetic
aguaagaaaugagacuugggagca

SEQ ID NO: 207062 - RNA, 18 nt, Artificial Sequence
  Synthetic
uucuugggaacuggagca

SEQ ID NO: 207063 - RNA, 19 nt, Artificial Sequence
  Synthetic
cuucuugggaacuggagca

SEQ ID NO: 207064 - RNA, 20 nt, Artificial Sequence
  Synthetic
acuucuugggaacuggagca

SEQ ID NO: 207065 - RNA, 21 nt, Artificial Sequence
  Synthetic
aacuucuugggaacuggagca

SEQ ID NO: 207066 - RNA, 22 nt, Artificial Sequence
  Synthetic
gaacuucuugggaacuggagca

SEQ ID NO: 207067 - RNA, 23 nt, Artificial Sequence
  Synthetic
ggaacuucuugggaacuggagca

SEQ ID NO: 207068 - RNA, 24 nt, Artificial Sequence
  Synthetic
aggaacuucuugggaacuggagca

SEQ ID NO: 207069 - RNA, 18 nt, Artificial Sequence
  Synthetic
auguuuuuuacuggagca

SEQ ID NO: 207070 - RNA, 19 nt, Artificial Sequence
  Synthetic
gauguuuuuuacuggagca

SEQ ID NO: 207071 - RNA, 20 nt, Artificial Sequence
  Synthetic
ggauguuuuuuacuggagca

SEQ ID NO: 207072 - RNA, 21 nt, Artificial Sequence
  Synthetic
uggauguuuuuuacuggagca

SEQ ID NO: 207073 - RNA, 22 nt, Artificial Sequence
  Synthetic
guggauguuuuuuacuggagca

SEQ ID NO: 207074 - RNA, 23 nt, Artificial Sequence
  Synthetic
uguggauguuuuuuacuggagca

SEQ ID NO: 207075 - RNA, 24 nt, Artificial Sequence
  Synthetic
guguggauguuuuuuacuggagca

SEQ ID NO: 207076 - RNA, 18 nt, Artificial Sequence
  Synthetic
ggcaaagaagcuggagca

SEQ ID NO: 207077 - RNA, 19 nt, Artificial Sequence
  Synthetic
aggcaaagaagcuggagca

SEQ ID NO: 207078 - RNA, 20 nt, Artificial Sequence
  Synthetic
caggcaaagaagcuggagca

SEQ ID NO: 207079 - RNA, 21 nt, Artificial Sequence
  Synthetic
ccaggcaaagaagcuggagca

SEQ ID NO: 207080 - RNA, 22 nt, Artificial Sequence
  Synthetic
uccaggcaaagaagcuggagca

SEQ ID NO: 207081 - RNA, 23 nt, Artificial Sequence
  Synthetic
uuccaggcaaagaagcuggagca

SEQ ID NO: 207082 - RNA, 24 nt, Artificial Sequence
  Synthetic
uuuccaggcaaagaagcuggagca

SEQ ID NO: 207083 - RNA, 18 nt, Artificial Sequence
  Synthetic
gaaaagugagcuggagca

SEQ ID NO: 207084 - RNA, 19 nt, Artificial Sequence
  Synthetic
ggaaaagugagcuggagca

SEQ ID NO: 207085 - RNA, 20 nt, Artificial Sequence
  Synthetic
uggaaaagugagcuggagca

SEQ ID NO: 207086 - RNA, 21 nt, Artificial Sequence
  Synthetic
uuggaaaagugagcuggagca

SEQ ID NO: 207087 - RNA, 22 nt, Artificial Sequence
  Synthetic
auuggaaaagugagcuggagca

SEQ ID NO: 207088 - RNA, 23 nt, Artificial Sequence
  Synthetic
gauuggaaaagugagcuggagca

SEQ ID NO: 207089 - RNA, 24 nt, Artificial Sequence
  Synthetic
ugauuggaaaagugagcuggagca

SEQ ID NO: 207090 - RNA, 18 nt, Artificial Sequence
  Synthetic
auuaguguauaaugagca

SEQ ID NO: 207091 - RNA, 19 nt, Artificial Sequence
  Synthetic
aauuaguguauaaugagca

SEQ ID NO: 207092 - RNA, 20 nt, Artificial Sequence
  Synthetic
uaauuaguguauaaugagca

SEQ ID NO: 207093 - RNA, 21 nt, Artificial Sequence
  Synthetic
auaauuaguguauaaugagca

SEQ ID NO: 207094 - RNA, 22 nt, Artificial Sequence
  Synthetic
uauaauuaguguauaaugagca

SEQ ID NO: 207095 - RNA, 23 nt, Artificial Sequence
  Synthetic
uuauaauuaguguauaaugagca

SEQ ID NO: 207096 - RNA, 24 nt, Artificial Sequence
  Synthetic
auuauaauuaguguauaaugagca

SEQ ID NO: 207097 - RNA, 18 nt, Artificial Sequence
  Synthetic
gcauuuuguuaaugagca

SEQ ID NO: 207098 - RNA, 19 nt, Artificial Sequence
  Synthetic
agcauuuuguuaaugagca

SEQ ID NO: 207099 - RNA, 20 nt, Artificial Sequence
  Synthetic
uagcauuuuguuaaugagca

SEQ ID NO: 207100 - RNA, 21 nt, Artificial Sequence
  Synthetic
guagcauuuuguuaaugagca

SEQ ID NO: 207101 - RNA, 22 nt, Artificial Sequence
  Synthetic
uguagcauuuuguuaaugagca

SEQ ID NO: 207102 - RNA, 23 nt, Artificial Sequence
  Synthetic
auguagcauuuuguuaaugagca

SEQ ID NO: 207103 - RNA, 24 nt, Artificial Sequence
  Synthetic
uauguagcauuuuguuaaugagca

SEQ ID NO: 207104 - RNA, 18 nt, Artificial Sequence
  Synthetic
uaggcugauagaugagca

SEQ ID NO: 207105 - RNA, 19 nt, Artificial Sequence
  Synthetic
auaggcugauagaugagca

SEQ ID NO: 207106 - RNA, 20 nt, Artificial Sequence
  Synthetic
uauaggcugauagaugagca

SEQ ID NO: 207107 - RNA, 21 nt, Artificial Sequence
  Synthetic
guauaggcugauagaugagca

SEQ ID NO: 207108 - RNA, 22 nt, Artificial Sequence
  Synthetic
uguauaggcugauagaugagca

SEQ ID NO: 207109 - RNA, 23 nt, Artificial Sequence
  Synthetic
auguauaggcugauagaugagca

SEQ ID NO: 207110 - RNA, 24 nt, Artificial Sequence
  Synthetic
aauguauaggcugauagaugagca

SEQ ID NO: 207111 - RNA, 18 nt, Artificial Sequence
  Synthetic
uuuuauccaguaugagca

SEQ ID NO: 207112 - RNA, 19 nt, Artificial Sequence
  Synthetic
uuuuuauccaguaugagca

SEQ ID NO: 207113 - RNA, 20 nt, Artificial Sequence
  Synthetic
auuuuuauccaguaugagca

SEQ ID NO: 207114 - RNA, 21 nt, Artificial Sequence
  Synthetic
gauuuuuauccaguaugagca

SEQ ID NO: 207115 - RNA, 22 nt, Artificial Sequence
  Synthetic
agauuuuuauccaguaugagca

SEQ ID NO: 207116 - RNA, 23 nt, Artificial Sequence
  Synthetic
aagauuuuuauccaguaugagca

SEQ ID NO: 207117 - RNA, 24 nt, Artificial Sequence
  Synthetic
gaagauuuuuauccaguaugagca

SEQ ID NO: 207118 - RNA, 18 nt, Artificial Sequence
  Synthetic
cucacccaauuaugagca

SEQ ID NO: 207119 - RNA, 19 nt, Artificial Sequence
  Synthetic
gcucacccaauuaugagca

SEQ ID NO: 207120 - RNA, 20 nt, Artificial Sequence
  Synthetic
ugcucacccaauuaugagca

SEQ ID NO: 207121 - RNA, 21 nt, Artificial Sequence
  Synthetic
augcucacccaauuaugagca

SEQ ID NO: 207122 - RNA, 22 nt, Artificial Sequence
  Synthetic
aaugcucacccaauuaugagca

SEQ ID NO: 207123 - RNA, 23 nt, Artificial Sequence
  Synthetic
aaaugcucacccaauuaugagca

SEQ ID NO: 207124 - RNA, 24 nt, Artificial Sequence
  Synthetic
gaaaugcucacccaauuaugagca

SEQ ID NO: 207125 - RNA, 18 nt, Artificial Sequence
  Synthetic
ugacuaggaaccugagca

SEQ ID NO: 207126 - RNA, 19 nt, Artificial Sequence
  Synthetic
augacuaggaaccugagca

SEQ ID NO: 207127 - RNA, 20 nt, Artificial Sequence
  Synthetic
aaugacuaggaaccugagca

SEQ ID NO: 207128 - RNA, 21 nt, Artificial Sequence
  Synthetic
gaaugacuaggaaccugagca

SEQ ID NO: 207129 - RNA, 22 nt, Artificial Sequence
  Synthetic
agaaugacuaggaaccugagca

SEQ ID NO: 207130 - RNA, 23 nt, Artificial Sequence
  Synthetic
aagaaugacuaggaaccugagca

SEQ ID NO: 207131 - RNA, 24 nt, Artificial Sequence
  Synthetic
gaagaaugacuaggaaccugagca

SEQ ID NO: 207132 - RNA, 18 nt, Artificial Sequence
  Synthetic
gaauuuuuagccugagca

SEQ ID NO: 207133 - RNA, 19 nt, Artificial Sequence
  Synthetic
agaauuuuuagccugagca

SEQ ID NO: 207134 - RNA, 20 nt, Artificial Sequence
  Synthetic
aagaauuuuuagccugagca

SEQ ID NO: 207135 - RNA, 21 nt, Artificial Sequence
  Synthetic
caagaauuuuuagccugagca

SEQ ID NO: 207136 - RNA, 22 nt, Artificial Sequence
  Synthetic
ucaagaauuuuuagccugagca

SEQ ID NO: 207137 - RNA, 23 nt, Artificial Sequence
  Synthetic
cucaagaauuuuuagccugagca

SEQ ID NO: 207138 - RNA, 24 nt, Artificial Sequence
  Synthetic
acucaagaauuuuuagccugagca

SEQ ID NO: 207139 - RNA, 18 nt, Artificial Sequence
  Synthetic
aaggagaagugcugagca

SEQ ID NO: 207140 - RNA, 19 nt, Artificial Sequence
  Synthetic
aaaggagaagugcugagca

SEQ ID NO: 207141 - RNA, 20 nt, Artificial Sequence
  Synthetic
gaaaggagaagugcugagca

SEQ ID NO: 207142 - RNA, 21 nt, Artificial Sequence
  Synthetic
agaaaggagaagugcugagca

SEQ ID NO: 207143 - RNA, 22 nt, Artificial Sequence
  Synthetic
cagaaaggagaagugcugagca

SEQ ID NO: 207144 - RNA, 23 nt, Artificial Sequence
  Synthetic
gcagaaaggagaagugcugagca

SEQ ID NO: 207145 - RNA, 24 nt, Artificial Sequence
  Synthetic
ggcagaaaggagaagugcugagca

SEQ ID NO: 207146 - RNA, 18 nt, Artificial Sequence
  Synthetic
acaggcgggaauugagca

SEQ ID NO: 207147 - RNA, 19 nt, Artificial Sequence
  Synthetic
cacaggcgggaauugagca

SEQ ID NO: 207148 - RNA, 20 nt, Artificial Sequence
  Synthetic
ucacaggcgggaauugagca

SEQ ID NO: 207149 - RNA, 21 nt, Artificial Sequence
  Synthetic
cucacaggcgggaauugagca

SEQ ID NO: 207150 - RNA, 22 nt, Artificial Sequence
  Synthetic
acucacaggcgggaauugagca

SEQ ID NO: 207151 - RNA, 23 nt, Artificial Sequence
  Synthetic
uacucacaggcgggaauugagca

SEQ ID NO: 207152 - RNA, 24 nt, Artificial Sequence
  Synthetic
uuacucacaggcgggaauugagca

SEQ ID NO: 207153 - RNA, 18 nt, Artificial Sequence
  Synthetic
auaauugggaguugagca

SEQ ID NO: 207154 - RNA, 19 nt, Artificial Sequence
  Synthetic
cauaauugggaguugagca

SEQ ID NO: 207155 - RNA, 20 nt, Artificial Sequence
  Synthetic
ucauaauugggaguugagca

SEQ ID NO: 207156 - RNA, 21 nt, Artificial Sequence
  Synthetic
cucauaauugggaguugagca

SEQ ID NO: 207157 - RNA, 22 nt, Artificial Sequence
  Synthetic
acucauaauugggaguugagca

SEQ ID NO: 207158 - RNA, 23 nt, Artificial Sequence
  Synthetic
cacucauaauugggaguugagca

SEQ ID NO: 207159 - RNA, 24 nt, Artificial Sequence
  Synthetic
ucacucauaauugggaguugagca

SEQ ID NO: 207160 - RNA, 18 nt, Artificial Sequence
  Synthetic
aggaggacuguuugagca

SEQ ID NO: 207161 - RNA, 19 nt, Artificial Sequence
  Synthetic
caggaggacuguuugagca

SEQ ID NO: 207162 - RNA, 20 nt, Artificial Sequence
  Synthetic
gcaggaggacuguuugagca

SEQ ID NO: 207163 - RNA, 21 nt, Artificial Sequence
  Synthetic
ggcaggaggacuguuugagca

SEQ ID NO: 207164 - RNA, 22 nt, Artificial Sequence
  Synthetic
gggcaggaggacuguuugagca

SEQ ID NO: 207165 - RNA, 23 nt, Artificial Sequence
  Synthetic
ggggcaggaggacuguuugagca

SEQ ID NO: 207166 - RNA, 24 nt, Artificial Sequence
  Synthetic
uggggcaggaggacuguuugagca

SEQ ID NO: 207167 - RNA, 18 nt, Artificial Sequence
  Synthetic
accagaagauuuugagca

SEQ ID NO: 207168 - RNA, 19 nt, Artificial Sequence
  Synthetic
caccagaagauuuugagca

SEQ ID NO: 207169 - RNA, 20 nt, Artificial Sequence
  Synthetic
ccaccagaagauuuugagca

SEQ ID NO: 207170 - RNA, 21 nt, Artificial Sequence
  Synthetic
gccaccagaagauuuugagca

SEQ ID NO: 207171 - RNA, 22 nt, Artificial Sequence
  Synthetic
agccaccagaagauuuugagca

SEQ ID NO: 207172 - RNA, 23 nt, Artificial Sequence
  Synthetic
gagccaccagaagauuuugagca

SEQ ID NO: 207173 - RNA, 24 nt, Artificial Sequence
  Synthetic
agagccaccagaagauuuugagca

SEQ ID NO: 207174 - RNA, 18 nt, Artificial Sequence
  Synthetic
uuuaggguauuuugagca

SEQ ID NO: 207175 - RNA, 19 nt, Artificial Sequence
  Synthetic
cuuuaggguauuuugagca

SEQ ID NO: 207176 - RNA, 20 nt, Artificial Sequence
  Synthetic
gcuuuaggguauuuugagca

SEQ ID NO: 207177 - RNA, 21 nt, Artificial Sequence
  Synthetic
agcuuuaggguauuuugagca

SEQ ID NO: 207178 - RNA, 22 nt, Artificial Sequence
  Synthetic
aagcuuuaggguauuuugagca

SEQ ID NO: 207179 - RNA, 23 nt, Artificial Sequence
  Synthetic
uaagcuuuaggguauuuugagca

SEQ ID NO: 207180 - RNA, 24 nt, Artificial Sequence
  Synthetic
uuaagcuuuaggguauuuugagca

SEQ ID NO: 207181 - RNA, 18 nt, Artificial Sequence
  Synthetic
caauguggguuuugagca

SEQ ID NO: 207182 - RNA, 19 nt, Artificial Sequence
  Synthetic
acaauguggguuuugagca

SEQ ID NO: 207183 - RNA, 20 nt, Artificial Sequence
  Synthetic
uacaauguggguuuugagca

SEQ ID NO: 207184 - RNA, 21 nt, Artificial Sequence
  Synthetic
auacaauguggguuuugagca

SEQ ID NO: 207185 - RNA, 22 nt, Artificial Sequence
  Synthetic
aauacaauguggguuuugagca

SEQ ID NO: 207186 - RNA, 23 nt, Artificial Sequence
  Synthetic
uaauacaauguggguuuugagca

SEQ ID NO: 207187 - RNA, 24 nt, Artificial Sequence
  Synthetic
cuaauacaauguggguuuugagca

SEQ ID NO: 207188 - RNA, 18 nt, Artificial Sequence
  Synthetic
uacauuuuaaaaauagca

SEQ ID NO: 207189 - RNA, 19 nt, Artificial Sequence
  Synthetic
auacauuuuaaaaauagca

SEQ ID NO: 207190 - RNA, 20 nt, Artificial Sequence
  Synthetic
gauacauuuuaaaaauagca

SEQ ID NO: 207191 - RNA, 21 nt, Artificial Sequence
  Synthetic
agauacauuuuaaaaauagca

SEQ ID NO: 207192 - RNA, 22 nt, Artificial Sequence
  Synthetic
aagauacauuuuaaaaauagca

SEQ ID NO: 207193 - RNA, 23 nt, Artificial Sequence
  Synthetic
gaagauacauuuuaaaaauagca

SEQ ID NO: 207194 - RNA, 24 nt, Artificial Sequence
  Synthetic
agaagauacauuuuaaaaauagca

SEQ ID NO: 207195 - RNA, 18 nt, Artificial Sequence
  Synthetic
auuauaaaaccaauagca

SEQ ID NO: 207196 - RNA, 19 nt, Artificial Sequence
  Synthetic
gauuauaaaaccaauagca

SEQ ID NO: 207197 - RNA, 20 nt, Artificial Sequence
  Synthetic
ugauuauaaaaccaauagca

SEQ ID NO: 207198 - RNA, 21 nt, Artificial Sequence
  Synthetic
augauuauaaaaccaauagca

SEQ ID NO: 207199 - RNA, 22 nt, Artificial Sequence
  Synthetic
uaugauuauaaaaccaauagca

SEQ ID NO: 207200 - RNA, 23 nt, Artificial Sequence
  Synthetic
auaugauuauaaaaccaauagca

SEQ ID NO: 207201 - RNA, 24 nt, Artificial Sequence
  Synthetic
uauaugauuauaaaaccaauagca

SEQ ID NO: 207202 - RNA, 18 nt, Artificial Sequence
  Synthetic
aagcguccaugaauagca

SEQ ID NO: 207203 - RNA, 19 nt, Artificial Sequence
  Synthetic
caagcguccaugaauagca

SEQ ID NO: 207204 - RNA, 20 nt, Artificial Sequence
  Synthetic
gcaagcguccaugaauagca

SEQ ID NO: 207205 - RNA, 21 nt, Artificial Sequence
  Synthetic
agcaagcguccaugaauagca

SEQ ID NO: 207206 - RNA, 22 nt, Artificial Sequence
  Synthetic
aagcaagcguccaugaauagca

SEQ ID NO: 207207 - RNA, 23 nt, Artificial Sequence
  Synthetic
uaagcaagcguccaugaauagca

SEQ ID NO: 207208 - RNA, 24 nt, Artificial Sequence
  Synthetic
uuaagcaagcguccaugaauagca

SEQ ID NO: 207209 - RNA, 18 nt, Artificial Sequence
  Synthetic
cuguguccuaacauagca

SEQ ID NO: 207210 - RNA, 19 nt, Artificial Sequence
  Synthetic
ucuguguccuaacauagca

SEQ ID NO: 207211 - RNA, 20 nt, Artificial Sequence
  Synthetic
cucuguguccuaacauagca

SEQ ID NO: 207212 - RNA, 21 nt, Artificial Sequence
  Synthetic
ucucuguguccuaacauagca

SEQ ID NO: 207213 - RNA, 22 nt, Artificial Sequence
  Synthetic
cucucuguguccuaacauagca

SEQ ID NO: 207214 - RNA, 23 nt, Artificial Sequence
  Synthetic
ucucucuguguccuaacauagca

SEQ ID NO: 207215 - RNA, 24 nt, Artificial Sequence
  Synthetic
uucucucuguguccuaacauagca

SEQ ID NO: 207216 - RNA, 18 nt, Artificial Sequence
  Synthetic
ccuaggcugcacauagca

SEQ ID NO: 207217 - RNA, 19 nt, Artificial Sequence
  Synthetic
cccuaggcugcacauagca

SEQ ID NO: 207218 - RNA, 20 nt, Artificial Sequence
  Synthetic
ucccuaggcugcacauagca

SEQ ID NO: 207219 - RNA, 21 nt, Artificial Sequence
  Synthetic
gucccuaggcugcacauagca

SEQ ID NO: 207220 - RNA, 22 nt, Artificial Sequence
  Synthetic
agucccuaggcugcacauagca

SEQ ID NO: 207221 - RNA, 23 nt, Artificial Sequence
  Synthetic
uagucccuaggcugcacauagca

SEQ ID NO: 207222 - RNA, 24 nt, Artificial Sequence
  Synthetic
cuagucccuaggcugcacauagca

SEQ ID NO: 207223 - RNA, 18 nt, Artificial Sequence
  Synthetic
agaauucaacccauagca

SEQ ID NO: 207224 - RNA, 19 nt, Artificial Sequence
  Synthetic
cagaauucaacccauagca

SEQ ID NO: 207225 - RNA, 20 nt, Artificial Sequence
  Synthetic
acagaauucaacccauagca

SEQ ID NO: 207226 - RNA, 21 nt, Artificial Sequence
  Synthetic
gacagaauucaacccauagca

SEQ ID NO: 207227 - RNA, 22 nt, Artificial Sequence
  Synthetic
ggacagaauucaacccauagca

SEQ ID NO: 207228 - RNA, 23 nt, Artificial Sequence
  Synthetic
uggacagaauucaacccauagca

SEQ ID NO: 207229 - RNA, 24 nt, Artificial Sequence
  Synthetic
uuggacagaauucaacccauagca

SEQ ID NO: 207230 - RNA, 18 nt, Artificial Sequence
  Synthetic
auaauaccuugcauagca

SEQ ID NO: 207231 - RNA, 19 nt, Artificial Sequence
  Synthetic
cauaauaccuugcauagca

SEQ ID NO: 207232 - RNA, 20 nt, Artificial Sequence
  Synthetic
ccauaauaccuugcauagca

SEQ ID NO: 207233 - RNA, 21 nt, Artificial Sequence
  Synthetic
accauaauaccuugcauagca

SEQ ID NO: 207234 - RNA, 22 nt, Artificial Sequence
  Synthetic
uaccauaauaccuugcauagca

SEQ ID NO: 207235 - RNA, 23 nt, Artificial Sequence
  Synthetic
auaccauaauaccuugcauagca

SEQ ID NO: 207236 - RNA, 24 nt, Artificial Sequence
  Synthetic
aauaccauaauaccuugcauagca

SEQ ID NO: 207237 - RNA, 18 nt, Artificial Sequence
  Synthetic
gaauacagggagauagca

SEQ ID NO: 207238 - RNA, 19 nt, Artificial Sequence
  Synthetic
ugaauacagggagauagca

SEQ ID NO: 207239 - RNA, 20 nt, Artificial Sequence
  Synthetic
gugaauacagggagauagca

SEQ ID NO: 207240 - RNA, 21 nt, Artificial Sequence
  Synthetic
agugaauacagggagauagca

SEQ ID NO: 207241 - RNA, 22 nt, Artificial Sequence
  Synthetic
uagugaauacagggagauagca

SEQ ID NO: 207242 - RNA, 23 nt, Artificial Sequence
  Synthetic
auagugaauacagggagauagca

SEQ ID NO: 207243 - RNA, 24 nt, Artificial Sequence
  Synthetic
aauagugaauacagggagauagca

SEQ ID NO: 207244 - RNA, 18 nt, Artificial Sequence
  Synthetic
aaggggggagggauagca

SEQ ID NO: 207245 - RNA, 19 nt, Artificial Sequence
  Synthetic
gaaggggggagggauagca

SEQ ID NO: 207246 - RNA, 20 nt, Artificial Sequence
  Synthetic
ggaaggggggagggauagca

SEQ ID NO: 207247 - RNA, 21 nt, Artificial Sequence
  Synthetic
gggaaggggggagggauagca

SEQ ID NO: 207248 - RNA, 22 nt, Artificial Sequence
  Synthetic
ggggaaggggggagggauagca

SEQ ID NO: 207249 - RNA, 23 nt, Artificial Sequence
  Synthetic
gggggaaggggggagggauagca

SEQ ID NO: 207250 - RNA, 24 nt, Artificial Sequence
  Synthetic
ugggggaaggggggagggauagca

SEQ ID NO: 207251 - RNA, 18 nt, Artificial Sequence
  Synthetic
gaggggggagggauagca

SEQ ID NO: 207252 - RNA, 19 nt, Artificial Sequence
  Synthetic
ggaggggggagggauagca

SEQ ID NO: 207253 - RNA, 20 nt, Artificial Sequence
  Synthetic
gggaggggggagggauagca

SEQ ID NO: 207254 - RNA, 21 nt, Artificial Sequence
  Synthetic
ggggaggggggagggauagca

SEQ ID NO: 207255 - RNA, 22 nt, Artificial Sequence
  Synthetic
gggggaggggggagggauagca

SEQ ID NO: 207256 - RNA, 23 nt, Artificial Sequence
  Synthetic
cgggggaggggggagggauagca

SEQ ID NO: 207257 - RNA, 24 nt, Artificial Sequence
  Synthetic
ucgggggaggggggagggauagca

SEQ ID NO: 207258 - RNA, 23 nt, Artificial Sequence
  Synthetic
ggggggaggggggagggauagca

SEQ ID NO: 207259 - RNA, 24 nt, Artificial Sequence
  Synthetic
uggggggaggggggagggauagca

SEQ ID NO: 207260 - RNA, 18 nt, Artificial Sequence
  Synthetic
uucaugacacuuauagca

SEQ ID NO: 207261 - RNA, 19 nt, Artificial Sequence
  Synthetic
cuucaugacacuuauagca

SEQ ID NO: 207262 - RNA, 20 nt, Artificial Sequence
  Synthetic
acuucaugacacuuauagca

SEQ ID NO: 207263 - RNA, 21 nt, Artificial Sequence
  Synthetic
aacuucaugacacuuauagca

SEQ ID NO: 207264 - RNA, 22 nt, Artificial Sequence
  Synthetic
uaacuucaugacacuuauagca

SEQ ID NO: 207265 - RNA, 23 nt, Artificial Sequence
  Synthetic
uuaacuucaugacacuuauagca

SEQ ID NO: 207266 - RNA, 24 nt, Artificial Sequence
  Synthetic
guuaacuucaugacacuuauagca

SEQ ID NO: 207267 - RNA, 18 nt, Artificial Sequence
  Synthetic
uuguauguuagucuagca

SEQ ID NO: 207268 - RNA, 19 nt, Artificial Sequence
  Synthetic
auuguauguuagucuagca

SEQ ID NO: 207269 - RNA, 20 nt, Artificial Sequence
  Synthetic
aauuguauguuagucuagca

SEQ ID NO: 207270 - RNA, 21 nt, Artificial Sequence
  Synthetic
aaauuguauguuagucuagca

SEQ ID NO: 207271 - RNA, 22 nt, Artificial Sequence
  Synthetic
aaaauuguauguuagucuagca

SEQ ID NO: 207272 - RNA, 23 nt, Artificial Sequence
  Synthetic
caaaauuguauguuagucuagca

SEQ ID NO: 207273 - RNA, 24 nt, Artificial Sequence
  Synthetic
ucaaaauuguauguuagucuagca

SEQ ID NO: 207274 - RNA, 18 nt, Artificial Sequence
  Synthetic
ugugagugacuucuagca

SEQ ID NO: 207275 - RNA, 19 nt, Artificial Sequence
  Synthetic
uugugagugacuucuagca

SEQ ID NO: 207276 - RNA, 20 nt, Artificial Sequence
  Synthetic
uuugugagugacuucuagca

SEQ ID NO: 207277 - RNA, 21 nt, Artificial Sequence
  Synthetic
uuuugugagugacuucuagca

SEQ ID NO: 207278 - RNA, 22 nt, Artificial Sequence
  Synthetic
cuuuugugagugacuucuagca

SEQ ID NO: 207279 - RNA, 23 nt, Artificial Sequence
  Synthetic
gcuuuugugagugacuucuagca

SEQ ID NO: 207280 - RNA, 24 nt, Artificial Sequence
  Synthetic
agcuuuugugagugacuucuagca

SEQ ID NO: 207281 - RNA, 18 nt, Artificial Sequence
  Synthetic
acuugguuaguucuagca

SEQ ID NO: 207282 - RNA, 19 nt, Artificial Sequence
  Synthetic
aacuugguuaguucuagca

SEQ ID NO: 207283 - RNA, 20 nt, Artificial Sequence
  Synthetic
gaacuugguuaguucuagca

SEQ ID NO: 207284 - RNA, 21 nt, Artificial Sequence
  Synthetic
agaacuugguuaguucuagca

SEQ ID NO: 207285 - RNA, 22 nt, Artificial Sequence
  Synthetic
uagaacuugguuaguucuagca

SEQ ID NO: 207286 - RNA, 23 nt, Artificial Sequence
  Synthetic
cuagaacuugguuaguucuagca

SEQ ID NO: 207287 - RNA, 24 nt, Artificial Sequence
  Synthetic
gcuagaacuugguuaguucuagca

SEQ ID NO: 207288 - RNA, 18 nt, Artificial Sequence
  Synthetic
ggaucuauuaaaguagca

SEQ ID NO: 207289 - RNA, 19 nt, Artificial Sequence
  Synthetic
uggaucuauuaaaguagca

SEQ ID NO: 207290 - RNA, 20 nt, Artificial Sequence
  Synthetic
uuggaucuauuaaaguagca

SEQ ID NO: 207291 - RNA, 21 nt, Artificial Sequence
  Synthetic
auuggaucuauuaaaguagca

SEQ ID NO: 207292 - RNA, 22 nt, Artificial Sequence
  Synthetic
gauuggaucuauuaaaguagca

SEQ ID NO: 207293 - RNA, 23 nt, Artificial Sequence
  Synthetic
ugauuggaucuauuaaaguagca

SEQ ID NO: 207294 - RNA, 24 nt, Artificial Sequence
  Synthetic
uugauuggaucuauuaaaguagca

SEQ ID NO: 207295 - RNA, 18 nt, Artificial Sequence
  Synthetic
accaauauggcaguagca

SEQ ID NO: 207296 - RNA, 19 nt, Artificial Sequence
  Synthetic
gaccaauauggcaguagca

SEQ ID NO: 207297 - RNA, 20 nt, Artificial Sequence
  Synthetic
ugaccaauauggcaguagca

SEQ ID NO: 207298 - RNA, 21 nt, Artificial Sequence
  Synthetic
uugaccaauauggcaguagca

SEQ ID NO: 207299 - RNA, 22 nt, Artificial Sequence
  Synthetic
guugaccaauauggcaguagca

SEQ ID NO: 207300 - RNA, 23 nt, Artificial Sequence
  Synthetic
gguugaccaauauggcaguagca

SEQ ID NO: 207301 - RNA, 24 nt, Artificial Sequence
  Synthetic
agguugaccaauauggcaguagca

SEQ ID NO: 207302 - RNA, 18 nt, Artificial Sequence
  Synthetic
cacacacuugacguagca

SEQ ID NO: 207303 - RNA, 19 nt, Artificial Sequence
  Synthetic
acacacacuugacguagca

SEQ ID NO: 207304 - RNA, 20 nt, Artificial Sequence
  Synthetic
aacacacacuugacguagca

SEQ ID NO: 207305 - RNA, 21 nt, Artificial Sequence
  Synthetic
caacacacacuugacguagca

SEQ ID NO: 207306 - RNA, 22 nt, Artificial Sequence
  Synthetic
ucaacacacacuugacguagca

SEQ ID NO: 207307 - RNA, 23 nt, Artificial Sequence
  Synthetic
uucaacacacacuugacguagca

SEQ ID NO: 207308 - RNA, 24 nt, Artificial Sequence
  Synthetic
uuucaacacacacuugacguagca

SEQ ID NO: 207309 - RNA, 18 nt, Artificial Sequence
  Synthetic
aacauucaaaccguagca

SEQ ID NO: 207310 - RNA, 19 nt, Artificial Sequence
  Synthetic
aaacauucaaaccguagca

SEQ ID NO: 207311 - RNA, 20 nt, Artificial Sequence
  Synthetic
caaacauucaaaccguagca

SEQ ID NO: 207312 - RNA, 21 nt, Artificial Sequence
  Synthetic
acaaacauucaaaccguagca

SEQ ID NO: 207313 - RNA, 22 nt, Artificial Sequence
  Synthetic
cacaaacauucaaaccguagca

SEQ ID NO: 207314 - RNA, 23 nt, Artificial Sequence
  Synthetic
acacaaacauucaaaccguagca

SEQ ID NO: 207315 - RNA, 24 nt, Artificial Sequence
  Synthetic
gacacaaacauucaaaccguagca

SEQ ID NO: 207316 - RNA, 18 nt, Artificial Sequence
  Synthetic
gacaaaagaaagguagca

SEQ ID NO: 207317 - RNA, 19 nt, Artificial Sequence
  Synthetic
agacaaaagaaagguagca

SEQ ID NO: 207318 - RNA, 20 nt, Artificial Sequence
  Synthetic
aagacaaaagaaagguagca

SEQ ID NO: 207319 - RNA, 21 nt, Artificial Sequence
  Synthetic
aaagacaaaagaaagguagca

SEQ ID NO: 207320 - RNA, 22 nt, Artificial Sequence
  Synthetic
aaaagacaaaagaaagguagca

SEQ ID NO: 207321 - RNA, 23 nt, Artificial Sequence
  Synthetic
gaaaagacaaaagaaagguagca

SEQ ID NO: 207322 - RNA, 24 nt, Artificial Sequence
  Synthetic
agaaaagacaaaagaaagguagca

SEQ ID NO: 207323 - RNA, 18 nt, Artificial Sequence
  Synthetic
ccuauuuuguguguagca

SEQ ID NO: 207324 - RNA, 19 nt, Artificial Sequence
  Synthetic
cccuauuuuguguguagca

SEQ ID NO: 207325 - RNA, 20 nt, Artificial Sequence
  Synthetic
gcccuauuuuguguguagca

SEQ ID NO: 207326 - RNA, 21 nt, Artificial Sequence
  Synthetic
agcccuauuuuguguguagca

SEQ ID NO: 207327 - RNA, 22 nt, Artificial Sequence
  Synthetic
gagcccuauuuuguguguagca

SEQ ID NO: 207328 - RNA, 23 nt, Artificial Sequence
  Synthetic
ugagcccuauuuuguguguagca

SEQ ID NO: 207329 - RNA, 24 nt, Artificial Sequence
  Synthetic
uugagcccuauuuuguguguagca

SEQ ID NO: 207330 - RNA, 18 nt, Artificial Sequence
  Synthetic
guaugcccaauuguagca

SEQ ID NO: 207331 - RNA, 19 nt, Artificial Sequence
  Synthetic
uguaugcccaauuguagca

SEQ ID NO: 207332 - RNA, 20 nt, Artificial Sequence
  Synthetic
guguaugcccaauuguagca

SEQ ID NO: 207333 - RNA, 21 nt, Artificial Sequence
  Synthetic
gguguaugcccaauuguagca

SEQ ID NO: 207334 - RNA, 22 nt, Artificial Sequence
  Synthetic
agguguaugcccaauuguagca

SEQ ID NO: 207335 - RNA, 23 nt, Artificial Sequence
  Synthetic
aagguguaugcccaauuguagca

SEQ ID NO: 207336 - RNA, 24 nt, Artificial Sequence
  Synthetic
uaagguguaugcccaauuguagca

SEQ ID NO: 207337 - RNA, 18 nt, Artificial Sequence
  Synthetic
uacacccauguuguagca

SEQ ID NO: 207338 - RNA, 19 nt, Artificial Sequence
  Synthetic
guacacccauguuguagca

SEQ ID NO: 207339 - RNA, 20 nt, Artificial Sequence
  Synthetic
gguacacccauguuguagca

SEQ ID NO: 207340 - RNA, 21 nt, Artificial Sequence
  Synthetic
agguacacccauguuguagca

SEQ ID NO: 207341 - RNA, 22 nt, Artificial Sequence
  Synthetic
aagguacacccauguuguagca

SEQ ID NO: 207342 - RNA, 23 nt, Artificial Sequence
  Synthetic
caagguacacccauguuguagca

SEQ ID NO: 207343 - RNA, 24 nt, Artificial Sequence
  Synthetic
ucaagguacacccauguuguagca

SEQ ID NO: 207344 - RNA, 18 nt, Artificial Sequence
  Synthetic
uuucagaguuacuuagca

SEQ ID NO: 207345 - RNA, 19 nt, Artificial Sequence
  Synthetic
auuucagaguuacuuagca

SEQ ID NO: 207346 - RNA, 20 nt, Artificial Sequence
  Synthetic
aauuucagaguuacuuagca

SEQ ID NO: 207347 - RNA, 21 nt, Artificial Sequence
  Synthetic
gaauuucagaguuacuuagca

SEQ ID NO: 207348 - RNA, 22 nt, Artificial Sequence
  Synthetic
agaauuucagaguuacuuagca

SEQ ID NO: 207349 - RNA, 23 nt, Artificial Sequence
  Synthetic
aagaauuucagaguuacuuagca

SEQ ID NO: 207350 - RNA, 24 nt, Artificial Sequence
  Synthetic
gaagaauuucagaguuacuuagca

SEQ ID NO: 207351 - RNA, 18 nt, Artificial Sequence
  Synthetic
cugagugaauccuuagca

SEQ ID NO: 207352 - RNA, 19 nt, Artificial Sequence
  Synthetic
ccugagugaauccuuagca

SEQ ID NO: 207353 - RNA, 20 nt, Artificial Sequence
  Synthetic
cccugagugaauccuuagca

SEQ ID NO: 207354 - RNA, 21 nt, Artificial Sequence
  Synthetic
ccccugagugaauccuuagca

SEQ ID NO: 207355 - RNA, 22 nt, Artificial Sequence
  Synthetic
uccccugagugaauccuuagca

SEQ ID NO: 207356 - RNA, 23 nt, Artificial Sequence
  Synthetic
uuccccugagugaauccuuagca

SEQ ID NO: 207357 - RNA, 24 nt, Artificial Sequence
  Synthetic
cuuccccugagugaauccuuagca

SEQ ID NO: 207358 - RNA, 18 nt, Artificial Sequence
  Synthetic
caaaaauggagcuuagca

SEQ ID NO: 207359 - RNA, 19 nt, Artificial Sequence
  Synthetic
gcaaaaauggagcuuagca

SEQ ID NO: 207360 - RNA, 20 nt, Artificial Sequence
  Synthetic
agcaaaaauggagcuuagca

SEQ ID NO: 207361 - RNA, 21 nt, Artificial Sequence
  Synthetic
gagcaaaaauggagcuuagca

SEQ ID NO: 207362 - RNA, 22 nt, Artificial Sequence
  Synthetic
ggagcaaaaauggagcuuagca

SEQ ID NO: 207363 - RNA, 23 nt, Artificial Sequence
  Synthetic
aggagcaaaaauggagcuuagca

SEQ ID NO: 207364 - RNA, 24 nt, Artificial Sequence
  Synthetic
gaggagcaaaaauggagcuuagca

SEQ ID NO: 207365 - RNA, 18 nt, Artificial Sequence
  Synthetic
agcucuaaagucuuagca

SEQ ID NO: 207366 - RNA, 19 nt, Artificial Sequence
  Synthetic
uagcucuaaagucuuagca

SEQ ID NO: 207367 - RNA, 20 nt, Artificial Sequence
  Synthetic
cuagcucuaaagucuuagca

SEQ ID NO: 207368 - RNA, 21 nt, Artificial Sequence
  Synthetic
gcuagcucuaaagucuuagca

SEQ ID NO: 207369 - RNA, 22 nt, Artificial Sequence
  Synthetic
ggcuagcucuaaagucuuagca

SEQ ID NO: 207370 - RNA, 23 nt, Artificial Sequence
  Synthetic
uggcuagcucuaaagucuuagca

SEQ ID NO: 207371 - RNA, 24 nt, Artificial Sequence
  Synthetic
auggcuagcucuaaagucuuagca

SEQ ID NO: 207372 - RNA, 18 nt, Artificial Sequence
  Synthetic
gggauuuaaguguuagca

SEQ ID NO: 207373 - RNA, 19 nt, Artificial Sequence
  Synthetic
ugggauuuaaguguuagca

SEQ ID NO: 207374 - RNA, 20 nt, Artificial Sequence
  Synthetic
augggauuuaaguguuagca

SEQ ID NO: 207375 - RNA, 21 nt, Artificial Sequence
  Synthetic
gaugggauuuaaguguuagca

SEQ ID NO: 207376 - RNA, 22 nt, Artificial Sequence
  Synthetic
ugaugggauuuaaguguuagca

SEQ ID NO: 207377 - RNA, 23 nt, Artificial Sequence
  Synthetic
cugaugggauuuaaguguuagca

SEQ ID NO: 207378 - RNA, 24 nt, Artificial Sequence
  Synthetic
ucugaugggauuuaaguguuagca

SEQ ID NO: 207379 - RNA, 18 nt, Artificial Sequence
  Synthetic
uggggaaauaauuuagca

SEQ ID NO: 207380 - RNA, 19 nt, Artificial Sequence
  Synthetic
uuggggaaauaauuuagca

SEQ ID NO: 207381 - RNA, 20 nt, Artificial Sequence
  Synthetic
uuuggggaaauaauuuagca

SEQ ID NO: 207382 - RNA, 21 nt, Artificial Sequence
  Synthetic
guuuggggaaauaauuuagca

SEQ ID NO: 207383 - RNA, 22 nt, Artificial Sequence
  Synthetic
aguuuggggaaauaauuuagca

SEQ ID NO: 207384 - RNA, 23 nt, Artificial Sequence
  Synthetic
uaguuuggggaaauaauuuagca

SEQ ID NO: 207385 - RNA, 24 nt, Artificial Sequence
  Synthetic
auaguuuggggaaauaauuuagca

SEQ ID NO: 207386 - RNA, 18 nt, Artificial Sequence
  Synthetic
uaauauucccauuuagca

SEQ ID NO: 207387 - RNA, 19 nt, Artificial Sequence
  Synthetic
uuaauauucccauuuagca

SEQ ID NO: 207388 - RNA, 20 nt, Artificial Sequence
  Synthetic
guuaauauucccauuuagca

SEQ ID NO: 207389 - RNA, 21 nt, Artificial Sequence
  Synthetic
uguuaauauucccauuuagca

SEQ ID NO: 207390 - RNA, 22 nt, Artificial Sequence
  Synthetic
cuguuaauauucccauuuagca

SEQ ID NO: 207391 - RNA, 23 nt, Artificial Sequence
  Synthetic
acuguuaauauucccauuuagca

SEQ ID NO: 207392 - RNA, 24 nt, Artificial Sequence
  Synthetic
uacuguuaauauucccauuuagca

SEQ ID NO: 207393 - RNA, 18 nt, Artificial Sequence
  Synthetic
agaggcagagauuuagca

SEQ ID NO: 207394 - RNA, 19 nt, Artificial Sequence
  Synthetic
aagaggcagagauuuagca

SEQ ID NO: 207395 - RNA, 20 nt, Artificial Sequence
  Synthetic
caagaggcagagauuuagca

SEQ ID NO: 207396 - RNA, 21 nt, Artificial Sequence
  Synthetic
gcaagaggcagagauuuagca

SEQ ID NO: 207397 - RNA, 22 nt, Artificial Sequence
  Synthetic
agcaagaggcagagauuuagca

SEQ ID NO: 207398 - RNA, 23 nt, Artificial Sequence
  Synthetic
cagcaagaggcagagauuuagca

SEQ ID NO: 207399 - RNA, 24 nt, Artificial Sequence
  Synthetic
acagcaagaggcagagauuuagca

SEQ ID NO: 207400 - RNA, 18 nt, Artificial Sequence
  Synthetic
uguugcuaagcuuuagca

SEQ ID NO: 207401 - RNA, 19 nt, Artificial Sequence
  Synthetic
cuguugcuaagcuuuagca

SEQ ID NO: 207402 - RNA, 20 nt, Artificial Sequence
  Synthetic
acuguugcuaagcuuuagca

SEQ ID NO: 207403 - RNA, 21 nt, Artificial Sequence
  Synthetic
cacuguugcuaagcuuuagca

SEQ ID NO: 207404 - RNA, 22 nt, Artificial Sequence
  Synthetic
acacuguugcuaagcuuuagca

SEQ ID NO: 207405 - RNA, 23 nt, Artificial Sequence
  Synthetic
gacacuguugcuaagcuuuagca

SEQ ID NO: 207406 - RNA, 24 nt, Artificial Sequence
  Synthetic
ggacacuguugcuaagcuuuagca

SEQ ID NO: 207407 - RNA, 18 nt, Artificial Sequence
  Synthetic
aucuagggaaguuuagca

SEQ ID NO: 207408 - RNA, 19 nt, Artificial Sequence
  Synthetic
gaucuagggaaguuuagca

SEQ ID NO: 207409 - RNA, 20 nt, Artificial Sequence
  Synthetic
agaucuagggaaguuuagca

SEQ ID NO: 207410 - RNA, 21 nt, Artificial Sequence
  Synthetic
aagaucuagggaaguuuagca

SEQ ID NO: 207411 - RNA, 22 nt, Artificial Sequence
  Synthetic
aaagaucuagggaaguuuagca

SEQ ID NO: 207412 - RNA, 23 nt, Artificial Sequence
  Synthetic
gaaagaucuagggaaguuuagca

SEQ ID NO: 207413 - RNA, 24 nt, Artificial Sequence
  Synthetic
ugaaagaucuagggaaguuuagca

SEQ ID NO: 207414 - RNA, 18 nt, Artificial Sequence
  Synthetic
ggaauuuacauuuuagca

SEQ ID NO: 207415 - RNA, 19 nt, Artificial Sequence
  Synthetic
uggaauuuacauuuuagca

SEQ ID NO: 207416 - RNA, 20 nt, Artificial Sequence
  Synthetic
guggaauuuacauuuuagca

SEQ ID NO: 207417 - RNA, 21 nt, Artificial Sequence
  Synthetic
uguggaauuuacauuuuagca

SEQ ID NO: 207418 - RNA, 22 nt, Artificial Sequence
  Synthetic
uuguggaauuuacauuuuagca

SEQ ID NO: 207419 - RNA, 23 nt, Artificial Sequence
  Synthetic
guuguggaauuuacauuuuagca

SEQ ID NO: 207420 - RNA, 24 nt, Artificial Sequence
  Synthetic
uguuguggaauuuacauuuuagca

SEQ ID NO: 207421 - RNA, 18 nt, Artificial Sequence
  Synthetic
auucaaugaaaugacgca

SEQ ID NO: 207422 - RNA, 19 nt, Artificial Sequence
  Synthetic
gauucaaugaaaugacgca

SEQ ID NO: 207423 - RNA, 20 nt, Artificial Sequence
  Synthetic
ggauucaaugaaaugacgca

SEQ ID NO: 207424 - RNA, 21 nt, Artificial Sequence
  Synthetic
aggauucaaugaaaugacgca

SEQ ID NO: 207425 - RNA, 22 nt, Artificial Sequence
  Synthetic
uaggauucaaugaaaugacgca

SEQ ID NO: 207426 - RNA, 23 nt, Artificial Sequence
  Synthetic
uuaggauucaaugaaaugacgca

SEQ ID NO: 207427 - RNA, 24 nt, Artificial Sequence
  Synthetic
guuaggauucaaugaaaugacgca

SEQ ID NO: 207428 - RNA, 18 nt, Artificial Sequence
  Synthetic
aacuacuuagcuuacgca

SEQ ID NO: 207429 - RNA, 19 nt, Artificial Sequence
  Synthetic
aaacuacuuagcuuacgca

SEQ ID NO: 207430 - RNA, 20 nt, Artificial Sequence
  Synthetic
aaaacuacuuagcuuacgca

SEQ ID NO: 207431 - RNA, 21 nt, Artificial Sequence
  Synthetic
aaaaacuacuuagcuuacgca

SEQ ID NO: 207432 - RNA, 22 nt, Artificial Sequence
  Synthetic
uaaaaacuacuuagcuuacgca

SEQ ID NO: 207433 - RNA, 23 nt, Artificial Sequence
  Synthetic
cuaaaaacuacuuagcuuacgca

SEQ ID NO: 207434 - RNA, 24 nt, Artificial Sequence
  Synthetic
ucuaaaaacuacuuagcuuacgca

SEQ ID NO: 207435 - RNA, 18 nt, Artificial Sequence
  Synthetic
ccuagcaaacuuuacgca

SEQ ID NO: 207436 - RNA, 19 nt, Artificial Sequence
  Synthetic
uccuagcaaacuuuacgca

SEQ ID NO: 207437 - RNA, 20 nt, Artificial Sequence
  Synthetic
uuccuagcaaacuuuacgca

SEQ ID NO: 207438 - RNA, 21 nt, Artificial Sequence
  Synthetic
guuccuagcaaacuuuacgca

SEQ ID NO: 207439 - RNA, 22 nt, Artificial Sequence
  Synthetic
uguuccuagcaaacuuuacgca

SEQ ID NO: 207440 - RNA, 23 nt, Artificial Sequence
  Synthetic
uuguuccuagcaaacuuuacgca

SEQ ID NO: 207441 - RNA, 24 nt, Artificial Sequence
  Synthetic
uuuguuccuagcaaacuuuacgca

SEQ ID NO: 207442 - RNA, 18 nt, Artificial Sequence
  Synthetic
gacuugagcucccccgca

SEQ ID NO: 207443 - RNA, 19 nt, Artificial Sequence
  Synthetic
ugacuugagcucccccgca

SEQ ID NO: 207444 - RNA, 20 nt, Artificial Sequence
  Synthetic
augacuugagcucccccgca

SEQ ID NO: 207445 - RNA, 21 nt, Artificial Sequence
  Synthetic
aaugacuugagcucccccgca

SEQ ID NO: 207446 - RNA, 22 nt, Artificial Sequence
  Synthetic
aaaugacuugagcucccccgca

SEQ ID NO: 207447 - RNA, 23 nt, Artificial Sequence
  Synthetic
caaaugacuugagcucccccgca

SEQ ID NO: 207448 - RNA, 24 nt, Artificial Sequence
  Synthetic
acaaaugacuugagcucccccgca

SEQ ID NO: 207449 - RNA, 18 nt, Artificial Sequence
  Synthetic
cuagagaagguccccgca

SEQ ID NO: 207450 - RNA, 19 nt, Artificial Sequence
  Synthetic
ucuagagaagguccccgca

SEQ ID NO: 207451 - RNA, 20 nt, Artificial Sequence
  Synthetic
cucuagagaagguccccgca

SEQ ID NO: 207452 - RNA, 21 nt, Artificial Sequence
  Synthetic
ucucuagagaagguccccgca

SEQ ID NO: 207453 - RNA, 22 nt, Artificial Sequence
  Synthetic
gucucuagagaagguccccgca

SEQ ID NO: 207454 - RNA, 23 nt, Artificial Sequence
  Synthetic
agucucuagagaagguccccgca

SEQ ID NO: 207455 - RNA, 24 nt, Artificial Sequence
  Synthetic
aagucucuagagaagguccccgca

SEQ ID NO: 207456 - RNA, 18 nt, Artificial Sequence
  Synthetic
gugaugggaggagccgca

SEQ ID NO: 207457 - RNA, 19 nt, Artificial Sequence
  Synthetic
ugugaugggaggagccgca

SEQ ID NO: 207458 - RNA, 20 nt, Artificial Sequence
  Synthetic
cugugaugggaggagccgca

SEQ ID NO: 207459 - RNA, 21 nt, Artificial Sequence
  Synthetic
ucugugaugggaggagccgca

SEQ ID NO: 207460 - RNA, 22 nt, Artificial Sequence
  Synthetic
gucugugaugggaggagccgca

SEQ ID NO: 207461 - RNA, 23 nt, Artificial Sequence
  Synthetic
ggucugugaugggaggagccgca

SEQ ID NO: 207462 - RNA, 24 nt, Artificial Sequence
  Synthetic
gggucugugaugggaggagccgca

SEQ ID NO: 207463 - RNA, 18 nt, Artificial Sequence
  Synthetic
cuugcuuaugaugccgca

SEQ ID NO: 207464 - RNA, 19 nt, Artificial Sequence
  Synthetic
acuugcuuaugaugccgca

SEQ ID NO: 207465 - RNA, 20 nt, Artificial Sequence
  Synthetic
cacuugcuuaugaugccgca

SEQ ID NO: 207466 - RNA, 21 nt, Artificial Sequence
  Synthetic
ucacuugcuuaugaugccgca

SEQ ID NO: 207467 - RNA, 22 nt, Artificial Sequence
  Synthetic
aucacuugcuuaugaugccgca

SEQ ID NO: 207468 - RNA, 23 nt, Artificial Sequence
  Synthetic
caucacuugcuuaugaugccgca

SEQ ID NO: 207469 - RNA, 24 nt, Artificial Sequence
  Synthetic
ccaucacuugcuuaugaugccgca

SEQ ID NO: 207470 - RNA, 18 nt, Artificial Sequence
  Synthetic
aguuucuuuguauccgca

SEQ ID NO: 207471 - RNA, 19 nt, Artificial Sequence
  Synthetic
caguuucuuuguauccgca

SEQ ID NO: 207472 - RNA, 20 nt, Artificial Sequence
  Synthetic
ucaguuucuuuguauccgca

SEQ ID NO: 207473 - RNA, 21 nt, Artificial Sequence
  Synthetic
cucaguuucuuuguauccgca

SEQ ID NO: 207474 - RNA, 22 nt, Artificial Sequence
  Synthetic
ccucaguuucuuuguauccgca

SEQ ID NO: 207475 - RNA, 23 nt, Artificial Sequence
  Synthetic
accucaguuucuuuguauccgca

SEQ ID NO: 207476 - RNA, 24 nt, Artificial Sequence
  Synthetic
uaccucaguuucuuuguauccgca

SEQ ID NO: 207477 - RNA, 18 nt, Artificial Sequence
  Synthetic
ugcauccgugcuuccgca

SEQ ID NO: 207478 - RNA, 19 nt, Artificial Sequence
  Synthetic
cugcauccgugcuuccgca

SEQ ID NO: 207479 - RNA, 20 nt, Artificial Sequence
  Synthetic
acugcauccgugcuuccgca

SEQ ID NO: 207480 - RNA, 21 nt, Artificial Sequence
  Synthetic
aacugcauccgugcuuccgca

SEQ ID NO: 207481 - RNA, 22 nt, Artificial Sequence
  Synthetic
caacugcauccgugcuuccgca

SEQ ID NO: 207482 - RNA, 23 nt, Artificial Sequence
  Synthetic
ccaacugcauccgugcuuccgca

SEQ ID NO: 207483 - RNA, 24 nt, Artificial Sequence
  Synthetic
uccaacugcauccgugcuuccgca

SEQ ID NO: 207484 - RNA, 18 nt, Artificial Sequence
  Synthetic
cgugcaauuuugggcgca

SEQ ID NO: 207485 - RNA, 19 nt, Artificial Sequence
  Synthetic
acgugcaauuuugggcgca

SEQ ID NO: 207486 - RNA, 20 nt, Artificial Sequence
  Synthetic
gacgugcaauuuugggcgca

SEQ ID NO: 207487 - RNA, 21 nt, Artificial Sequence
  Synthetic
ggacgugcaauuuugggcgca

SEQ ID NO: 207488 - RNA, 22 nt, Artificial Sequence
  Synthetic
aggacgugcaauuuugggcgca

SEQ ID NO: 207489 - RNA, 23 nt, Artificial Sequence
  Synthetic
caggacgugcaauuuugggcgca

SEQ ID NO: 207490 - RNA, 24 nt, Artificial Sequence
  Synthetic
acaggacgugcaauuuugggcgca

SEQ ID NO: 207491 - RNA, 18 nt, Artificial Sequence
  Synthetic
agcauuaguuugugcgca

SEQ ID NO: 207492 - RNA, 19 nt, Artificial Sequence
  Synthetic
uagcauuaguuugugcgca

SEQ ID NO: 207493 - RNA, 20 nt, Artificial Sequence
  Synthetic
uuagcauuaguuugugcgca

SEQ ID NO: 207494 - RNA, 21 nt, Artificial Sequence
  Synthetic
guuagcauuaguuugugcgca

SEQ ID NO: 207495 - RNA, 22 nt, Artificial Sequence
  Synthetic
uguuagcauuaguuugugcgca

SEQ ID NO: 207496 - RNA, 23 nt, Artificial Sequence
  Synthetic
auguuagcauuaguuugugcgca

SEQ ID NO: 207497 - RNA, 24 nt, Artificial Sequence
  Synthetic
aauguuagcauuaguuugugcgca

SEQ ID NO: 207498 - RNA, 18 nt, Artificial Sequence
  Synthetic
augcauauuacaaucgca

SEQ ID NO: 207499 - RNA, 19 nt, Artificial Sequence
  Synthetic
aaugcauauuacaaucgca

SEQ ID NO: 207500 - RNA, 20 nt, Artificial Sequence
  Synthetic
aaaugcauauuacaaucgca

SEQ ID NO: 207501 - RNA, 21 nt, Artificial Sequence
  Synthetic
gaaaugcauauuacaaucgca

SEQ ID NO: 207502 - RNA, 22 nt, Artificial Sequence
  Synthetic
ggaaaugcauauuacaaucgca

SEQ ID NO: 207503 - RNA, 23 nt, Artificial Sequence
  Synthetic
gggaaaugcauauuacaaucgca

SEQ ID NO: 207504 - RNA, 24 nt, Artificial Sequence
  Synthetic
ggggaaaugcauauuacaaucgca

SEQ ID NO: 207505 - RNA, 18 nt, Artificial Sequence
  Synthetic
aaaacuguauucaucgca

SEQ ID NO: 207506 - RNA, 19 nt, Artificial Sequence
  Synthetic
uaaaacuguauucaucgca

SEQ ID NO: 207507 - RNA, 20 nt, Artificial Sequence
  Synthetic
cuaaaacuguauucaucgca

SEQ ID NO: 207508 - RNA, 21 nt, Artificial Sequence
  Synthetic
ucuaaaacuguauucaucgca

SEQ ID NO: 207509 - RNA, 22 nt, Artificial Sequence
  Synthetic
uucuaaaacuguauucaucgca

SEQ ID NO: 207510 - RNA, 23 nt, Artificial Sequence
  Synthetic
uuucuaaaacuguauucaucgca

SEQ ID NO: 207511 - RNA, 24 nt, Artificial Sequence
  Synthetic
uuuucuaaaacuguauucaucgca

SEQ ID NO: 207512 - RNA, 18 nt, Artificial Sequence
  Synthetic
ugauuggacugucucgca

SEQ ID NO: 207513 - RNA, 19 nt, Artificial Sequence
  Synthetic
uugauuggacugucucgca

SEQ ID NO: 207514 - RNA, 20 nt, Artificial Sequence
  Synthetic
auugauuggacugucucgca

SEQ ID NO: 207515 - RNA, 21 nt, Artificial Sequence
  Synthetic
gauugauuggacugucucgca

SEQ ID NO: 207516 - RNA, 22 nt, Artificial Sequence
  Synthetic
ugauugauuggacugucucgca

SEQ ID NO: 207517 - RNA, 23 nt, Artificial Sequence
  Synthetic
cugauugauuggacugucucgca

SEQ ID NO: 207518 - RNA, 24 nt, Artificial Sequence
  Synthetic
acugauugauuggacugucucgca

SEQ ID NO: 207519 - RNA, 18 nt, Artificial Sequence
  Synthetic
cgagaggcggaggucgca

SEQ ID NO: 207520 - RNA, 19 nt, Artificial Sequence
  Synthetic
ccgagaggcggaggucgca

SEQ ID NO: 207521 - RNA, 20 nt, Artificial Sequence
  Synthetic
cccgagaggcggaggucgca

SEQ ID NO: 207522 - RNA, 21 nt, Artificial Sequence
  Synthetic
acccgagaggcggaggucgca

SEQ ID NO: 207523 - RNA, 22 nt, Artificial Sequence
  Synthetic
aacccgagaggcggaggucgca

SEQ ID NO: 207524 - RNA, 23 nt, Artificial Sequence
  Synthetic
gaacccgagaggcggaggucgca

SEQ ID NO: 207525 - RNA, 24 nt, Artificial Sequence
  Synthetic
ugaacccgagaggcggaggucgca

SEQ ID NO: 207526 - RNA, 18 nt, Artificial Sequence
  Synthetic
uaaaagcuggaaaaggca

SEQ ID NO: 207527 - RNA, 19 nt, Artificial Sequence
  Synthetic
cuaaaagcuggaaaaggca

SEQ ID NO: 207528 - RNA, 20 nt, Artificial Sequence
  Synthetic
ucuaaaagcuggaaaaggca

SEQ ID NO: 207529 - RNA, 21 nt, Artificial Sequence
  Synthetic
cucuaaaagcuggaaaaggca

SEQ ID NO: 207530 - RNA, 22 nt, Artificial Sequence
  Synthetic
gcucuaaaagcuggaaaaggca

SEQ ID NO: 207531 - RNA, 23 nt, Artificial Sequence
  Synthetic
ggcucuaaaagcuggaaaaggca

SEQ ID NO: 207532 - RNA, 24 nt, Artificial Sequence
  Synthetic
aggcucuaaaagcuggaaaaggca

SEQ ID NO: 207533 - RNA, 18 nt, Artificial Sequence
  Synthetic
cuaaugcuggaaaaggca

SEQ ID NO: 207534 - RNA, 19 nt, Artificial Sequence
  Synthetic
ucuaaugcuggaaaaggca

SEQ ID NO: 207535 - RNA, 20 nt, Artificial Sequence
  Synthetic
aucuaaugcuggaaaaggca

SEQ ID NO: 207536 - RNA, 21 nt, Artificial Sequence
  Synthetic
caucuaaugcuggaaaaggca

SEQ ID NO: 207537 - RNA, 22 nt, Artificial Sequence
  Synthetic
gcaucuaaugcuggaaaaggca

SEQ ID NO: 207538 - RNA, 23 nt, Artificial Sequence
  Synthetic
agcaucuaaugcuggaaaaggca

SEQ ID NO: 207539 - RNA, 24 nt, Artificial Sequence
  Synthetic
uagcaucuaaugcuggaaaaggca

SEQ ID NO: 207540 - RNA, 18 nt, Artificial Sequence
  Synthetic
cugcaaacugaaaaggca

SEQ ID NO: 207541 - RNA, 19 nt, Artificial Sequence
  Synthetic
gcugcaaacugaaaaggca

SEQ ID NO: 207542 - RNA, 20 nt, Artificial Sequence
  Synthetic
ugcugcaaacugaaaaggca

SEQ ID NO: 207543 - RNA, 21 nt, Artificial Sequence
  Synthetic
gugcugcaaacugaaaaggca

SEQ ID NO: 207544 - RNA, 22 nt, Artificial Sequence
  Synthetic
agugcugcaaacugaaaaggca

SEQ ID NO: 207545 - RNA, 23 nt, Artificial Sequence
  Synthetic
gagugcugcaaacugaaaaggca

SEQ ID NO: 207546 - RNA, 24 nt, Artificial Sequence
  Synthetic
agagugcugcaaacugaaaaggca

SEQ ID NO: 207547 - RNA, 18 nt, Artificial Sequence
  Synthetic
aaggaacauuaaaaggca

SEQ ID NO: 207548 - RNA, 19 nt, Artificial Sequence
  Synthetic
caaggaacauuaaaaggca

SEQ ID NO: 207549 - RNA, 20 nt, Artificial Sequence
  Synthetic
gcaaggaacauuaaaaggca

SEQ ID NO: 207550 - RNA, 21 nt, Artificial Sequence
  Synthetic
ugcaaggaacauuaaaaggca

SEQ ID NO: 207551 - RNA, 22 nt, Artificial Sequence
  Synthetic
cugcaaggaacauuaaaaggca

SEQ ID NO: 207552 - RNA, 23 nt, Artificial Sequence
  Synthetic
ccugcaaggaacauuaaaaggca

SEQ ID NO: 207553 - RNA, 24 nt, Artificial Sequence
  Synthetic
accugcaaggaacauuaaaaggca

SEQ ID NO: 207554 - RNA, 18 nt, Artificial Sequence
  Synthetic
guaauuagcacaaaggca

SEQ ID NO: 207555 - RNA, 19 nt, Artificial Sequence
  Synthetic
uguaauuagcacaaaggca

SEQ ID NO: 207556 - RNA, 20 nt, Artificial Sequence
  Synthetic
cuguaauuagcacaaaggca

SEQ ID NO: 207557 - RNA, 21 nt, Artificial Sequence
  Synthetic
gcuguaauuagcacaaaggca

SEQ ID NO: 207558 - RNA, 22 nt, Artificial Sequence
  Synthetic
ugcuguaauuagcacaaaggca

SEQ ID NO: 207559 - RNA, 23 nt, Artificial Sequence
  Synthetic
gugcuguaauuagcacaaaggca

SEQ ID NO: 207560 - RNA, 24 nt, Artificial Sequence
  Synthetic
ugugcuguaauuagcacaaaggca

SEQ ID NO: 207561 - RNA, 18 nt, Artificial Sequence
  Synthetic
uuuugaaauggaaaggca

SEQ ID NO: 207562 - RNA, 19 nt, Artificial Sequence
  Synthetic
auuuugaaauggaaaggca

SEQ ID NO: 207563 - RNA, 20 nt, Artificial Sequence
  Synthetic
uauuuugaaauggaaaggca

SEQ ID NO: 207564 - RNA, 21 nt, Artificial Sequence
  Synthetic
guauuuugaaauggaaaggca

SEQ ID NO: 207565 - RNA, 22 nt, Artificial Sequence
  Synthetic
uguauuuugaaauggaaaggca

SEQ ID NO: 207566 - RNA, 23 nt, Artificial Sequence
  Synthetic
guguauuuugaaauggaaaggca

SEQ ID NO: 207567 - RNA, 24 nt, Artificial Sequence
  Synthetic
aguguauuuugaaauggaaaggca

SEQ ID NO: 207568 - RNA, 18 nt, Artificial Sequence
  Synthetic
ccaggcuugauaaaggca

SEQ ID NO: 207569 - RNA, 19 nt, Artificial Sequence
  Synthetic
gccaggcuugauaaaggca

SEQ ID NO: 207570 - RNA, 20 nt, Artificial Sequence
  Synthetic
agccaggcuugauaaaggca

SEQ ID NO: 207571 - RNA, 21 nt, Artificial Sequence
  Synthetic
aagccaggcuugauaaaggca

SEQ ID NO: 207572 - RNA, 22 nt, Artificial Sequence
  Synthetic
aaagccaggcuugauaaaggca

SEQ ID NO: 207573 - RNA, 23 nt, Artificial Sequence
  Synthetic
caaagccaggcuugauaaaggca

SEQ ID NO: 207574 - RNA, 24 nt, Artificial Sequence
  Synthetic
ccaaagccaggcuugauaaaggca

SEQ ID NO: 207575 - RNA, 18 nt, Artificial Sequence
  Synthetic
cacaaggggguaaaggca

SEQ ID NO: 207576 - RNA, 19 nt, Artificial Sequence
  Synthetic
ccacaaggggguaaaggca

SEQ ID NO: 207577 - RNA, 20 nt, Artificial Sequence
  Synthetic
accacaaggggguaaaggca

SEQ ID NO: 207578 - RNA, 21 nt, Artificial Sequence
  Synthetic
aaccacaaggggguaaaggca

SEQ ID NO: 207579 - RNA, 22 nt, Artificial Sequence
  Synthetic
caaccacaaggggguaaaggca

SEQ ID NO: 207580 - RNA, 23 nt, Artificial Sequence
  Synthetic
ucaaccacaaggggguaaaggca

SEQ ID NO: 207581 - RNA, 24 nt, Artificial Sequence
  Synthetic
gucaaccacaaggggguaaaggca

SEQ ID NO: 207582 - RNA, 18 nt, Artificial Sequence
  Synthetic
aaaacaucguacaaggca

SEQ ID NO: 207583 - RNA, 19 nt, Artificial Sequence
  Synthetic
gaaaacaucguacaaggca

SEQ ID NO: 207584 - RNA, 20 nt, Artificial Sequence
  Synthetic
agaaaacaucguacaaggca

SEQ ID NO: 207585 - RNA, 21 nt, Artificial Sequence
  Synthetic
aagaaaacaucguacaaggca

SEQ ID NO: 207586 - RNA, 22 nt, Artificial Sequence
  Synthetic
aaagaaaacaucguacaaggca

SEQ ID NO: 207587 - RNA, 23 nt, Artificial Sequence
  Synthetic
uaaagaaaacaucguacaaggca

SEQ ID NO: 207588 - RNA, 24 nt, Artificial Sequence
  Synthetic
auaaagaaaacaucguacaaggca

SEQ ID NO: 207589 - RNA, 18 nt, Artificial Sequence
  Synthetic
ggagacggaagcaaggca

SEQ ID NO: 207590 - RNA, 19 nt, Artificial Sequence
  Synthetic
gggagacggaagcaaggca

SEQ ID NO: 207591 - RNA, 20 nt, Artificial Sequence
  Synthetic
ugggagacggaagcaaggca

SEQ ID NO: 207592 - RNA, 21 nt, Artificial Sequence
  Synthetic
augggagacggaagcaaggca

SEQ ID NO: 207593 - RNA, 22 nt, Artificial Sequence
  Synthetic
aaugggagacggaagcaaggca

SEQ ID NO: 207594 - RNA, 23 nt, Artificial Sequence
  Synthetic
gaaugggagacggaagcaaggca

SEQ ID NO: 207595 - RNA, 24 nt, Artificial Sequence
  Synthetic
ugaaugggagacggaagcaaggca

SEQ ID NO: 207596 - RNA, 18 nt, Artificial Sequence
  Synthetic
caugaauggcagaaggca

SEQ ID NO: 207597 - RNA, 19 nt, Artificial Sequence
  Synthetic
acaugaauggcagaaggca

SEQ ID NO: 207598 - RNA, 20 nt, Artificial Sequence
  Synthetic
uacaugaauggcagaaggca

SEQ ID NO: 207599 - RNA, 21 nt, Artificial Sequence
  Synthetic
uuacaugaauggcagaaggca

SEQ ID NO: 207600 - RNA, 22 nt, Artificial Sequence
  Synthetic
cuuacaugaauggcagaaggca

SEQ ID NO: 207601 - RNA, 23 nt, Artificial Sequence
  Synthetic
ucuuacaugaauggcagaaggca

SEQ ID NO: 207602 - RNA, 24 nt, Artificial Sequence
  Synthetic
aucuuacaugaauggcagaaggca

SEQ ID NO: 207603 - RNA, 18 nt, Artificial Sequence
  Synthetic
caaucuuggcagaaggca

SEQ ID NO: 207604 - RNA, 19 nt, Artificial Sequence
  Synthetic
acaaucuuggcagaaggca

SEQ ID NO: 207605 - RNA, 20 nt, Artificial Sequence
  Synthetic
cacaaucuuggcagaaggca

SEQ ID NO: 207606 - RNA, 21 nt, Artificial Sequence
  Synthetic
ucacaaucuuggcagaaggca

SEQ ID NO: 207607 - RNA, 22 nt, Artificial Sequence
  Synthetic
cucacaaucuuggcagaaggca

SEQ ID NO: 207608 - RNA, 23 nt, Artificial Sequence
  Synthetic
ccucacaaucuuggcagaaggca

SEQ ID NO: 207609 - RNA, 24 nt, Artificial Sequence
  Synthetic
gccucacaaucuuggcagaaggca

SEQ ID NO: 207610 - RNA, 18 nt, Artificial Sequence
  Synthetic
gacggagccgagaaggca

SEQ ID NO: 207611 - RNA, 19 nt, Artificial Sequence
  Synthetic
agacggagccgagaaggca

SEQ ID NO: 207612 - RNA, 20 nt, Artificial Sequence
  Synthetic
gagacggagccgagaaggca

SEQ ID NO: 207613 - RNA, 21 nt, Artificial Sequence
  Synthetic
ggagacggagccgagaaggca

SEQ ID NO: 207614 - RNA, 22 nt, Artificial Sequence
  Synthetic
aggagacggagccgagaaggca

SEQ ID NO: 207615 - RNA, 23 nt, Artificial Sequence
  Synthetic
caggagacggagccgagaaggca

SEQ ID NO: 207616 - RNA, 24 nt, Artificial Sequence
  Synthetic
gcaggagacggagccgagaaggca

SEQ ID NO: 207617 - RNA, 18 nt, Artificial Sequence
  Synthetic
cuuauguuuuagaaggca

SEQ ID NO: 207618 - RNA, 19 nt, Artificial Sequence
  Synthetic
ucuuauguuuuagaaggca

SEQ ID NO: 207619 - RNA, 20 nt, Artificial Sequence
  Synthetic
uucuuauguuuuagaaggca

SEQ ID NO: 207620 - RNA, 21 nt, Artificial Sequence
  Synthetic
guucuuauguuuuagaaggca

SEQ ID NO: 207621 - RNA, 22 nt, Artificial Sequence
  Synthetic
uguucuuauguuuuagaaggca

SEQ ID NO: 207622 - RNA, 23 nt, Artificial Sequence
  Synthetic
uuguucuuauguuuuagaaggca

SEQ ID NO: 207623 - RNA, 24 nt, Artificial Sequence
  Synthetic
uuuguucuuauguuuuagaaggca

SEQ ID NO: 207624 - RNA, 18 nt, Artificial Sequence
  Synthetic
ggcuacuccaggaaggca

SEQ ID NO: 207625 - RNA, 19 nt, Artificial Sequence
  Synthetic
gggcuacuccaggaaggca

SEQ ID NO: 207626 - RNA, 20 nt, Artificial Sequence
  Synthetic
ugggcuacuccaggaaggca

SEQ ID NO: 207627 - RNA, 21 nt, Artificial Sequence
  Synthetic
gugggcuacuccaggaaggca

SEQ ID NO: 207628 - RNA, 22 nt, Artificial Sequence
  Synthetic
ugugggcuacuccaggaaggca

SEQ ID NO: 207629 - RNA, 23 nt, Artificial Sequence
  Synthetic
augugggcuacuccaggaaggca

SEQ ID NO: 207630 - RNA, 24 nt, Artificial Sequence
  Synthetic
gaugugggcuacuccaggaaggca

SEQ ID NO: 207631 - RNA, 18 nt, Artificial Sequence
  Synthetic
uggcucucguggaaggca

SEQ ID NO: 207632 - RNA, 19 nt, Artificial Sequence
  Synthetic
auggcucucguggaaggca

SEQ ID NO: 207633 - RNA, 20 nt, Artificial Sequence
  Synthetic
aauggcucucguggaaggca

SEQ ID NO: 207634 - RNA, 21 nt, Artificial Sequence
  Synthetic
aaauggcucucguggaaggca

SEQ ID NO: 207635 - RNA, 22 nt, Artificial Sequence
  Synthetic
caaauggcucucguggaaggca

SEQ ID NO: 207636 - RNA, 23 nt, Artificial Sequence
  Synthetic
ccaaauggcucucguggaaggca

SEQ ID NO: 207637 - RNA, 24 nt, Artificial Sequence
  Synthetic
accaaauggcucucguggaaggca

SEQ ID NO: 207638 - RNA, 18 nt, Artificial Sequence
  Synthetic
uccauucagaugaaggca

SEQ ID NO: 207639 - RNA, 19 nt, Artificial Sequence
  Synthetic
uuccauucagaugaaggca

SEQ ID NO: 207640 - RNA, 20 nt, Artificial Sequence
  Synthetic
auuccauucagaugaaggca

SEQ ID NO: 207641 - RNA, 21 nt, Artificial Sequence
  Synthetic
gauuccauucagaugaaggca

SEQ ID NO: 207642 - RNA, 22 nt, Artificial Sequence
  Synthetic
ugauuccauucagaugaaggca

SEQ ID NO: 207643 - RNA, 23 nt, Artificial Sequence
  Synthetic
augauuccauucagaugaaggca

SEQ ID NO: 207644 - RNA, 24 nt, Artificial Sequence
  Synthetic
aaugauuccauucagaugaaggca

SEQ ID NO: 207645 - RNA, 18 nt, Artificial Sequence
  Synthetic
uuucuccuggugaaggca

SEQ ID NO: 207646 - RNA, 19 nt, Artificial Sequence
  Synthetic
auuucuccuggugaaggca

SEQ ID NO: 207647 - RNA, 20 nt, Artificial Sequence
  Synthetic
uauuucuccuggugaaggca

SEQ ID NO: 207648 - RNA, 21 nt, Artificial Sequence
  Synthetic
auauuucuccuggugaaggca

SEQ ID NO: 207649 - RNA, 22 nt, Artificial Sequence
  Synthetic
cauauuucuccuggugaaggca

SEQ ID NO: 207650 - RNA, 23 nt, Artificial Sequence
  Synthetic
ccauauuucuccuggugaaggca

SEQ ID NO: 207651 - RNA, 24 nt, Artificial Sequence
  Synthetic
accauauuucuccuggugaaggca

SEQ ID NO: 207652 - RNA, 18 nt, Artificial Sequence
  Synthetic
uggaauguauugaaggca

SEQ ID NO: 207653 - RNA, 19 nt, Artificial Sequence
  Synthetic
uuggaauguauugaaggca

SEQ ID NO: 207654 - RNA, 20 nt, Artificial Sequence
  Synthetic
cuuggaauguauugaaggca

SEQ ID NO: 207655 - RNA, 21 nt, Artificial Sequence
  Synthetic
ccuuggaauguauugaaggca

SEQ ID NO: 207656 - RNA, 22 nt, Artificial Sequence
  Synthetic
cccuuggaauguauugaaggca

SEQ ID NO: 207657 - RNA, 23 nt, Artificial Sequence
  Synthetic
ucccuuggaauguauugaaggca

SEQ ID NO: 207658 - RNA, 24 nt, Artificial Sequence
  Synthetic
uucccuuggaauguauugaaggca

SEQ ID NO: 207659 - RNA, 18 nt, Artificial Sequence
  Synthetic
gacauuaagaauaaggca

SEQ ID NO: 207660 - RNA, 19 nt, Artificial Sequence
  Synthetic
ggacauuaagaauaaggca

SEQ ID NO: 207661 - RNA, 20 nt, Artificial Sequence
  Synthetic
gggacauuaagaauaaggca

SEQ ID NO: 207662 - RNA, 21 nt, Artificial Sequence
  Synthetic
ggggacauuaagaauaaggca

SEQ ID NO: 207663 - RNA, 22 nt, Artificial Sequence
  Synthetic
aggggacauuaagaauaaggca

SEQ ID NO: 207664 - RNA, 23 nt, Artificial Sequence
  Synthetic
gaggggacauuaagaauaaggca

SEQ ID NO: 207665 - RNA, 24 nt, Artificial Sequence
  Synthetic
ggaggggacauuaagaauaaggca

SEQ ID NO: 207666 - RNA, 18 nt, Artificial Sequence
  Synthetic
aguuugaauuguaaggca

SEQ ID NO: 207667 - RNA, 19 nt, Artificial Sequence
  Synthetic
gaguuugaauuguaaggca

SEQ ID NO: 207668 - RNA, 20 nt, Artificial Sequence
  Synthetic
ggaguuugaauuguaaggca

SEQ ID NO: 207669 - RNA, 21 nt, Artificial Sequence
  Synthetic
aggaguuugaauuguaaggca

SEQ ID NO: 207670 - RNA, 22 nt, Artificial Sequence
  Synthetic
uaggaguuugaauuguaaggca

SEQ ID NO: 207671 - RNA, 23 nt, Artificial Sequence
  Synthetic
guaggaguuugaauuguaaggca

SEQ ID NO: 207672 - RNA, 24 nt, Artificial Sequence
  Synthetic
uguaggaguuugaauuguaaggca

SEQ ID NO: 207673 - RNA, 18 nt, Artificial Sequence
  Synthetic
uacuuucuuuuuaaggca

SEQ ID NO: 207674 - RNA, 19 nt, Artificial Sequence
  Synthetic
auacuuucuuuuuaaggca

SEQ ID NO: 207675 - RNA, 20 nt, Artificial Sequence
  Synthetic
aauacuuucuuuuuaaggca

SEQ ID NO: 207676 - RNA, 21 nt, Artificial Sequence
  Synthetic
gaauacuuucuuuuuaaggca

SEQ ID NO: 207677 - RNA, 22 nt, Artificial Sequence
  Synthetic
agaauacuuucuuuuuaaggca

SEQ ID NO: 207678 - RNA, 23 nt, Artificial Sequence
  Synthetic
uagaauacuuucuuuuuaaggca

SEQ ID NO: 207679 - RNA, 24 nt, Artificial Sequence
  Synthetic
cuagaauacuuucuuuuuaaggca

SEQ ID NO: 207680 - RNA, 18 nt, Artificial Sequence
  Synthetic
auucacuaaucacaggca

SEQ ID NO: 207681 - RNA, 19 nt, Artificial Sequence
  Synthetic
uauucacuaaucacaggca

SEQ ID NO: 207682 - RNA, 20 nt, Artificial Sequence
  Synthetic
auauucacuaaucacaggca

SEQ ID NO: 207683 - RNA, 21 nt, Artificial Sequence
  Synthetic
uauauucacuaaucacaggca

SEQ ID NO: 207684 - RNA, 22 nt, Artificial Sequence
  Synthetic
cuauauucacuaaucacaggca

SEQ ID NO: 207685 - RNA, 23 nt, Artificial Sequence
  Synthetic
ucuauauucacuaaucacaggca

SEQ ID NO: 207686 - RNA, 24 nt, Artificial Sequence
  Synthetic
cucuauauucacuaaucacaggca

SEQ ID NO: 207687 - RNA, 18 nt, Artificial Sequence
  Synthetic
caacuauggcaccaggca

SEQ ID NO: 207688 - RNA, 19 nt, Artificial Sequence
  Synthetic
acaacuauggcaccaggca

SEQ ID NO: 207689 - RNA, 20 nt, Artificial Sequence
  Synthetic
cacaacuauggcaccaggca

SEQ ID NO: 207690 - RNA, 21 nt, Artificial Sequence
  Synthetic
ucacaacuauggcaccaggca

SEQ ID NO: 207691 - RNA, 22 nt, Artificial Sequence
  Synthetic
cucacaacuauggcaccaggca

SEQ ID NO: 207692 - RNA, 23 nt, Artificial Sequence
  Synthetic
ccucacaacuauggcaccaggca

SEQ ID NO: 207693 - RNA, 24 nt, Artificial Sequence
  Synthetic
accucacaacuauggcaccaggca

SEQ ID NO: 207694 - RNA, 18 nt, Artificial Sequence
  Synthetic
gaccccaucacccaggca

SEQ ID NO: 207695 - RNA, 19 nt, Artificial Sequence
  Synthetic
ugaccccaucacccaggca

SEQ ID NO: 207696 - RNA, 20 nt, Artificial Sequence
  Synthetic
augaccccaucacccaggca

SEQ ID NO: 207697 - RNA, 21 nt, Artificial Sequence
  Synthetic
aaugaccccaucacccaggca

SEQ ID NO: 207698 - RNA, 22 nt, Artificial Sequence
  Synthetic
gaaugaccccaucacccaggca

SEQ ID NO: 207699 - RNA, 23 nt, Artificial Sequence
  Synthetic
ugaaugaccccaucacccaggca

SEQ ID NO: 207700 - RNA, 24 nt, Artificial Sequence
  Synthetic
augaaugaccccaucacccaggca

SEQ ID NO: 207701 - RNA, 18 nt, Artificial Sequence
  Synthetic
acauuuuucccccaggca

SEQ ID NO: 207702 - RNA, 19 nt, Artificial Sequence
  Synthetic
aacauuuuucccccaggca

SEQ ID NO: 207703 - RNA, 20 nt, Artificial Sequence
  Synthetic
gaacauuuuucccccaggca

SEQ ID NO: 207704 - RNA, 21 nt, Artificial Sequence
  Synthetic
ugaacauuuuucccccaggca

SEQ ID NO: 207705 - RNA, 22 nt, Artificial Sequence
  Synthetic
augaacauuuuucccccaggca

SEQ ID NO: 207706 - RNA, 23 nt, Artificial Sequence
  Synthetic
caugaacauuuuucccccaggca

SEQ ID NO: 207707 - RNA, 24 nt, Artificial Sequence
  Synthetic
acaugaacauuuuucccccaggca

SEQ ID NO: 207708 - RNA, 18 nt, Artificial Sequence
  Synthetic
cucugguguccccaggca

SEQ ID NO: 207709 - RNA, 19 nt, Artificial Sequence
  Synthetic
ccucugguguccccaggca

SEQ ID NO: 207710 - RNA, 20 nt, Artificial Sequence
  Synthetic
uccucugguguccccaggca

SEQ ID NO: 207711 - RNA, 21 nt, Artificial Sequence
  Synthetic
cuccucugguguccccaggca

SEQ ID NO: 207712 - RNA, 22 nt, Artificial Sequence
  Synthetic
ucuccucugguguccccaggca

SEQ ID NO: 207713 - RNA, 23 nt, Artificial Sequence
  Synthetic
uucuccucugguguccccaggca

SEQ ID NO: 207714 - RNA, 24 nt, Artificial Sequence
  Synthetic
guucuccucugguguccccaggca

SEQ ID NO: 207715 - RNA, 18 nt, Artificial Sequence
  Synthetic
ggaaggacaucccaggca

SEQ ID NO: 207716 - RNA, 19 nt, Artificial Sequence
  Synthetic
uggaaggacaucccaggca

SEQ ID NO: 207717 - RNA, 20 nt, Artificial Sequence
  Synthetic
auggaaggacaucccaggca

SEQ ID NO: 207718 - RNA, 21 nt, Artificial Sequence
  Synthetic
uauggaaggacaucccaggca

SEQ ID NO: 207719 - RNA, 22 nt, Artificial Sequence
  Synthetic
guauggaaggacaucccaggca

SEQ ID NO: 207720 - RNA, 23 nt, Artificial Sequence
  Synthetic
uguauggaaggacaucccaggca

SEQ ID NO: 207721 - RNA, 24 nt, Artificial Sequence
  Synthetic
auguauggaaggacaucccaggca

SEQ ID NO: 207722 - RNA, 18 nt, Artificial Sequence
  Synthetic
aaugaaauaagccaggca

SEQ ID NO: 207723 - RNA, 19 nt, Artificial Sequence
  Synthetic
aaaugaaauaagccaggca

SEQ ID NO: 207724 - RNA, 20 nt, Artificial Sequence
  Synthetic
uaaaugaaauaagccaggca

SEQ ID NO: 207725 - RNA, 21 nt, Artificial Sequence
  Synthetic
cuaaaugaaauaagccaggca

SEQ ID NO: 207726 - RNA, 22 nt, Artificial Sequence
  Synthetic
acuaaaugaaauaagccaggca

SEQ ID NO: 207727 - RNA, 23 nt, Artificial Sequence
  Synthetic
uacuaaaugaaauaagccaggca

SEQ ID NO: 207728 - RNA, 24 nt, Artificial Sequence
  Synthetic
auacuaaaugaaauaagccaggca

SEQ ID NO: 207729 - RNA, 18 nt, Artificial Sequence
  Synthetic
uugaggcagagccaggca

SEQ ID NO: 207730 - RNA, 19 nt, Artificial Sequence
  Synthetic
auugaggcagagccaggca

SEQ ID NO: 207731 - RNA, 20 nt, Artificial Sequence
  Synthetic
cauugaggcagagccaggca

SEQ ID NO: 207732 - RNA, 21 nt, Artificial Sequence
  Synthetic
ucauugaggcagagccaggca

SEQ ID NO: 207733 - RNA, 22 nt, Artificial Sequence
  Synthetic
gucauugaggcagagccaggca

SEQ ID NO: 207734 - RNA, 23 nt, Artificial Sequence
  Synthetic
agucauugaggcagagccaggca

SEQ ID NO: 207735 - RNA, 24 nt, Artificial Sequence
  Synthetic
aagucauugaggcagagccaggca

SEQ ID NO: 207736 - RNA, 18 nt, Artificial Sequence
  Synthetic
gguuucacgggccaggca

SEQ ID NO: 207737 - RNA, 19 nt, Artificial Sequence
  Synthetic
ugguuucacgggccaggca

SEQ ID NO: 207738 - RNA, 20 nt, Artificial Sequence
  Synthetic
augguuucacgggccaggca

SEQ ID NO: 207739 - RNA, 21 nt, Artificial Sequence
  Synthetic
caugguuucacgggccaggca

SEQ ID NO: 207740 - RNA, 22 nt, Artificial Sequence
  Synthetic
acaugguuucacgggccaggca

SEQ ID NO: 207741 - RNA, 23 nt, Artificial Sequence
  Synthetic
aacaugguuucacgggccaggca

SEQ ID NO: 207742 - RNA, 24 nt, Artificial Sequence
  Synthetic
aaacaugguuucacgggccaggca

SEQ ID NO: 207743 - RNA, 18 nt, Artificial Sequence
  Synthetic
agaagggcaauccaggca

SEQ ID NO: 207744 - RNA, 19 nt, Artificial Sequence
  Synthetic
gagaagggcaauccaggca

SEQ ID NO: 207745 - RNA, 20 nt, Artificial Sequence
  Synthetic
cgagaagggcaauccaggca

SEQ ID NO: 207746 - RNA, 21 nt, Artificial Sequence
  Synthetic
acgagaagggcaauccaggca

SEQ ID NO: 207747 - RNA, 22 nt, Artificial Sequence
  Synthetic
aacgagaagggcaauccaggca

SEQ ID NO: 207748 - RNA, 23 nt, Artificial Sequence
  Synthetic
aaacgagaagggcaauccaggca

SEQ ID NO: 207749 - RNA, 24 nt, Artificial Sequence
  Synthetic
aaaacgagaagggcaauccaggca

SEQ ID NO: 207750 - RNA, 18 nt, Artificial Sequence
  Synthetic
gcaaaaacauuccaggca

SEQ ID NO: 207751 - RNA, 19 nt, Artificial Sequence
  Synthetic
ggcaaaaacauuccaggca

SEQ ID NO: 207752 - RNA, 20 nt, Artificial Sequence
  Synthetic
gggcaaaaacauuccaggca

SEQ ID NO: 207753 - RNA, 21 nt, Artificial Sequence
  Synthetic
ugggcaaaaacauuccaggca

SEQ ID NO: 207754 - RNA, 22 nt, Artificial Sequence
  Synthetic
uugggcaaaaacauuccaggca

SEQ ID NO: 207755 - RNA, 23 nt, Artificial Sequence
  Synthetic
uuugggcaaaaacauuccaggca

SEQ ID NO: 207756 - RNA, 24 nt, Artificial Sequence
  Synthetic
auuugggcaaaaacauuccaggca

SEQ ID NO: 207757 - RNA, 18 nt, Artificial Sequence
  Synthetic
ggaaaauuauuccaggca

SEQ ID NO: 207758 - RNA, 19 nt, Artificial Sequence
  Synthetic
gggaaaauuauuccaggca

SEQ ID NO: 207759 - RNA, 20 nt, Artificial Sequence
  Synthetic
ugggaaaauuauuccaggca

SEQ ID NO: 207760 - RNA, 21 nt, Artificial Sequence
  Synthetic
cugggaaaauuauuccaggca

SEQ ID NO: 207761 - RNA, 22 nt, Artificial Sequence
  Synthetic
ucugggaaaauuauuccaggca

SEQ ID NO: 207762 - RNA, 23 nt, Artificial Sequence
  Synthetic
uucugggaaaauuauuccaggca

SEQ ID NO: 207763 - RNA, 24 nt, Artificial Sequence
  Synthetic
uuucugggaaaauuauuccaggca

SEQ ID NO: 207764 - RNA, 18 nt, Artificial Sequence
  Synthetic
guucccauuuuccaggca

SEQ ID NO: 207765 - RNA, 19 nt, Artificial Sequence
  Synthetic
cguucccauuuuccaggca

SEQ ID NO: 207766 - RNA, 20 nt, Artificial Sequence
  Synthetic
ucguucccauuuuccaggca

SEQ ID NO: 207767 - RNA, 21 nt, Artificial Sequence
  Synthetic
aucguucccauuuuccaggca

SEQ ID NO: 207768 - RNA, 22 nt, Artificial Sequence
  Synthetic
uaucguucccauuuuccaggca

SEQ ID NO: 207769 - RNA, 23 nt, Artificial Sequence
  Synthetic
uuaucguucccauuuuccaggca

SEQ ID NO: 207770 - RNA, 24 nt, Artificial Sequence
  Synthetic
auuaucguucccauuuuccaggca

SEQ ID NO: 207771 - RNA, 18 nt, Artificial Sequence
  Synthetic
uguccugaauugcaggca

SEQ ID NO: 207772 - RNA, 19 nt, Artificial Sequence
  Synthetic
cuguccugaauugcaggca

SEQ ID NO: 207773 - RNA, 20 nt, Artificial Sequence
  Synthetic
gcuguccugaauugcaggca

SEQ ID NO: 207774 - RNA, 21 nt, Artificial Sequence
  Synthetic
agcuguccugaauugcaggca

SEQ ID NO: 207775 - RNA, 22 nt, Artificial Sequence
  Synthetic
gagcuguccugaauugcaggca

SEQ ID NO: 207776 - RNA, 23 nt, Artificial Sequence
  Synthetic
agagcuguccugaauugcaggca

SEQ ID NO: 207777 - RNA, 24 nt, Artificial Sequence
  Synthetic
cagagcuguccugaauugcaggca

SEQ ID NO: 207778 - RNA, 18 nt, Artificial Sequence
  Synthetic
ggccaggacaaucaggca

SEQ ID NO: 207779 - RNA, 19 nt, Artificial Sequence
  Synthetic
uggccaggacaaucaggca

SEQ ID NO: 207780 - RNA, 20 nt, Artificial Sequence
  Synthetic
uuggccaggacaaucaggca

SEQ ID NO: 207781 - RNA, 21 nt, Artificial Sequence
  Synthetic
uuuggccaggacaaucaggca

SEQ ID NO: 207782 - RNA, 22 nt, Artificial Sequence
  Synthetic
uuuuggccaggacaaucaggca

SEQ ID NO: 207783 - RNA, 23 nt, Artificial Sequence
  Synthetic
guuuuggccaggacaaucaggca

SEQ ID NO: 207784 - RNA, 24 nt, Artificial Sequence
  Synthetic
aguuuuggccaggacaaucaggca

SEQ ID NO: 207785 - RNA, 18 nt, Artificial Sequence
  Synthetic
acagaaagccuucaggca

SEQ ID NO: 207786 - RNA, 19 nt, Artificial Sequence
  Synthetic
aacagaaagccuucaggca

SEQ ID NO: 207787 - RNA, 20 nt, Artificial Sequence
  Synthetic
caacagaaagccuucaggca

SEQ ID NO: 207788 - RNA, 21 nt, Artificial Sequence
  Synthetic
gcaacagaaagccuucaggca

SEQ ID NO: 207789 - RNA, 22 nt, Artificial Sequence
  Synthetic
ggcaacagaaagccuucaggca

SEQ ID NO: 207790 - RNA, 23 nt, Artificial Sequence
  Synthetic
uggcaacagaaagccuucaggca

SEQ ID NO: 207791 - RNA, 24 nt, Artificial Sequence
  Synthetic
guggcaacagaaagccuucaggca

SEQ ID NO: 207792 - RNA, 18 nt, Artificial Sequence
  Synthetic
uccuggaggaaagaggca

SEQ ID NO: 207793 - RNA, 19 nt, Artificial Sequence
  Synthetic
cuccuggaggaaagaggca

SEQ ID NO: 207794 - RNA, 20 nt, Artificial Sequence
  Synthetic
ucuccuggaggaaagaggca

SEQ ID NO: 207795 - RNA, 21 nt, Artificial Sequence
  Synthetic
gucuccuggaggaaagaggca

SEQ ID NO: 207796 - RNA, 22 nt, Artificial Sequence
  Synthetic
ugucuccuggaggaaagaggca

SEQ ID NO: 207797 - RNA, 23 nt, Artificial Sequence
  Synthetic
augucuccuggaggaaagaggca

SEQ ID NO: 207798 - RNA, 24 nt, Artificial Sequence
  Synthetic
aaugucuccuggaggaaagaggca

SEQ ID NO: 207799 - RNA, 18 nt, Artificial Sequence
  Synthetic
agaagcaaggaagaggca

SEQ ID NO: 207800 - RNA, 19 nt, Artificial Sequence
  Synthetic
uagaagcaaggaagaggca

SEQ ID NO: 207801 - RNA, 20 nt, Artificial Sequence
  Synthetic
uuagaagcaaggaagaggca

SEQ ID NO: 207802 - RNA, 21 nt, Artificial Sequence
  Synthetic
auuagaagcaaggaagaggca

SEQ ID NO: 207803 - RNA, 22 nt, Artificial Sequence
  Synthetic
cauuagaagcaaggaagaggca

SEQ ID NO: 207804 - RNA, 23 nt, Artificial Sequence
  Synthetic
ucauuagaagcaaggaagaggca

SEQ ID NO: 207805 - RNA, 24 nt, Artificial Sequence
  Synthetic
aucauuagaagcaaggaagaggca

SEQ ID NO: 207806 - RNA, 18 nt, Artificial Sequence
  Synthetic
acuaaggggacagaggca

SEQ ID NO: 207807 - RNA, 19 nt, Artificial Sequence
  Synthetic
uacuaaggggacagaggca

SEQ ID NO: 207808 - RNA, 20 nt, Artificial Sequence
  Synthetic
cuacuaaggggacagaggca

SEQ ID NO: 207809 - RNA, 21 nt, Artificial Sequence
  Synthetic
acuacuaaggggacagaggca

SEQ ID NO: 207810 - RNA, 22 nt, Artificial Sequence
  Synthetic
uacuacuaaggggacagaggca

SEQ ID NO: 207811 - RNA, 23 nt, Artificial Sequence
  Synthetic
uuacuacuaaggggacagaggca

SEQ ID NO: 207812 - RNA, 24 nt, Artificial Sequence
  Synthetic
uuuacuacuaaggggacagaggca

SEQ ID NO: 207813 - RNA, 18 nt, Artificial Sequence
  Synthetic
acaaggaggagagaggca

SEQ ID NO: 207814 - RNA, 19 nt, Artificial Sequence
  Synthetic
gacaaggaggagagaggca

SEQ ID NO: 207815 - RNA, 20 nt, Artificial Sequence
  Synthetic
ggacaaggaggagagaggca

SEQ ID NO: 207816 - RNA, 21 nt, Artificial Sequence
  Synthetic
uggacaaggaggagagaggca

SEQ ID NO: 207817 - RNA, 22 nt, Artificial Sequence
  Synthetic
uuggacaaggaggagagaggca

SEQ ID NO: 207818 - RNA, 23 nt, Artificial Sequence
  Synthetic
uuuggacaaggaggagagaggca

SEQ ID NO: 207819 - RNA, 24 nt, Artificial Sequence
  Synthetic
auuuggacaaggaggagagaggca

SEQ ID NO: 207820 - RNA, 18 nt, Artificial Sequence
  Synthetic
uucaugaucauagaggca

SEQ ID NO: 207821 - RNA, 19 nt, Artificial Sequence
  Synthetic
uuucaugaucauagaggca

SEQ ID NO: 207822 - RNA, 20 nt, Artificial Sequence
  Synthetic
cuuucaugaucauagaggca

SEQ ID NO: 207823 - RNA, 21 nt, Artificial Sequence
  Synthetic
ucuuucaugaucauagaggca

SEQ ID NO: 207824 - RNA, 22 nt, Artificial Sequence
  Synthetic
uucuuucaugaucauagaggca

SEQ ID NO: 207825 - RNA, 23 nt, Artificial Sequence
  Synthetic
auucuuucaugaucauagaggca

SEQ ID NO: 207826 - RNA, 24 nt, Artificial Sequence
  Synthetic
cauucuuucaugaucauagaggca

SEQ ID NO: 207827 - RNA, 18 nt, Artificial Sequence
  Synthetic
uacuuuuaugacgaggca

SEQ ID NO: 207828 - RNA, 19 nt, Artificial Sequence
  Synthetic
cuacuuuuaugacgaggca

SEQ ID NO: 207829 - RNA, 20 nt, Artificial Sequence
  Synthetic
gcuacuuuuaugacgaggca

SEQ ID NO: 207830 - RNA, 21 nt, Artificial Sequence
  Synthetic
agcuacuuuuaugacgaggca

SEQ ID NO: 207831 - RNA, 22 nt, Artificial Sequence
  Synthetic
aagcuacuuuuaugacgaggca

SEQ ID NO: 207832 - RNA, 23 nt, Artificial Sequence
  Synthetic
aaagcuacuuuuaugacgaggca

SEQ ID NO: 207833 - RNA, 24 nt, Artificial Sequence
  Synthetic
aaaagcuacuuuuaugacgaggca

SEQ ID NO: 207834 - RNA, 18 nt, Artificial Sequence
  Synthetic
uggaaguagcucgaggca

SEQ ID NO: 207835 - RNA, 19 nt, Artificial Sequence
  Synthetic
auggaaguagcucgaggca

SEQ ID NO: 207836 - RNA, 20 nt, Artificial Sequence
  Synthetic
aauggaaguagcucgaggca

SEQ ID NO: 207837 - RNA, 21 nt, Artificial Sequence
  Synthetic
aaauggaaguagcucgaggca

SEQ ID NO: 207838 - RNA, 22 nt, Artificial Sequence
  Synthetic
gaaauggaaguagcucgaggca

SEQ ID NO: 207839 - RNA, 23 nt, Artificial Sequence
  Synthetic
ggaaauggaaguagcucgaggca

SEQ ID NO: 207840 - RNA, 24 nt, Artificial Sequence
  Synthetic
aggaaauggaaguagcucgaggca

SEQ ID NO: 207841 - RNA, 18 nt, Artificial Sequence
  Synthetic
ugauagcggcaggaggca

SEQ ID NO: 207842 - RNA, 19 nt, Artificial Sequence
  Synthetic
cugauagcggcaggaggca

SEQ ID NO: 207843 - RNA, 20 nt, Artificial Sequence
  Synthetic
acugauagcggcaggaggca

SEQ ID NO: 207844 - RNA, 21 nt, Artificial Sequence
  Synthetic
uacugauagcggcaggaggca

SEQ ID NO: 207845 - RNA, 22 nt, Artificial Sequence
  Synthetic
guacugauagcggcaggaggca

SEQ ID NO: 207846 - RNA, 23 nt, Artificial Sequence
  Synthetic
cguacugauagcggcaggaggca

SEQ ID NO: 207847 - RNA, 24 nt, Artificial Sequence
  Synthetic
ucguacugauagcggcaggaggca

SEQ ID NO: 207848 - RNA, 18 nt, Artificial Sequence
  Synthetic
caaucuacagaggaggca

SEQ ID NO: 207849 - RNA, 19 nt, Artificial Sequence
  Synthetic
ccaaucuacagaggaggca

SEQ ID NO: 207850 - RNA, 20 nt, Artificial Sequence
  Synthetic
cccaaucuacagaggaggca

SEQ ID NO: 207851 - RNA, 21 nt, Artificial Sequence
  Synthetic
ccccaaucuacagaggaggca

SEQ ID NO: 207852 - RNA, 22 nt, Artificial Sequence
  Synthetic
uccccaaucuacagaggaggca

SEQ ID NO: 207853 - RNA, 23 nt, Artificial Sequence
  Synthetic
guccccaaucuacagaggaggca

SEQ ID NO: 207854 - RNA, 24 nt, Artificial Sequence
  Synthetic
uguccccaaucuacagaggaggca

SEQ ID NO: 207855 - RNA, 18 nt, Artificial Sequence
  Synthetic
aagauguuuuaggaggca

SEQ ID NO: 207856 - RNA, 19 nt, Artificial Sequence
  Synthetic
uaagauguuuuaggaggca

SEQ ID NO: 207857 - RNA, 20 nt, Artificial Sequence
  Synthetic
auaagauguuuuaggaggca

SEQ ID NO: 207858 - RNA, 21 nt, Artificial Sequence
  Synthetic
aauaagauguuuuaggaggca

SEQ ID NO: 207859 - RNA, 22 nt, Artificial Sequence
  Synthetic
gaauaagauguuuuaggaggca

SEQ ID NO: 207860 - RNA, 23 nt, Artificial Sequence
  Synthetic
ggaauaagauguuuuaggaggca

SEQ ID NO: 207861 - RNA, 24 nt, Artificial Sequence
  Synthetic
aggaauaagauguuuuaggaggca

SEQ ID NO: 207862 - RNA, 18 nt, Artificial Sequence
  Synthetic
ccaaaaauuagggaggca

SEQ ID NO: 207863 - RNA, 19 nt, Artificial Sequence
  Synthetic
cccaaaaauuagggaggca

SEQ ID NO: 207864 - RNA, 20 nt, Artificial Sequence
  Synthetic
gcccaaaaauuagggaggca

SEQ ID NO: 207865 - RNA, 21 nt, Artificial Sequence
  Synthetic
agcccaaaaauuagggaggca

SEQ ID NO: 207866 - RNA, 22 nt, Artificial Sequence
  Synthetic
aagcccaaaaauuagggaggca

SEQ ID NO: 207867 - RNA, 23 nt, Artificial Sequence
  Synthetic
aaagcccaaaaauuagggaggca

SEQ ID NO: 207868 - RNA, 24 nt, Artificial Sequence
  Synthetic
aaaagcccaaaaauuagggaggca

SEQ ID NO: 207869 - RNA, 18 nt, Artificial Sequence
  Synthetic
auuuuagcaggggaggca

SEQ ID NO: 207870 - RNA, 19 nt, Artificial Sequence
  Synthetic
cauuuuagcaggggaggca

SEQ ID NO: 207871 - RNA, 20 nt, Artificial Sequence
  Synthetic
acauuuuagcaggggaggca

SEQ ID NO: 207872 - RNA, 21 nt, Artificial Sequence
  Synthetic
uacauuuuagcaggggaggca

SEQ ID NO: 207873 - RNA, 22 nt, Artificial Sequence
  Synthetic
uuacauuuuagcaggggaggca

SEQ ID NO: 207874 - RNA, 23 nt, Artificial Sequence
  Synthetic
uuuacauuuuagcaggggaggca

SEQ ID NO: 207875 - RNA, 24 nt, Artificial Sequence
  Synthetic
auuuacauuuuagcaggggaggca

SEQ ID NO: 207876 - RNA, 18 nt, Artificial Sequence
  Synthetic
gcauggcagauggaggca

SEQ ID NO: 207877 - RNA, 19 nt, Artificial Sequence
  Synthetic
ugcauggcagauggaggca

SEQ ID NO: 207878 - RNA, 20 nt, Artificial Sequence
  Synthetic
uugcauggcagauggaggca

SEQ ID NO: 207879 - RNA, 21 nt, Artificial Sequence
  Synthetic
cuugcauggcagauggaggca

SEQ ID NO: 207880 - RNA, 22 nt, Artificial Sequence
  Synthetic
gcuugcauggcagauggaggca

SEQ ID NO: 207881 - RNA, 23 nt, Artificial Sequence
  Synthetic
ggcuugcauggcagauggaggca

SEQ ID NO: 207882 - RNA, 24 nt, Artificial Sequence
  Synthetic
aggcuugcauggcagauggaggca

SEQ ID NO: 207883 - RNA, 18 nt, Artificial Sequence
  Synthetic
aaggaggaaacugaggca

SEQ ID NO: 207884 - RNA, 19 nt, Artificial Sequence
  Synthetic
aaaggaggaaacugaggca

SEQ ID NO: 207885 - RNA, 20 nt, Artificial Sequence
  Synthetic
caaaggaggaaacugaggca

SEQ ID NO: 207886 - RNA, 21 nt, Artificial Sequence
  Synthetic
gcaaaggaggaaacugaggca

SEQ ID NO: 207887 - RNA, 22 nt, Artificial Sequence
  Synthetic
agcaaaggaggaaacugaggca

SEQ ID NO: 207888 - RNA, 23 nt, Artificial Sequence
  Synthetic
uagcaaaggaggaaacugaggca

SEQ ID NO: 207889 - RNA, 24 nt, Artificial Sequence
  Synthetic
uuagcaaaggaggaaacugaggca

SEQ ID NO: 207890 - RNA, 18 nt, Artificial Sequence
  Synthetic
gaaaaggauacugaggca

SEQ ID NO: 207891 - RNA, 19 nt, Artificial Sequence
  Synthetic
agaaaaggauacugaggca

SEQ ID NO: 207892 - RNA, 20 nt, Artificial Sequence
  Synthetic
gagaaaaggauacugaggca

SEQ ID NO: 207893 - RNA, 21 nt, Artificial Sequence
  Synthetic
agagaaaaggauacugaggca

SEQ ID NO: 207894 - RNA, 22 nt, Artificial Sequence
  Synthetic
cagagaaaaggauacugaggca

SEQ ID NO: 207895 - RNA, 23 nt, Artificial Sequence
  Synthetic
acagagaaaaggauacugaggca

SEQ ID NO: 207896 - RNA, 24 nt, Artificial Sequence
  Synthetic
gacagagaaaaggauacugaggca

SEQ ID NO: 207897 - RNA, 18 nt, Artificial Sequence
  Synthetic
acucaggaggcugaggca

SEQ ID NO: 207898 - RNA, 19 nt, Artificial Sequence
  Synthetic
uacucaggaggcugaggca

SEQ ID NO: 207899 - RNA, 20 nt, Artificial Sequence
  Synthetic
auacucaggaggcugaggca

SEQ ID NO: 207900 - RNA, 21 nt, Artificial Sequence
  Synthetic
gauacucaggaggcugaggca

SEQ ID NO: 207901 - RNA, 22 nt, Artificial Sequence
  Synthetic
agauacucaggaggcugaggca

SEQ ID NO: 207902 - RNA, 23 nt, Artificial Sequence
  Synthetic
cagauacucaggaggcugaggca

SEQ ID NO: 207903 - RNA, 24 nt, Artificial Sequence
  Synthetic
ccagauacucaggaggcugaggca

SEQ ID NO: 207904 - RNA, 18 nt, Artificial Sequence
  Synthetic
acuugggaggcugaggca

SEQ ID NO: 207905 - RNA, 19 nt, Artificial Sequence
  Synthetic
uacuugggaggcugaggca

SEQ ID NO: 207906 - RNA, 20 nt, Artificial Sequence
  Synthetic
cuacuugggaggcugaggca

SEQ ID NO: 207907 - RNA, 21 nt, Artificial Sequence
  Synthetic
gcuacuugggaggcugaggca

SEQ ID NO: 207908 - RNA, 22 nt, Artificial Sequence
  Synthetic
agcuacuugggaggcugaggca

SEQ ID NO: 207909 - RNA, 23 nt, Artificial Sequence
  Synthetic
cagcuacuugggaggcugaggca

SEQ ID NO: 207910 - RNA, 24 nt, Artificial Sequence
  Synthetic
ccagcuacuugggaggcugaggca

SEQ ID NO: 207911 - RNA, 18 nt, Artificial Sequence
  Synthetic
uuugaagaaagugaggca

SEQ ID NO: 207912 - RNA, 19 nt, Artificial Sequence
  Synthetic
auuugaagaaagugaggca

SEQ ID NO: 207913 - RNA, 20 nt, Artificial Sequence
  Synthetic
cauuugaagaaagugaggca

SEQ ID NO: 207914 - RNA, 21 nt, Artificial Sequence
  Synthetic
acauuugaagaaagugaggca

SEQ ID NO: 207915 - RNA, 22 nt, Artificial Sequence
  Synthetic
uacauuugaagaaagugaggca

SEQ ID NO: 207916 - RNA, 23 nt, Artificial Sequence
  Synthetic
uuacauuugaagaaagugaggca

SEQ ID NO: 207917 - RNA, 24 nt, Artificial Sequence
  Synthetic
uuuacauuugaagaaagugaggca

SEQ ID NO: 207918 - RNA, 18 nt, Artificial Sequence
  Synthetic
agagagagaguugaggca

SEQ ID NO: 207919 - RNA, 19 nt, Artificial Sequence
  Synthetic
gagagagagaguugaggca

SEQ ID NO: 207920 - RNA, 20 nt, Artificial Sequence
  Synthetic
ggagagagagaguugaggca

SEQ ID NO: 207921 - RNA, 21 nt, Artificial Sequence
  Synthetic
gggagagagagaguugaggca

SEQ ID NO: 207922 - RNA, 22 nt, Artificial Sequence
  Synthetic
ggggagagagagaguugaggca

SEQ ID NO: 207923 - RNA, 23 nt, Artificial Sequence
  Synthetic
aggggagagagagaguugaggca

SEQ ID NO: 207924 - RNA, 24 nt, Artificial Sequence
  Synthetic
aaggggagagagagaguugaggca

SEQ ID NO: 207925 - RNA, 18 nt, Artificial Sequence
  Synthetic
ggauaaccacaauaggca

SEQ ID NO: 207926 - RNA, 19 nt, Artificial Sequence
  Synthetic
aggauaaccacaauaggca

SEQ ID NO: 207927 - RNA, 20 nt, Artificial Sequence
  Synthetic
caggauaaccacaauaggca

SEQ ID NO: 207928 - RNA, 21 nt, Artificial Sequence
  Synthetic
ucaggauaaccacaauaggca

SEQ ID NO: 207929 - RNA, 22 nt, Artificial Sequence
  Synthetic
uucaggauaaccacaauaggca

SEQ ID NO: 207930 - RNA, 23 nt, Artificial Sequence
  Synthetic
auucaggauaaccacaauaggca

SEQ ID NO: 207931 - RNA, 24 nt, Artificial Sequence
  Synthetic
uauucaggauaaccacaauaggca

SEQ ID NO: 207932 - RNA, 18 nt, Artificial Sequence
  Synthetic
aagguauugguauaggca

SEQ ID NO: 207933 - RNA, 19 nt, Artificial Sequence
  Synthetic
aaagguauugguauaggca

SEQ ID NO: 207934 - RNA, 20 nt, Artificial Sequence
  Synthetic
aaaagguauugguauaggca

SEQ ID NO: 207935 - RNA, 21 nt, Artificial Sequence
  Synthetic
caaaagguauugguauaggca

SEQ ID NO: 207936 - RNA, 22 nt, Artificial Sequence
  Synthetic
acaaaagguauugguauaggca

SEQ ID NO: 207937 - RNA, 23 nt, Artificial Sequence
  Synthetic
aacaaaagguauugguauaggca

SEQ ID NO: 207938 - RNA, 24 nt, Artificial Sequence
  Synthetic
gaacaaaagguauugguauaggca

SEQ ID NO: 207939 - RNA, 18 nt, Artificial Sequence
  Synthetic
cauuuguucaucuaggca

SEQ ID NO: 207940 - RNA, 19 nt, Artificial Sequence
  Synthetic
ucauuuguucaucuaggca

SEQ ID NO: 207941 - RNA, 20 nt, Artificial Sequence
  Synthetic
gucauuuguucaucuaggca

SEQ ID NO: 207942 - RNA, 21 nt, Artificial Sequence
  Synthetic
cgucauuuguucaucuaggca

SEQ ID NO: 207943 - RNA, 22 nt, Artificial Sequence
  Synthetic
acgucauuuguucaucuaggca

SEQ ID NO: 207944 - RNA, 23 nt, Artificial Sequence
  Synthetic
uacgucauuuguucaucuaggca

SEQ ID NO: 207945 - RNA, 24 nt, Artificial Sequence
  Synthetic
auacgucauuuguucaucuaggca

SEQ ID NO: 207946 - RNA, 18 nt, Artificial Sequence
  Synthetic
gaugaugcauucuaggca

SEQ ID NO: 207947 - RNA, 19 nt, Artificial Sequence
  Synthetic
agaugaugcauucuaggca

SEQ ID NO: 207948 - RNA, 20 nt, Artificial Sequence
  Synthetic
cagaugaugcauucuaggca

SEQ ID NO: 207949 - RNA, 21 nt, Artificial Sequence
  Synthetic
ccagaugaugcauucuaggca

SEQ ID NO: 207950 - RNA, 22 nt, Artificial Sequence
  Synthetic
accagaugaugcauucuaggca

SEQ ID NO: 207951 - RNA, 23 nt, Artificial Sequence
  Synthetic
uaccagaugaugcauucuaggca

SEQ ID NO: 207952 - RNA, 24 nt, Artificial Sequence
  Synthetic
guaccagaugaugcauucuaggca

SEQ ID NO: 207953 - RNA, 18 nt, Artificial Sequence
  Synthetic
cagagagcauuguaggca

SEQ ID NO: 207954 - RNA, 19 nt, Artificial Sequence
  Synthetic
gcagagagcauuguaggca

SEQ ID NO: 207955 - RNA, 20 nt, Artificial Sequence
  Synthetic
ggcagagagcauuguaggca

SEQ ID NO: 207956 - RNA, 21 nt, Artificial Sequence
  Synthetic
aggcagagagcauuguaggca

SEQ ID NO: 207957 - RNA, 22 nt, Artificial Sequence
  Synthetic
aaggcagagagcauuguaggca

SEQ ID NO: 207958 - RNA, 23 nt, Artificial Sequence
  Synthetic
aaaggcagagagcauuguaggca

SEQ ID NO: 207959 - RNA, 24 nt, Artificial Sequence
  Synthetic
aaaaggcagagagcauuguaggca

SEQ ID NO: 207960 - RNA, 18 nt, Artificial Sequence
  Synthetic
aaauaguucauuuaggca

SEQ ID NO: 207961 - RNA, 19 nt, Artificial Sequence
  Synthetic
gaaauaguucauuuaggca

SEQ ID NO: 207962 - RNA, 20 nt, Artificial Sequence
  Synthetic
ugaaauaguucauuuaggca

SEQ ID NO: 207963 - RNA, 21 nt, Artificial Sequence
  Synthetic
augaaauaguucauuuaggca

SEQ ID NO: 207964 - RNA, 22 nt, Artificial Sequence
  Synthetic
aaugaaauaguucauuuaggca

SEQ ID NO: 207965 - RNA, 23 nt, Artificial Sequence
  Synthetic
aaaugaaauaguucauuuaggca

SEQ ID NO: 207966 - RNA, 24 nt, Artificial Sequence
  Synthetic
uaaaugaaauaguucauuuaggca

SEQ ID NO: 207967 - RNA, 18 nt, Artificial Sequence
  Synthetic
acaaaacuuuggacggca

SEQ ID NO: 207968 - RNA, 19 nt, Artificial Sequence
  Synthetic
aacaaaacuuuggacggca

SEQ ID NO: 207969 - RNA, 20 nt, Artificial Sequence
  Synthetic
aaacaaaacuuuggacggca

SEQ ID NO: 207970 - RNA, 21 nt, Artificial Sequence
  Synthetic
gaaacaaaacuuuggacggca

SEQ ID NO: 207971 - RNA, 22 nt, Artificial Sequence
  Synthetic
agaaacaaaacuuuggacggca

SEQ ID NO: 207972 - RNA, 23 nt, Artificial Sequence
  Synthetic
gagaaacaaaacuuuggacggca

SEQ ID NO: 207973 - RNA, 24 nt, Artificial Sequence
  Synthetic
ggagaaacaaaacuuuggacggca

SEQ ID NO: 207974 - RNA, 18 nt, Artificial Sequence
  Synthetic
caccacugcacuccggca

SEQ ID NO: 207975 - RNA, 19 nt, Artificial Sequence
  Synthetic
acaccacugcacuccggca

SEQ ID NO: 207976 - RNA, 20 nt, Artificial Sequence
  Synthetic
cacaccacugcacuccggca

SEQ ID NO: 207977 - RNA, 21 nt, Artificial Sequence
  Synthetic
ucacaccacugcacuccggca

SEQ ID NO: 207978 - RNA, 22 nt, Artificial Sequence
  Synthetic
aucacaccacugcacuccggca

SEQ ID NO: 207979 - RNA, 23 nt, Artificial Sequence
  Synthetic
gaucacaccacugcacuccggca

SEQ ID NO: 207980 - RNA, 24 nt, Artificial Sequence
  Synthetic
agaucacaccacugcacuccggca

SEQ ID NO: 207981 - RNA, 18 nt, Artificial Sequence
  Synthetic
aaaagaguaaaaucggca

SEQ ID NO: 207982 - RNA, 19 nt, Artificial Sequence
  Synthetic
uaaaagaguaaaaucggca

SEQ ID NO: 207983 - RNA, 20 nt, Artificial Sequence
  Synthetic
auaaaagaguaaaaucggca

SEQ ID NO: 207984 - RNA, 21 nt, Artificial Sequence
  Synthetic
uauaaaagaguaaaaucggca

SEQ ID NO: 207985 - RNA, 22 nt, Artificial Sequence
  Synthetic
uuauaaaagaguaaaaucggca

SEQ ID NO: 207986 - RNA, 23 nt, Artificial Sequence
  Synthetic
cuuauaaaagaguaaaaucggca

SEQ ID NO: 207987 - RNA, 24 nt, Artificial Sequence
  Synthetic
ucuuauaaaagaguaaaaucggca

SEQ ID NO: 207988 - RNA, 18 nt, Artificial Sequence
  Synthetic
aucuuuguaaaaagggca

SEQ ID NO: 207989 - RNA, 19 nt, Artificial Sequence
  Synthetic
caucuuuguaaaaagggca

SEQ ID NO: 207990 - RNA, 20 nt, Artificial Sequence
  Synthetic
gcaucuuuguaaaaagggca

SEQ ID NO: 207991 - RNA, 21 nt, Artificial Sequence
  Synthetic
agcaucuuuguaaaaagggca

SEQ ID NO: 207992 - RNA, 22 nt, Artificial Sequence
  Synthetic
uagcaucuuuguaaaaagggca

SEQ ID NO: 207993 - RNA, 23 nt, Artificial Sequence
  Synthetic
auagcaucuuuguaaaaagggca

SEQ ID NO: 207994 - RNA, 24 nt, Artificial Sequence
  Synthetic
cauagcaucuuuguaaaaagggca

SEQ ID NO: 207995 - RNA, 18 nt, Artificial Sequence
  Synthetic
agaaagagacaaagggca

SEQ ID NO: 207996 - RNA, 19 nt, Artificial Sequence
  Synthetic
cagaaagagacaaagggca

SEQ ID NO: 207997 - RNA, 20 nt, Artificial Sequence
  Synthetic
gcagaaagagacaaagggca

SEQ ID NO: 207998 - RNA, 21 nt, Artificial Sequence
  Synthetic
agcagaaagagacaaagggca

SEQ ID NO: 207999 - RNA, 22 nt, Artificial Sequence
  Synthetic
uagcagaaagagacaaagggca

SEQ ID NO: 208000 - RNA, 23 nt, Artificial Sequence
  Synthetic
auagcagaaagagacaaagggca

SEQ ID NO: 208001 - RNA, 24 nt, Artificial Sequence
  Synthetic
uauagcagaaagagacaaagggca

SEQ ID NO: 208002 - RNA, 18 nt, Artificial Sequence
  Synthetic
uuauaaaagagaagggca

SEQ ID NO: 208003 - RNA, 19 nt, Artificial Sequence
  Synthetic
uuuauaaaagagaagggca

SEQ ID NO: 208004 - RNA, 20 nt, Artificial Sequence
  Synthetic
auuuauaaaagagaagggca

SEQ ID NO: 208005 - RNA, 21 nt, Artificial Sequence
  Synthetic
gauuuauaaaagagaagggca

SEQ ID NO: 208006 - RNA, 22 nt, Artificial Sequence
  Synthetic
agauuuauaaaagagaagggca

SEQ ID NO: 208007 - RNA, 23 nt, Artificial Sequence
  Synthetic
gagauuuauaaaagagaagggca

SEQ ID NO: 208008 - RNA, 24 nt, Artificial Sequence
  Synthetic
agagauuuauaaaagagaagggca

SEQ ID NO: 208009 - RNA, 18 nt, Artificial Sequence
  Synthetic
cauucauggugaagggca

SEQ ID NO: 208010 - RNA, 19 nt, Artificial Sequence
  Synthetic
ccauucauggugaagggca

SEQ ID NO: 208011 - RNA, 20 nt, Artificial Sequence
  Synthetic
uccauucauggugaagggca

SEQ ID NO: 208012 - RNA, 21 nt, Artificial Sequence
  Synthetic
uuccauucauggugaagggca

SEQ ID NO: 208013 - RNA, 22 nt, Artificial Sequence
  Synthetic
cuuccauucauggugaagggca

SEQ ID NO: 208014 - RNA, 23 nt, Artificial Sequence
  Synthetic
ucuuccauucauggugaagggca

SEQ ID NO: 208015 - RNA, 24 nt, Artificial Sequence
  Synthetic
uucuuccauucauggugaagggca

SEQ ID NO: 208016 - RNA, 18 nt, Artificial Sequence
  Synthetic
caauacguauuaagggca

SEQ ID NO: 208017 - RNA, 19 nt, Artificial Sequence
  Synthetic
gcaauacguauuaagggca

SEQ ID NO: 208018 - RNA, 20 nt, Artificial Sequence
  Synthetic
agcaauacguauuaagggca

SEQ ID NO: 208019 - RNA, 21 nt, Artificial Sequence
  Synthetic
cagcaauacguauuaagggca

SEQ ID NO: 208020 - RNA, 22 nt, Artificial Sequence
  Synthetic
gcagcaauacguauuaagggca

SEQ ID NO: 208021 - RNA, 23 nt, Artificial Sequence
  Synthetic
ugcagcaauacguauuaagggca

SEQ ID NO: 208022 - RNA, 24 nt, Artificial Sequence
  Synthetic
gugcagcaauacguauuaagggca

SEQ ID NO: 208023 - RNA, 18 nt, Artificial Sequence
  Synthetic
cccuucaaguuaagggca

SEQ ID NO: 208024 - RNA, 19 nt, Artificial Sequence
  Synthetic
ucccuucaaguuaagggca

SEQ ID NO: 208025 - RNA, 20 nt, Artificial Sequence
  Synthetic
gucccuucaaguuaagggca

SEQ ID NO: 208026 - RNA, 21 nt, Artificial Sequence
  Synthetic
ugucccuucaaguuaagggca

SEQ ID NO: 208027 - RNA, 22 nt, Artificial Sequence
  Synthetic
gugucccuucaaguuaagggca

SEQ ID NO: 208028 - RNA, 23 nt, Artificial Sequence
  Synthetic
agugucccuucaaguuaagggca

SEQ ID NO: 208029 - RNA, 24 nt, Artificial Sequence
  Synthetic
uagugucccuucaaguuaagggca

SEQ ID NO: 208030 - RNA, 18 nt, Artificial Sequence
  Synthetic
gugucuaagaacagggca

SEQ ID NO: 208031 - RNA, 19 nt, Artificial Sequence
  Synthetic
cgugucuaagaacagggca

SEQ ID NO: 208032 - RNA, 20 nt, Artificial Sequence
  Synthetic
ccgugucuaagaacagggca

SEQ ID NO: 208033 - RNA, 21 nt, Artificial Sequence
  Synthetic
gccgugucuaagaacagggca

SEQ ID NO: 208034 - RNA, 22 nt, Artificial Sequence
  Synthetic
ggccgugucuaagaacagggca

SEQ ID NO: 208035 - RNA, 23 nt, Artificial Sequence
  Synthetic
gggccgugucuaagaacagggca

SEQ ID NO: 208036 - RNA, 24 nt, Artificial Sequence
  Synthetic
ugggccgugucuaagaacagggca

SEQ ID NO: 208037 - RNA, 18 nt, Artificial Sequence
  Synthetic
guuccagggggcagggca

SEQ ID NO: 208038 - RNA, 19 nt, Artificial Sequence
  Synthetic
uguuccagggggcagggca

SEQ ID NO: 208039 - RNA, 20 nt, Artificial Sequence
  Synthetic
cuguuccagggggcagggca

SEQ ID NO: 208040 - RNA, 21 nt, Artificial Sequence
  Synthetic
acuguuccagggggcagggca

SEQ ID NO: 208041 - RNA, 22 nt, Artificial Sequence
  Synthetic
cacuguuccagggggcagggca

SEQ ID NO: 208042 - RNA, 23 nt, Artificial Sequence
  Synthetic
gcacuguuccagggggcagggca

SEQ ID NO: 208043 - RNA, 24 nt, Artificial Sequence
  Synthetic
ggcacuguuccagggggcagggca

SEQ ID NO: 208044 - RNA, 18 nt, Artificial Sequence
  Synthetic
caucucaguaagagggca

SEQ ID NO: 208045 - RNA, 19 nt, Artificial Sequence
  Synthetic
gcaucucaguaagagggca

SEQ ID NO: 208046 - RNA, 20 nt, Artificial Sequence
  Synthetic
ggcaucucaguaagagggca

SEQ ID NO: 208047 - RNA, 21 nt, Artificial Sequence
  Synthetic
gggcaucucaguaagagggca

SEQ ID NO: 208048 - RNA, 22 nt, Artificial Sequence
  Synthetic
ugggcaucucaguaagagggca

SEQ ID NO: 208049 - RNA, 23 nt, Artificial Sequence
  Synthetic
gugggcaucucaguaagagggca

SEQ ID NO: 208050 - RNA, 24 nt, Artificial Sequence
  Synthetic
ugugggcaucucaguaagagggca

SEQ ID NO: 208051 - RNA, 18 nt, Artificial Sequence
  Synthetic
uaauuuuacaggagggca

SEQ ID NO: 208052 - RNA, 19 nt, Artificial Sequence
  Synthetic
uuaauuuuacaggagggca

SEQ ID NO: 208053 - RNA, 20 nt, Artificial Sequence
  Synthetic
uuuaauuuuacaggagggca

SEQ ID NO: 208054 - RNA, 21 nt, Artificial Sequence
  Synthetic
uuuuaauuuuacaggagggca

SEQ ID NO: 208055 - RNA, 22 nt, Artificial Sequence
  Synthetic
cuuuuaauuuuacaggagggca

SEQ ID NO: 208056 - RNA, 23 nt, Artificial Sequence
  Synthetic
ccuuuuaauuuuacaggagggca

SEQ ID NO: 208057 - RNA, 24 nt, Artificial Sequence
  Synthetic
uccuuuuaauuuuacaggagggca

SEQ ID NO: 208058 - RNA, 18 nt, Artificial Sequence
  Synthetic
aaaagcuucaugagggca

SEQ ID NO: 208059 - RNA, 19 nt, Artificial Sequence
  Synthetic
uaaaagcuucaugagggca

SEQ ID NO: 208060 - RNA, 20 nt, Artificial Sequence
  Synthetic
uuaaaagcuucaugagggca

SEQ ID NO: 208061 - RNA, 21 nt, Artificial Sequence
  Synthetic
auuaaaagcuucaugagggca

SEQ ID NO: 208062 - RNA, 22 nt, Artificial Sequence
  Synthetic
gauuaaaagcuucaugagggca

SEQ ID NO: 208063 - RNA, 23 nt, Artificial Sequence
  Synthetic
agauuaaaagcuucaugagggca

SEQ ID NO: 208064 - RNA, 24 nt, Artificial Sequence
  Synthetic
aagauuaaaagcuucaugagggca

SEQ ID NO: 208065 - RNA, 18 nt, Artificial Sequence
  Synthetic
uugccuggaaauagggca

SEQ ID NO: 208066 - RNA, 19 nt, Artificial Sequence
  Synthetic
guugccuggaaauagggca

SEQ ID NO: 208067 - RNA, 20 nt, Artificial Sequence
  Synthetic
uguugccuggaaauagggca

SEQ ID NO: 208068 - RNA, 21 nt, Artificial Sequence
  Synthetic
cuguugccuggaaauagggca

SEQ ID NO: 208069 - RNA, 22 nt, Artificial Sequence
  Synthetic
ucuguugccuggaaauagggca

SEQ ID NO: 208070 - RNA, 23 nt, Artificial Sequence
  Synthetic
cucuguugccuggaaauagggca

SEQ ID NO: 208071 - RNA, 24 nt, Artificial Sequence
  Synthetic
acucuguugccuggaaauagggca

SEQ ID NO: 208072 - RNA, 18 nt, Artificial Sequence
  Synthetic
acagaaaaccauagggca

SEQ ID NO: 208073 - RNA, 19 nt, Artificial Sequence
  Synthetic
aacagaaaaccauagggca

SEQ ID NO: 208074 - RNA, 20 nt, Artificial Sequence
  Synthetic
aaacagaaaaccauagggca

SEQ ID NO: 208075 - RNA, 21 nt, Artificial Sequence
  Synthetic
caaacagaaaaccauagggca

SEQ ID NO: 208076 - RNA, 22 nt, Artificial Sequence
  Synthetic
ccaaacagaaaaccauagggca

SEQ ID NO: 208077 - RNA, 23 nt, Artificial Sequence
  Synthetic
cccaaacagaaaaccauagggca

SEQ ID NO: 208078 - RNA, 24 nt, Artificial Sequence
  Synthetic
acccaaacagaaaaccauagggca

SEQ ID NO: 208079 - RNA, 18 nt, Artificial Sequence
  Synthetic
cccagaguuccuagggca

SEQ ID NO: 208080 - RNA, 19 nt, Artificial Sequence
  Synthetic
ucccagaguuccuagggca

SEQ ID NO: 208081 - RNA, 20 nt, Artificial Sequence
  Synthetic
gucccagaguuccuagggca

SEQ ID NO: 208082 - RNA, 21 nt, Artificial Sequence
  Synthetic
ggucccagaguuccuagggca

SEQ ID NO: 208083 - RNA, 22 nt, Artificial Sequence
  Synthetic
aggucccagaguuccuagggca

SEQ ID NO: 208084 - RNA, 23 nt, Artificial Sequence
  Synthetic
aaggucccagaguuccuagggca

SEQ ID NO: 208085 - RNA, 24 nt, Artificial Sequence
  Synthetic
caaggucccagaguuccuagggca

SEQ ID NO: 208086 - RNA, 18 nt, Artificial Sequence
  Synthetic
uuauauuuuuuuagggca

SEQ ID NO: 208087 - RNA, 19 nt, Artificial Sequence
  Synthetic
guuauauuuuuuuagggca

SEQ ID NO: 208088 - RNA, 20 nt, Artificial Sequence
  Synthetic
aguuauauuuuuuuagggca

SEQ ID NO: 208089 - RNA, 21 nt, Artificial Sequence
  Synthetic
aaguuauauuuuuuuagggca

SEQ ID NO: 208090 - RNA, 22 nt, Artificial Sequence
  Synthetic
aaaguuauauuuuuuuagggca

SEQ ID NO: 208091 - RNA, 23 nt, Artificial Sequence
  Synthetic
aaaaguuauauuuuuuuagggca

SEQ ID NO: 208092 - RNA, 24 nt, Artificial Sequence
  Synthetic
uaaaaguuauauuuuuuuagggca

SEQ ID NO: 208093 - RNA, 18 nt, Artificial Sequence
  Synthetic
uauucuuucaaaggggca

SEQ ID NO: 208094 - RNA, 19 nt, Artificial Sequence
  Synthetic
uuauucuuucaaaggggca

SEQ ID NO: 208095 - RNA, 20 nt, Artificial Sequence
  Synthetic
guuauucuuucaaaggggca

SEQ ID NO: 208096 - RNA, 21 nt, Artificial Sequence
  Synthetic
aguuauucuuucaaaggggca

SEQ ID NO: 208097 - RNA, 22 nt, Artificial Sequence
  Synthetic
uaguuauucuuucaaaggggca

SEQ ID NO: 208098 - RNA, 23 nt, Artificial Sequence
  Synthetic
uuaguuauucuuucaaaggggca

SEQ ID NO: 208099 - RNA, 24 nt, Artificial Sequence
  Synthetic
guuaguuauucuuucaaaggggca

SEQ ID NO: 208100 - RNA, 18 nt, Artificial Sequence
  Synthetic
uacaaucagaaaggggca

SEQ ID NO: 208101 - RNA, 19 nt, Artificial Sequence
  Synthetic
uuacaaucagaaaggggca

SEQ ID NO: 208102 - RNA, 20 nt, Artificial Sequence
  Synthetic
cuuacaaucagaaaggggca

SEQ ID NO: 208103 - RNA, 21 nt, Artificial Sequence
  Synthetic
acuuacaaucagaaaggggca

SEQ ID NO: 208104 - RNA, 22 nt, Artificial Sequence
  Synthetic
uacuuacaaucagaaaggggca

SEQ ID NO: 208105 - RNA, 23 nt, Artificial Sequence
  Synthetic
guacuuacaaucagaaaggggca

SEQ ID NO: 208106 - RNA, 24 nt, Artificial Sequence
  Synthetic
uguacuuacaaucagaaaggggca

SEQ ID NO: 208107 - RNA, 18 nt, Artificial Sequence
  Synthetic
gagggacggaaaggggca

SEQ ID NO: 208108 - RNA, 19 nt, Artificial Sequence
  Synthetic
ggagggacggaaaggggca

SEQ ID NO: 208109 - RNA, 20 nt, Artificial Sequence
  Synthetic
uggagggacggaaaggggca

SEQ ID NO: 208110 - RNA, 21 nt, Artificial Sequence
  Synthetic
guggagggacggaaaggggca

SEQ ID NO: 208111 - RNA, 22 nt, Artificial Sequence
  Synthetic
gguggagggacggaaaggggca

SEQ ID NO: 208112 - RNA, 23 nt, Artificial Sequence
  Synthetic
ggguggagggacggaaaggggca

SEQ ID NO: 208113 - RNA, 24 nt, Artificial Sequence
  Synthetic
gggguggagggacggaaaggggca

SEQ ID NO: 208114 - RNA, 18 nt, Artificial Sequence
  Synthetic
ugaauuggauaaggggca

SEQ ID NO: 208115 - RNA, 19 nt, Artificial Sequence
  Synthetic
augaauuggauaaggggca

SEQ ID NO: 208116 - RNA, 20 nt, Artificial Sequence
  Synthetic
gaugaauuggauaaggggca

SEQ ID NO: 208117 - RNA, 21 nt, Artificial Sequence
  Synthetic
ggaugaauuggauaaggggca

SEQ ID NO: 208118 - RNA, 22 nt, Artificial Sequence
  Synthetic
uggaugaauuggauaaggggca

SEQ ID NO: 208119 - RNA, 23 nt, Artificial Sequence
  Synthetic
cuggaugaauuggauaaggggca

SEQ ID NO: 208120 - RNA, 24 nt, Artificial Sequence
  Synthetic
ucuggaugaauuggauaaggggca

SEQ ID NO: 208121 - RNA, 18 nt, Artificial Sequence
  Synthetic
ugaguuuagguaggggca

SEQ ID NO: 208122 - RNA, 19 nt, Artificial Sequence
  Synthetic
augaguuuagguaggggca

SEQ ID NO: 208123 - RNA, 20 nt, Artificial Sequence
  Synthetic
aaugaguuuagguaggggca

SEQ ID NO: 208124 - RNA, 21 nt, Artificial Sequence
  Synthetic
aaaugaguuuagguaggggca

SEQ ID NO: 208125 - RNA, 22 nt, Artificial Sequence
  Synthetic
aaaaugaguuuagguaggggca

SEQ ID NO: 208126 - RNA, 23 nt, Artificial Sequence
  Synthetic
caaaaugaguuuagguaggggca

SEQ ID NO: 208127 - RNA, 24 nt, Artificial Sequence
  Synthetic
ucaaaaugaguuuagguaggggca

SEQ ID NO: 208128 - RNA, 18 nt, Artificial Sequence
  Synthetic
ggucaacguguaggggca

SEQ ID NO: 208129 - RNA, 19 nt, Artificial Sequence
  Synthetic
gggucaacguguaggggca

SEQ ID NO: 208130 - RNA, 20 nt, Artificial Sequence
  Synthetic
ggggucaacguguaggggca

SEQ ID NO: 208131 - RNA, 21 nt, Artificial Sequence
  Synthetic
uggggucaacguguaggggca

SEQ ID NO: 208132 - RNA, 22 nt, Artificial Sequence
  Synthetic
uuggggucaacguguaggggca

SEQ ID NO: 208133 - RNA, 23 nt, Artificial Sequence
  Synthetic
cuuggggucaacguguaggggca

SEQ ID NO: 208134 - RNA, 24 nt, Artificial Sequence
  Synthetic
ucuuggggucaacguguaggggca

SEQ ID NO: 208135 - RNA, 18 nt, Artificial Sequence
  Synthetic
uggggugggcagggggca

SEQ ID NO: 208136 - RNA, 19 nt, Artificial Sequence
  Synthetic
auggggugggcagggggca

SEQ ID NO: 208137 - RNA, 20 nt, Artificial Sequence
  Synthetic
gauggggugggcagggggca

SEQ ID NO: 208138 - RNA, 21 nt, Artificial Sequence
  Synthetic
agauggggugggcagggggca

SEQ ID NO: 208139 - RNA, 22 nt, Artificial Sequence
  Synthetic
cagauggggugggcagggggca

SEQ ID NO: 208140 - RNA, 23 nt, Artificial Sequence
  Synthetic
acagauggggugggcagggggca

SEQ ID NO: 208141 - RNA, 24 nt, Artificial Sequence
  Synthetic
cacagauggggugggcagggggca

SEQ ID NO: 208142 - RNA, 18 nt, Artificial Sequence
  Synthetic
cuauuccuuccgggggca

SEQ ID NO: 208143 - RNA, 19 nt, Artificial Sequence
  Synthetic
acuauuccuuccgggggca

SEQ ID NO: 208144 - RNA, 20 nt, Artificial Sequence
  Synthetic
cacuauuccuuccgggggca

SEQ ID NO: 208145 - RNA, 21 nt, Artificial Sequence
  Synthetic
ccacuauuccuuccgggggca

SEQ ID NO: 208146 - RNA, 22 nt, Artificial Sequence
  Synthetic
accacuauuccuuccgggggca

SEQ ID NO: 208147 - RNA, 23 nt, Artificial Sequence
  Synthetic
aaccacuauuccuuccgggggca

SEQ ID NO: 208148 - RNA, 24 nt, Artificial Sequence
  Synthetic
uaaccacuauuccuuccgggggca

SEQ ID NO: 208149 - RNA, 18 nt, Artificial Sequence
  Synthetic
gucgcgagguggggggca

SEQ ID NO: 208150 - RNA, 19 nt, Artificial Sequence
  Synthetic
ugucgcgagguggggggca

SEQ ID NO: 208151 - RNA, 20 nt, Artificial Sequence
  Synthetic
cugucgcgagguggggggca

SEQ ID NO: 208152 - RNA, 21 nt, Artificial Sequence
  Synthetic
ccugucgcgagguggggggca

SEQ ID NO: 208153 - RNA, 22 nt, Artificial Sequence
  Synthetic
gccugucgcgagguggggggca

SEQ ID NO: 208154 - RNA, 23 nt, Artificial Sequence
  Synthetic
ggccugucgcgagguggggggca

SEQ ID NO: 208155 - RNA, 24 nt, Artificial Sequence
  Synthetic
aggccugucgcgagguggggggca

SEQ ID NO: 208156 - RNA, 18 nt, Artificial Sequence
  Synthetic
uugggggauuggggggca

SEQ ID NO: 208157 - RNA, 19 nt, Artificial Sequence
  Synthetic
guugggggauuggggggca

SEQ ID NO: 208158 - RNA, 20 nt, Artificial Sequence
  Synthetic
aguugggggauuggggggca

SEQ ID NO: 208159 - RNA, 21 nt, Artificial Sequence
  Synthetic
caguugggggauuggggggca

SEQ ID NO: 208160 - RNA, 22 nt, Artificial Sequence
  Synthetic
ccaguugggggauuggggggca

SEQ ID NO: 208161 - RNA, 23 nt, Artificial Sequence
  Synthetic
accaguugggggauuggggggca

SEQ ID NO: 208162 - RNA, 24 nt, Artificial Sequence
  Synthetic
caccaguugggggauuggggggca

SEQ ID NO: 208163 - RNA, 18 nt, Artificial Sequence
  Synthetic
gguagcagauugggggca

SEQ ID NO: 208164 - RNA, 19 nt, Artificial Sequence
  Synthetic
ggguagcagauugggggca

SEQ ID NO: 208165 - RNA, 20 nt, Artificial Sequence
  Synthetic
gggguagcagauugggggca

SEQ ID NO: 208166 - RNA, 21 nt, Artificial Sequence
  Synthetic
agggguagcagauugggggca

SEQ ID NO: 208167 - RNA, 22 nt, Artificial Sequence
  Synthetic
uagggguagcagauugggggca

SEQ ID NO: 208168 - RNA, 23 nt, Artificial Sequence
  Synthetic
guagggguagcagauugggggca

SEQ ID NO: 208169 - RNA, 24 nt, Artificial Sequence
  Synthetic
gguagggguagcagauugggggca

SEQ ID NO: 208170 - RNA, 18 nt, Artificial Sequence
  Synthetic
cuuucuaucuguggggca

SEQ ID NO: 208171 - RNA, 19 nt, Artificial Sequence
  Synthetic
acuuucuaucuguggggca

SEQ ID NO: 208172 - RNA, 20 nt, Artificial Sequence
  Synthetic
cacuuucuaucuguggggca

SEQ ID NO: 208173 - RNA, 21 nt, Artificial Sequence
  Synthetic
ccacuuucuaucuguggggca

SEQ ID NO: 208174 - RNA, 22 nt, Artificial Sequence
  Synthetic
accacuuucuaucuguggggca

SEQ ID NO: 208175 - RNA, 23 nt, Artificial Sequence
  Synthetic
caccacuuucuaucuguggggca

SEQ ID NO: 208176 - RNA, 24 nt, Artificial Sequence
  Synthetic
ccaccacuuucuaucuguggggca

SEQ ID NO: 208177 - RNA, 18 nt, Artificial Sequence
  Synthetic
guaaaucagauuggggca

SEQ ID NO: 208178 - RNA, 19 nt, Artificial Sequence
  Synthetic
cguaaaucagauuggggca

SEQ ID NO: 208179 - RNA, 20 nt, Artificial Sequence
  Synthetic
ucguaaaucagauuggggca

SEQ ID NO: 208180 - RNA, 21 nt, Artificial Sequence
  Synthetic
aucguaaaucagauuggggca

SEQ ID NO: 208181 - RNA, 22 nt, Artificial Sequence
  Synthetic
aaucguaaaucagauuggggca

SEQ ID NO: 208182 - RNA, 23 nt, Artificial Sequence
  Synthetic
uaaucguaaaucagauuggggca

SEQ ID NO: 208183 - RNA, 24 nt, Artificial Sequence
  Synthetic
guaaucguaaaucagauuggggca

SEQ ID NO: 208184 - RNA, 18 nt, Artificial Sequence
  Synthetic
ggaaggucuucaugggca

SEQ ID NO: 208185 - RNA, 19 nt, Artificial Sequence
  Synthetic
uggaaggucuucaugggca

SEQ ID NO: 208186 - RNA, 20 nt, Artificial Sequence
  Synthetic
cuggaaggucuucaugggca

SEQ ID NO: 208187 - RNA, 21 nt, Artificial Sequence
  Synthetic
acuggaaggucuucaugggca

SEQ ID NO: 208188 - RNA, 22 nt, Artificial Sequence
  Synthetic
cacuggaaggucuucaugggca

SEQ ID NO: 208189 - RNA, 23 nt, Artificial Sequence
  Synthetic
ccacuggaaggucuucaugggca

SEQ ID NO: 208190 - RNA, 24 nt, Artificial Sequence
  Synthetic
cccacuggaaggucuucaugggca

SEQ ID NO: 208191 - RNA, 18 nt, Artificial Sequence
  Synthetic
uaacaugucauaugggca

SEQ ID NO: 208192 - RNA, 19 nt, Artificial Sequence
  Synthetic
auaacaugucauaugggca

SEQ ID NO: 208193 - RNA, 20 nt, Artificial Sequence
  Synthetic
uauaacaugucauaugggca

SEQ ID NO: 208194 - RNA, 21 nt, Artificial Sequence
  Synthetic
auauaacaugucauaugggca

SEQ ID NO: 208195 - RNA, 22 nt, Artificial Sequence
  Synthetic
uauauaacaugucauaugggca

SEQ ID NO: 208196 - RNA, 23 nt, Artificial Sequence
  Synthetic
uuauauaacaugucauaugggca

SEQ ID NO: 208197 - RNA, 24 nt, Artificial Sequence
  Synthetic
cuuauauaacaugucauaugggca

SEQ ID NO: 208198 - RNA, 18 nt, Artificial Sequence
  Synthetic
ccuuucccauacugggca

SEQ ID NO: 208199 - RNA, 19 nt, Artificial Sequence
  Synthetic
cccuuucccauacugggca

SEQ ID NO: 208200 - RNA, 20 nt, Artificial Sequence
  Synthetic
acccuuucccauacugggca

SEQ ID NO: 208201 - RNA, 21 nt, Artificial Sequence
  Synthetic
aacccuuucccauacugggca

SEQ ID NO: 208202 - RNA, 22 nt, Artificial Sequence
  Synthetic
uaacccuuucccauacugggca

SEQ ID NO: 208203 - RNA, 23 nt, Artificial Sequence
  Synthetic
auaacccuuucccauacugggca

SEQ ID NO: 208204 - RNA, 24 nt, Artificial Sequence
  Synthetic
cauaacccuuucccauacugggca

SEQ ID NO: 208205 - RNA, 18 nt, Artificial Sequence
  Synthetic
acucaguuuuacugggca

SEQ ID NO: 208206 - RNA, 19 nt, Artificial Sequence
  Synthetic
uacucaguuuuacugggca

SEQ ID NO: 208207 - RNA, 20 nt, Artificial Sequence
  Synthetic
uuacucaguuuuacugggca

SEQ ID NO: 208208 - RNA, 21 nt, Artificial Sequence
  Synthetic
guuacucaguuuuacugggca

SEQ ID NO: 208209 - RNA, 22 nt, Artificial Sequence
  Synthetic
aguuacucaguuuuacugggca

SEQ ID NO: 208210 - RNA, 23 nt, Artificial Sequence
  Synthetic
aaguuacucaguuuuacugggca

SEQ ID NO: 208211 - RNA, 24 nt, Artificial Sequence
  Synthetic
aaaguuacucaguuuuacugggca

SEQ ID NO: 208212 - RNA, 18 nt, Artificial Sequence
  Synthetic
uggauuccaaccugggca

SEQ ID NO: 208213 - RNA, 19 nt, Artificial Sequence
  Synthetic
cuggauuccaaccugggca

SEQ ID NO: 208214 - RNA, 20 nt, Artificial Sequence
  Synthetic
acuggauuccaaccugggca

SEQ ID NO: 208215 - RNA, 21 nt, Artificial Sequence
  Synthetic
cacuggauuccaaccugggca

SEQ ID NO: 208216 - RNA, 22 nt, Artificial Sequence
  Synthetic
ccacuggauuccaaccugggca

SEQ ID NO: 208217 - RNA, 23 nt, Artificial Sequence
  Synthetic
gccacuggauuccaaccugggca

SEQ ID NO: 208218 - RNA, 24 nt, Artificial Sequence
  Synthetic
cgccacuggauuccaaccugggca

SEQ ID NO: 208219 - RNA, 18 nt, Artificial Sequence
  Synthetic
uauguaugcugcugggca

SEQ ID NO: 208220 - RNA, 19 nt, Artificial Sequence
  Synthetic
uuauguaugcugcugggca

SEQ ID NO: 208221 - RNA, 20 nt, Artificial Sequence
  Synthetic
guuauguaugcugcugggca

SEQ ID NO: 208222 - RNA, 21 nt, Artificial Sequence
  Synthetic
uguuauguaugcugcugggca

SEQ ID NO: 208223 - RNA, 22 nt, Artificial Sequence
  Synthetic
uuguuauguaugcugcugggca

SEQ ID NO: 208224 - RNA, 23 nt, Artificial Sequence
  Synthetic
cuuguuauguaugcugcugggca

SEQ ID NO: 208225 - RNA, 24 nt, Artificial Sequence
  Synthetic
ucuuguuauguaugcugcugggca

SEQ ID NO: 208226 - RNA, 18 nt, Artificial Sequence
  Synthetic
uaggcacucuucugggca

SEQ ID NO: 208227 - RNA, 19 nt, Artificial Sequence
  Synthetic
cuaggcacucuucugggca

SEQ ID NO: 208228 - RNA, 20 nt, Artificial Sequence
  Synthetic
acuaggcacucuucugggca

SEQ ID NO: 208229 - RNA, 21 nt, Artificial Sequence
  Synthetic
uacuaggcacucuucugggca

SEQ ID NO: 208230 - RNA, 22 nt, Artificial Sequence
  Synthetic
guacuaggcacucuucugggca

SEQ ID NO: 208231 - RNA, 23 nt, Artificial Sequence
  Synthetic
uguacuaggcacucuucugggca

SEQ ID NO: 208232 - RNA, 24 nt, Artificial Sequence
  Synthetic
auguacuaggcacucuucugggca

SEQ ID NO: 208233 - RNA, 18 nt, Artificial Sequence
  Synthetic
ucacagauggggugggca

SEQ ID NO: 208234 - RNA, 19 nt, Artificial Sequence
  Synthetic
uucacagauggggugggca

SEQ ID NO: 208235 - RNA, 20 nt, Artificial Sequence
  Synthetic
uuucacagauggggugggca

SEQ ID NO: 208236 - RNA, 21 nt, Artificial Sequence
  Synthetic
auuucacagauggggugggca

SEQ ID NO: 208237 - RNA, 22 nt, Artificial Sequence
  Synthetic
aauuucacagauggggugggca

SEQ ID NO: 208238 - RNA, 23 nt, Artificial Sequence
  Synthetic
aaauuucacagauggggugggca

SEQ ID NO: 208239 - RNA, 24 nt, Artificial Sequence
  Synthetic
aaaauuucacagauggggugggca

SEQ ID NO: 208240 - RNA, 18 nt, Artificial Sequence
  Synthetic
aggaggcaguauugggca

SEQ ID NO: 208241 - RNA, 19 nt, Artificial Sequence
  Synthetic
aaggaggcaguauugggca

SEQ ID NO: 208242 - RNA, 20 nt, Artificial Sequence
  Synthetic
gaaggaggcaguauugggca

SEQ ID NO: 208243 - RNA, 21 nt, Artificial Sequence
  Synthetic
ugaaggaggcaguauugggca

SEQ ID NO: 208244 - RNA, 22 nt, Artificial Sequence
  Synthetic
gugaaggaggcaguauugggca

SEQ ID NO: 208245 - RNA, 23 nt, Artificial Sequence
  Synthetic
agugaaggaggcaguauugggca

SEQ ID NO: 208246 - RNA, 24 nt, Artificial Sequence
  Synthetic
aagugaaggaggcaguauugggca

SEQ ID NO: 208247 - RNA, 18 nt, Artificial Sequence
  Synthetic
uucucccauuauugggca

SEQ ID NO: 208248 - RNA, 19 nt, Artificial Sequence
  Synthetic
auucucccauuauugggca

SEQ ID NO: 208249 - RNA, 20 nt, Artificial Sequence
  Synthetic
uauucucccauuauugggca

SEQ ID NO: 208250 - RNA, 21 nt, Artificial Sequence
  Synthetic
uuauucucccauuauugggca

SEQ ID NO: 208251 - RNA, 22 nt, Artificial Sequence
  Synthetic
auuauucucccauuauugggca

SEQ ID NO: 208252 - RNA, 23 nt, Artificial Sequence
  Synthetic
aauuauucucccauuauugggca

SEQ ID NO: 208253 - RNA, 24 nt, Artificial Sequence
  Synthetic
uaauuauucucccauuauugggca

SEQ ID NO: 208254 - RNA, 18 nt, Artificial Sequence
  Synthetic
ucuauuauauguugggca

SEQ ID NO: 208255 - RNA, 19 nt, Artificial Sequence
  Synthetic
gucuauuauauguugggca

SEQ ID NO: 208256 - RNA, 20 nt, Artificial Sequence
  Synthetic
ugucuauuauauguugggca

SEQ ID NO: 208257 - RNA, 21 nt, Artificial Sequence
  Synthetic
augucuauuauauguugggca

SEQ ID NO: 208258 - RNA, 22 nt, Artificial Sequence
  Synthetic
gaugucuauuauauguugggca

SEQ ID NO: 208259 - RNA, 23 nt, Artificial Sequence
  Synthetic
ggaugucuauuauauguugggca

SEQ ID NO: 208260 - RNA, 24 nt, Artificial Sequence
  Synthetic
uggaugucuauuauauguugggca

SEQ ID NO: 208261 - RNA, 18 nt, Artificial Sequence
  Synthetic
caagggccucuuugggca

SEQ ID NO: 208262 - RNA, 19 nt, Artificial Sequence
  Synthetic
gcaagggccucuuugggca

SEQ ID NO: 208263 - RNA, 20 nt, Artificial Sequence
  Synthetic
ugcaagggccucuuugggca

SEQ ID NO: 208264 - RNA, 21 nt, Artificial Sequence
  Synthetic
cugcaagggccucuuugggca

SEQ ID NO: 208265 - RNA, 22 nt, Artificial Sequence
  Synthetic
ccugcaagggccucuuugggca

SEQ ID NO: 208266 - RNA, 23 nt, Artificial Sequence
  Synthetic
cccugcaagggccucuuugggca

SEQ ID NO: 208267 - RNA, 24 nt, Artificial Sequence
  Synthetic
ucccugcaagggccucuuugggca

SEQ ID NO: 208268 - RNA, 18 nt, Artificial Sequence
  Synthetic
uuauuuacaaaaauggca

SEQ ID NO: 208269 - RNA, 19 nt, Artificial Sequence
  Synthetic
uuuauuuacaaaaauggca

SEQ ID NO: 208270 - RNA, 20 nt, Artificial Sequence
  Synthetic
cuuuauuuacaaaaauggca

SEQ ID NO: 208271 - RNA, 21 nt, Artificial Sequence
  Synthetic
acuuuauuuacaaaaauggca

SEQ ID NO: 208272 - RNA, 22 nt, Artificial Sequence
  Synthetic
aacuuuauuuacaaaaauggca

SEQ ID NO: 208273 - RNA, 23 nt, Artificial Sequence
  Synthetic
aaacuuuauuuacaaaaauggca

SEQ ID NO: 208274 - RNA, 24 nt, Artificial Sequence
  Synthetic
aaaacuuuauuuacaaaaauggca

SEQ ID NO: 208275 - RNA, 18 nt, Artificial Sequence
  Synthetic
acacauguuuaaauggca

SEQ ID NO: 208276 - RNA, 19 nt, Artificial Sequence
  Synthetic
uacacauguuuaaauggca

SEQ ID NO: 208277 - RNA, 20 nt, Artificial Sequence
  Synthetic
uuacacauguuuaaauggca

SEQ ID NO: 208278 - RNA, 21 nt, Artificial Sequence
  Synthetic
cuuacacauguuuaaauggca

SEQ ID NO: 208279 - RNA, 22 nt, Artificial Sequence
  Synthetic
acuuacacauguuuaaauggca

SEQ ID NO: 208280 - RNA, 23 nt, Artificial Sequence
  Synthetic
gacuuacacauguuuaaauggca

SEQ ID NO: 208281 - RNA, 24 nt, Artificial Sequence
  Synthetic
ugacuuacacauguuuaaauggca

SEQ ID NO: 208282 - RNA, 18 nt, Artificial Sequence
  Synthetic
guagccaaacuaauggca

SEQ ID NO: 208283 - RNA, 19 nt, Artificial Sequence
  Synthetic
uguagccaaacuaauggca

SEQ ID NO: 208284 - RNA, 20 nt, Artificial Sequence
  Synthetic
auguagccaaacuaauggca

SEQ ID NO: 208285 - RNA, 21 nt, Artificial Sequence
  Synthetic
cauguagccaaacuaauggca

SEQ ID NO: 208286 - RNA, 22 nt, Artificial Sequence
  Synthetic
ucauguagccaaacuaauggca

SEQ ID NO: 208287 - RNA, 23 nt, Artificial Sequence
  Synthetic
gucauguagccaaacuaauggca

SEQ ID NO: 208288 - RNA, 24 nt, Artificial Sequence
  Synthetic
agucauguagccaaacuaauggca

SEQ ID NO: 208289 - RNA, 18 nt, Artificial Sequence
  Synthetic
auuaauagaaacauggca

SEQ ID NO: 208290 - RNA, 19 nt, Artificial Sequence
  Synthetic
cauuaauagaaacauggca

SEQ ID NO: 208291 - RNA, 20 nt, Artificial Sequence
  Synthetic
ucauuaauagaaacauggca

SEQ ID NO: 208292 - RNA, 21 nt, Artificial Sequence
  Synthetic
cucauuaauagaaacauggca

SEQ ID NO: 208293 - RNA, 22 nt, Artificial Sequence
  Synthetic
ucucauuaauagaaacauggca

SEQ ID NO: 208294 - RNA, 23 nt, Artificial Sequence
  Synthetic
uucucauuaauagaaacauggca

SEQ ID NO: 208295 - RNA, 24 nt, Artificial Sequence
  Synthetic
cuucucauuaauagaaacauggca

SEQ ID NO: 208296 - RNA, 18 nt, Artificial Sequence
  Synthetic
auuguggauuccauggca

SEQ ID NO: 208297 - RNA, 19 nt, Artificial Sequence
  Synthetic
cauuguggauuccauggca

SEQ ID NO: 208298 - RNA, 20 nt, Artificial Sequence
  Synthetic
ccauuguggauuccauggca

SEQ ID NO: 208299 - RNA, 21 nt, Artificial Sequence
  Synthetic
uccauuguggauuccauggca

SEQ ID NO: 208300 - RNA, 22 nt, Artificial Sequence
  Synthetic
uuccauuguggauuccauggca

SEQ ID NO: 208301 - RNA, 23 nt, Artificial Sequence
  Synthetic
uuuccauuguggauuccauggca

SEQ ID NO: 208302 - RNA, 24 nt, Artificial Sequence
  Synthetic
auuuccauuguggauuccauggca

SEQ ID NO: 208303 - RNA, 18 nt, Artificial Sequence
  Synthetic
ggaggauuuuccauggca

SEQ ID NO: 208304 - RNA, 19 nt, Artificial Sequence
  Synthetic
uggaggauuuuccauggca

SEQ ID NO: 208305 - RNA, 20 nt, Artificial Sequence
  Synthetic
cuggaggauuuuccauggca

SEQ ID NO: 208306 - RNA, 21 nt, Artificial Sequence
  Synthetic
ccuggaggauuuuccauggca

SEQ ID NO: 208307 - RNA, 22 nt, Artificial Sequence
  Synthetic
uccuggaggauuuuccauggca

SEQ ID NO: 208308 - RNA, 23 nt, Artificial Sequence
  Synthetic
auccuggaggauuuuccauggca

SEQ ID NO: 208309 - RNA, 24 nt, Artificial Sequence
  Synthetic
uauccuggaggauuuuccauggca

SEQ ID NO: 208310 - RNA, 18 nt, Artificial Sequence
  Synthetic
auuucuuggagcauggca

SEQ ID NO: 208311 - RNA, 19 nt, Artificial Sequence
  Synthetic
gauuucuuggagcauggca

SEQ ID NO: 208312 - RNA, 20 nt, Artificial Sequence
  Synthetic
ggauuucuuggagcauggca

SEQ ID NO: 208313 - RNA, 21 nt, Artificial Sequence
  Synthetic
uggauuucuuggagcauggca

SEQ ID NO: 208314 - RNA, 22 nt, Artificial Sequence
  Synthetic
auggauuucuuggagcauggca

SEQ ID NO: 208315 - RNA, 23 nt, Artificial Sequence
  Synthetic
gauggauuucuuggagcauggca

SEQ ID NO: 208316 - RNA, 24 nt, Artificial Sequence
  Synthetic
cgauggauuucuuggagcauggca

SEQ ID NO: 208317 - RNA, 18 nt, Artificial Sequence
  Synthetic
accuauauuuucauggca

SEQ ID NO: 208318 - RNA, 19 nt, Artificial Sequence
  Synthetic
aaccuauauuuucauggca

SEQ ID NO: 208319 - RNA, 20 nt, Artificial Sequence
  Synthetic
uaaccuauauuuucauggca

SEQ ID NO: 208320 - RNA, 21 nt, Artificial Sequence
  Synthetic
auaaccuauauuuucauggca

SEQ ID NO: 208321 - RNA, 22 nt, Artificial Sequence
  Synthetic
uauaaccuauauuuucauggca

SEQ ID NO: 208322 - RNA, 23 nt, Artificial Sequence
  Synthetic
cuauaaccuauauuuucauggca

SEQ ID NO: 208323 - RNA, 24 nt, Artificial Sequence
  Synthetic
acuauaaccuauauuuucauggca

SEQ ID NO: 208324 - RNA, 18 nt, Artificial Sequence
  Synthetic
ccaagccuugagauggca

SEQ ID NO: 208325 - RNA, 19 nt, Artificial Sequence
  Synthetic
accaagccuugagauggca

SEQ ID NO: 208326 - RNA, 20 nt, Artificial Sequence
  Synthetic
gaccaagccuugagauggca

SEQ ID NO: 208327 - RNA, 21 nt, Artificial Sequence
  Synthetic
agaccaagccuugagauggca

SEQ ID NO: 208328 - RNA, 22 nt, Artificial Sequence
  Synthetic
uagaccaagccuugagauggca

SEQ ID NO: 208329 - RNA, 23 nt, Artificial Sequence
  Synthetic
auagaccaagccuugagauggca

SEQ ID NO: 208330 - RNA, 24 nt, Artificial Sequence
  Synthetic
cauagaccaagccuugagauggca

SEQ ID NO: 208331 - RNA, 18 nt, Artificial Sequence
  Synthetic
aggaacuccaggauggca

SEQ ID NO: 208332 - RNA, 19 nt, Artificial Sequence
  Synthetic
caggaacuccaggauggca

SEQ ID NO: 208333 - RNA, 20 nt, Artificial Sequence
  Synthetic
acaggaacuccaggauggca

SEQ ID NO: 208334 - RNA, 21 nt, Artificial Sequence
  Synthetic
uacaggaacuccaggauggca

SEQ ID NO: 208335 - RNA, 22 nt, Artificial Sequence
  Synthetic
uuacaggaacuccaggauggca

SEQ ID NO: 208336 - RNA, 23 nt, Artificial Sequence
  Synthetic
cuuacaggaacuccaggauggca

SEQ ID NO: 208337 - RNA, 24 nt, Artificial Sequence
  Synthetic
ucuuacaggaacuccaggauggca

SEQ ID NO: 208338 - RNA, 18 nt, Artificial Sequence
  Synthetic
ucuguuuuuaggauggca

SEQ ID NO: 208339 - RNA, 19 nt, Artificial Sequence
  Synthetic
uucuguuuuuaggauggca

SEQ ID NO: 208340 - RNA, 20 nt, Artificial Sequence
  Synthetic
cuucuguuuuuaggauggca

SEQ ID NO: 208341 - RNA, 21 nt, Artificial Sequence
  Synthetic
ccuucuguuuuuaggauggca

SEQ ID NO: 208342 - RNA, 22 nt, Artificial Sequence
  Synthetic
uccuucuguuuuuaggauggca

SEQ ID NO: 208343 - RNA, 23 nt, Artificial Sequence
  Synthetic
cuccuucuguuuuuaggauggca

SEQ ID NO: 208344 - RNA, 24 nt, Artificial Sequence
  Synthetic
ccuccuucuguuuuuaggauggca

SEQ ID NO: 208345 - RNA, 18 nt, Artificial Sequence
  Synthetic
gaggggggagggauggca

SEQ ID NO: 208346 - RNA, 19 nt, Artificial Sequence
  Synthetic
ggaggggggagggauggca

SEQ ID NO: 208347 - RNA, 20 nt, Artificial Sequence
  Synthetic
gggaggggggagggauggca

SEQ ID NO: 208348 - RNA, 21 nt, Artificial Sequence
  Synthetic
ggggaggggggagggauggca

SEQ ID NO: 208349 - RNA, 22 nt, Artificial Sequence
  Synthetic
gggggaggggggagggauggca

SEQ ID NO: 208350 - RNA, 23 nt, Artificial Sequence
  Synthetic
ggggggaggggggagggauggca

SEQ ID NO: 208351 - RNA, 24 nt, Artificial Sequence
  Synthetic
uggggggaggggggagggauggca

SEQ ID NO: 208352 - RNA, 18 nt, Artificial Sequence
  Synthetic
gcucauggacauauggca

SEQ ID NO: 208353 - RNA, 19 nt, Artificial Sequence
  Synthetic
agcucauggacauauggca

SEQ ID NO: 208354 - RNA, 20 nt, Artificial Sequence
  Synthetic
uagcucauggacauauggca

SEQ ID NO: 208355 - RNA, 21 nt, Artificial Sequence
  Synthetic
guagcucauggacauauggca

SEQ ID NO: 208356 - RNA, 22 nt, Artificial Sequence
  Synthetic
uguagcucauggacauauggca

SEQ ID NO: 208357 - RNA, 23 nt, Artificial Sequence
  Synthetic
guguagcucauggacauauggca

SEQ ID NO: 208358 - RNA, 24 nt, Artificial Sequence
  Synthetic
gguguagcucauggacauauggca

SEQ ID NO: 208359 - RNA, 18 nt, Artificial Sequence
  Synthetic
gaugcuacacuacuggca

SEQ ID NO: 208360 - RNA, 19 nt, Artificial Sequence
  Synthetic
agaugcuacacuacuggca

SEQ ID NO: 208361 - RNA, 20 nt, Artificial Sequence
  Synthetic
aagaugcuacacuacuggca

SEQ ID NO: 208362 - RNA, 21 nt, Artificial Sequence
  Synthetic
gaagaugcuacacuacuggca

SEQ ID NO: 208363 - RNA, 22 nt, Artificial Sequence
  Synthetic
ggaagaugcuacacuacuggca

SEQ ID NO: 208364 - RNA, 23 nt, Artificial Sequence
  Synthetic
uggaagaugcuacacuacuggca

SEQ ID NO: 208365 - RNA, 24 nt, Artificial Sequence
  Synthetic
uuggaagaugcuacacuacuggca

SEQ ID NO: 208366 - RNA, 18 nt, Artificial Sequence
  Synthetic
uuccuugcuugccuggca

SEQ ID NO: 208367 - RNA, 19 nt, Artificial Sequence
  Synthetic
auuccuugcuugccuggca

SEQ ID NO: 208368 - RNA, 20 nt, Artificial Sequence
  Synthetic
aauuccuugcuugccuggca

SEQ ID NO: 208369 - RNA, 21 nt, Artificial Sequence
  Synthetic
gaauuccuugcuugccuggca

SEQ ID NO: 208370 - RNA, 22 nt, Artificial Sequence
  Synthetic
ugaauuccuugcuugccuggca

SEQ ID NO: 208371 - RNA, 23 nt, Artificial Sequence
  Synthetic
cugaauuccuugcuugccuggca

SEQ ID NO: 208372 - RNA, 24 nt, Artificial Sequence
  Synthetic
gcugaauuccuugcuugccuggca

SEQ ID NO: 208373 - RNA, 18 nt, Artificial Sequence
  Synthetic
ggcaaugaaaugcuggca

SEQ ID NO: 208374 - RNA, 19 nt, Artificial Sequence
  Synthetic
aggcaaugaaaugcuggca

SEQ ID NO: 208375 - RNA, 20 nt, Artificial Sequence
  Synthetic
caggcaaugaaaugcuggca

SEQ ID NO: 208376 - RNA, 21 nt, Artificial Sequence
  Synthetic
ucaggcaaugaaaugcuggca

SEQ ID NO: 208377 - RNA, 22 nt, Artificial Sequence
  Synthetic
uucaggcaaugaaaugcuggca

SEQ ID NO: 208378 - RNA, 23 nt, Artificial Sequence
  Synthetic
cuucaggcaaugaaaugcuggca

SEQ ID NO: 208379 - RNA, 24 nt, Artificial Sequence
  Synthetic
ccuucaggcaaugaaaugcuggca

SEQ ID NO: 208380 - RNA, 18 nt, Artificial Sequence
  Synthetic
aagaagcagggucuggca

SEQ ID NO: 208381 - RNA, 19 nt, Artificial Sequence
  Synthetic
gaagaagcagggucuggca

SEQ ID NO: 208382 - RNA, 20 nt, Artificial Sequence
  Synthetic
ugaagaagcagggucuggca

SEQ ID NO: 208383 - RNA, 21 nt, Artificial Sequence
  Synthetic
gugaagaagcagggucuggca

SEQ ID NO: 208384 - RNA, 22 nt, Artificial Sequence
  Synthetic
ugugaagaagcagggucuggca

SEQ ID NO: 208385 - RNA, 23 nt, Artificial Sequence
  Synthetic
gugugaagaagcagggucuggca

SEQ ID NO: 208386 - RNA, 24 nt, Artificial Sequence
  Synthetic
ugugugaagaagcagggucuggca

SEQ ID NO: 208387 - RNA, 18 nt, Artificial Sequence
  Synthetic
agccacuggauucuggca

SEQ ID NO: 208388 - RNA, 19 nt, Artificial Sequence
  Synthetic
gagccacuggauucuggca

SEQ ID NO: 208389 - RNA, 20 nt, Artificial Sequence
  Synthetic
agagccacuggauucuggca

SEQ ID NO: 208390 - RNA, 21 nt, Artificial Sequence
  Synthetic
uagagccacuggauucuggca

SEQ ID NO: 208391 - RNA, 22 nt, Artificial Sequence
  Synthetic
guagagccacuggauucuggca

SEQ ID NO: 208392 - RNA, 23 nt, Artificial Sequence
  Synthetic
aguagagccacuggauucuggca

SEQ ID NO: 208393 - RNA, 24 nt, Artificial Sequence
  Synthetic
uaguagagccacuggauucuggca

SEQ ID NO: 208394 - RNA, 18 nt, Artificial Sequence
  Synthetic
auuauuuucuaaguggca

SEQ ID NO: 208395 - RNA, 19 nt, Artificial Sequence
  Synthetic
uauuauuuucuaaguggca

SEQ ID NO: 208396 - RNA, 20 nt, Artificial Sequence
  Synthetic
auauuauuuucuaaguggca

SEQ ID NO: 208397 - RNA, 21 nt, Artificial Sequence
  Synthetic
aauauuauuuucuaaguggca

SEQ ID NO: 208398 - RNA, 22 nt, Artificial Sequence
  Synthetic
caauauuauuuucuaaguggca

SEQ ID NO: 208399 - RNA, 23 nt, Artificial Sequence
  Synthetic
ccaauauuauuuucuaaguggca

SEQ ID NO: 208400 - RNA, 24 nt, Artificial Sequence
  Synthetic
cccaauauuauuuucuaaguggca

SEQ ID NO: 208401 - RNA, 18 nt, Artificial Sequence
  Synthetic
acgaaggaaacaguggca

SEQ ID NO: 208402 - RNA, 19 nt, Artificial Sequence
  Synthetic
uacgaaggaaacaguggca

SEQ ID NO: 208403 - RNA, 20 nt, Artificial Sequence
  Synthetic
auacgaaggaaacaguggca

SEQ ID NO: 208404 - RNA, 21 nt, Artificial Sequence
  Synthetic
uauacgaaggaaacaguggca

SEQ ID NO: 208405 - RNA, 22 nt, Artificial Sequence
  Synthetic
guauacgaaggaaacaguggca

SEQ ID NO: 208406 - RNA, 23 nt, Artificial Sequence
  Synthetic
aguauacgaaggaaacaguggca

SEQ ID NO: 208407 - RNA, 24 nt, Artificial Sequence
  Synthetic
caguauacgaaggaaacaguggca

SEQ ID NO: 208408 - RNA, 18 nt, Artificial Sequence
  Synthetic
ugcucucauacaguggca

SEQ ID NO: 208409 - RNA, 19 nt, Artificial Sequence
  Synthetic
cugcucucauacaguggca

SEQ ID NO: 208410 - RNA, 20 nt, Artificial Sequence
  Synthetic
ccugcucucauacaguggca

SEQ ID NO: 208411 - RNA, 21 nt, Artificial Sequence
  Synthetic
gccugcucucauacaguggca

SEQ ID NO: 208412 - RNA, 22 nt, Artificial Sequence
  Synthetic
cgccugcucucauacaguggca

SEQ ID NO: 208413 - RNA, 23 nt, Artificial Sequence
  Synthetic
acgccugcucucauacaguggca

SEQ ID NO: 208414 - RNA, 24 nt, Artificial Sequence
  Synthetic
aacgccugcucucauacaguggca

SEQ ID NO: 208415 - RNA, 18 nt, Artificial Sequence
  Synthetic
uaccauggggcaguggca

SEQ ID NO: 208416 - RNA, 19 nt, Artificial Sequence
  Synthetic
auaccauggggcaguggca

SEQ ID NO: 208417 - RNA, 20 nt, Artificial Sequence
  Synthetic
cauaccauggggcaguggca

SEQ ID NO: 208418 - RNA, 21 nt, Artificial Sequence
  Synthetic
gcauaccauggggcaguggca

SEQ ID NO: 208419 - RNA, 22 nt, Artificial Sequence
  Synthetic
ugcauaccauggggcaguggca

SEQ ID NO: 208420 - RNA, 23 nt, Artificial Sequence
  Synthetic
augcauaccauggggcaguggca

SEQ ID NO: 208421 - RNA, 24 nt, Artificial Sequence
  Synthetic
aaugcauaccauggggcaguggca

SEQ ID NO: 208422 - RNA, 18 nt, Artificial Sequence
  Synthetic
cugaauuugauaguggca

SEQ ID NO: 208423 - RNA, 19 nt, Artificial Sequence
  Synthetic
acugaauuugauaguggca

SEQ ID NO: 208424 - RNA, 20 nt, Artificial Sequence
  Synthetic
aacugaauuugauaguggca

SEQ ID NO: 208425 - RNA, 21 nt, Artificial Sequence
  Synthetic
aaacugaauuugauaguggca

SEQ ID NO: 208426 - RNA, 22 nt, Artificial Sequence
  Synthetic
aaaacugaauuugauaguggca

SEQ ID NO: 208427 - RNA, 23 nt, Artificial Sequence
  Synthetic
gaaaacugaauuugauaguggca

SEQ ID NO: 208428 - RNA, 24 nt, Artificial Sequence
  Synthetic
ugaaaacugaauuugauaguggca

SEQ ID NO: 208429 - RNA, 18 nt, Artificial Sequence
  Synthetic
gagcccccaguaguggca

SEQ ID NO: 208430 - RNA, 19 nt, Artificial Sequence
  Synthetic
agagcccccaguaguggca

SEQ ID NO: 208431 - RNA, 20 nt, Artificial Sequence
  Synthetic
cagagcccccaguaguggca

SEQ ID NO: 208432 - RNA, 21 nt, Artificial Sequence
  Synthetic
ccagagcccccaguaguggca

SEQ ID NO: 208433 - RNA, 22 nt, Artificial Sequence
  Synthetic
uccagagcccccaguaguggca

SEQ ID NO: 208434 - RNA, 23 nt, Artificial Sequence
  Synthetic
uuccagagcccccaguaguggca

SEQ ID NO: 208435 - RNA, 24 nt, Artificial Sequence
  Synthetic
uuuccagagcccccaguaguggca

SEQ ID NO: 208436 - RNA, 18 nt, Artificial Sequence
  Synthetic
caagaggcagagguggca

SEQ ID NO: 208437 - RNA, 19 nt, Artificial Sequence
  Synthetic
ccaagaggcagagguggca

SEQ ID NO: 208438 - RNA, 20 nt, Artificial Sequence
  Synthetic
cccaagaggcagagguggca

SEQ ID NO: 208439 - RNA, 21 nt, Artificial Sequence
  Synthetic
acccaagaggcagagguggca

SEQ ID NO: 208440 - RNA, 22 nt, Artificial Sequence
  Synthetic
aacccaagaggcagagguggca

SEQ ID NO: 208441 - RNA, 23 nt, Artificial Sequence
  Synthetic
gaacccaagaggcagagguggca

SEQ ID NO: 208442 - RNA, 24 nt, Artificial Sequence
  Synthetic
ugaacccaagaggcagagguggca

SEQ ID NO: 208443 - RNA, 18 nt, Artificial Sequence
  Synthetic
aagaaggcaacuguggca

SEQ ID NO: 208444 - RNA, 19 nt, Artificial Sequence
  Synthetic
aaagaaggcaacuguggca

SEQ ID NO: 208445 - RNA, 20 nt, Artificial Sequence
  Synthetic
aaaagaaggcaacuguggca

SEQ ID NO: 208446 - RNA, 21 nt, Artificial Sequence
  Synthetic
gaaaagaaggcaacuguggca

SEQ ID NO: 208447 - RNA, 22 nt, Artificial Sequence
  Synthetic
ggaaaagaaggcaacuguggca

SEQ ID NO: 208448 - RNA, 23 nt, Artificial Sequence
  Synthetic
aggaaaagaaggcaacuguggca

SEQ ID NO: 208449 - RNA, 24 nt, Artificial Sequence
  Synthetic
aaggaaaagaaggcaacuguggca

SEQ ID NO: 208450 - RNA, 18 nt, Artificial Sequence
  Synthetic
gauucugcaguuguggca

SEQ ID NO: 208451 - RNA, 19 nt, Artificial Sequence
  Synthetic
ugauucugcaguuguggca

SEQ ID NO: 208452 - RNA, 20 nt, Artificial Sequence
  Synthetic
uugauucugcaguuguggca

SEQ ID NO: 208453 - RNA, 21 nt, Artificial Sequence
  Synthetic
cuugauucugcaguuguggca

SEQ ID NO: 208454 - RNA, 22 nt, Artificial Sequence
  Synthetic
acuugauucugcaguuguggca

SEQ ID NO: 208455 - RNA, 23 nt, Artificial Sequence
  Synthetic
uacuugauucugcaguuguggca

SEQ ID NO: 208456 - RNA, 24 nt, Artificial Sequence
  Synthetic
uuacuugauucugcaguuguggca

SEQ ID NO: 208457 - RNA, 18 nt, Artificial Sequence
  Synthetic
auauuguuaaaauuggca

SEQ ID NO: 208458 - RNA, 19 nt, Artificial Sequence
  Synthetic
aauauuguuaaaauuggca

SEQ ID NO: 208459 - RNA, 20 nt, Artificial Sequence
  Synthetic
uaauauuguuaaaauuggca

SEQ ID NO: 208460 - RNA, 21 nt, Artificial Sequence
  Synthetic
uuaauauuguuaaaauuggca

SEQ ID NO: 208461 - RNA, 22 nt, Artificial Sequence
  Synthetic
cuuaauauuguuaaaauuggca

SEQ ID NO: 208462 - RNA, 23 nt, Artificial Sequence
  Synthetic
ucuuaauauuguuaaaauuggca

SEQ ID NO: 208463 - RNA, 24 nt, Artificial Sequence
  Synthetic
uucuuaauauuguuaaaauuggca

SEQ ID NO: 208464 - RNA, 18 nt, Artificial Sequence
  Synthetic
cuagggcuagaauuggca

SEQ ID NO: 208465 - RNA, 19 nt, Artificial Sequence
  Synthetic
ucuagggcuagaauuggca

SEQ ID NO: 208466 - RNA, 20 nt, Artificial Sequence
  Synthetic
cucuagggcuagaauuggca

SEQ ID NO: 208467 - RNA, 21 nt, Artificial Sequence
  Synthetic
gcucuagggcuagaauuggca

SEQ ID NO: 208468 - RNA, 22 nt, Artificial Sequence
  Synthetic
ggcucuagggcuagaauuggca

SEQ ID NO: 208469 - RNA, 23 nt, Artificial Sequence
  Synthetic
aggcucuagggcuagaauuggca

SEQ ID NO: 208470 - RNA, 24 nt, Artificial Sequence
  Synthetic
caggcucuagggcuagaauuggca

SEQ ID NO: 208471 - RNA, 18 nt, Artificial Sequence
  Synthetic
uguguuauaauauuggca

SEQ ID NO: 208472 - RNA, 19 nt, Artificial Sequence
  Synthetic
cuguguuauaauauuggca

SEQ ID NO: 208473 - RNA, 20 nt, Artificial Sequence
  Synthetic
acuguguuauaauauuggca

SEQ ID NO: 208474 - RNA, 21 nt, Artificial Sequence
  Synthetic
cacuguguuauaauauuggca

SEQ ID NO: 208475 - RNA, 22 nt, Artificial Sequence
  Synthetic
ucacuguguuauaauauuggca

SEQ ID NO: 208476 - RNA, 23 nt, Artificial Sequence
  Synthetic
aucacuguguuauaauauuggca

SEQ ID NO: 208477 - RNA, 24 nt, Artificial Sequence
  Synthetic
caucacuguguuauaauauuggca

SEQ ID NO: 208478 - RNA, 18 nt, Artificial Sequence
  Synthetic
gguagagggauauuggca

SEQ ID NO: 208479 - RNA, 19 nt, Artificial Sequence
  Synthetic
agguagagggauauuggca

SEQ ID NO: 208480 - RNA, 20 nt, Artificial Sequence
  Synthetic
aagguagagggauauuggca

SEQ ID NO: 208481 - RNA, 21 nt, Artificial Sequence
  Synthetic
caagguagagggauauuggca

SEQ ID NO: 208482 - RNA, 22 nt, Artificial Sequence
  Synthetic
ucaagguagagggauauuggca

SEQ ID NO: 208483 - RNA, 23 nt, Artificial Sequence
  Synthetic
uucaagguagagggauauuggca

SEQ ID NO: 208484 - RNA, 24 nt, Artificial Sequence
  Synthetic
uuucaagguagagggauauuggca

SEQ ID NO: 208485 - RNA, 18 nt, Artificial Sequence
  Synthetic
guaaugaaauuauuggca

SEQ ID NO: 208486 - RNA, 19 nt, Artificial Sequence
  Synthetic
aguaaugaaauuauuggca

SEQ ID NO: 208487 - RNA, 20 nt, Artificial Sequence
  Synthetic
uaguaaugaaauuauuggca

SEQ ID NO: 208488 - RNA, 21 nt, Artificial Sequence
  Synthetic
auaguaaugaaauuauuggca

SEQ ID NO: 208489 - RNA, 22 nt, Artificial Sequence
  Synthetic
uauaguaaugaaauuauuggca

SEQ ID NO: 208490 - RNA, 23 nt, Artificial Sequence
  Synthetic
auauaguaaugaaauuauuggca

SEQ ID NO: 208491 - RNA, 24 nt, Artificial Sequence
  Synthetic
cauauaguaaugaaauuauuggca

SEQ ID NO: 208492 - RNA, 18 nt, Artificial Sequence
  Synthetic
gacaacacauucuuggca

SEQ ID NO: 208493 - RNA, 19 nt, Artificial Sequence
  Synthetic
ggacaacacauucuuggca

SEQ ID NO: 208494 - RNA, 20 nt, Artificial Sequence
  Synthetic
uggacaacacauucuuggca

SEQ ID NO: 208495 - RNA, 21 nt, Artificial Sequence
  Synthetic
uuggacaacacauucuuggca

SEQ ID NO: 208496 - RNA, 22 nt, Artificial Sequence
  Synthetic
uuuggacaacacauucuuggca

SEQ ID NO: 208497 - RNA, 23 nt, Artificial Sequence
  Synthetic
uuuuggacaacacauucuuggca

SEQ ID NO: 208498 - RNA, 24 nt, Artificial Sequence
  Synthetic
auuuuggacaacacauucuuggca

SEQ ID NO: 208499 - RNA, 18 nt, Artificial Sequence
  Synthetic
caauguguuuucuuggca

SEQ ID NO: 208500 - RNA, 19 nt, Artificial Sequence
  Synthetic
acaauguguuuucuuggca

SEQ ID NO: 208501 - RNA, 20 nt, Artificial Sequence
  Synthetic
aacaauguguuuucuuggca

SEQ ID NO: 208502 - RNA, 21 nt, Artificial Sequence
  Synthetic
gaacaauguguuuucuuggca

SEQ ID NO: 208503 - RNA, 22 nt, Artificial Sequence
  Synthetic
ggaacaauguguuuucuuggca

SEQ ID NO: 208504 - RNA, 23 nt, Artificial Sequence
  Synthetic
gggaacaauguguuuucuuggca

SEQ ID NO: 208505 - RNA, 24 nt, Artificial Sequence
  Synthetic
agggaacaauguguuuucuuggca

SEQ ID NO: 208506 - RNA, 18 nt, Artificial Sequence
  Synthetic
uaagacuguagguuggca

SEQ ID NO: 208507 - RNA, 19 nt, Artificial Sequence
  Synthetic
auaagacuguagguuggca

SEQ ID NO: 208508 - RNA, 20 nt, Artificial Sequence
  Synthetic
aauaagacuguagguuggca

SEQ ID NO: 208509 - RNA, 21 nt, Artificial Sequence
  Synthetic
aaauaagacuguagguuggca

SEQ ID NO: 208510 - RNA, 22 nt, Artificial Sequence
  Synthetic
uaaauaagacuguagguuggca

SEQ ID NO: 208511 - RNA, 23 nt, Artificial Sequence
  Synthetic
uuaaauaagacuguagguuggca

SEQ ID NO: 208512 - RNA, 24 nt, Artificial Sequence
  Synthetic
uuuaaauaagacuguagguuggca

SEQ ID NO: 208513 - RNA, 18 nt, Artificial Sequence
  Synthetic
aaauauggaaauuuggca

SEQ ID NO: 208514 - RNA, 19 nt, Artificial Sequence
  Synthetic
gaaauauggaaauuuggca

SEQ ID NO: 208515 - RNA, 20 nt, Artificial Sequence
  Synthetic
agaaauauggaaauuuggca

SEQ ID NO: 208516 - RNA, 21 nt, Artificial Sequence
  Synthetic
gagaaauauggaaauuuggca

SEQ ID NO: 208517 - RNA, 22 nt, Artificial Sequence
  Synthetic
ugagaaauauggaaauuuggca

SEQ ID NO: 208518 - RNA, 23 nt, Artificial Sequence
  Synthetic
cugagaaauauggaaauuuggca

SEQ ID NO: 208519 - RNA, 24 nt, Artificial Sequence
  Synthetic
ccugagaaauauggaaauuuggca

SEQ ID NO: 208520 - RNA, 18 nt, Artificial Sequence
  Synthetic
ccucaccgccuuuuggca

SEQ ID NO: 208521 - RNA, 19 nt, Artificial Sequence
  Synthetic
uccucaccgccuuuuggca

SEQ ID NO: 208522 - RNA, 20 nt, Artificial Sequence
  Synthetic
cuccucaccgccuuuuggca

SEQ ID NO: 208523 - RNA, 21 nt, Artificial Sequence
  Synthetic
acuccucaccgccuuuuggca

SEQ ID NO: 208524 - RNA, 22 nt, Artificial Sequence
  Synthetic
aacuccucaccgccuuuuggca

SEQ ID NO: 208525 - RNA, 23 nt, Artificial Sequence
  Synthetic
aaacuccucaccgccuuuuggca

SEQ ID NO: 208526 - RNA, 24 nt, Artificial Sequence
  Synthetic
aaaacuccucaccgccuuuuggca

SEQ ID NO: 208527 - RNA, 18 nt, Artificial Sequence
  Synthetic
cuaaaauagaaaaaugca

SEQ ID NO: 208528 - RNA, 19 nt, Artificial Sequence
  Synthetic
acuaaaauagaaaaaugca

SEQ ID NO: 208529 - RNA, 20 nt, Artificial Sequence
  Synthetic
uacuaaaauagaaaaaugca

SEQ ID NO: 208530 - RNA, 21 nt, Artificial Sequence
  Synthetic
auacuaaaauagaaaaaugca

SEQ ID NO: 208531 - RNA, 22 nt, Artificial Sequence
  Synthetic
aauacuaaaauagaaaaaugca

SEQ ID NO: 208532 - RNA, 23 nt, Artificial Sequence
  Synthetic
uaauacuaaaauagaaaaaugca

SEQ ID NO: 208533 - RNA, 24 nt, Artificial Sequence
  Synthetic
guaauacuaaaauagaaaaaugca

SEQ ID NO: 208534 - RNA, 18 nt, Artificial Sequence
  Synthetic
cuuuuccccucaaaugca

SEQ ID NO: 208535 - RNA, 19 nt, Artificial Sequence
  Synthetic
ucuuuuccccucaaaugca

SEQ ID NO: 208536 - RNA, 20 nt, Artificial Sequence
  Synthetic
uucuuuuccccucaaaugca

SEQ ID NO: 208537 - RNA, 21 nt, Artificial Sequence
  Synthetic
auucuuuuccccucaaaugca

SEQ ID NO: 208538 - RNA, 22 nt, Artificial Sequence
  Synthetic
uauucuuuuccccucaaaugca

SEQ ID NO: 208539 - RNA, 23 nt, Artificial Sequence
  Synthetic
uuauucuuuuccccucaaaugca

SEQ ID NO: 208540 - RNA, 24 nt, Artificial Sequence
  Synthetic
auuauucuuuuccccucaaaugca

SEQ ID NO: 208541 - RNA, 18 nt, Artificial Sequence
  Synthetic
uucugauccuacaaugca

SEQ ID NO: 208542 - RNA, 19 nt, Artificial Sequence
  Synthetic
auucugauccuacaaugca

SEQ ID NO: 208543 - RNA, 20 nt, Artificial Sequence
  Synthetic
aauucugauccuacaaugca

SEQ ID NO: 208544 - RNA, 21 nt, Artificial Sequence
  Synthetic
caauucugauccuacaaugca

SEQ ID NO: 208545 - RNA, 22 nt, Artificial Sequence
  Synthetic
gcaauucugauccuacaaugca

SEQ ID NO: 208546 - RNA, 23 nt, Artificial Sequence
  Synthetic
agcaauucugauccuacaaugca

SEQ ID NO: 208547 - RNA, 24 nt, Artificial Sequence
  Synthetic
aagcaauucugauccuacaaugca

SEQ ID NO: 208548 - RNA, 18 nt, Artificial Sequence
  Synthetic
guguucuaacccaaugca

SEQ ID NO: 208549 - RNA, 19 nt, Artificial Sequence
  Synthetic
cguguucuaacccaaugca

SEQ ID NO: 208550 - RNA, 20 nt, Artificial Sequence
  Synthetic
gcguguucuaacccaaugca

SEQ ID NO: 208551 - RNA, 21 nt, Artificial Sequence
  Synthetic
agcguguucuaacccaaugca

SEQ ID NO: 208552 - RNA, 22 nt, Artificial Sequence
  Synthetic
gagcguguucuaacccaaugca

SEQ ID NO: 208553 - RNA, 23 nt, Artificial Sequence
  Synthetic
ggagcguguucuaacccaaugca

SEQ ID NO: 208554 - RNA, 24 nt, Artificial Sequence
  Synthetic
aggagcguguucuaacccaaugca

SEQ ID NO: 208555 - RNA, 18 nt, Artificial Sequence
  Synthetic
aagaugcaacgcaaugca

SEQ ID NO: 208556 - RNA, 19 nt, Artificial Sequence
  Synthetic
uaagaugcaacgcaaugca

SEQ ID NO: 208557 - RNA, 20 nt, Artificial Sequence
  Synthetic
uuaagaugcaacgcaaugca

SEQ ID NO: 208558 - RNA, 21 nt, Artificial Sequence
  Synthetic
uuuaagaugcaacgcaaugca

SEQ ID NO: 208559 - RNA, 22 nt, Artificial Sequence
  Synthetic
guuuaagaugcaacgcaaugca

SEQ ID NO: 208560 - RNA, 23 nt, Artificial Sequence
  Synthetic
cguuuaagaugcaacgcaaugca

SEQ ID NO: 208561 - RNA, 24 nt, Artificial Sequence
  Synthetic
ucguuuaagaugcaacgcaaugca

SEQ ID NO: 208562 - RNA, 18 nt, Artificial Sequence
  Synthetic
aaaaucaauaagaaugca

SEQ ID NO: 208563 - RNA, 19 nt, Artificial Sequence
  Synthetic
aaaaaucaauaagaaugca

SEQ ID NO: 208564 - RNA, 20 nt, Artificial Sequence
  Synthetic
aaaaaaucaauaagaaugca

SEQ ID NO: 208565 - RNA, 21 nt, Artificial Sequence
  Synthetic
uaaaaaaucaauaagaaugca

SEQ ID NO: 208566 - RNA, 22 nt, Artificial Sequence
  Synthetic
uuaaaaaaucaauaagaaugca

SEQ ID NO: 208567 - RNA, 23 nt, Artificial Sequence
  Synthetic
auuaaaaaaucaauaagaaugca

SEQ ID NO: 208568 - RNA, 24 nt, Artificial Sequence
  Synthetic
cauuaaaaaaucaauaagaaugca

SEQ ID NO: 208569 - RNA, 18 nt, Artificial Sequence
  Synthetic
ggccaaguugugaaugca

SEQ ID NO: 208570 - RNA, 19 nt, Artificial Sequence
  Synthetic
uggccaaguugugaaugca

SEQ ID NO: 208571 - RNA, 20 nt, Artificial Sequence
  Synthetic
uuggccaaguugugaaugca

SEQ ID NO: 208572 - RNA, 21 nt, Artificial Sequence
  Synthetic
guuggccaaguugugaaugca

SEQ ID NO: 208573 - RNA, 22 nt, Artificial Sequence
  Synthetic
aguuggccaaguugugaaugca

SEQ ID NO: 208574 - RNA, 23 nt, Artificial Sequence
  Synthetic
caguuggccaaguugugaaugca

SEQ ID NO: 208575 - RNA, 24 nt, Artificial Sequence
  Synthetic
ccaguuggccaaguugugaaugca

SEQ ID NO: 208576 - RNA, 18 nt, Artificial Sequence
  Synthetic
gauagauaagauaaugca

SEQ ID NO: 208577 - RNA, 19 nt, Artificial Sequence
  Synthetic
agauagauaagauaaugca

SEQ ID NO: 208578 - RNA, 20 nt, Artificial Sequence
  Synthetic
aagauagauaagauaaugca

SEQ ID NO: 208579 - RNA, 21 nt, Artificial Sequence
  Synthetic
gaagauagauaagauaaugca

SEQ ID NO: 208580 - RNA, 22 nt, Artificial Sequence
  Synthetic
agaagauagauaagauaaugca

SEQ ID NO: 208581 - RNA, 23 nt, Artificial Sequence
  Synthetic
cagaagauagauaagauaaugca

SEQ ID NO: 208582 - RNA, 24 nt, Artificial Sequence
  Synthetic
ccagaagauagauaagauaaugca

SEQ ID NO: 208583 - RNA, 18 nt, Artificial Sequence
  Synthetic
cucauaagagauaaugca

SEQ ID NO: 208584 - RNA, 19 nt, Artificial Sequence
  Synthetic
gcucauaagagauaaugca

SEQ ID NO: 208585 - RNA, 20 nt, Artificial Sequence
  Synthetic
agcucauaagagauaaugca

SEQ ID NO: 208586 - RNA, 21 nt, Artificial Sequence
  Synthetic
uagcucauaagagauaaugca

SEQ ID NO: 208587 - RNA, 22 nt, Artificial Sequence
  Synthetic
guagcucauaagagauaaugca

SEQ ID NO: 208588 - RNA, 23 nt, Artificial Sequence
  Synthetic
uguagcucauaagagauaaugca

SEQ ID NO: 208589 - RNA, 24 nt, Artificial Sequence
  Synthetic
auguagcucauaagagauaaugca

SEQ ID NO: 208590 - RNA, 18 nt, Artificial Sequence
  Synthetic
gauuaagugauuaaugca

SEQ ID NO: 208591 - RNA, 19 nt, Artificial Sequence
  Synthetic
ugauuaagugauuaaugca

SEQ ID NO: 208592 - RNA, 20 nt, Artificial Sequence
  Synthetic
augauuaagugauuaaugca

SEQ ID NO: 208593 - RNA, 21 nt, Artificial Sequence
  Synthetic
gaugauuaagugauuaaugca

SEQ ID NO: 208594 - RNA, 22 nt, Artificial Sequence
  Synthetic
ugaugauuaagugauuaaugca

SEQ ID NO: 208595 - RNA, 23 nt, Artificial Sequence
  Synthetic
augaugauuaagugauuaaugca

SEQ ID NO: 208596 - RNA, 24 nt, Artificial Sequence
  Synthetic
uaugaugauuaagugauuaaugca

SEQ ID NO: 208597 - RNA, 18 nt, Artificial Sequence
  Synthetic
uaagaaagaguuaaugca

SEQ ID NO: 208598 - RNA, 19 nt, Artificial Sequence
  Synthetic
uuaagaaagaguuaaugca

SEQ ID NO: 208599 - RNA, 20 nt, Artificial Sequence
  Synthetic
cuuaagaaagaguuaaugca

SEQ ID NO: 208600 - RNA, 21 nt, Artificial Sequence
  Synthetic
ucuuaagaaagaguuaaugca

SEQ ID NO: 208601 - RNA, 22 nt, Artificial Sequence
  Synthetic
aucuuaagaaagaguuaaugca

SEQ ID NO: 208602 - RNA, 23 nt, Artificial Sequence
  Synthetic
aaucuuaagaaagaguuaaugca

SEQ ID NO: 208603 - RNA, 24 nt, Artificial Sequence
  Synthetic
aaaucuuaagaaagaguuaaugca

SEQ ID NO: 208604 - RNA, 18 nt, Artificial Sequence
  Synthetic
aacauaacauuuaaugca

SEQ ID NO: 208605 - RNA, 19 nt, Artificial Sequence
  Synthetic
aaacauaacauuuaaugca

SEQ ID NO: 208606 - RNA, 20 nt, Artificial Sequence
  Synthetic
uaaacauaacauuuaaugca

SEQ ID NO: 208607 - RNA, 21 nt, Artificial Sequence
  Synthetic
guaaacauaacauuuaaugca

SEQ ID NO: 208608 - RNA, 22 nt, Artificial Sequence
  Synthetic
uguaaacauaacauuuaaugca

SEQ ID NO: 208609 - RNA, 23 nt, Artificial Sequence
  Synthetic
guguaaacauaacauuuaaugca

SEQ ID NO: 208610 - RNA, 24 nt, Artificial Sequence
  Synthetic
aguguaaacauaacauuuaaugca

SEQ ID NO: 208611 - RNA, 18 nt, Artificial Sequence
  Synthetic
ggaaacaaauaacaugca

SEQ ID NO: 208612 - RNA, 19 nt, Artificial Sequence
  Synthetic
aggaaacaaauaacaugca

SEQ ID NO: 208613 - RNA, 20 nt, Artificial Sequence
  Synthetic
aaggaaacaaauaacaugca

SEQ ID NO: 208614 - RNA, 21 nt, Artificial Sequence
  Synthetic
aaaggaaacaaauaacaugca

SEQ ID NO: 208615 - RNA, 22 nt, Artificial Sequence
  Synthetic
gaaaggaaacaaauaacaugca

SEQ ID NO: 208616 - RNA, 23 nt, Artificial Sequence
  Synthetic
agaaaggaaacaaauaacaugca

SEQ ID NO: 208617 - RNA, 24 nt, Artificial Sequence
  Synthetic
gagaaaggaaacaaauaacaugca

SEQ ID NO: 208618 - RNA, 18 nt, Artificial Sequence
  Synthetic
uacucugucccccaugca

SEQ ID NO: 208619 - RNA, 19 nt, Artificial Sequence
  Synthetic
uuacucugucccccaugca

SEQ ID NO: 208620 - RNA, 20 nt, Artificial Sequence
  Synthetic
cuuacucugucccccaugca

SEQ ID NO: 208621 - RNA, 21 nt, Artificial Sequence
  Synthetic
ccuuacucugucccccaugca

SEQ ID NO: 208622 - RNA, 22 nt, Artificial Sequence
  Synthetic
cccuuacucugucccccaugca

SEQ ID NO: 208623 - RNA, 23 nt, Artificial Sequence
  Synthetic
ucccuuacucugucccccaugca

SEQ ID NO: 208624 - RNA, 24 nt, Artificial Sequence
  Synthetic
gucccuuacucugucccccaugca

SEQ ID NO: 208625 - RNA, 18 nt, Artificial Sequence
  Synthetic
uauucuaacaagcaugca

SEQ ID NO: 208626 - RNA, 19 nt, Artificial Sequence
  Synthetic
cuauucuaacaagcaugca

SEQ ID NO: 208627 - RNA, 20 nt, Artificial Sequence
  Synthetic
gcuauucuaacaagcaugca

SEQ ID NO: 208628 - RNA, 21 nt, Artificial Sequence
  Synthetic
ugcuauucuaacaagcaugca

SEQ ID NO: 208629 - RNA, 22 nt, Artificial Sequence
  Synthetic
gugcuauucuaacaagcaugca

SEQ ID NO: 208630 - RNA, 23 nt, Artificial Sequence
  Synthetic
ugugcuauucuaacaagcaugca

SEQ ID NO: 208631 - RNA, 24 nt, Artificial Sequence
  Synthetic
gugugcuauucuaacaagcaugca

SEQ ID NO: 208632 - RNA, 18 nt, Artificial Sequence
  Synthetic
uauggguagcuucaugca

SEQ ID NO: 208633 - RNA, 19 nt, Artificial Sequence
  Synthetic
uuauggguagcuucaugca

SEQ ID NO: 208634 - RNA, 20 nt, Artificial Sequence
  Synthetic
uuuauggguagcuucaugca

SEQ ID NO: 208635 - RNA, 21 nt, Artificial Sequence
  Synthetic
auuuauggguagcuucaugca

SEQ ID NO: 208636 - RNA, 22 nt, Artificial Sequence
  Synthetic
aauuuauggguagcuucaugca

SEQ ID NO: 208637 - RNA, 23 nt, Artificial Sequence
  Synthetic
aaauuuauggguagcuucaugca

SEQ ID NO: 208638 - RNA, 24 nt, Artificial Sequence
  Synthetic
uaaauuuauggguagcuucaugca

SEQ ID NO: 208639 - RNA, 18 nt, Artificial Sequence
  Synthetic
uaggaggcagaggaugca

SEQ ID NO: 208640 - RNA, 19 nt, Artificial Sequence
  Synthetic
guaggaggcagaggaugca

SEQ ID NO: 208641 - RNA, 20 nt, Artificial Sequence
  Synthetic
cguaggaggcagaggaugca

SEQ ID NO: 208642 - RNA, 21 nt, Artificial Sequence
  Synthetic
acguaggaggcagaggaugca

SEQ ID NO: 208643 - RNA, 22 nt, Artificial Sequence
  Synthetic
aacguaggaggcagaggaugca

SEQ ID NO: 208644 - RNA, 23 nt, Artificial Sequence
  Synthetic
gaacguaggaggcagaggaugca

SEQ ID NO: 208645 - RNA, 24 nt, Artificial Sequence
  Synthetic
ugaacguaggaggcagaggaugca

SEQ ID NO: 208646 - RNA, 18 nt, Artificial Sequence
  Synthetic
agaauauaggaggaugca

SEQ ID NO: 208647 - RNA, 19 nt, Artificial Sequence
  Synthetic
cagaauauaggaggaugca

SEQ ID NO: 208648 - RNA, 20 nt, Artificial Sequence
  Synthetic
ucagaauauaggaggaugca

SEQ ID NO: 208649 - RNA, 21 nt, Artificial Sequence
  Synthetic
cucagaauauaggaggaugca

SEQ ID NO: 208650 - RNA, 22 nt, Artificial Sequence
  Synthetic
ucucagaauauaggaggaugca

SEQ ID NO: 208651 - RNA, 23 nt, Artificial Sequence
  Synthetic
aucucagaauauaggaggaugca

SEQ ID NO: 208652 - RNA, 24 nt, Artificial Sequence
  Synthetic
aaucucagaauauaggaggaugca

SEQ ID NO: 208653 - RNA, 18 nt, Artificial Sequence
  Synthetic
uggauguguggggaugca

SEQ ID NO: 208654 - RNA, 19 nt, Artificial Sequence
  Synthetic
auggauguguggggaugca

SEQ ID NO: 208655 - RNA, 20 nt, Artificial Sequence
  Synthetic
gauggauguguggggaugca

SEQ ID NO: 208656 - RNA, 21 nt, Artificial Sequence
  Synthetic
ggauggauguguggggaugca

SEQ ID NO: 208657 - RNA, 22 nt, Artificial Sequence
  Synthetic
uggauggauguguggggaugca

SEQ ID NO: 208658 - RNA, 23 nt, Artificial Sequence
  Synthetic
auggauggauguguggggaugca

SEQ ID NO: 208659 - RNA, 24 nt, Artificial Sequence
  Synthetic
cauggauggauguguggggaugca

SEQ ID NO: 208660 - RNA, 18 nt, Artificial Sequence
  Synthetic
gaucagagauuggaugca

SEQ ID NO: 208661 - RNA, 19 nt, Artificial Sequence
  Synthetic
ggaucagagauuggaugca

SEQ ID NO: 208662 - RNA, 20 nt, Artificial Sequence
  Synthetic
gggaucagagauuggaugca

SEQ ID NO: 208663 - RNA, 21 nt, Artificial Sequence
  Synthetic
agggaucagagauuggaugca

SEQ ID NO: 208664 - RNA, 22 nt, Artificial Sequence
  Synthetic
uagggaucagagauuggaugca

SEQ ID NO: 208665 - RNA, 23 nt, Artificial Sequence
  Synthetic
cuagggaucagagauuggaugca

SEQ ID NO: 208666 - RNA, 24 nt, Artificial Sequence
  Synthetic
ucuagggaucagagauuggaugca

SEQ ID NO: 208667 - RNA, 18 nt, Artificial Sequence
  Synthetic
guaagcguguuggaugca

SEQ ID NO: 208668 - RNA, 19 nt, Artificial Sequence
  Synthetic
gguaagcguguuggaugca

SEQ ID NO: 208669 - RNA, 20 nt, Artificial Sequence
  Synthetic
ugguaagcguguuggaugca

SEQ ID NO: 208670 - RNA, 21 nt, Artificial Sequence
  Synthetic
uugguaagcguguuggaugca

SEQ ID NO: 208671 - RNA, 22 nt, Artificial Sequence
  Synthetic
cuugguaagcguguuggaugca

SEQ ID NO: 208672 - RNA, 23 nt, Artificial Sequence
  Synthetic
ucuugguaagcguguuggaugca

SEQ ID NO: 208673 - RNA, 24 nt, Artificial Sequence
  Synthetic
cucuugguaagcguguuggaugca

SEQ ID NO: 208674 - RNA, 18 nt, Artificial Sequence
  Synthetic
gaguugaaugaugaugca

SEQ ID NO: 208675 - RNA, 19 nt, Artificial Sequence
  Synthetic
ggaguugaaugaugaugca

SEQ ID NO: 208676 - RNA, 20 nt, Artificial Sequence
  Synthetic
aggaguugaaugaugaugca

SEQ ID NO: 208677 - RNA, 21 nt, Artificial Sequence
  Synthetic
gaggaguugaaugaugaugca

SEQ ID NO: 208678 - RNA, 22 nt, Artificial Sequence
  Synthetic
agaggaguugaaugaugaugca

SEQ ID NO: 208679 - RNA, 23 nt, Artificial Sequence
  Synthetic
gagaggaguugaaugaugaugca

SEQ ID NO: 208680 - RNA, 24 nt, Artificial Sequence
  Synthetic
agagaggaguugaaugaugaugca

SEQ ID NO: 208681 - RNA, 18 nt, Artificial Sequence
  Synthetic
ucaagggcuacugaugca

SEQ ID NO: 208682 - RNA, 19 nt, Artificial Sequence
  Synthetic
uucaagggcuacugaugca

SEQ ID NO: 208683 - RNA, 20 nt, Artificial Sequence
  Synthetic
cuucaagggcuacugaugca

SEQ ID NO: 208684 - RNA, 21 nt, Artificial Sequence
  Synthetic
ccuucaagggcuacugaugca

SEQ ID NO: 208685 - RNA, 22 nt, Artificial Sequence
  Synthetic
gccuucaagggcuacugaugca

SEQ ID NO: 208686 - RNA, 23 nt, Artificial Sequence
  Synthetic
ugccuucaagggcuacugaugca

SEQ ID NO: 208687 - RNA, 24 nt, Artificial Sequence
  Synthetic
augccuucaagggcuacugaugca

SEQ ID NO: 208688 - RNA, 18 nt, Artificial Sequence
  Synthetic
gaauccagguuugaugca

SEQ ID NO: 208689 - RNA, 19 nt, Artificial Sequence
  Synthetic
agaauccagguuugaugca

SEQ ID NO: 208690 - RNA, 20 nt, Artificial Sequence
  Synthetic
aagaauccagguuugaugca

SEQ ID NO: 208691 - RNA, 21 nt, Artificial Sequence
  Synthetic
aaagaauccagguuugaugca

SEQ ID NO: 208692 - RNA, 22 nt, Artificial Sequence
  Synthetic
gaaagaauccagguuugaugca

SEQ ID NO: 208693 - RNA, 23 nt, Artificial Sequence
  Synthetic
ggaaagaauccagguuugaugca

SEQ ID NO: 208694 - RNA, 24 nt, Artificial Sequence
  Synthetic
aggaaagaauccagguuugaugca

SEQ ID NO: 208695 - RNA, 18 nt, Artificial Sequence
  Synthetic
guauacaacaaauaugca

SEQ ID NO: 208696 - RNA, 19 nt, Artificial Sequence
  Synthetic
aguauacaacaaauaugca

SEQ ID NO: 208697 - RNA, 20 nt, Artificial Sequence
  Synthetic
gaguauacaacaaauaugca

SEQ ID NO: 208698 - RNA, 21 nt, Artificial Sequence
  Synthetic
agaguauacaacaaauaugca

SEQ ID NO: 208699 - RNA, 22 nt, Artificial Sequence
  Synthetic
aagaguauacaacaaauaugca

SEQ ID NO: 208700 - RNA, 23 nt, Artificial Sequence
  Synthetic
aaagaguauacaacaaauaugca

SEQ ID NO: 208701 - RNA, 24 nt, Artificial Sequence
  Synthetic
caaagaguauacaacaaauaugca

SEQ ID NO: 208702 - RNA, 18 nt, Artificial Sequence
  Synthetic
guuccauguauauaugca

SEQ ID NO: 208703 - RNA, 19 nt, Artificial Sequence
  Synthetic
aguuccauguauauaugca

SEQ ID NO: 208704 - RNA, 20 nt, Artificial Sequence
  Synthetic
uaguuccauguauauaugca

SEQ ID NO: 208705 - RNA, 21 nt, Artificial Sequence
  Synthetic
cuaguuccauguauauaugca

SEQ ID NO: 208706 - RNA, 22 nt, Artificial Sequence
  Synthetic
acuaguuccauguauauaugca

SEQ ID NO: 208707 - RNA, 23 nt, Artificial Sequence
  Synthetic
gacuaguuccauguauauaugca

SEQ ID NO: 208708 - RNA, 24 nt, Artificial Sequence
  Synthetic
agacuaguuccauguauauaugca

SEQ ID NO: 208709 - RNA, 18 nt, Artificial Sequence
  Synthetic
gagucuaguuuauaugca

SEQ ID NO: 208710 - RNA, 19 nt, Artificial Sequence
  Synthetic
ugagucuaguuuauaugca

SEQ ID NO: 208711 - RNA, 20 nt, Artificial Sequence
  Synthetic
augagucuaguuuauaugca

SEQ ID NO: 208712 - RNA, 21 nt, Artificial Sequence
  Synthetic
gaugagucuaguuuauaugca

SEQ ID NO: 208713 - RNA, 22 nt, Artificial Sequence
  Synthetic
ggaugagucuaguuuauaugca

SEQ ID NO: 208714 - RNA, 23 nt, Artificial Sequence
  Synthetic
gggaugagucuaguuuauaugca

SEQ ID NO: 208715 - RNA, 24 nt, Artificial Sequence
  Synthetic
agggaugagucuaguuuauaugca

SEQ ID NO: 208716 - RNA, 18 nt, Artificial Sequence
  Synthetic
cugguccaauacuaugca

SEQ ID NO: 208717 - RNA, 19 nt, Artificial Sequence
  Synthetic
ucugguccaauacuaugca

SEQ ID NO: 208718 - RNA, 20 nt, Artificial Sequence
  Synthetic
aucugguccaauacuaugca

SEQ ID NO: 208719 - RNA, 21 nt, Artificial Sequence
  Synthetic
uaucugguccaauacuaugca

SEQ ID NO: 208720 - RNA, 22 nt, Artificial Sequence
  Synthetic
guaucugguccaauacuaugca

SEQ ID NO: 208721 - RNA, 23 nt, Artificial Sequence
  Synthetic
aguaucugguccaauacuaugca

SEQ ID NO: 208722 - RNA, 24 nt, Artificial Sequence
  Synthetic
caguaucugguccaauacuaugca

SEQ ID NO: 208723 - RNA, 18 nt, Artificial Sequence
  Synthetic
ugcauaauauccuaugca

SEQ ID NO: 208724 - RNA, 19 nt, Artificial Sequence
  Synthetic
gugcauaauauccuaugca

SEQ ID NO: 208725 - RNA, 20 nt, Artificial Sequence
  Synthetic
ggugcauaauauccuaugca

SEQ ID NO: 208726 - RNA, 21 nt, Artificial Sequence
  Synthetic
cggugcauaauauccuaugca

SEQ ID NO: 208727 - RNA, 22 nt, Artificial Sequence
  Synthetic
ucggugcauaauauccuaugca

SEQ ID NO: 208728 - RNA, 23 nt, Artificial Sequence
  Synthetic
uucggugcauaauauccuaugca

SEQ ID NO: 208729 - RNA, 24 nt, Artificial Sequence
  Synthetic
uuucggugcauaauauccuaugca

SEQ ID NO: 208730 - RNA, 18 nt, Artificial Sequence
  Synthetic
cugucaauuggguaugca

SEQ ID NO: 208731 - RNA, 19 nt, Artificial Sequence
  Synthetic
ucugucaauuggguaugca

SEQ ID NO: 208732 - RNA, 20 nt, Artificial Sequence
  Synthetic
uucugucaauuggguaugca

SEQ ID NO: 208733 - RNA, 21 nt, Artificial Sequence
  Synthetic
cuucugucaauuggguaugca

SEQ ID NO: 208734 - RNA, 22 nt, Artificial Sequence
  Synthetic
ucuucugucaauuggguaugca

SEQ ID NO: 208735 - RNA, 23 nt, Artificial Sequence
  Synthetic
cucuucugucaauuggguaugca

SEQ ID NO: 208736 - RNA, 24 nt, Artificial Sequence
  Synthetic
acucuucugucaauuggguaugca

SEQ ID NO: 208737 - RNA, 18 nt, Artificial Sequence
  Synthetic
aaacaaaauaauuaugca

SEQ ID NO: 208738 - RNA, 19 nt, Artificial Sequence
  Synthetic
gaaacaaaauaauuaugca

SEQ ID NO: 208739 - RNA, 20 nt, Artificial Sequence
  Synthetic
agaaacaaaauaauuaugca

SEQ ID NO: 208740 - RNA, 21 nt, Artificial Sequence
  Synthetic
uagaaacaaaauaauuaugca

SEQ ID NO: 208741 - RNA, 22 nt, Artificial Sequence
  Synthetic
uuagaaacaaaauaauuaugca

SEQ ID NO: 208742 - RNA, 23 nt, Artificial Sequence
  Synthetic
auuagaaacaaaauaauuaugca

SEQ ID NO: 208743 - RNA, 24 nt, Artificial Sequence
  Synthetic
cauuagaaacaaaauaauuaugca

SEQ ID NO: 208744 - RNA, 18 nt, Artificial Sequence
  Synthetic
uuuaaccuugcuuaugca

SEQ ID NO: 208745 - RNA, 19 nt, Artificial Sequence
  Synthetic
uuuuaaccuugcuuaugca

SEQ ID NO: 208746 - RNA, 20 nt, Artificial Sequence
  Synthetic
auuuuaaccuugcuuaugca

SEQ ID NO: 208747 - RNA, 21 nt, Artificial Sequence
  Synthetic
gauuuuaaccuugcuuaugca

SEQ ID NO: 208748 - RNA, 22 nt, Artificial Sequence
  Synthetic
ggauuuuaaccuugcuuaugca

SEQ ID NO: 208749 - RNA, 23 nt, Artificial Sequence
  Synthetic
uggauuuuaaccuugcuuaugca

SEQ ID NO: 208750 - RNA, 24 nt, Artificial Sequence
  Synthetic
guggauuuuaaccuugcuuaugca

SEQ ID NO: 208751 - RNA, 18 nt, Artificial Sequence
  Synthetic
uguguagaauguuaugca

SEQ ID NO: 208752 - RNA, 19 nt, Artificial Sequence
  Synthetic
uuguguagaauguuaugca

SEQ ID NO: 208753 - RNA, 20 nt, Artificial Sequence
  Synthetic
auuguguagaauguuaugca

SEQ ID NO: 208754 - RNA, 21 nt, Artificial Sequence
  Synthetic
gauuguguagaauguuaugca

SEQ ID NO: 208755 - RNA, 22 nt, Artificial Sequence
  Synthetic
agauuguguagaauguuaugca

SEQ ID NO: 208756 - RNA, 23 nt, Artificial Sequence
  Synthetic
aagauuguguagaauguuaugca

SEQ ID NO: 208757 - RNA, 24 nt, Artificial Sequence
  Synthetic
aaagauuguguagaauguuaugca

SEQ ID NO: 208758 - RNA, 18 nt, Artificial Sequence
  Synthetic
ugacaaugccaaacugca

SEQ ID NO: 208759 - RNA, 19 nt, Artificial Sequence
  Synthetic
augacaaugccaaacugca

SEQ ID NO: 208760 - RNA, 20 nt, Artificial Sequence
  Synthetic
caugacaaugccaaacugca

SEQ ID NO: 208761 - RNA, 21 nt, Artificial Sequence
  Synthetic
ucaugacaaugccaaacugca

SEQ ID NO: 208762 - RNA, 22 nt, Artificial Sequence
  Synthetic
cucaugacaaugccaaacugca

SEQ ID NO: 208763 - RNA, 23 nt, Artificial Sequence
  Synthetic
ucucaugacaaugccaaacugca

SEQ ID NO: 208764 - RNA, 24 nt, Artificial Sequence
  Synthetic
uucucaugacaaugccaaacugca

SEQ ID NO: 208765 - RNA, 18 nt, Artificial Sequence
  Synthetic
gaaacauaauaaacugca

SEQ ID NO: 208766 - RNA, 19 nt, Artificial Sequence
  Synthetic
ggaaacauaauaaacugca

SEQ ID NO: 208767 - RNA, 20 nt, Artificial Sequence
  Synthetic
uggaaacauaauaaacugca

SEQ ID NO: 208768 - RNA, 21 nt, Artificial Sequence
  Synthetic
guggaaacauaauaaacugca

SEQ ID NO: 208769 - RNA, 22 nt, Artificial Sequence
  Synthetic
cguggaaacauaauaaacugca

SEQ ID NO: 208770 - RNA, 23 nt, Artificial Sequence
  Synthetic
acguggaaacauaauaaacugca

SEQ ID NO: 208771 - RNA, 24 nt, Artificial Sequence
  Synthetic
uacguggaaacauaauaaacugca

SEQ ID NO: 208772 - RNA, 18 nt, Artificial Sequence
  Synthetic
gucaccuccccaacugca

SEQ ID NO: 208773 - RNA, 19 nt, Artificial Sequence
  Synthetic
ggucaccuccccaacugca

SEQ ID NO: 208774 - RNA, 20 nt, Artificial Sequence
  Synthetic
aggucaccuccccaacugca

SEQ ID NO: 208775 - RNA, 21 nt, Artificial Sequence
  Synthetic
aaggucaccuccccaacugca

SEQ ID NO: 208776 - RNA, 22 nt, Artificial Sequence
  Synthetic
gaaggucaccuccccaacugca

SEQ ID NO: 208777 - RNA, 23 nt, Artificial Sequence
  Synthetic
ugaaggucaccuccccaacugca

SEQ ID NO: 208778 - RNA, 24 nt, Artificial Sequence
  Synthetic
cugaaggucaccuccccaacugca

SEQ ID NO: 208779 - RNA, 18 nt, Artificial Sequence
  Synthetic
auccucaaaauaacugca

SEQ ID NO: 208780 - RNA, 19 nt, Artificial Sequence
  Synthetic
uauccucaaaauaacugca

SEQ ID NO: 208781 - RNA, 20 nt, Artificial Sequence
  Synthetic
uuauccucaaaauaacugca

SEQ ID NO: 208782 - RNA, 21 nt, Artificial Sequence
  Synthetic
uuuauccucaaaauaacugca

SEQ ID NO: 208783 - RNA, 22 nt, Artificial Sequence
  Synthetic
cuuuauccucaaaauaacugca

SEQ ID NO: 208784 - RNA, 23 nt, Artificial Sequence
  Synthetic
ucuuuauccucaaaauaacugca

SEQ ID NO: 208785 - RNA, 24 nt, Artificial Sequence
  Synthetic
gucuuuauccucaaaauaacugca

SEQ ID NO: 208786 - RNA, 18 nt, Artificial Sequence
  Synthetic
uucauuuuuauaacugca

SEQ ID NO: 208787 - RNA, 19 nt, Artificial Sequence
  Synthetic
auucauuuuuauaacugca

SEQ ID NO: 208788 - RNA, 20 nt, Artificial Sequence
  Synthetic
uauucauuuuuauaacugca

SEQ ID NO: 208789 - RNA, 21 nt, Artificial Sequence
  Synthetic
uuauucauuuuuauaacugca

SEQ ID NO: 208790 - RNA, 22 nt, Artificial Sequence
  Synthetic
cuuauucauuuuuauaacugca

SEQ ID NO: 208791 - RNA, 23 nt, Artificial Sequence
  Synthetic
gcuuauucauuuuuauaacugca

SEQ ID NO: 208792 - RNA, 24 nt, Artificial Sequence
  Synthetic
ggcuuauucauuuuuauaacugca

SEQ ID NO: 208793 - RNA, 18 nt, Artificial Sequence
  Synthetic
ggcacagggaccacugca

SEQ ID NO: 208794 - RNA, 19 nt, Artificial Sequence
  Synthetic
aggcacagggaccacugca

SEQ ID NO: 208795 - RNA, 20 nt, Artificial Sequence
  Synthetic
uaggcacagggaccacugca

SEQ ID NO: 208796 - RNA, 21 nt, Artificial Sequence
  Synthetic
auaggcacagggaccacugca

SEQ ID NO: 208797 - RNA, 22 nt, Artificial Sequence
  Synthetic
aauaggcacagggaccacugca

SEQ ID NO: 208798 - RNA, 23 nt, Artificial Sequence
  Synthetic
caauaggcacagggaccacugca

SEQ ID NO: 208799 - RNA, 24 nt, Artificial Sequence
  Synthetic
acaauaggcacagggaccacugca

SEQ ID NO: 208800 - RNA, 18 nt, Artificial Sequence
  Synthetic
aagauuucuaccacugca

SEQ ID NO: 208801 - RNA, 19 nt, Artificial Sequence
  Synthetic
uaagauuucuaccacugca

SEQ ID NO: 208802 - RNA, 20 nt, Artificial Sequence
  Synthetic
guaagauuucuaccacugca

SEQ ID NO: 208803 - RNA, 21 nt, Artificial Sequence
  Synthetic
aguaagauuucuaccacugca

SEQ ID NO: 208804 - RNA, 22 nt, Artificial Sequence
  Synthetic
caguaagauuucuaccacugca

SEQ ID NO: 208805 - RNA, 23 nt, Artificial Sequence
  Synthetic
acaguaagauuucuaccacugca

SEQ ID NO: 208806 - RNA, 24 nt, Artificial Sequence
  Synthetic
uacaguaagauuucuaccacugca

SEQ ID NO: 208807 - RNA, 18 nt, Artificial Sequence
  Synthetic
cacauuuuggucacugca

SEQ ID NO: 208808 - RNA, 19 nt, Artificial Sequence
  Synthetic
ccacauuuuggucacugca

SEQ ID NO: 208809 - RNA, 20 nt, Artificial Sequence
  Synthetic
uccacauuuuggucacugca

SEQ ID NO: 208810 - RNA, 21 nt, Artificial Sequence
  Synthetic
uuccacauuuuggucacugca

SEQ ID NO: 208811 - RNA, 22 nt, Artificial Sequence
  Synthetic
cuuccacauuuuggucacugca

SEQ ID NO: 208812 - RNA, 23 nt, Artificial Sequence
  Synthetic
gcuuccacauuuuggucacugca

SEQ ID NO: 208813 - RNA, 24 nt, Artificial Sequence
  Synthetic
ugcuuccacauuuuggucacugca

SEQ ID NO: 208814 - RNA, 18 nt, Artificial Sequence
  Synthetic
uuuagaaacaggacugca

SEQ ID NO: 208815 - RNA, 19 nt, Artificial Sequence
  Synthetic
uuuuagaaacaggacugca

SEQ ID NO: 208816 - RNA, 20 nt, Artificial Sequence
  Synthetic
auuuuagaaacaggacugca

SEQ ID NO: 208817 - RNA, 21 nt, Artificial Sequence
  Synthetic
uauuuuagaaacaggacugca

SEQ ID NO: 208818 - RNA, 22 nt, Artificial Sequence
  Synthetic
cuauuuuagaaacaggacugca

SEQ ID NO: 208819 - RNA, 23 nt, Artificial Sequence
  Synthetic
ucuauuuuagaaacaggacugca

SEQ ID NO: 208820 - RNA, 24 nt, Artificial Sequence
  Synthetic
uucuauuuuagaaacaggacugca

SEQ ID NO: 208821 - RNA, 18 nt, Artificial Sequence
  Synthetic
uuggaggcagugacugca

SEQ ID NO: 208822 - RNA, 19 nt, Artificial Sequence
  Synthetic
cuuggaggcagugacugca

SEQ ID NO: 208823 - RNA, 20 nt, Artificial Sequence
  Synthetic
acuuggaggcagugacugca

SEQ ID NO: 208824 - RNA, 21 nt, Artificial Sequence
  Synthetic
uacuuggaggcagugacugca

SEQ ID NO: 208825 - RNA, 22 nt, Artificial Sequence
  Synthetic
auacuuggaggcagugacugca

SEQ ID NO: 208826 - RNA, 23 nt, Artificial Sequence
  Synthetic
uauacuuggaggcagugacugca

SEQ ID NO: 208827 - RNA, 24 nt, Artificial Sequence
  Synthetic
uuauacuuggaggcagugacugca

SEQ ID NO: 208828 - RNA, 18 nt, Artificial Sequence
  Synthetic
gagugcaaaaguacugca

SEQ ID NO: 208829 - RNA, 19 nt, Artificial Sequence
  Synthetic
ugagugcaaaaguacugca

SEQ ID NO: 208830 - RNA, 20 nt, Artificial Sequence
  Synthetic
uugagugcaaaaguacugca

SEQ ID NO: 208831 - RNA, 21 nt, Artificial Sequence
  Synthetic
guugagugcaaaaguacugca

SEQ ID NO: 208832 - RNA, 22 nt, Artificial Sequence
  Synthetic
uguugagugcaaaaguacugca

SEQ ID NO: 208833 - RNA, 23 nt, Artificial Sequence
  Synthetic
uuguugagugcaaaaguacugca

SEQ ID NO: 208834 - RNA, 24 nt, Artificial Sequence
  Synthetic
cuuguugagugcaaaaguacugca

SEQ ID NO: 208835 - RNA, 18 nt, Artificial Sequence
  Synthetic
aagagaacacuuacugca

SEQ ID NO: 208836 - RNA, 19 nt, Artificial Sequence
  Synthetic
aaagagaacacuuacugca

SEQ ID NO: 208837 - RNA, 20 nt, Artificial Sequence
  Synthetic
uaaagagaacacuuacugca

SEQ ID NO: 208838 - RNA, 21 nt, Artificial Sequence
  Synthetic
cuaaagagaacacuuacugca

SEQ ID NO: 208839 - RNA, 22 nt, Artificial Sequence
  Synthetic
acuaaagagaacacuuacugca

SEQ ID NO: 208840 - RNA, 23 nt, Artificial Sequence
  Synthetic
cacuaaagagaacacuuacugca

SEQ ID NO: 208841 - RNA, 24 nt, Artificial Sequence
  Synthetic
acacuaaagagaacacuuacugca

SEQ ID NO: 208842 - RNA, 18 nt, Artificial Sequence
  Synthetic
auauuaaauguuacugca

SEQ ID NO: 208843 - RNA, 19 nt, Artificial Sequence
  Synthetic
aauauuaaauguuacugca

SEQ ID NO: 208844 - RNA, 20 nt, Artificial Sequence
  Synthetic
aaauauuaaauguuacugca

SEQ ID NO: 208845 - RNA, 21 nt, Artificial Sequence
  Synthetic
aaaauauuaaauguuacugca

SEQ ID NO: 208846 - RNA, 22 nt, Artificial Sequence
  Synthetic
aaaaauauuaaauguuacugca

SEQ ID NO: 208847 - RNA, 23 nt, Artificial Sequence
  Synthetic
uaaaaauauuaaauguuacugca

SEQ ID NO: 208848 - RNA, 24 nt, Artificial Sequence
  Synthetic
uuaaaaauauuaaauguuacugca

SEQ ID NO: 208849 - RNA, 18 nt, Artificial Sequence
  Synthetic
ugcuuuguuugaccugca

SEQ ID NO: 208850 - RNA, 19 nt, Artificial Sequence
  Synthetic
cugcuuuguuugaccugca

SEQ ID NO: 208851 - RNA, 20 nt, Artificial Sequence
  Synthetic
gcugcuuuguuugaccugca

SEQ ID NO: 208852 - RNA, 21 nt, Artificial Sequence
  Synthetic
ggcugcuuuguuugaccugca

SEQ ID NO: 208853 - RNA, 22 nt, Artificial Sequence
  Synthetic
uggcugcuuuguuugaccugca

SEQ ID NO: 208854 - RNA, 23 nt, Artificial Sequence
  Synthetic
uuggcugcuuuguuugaccugca

SEQ ID NO: 208855 - RNA, 24 nt, Artificial Sequence
  Synthetic
cuuggcugcuuuguuugaccugca

SEQ ID NO: 208856 - RNA, 18 nt, Artificial Sequence
  Synthetic
uguuugucuauaccugca

SEQ ID NO: 208857 - RNA, 19 nt, Artificial Sequence
  Synthetic
uuguuugucuauaccugca

SEQ ID NO: 208858 - RNA, 20 nt, Artificial Sequence
  Synthetic
auuguuugucuauaccugca

SEQ ID NO: 208859 - RNA, 21 nt, Artificial Sequence
  Synthetic
uauuguuugucuauaccugca

SEQ ID NO: 208860 - RNA, 22 nt, Artificial Sequence
  Synthetic
uuauuguuugucuauaccugca

SEQ ID NO: 208861 - RNA, 23 nt, Artificial Sequence
  Synthetic
uuuauuguuugucuauaccugca

SEQ ID NO: 208862 - RNA, 24 nt, Artificial Sequence
  Synthetic
guuuauuguuugucuauaccugca

SEQ ID NO: 208863 - RNA, 18 nt, Artificial Sequence
  Synthetic
uucauccaugucccugca

SEQ ID NO: 208864 - RNA, 19 nt, Artificial Sequence
  Synthetic
cuucauccaugucccugca

SEQ ID NO: 208865 - RNA, 20 nt, Artificial Sequence
  Synthetic
gcuucauccaugucccugca

SEQ ID NO: 208866 - RNA, 21 nt, Artificial Sequence
  Synthetic
agcuucauccaugucccugca

SEQ ID NO: 208867 - RNA, 22 nt, Artificial Sequence
  Synthetic
cagcuucauccaugucccugca

SEQ ID NO: 208868 - RNA, 23 nt, Artificial Sequence
  Synthetic
ccagcuucauccaugucccugca

SEQ ID NO: 208869 - RNA, 24 nt, Artificial Sequence
  Synthetic
uccagcuucauccaugucccugca

SEQ ID NO: 208870 - RNA, 18 nt, Artificial Sequence
  Synthetic
uccaucuaugucccugca

SEQ ID NO: 208871 - RNA, 19 nt, Artificial Sequence
  Synthetic
auccaucuaugucccugca

SEQ ID NO: 208872 - RNA, 20 nt, Artificial Sequence
  Synthetic
gauccaucuaugucccugca

SEQ ID NO: 208873 - RNA, 21 nt, Artificial Sequence
  Synthetic
agauccaucuaugucccugca

SEQ ID NO: 208874 - RNA, 22 nt, Artificial Sequence
  Synthetic
cagauccaucuaugucccugca

SEQ ID NO: 208875 - RNA, 23 nt, Artificial Sequence
  Synthetic
ccagauccaucuaugucccugca

SEQ ID NO: 208876 - RNA, 24 nt, Artificial Sequence
  Synthetic
uccagauccaucuaugucccugca

SEQ ID NO: 208877 - RNA, 18 nt, Artificial Sequence
  Synthetic
acuaaugcauugccugca

SEQ ID NO: 208878 - RNA, 19 nt, Artificial Sequence
  Synthetic
cacuaaugcauugccugca

SEQ ID NO: 208879 - RNA, 20 nt, Artificial Sequence
  Synthetic
acacuaaugcauugccugca

SEQ ID NO: 208880 - RNA, 21 nt, Artificial Sequence
  Synthetic
aacacuaaugcauugccugca

SEQ ID NO: 208881 - RNA, 22 nt, Artificial Sequence
  Synthetic
aaacacuaaugcauugccugca

SEQ ID NO: 208882 - RNA, 23 nt, Artificial Sequence
  Synthetic
gaaacacuaaugcauugccugca

SEQ ID NO: 208883 - RNA, 24 nt, Artificial Sequence
  Synthetic
ugaaacacuaaugcauugccugca

SEQ ID NO: 208884 - RNA, 18 nt, Artificial Sequence
  Synthetic
cacuggaauuauccugca

SEQ ID NO: 208885 - RNA, 19 nt, Artificial Sequence
  Synthetic
gcacuggaauuauccugca

SEQ ID NO: 208886 - RNA, 20 nt, Artificial Sequence
  Synthetic
ugcacuggaauuauccugca

SEQ ID NO: 208887 - RNA, 21 nt, Artificial Sequence
  Synthetic
uugcacuggaauuauccugca

SEQ ID NO: 208888 - RNA, 22 nt, Artificial Sequence
  Synthetic
uuugcacuggaauuauccugca

SEQ ID NO: 208889 - RNA, 23 nt, Artificial Sequence
  Synthetic
cuuugcacuggaauuauccugca

SEQ ID NO: 208890 - RNA, 24 nt, Artificial Sequence
  Synthetic
ccuuugcacuggaauuauccugca

SEQ ID NO: 208891 - RNA, 18 nt, Artificial Sequence
  Synthetic
aaacuaaggccuccugca

SEQ ID NO: 208892 - RNA, 19 nt, Artificial Sequence
  Synthetic
gaaacuaaggccuccugca

SEQ ID NO: 208893 - RNA, 20 nt, Artificial Sequence
  Synthetic
agaaacuaaggccuccugca

SEQ ID NO: 208894 - RNA, 21 nt, Artificial Sequence
  Synthetic
gagaaacuaaggccuccugca

SEQ ID NO: 208895 - RNA, 22 nt, Artificial Sequence
  Synthetic
ugagaaacuaaggccuccugca

SEQ ID NO: 208896 - RNA, 23 nt, Artificial Sequence
  Synthetic
cugagaaacuaaggccuccugca

SEQ ID NO: 208897 - RNA, 24 nt, Artificial Sequence
  Synthetic
gcugagaaacuaaggccuccugca

SEQ ID NO: 208898 - RNA, 18 nt, Artificial Sequence
  Synthetic
aggugauuuuguccugca

SEQ ID NO: 208899 - RNA, 19 nt, Artificial Sequence
  Synthetic
gaggugauuuuguccugca

SEQ ID NO: 208900 - RNA, 20 nt, Artificial Sequence
  Synthetic
agaggugauuuuguccugca

SEQ ID NO: 208901 - RNA, 21 nt, Artificial Sequence
  Synthetic
uagaggugauuuuguccugca

SEQ ID NO: 208902 - RNA, 22 nt, Artificial Sequence
  Synthetic
auagaggugauuuuguccugca

SEQ ID NO: 208903 - RNA, 23 nt, Artificial Sequence
  Synthetic
aauagaggugauuuuguccugca

SEQ ID NO: 208904 - RNA, 24 nt, Artificial Sequence
  Synthetic
aaauagaggugauuuuguccugca

SEQ ID NO: 208905 - RNA, 18 nt, Artificial Sequence
  Synthetic
uucauccauguuccugca

SEQ ID NO: 208906 - RNA, 19 nt, Artificial Sequence
  Synthetic
uuucauccauguuccugca

SEQ ID NO: 208907 - RNA, 20 nt, Artificial Sequence
  Synthetic
guuucauccauguuccugca

SEQ ID NO: 208908 - RNA, 21 nt, Artificial Sequence
  Synthetic
aguuucauccauguuccugca

SEQ ID NO: 208909 - RNA, 22 nt, Artificial Sequence
  Synthetic
uaguuucauccauguuccugca

SEQ ID NO: 208910 - RNA, 23 nt, Artificial Sequence
  Synthetic
cuaguuucauccauguuccugca

SEQ ID NO: 208911 - RNA, 24 nt, Artificial Sequence
  Synthetic
ucuaguuucauccauguuccugca

SEQ ID NO: 208912 - RNA, 18 nt, Artificial Sequence
  Synthetic
uccauauguguuccugca

SEQ ID NO: 208913 - RNA, 19 nt, Artificial Sequence
  Synthetic
cuccauauguguuccugca

SEQ ID NO: 208914 - RNA, 20 nt, Artificial Sequence
  Synthetic
gcuccauauguguuccugca

SEQ ID NO: 208915 - RNA, 21 nt, Artificial Sequence
  Synthetic
agcuccauauguguuccugca

SEQ ID NO: 208916 - RNA, 22 nt, Artificial Sequence
  Synthetic
cagcuccauauguguuccugca

SEQ ID NO: 208917 - RNA, 23 nt, Artificial Sequence
  Synthetic
acagcuccauauguguuccugca

SEQ ID NO: 208918 - RNA, 24 nt, Artificial Sequence
  Synthetic
cacagcuccauauguguuccugca

SEQ ID NO: 208919 - RNA, 18 nt, Artificial Sequence
  Synthetic
ugggaagucgaagcugca

SEQ ID NO: 208920 - RNA, 19 nt, Artificial Sequence
  Synthetic
uugggaagucgaagcugca

SEQ ID NO: 208921 - RNA, 20 nt, Artificial Sequence
  Synthetic
cuugggaagucgaagcugca

SEQ ID NO: 208922 - RNA, 21 nt, Artificial Sequence
  Synthetic
gcuugggaagucgaagcugca

SEQ ID NO: 208923 - RNA, 22 nt, Artificial Sequence
  Synthetic
agcuugggaagucgaagcugca

SEQ ID NO: 208924 - RNA, 23 nt, Artificial Sequence
  Synthetic
gagcuugggaagucgaagcugca

SEQ ID NO: 208925 - RNA, 24 nt, Artificial Sequence
  Synthetic
ugagcuugggaagucgaagcugca

SEQ ID NO: 208926 - RNA, 18 nt, Artificial Sequence
  Synthetic
agcagcccaccagcugca

SEQ ID NO: 208927 - RNA, 19 nt, Artificial Sequence
  Synthetic
aagcagcccaccagcugca

SEQ ID NO: 208928 - RNA, 20 nt, Artificial Sequence
  Synthetic
gaagcagcccaccagcugca

SEQ ID NO: 208929 - RNA, 21 nt, Artificial Sequence
  Synthetic
ggaagcagcccaccagcugca

SEQ ID NO: 208930 - RNA, 22 nt, Artificial Sequence
  Synthetic
aggaagcagcccaccagcugca

SEQ ID NO: 208931 - RNA, 23 nt, Artificial Sequence
  Synthetic
caggaagcagcccaccagcugca

SEQ ID NO: 208932 - RNA, 24 nt, Artificial Sequence
  Synthetic
gcaggaagcagcccaccagcugca

SEQ ID NO: 208933 - RNA, 18 nt, Artificial Sequence
  Synthetic
ggagcccugccagcugca

SEQ ID NO: 208934 - RNA, 19 nt, Artificial Sequence
  Synthetic
aggagcccugccagcugca

SEQ ID NO: 208935 - RNA, 20 nt, Artificial Sequence
  Synthetic
aaggagcccugccagcugca

SEQ ID NO: 208936 - RNA, 21 nt, Artificial Sequence
  Synthetic
uaaggagcccugccagcugca

SEQ ID NO: 208937 - RNA, 22 nt, Artificial Sequence
  Synthetic
guaaggagcccugccagcugca

SEQ ID NO: 208938 - RNA, 23 nt, Artificial Sequence
  Synthetic
uguaaggagcccugccagcugca

SEQ ID NO: 208939 - RNA, 24 nt, Artificial Sequence
  Synthetic
cuguaaggagcccugccagcugca

SEQ ID NO: 208940 - RNA, 18 nt, Artificial Sequence
  Synthetic
acugcaguugcagcugca

SEQ ID NO: 208941 - RNA, 19 nt, Artificial Sequence
  Synthetic
cacugcaguugcagcugca

SEQ ID NO: 208942 - RNA, 20 nt, Artificial Sequence
  Synthetic
gcacugcaguugcagcugca

SEQ ID NO: 208943 - RNA, 21 nt, Artificial Sequence
  Synthetic
ugcacugcaguugcagcugca

SEQ ID NO: 208944 - RNA, 22 nt, Artificial Sequence
  Synthetic
cugcacugcaguugcagcugca

SEQ ID NO: 208945 - RNA, 23 nt, Artificial Sequence
  Synthetic
ccugcacugcaguugcagcugca

SEQ ID NO: 208946 - RNA, 24 nt, Artificial Sequence
  Synthetic
uccugcacugcaguugcagcugca

SEQ ID NO: 208947 - RNA, 18 nt, Artificial Sequence
  Synthetic
aucagaacacuagcugca

SEQ ID NO: 208948 - RNA, 19 nt, Artificial Sequence
  Synthetic
aaucagaacacuagcugca

SEQ ID NO: 208949 - RNA, 20 nt, Artificial Sequence
  Synthetic
uaaucagaacacuagcugca

SEQ ID NO: 208950 - RNA, 21 nt, Artificial Sequence
  Synthetic
auaaucagaacacuagcugca

SEQ ID NO: 208951 - RNA, 22 nt, Artificial Sequence
  Synthetic
cauaaucagaacacuagcugca

SEQ ID NO: 208952 - RNA, 23 nt, Artificial Sequence
  Synthetic
ucauaaucagaacacuagcugca

SEQ ID NO: 208953 - RNA, 24 nt, Artificial Sequence
  Synthetic
uucauaaucagaacacuagcugca

SEQ ID NO: 208954 - RNA, 18 nt, Artificial Sequence
  Synthetic
guuuguggcaaggcugca

SEQ ID NO: 208955 - RNA, 19 nt, Artificial Sequence
  Synthetic
aguuuguggcaaggcugca

SEQ ID NO: 208956 - RNA, 20 nt, Artificial Sequence
  Synthetic
aaguuuguggcaaggcugca

SEQ ID NO: 208957 - RNA, 21 nt, Artificial Sequence
  Synthetic
aaaguuuguggcaaggcugca

SEQ ID NO: 208958 - RNA, 22 nt, Artificial Sequence
  Synthetic
gaaaguuuguggcaaggcugca

SEQ ID NO: 208959 - RNA, 23 nt, Artificial Sequence
  Synthetic
ugaaaguuuguggcaaggcugca

SEQ ID NO: 208960 - RNA, 24 nt, Artificial Sequence
  Synthetic
uugaaaguuuguggcaaggcugca

SEQ ID NO: 208961 - RNA, 18 nt, Artificial Sequence
  Synthetic
caaggcugcaaggcugca

SEQ ID NO: 208962 - RNA, 19 nt, Artificial Sequence
  Synthetic
ucaaggcugcaaggcugca

SEQ ID NO: 208963 - RNA, 20 nt, Artificial Sequence
  Synthetic
gucaaggcugcaaggcugca

SEQ ID NO: 208964 - RNA, 21 nt, Artificial Sequence
  Synthetic
ggucaaggcugcaaggcugca

SEQ ID NO: 208965 - RNA, 22 nt, Artificial Sequence
  Synthetic
aggucaaggcugcaaggcugca

SEQ ID NO: 208966 - RNA, 23 nt, Artificial Sequence
  Synthetic
gaggucaaggcugcaaggcugca

SEQ ID NO: 208967 - RNA, 24 nt, Artificial Sequence
  Synthetic
ggaggucaaggcugcaaggcugca

SEQ ID NO: 208968 - RNA, 18 nt, Artificial Sequence
  Synthetic
ugggaagucaaggcugca

SEQ ID NO: 208969 - RNA, 19 nt, Artificial Sequence
  Synthetic
cugggaagucaaggcugca

SEQ ID NO: 208970 - RNA, 20 nt, Artificial Sequence
  Synthetic
ccugggaagucaaggcugca

SEQ ID NO: 208971 - RNA, 21 nt, Artificial Sequence
  Synthetic
gccugggaagucaaggcugca

SEQ ID NO: 208972 - RNA, 22 nt, Artificial Sequence
  Synthetic
agccugggaagucaaggcugca

SEQ ID NO: 208973 - RNA, 23 nt, Artificial Sequence
  Synthetic
gagccugggaagucaaggcugca

SEQ ID NO: 208974 - RNA, 24 nt, Artificial Sequence
  Synthetic
ugagccugggaagucaaggcugca

SEQ ID NO: 208975 - RNA, 18 nt, Artificial Sequence
  Synthetic
guucaguucaaggcugca

SEQ ID NO: 208976 - RNA, 19 nt, Artificial Sequence
  Synthetic
aguucaguucaaggcugca

SEQ ID NO: 208977 - RNA, 20 nt, Artificial Sequence
  Synthetic
gaguucaguucaaggcugca

SEQ ID NO: 208978 - RNA, 21 nt, Artificial Sequence
  Synthetic
ggaguucaguucaaggcugca

SEQ ID NO: 208979 - RNA, 22 nt, Artificial Sequence
  Synthetic
aggaguucaguucaaggcugca

SEQ ID NO: 208980 - RNA, 23 nt, Artificial Sequence
  Synthetic
uaggaguucaguucaaggcugca

SEQ ID NO: 208981 - RNA, 24 nt, Artificial Sequence
  Synthetic
cuaggaguucaguucaaggcugca

SEQ ID NO: 208982 - RNA, 18 nt, Artificial Sequence
  Synthetic
caggaggcagaggcugca

SEQ ID NO: 208983 - RNA, 19 nt, Artificial Sequence
  Synthetic
ccaggaggcagaggcugca

SEQ ID NO: 208984 - RNA, 20 nt, Artificial Sequence
  Synthetic
cccaggaggcagaggcugca

SEQ ID NO: 208985 - RNA, 21 nt, Artificial Sequence
  Synthetic
acccaggaggcagaggcugca

SEQ ID NO: 208986 - RNA, 22 nt, Artificial Sequence
  Synthetic
aacccaggaggcagaggcugca

SEQ ID NO: 208987 - RNA, 23 nt, Artificial Sequence
  Synthetic
gaacccaggaggcagaggcugca

SEQ ID NO: 208988 - RNA, 24 nt, Artificial Sequence
  Synthetic
ugaacccaggaggcagaggcugca

SEQ ID NO: 208989 - RNA, 18 nt, Artificial Sequence
  Synthetic
caggaagucgaggcugca

SEQ ID NO: 208990 - RNA, 19 nt, Artificial Sequence
  Synthetic
ccaggaagucgaggcugca

SEQ ID NO: 208991 - RNA, 20 nt, Artificial Sequence
  Synthetic
cccaggaagucgaggcugca

SEQ ID NO: 208992 - RNA, 21 nt, Artificial Sequence
  Synthetic
acccaggaagucgaggcugca

SEQ ID NO: 208993 - RNA, 22 nt, Artificial Sequence
  Synthetic
aacccaggaagucgaggcugca

SEQ ID NO: 208994 - RNA, 23 nt, Artificial Sequence
  Synthetic
gaacccaggaagucgaggcugca

SEQ ID NO: 208995 - RNA, 24 nt, Artificial Sequence
  Synthetic
ugaacccaggaagucgaggcugca

SEQ ID NO: 208996 - RNA, 18 nt, Artificial Sequence
  Synthetic
uaggaagucgaggcugca

SEQ ID NO: 208997 - RNA, 19 nt, Artificial Sequence
  Synthetic
cuaggaagucgaggcugca

SEQ ID NO: 208998 - RNA, 20 nt, Artificial Sequence
  Synthetic
ccuaggaagucgaggcugca

SEQ ID NO: 208999 - RNA, 21 nt, Artificial Sequence
  Synthetic
gccuaggaagucgaggcugca

SEQ ID NO: 209000 - RNA, 22 nt, Artificial Sequence
  Synthetic
ugccuaggaagucgaggcugca

SEQ ID NO: 209001 - RNA, 23 nt, Artificial Sequence
  Synthetic
uugccuaggaagucgaggcugca

SEQ ID NO: 209002 - RNA, 24 nt, Artificial Sequence
  Synthetic
auugccuaggaagucgaggcugca

SEQ ID NO: 209003 - RNA, 18 nt, Artificial Sequence
  Synthetic
caggaguucgaggcugca

SEQ ID NO: 209004 - RNA, 19 nt, Artificial Sequence
  Synthetic
ccaggaguucgaggcugca

SEQ ID NO: 209005 - RNA, 20 nt, Artificial Sequence
  Synthetic
cccaggaguucgaggcugca

SEQ ID NO: 209006 - RNA, 21 nt, Artificial Sequence
  Synthetic
gcccaggaguucgaggcugca

SEQ ID NO: 209007 - RNA, 22 nt, Artificial Sequence
  Synthetic
ggcccaggaguucgaggcugca

SEQ ID NO: 209008 - RNA, 23 nt, Artificial Sequence
  Synthetic
gggcccaggaguucgaggcugca

SEQ ID NO: 209009 - RNA, 24 nt, Artificial Sequence
  Synthetic
ugggcccaggaguucgaggcugca

SEQ ID NO: 209010 - RNA, 18 nt, Artificial Sequence
  Synthetic
gauguuggugaggcugca

SEQ ID NO: 209011 - RNA, 19 nt, Artificial Sequence
  Synthetic
agauguuggugaggcugca

SEQ ID NO: 209012 - RNA, 20 nt, Artificial Sequence
  Synthetic
uagauguuggugaggcugca

SEQ ID NO: 209013 - RNA, 21 nt, Artificial Sequence
  Synthetic
auagauguuggugaggcugca

SEQ ID NO: 209014 - RNA, 22 nt, Artificial Sequence
  Synthetic
aauagauguuggugaggcugca

SEQ ID NO: 209015 - RNA, 23 nt, Artificial Sequence
  Synthetic
caauagauguuggugaggcugca

SEQ ID NO: 209016 - RNA, 24 nt, Artificial Sequence
  Synthetic
acaauagauguuggugaggcugca

SEQ ID NO: 209017 - RNA, 19 nt, Artificial Sequence
  Synthetic
ccaggaguuugaggcugca

SEQ ID NO: 209018 - RNA, 20 nt, Artificial Sequence
  Synthetic
cccaggaguuugaggcugca

SEQ ID NO: 209019 - RNA, 21 nt, Artificial Sequence
  Synthetic
gcccaggaguuugaggcugca

SEQ ID NO: 209020 - RNA, 22 nt, Artificial Sequence
  Synthetic
agcccaggaguuugaggcugca

SEQ ID NO: 209021 - RNA, 23 nt, Artificial Sequence
  Synthetic
gagcccaggaguuugaggcugca

SEQ ID NO: 209022 - RNA, 24 nt, Artificial Sequence
  Synthetic
ugagcccaggaguuugaggcugca

SEQ ID NO: 209023 - RNA, 18 nt, Artificial Sequence
  Synthetic
aggauggcaugggcugca

SEQ ID NO: 209024 - RNA, 19 nt, Artificial Sequence
  Synthetic
caggauggcaugggcugca

SEQ ID NO: 209025 - RNA, 20 nt, Artificial Sequence
  Synthetic
gcaggauggcaugggcugca

SEQ ID NO: 209026 - RNA, 21 nt, Artificial Sequence
  Synthetic
ggcaggauggcaugggcugca

SEQ ID NO: 209027 - RNA, 22 nt, Artificial Sequence
  Synthetic
aggcaggauggcaugggcugca

SEQ ID NO: 209028 - RNA, 23 nt, Artificial Sequence
  Synthetic
gaggcaggauggcaugggcugca

SEQ ID NO: 209029 - RNA, 24 nt, Artificial Sequence
  Synthetic
ggaggcaggauggcaugggcugca

SEQ ID NO: 209030 - RNA, 18 nt, Artificial Sequence
  Synthetic
uugggggaacuggcugca

SEQ ID NO: 209031 - RNA, 19 nt, Artificial Sequence
  Synthetic
cuugggggaacuggcugca

SEQ ID NO: 209032 - RNA, 20 nt, Artificial Sequence
  Synthetic
gcuugggggaacuggcugca

SEQ ID NO: 209033 - RNA, 21 nt, Artificial Sequence
  Synthetic
ugcuugggggaacuggcugca

SEQ ID NO: 209034 - RNA, 22 nt, Artificial Sequence
  Synthetic
uugcuugggggaacuggcugca

SEQ ID NO: 209035 - RNA, 23 nt, Artificial Sequence
  Synthetic
uuugcuugggggaacuggcugca

SEQ ID NO: 209036 - RNA, 24 nt, Artificial Sequence
  Synthetic
uuuugcuugggggaacuggcugca

SEQ ID NO: 209037 - RNA, 18 nt, Artificial Sequence
  Synthetic
aacuauuuauuggcugca

SEQ ID NO: 209038 - RNA, 19 nt, Artificial Sequence
  Synthetic
caacuauuuauuggcugca

SEQ ID NO: 209039 - RNA, 20 nt, Artificial Sequence
  Synthetic
acaacuauuuauuggcugca

SEQ ID NO: 209040 - RNA, 21 nt, Artificial Sequence
  Synthetic
uacaacuauuuauuggcugca

SEQ ID NO: 209041 - RNA, 22 nt, Artificial Sequence
  Synthetic
auacaacuauuuauuggcugca

SEQ ID NO: 209042 - RNA, 23 nt, Artificial Sequence
  Synthetic
uauacaacuauuuauuggcugca

SEQ ID NO: 209043 - RNA, 24 nt, Artificial Sequence
  Synthetic
uuauacaacuauuuauuggcugca

SEQ ID NO: 209044 - RNA, 18 nt, Artificial Sequence
  Synthetic
gacacauuugcugcugca

SEQ ID NO: 209045 - RNA, 19 nt, Artificial Sequence
  Synthetic
agacacauuugcugcugca

SEQ ID NO: 209046 - RNA, 20 nt, Artificial Sequence
  Synthetic
cagacacauuugcugcugca

SEQ ID NO: 209047 - RNA, 21 nt, Artificial Sequence
  Synthetic
ucagacacauuugcugcugca

SEQ ID NO: 209048 - RNA, 22 nt, Artificial Sequence
  Synthetic
uucagacacauuugcugcugca

SEQ ID NO: 209049 - RNA, 23 nt, Artificial Sequence
  Synthetic
uuucagacacauuugcugcugca

SEQ ID NO: 209050 - RNA, 24 nt, Artificial Sequence
  Synthetic
cuuucagacacauuugcugcugca

SEQ ID NO: 209051 - RNA, 18 nt, Artificial Sequence
  Synthetic
auugugaauagugcugca

SEQ ID NO: 209052 - RNA, 19 nt, Artificial Sequence
  Synthetic
uauugugaauagugcugca

SEQ ID NO: 209053 - RNA, 20 nt, Artificial Sequence
  Synthetic
cuauugugaauagugcugca

SEQ ID NO: 209054 - RNA, 21 nt, Artificial Sequence
  Synthetic
gcuauugugaauagugcugca

SEQ ID NO: 209055 - RNA, 22 nt, Artificial Sequence
  Synthetic
ugcuauugugaauagugcugca

SEQ ID NO: 209056 - RNA, 23 nt, Artificial Sequence
  Synthetic
uugcuauugugaauagugcugca

SEQ ID NO: 209057 - RNA, 24 nt, Artificial Sequence
  Synthetic
uuugcuauugugaauagugcugca

SEQ ID NO: 209058 - RNA, 18 nt, Artificial Sequence
  Synthetic
uccauccauguugcugca

SEQ ID NO: 209059 - RNA, 19 nt, Artificial Sequence
  Synthetic
cuccauccauguugcugca

SEQ ID NO: 209060 - RNA, 20 nt, Artificial Sequence
  Synthetic
gcuccauccauguugcugca

SEQ ID NO: 209061 - RNA, 21 nt, Artificial Sequence
  Synthetic
agcuccauccauguugcugca

SEQ ID NO: 209062 - RNA, 22 nt, Artificial Sequence
  Synthetic
cagcuccauccauguugcugca

SEQ ID NO: 209063 - RNA, 23 nt, Artificial Sequence
  Synthetic
ccagcuccauccauguugcugca

SEQ ID NO: 209064 - RNA, 24 nt, Artificial Sequence
  Synthetic
uccagcuccauccauguugcugca

SEQ ID NO: 209065 - RNA, 18 nt, Artificial Sequence
  Synthetic
ugcauccauguugcugca

SEQ ID NO: 209066 - RNA, 19 nt, Artificial Sequence
  Synthetic
cugcauccauguugcugca

SEQ ID NO: 209067 - RNA, 20 nt, Artificial Sequence
  Synthetic
gcugcauccauguugcugca

SEQ ID NO: 209068 - RNA, 21 nt, Artificial Sequence
  Synthetic
agcugcauccauguugcugca

SEQ ID NO: 209069 - RNA, 22 nt, Artificial Sequence
  Synthetic
cagcugcauccauguugcugca

SEQ ID NO: 209070 - RNA, 23 nt, Artificial Sequence
  Synthetic
ccagcugcauccauguugcugca

SEQ ID NO: 209071 - RNA, 24 nt, Artificial Sequence
  Synthetic
uccagcugcauccauguugcugca

SEQ ID NO: 209072 - RNA, 18 nt, Artificial Sequence
  Synthetic
aaacugcccugaucugca

SEQ ID NO: 209073 - RNA, 19 nt, Artificial Sequence
  Synthetic
caaacugcccugaucugca

SEQ ID NO: 209074 - RNA, 20 nt, Artificial Sequence
  Synthetic
gcaaacugcccugaucugca

SEQ ID NO: 209075 - RNA, 21 nt, Artificial Sequence
  Synthetic
ugcaaacugcccugaucugca

SEQ ID NO: 209076 - RNA, 22 nt, Artificial Sequence
  Synthetic
gugcaaacugcccugaucugca

SEQ ID NO: 209077 - RNA, 23 nt, Artificial Sequence
  Synthetic
ugugcaaacugcccugaucugca

SEQ ID NO: 209078 - RNA, 24 nt, Artificial Sequence
  Synthetic
gugugcaaacugcccugaucugca

SEQ ID NO: 209079 - RNA, 18 nt, Artificial Sequence
  Synthetic
ugcaauucugacucugca

SEQ ID NO: 209080 - RNA, 19 nt, Artificial Sequence
  Synthetic
augcaauucugacucugca

SEQ ID NO: 209081 - RNA, 20 nt, Artificial Sequence
  Synthetic
gaugcaauucugacucugca

SEQ ID NO: 209082 - RNA, 21 nt, Artificial Sequence
  Synthetic
agaugcaauucugacucugca

SEQ ID NO: 209083 - RNA, 22 nt, Artificial Sequence
  Synthetic
aagaugcaauucugacucugca

SEQ ID NO: 209084 - RNA, 23 nt, Artificial Sequence
  Synthetic
caagaugcaauucugacucugca

SEQ ID NO: 209085 - RNA, 24 nt, Artificial Sequence
  Synthetic
ucaagaugcaauucugacucugca

SEQ ID NO: 209086 - RNA, 18 nt, Artificial Sequence
  Synthetic
guaaaggcaggcucugca

SEQ ID NO: 209087 - RNA, 19 nt, Artificial Sequence
  Synthetic
gguaaaggcaggcucugca

SEQ ID NO: 209088 - RNA, 20 nt, Artificial Sequence
  Synthetic
ugguaaaggcaggcucugca

SEQ ID NO: 209089 - RNA, 21 nt, Artificial Sequence
  Synthetic
augguaaaggcaggcucugca

SEQ ID NO: 209090 - RNA, 22 nt, Artificial Sequence
  Synthetic
gaugguaaaggcaggcucugca

SEQ ID NO: 209091 - RNA, 23 nt, Artificial Sequence
  Synthetic
agaugguaaaggcaggcucugca

SEQ ID NO: 209092 - RNA, 24 nt, Artificial Sequence
  Synthetic
uagaugguaaaggcaggcucugca

SEQ ID NO: 209093 - RNA, 18 nt, Artificial Sequence
  Synthetic
uugcugagaggcucugca

SEQ ID NO: 209094 - RNA, 19 nt, Artificial Sequence
  Synthetic
auugcugagaggcucugca

SEQ ID NO: 209095 - RNA, 20 nt, Artificial Sequence
  Synthetic
uauugcugagaggcucugca

SEQ ID NO: 209096 - RNA, 21 nt, Artificial Sequence
  Synthetic
guauugcugagaggcucugca

SEQ ID NO: 209097 - RNA, 22 nt, Artificial Sequence
  Synthetic
aguauugcugagaggcucugca

SEQ ID NO: 209098 - RNA, 23 nt, Artificial Sequence
  Synthetic
uaguauugcugagaggcucugca

SEQ ID NO: 209099 - RNA, 24 nt, Artificial Sequence
  Synthetic
auaguauugcugagaggcucugca

SEQ ID NO: 209100 - RNA, 18 nt, Artificial Sequence
  Synthetic
agcaauuuuacuucugca

SEQ ID NO: 209101 - RNA, 19 nt, Artificial Sequence
  Synthetic
aagcaauuuuacuucugca

SEQ ID NO: 209102 - RNA, 20 nt, Artificial Sequence
  Synthetic
aaagcaauuuuacuucugca

SEQ ID NO: 209103 - RNA, 21 nt, Artificial Sequence
  Synthetic
caaagcaauuuuacuucugca

SEQ ID NO: 209104 - RNA, 22 nt, Artificial Sequence
  Synthetic
gcaaagcaauuuuacuucugca

SEQ ID NO: 209105 - RNA, 23 nt, Artificial Sequence
  Synthetic
agcaaagcaauuuuacuucugca

SEQ ID NO: 209106 - RNA, 24 nt, Artificial Sequence
  Synthetic
uagcaaagcaauuuuacuucugca

SEQ ID NO: 209107 - RNA, 18 nt, Artificial Sequence
  Synthetic
gcucagauggcuucugca

SEQ ID NO: 209108 - RNA, 19 nt, Artificial Sequence
  Synthetic
agcucagauggcuucugca

SEQ ID NO: 209109 - RNA, 20 nt, Artificial Sequence
  Synthetic
gagcucagauggcuucugca

SEQ ID NO: 209110 - RNA, 21 nt, Artificial Sequence
  Synthetic
ggagcucagauggcuucugca

SEQ ID NO: 209111 - RNA, 22 nt, Artificial Sequence
  Synthetic
gggagcucagauggcuucugca

SEQ ID NO: 209112 - RNA, 23 nt, Artificial Sequence
  Synthetic
agggagcucagauggcuucugca

SEQ ID NO: 209113 - RNA, 24 nt, Artificial Sequence
  Synthetic
aagggagcucagauggcuucugca

SEQ ID NO: 209114 - RNA, 18 nt, Artificial Sequence
  Synthetic
cuucccuugucuucugca

SEQ ID NO: 209115 - RNA, 19 nt, Artificial Sequence
  Synthetic
ucuucccuugucuucugca

SEQ ID NO: 209116 - RNA, 20 nt, Artificial Sequence
  Synthetic
uucuucccuugucuucugca

SEQ ID NO: 209117 - RNA, 21 nt, Artificial Sequence
  Synthetic
uuucuucccuugucuucugca

SEQ ID NO: 209118 - RNA, 22 nt, Artificial Sequence
  Synthetic
uuuucuucccuugucuucugca

SEQ ID NO: 209119 - RNA, 23 nt, Artificial Sequence
  Synthetic
uuuuucuucccuugucuucugca

SEQ ID NO: 209120 - RNA, 24 nt, Artificial Sequence
  Synthetic
cuuuuucuucccuugucuucugca

SEQ ID NO: 209121 - RNA, 18 nt, Artificial Sequence
  Synthetic
caacagacuguuucugca

SEQ ID NO: 209122 - RNA, 19 nt, Artificial Sequence
  Synthetic
ucaacagacuguuucugca

SEQ ID NO: 209123 - RNA, 20 nt, Artificial Sequence
  Synthetic
aucaacagacuguuucugca

SEQ ID NO: 209124 - RNA, 21 nt, Artificial Sequence
  Synthetic
gaucaacagacuguuucugca

SEQ ID NO: 209125 - RNA, 22 nt, Artificial Sequence
  Synthetic
ggaucaacagacuguuucugca

SEQ ID NO: 209126 - RNA, 23 nt, Artificial Sequence
  Synthetic
gggaucaacagacuguuucugca

SEQ ID NO: 209127 - RNA, 24 nt, Artificial Sequence
  Synthetic
agggaucaacagacuguuucugca

SEQ ID NO: 209128 - RNA, 18 nt, Artificial Sequence
  Synthetic
cacagacgaagaagugca

SEQ ID NO: 209129 - RNA, 19 nt, Artificial Sequence
  Synthetic
gcacagacgaagaagugca

SEQ ID NO: 209130 - RNA, 20 nt, Artificial Sequence
  Synthetic
ugcacagacgaagaagugca

SEQ ID NO: 209131 - RNA, 21 nt, Artificial Sequence
  Synthetic
uugcacagacgaagaagugca

SEQ ID NO: 209132 - RNA, 22 nt, Artificial Sequence
  Synthetic
auugcacagacgaagaagugca

SEQ ID NO: 209133 - RNA, 23 nt, Artificial Sequence
  Synthetic
gauugcacagacgaagaagugca

SEQ ID NO: 209134 - RNA, 24 nt, Artificial Sequence
  Synthetic
agauugcacagacgaagaagugca

SEQ ID NO: 209135 - RNA, 18 nt, Artificial Sequence
  Synthetic
uaauggaagagaagugca

SEQ ID NO: 209136 - RNA, 19 nt, Artificial Sequence
  Synthetic
auaauggaagagaagugca

SEQ ID NO: 209137 - RNA, 20 nt, Artificial Sequence
  Synthetic
aauaauggaagagaagugca

SEQ ID NO: 209138 - RNA, 21 nt, Artificial Sequence
  Synthetic
caauaauggaagagaagugca

SEQ ID NO: 209139 - RNA, 22 nt, Artificial Sequence
  Synthetic
acaauaauggaagagaagugca

SEQ ID NO: 209140 - RNA, 23 nt, Artificial Sequence
  Synthetic
cacaauaauggaagagaagugca

SEQ ID NO: 209141 - RNA, 24 nt, Artificial Sequence
  Synthetic
gcacaauaauggaagagaagugca

SEQ ID NO: 209142 - RNA, 18 nt, Artificial Sequence
  Synthetic
aaggcaaggggaagugca

SEQ ID NO: 209143 - RNA, 19 nt, Artificial Sequence
  Synthetic
aaaggcaaggggaagugca

SEQ ID NO: 209144 - RNA, 20 nt, Artificial Sequence
  Synthetic
gaaaggcaaggggaagugca

SEQ ID NO: 209145 - RNA, 21 nt, Artificial Sequence
  Synthetic
ggaaaggcaaggggaagugca

SEQ ID NO: 209146 - RNA, 22 nt, Artificial Sequence
  Synthetic
uggaaaggcaaggggaagugca

SEQ ID NO: 209147 - RNA, 23 nt, Artificial Sequence
  Synthetic
auggaaaggcaaggggaagugca

SEQ ID NO: 209148 - RNA, 24 nt, Artificial Sequence
  Synthetic
aauggaaaggcaaggggaagugca

SEQ ID NO: 209149 - RNA, 18 nt, Artificial Sequence
  Synthetic
uuaauguacugaagugca

SEQ ID NO: 209150 - RNA, 19 nt, Artificial Sequence
  Synthetic
auuaauguacugaagugca

SEQ ID NO: 209151 - RNA, 20 nt, Artificial Sequence
  Synthetic
aauuaauguacugaagugca

SEQ ID NO: 209152 - RNA, 21 nt, Artificial Sequence
  Synthetic
gaauuaauguacugaagugca

SEQ ID NO: 209153 - RNA, 22 nt, Artificial Sequence
  Synthetic
cgaauuaauguacugaagugca

SEQ ID NO: 209154 - RNA, 23 nt, Artificial Sequence
  Synthetic
gcgaauuaauguacugaagugca

SEQ ID NO: 209155 - RNA, 24 nt, Artificial Sequence
  Synthetic
ugcgaauuaauguacugaagugca

SEQ ID NO: 209156 - RNA, 18 nt, Artificial Sequence
  Synthetic
agauuuuaucuaagugca

SEQ ID NO: 209157 - RNA, 19 nt, Artificial Sequence
  Synthetic
uagauuuuaucuaagugca

SEQ ID NO: 209158 - RNA, 20 nt, Artificial Sequence
  Synthetic
auagauuuuaucuaagugca

SEQ ID NO: 209159 - RNA, 21 nt, Artificial Sequence
  Synthetic
uauagauuuuaucuaagugca

SEQ ID NO: 209160 - RNA, 22 nt, Artificial Sequence
  Synthetic
guauagauuuuaucuaagugca

SEQ ID NO: 209161 - RNA, 23 nt, Artificial Sequence
  Synthetic
aguauagauuuuaucuaagugca

SEQ ID NO: 209162 - RNA, 24 nt, Artificial Sequence
  Synthetic
aaguauagauuuuaucuaagugca

SEQ ID NO: 209163 - RNA, 18 nt, Artificial Sequence
  Synthetic
caugaacuauacagugca

SEQ ID NO: 209164 - RNA, 19 nt, Artificial Sequence
  Synthetic
ccaugaacuauacagugca

SEQ ID NO: 209165 - RNA, 20 nt, Artificial Sequence
  Synthetic
uccaugaacuauacagugca

SEQ ID NO: 209166 - RNA, 21 nt, Artificial Sequence
  Synthetic
uuccaugaacuauacagugca

SEQ ID NO: 209167 - RNA, 22 nt, Artificial Sequence
  Synthetic
guuccaugaacuauacagugca

SEQ ID NO: 209168 - RNA, 23 nt, Artificial Sequence
  Synthetic
uguuccaugaacuauacagugca

SEQ ID NO: 209169 - RNA, 24 nt, Artificial Sequence
  Synthetic
uuguuccaugaacuauacagugca

SEQ ID NO: 209170 - RNA, 18 nt, Artificial Sequence
  Synthetic
agaauuaugaucagugca

SEQ ID NO: 209171 - RNA, 19 nt, Artificial Sequence
  Synthetic
aagaauuaugaucagugca

SEQ ID NO: 209172 - RNA, 20 nt, Artificial Sequence
  Synthetic
gaagaauuaugaucagugca

SEQ ID NO: 209173 - RNA, 21 nt, Artificial Sequence
  Synthetic
ugaagaauuaugaucagugca

SEQ ID NO: 209174 - RNA, 22 nt, Artificial Sequence
  Synthetic
augaagaauuaugaucagugca

SEQ ID NO: 209175 - RNA, 23 nt, Artificial Sequence
  Synthetic
gaugaagaauuaugaucagugca

SEQ ID NO: 209176 - RNA, 24 nt, Artificial Sequence
  Synthetic
agaugaagaauuaugaucagugca

SEQ ID NO: 209177 - RNA, 18 nt, Artificial Sequence
  Synthetic
gccuucuaauucagugca

SEQ ID NO: 209178 - RNA, 19 nt, Artificial Sequence
  Synthetic
ugccuucuaauucagugca

SEQ ID NO: 209179 - RNA, 20 nt, Artificial Sequence
  Synthetic
gugccuucuaauucagugca

SEQ ID NO: 209180 - RNA, 21 nt, Artificial Sequence
  Synthetic
agugccuucuaauucagugca

SEQ ID NO: 209181 - RNA, 22 nt, Artificial Sequence
  Synthetic
uagugccuucuaauucagugca

SEQ ID NO: 209182 - RNA, 23 nt, Artificial Sequence
  Synthetic
guagugccuucuaauucagugca

SEQ ID NO: 209183 - RNA, 24 nt, Artificial Sequence
  Synthetic
uguagugccuucuaauucagugca

SEQ ID NO: 209184 - RNA, 18 nt, Artificial Sequence
  Synthetic
uuggcauaguggagugca

SEQ ID NO: 209185 - RNA, 19 nt, Artificial Sequence
  Synthetic
cuuggcauaguggagugca

SEQ ID NO: 209186 - RNA, 20 nt, Artificial Sequence
  Synthetic
acuuggcauaguggagugca

SEQ ID NO: 209187 - RNA, 21 nt, Artificial Sequence
  Synthetic
aacuuggcauaguggagugca

SEQ ID NO: 209188 - RNA, 22 nt, Artificial Sequence
  Synthetic
uaacuuggcauaguggagugca

SEQ ID NO: 209189 - RNA, 23 nt, Artificial Sequence
  Synthetic
uuaacuuggcauaguggagugca

SEQ ID NO: 209190 - RNA, 24 nt, Artificial Sequence
  Synthetic
auuaacuuggcauaguggagugca

SEQ ID NO: 209191 - RNA, 18 nt, Artificial Sequence
  Synthetic
cacuguucuuugagugca

SEQ ID NO: 209192 - RNA, 19 nt, Artificial Sequence
  Synthetic
gcacuguucuuugagugca

SEQ ID NO: 209193 - RNA, 20 nt, Artificial Sequence
  Synthetic
ugcacuguucuuugagugca

SEQ ID NO: 209194 - RNA, 21 nt, Artificial Sequence
  Synthetic
cugcacuguucuuugagugca

SEQ ID NO: 209195 - RNA, 22 nt, Artificial Sequence
  Synthetic
ucugcacuguucuuugagugca

SEQ ID NO: 209196 - RNA, 23 nt, Artificial Sequence
  Synthetic
aucugcacuguucuuugagugca

SEQ ID NO: 209197 - RNA, 24 nt, Artificial Sequence
  Synthetic
caucugcacuguucuuugagugca

SEQ ID NO: 209198 - RNA, 18 nt, Artificial Sequence
  Synthetic
gaaagccagucuagugca

SEQ ID NO: 209199 - RNA, 19 nt, Artificial Sequence
  Synthetic
agaaagccagucuagugca

SEQ ID NO: 209200 - RNA, 20 nt, Artificial Sequence
  Synthetic
aagaaagccagucuagugca

SEQ ID NO: 209201 - RNA, 21 nt, Artificial Sequence
  Synthetic
caagaaagccagucuagugca

SEQ ID NO: 209202 - RNA, 22 nt, Artificial Sequence
  Synthetic
ucaagaaagccagucuagugca

SEQ ID NO: 209203 - RNA, 23 nt, Artificial Sequence
  Synthetic
cucaagaaagccagucuagugca

SEQ ID NO: 209204 - RNA, 24 nt, Artificial Sequence
  Synthetic
acucaagaaagccagucuagugca

SEQ ID NO: 209205 - RNA, 18 nt, Artificial Sequence
  Synthetic
uucauccauguccgugca

SEQ ID NO: 209206 - RNA, 19 nt, Artificial Sequence
  Synthetic
cuucauccauguccgugca

SEQ ID NO: 209207 - RNA, 20 nt, Artificial Sequence
  Synthetic
gcuucauccauguccgugca

SEQ ID NO: 209208 - RNA, 21 nt, Artificial Sequence
  Synthetic
agcuucauccauguccgugca

SEQ ID NO: 209209 - RNA, 22 nt, Artificial Sequence
  Synthetic
cagcuucauccauguccgugca

SEQ ID NO: 209210 - RNA, 23 nt, Artificial Sequence
  Synthetic
ccagcuucauccauguccgugca

SEQ ID NO: 209211 - RNA, 24 nt, Artificial Sequence
  Synthetic
uccagcuucauccauguccgugca

SEQ ID NO: 209212 - RNA, 18 nt, Artificial Sequence
  Synthetic
aucaauucacugcgugca

SEQ ID NO: 209213 - RNA, 19 nt, Artificial Sequence
  Synthetic
gaucaauucacugcgugca

SEQ ID NO: 209214 - RNA, 20 nt, Artificial Sequence
  Synthetic
ugaucaauucacugcgugca

SEQ ID NO: 209215 - RNA, 21 nt, Artificial Sequence
  Synthetic
gugaucaauucacugcgugca

SEQ ID NO: 209216 - RNA, 22 nt, Artificial Sequence
  Synthetic
agugaucaauucacugcgugca

SEQ ID NO: 209217 - RNA, 23 nt, Artificial Sequence
  Synthetic
cagugaucaauucacugcgugca

SEQ ID NO: 209218 - RNA, 24 nt, Artificial Sequence
  Synthetic
gcagugaucaauucacugcgugca

SEQ ID NO: 209219 - RNA, 18 nt, Artificial Sequence
  Synthetic
aagguggugacaggugca

SEQ ID NO: 209220 - RNA, 19 nt, Artificial Sequence
  Synthetic
caagguggugacaggugca

SEQ ID NO: 209221 - RNA, 20 nt, Artificial Sequence
  Synthetic
ucaagguggugacaggugca

SEQ ID NO: 209222 - RNA, 21 nt, Artificial Sequence
  Synthetic
cucaagguggugacaggugca

SEQ ID NO: 209223 - RNA, 22 nt, Artificial Sequence
  Synthetic
gcucaagguggugacaggugca

SEQ ID NO: 209224 - RNA, 23 nt, Artificial Sequence
  Synthetic
ugcucaagguggugacaggugca

SEQ ID NO: 209225 - RNA, 24 nt, Artificial Sequence
  Synthetic
uugcucaagguggugacaggugca

SEQ ID NO: 209226 - RNA, 18 nt, Artificial Sequence
  Synthetic
caugacaucucaggugca

SEQ ID NO: 209227 - RNA, 19 nt, Artificial Sequence
  Synthetic
ucaugacaucucaggugca

SEQ ID NO: 209228 - RNA, 20 nt, Artificial Sequence
  Synthetic
cucaugacaucucaggugca

SEQ ID NO: 209229 - RNA, 21 nt, Artificial Sequence
  Synthetic
ucucaugacaucucaggugca

SEQ ID NO: 209230 - RNA, 22 nt, Artificial Sequence
  Synthetic
cucucaugacaucucaggugca

SEQ ID NO: 209231 - RNA, 23 nt, Artificial Sequence
  Synthetic
ucucucaugacaucucaggugca

SEQ ID NO: 209232 - RNA, 24 nt, Artificial Sequence
  Synthetic
cucucucaugacaucucaggugca

SEQ ID NO: 209233 - RNA, 18 nt, Artificial Sequence
  Synthetic
ccgggagguggaggugca

SEQ ID NO: 209234 - RNA, 19 nt, Artificial Sequence
  Synthetic
cccgggagguggaggugca

SEQ ID NO: 209235 - RNA, 20 nt, Artificial Sequence
  Synthetic
acccgggagguggaggugca

SEQ ID NO: 209236 - RNA, 21 nt, Artificial Sequence
  Synthetic
aacccgggagguggaggugca

SEQ ID NO: 209237 - RNA, 22 nt, Artificial Sequence
  Synthetic
gaacccgggagguggaggugca

SEQ ID NO: 209238 - RNA, 23 nt, Artificial Sequence
  Synthetic
ugaacccgggagguggaggugca

SEQ ID NO: 209239 - RNA, 24 nt, Artificial Sequence
  Synthetic
uugaacccgggagguggaggugca

SEQ ID NO: 209240 - RNA, 18 nt, Artificial Sequence
  Synthetic
gagaggguaccuggugca

SEQ ID NO: 209241 - RNA, 19 nt, Artificial Sequence
  Synthetic
agagaggguaccuggugca

SEQ ID NO: 209242 - RNA, 20 nt, Artificial Sequence
  Synthetic
gagagaggguaccuggugca

SEQ ID NO: 209243 - RNA, 21 nt, Artificial Sequence
  Synthetic
agagagaggguaccuggugca

SEQ ID NO: 209244 - RNA, 22 nt, Artificial Sequence
  Synthetic
cagagagaggguaccuggugca

SEQ ID NO: 209245 - RNA, 23 nt, Artificial Sequence
  Synthetic
acagagagaggguaccuggugca

SEQ ID NO: 209246 - RNA, 24 nt, Artificial Sequence
  Synthetic
cacagagagaggguaccuggugca

SEQ ID NO: 209247 - RNA, 18 nt, Artificial Sequence
  Synthetic
ggggagagagguggugca

SEQ ID NO: 209248 - RNA, 19 nt, Artificial Sequence
  Synthetic
uggggagagagguggugca

SEQ ID NO: 209249 - RNA, 20 nt, Artificial Sequence
  Synthetic
uuggggagagagguggugca

SEQ ID NO: 209250 - RNA, 21 nt, Artificial Sequence
  Synthetic
guuggggagagagguggugca

SEQ ID NO: 209251 - RNA, 22 nt, Artificial Sequence
  Synthetic
uguuggggagagagguggugca

SEQ ID NO: 209252 - RNA, 23 nt, Artificial Sequence
  Synthetic
auguuggggagagagguggugca

SEQ ID NO: 209253 - RNA, 24 nt, Artificial Sequence
  Synthetic
uauguuggggagagagguggugca

SEQ ID NO: 209254 - RNA, 18 nt, Artificial Sequence
  Synthetic
agcucaaucuaaugugca

SEQ ID NO: 209255 - RNA, 19 nt, Artificial Sequence
  Synthetic
cagcucaaucuaaugugca

SEQ ID NO: 209256 - RNA, 20 nt, Artificial Sequence
  Synthetic
ucagcucaaucuaaugugca

SEQ ID NO: 209257 - RNA, 21 nt, Artificial Sequence
  Synthetic
cucagcucaaucuaaugugca

SEQ ID NO: 209258 - RNA, 22 nt, Artificial Sequence
  Synthetic
acucagcucaaucuaaugugca

SEQ ID NO: 209259 - RNA, 23 nt, Artificial Sequence
  Synthetic
uacucagcucaaucuaaugugca

SEQ ID NO: 209260 - RNA, 24 nt, Artificial Sequence
  Synthetic
cuacucagcucaaucuaaugugca

SEQ ID NO: 209261 - RNA, 18 nt, Artificial Sequence
  Synthetic
ggcaagagagcaugugca

SEQ ID NO: 209262 - RNA, 19 nt, Artificial Sequence
  Synthetic
aggcaagagagcaugugca

SEQ ID NO: 209263 - RNA, 20 nt, Artificial Sequence
  Synthetic
caggcaagagagcaugugca

SEQ ID NO: 209264 - RNA, 21 nt, Artificial Sequence
  Synthetic
gcaggcaagagagcaugugca

SEQ ID NO: 209265 - RNA, 22 nt, Artificial Sequence
  Synthetic
agcaggcaagagagcaugugca

SEQ ID NO: 209266 - RNA, 23 nt, Artificial Sequence
  Synthetic
cagcaggcaagagagcaugugca

SEQ ID NO: 209267 - RNA, 24 nt, Artificial Sequence
  Synthetic
acagcaggcaagagagcaugugca

SEQ ID NO: 209268 - RNA, 18 nt, Artificial Sequence
  Synthetic
aaaagaaaaugaugugca

SEQ ID NO: 209269 - RNA, 19 nt, Artificial Sequence
  Synthetic
caaaagaaaaugaugugca

SEQ ID NO: 209270 - RNA, 20 nt, Artificial Sequence
  Synthetic
gcaaaagaaaaugaugugca

SEQ ID NO: 209271 - RNA, 21 nt, Artificial Sequence
  Synthetic
ugcaaaagaaaaugaugugca

SEQ ID NO: 209272 - RNA, 22 nt, Artificial Sequence
  Synthetic
cugcaaaagaaaaugaugugca

SEQ ID NO: 209273 - RNA, 23 nt, Artificial Sequence
  Synthetic
gcugcaaaagaaaaugaugugca

SEQ ID NO: 209274 - RNA, 24 nt, Artificial Sequence
  Synthetic
agcugcaaaagaaaaugaugugca

SEQ ID NO: 209275 - RNA, 18 nt, Artificial Sequence
  Synthetic
uaauugcaagacugugca

SEQ ID NO: 209276 - RNA, 19 nt, Artificial Sequence
  Synthetic
guaauugcaagacugugca

SEQ ID NO: 209277 - RNA, 20 nt, Artificial Sequence
  Synthetic
aguaauugcaagacugugca

SEQ ID NO: 209278 - RNA, 21 nt, Artificial Sequence
  Synthetic
aaguaauugcaagacugugca

SEQ ID NO: 209279 - RNA, 22 nt, Artificial Sequence
  Synthetic
caaguaauugcaagacugugca

SEQ ID NO: 209280 - RNA, 23 nt, Artificial Sequence
  Synthetic
ucaaguaauugcaagacugugca

SEQ ID NO: 209281 - RNA, 24 nt, Artificial Sequence
  Synthetic
aucaaguaauugcaagacugugca

SEQ ID NO: 209282 - RNA, 18 nt, Artificial Sequence
  Synthetic
auacagcauagcugugca

SEQ ID NO: 209283 - RNA, 19 nt, Artificial Sequence
  Synthetic
aauacagcauagcugugca

SEQ ID NO: 209284 - RNA, 20 nt, Artificial Sequence
  Synthetic
caauacagcauagcugugca

SEQ ID NO: 209285 - RNA, 21 nt, Artificial Sequence
  Synthetic
ucaauacagcauagcugugca

SEQ ID NO: 209286 - RNA, 22 nt, Artificial Sequence
  Synthetic
aucaauacagcauagcugugca

SEQ ID NO: 209287 - RNA, 23 nt, Artificial Sequence
  Synthetic
uaucaauacagcauagcugugca

SEQ ID NO: 209288 - RNA, 24 nt, Artificial Sequence
  Synthetic
auaucaauacagcauagcugugca

SEQ ID NO: 209289 - RNA, 18 nt, Artificial Sequence
  Synthetic
gaagugugggggugugca

SEQ ID NO: 209290 - RNA, 19 nt, Artificial Sequence
  Synthetic
ugaagugugggggugugca

SEQ ID NO: 209291 - RNA, 20 nt, Artificial Sequence
  Synthetic
cugaagugugggggugugca

SEQ ID NO: 209292 - RNA, 21 nt, Artificial Sequence
  Synthetic
acugaagugugggggugugca

SEQ ID NO: 209293 - RNA, 22 nt, Artificial Sequence
  Synthetic
gacugaagugugggggugugca

SEQ ID NO: 209294 - RNA, 23 nt, Artificial Sequence
  Synthetic
agacugaagugugggggugugca

SEQ ID NO: 209295 - RNA, 24 nt, Artificial Sequence
  Synthetic
gagacugaagugugggggugugca

SEQ ID NO: 209296 - RNA, 18 nt, Artificial Sequence
  Synthetic
uuauguuccuugugugca

SEQ ID NO: 209297 - RNA, 19 nt, Artificial Sequence
  Synthetic
uuuauguuccuugugugca

SEQ ID NO: 209298 - RNA, 20 nt, Artificial Sequence
  Synthetic
auuuauguuccuugugugca

SEQ ID NO: 209299 - RNA, 21 nt, Artificial Sequence
  Synthetic
aauuuauguuccuugugugca

SEQ ID NO: 209300 - RNA, 22 nt, Artificial Sequence
  Synthetic
gaauuuauguuccuugugugca

SEQ ID NO: 209301 - RNA, 23 nt, Artificial Sequence
  Synthetic
ugaauuuauguuccuugugugca

SEQ ID NO: 209302 - RNA, 24 nt, Artificial Sequence
  Synthetic
uugaauuuauguuccuugugugca

SEQ ID NO: 209303 - RNA, 18 nt, Artificial Sequence
  Synthetic
aaauaggauuauugugca

SEQ ID NO: 209304 - RNA, 19 nt, Artificial Sequence
  Synthetic
uaaauaggauuauugugca

SEQ ID NO: 209305 - RNA, 20 nt, Artificial Sequence
  Synthetic
uuaaauaggauuauugugca

SEQ ID NO: 209306 - RNA, 21 nt, Artificial Sequence
  Synthetic
guuaaauaggauuauugugca

SEQ ID NO: 209307 - RNA, 22 nt, Artificial Sequence
  Synthetic
uguuaaauaggauuauugugca

SEQ ID NO: 209308 - RNA, 23 nt, Artificial Sequence
  Synthetic
uuguuaaauaggauuauugugca

SEQ ID NO: 209309 - RNA, 24 nt, Artificial Sequence
  Synthetic
auuguuaaauaggauuauugugca

SEQ ID NO: 209310 - RNA, 18 nt, Artificial Sequence
  Synthetic
ggcuggaucacuugugca

SEQ ID NO: 209311 - RNA, 19 nt, Artificial Sequence
  Synthetic
aggcuggaucacuugugca

SEQ ID NO: 209312 - RNA, 20 nt, Artificial Sequence
  Synthetic
aaggcuggaucacuugugca

SEQ ID NO: 209313 - RNA, 21 nt, Artificial Sequence
  Synthetic
aaaggcuggaucacuugugca

SEQ ID NO: 209314 - RNA, 22 nt, Artificial Sequence
  Synthetic
caaaggcuggaucacuugugca

SEQ ID NO: 209315 - RNA, 23 nt, Artificial Sequence
  Synthetic
ucaaaggcuggaucacuugugca

SEQ ID NO: 209316 - RNA, 24 nt, Artificial Sequence
  Synthetic
gucaaaggcuggaucacuugugca

SEQ ID NO: 209317 - RNA, 18 nt, Artificial Sequence
  Synthetic
aagucaugaccuugugca

SEQ ID NO: 209318 - RNA, 19 nt, Artificial Sequence
  Synthetic
uaagucaugaccuugugca

SEQ ID NO: 209319 - RNA, 20 nt, Artificial Sequence
  Synthetic
auaagucaugaccuugugca

SEQ ID NO: 209320 - RNA, 21 nt, Artificial Sequence
  Synthetic
aauaagucaugaccuugugca

SEQ ID NO: 209321 - RNA, 22 nt, Artificial Sequence
  Synthetic
aaauaagucaugaccuugugca

SEQ ID NO: 209322 - RNA, 23 nt, Artificial Sequence
  Synthetic
gaaauaagucaugaccuugugca

SEQ ID NO: 209323 - RNA, 24 nt, Artificial Sequence
  Synthetic
agaaauaagucaugaccuugugca

SEQ ID NO: 209324 - RNA, 18 nt, Artificial Sequence
  Synthetic
uuucuccuccuuugugca

SEQ ID NO: 209325 - RNA, 19 nt, Artificial Sequence
  Synthetic
auuucuccuccuuugugca

SEQ ID NO: 209326 - RNA, 20 nt, Artificial Sequence
  Synthetic
uauuucuccuccuuugugca

SEQ ID NO: 209327 - RNA, 21 nt, Artificial Sequence
  Synthetic
auauuucuccuccuuugugca

SEQ ID NO: 209328 - RNA, 22 nt, Artificial Sequence
  Synthetic
gauauuucuccuccuuugugca

SEQ ID NO: 209329 - RNA, 23 nt, Artificial Sequence
  Synthetic
agauauuucuccuccuuugugca

SEQ ID NO: 209330 - RNA, 24 nt, Artificial Sequence
  Synthetic
cagauauuucuccuccuuugugca

SEQ ID NO: 209331 - RNA, 18 nt, Artificial Sequence
  Synthetic
auugguccuaaaauugca

SEQ ID NO: 209332 - RNA, 19 nt, Artificial Sequence
  Synthetic
cauugguccuaaaauugca

SEQ ID NO: 209333 - RNA, 20 nt, Artificial Sequence
  Synthetic
ucauugguccuaaaauugca

SEQ ID NO: 209334 - RNA, 21 nt, Artificial Sequence
  Synthetic
uucauugguccuaaaauugca

SEQ ID NO: 209335 - RNA, 22 nt, Artificial Sequence
  Synthetic
uuucauugguccuaaaauugca

SEQ ID NO: 209336 - RNA, 23 nt, Artificial Sequence
  Synthetic
uuuucauugguccuaaaauugca

SEQ ID NO: 209337 - RNA, 24 nt, Artificial Sequence
  Synthetic
cuuuucauugguccuaaaauugca

SEQ ID NO: 209338 - RNA, 18 nt, Artificial Sequence
  Synthetic
uucugggaaccaauugca

SEQ ID NO: 209339 - RNA, 19 nt, Artificial Sequence
  Synthetic
auucugggaaccaauugca

SEQ ID NO: 209340 - RNA, 20 nt, Artificial Sequence
  Synthetic
aauucugggaaccaauugca

SEQ ID NO: 209341 - RNA, 21 nt, Artificial Sequence
  Synthetic
aaauucugggaaccaauugca

SEQ ID NO: 209342 - RNA, 22 nt, Artificial Sequence
  Synthetic
gaaauucugggaaccaauugca

SEQ ID NO: 209343 - RNA, 23 nt, Artificial Sequence
  Synthetic
ugaaauucugggaaccaauugca

SEQ ID NO: 209344 - RNA, 24 nt, Artificial Sequence
  Synthetic
gugaaauucugggaaccaauugca

SEQ ID NO: 209345 - RNA, 18 nt, Artificial Sequence
  Synthetic
acuaaccuuugaauugca

SEQ ID NO: 209346 - RNA, 19 nt, Artificial Sequence
  Synthetic
aacuaaccuuugaauugca

SEQ ID NO: 209347 - RNA, 20 nt, Artificial Sequence
  Synthetic
aaacuaaccuuugaauugca

SEQ ID NO: 209348 - RNA, 21 nt, Artificial Sequence
  Synthetic
aaaacuaaccuuugaauugca

SEQ ID NO: 209349 - RNA, 22 nt, Artificial Sequence
  Synthetic
caaaacuaaccuuugaauugca

SEQ ID NO: 209350 - RNA, 23 nt, Artificial Sequence
  Synthetic
ucaaaacuaaccuuugaauugca

SEQ ID NO: 209351 - RNA, 24 nt, Artificial Sequence
  Synthetic
aucaaaacuaaccuuugaauugca

SEQ ID NO: 209352 - RNA, 18 nt, Artificial Sequence
  Synthetic
gugaguugucuaauugca

SEQ ID NO: 209353 - RNA, 19 nt, Artificial Sequence
  Synthetic
ugugaguugucuaauugca

SEQ ID NO: 209354 - RNA, 20 nt, Artificial Sequence
  Synthetic
cugugaguugucuaauugca

SEQ ID NO: 209355 - RNA, 21 nt, Artificial Sequence
  Synthetic
acugugaguugucuaauugca

SEQ ID NO: 209356 - RNA, 22 nt, Artificial Sequence
  Synthetic
cacugugaguugucuaauugca

SEQ ID NO: 209357 - RNA, 23 nt, Artificial Sequence
  Synthetic
ucacugugaguugucuaauugca

SEQ ID NO: 209358 - RNA, 24 nt, Artificial Sequence
  Synthetic
gucacugugaguugucuaauugca

SEQ ID NO: 209359 - RNA, 18 nt, Artificial Sequence
  Synthetic
ucaauauuccacauugca

SEQ ID NO: 209360 - RNA, 19 nt, Artificial Sequence
  Synthetic
uucaauauuccacauugca

SEQ ID NO: 209361 - RNA, 20 nt, Artificial Sequence
  Synthetic
cuucaauauuccacauugca

SEQ ID NO: 209362 - RNA, 21 nt, Artificial Sequence
  Synthetic
ccuucaauauuccacauugca

SEQ ID NO: 209363 - RNA, 22 nt, Artificial Sequence
  Synthetic
cccuucaauauuccacauugca

SEQ ID NO: 209364 - RNA, 23 nt, Artificial Sequence
  Synthetic
ucccuucaauauuccacauugca

SEQ ID NO: 209365 - RNA, 24 nt, Artificial Sequence
  Synthetic
aucccuucaauauuccacauugca

SEQ ID NO: 209366 - RNA, 18 nt, Artificial Sequence
  Synthetic
accaggagcaccauugca

SEQ ID NO: 209367 - RNA, 19 nt, Artificial Sequence
  Synthetic
uaccaggagcaccauugca

SEQ ID NO: 209368 - RNA, 20 nt, Artificial Sequence
  Synthetic
uuaccaggagcaccauugca

SEQ ID NO: 209369 - RNA, 21 nt, Artificial Sequence
  Synthetic
uuuaccaggagcaccauugca

SEQ ID NO: 209370 - RNA, 22 nt, Artificial Sequence
  Synthetic
cuuuaccaggagcaccauugca

SEQ ID NO: 209371 - RNA, 23 nt, Artificial Sequence
  Synthetic
gcuuuaccaggagcaccauugca

SEQ ID NO: 209372 - RNA, 24 nt, Artificial Sequence
  Synthetic
ugcuuuaccaggagcaccauugca

SEQ ID NO: 209373 - RNA, 18 nt, Artificial Sequence
  Synthetic
caguggauucccauugca

SEQ ID NO: 209374 - RNA, 19 nt, Artificial Sequence
  Synthetic
ucaguggauucccauugca

SEQ ID NO: 209375 - RNA, 20 nt, Artificial Sequence
  Synthetic
uucaguggauucccauugca

SEQ ID NO: 209376 - RNA, 21 nt, Artificial Sequence
  Synthetic
uuucaguggauucccauugca

SEQ ID NO: 209377 - RNA, 22 nt, Artificial Sequence
  Synthetic
cuuucaguggauucccauugca

SEQ ID NO: 209378 - RNA, 23 nt, Artificial Sequence
  Synthetic
ccuuucaguggauucccauugca

SEQ ID NO: 209379 - RNA, 24 nt, Artificial Sequence
  Synthetic
accuuucaguggauucccauugca

SEQ ID NO: 209380 - RNA, 18 nt, Artificial Sequence
  Synthetic
ucuaauuguaucauugca

SEQ ID NO: 209381 - RNA, 19 nt, Artificial Sequence
  Synthetic
gucuaauuguaucauugca

SEQ ID NO: 209382 - RNA, 20 nt, Artificial Sequence
  Synthetic
agucuaauuguaucauugca

SEQ ID NO: 209383 - RNA, 21 nt, Artificial Sequence
  Synthetic
aagucuaauuguaucauugca

SEQ ID NO: 209384 - RNA, 22 nt, Artificial Sequence
  Synthetic
gaagucuaauuguaucauugca

SEQ ID NO: 209385 - RNA, 23 nt, Artificial Sequence
  Synthetic
ggaagucuaauuguaucauugca

SEQ ID NO: 209386 - RNA, 24 nt, Artificial Sequence
  Synthetic
uggaagucuaauuguaucauugca

SEQ ID NO: 209387 - RNA, 18 nt, Artificial Sequence
  Synthetic
aaaguaggcuucauugca

SEQ ID NO: 209388 - RNA, 19 nt, Artificial Sequence
  Synthetic
uaaaguaggcuucauugca

SEQ ID NO: 209389 - RNA, 20 nt, Artificial Sequence
  Synthetic
auaaaguaggcuucauugca

SEQ ID NO: 209390 - RNA, 21 nt, Artificial Sequence
  Synthetic
gauaaaguaggcuucauugca

SEQ ID NO: 209391 - RNA, 22 nt, Artificial Sequence
  Synthetic
agauaaaguaggcuucauugca

SEQ ID NO: 209392 - RNA, 23 nt, Artificial Sequence
  Synthetic
cagauaaaguaggcuucauugca

SEQ ID NO: 209393 - RNA, 24 nt, Artificial Sequence
  Synthetic
ucagauaaaguaggcuucauugca

SEQ ID NO: 209394 - RNA, 18 nt, Artificial Sequence
  Synthetic
ugugggcacaagauugca

SEQ ID NO: 209395 - RNA, 19 nt, Artificial Sequence
  Synthetic
uugugggcacaagauugca

SEQ ID NO: 209396 - RNA, 20 nt, Artificial Sequence
  Synthetic
uuugugggcacaagauugca

SEQ ID NO: 209397 - RNA, 21 nt, Artificial Sequence
  Synthetic
uuuugugggcacaagauugca

SEQ ID NO: 209398 - RNA, 22 nt, Artificial Sequence
  Synthetic
auuuugugggcacaagauugca

SEQ ID NO: 209399 - RNA, 23 nt, Artificial Sequence
  Synthetic
gauuuugugggcacaagauugca

SEQ ID NO: 209400 - RNA, 24 nt, Artificial Sequence
  Synthetic
agauuuugugggcacaagauugca

SEQ ID NO: 209401 - RNA, 18 nt, Artificial Sequence
  Synthetic
cgcgaggcagagauugca

SEQ ID NO: 209402 - RNA, 19 nt, Artificial Sequence
  Synthetic
ccgcgaggcagagauugca

SEQ ID NO: 209403 - RNA, 20 nt, Artificial Sequence
  Synthetic
cccgcgaggcagagauugca

SEQ ID NO: 209404 - RNA, 21 nt, Artificial Sequence
  Synthetic
acccgcgaggcagagauugca

SEQ ID NO: 209405 - RNA, 22 nt, Artificial Sequence
  Synthetic
aacccgcgaggcagagauugca

SEQ ID NO: 209406 - RNA, 23 nt, Artificial Sequence
  Synthetic
gaacccgcgaggcagagauugca

SEQ ID NO: 209407 - RNA, 24 nt, Artificial Sequence
  Synthetic
ugaacccgcgaggcagagauugca

SEQ ID NO: 209408 - RNA, 18 nt, Artificial Sequence
  Synthetic
ugcaauuaggagauugca

SEQ ID NO: 209409 - RNA, 19 nt, Artificial Sequence
  Synthetic
augcaauuaggagauugca

SEQ ID NO: 209410 - RNA, 20 nt, Artificial Sequence
  Synthetic
gaugcaauuaggagauugca

SEQ ID NO: 209411 - RNA, 21 nt, Artificial Sequence
  Synthetic
agaugcaauuaggagauugca

SEQ ID NO: 209412 - RNA, 22 nt, Artificial Sequence
  Synthetic
aagaugcaauuaggagauugca

SEQ ID NO: 209413 - RNA, 23 nt, Artificial Sequence
  Synthetic
aaagaugcaauuaggagauugca

SEQ ID NO: 209414 - RNA, 24 nt, Artificial Sequence
  Synthetic
caaagaugcaauuaggagauugca

SEQ ID NO: 209415 - RNA, 18 nt, Artificial Sequence
  Synthetic
uaccccacaaauauugca

SEQ ID NO: 209416 - RNA, 19 nt, Artificial Sequence
  Synthetic
uuaccccacaaauauugca

SEQ ID NO: 209417 - RNA, 20 nt, Artificial Sequence
  Synthetic
cuuaccccacaaauauugca

SEQ ID NO: 209418 - RNA, 21 nt, Artificial Sequence
  Synthetic
gcuuaccccacaaauauugca

SEQ ID NO: 209419 - RNA, 22 nt, Artificial Sequence
  Synthetic
ugcuuaccccacaaauauugca

SEQ ID NO: 209420 - RNA, 23 nt, Artificial Sequence
  Synthetic
cugcuuaccccacaaauauugca

SEQ ID NO: 209421 - RNA, 24 nt, Artificial Sequence
  Synthetic
ucugcuuaccccacaaauauugca

SEQ ID NO: 209422 - RNA, 18 nt, Artificial Sequence
  Synthetic
augauaaaggauauugca

SEQ ID NO: 209423 - RNA, 19 nt, Artificial Sequence
  Synthetic
uaugauaaaggauauugca

SEQ ID NO: 209424 - RNA, 20 nt, Artificial Sequence
  Synthetic
uuaugauaaaggauauugca

SEQ ID NO: 209425 - RNA, 21 nt, Artificial Sequence
  Synthetic
uuuaugauaaaggauauugca

SEQ ID NO: 209426 - RNA, 22 nt, Artificial Sequence
  Synthetic
guuuaugauaaaggauauugca

SEQ ID NO: 209427 - RNA, 23 nt, Artificial Sequence
  Synthetic
uguuuaugauaaaggauauugca

SEQ ID NO: 209428 - RNA, 24 nt, Artificial Sequence
  Synthetic
cuguuuaugauaaaggauauugca

SEQ ID NO: 209429 - RNA, 18 nt, Artificial Sequence
  Synthetic
uucuuuguauauauugca

SEQ ID NO: 209430 - RNA, 19 nt, Artificial Sequence
  Synthetic
uuucuuuguauauauugca

SEQ ID NO: 209431 - RNA, 20 nt, Artificial Sequence
  Synthetic
auuucuuuguauauauugca

SEQ ID NO: 209432 - RNA, 21 nt, Artificial Sequence
  Synthetic
aauuucuuuguauauauugca

SEQ ID NO: 209433 - RNA, 22 nt, Artificial Sequence
  Synthetic
aaauuucuuuguauauauugca

SEQ ID NO: 209434 - RNA, 23 nt, Artificial Sequence
  Synthetic
aaaauuucuuuguauauauugca

SEQ ID NO: 209435 - RNA, 24 nt, Artificial Sequence
  Synthetic
aaaaauuucuuuguauauauugca

SEQ ID NO: 209436 - RNA, 18 nt, Artificial Sequence
  Synthetic
guauauuauucacuugca

SEQ ID NO: 209437 - RNA, 19 nt, Artificial Sequence
  Synthetic
aguauauuauucacuugca

SEQ ID NO: 209438 - RNA, 20 nt, Artificial Sequence
  Synthetic
uaguauauuauucacuugca

SEQ ID NO: 209439 - RNA, 21 nt, Artificial Sequence
  Synthetic
uuaguauauuauucacuugca

SEQ ID NO: 209440 - RNA, 22 nt, Artificial Sequence
  Synthetic
uuuaguauauuauucacuugca

SEQ ID NO: 209441 - RNA, 23 nt, Artificial Sequence
  Synthetic
uuuuaguauauuauucacuugca

SEQ ID NO: 209442 - RNA, 24 nt, Artificial Sequence
  Synthetic
auuuuaguauauuauucacuugca

SEQ ID NO: 209443 - RNA, 18 nt, Artificial Sequence
  Synthetic
ucauaucaaagacuugca

SEQ ID NO: 209444 - RNA, 19 nt, Artificial Sequence
  Synthetic
aucauaucaaagacuugca

SEQ ID NO: 209445 - RNA, 20 nt, Artificial Sequence
  Synthetic
aaucauaucaaagacuugca

SEQ ID NO: 209446 - RNA, 21 nt, Artificial Sequence
  Synthetic
aaaucauaucaaagacuugca

SEQ ID NO: 209447 - RNA, 22 nt, Artificial Sequence
  Synthetic
caaaucauaucaaagacuugca

SEQ ID NO: 209448 - RNA, 23 nt, Artificial Sequence
  Synthetic
ccaaaucauaucaaagacuugca

SEQ ID NO: 209449 - RNA, 24 nt, Artificial Sequence
  Synthetic
uccaaaucauaucaaagacuugca

SEQ ID NO: 209450 - RNA, 18 nt, Artificial Sequence
  Synthetic
caggaggcagagcuugca

SEQ ID NO: 209451 - RNA, 19 nt, Artificial Sequence
  Synthetic
ucaggaggcagagcuugca

SEQ ID NO: 209452 - RNA, 20 nt, Artificial Sequence
  Synthetic
cucaggaggcagagcuugca

SEQ ID NO: 209453 - RNA, 21 nt, Artificial Sequence
  Synthetic
acucaggaggcagagcuugca

SEQ ID NO: 209454 - RNA, 22 nt, Artificial Sequence
  Synthetic
uacucaggaggcagagcuugca

SEQ ID NO: 209455 - RNA, 23 nt, Artificial Sequence
  Synthetic
cuacucaggaggcagagcuugca

SEQ ID NO: 209456 - RNA, 24 nt, Artificial Sequence
  Synthetic
acuacucaggaggcagagcuugca

SEQ ID NO: 209457 - RNA, 18 nt, Artificial Sequence
  Synthetic
cgggaggcagagcuugca

SEQ ID NO: 209458 - RNA, 19 nt, Artificial Sequence
  Synthetic
ccgggaggcagagcuugca

SEQ ID NO: 209459 - RNA, 20 nt, Artificial Sequence
  Synthetic
cccgggaggcagagcuugca

SEQ ID NO: 209460 - RNA, 21 nt, Artificial Sequence
  Synthetic
acccgggaggcagagcuugca

SEQ ID NO: 209461 - RNA, 22 nt, Artificial Sequence
  Synthetic
aacccgggaggcagagcuugca

SEQ ID NO: 209462 - RNA, 23 nt, Artificial Sequence
  Synthetic
gaacccgggaggcagagcuugca

SEQ ID NO: 209463 - RNA, 24 nt, Artificial Sequence
  Synthetic
ugaacccgggaggcagagcuugca

SEQ ID NO: 209464 - RNA, 18 nt, Artificial Sequence
  Synthetic
ugggaugcagagcuugca

SEQ ID NO: 209465 - RNA, 19 nt, Artificial Sequence
  Synthetic
cugggaugcagagcuugca

SEQ ID NO: 209466 - RNA, 20 nt, Artificial Sequence
  Synthetic
ccugggaugcagagcuugca

SEQ ID NO: 209467 - RNA, 21 nt, Artificial Sequence
  Synthetic
accugggaugcagagcuugca

SEQ ID NO: 209468 - RNA, 22 nt, Artificial Sequence
  Synthetic
aaccugggaugcagagcuugca

SEQ ID NO: 209469 - RNA, 23 nt, Artificial Sequence
  Synthetic
gaaccugggaugcagagcuugca

SEQ ID NO: 209470 - RNA, 24 nt, Artificial Sequence
  Synthetic
ugaaccugggaugcagagcuugca

SEQ ID NO: 209471 - RNA, 18 nt, Artificial Sequence
  Synthetic
ugggagacggagcuugca

SEQ ID NO: 209472 - RNA, 19 nt, Artificial Sequence
  Synthetic
cugggagacggagcuugca

SEQ ID NO: 209473 - RNA, 20 nt, Artificial Sequence
  Synthetic
ccugggagacggagcuugca

SEQ ID NO: 209474 - RNA, 21 nt, Artificial Sequence
  Synthetic
accugggagacggagcuugca

SEQ ID NO: 209475 - RNA, 22 nt, Artificial Sequence
  Synthetic
aaccugggagacggagcuugca

SEQ ID NO: 209476 - RNA, 23 nt, Artificial Sequence
  Synthetic
gaaccugggagacggagcuugca

SEQ ID NO: 209477 - RNA, 24 nt, Artificial Sequence
  Synthetic
ugaaccugggagacggagcuugca

SEQ ID NO: 209478 - RNA, 18 nt, Artificial Sequence
  Synthetic
cgggaggcggagcuugca

SEQ ID NO: 209479 - RNA, 19 nt, Artificial Sequence
  Synthetic
ccgggaggcggagcuugca

SEQ ID NO: 209480 - RNA, 20 nt, Artificial Sequence
  Synthetic
cccgggaggcggagcuugca

SEQ ID NO: 209481 - RNA, 23 nt, Artificial Sequence
  Synthetic
aaacccgggaggcggagcuugca

SEQ ID NO: 209482 - RNA, 24 nt, Artificial Sequence
  Synthetic
uaaacccgggaggcggagcuugca

SEQ ID NO: 209483 - RNA, 18 nt, Artificial Sequence
  Synthetic
ugggaggcggagcuugca

SEQ ID NO: 209484 - RNA, 19 nt, Artificial Sequence
  Synthetic
cugggaggcggagcuugca

SEQ ID NO: 209485 - RNA, 20 nt, Artificial Sequence
  Synthetic
ccugggaggcggagcuugca

SEQ ID NO: 209486 - RNA, 21 nt, Artificial Sequence
  Synthetic
accugggaggcggagcuugca

SEQ ID NO: 209487 - RNA, 22 nt, Artificial Sequence
  Synthetic
aaccugggaggcggagcuugca

SEQ ID NO: 209488 - RNA, 23 nt, Artificial Sequence
  Synthetic
gaaccugggaggcggagcuugca

SEQ ID NO: 209489 - RNA, 24 nt, Artificial Sequence
  Synthetic
ugaaccugggaggcggagcuugca

SEQ ID NO: 209490 - RNA, 18 nt, Artificial Sequence
  Synthetic
cgggagguggagcuugca

SEQ ID NO: 209491 - RNA, 19 nt, Artificial Sequence
  Synthetic
ccgggagguggagcuugca

SEQ ID NO: 209492 - RNA, 20 nt, Artificial Sequence
  Synthetic
cccgggagguggagcuugca

SEQ ID NO: 209493 - RNA, 21 nt, Artificial Sequence
  Synthetic
acccgggagguggagcuugca

SEQ ID NO: 209494 - RNA, 22 nt, Artificial Sequence
  Synthetic
aacccgggagguggagcuugca

SEQ ID NO: 209495 - RNA, 23 nt, Artificial Sequence
  Synthetic
gaacccgggagguggagcuugca

SEQ ID NO: 209496 - RNA, 24 nt, Artificial Sequence
  Synthetic
ugaacccgggagguggagcuugca

SEQ ID NO: 209497 - RNA, 18 nt, Artificial Sequence
  Synthetic
ugggagguggagcuugca

SEQ ID NO: 209498 - RNA, 19 nt, Artificial Sequence
  Synthetic
cugggagguggagcuugca

SEQ ID NO: 209499 - RNA, 20 nt, Artificial Sequence
  Synthetic
ccugggagguggagcuugca

SEQ ID NO: 209500 - RNA, 21 nt, Artificial Sequence
  Synthetic
accugggagguggagcuugca

SEQ ID NO: 209501 - RNA, 22 nt, Artificial Sequence
  Synthetic
aaccugggagguggagcuugca

SEQ ID NO: 209502 - RNA, 23 nt, Artificial Sequence
  Synthetic
gaaccugggagguggagcuugca

SEQ ID NO: 209503 - RNA, 24 nt, Artificial Sequence
  Synthetic
ugaaccugggagguggagcuugca

SEQ ID NO: 209504 - RNA, 18 nt, Artificial Sequence
  Synthetic
ggaaugucugagcuugca

SEQ ID NO: 209505 - RNA, 19 nt, Artificial Sequence
  Synthetic
uggaaugucugagcuugca

SEQ ID NO: 209506 - RNA, 20 nt, Artificial Sequence
  Synthetic
cuggaaugucugagcuugca

SEQ ID NO: 209507 - RNA, 21 nt, Artificial Sequence
  Synthetic
ccuggaaugucugagcuugca

SEQ ID NO: 209508 - RNA, 22 nt, Artificial Sequence
  Synthetic
accuggaaugucugagcuugca

SEQ ID NO: 209509 - RNA, 23 nt, Artificial Sequence
  Synthetic
uaccuggaaugucugagcuugca

SEQ ID NO: 209510 - RNA, 24 nt, Artificial Sequence
  Synthetic
uuaccuggaaugucugagcuugca

SEQ ID NO: 209511 - RNA, 18 nt, Artificial Sequence
  Synthetic
aacagcuaaaaucuugca

SEQ ID NO: 209512 - RNA, 19 nt, Artificial Sequence
  Synthetic
aaacagcuaaaaucuugca

SEQ ID NO: 209513 - RNA, 20 nt, Artificial Sequence
  Synthetic
uaaacagcuaaaaucuugca

SEQ ID NO: 209514 - RNA, 21 nt, Artificial Sequence
  Synthetic
uuaaacagcuaaaaucuugca

SEQ ID NO: 209515 - RNA, 22 nt, Artificial Sequence
  Synthetic
auuaaacagcuaaaaucuugca

SEQ ID NO: 209516 - RNA, 23 nt, Artificial Sequence
  Synthetic
uauuaaacagcuaaaaucuugca

SEQ ID NO: 209517 - RNA, 24 nt, Artificial Sequence
  Synthetic
cuauuaaacagcuaaaaucuugca

SEQ ID NO: 209518 - RNA, 18 nt, Artificial Sequence
  Synthetic
cugguacacaaucuugca

SEQ ID NO: 209519 - RNA, 19 nt, Artificial Sequence
  Synthetic
ccugguacacaaucuugca

SEQ ID NO: 209520 - RNA, 20 nt, Artificial Sequence
  Synthetic
accugguacacaaucuugca

SEQ ID NO: 209521 - RNA, 21 nt, Artificial Sequence
  Synthetic
caccugguacacaaucuugca

SEQ ID NO: 209522 - RNA, 22 nt, Artificial Sequence
  Synthetic
acaccugguacacaaucuugca

SEQ ID NO: 209523 - RNA, 23 nt, Artificial Sequence
  Synthetic
aacaccugguacacaaucuugca

SEQ ID NO: 209524 - RNA, 24 nt, Artificial Sequence
  Synthetic
uaacaccugguacacaaucuugca

SEQ ID NO: 209525 - RNA, 18 nt, Artificial Sequence
  Synthetic
cagguuaggcaucuugca

SEQ ID NO: 209526 - RNA, 19 nt, Artificial Sequence
  Synthetic
ucagguuaggcaucuugca

SEQ ID NO: 209527 - RNA, 20 nt, Artificial Sequence
  Synthetic
aucagguuaggcaucuugca

SEQ ID NO: 209528 - RNA, 21 nt, Artificial Sequence
  Synthetic
aaucagguuaggcaucuugca

SEQ ID NO: 209529 - RNA, 22 nt, Artificial Sequence
  Synthetic
gaaucagguuaggcaucuugca

SEQ ID NO: 209530 - RNA, 23 nt, Artificial Sequence
  Synthetic
ggaaucagguuaggcaucuugca

SEQ ID NO: 209531 - RNA, 24 nt, Artificial Sequence
  Synthetic
aggaaucagguuaggcaucuugca

SEQ ID NO: 209532 - RNA, 18 nt, Artificial Sequence
  Synthetic
gauucaauggcucuugca

SEQ ID NO: 209533 - RNA, 19 nt, Artificial Sequence
  Synthetic
ugauucaauggcucuugca

SEQ ID NO: 209534 - RNA, 20 nt, Artificial Sequence
  Synthetic
cugauucaauggcucuugca

SEQ ID NO: 209535 - RNA, 21 nt, Artificial Sequence
  Synthetic
acugauucaauggcucuugca

SEQ ID NO: 209536 - RNA, 22 nt, Artificial Sequence
  Synthetic
uacugauucaauggcucuugca

SEQ ID NO: 209537 - RNA, 23 nt, Artificial Sequence
  Synthetic
uuacugauucaauggcucuugca

SEQ ID NO: 209538 - RNA, 24 nt, Artificial Sequence
  Synthetic
guuacugauucaauggcucuugca

SEQ ID NO: 209539 - RNA, 18 nt, Artificial Sequence
  Synthetic
uauuuucugugucuugca

SEQ ID NO: 209540 - RNA, 19 nt, Artificial Sequence
  Synthetic
cuauuuucugugucuugca

SEQ ID NO: 209541 - RNA, 20 nt, Artificial Sequence
  Synthetic
ccuauuuucugugucuugca

SEQ ID NO: 209542 - RNA, 21 nt, Artificial Sequence
  Synthetic
gccuauuuucugugucuugca

SEQ ID NO: 209543 - RNA, 22 nt, Artificial Sequence
  Synthetic
ugccuauuuucugugucuugca

SEQ ID NO: 209544 - RNA, 23 nt, Artificial Sequence
  Synthetic
uugccuauuuucugugucuugca

SEQ ID NO: 209545 - RNA, 24 nt, Artificial Sequence
  Synthetic
auugccuauuuucugugucuugca

SEQ ID NO: 209546 - RNA, 18 nt, Artificial Sequence
  Synthetic
cgagaggcagaaguugca

SEQ ID NO: 209547 - RNA, 19 nt, Artificial Sequence
  Synthetic
ccgagaggcagaaguugca

SEQ ID NO: 209548 - RNA, 20 nt, Artificial Sequence
  Synthetic
cccgagaggcagaaguugca

SEQ ID NO: 209549 - RNA, 21 nt, Artificial Sequence
  Synthetic
acccgagaggcagaaguugca

SEQ ID NO: 209550 - RNA, 22 nt, Artificial Sequence
  Synthetic
aacccgagaggcagaaguugca

SEQ ID NO: 209551 - RNA, 23 nt, Artificial Sequence
  Synthetic
gaacccgagaggcagaaguugca

SEQ ID NO: 209552 - RNA, 24 nt, Artificial Sequence
  Synthetic
ugaacccgagaggcagaaguugca

SEQ ID NO: 209553 - RNA, 18 nt, Artificial Sequence
  Synthetic
cagcuuagagaaguugca

SEQ ID NO: 209554 - RNA, 19 nt, Artificial Sequence
  Synthetic
ccagcuuagagaaguugca

SEQ ID NO: 209555 - RNA, 20 nt, Artificial Sequence
  Synthetic
accagcuuagagaaguugca

SEQ ID NO: 209556 - RNA, 21 nt, Artificial Sequence
  Synthetic
aaccagcuuagagaaguugca

SEQ ID NO: 209557 - RNA, 22 nt, Artificial Sequence
  Synthetic
aaaccagcuuagagaaguugca

SEQ ID NO: 209558 - RNA, 23 nt, Artificial Sequence
  Synthetic
aaaaccagcuuagagaaguugca

SEQ ID NO: 209559 - RNA, 24 nt, Artificial Sequence
  Synthetic
uaaaaccagcuuagagaaguugca

SEQ ID NO: 209560 - RNA, 18 nt, Artificial Sequence
  Synthetic
caggagguagaaguugca

SEQ ID NO: 209561 - RNA, 19 nt, Artificial Sequence
  Synthetic
ccaggagguagaaguugca

SEQ ID NO: 209562 - RNA, 20 nt, Artificial Sequence
  Synthetic
cccaggagguagaaguugca

SEQ ID NO: 209563 - RNA, 21 nt, Artificial Sequence
  Synthetic
acccaggagguagaaguugca

SEQ ID NO: 209564 - RNA, 22 nt, Artificial Sequence
  Synthetic
aacccaggagguagaaguugca

SEQ ID NO: 209565 - RNA, 23 nt, Artificial Sequence
  Synthetic
gaacccaggagguagaaguugca

SEQ ID NO: 209566 - RNA, 24 nt, Artificial Sequence
  Synthetic
ugaacccaggagguagaaguugca

SEQ ID NO: 209567 - RNA, 18 nt, Artificial Sequence
  Synthetic
aauuuuuccgaaguugca

SEQ ID NO: 209568 - RNA, 19 nt, Artificial Sequence
  Synthetic
aaauuuuuccgaaguugca

SEQ ID NO: 209569 - RNA, 20 nt, Artificial Sequence
  Synthetic
gaaauuuuuccgaaguugca

SEQ ID NO: 209570 - RNA, 21 nt, Artificial Sequence
  Synthetic
agaaauuuuuccgaaguugca

SEQ ID NO: 209571 - RNA, 22 nt, Artificial Sequence
  Synthetic
uagaaauuuuuccgaaguugca

SEQ ID NO: 209572 - RNA, 23 nt, Artificial Sequence
  Synthetic
uuagaaauuuuuccgaaguugca

SEQ ID NO: 209573 - RNA, 24 nt, Artificial Sequence
  Synthetic
guuagaaauuuuuccgaaguugca

SEQ ID NO: 209574 - RNA, 18 nt, Artificial Sequence
  Synthetic
aaaauauaggaaguugca

SEQ ID NO: 209575 - RNA, 19 nt, Artificial Sequence
  Synthetic
aaaaauauaggaaguugca

SEQ ID NO: 209576 - RNA, 20 nt, Artificial Sequence
  Synthetic
gaaaaauauaggaaguugca

SEQ ID NO: 209577 - RNA, 21 nt, Artificial Sequence
  Synthetic
ugaaaaauauaggaaguugca

SEQ ID NO: 209578 - RNA, 22 nt, Artificial Sequence
  Synthetic
uugaaaaauauaggaaguugca

SEQ ID NO: 209579 - RNA, 23 nt, Artificial Sequence
  Synthetic
uuugaaaaauauaggaaguugca

SEQ ID NO: 209580 - RNA, 24 nt, Artificial Sequence
  Synthetic
auuugaaaaauauaggaaguugca

SEQ ID NO: 209581 - RNA, 18 nt, Artificial Sequence
  Synthetic
uccguaauauaaguugca

SEQ ID NO: 209582 - RNA, 19 nt, Artificial Sequence
  Synthetic
auccguaauauaaguugca

SEQ ID NO: 209583 - RNA, 20 nt, Artificial Sequence
  Synthetic
uauccguaauauaaguugca

SEQ ID NO: 209584 - RNA, 21 nt, Artificial Sequence
  Synthetic
cuauccguaauauaaguugca

SEQ ID NO: 209585 - RNA, 22 nt, Artificial Sequence
  Synthetic
ccuauccguaauauaaguugca

SEQ ID NO: 209586 - RNA, 23 nt, Artificial Sequence
  Synthetic
cccuauccguaauauaaguugca

SEQ ID NO: 209587 - RNA, 24 nt, Artificial Sequence
  Synthetic
ucccuauccguaauauaaguugca

SEQ ID NO: 209588 - RNA, 18 nt, Artificial Sequence
  Synthetic
ucaucacauuaaguugca

SEQ ID NO: 209589 - RNA, 19 nt, Artificial Sequence
  Synthetic
aucaucacauuaaguugca

SEQ ID NO: 209590 - RNA, 20 nt, Artificial Sequence
  Synthetic
aaucaucacauuaaguugca

SEQ ID NO: 209591 - RNA, 21 nt, Artificial Sequence
  Synthetic
uaaucaucacauuaaguugca

SEQ ID NO: 209592 - RNA, 22 nt, Artificial Sequence
  Synthetic
uuaaucaucacauuaaguugca

SEQ ID NO: 209593 - RNA, 23 nt, Artificial Sequence
  Synthetic
auuaaucaucacauuaaguugca

SEQ ID NO: 209594 - RNA, 24 nt, Artificial Sequence
  Synthetic
uauuaaucaucacauuaaguugca

SEQ ID NO: 209595 - RNA, 18 nt, Artificial Sequence
  Synthetic
gagaggaaaagaguugca

SEQ ID NO: 209596 - RNA, 19 nt, Artificial Sequence
  Synthetic
ggagaggaaaagaguugca

SEQ ID NO: 209597 - RNA, 20 nt, Artificial Sequence
  Synthetic
gggagaggaaaagaguugca

SEQ ID NO: 209598 - RNA, 21 nt, Artificial Sequence
  Synthetic
ggggagaggaaaagaguugca

SEQ ID NO: 209599 - RNA, 22 nt, Artificial Sequence
  Synthetic
aggggagaggaaaagaguugca

SEQ ID NO: 209600 - RNA, 23 nt, Artificial Sequence
  Synthetic
aaggggagaggaaaagaguugca

SEQ ID NO: 209601 - RNA, 24 nt, Artificial Sequence
  Synthetic
uaaggggagaggaaaagaguugca

SEQ ID NO: 209602 - RNA, 18 nt, Artificial Sequence
  Synthetic
caggguauuuuaguugca

SEQ ID NO: 209603 - RNA, 19 nt, Artificial Sequence
  Synthetic
gcaggguauuuuaguugca

SEQ ID NO: 209604 - RNA, 20 nt, Artificial Sequence
  Synthetic
ggcaggguauuuuaguugca

SEQ ID NO: 209605 - RNA, 21 nt, Artificial Sequence
  Synthetic
gggcaggguauuuuaguugca

SEQ ID NO: 209606 - RNA, 22 nt, Artificial Sequence
  Synthetic
ggggcaggguauuuuaguugca

SEQ ID NO: 209607 - RNA, 23 nt, Artificial Sequence
  Synthetic
aggggcaggguauuuuaguugca

SEQ ID NO: 209608 - RNA, 24 nt, Artificial Sequence
  Synthetic
gaggggcaggguauuuuaguugca

SEQ ID NO: 209609 - RNA, 18 nt, Artificial Sequence
  Synthetic
caggaggcaaagguugca

SEQ ID NO: 209610 - RNA, 19 nt, Artificial Sequence
  Synthetic
ccaggaggcaaagguugca

SEQ ID NO: 209611 - RNA, 20 nt, Artificial Sequence
  Synthetic
cccaggaggcaaagguugca

SEQ ID NO: 209612 - RNA, 21 nt, Artificial Sequence
  Synthetic
acccaggaggcaaagguugca

SEQ ID NO: 209613 - RNA, 22 nt, Artificial Sequence
  Synthetic
aacccaggaggcaaagguugca

SEQ ID NO: 209614 - RNA, 23 nt, Artificial Sequence
  Synthetic
gaacccaggaggcaaagguugca

SEQ ID NO: 209615 - RNA, 24 nt, Artificial Sequence
  Synthetic
ugaacccaggaggcaaagguugca

SEQ ID NO: 209616 - RNA, 18 nt, Artificial Sequence
  Synthetic
uaggagacagagguugca

SEQ ID NO: 209617 - RNA, 19 nt, Artificial Sequence
  Synthetic
cuaggagacagagguugca

SEQ ID NO: 209618 - RNA, 20 nt, Artificial Sequence
  Synthetic
ccuaggagacagagguugca

SEQ ID NO: 209619 - RNA, 21 nt, Artificial Sequence
  Synthetic
accuaggagacagagguugca

SEQ ID NO: 209620 - RNA, 22 nt, Artificial Sequence
  Synthetic
uaccuaggagacagagguugca

SEQ ID NO: 209621 - RNA, 23 nt, Artificial Sequence
  Synthetic
guaccuaggagacagagguugca

SEQ ID NO: 209622 - RNA, 24 nt, Artificial Sequence
  Synthetic
uguaccuaggagacagagguugca

SEQ ID NO: 209623 - RNA, 18 nt, Artificial Sequence
  Synthetic
ugggagacagagguugca

SEQ ID NO: 209624 - RNA, 19 nt, Artificial Sequence
  Synthetic
cugggagacagagguugca

SEQ ID NO: 209625 - RNA, 20 nt, Artificial Sequence
  Synthetic
ccugggagacagagguugca

SEQ ID NO: 209626 - RNA, 21 nt, Artificial Sequence
  Synthetic
accugggagacagagguugca

SEQ ID NO: 209627 - RNA, 22 nt, Artificial Sequence
  Synthetic
aaccugggagacagagguugca

SEQ ID NO: 209628 - RNA, 23 nt, Artificial Sequence
  Synthetic
gaaccugggagacagagguugca

SEQ ID NO: 209629 - RNA, 24 nt, Artificial Sequence
  Synthetic
ugaaccugggagacagagguugca

SEQ ID NO: 209630 - RNA, 18 nt, Artificial Sequence
  Synthetic
agggggacagagguugca

SEQ ID NO: 209631 - RNA, 19 nt, Artificial Sequence
  Synthetic
gagggggacagagguugca

SEQ ID NO: 209632 - RNA, 20 nt, Artificial Sequence
  Synthetic
ggagggggacagagguugca

SEQ ID NO: 209633 - RNA, 21 nt, Artificial Sequence
  Synthetic
aggagggggacagagguugca

SEQ ID NO: 209634 - RNA, 22 nt, Artificial Sequence
  Synthetic
caggagggggacagagguugca

SEQ ID NO: 209635 - RNA, 23 nt, Artificial Sequence
  Synthetic
ccaggagggggacagagguugca

SEQ ID NO: 209636 - RNA, 24 nt, Artificial Sequence
  Synthetic
cccaggagggggacagagguugca

SEQ ID NO: 209637 - RNA, 18 nt, Artificial Sequence
  Synthetic
caggaggcagagguugca

SEQ ID NO: 209638 - RNA, 19 nt, Artificial Sequence
  Synthetic
ccaggaggcagagguugca

SEQ ID NO: 209639 - RNA, 20 nt, Artificial Sequence
  Synthetic
cccaggaggcagagguugca

SEQ ID NO: 209640 - RNA, 21 nt, Artificial Sequence
  Synthetic
acccaggaggcagagguugca

SEQ ID NO: 209641 - RNA, 22 nt, Artificial Sequence
  Synthetic
aacccaggaggcagagguugca

SEQ ID NO: 209642 - RNA, 23 nt, Artificial Sequence
  Synthetic
gaacccaggaggcagagguugca

SEQ ID NO: 209643 - RNA, 24 nt, Artificial Sequence
  Synthetic
ugaacccaggaggcagagguugca

SEQ ID NO: 209644 - RNA, 18 nt, Artificial Sequence
  Synthetic
cgggaggcagagguugca

SEQ ID NO: 209645 - RNA, 19 nt, Artificial Sequence
  Synthetic
ccgggaggcagagguugca

SEQ ID NO: 209646 - RNA, 20 nt, Artificial Sequence
  Synthetic
cccgggaggcagagguugca

SEQ ID NO: 209647 - RNA, 24 nt, Artificial Sequence
  Synthetic
cgaacccgggaggcagagguugca

SEQ ID NO: 209648 - RNA, 19 nt, Artificial Sequence
  Synthetic
ucgggaggcagagguugca

SEQ ID NO: 209649 - RNA, 20 nt, Artificial Sequence
  Synthetic
cucgggaggcagagguugca

SEQ ID NO: 209650 - RNA, 21 nt, Artificial Sequence
  Synthetic
acucgggaggcagagguugca

SEQ ID NO: 209651 - RNA, 22 nt, Artificial Sequence
  Synthetic
aacucgggaggcagagguugca

SEQ ID NO: 209652 - RNA, 23 nt, Artificial Sequence
  Synthetic
gaacucgggaggcagagguugca

SEQ ID NO: 209653 - RNA, 24 nt, Artificial Sequence
  Synthetic
ugaacucgggaggcagagguugca

SEQ ID NO: 209654 - RNA, 18 nt, Artificial Sequence
  Synthetic
ggggaggcagagguugca

SEQ ID NO: 209655 - RNA, 19 nt, Artificial Sequence
  Synthetic
uggggaggcagagguugca

SEQ ID NO: 209656 - RNA, 20 nt, Artificial Sequence
  Synthetic
cuggggaggcagagguugca

SEQ ID NO: 209657 - RNA, 21 nt, Artificial Sequence
  Synthetic
gcuggggaggcagagguugca

SEQ ID NO: 209658 - RNA, 22 nt, Artificial Sequence
  Synthetic
agcuggggaggcagagguugca

SEQ ID NO: 209659 - RNA, 23 nt, Artificial Sequence
  Synthetic
gagcuggggaggcagagguugca

SEQ ID NO: 209660 - RNA, 24 nt, Artificial Sequence
  Synthetic
ugagcuggggaggcagagguugca

SEQ ID NO: 209661 - RNA, 18 nt, Artificial Sequence
  Synthetic
gucaaggaggagguugca

SEQ ID NO: 209662 - RNA, 19 nt, Artificial Sequence
  Synthetic
ggucaaggaggagguugca

SEQ ID NO: 209663 - RNA, 20 nt, Artificial Sequence
  Synthetic
aggucaaggaggagguugca

SEQ ID NO: 209664 - RNA, 21 nt, Artificial Sequence
  Synthetic
caggucaaggaggagguugca

SEQ ID NO: 209665 - RNA, 22 nt, Artificial Sequence
  Synthetic
ccaggucaaggaggagguugca

SEQ ID NO: 209666 - RNA, 23 nt, Artificial Sequence
  Synthetic
cccaggucaaggaggagguugca

SEQ ID NO: 209667 - RNA, 24 nt, Artificial Sequence
  Synthetic
ccccaggucaaggaggagguugca

SEQ ID NO: 209668 - RNA, 18 nt, Artificial Sequence
  Synthetic
agggaguaggagguugca

SEQ ID NO: 209669 - RNA, 19 nt, Artificial Sequence
  Synthetic
cagggaguaggagguugca

SEQ ID NO: 209670 - RNA, 20 nt, Artificial Sequence
  Synthetic
ccagggaguaggagguugca

SEQ ID NO: 209671 - RNA, 21 nt, Artificial Sequence
  Synthetic
accagggaguaggagguugca

SEQ ID NO: 209672 - RNA, 22 nt, Artificial Sequence
  Synthetic
aaccagggaguaggagguugca

SEQ ID NO: 209673 - RNA, 23 nt, Artificial Sequence
  Synthetic
gaaccagggaguaggagguugca

SEQ ID NO: 209674 - RNA, 24 nt, Artificial Sequence
  Synthetic
ugaaccagggaguaggagguugca

SEQ ID NO: 209675 - RNA, 18 nt, Artificial Sequence
  Synthetic
cagcaggcggagguugca

SEQ ID NO: 209676 - RNA, 19 nt, Artificial Sequence
  Synthetic
ccagcaggcggagguugca

SEQ ID NO: 209677 - RNA, 20 nt, Artificial Sequence
  Synthetic
cccagcaggcggagguugca

SEQ ID NO: 209678 - RNA, 21 nt, Artificial Sequence
  Synthetic
acccagcaggcggagguugca

SEQ ID NO: 209679 - RNA, 22 nt, Artificial Sequence
  Synthetic
aacccagcaggcggagguugca

SEQ ID NO: 209680 - RNA, 23 nt, Artificial Sequence
  Synthetic
gaacccagcaggcggagguugca

SEQ ID NO: 209681 - RNA, 24 nt, Artificial Sequence
  Synthetic
ugaacccagcaggcggagguugca

SEQ ID NO: 209682 - RNA, 18 nt, Artificial Sequence
  Synthetic
cacgaggcggagguugca

SEQ ID NO: 209683 - RNA, 19 nt, Artificial Sequence
  Synthetic
ccacgaggcggagguugca

SEQ ID NO: 209684 - RNA, 20 nt, Artificial Sequence
  Synthetic
cccacgaggcggagguugca

SEQ ID NO: 209685 - RNA, 21 nt, Artificial Sequence
  Synthetic
acccacgaggcggagguugca

SEQ ID NO: 209686 - RNA, 22 nt, Artificial Sequence
  Synthetic
aacccacgaggcggagguugca

SEQ ID NO: 209687 - RNA, 23 nt, Artificial Sequence
  Synthetic
gaacccacgaggcggagguugca

SEQ ID NO: 209688 - RNA, 24 nt, Artificial Sequence
  Synthetic
ugaacccacgaggcggagguugca

SEQ ID NO: 209689 - RNA, 21 nt, Artificial Sequence
  Synthetic
acccaggaggcggagguugca

SEQ ID NO: 209690 - RNA, 22 nt, Artificial Sequence
  Synthetic
aacccaggaggcggagguugca

SEQ ID NO: 209691 - RNA, 23 nt, Artificial Sequence
  Synthetic
gaacccaggaggcggagguugca

SEQ ID NO: 209692 - RNA, 24 nt, Artificial Sequence
  Synthetic
ggaacccaggaggcggagguugca

SEQ ID NO: 209693 - RNA, 18 nt, Artificial Sequence
  Synthetic
cgggaggcggagguugca

SEQ ID NO: 209694 - RNA, 19 nt, Artificial Sequence
  Synthetic
ccgggaggcggagguugca

SEQ ID NO: 209695 - RNA, 21 nt, Artificial Sequence
  Synthetic
acccgggaggcggagguugca

SEQ ID NO: 209696 - RNA, 22 nt, Artificial Sequence
  Synthetic
aacccgggaggcggagguugca

SEQ ID NO: 209697 - RNA, 23 nt, Artificial Sequence
  Synthetic
gaacccgggaggcggagguugca

SEQ ID NO: 209698 - RNA, 24 nt, Artificial Sequence
  Synthetic
cgaacccgggaggcggagguugca

SEQ ID NO: 209699 - RNA, 20 nt, Artificial Sequence
  Synthetic
gccgggaggcggagguugca

SEQ ID NO: 209700 - RNA, 21 nt, Artificial Sequence
  Synthetic
agccgggaggcggagguugca

SEQ ID NO: 209701 - RNA, 22 nt, Artificial Sequence
  Synthetic
aagccgggaggcggagguugca

SEQ ID NO: 209702 - RNA, 23 nt, Artificial Sequence
  Synthetic
gaagccgggaggcggagguugca

SEQ ID NO: 209703 - RNA, 24 nt, Artificial Sequence
  Synthetic
ugaagccgggaggcggagguugca

SEQ ID NO: 209704 - RNA, 18 nt, Artificial Sequence
  Synthetic
ugggaggcggagguugca

SEQ ID NO: 209705 - RNA, 19 nt, Artificial Sequence
  Synthetic
cugggaggcggagguugca

SEQ ID NO: 209706 - RNA, 20 nt, Artificial Sequence
  Synthetic
ccugggaggcggagguugca

SEQ ID NO: 209707 - RNA, 18 nt, Artificial Sequence
  Synthetic
cuggaggcggagguugca

SEQ ID NO: 209708 - RNA, 19 nt, Artificial Sequence
  Synthetic
ccuggaggcggagguugca

SEQ ID NO: 209709 - RNA, 20 nt, Artificial Sequence
  Synthetic
accuggaggcggagguugca

SEQ ID NO: 209710 - RNA, 21 nt, Artificial Sequence
  Synthetic
aaccuggaggcggagguugca

SEQ ID NO: 209711 - RNA, 22 nt, Artificial Sequence
  Synthetic
gaaccuggaggcggagguugca

SEQ ID NO: 209712 - RNA, 23 nt, Artificial Sequence
  Synthetic
ugaaccuggaggcggagguugca

SEQ ID NO: 209713 - RNA, 24 nt, Artificial Sequence
  Synthetic
uugaaccuggaggcggagguugca

SEQ ID NO: 209714 - RNA, 18 nt, Artificial Sequence
  Synthetic
agggagucggagguugca

SEQ ID NO: 209715 - RNA, 19 nt, Artificial Sequence
  Synthetic
cagggagucggagguugca

SEQ ID NO: 209716 - RNA, 20 nt, Artificial Sequence
  Synthetic
ccagggagucggagguugca

SEQ ID NO: 209717 - RNA, 21 nt, Artificial Sequence
  Synthetic
gccagggagucggagguugca

SEQ ID NO: 209718 - RNA, 22 nt, Artificial Sequence
  Synthetic
agccagggagucggagguugca

SEQ ID NO: 209719 - RNA, 23 nt, Artificial Sequence
  Synthetic
gagccagggagucggagguugca

SEQ ID NO: 209720 - RNA, 24 nt, Artificial Sequence
  Synthetic
ugagccagggagucggagguugca

SEQ ID NO: 209721 - RNA, 19 nt, Artificial Sequence
  Synthetic
ccaggagguggagguugca

SEQ ID NO: 209722 - RNA, 20 nt, Artificial Sequence
  Synthetic
cccaggagguggagguugca

SEQ ID NO: 209723 - RNA, 21 nt, Artificial Sequence
  Synthetic
acccaggagguggagguugca

SEQ ID NO: 209724 - RNA, 22 nt, Artificial Sequence
  Synthetic
aacccaggagguggagguugca

SEQ ID NO: 209725 - RNA, 23 nt, Artificial Sequence
  Synthetic
gaacccaggagguggagguugca

SEQ ID NO: 209726 - RNA, 24 nt, Artificial Sequence
  Synthetic
ugaacccaggagguggagguugca

SEQ ID NO: 209727 - RNA, 19 nt, Artificial Sequence
  Synthetic
ccgggagguggagguugca

SEQ ID NO: 209728 - RNA, 20 nt, Artificial Sequence
  Synthetic
cccgggagguggagguugca

SEQ ID NO: 209729 - RNA, 21 nt, Artificial Sequence
  Synthetic
acccgggagguggagguugca

SEQ ID NO: 209730 - RNA, 22 nt, Artificial Sequence
  Synthetic
aacccgggagguggagguugca

SEQ ID NO: 209731 - RNA, 23 nt, Artificial Sequence
  Synthetic
gaacccgggagguggagguugca

SEQ ID NO: 209732 - RNA, 24 nt, Artificial Sequence
  Synthetic
ugaacccgggagguggagguugca

SEQ ID NO: 209733 - RNA, 18 nt, Artificial Sequence
  Synthetic
cgggaggcagauguugca

SEQ ID NO: 209734 - RNA, 19 nt, Artificial Sequence
  Synthetic
ccgggaggcagauguugca

SEQ ID NO: 209735 - RNA, 20 nt, Artificial Sequence
  Synthetic
cccgggaggcagauguugca

SEQ ID NO: 209736 - RNA, 21 nt, Artificial Sequence
  Synthetic
acccgggaggcagauguugca

SEQ ID NO: 209737 - RNA, 22 nt, Artificial Sequence
  Synthetic
aacccgggaggcagauguugca

SEQ ID NO: 209738 - RNA, 23 nt, Artificial Sequence
  Synthetic
gaacccgggaggcagauguugca

SEQ ID NO: 209739 - RNA, 24 nt, Artificial Sequence
  Synthetic
ugaacccgggaggcagauguugca

SEQ ID NO: 209740 - RNA, 18 nt, Artificial Sequence
  Synthetic
ucaguuucuauuguugca

SEQ ID NO: 209741 - RNA, 19 nt, Artificial Sequence
  Synthetic
aucaguuucuauuguugca

SEQ ID NO: 209742 - RNA, 20 nt, Artificial Sequence
  Synthetic
uaucaguuucuauuguugca

SEQ ID NO: 209743 - RNA, 21 nt, Artificial Sequence
  Synthetic
auaucaguuucuauuguugca

SEQ ID NO: 209744 - RNA, 22 nt, Artificial Sequence
  Synthetic
cauaucaguuucuauuguugca

SEQ ID NO: 209745 - RNA, 23 nt, Artificial Sequence
  Synthetic
ccauaucaguuucuauuguugca

SEQ ID NO: 209746 - RNA, 24 nt, Artificial Sequence
  Synthetic
uccauaucaguuucuauuguugca

SEQ ID NO: 209747 - RNA, 18 nt, Artificial Sequence
  Synthetic
uuaguaguaguuguugca

SEQ ID NO: 209748 - RNA, 19 nt, Artificial Sequence
  Synthetic
uuuaguaguaguuguugca

SEQ ID NO: 209749 - RNA, 20 nt, Artificial Sequence
  Synthetic
uuuuaguaguaguuguugca

SEQ ID NO: 209750 - RNA, 21 nt, Artificial Sequence
  Synthetic
auuuuaguaguaguuguugca

SEQ ID NO: 209751 - RNA, 22 nt, Artificial Sequence
  Synthetic
gauuuuaguaguaguuguugca

SEQ ID NO: 209752 - RNA, 23 nt, Artificial Sequence
  Synthetic
agauuuuaguaguaguuguugca

SEQ ID NO: 209753 - RNA, 24 nt, Artificial Sequence
  Synthetic
cagauuuuaguaguaguuguugca

SEQ ID NO: 209754 - RNA, 18 nt, Artificial Sequence
  Synthetic
ccuuccccaaaauuugca

SEQ ID NO: 209755 - RNA, 19 nt, Artificial Sequence
  Synthetic
cccuuccccaaaauuugca

SEQ ID NO: 209756 - RNA, 20 nt, Artificial Sequence
  Synthetic
ccccuuccccaaaauuugca

SEQ ID NO: 209757 - RNA, 21 nt, Artificial Sequence
  Synthetic
cccccuuccccaaaauuugca

SEQ ID NO: 209758 - RNA, 22 nt, Artificial Sequence
  Synthetic
ucccccuuccccaaaauuugca

SEQ ID NO: 209759 - RNA, 23 nt, Artificial Sequence
  Synthetic
cucccccuuccccaaaauuugca

SEQ ID NO: 209760 - RNA, 24 nt, Artificial Sequence
  Synthetic
ccucccccuuccccaaaauuugca

SEQ ID NO: 209761 - RNA, 18 nt, Artificial Sequence
  Synthetic
aguuuucuaaaauuugca

SEQ ID NO: 209762 - RNA, 19 nt, Artificial Sequence
  Synthetic
caguuuucuaaaauuugca

SEQ ID NO: 209763 - RNA, 20 nt, Artificial Sequence
  Synthetic
ucaguuuucuaaaauuugca

SEQ ID NO: 209764 - RNA, 21 nt, Artificial Sequence
  Synthetic
aucaguuuucuaaaauuugca

SEQ ID NO: 209765 - RNA, 22 nt, Artificial Sequence
  Synthetic
uaucaguuuucuaaaauuugca

SEQ ID NO: 209766 - RNA, 23 nt, Artificial Sequence
  Synthetic
auaucaguuuucuaaaauuugca

SEQ ID NO: 209767 - RNA, 24 nt, Artificial Sequence
  Synthetic
cauaucaguuuucuaaaauuugca

SEQ ID NO: 209768 - RNA, 18 nt, Artificial Sequence
  Synthetic
caguucaguaaauuugca

SEQ ID NO: 209769 - RNA, 19 nt, Artificial Sequence
  Synthetic
ucaguucaguaaauuugca

SEQ ID NO: 209770 - RNA, 20 nt, Artificial Sequence
  Synthetic
uucaguucaguaaauuugca

SEQ ID NO: 209771 - RNA, 21 nt, Artificial Sequence
  Synthetic
uuucaguucaguaaauuugca

SEQ ID NO: 209772 - RNA, 22 nt, Artificial Sequence
  Synthetic
auuucaguucaguaaauuugca

SEQ ID NO: 209773 - RNA, 23 nt, Artificial Sequence
  Synthetic
gauuucaguucaguaaauuugca

SEQ ID NO: 209774 - RNA, 24 nt, Artificial Sequence
  Synthetic
agauuucaguucaguaaauuugca

SEQ ID NO: 209775 - RNA, 18 nt, Artificial Sequence
  Synthetic
aacucuaccacauuugca

SEQ ID NO: 209776 - RNA, 19 nt, Artificial Sequence
  Synthetic
gaacucuaccacauuugca

SEQ ID NO: 209777 - RNA, 20 nt, Artificial Sequence
  Synthetic
agaacucuaccacauuugca

SEQ ID NO: 209778 - RNA, 21 nt, Artificial Sequence
  Synthetic
cagaacucuaccacauuugca

SEQ ID NO: 209779 - RNA, 22 nt, Artificial Sequence
  Synthetic
acagaacucuaccacauuugca

SEQ ID NO: 209780 - RNA, 23 nt, Artificial Sequence
  Synthetic
aacagaacucuaccacauuugca

SEQ ID NO: 209781 - RNA, 24 nt, Artificial Sequence
  Synthetic
aaacagaacucuaccacauuugca

SEQ ID NO: 209782 - RNA, 18 nt, Artificial Sequence
  Synthetic
uaaaaauugacauuugca

SEQ ID NO: 209783 - RNA, 19 nt, Artificial Sequence
  Synthetic
auaaaaauugacauuugca

SEQ ID NO: 209784 - RNA, 20 nt, Artificial Sequence
  Synthetic
uauaaaaauugacauuugca

SEQ ID NO: 209785 - RNA, 21 nt, Artificial Sequence
  Synthetic
uuauaaaaauugacauuugca

SEQ ID NO: 209786 - RNA, 22 nt, Artificial Sequence
  Synthetic
auuauaaaaauugacauuugca

SEQ ID NO: 209787 - RNA, 23 nt, Artificial Sequence
  Synthetic
aauuauaaaaauugacauuugca

SEQ ID NO: 209788 - RNA, 24 nt, Artificial Sequence
  Synthetic
caauuauaaaaauugacauuugca

SEQ ID NO: 209789 - RNA, 18 nt, Artificial Sequence
  Synthetic
uuuuuuuuuugauuugca

SEQ ID NO: 209790 - RNA, 19 nt, Artificial Sequence
  Synthetic
uuuuuuuuuuugauuugca

SEQ ID NO: 209791 - RNA, 20 nt, Artificial Sequence
  Synthetic
uuuuuuuuuuuugauuugca

SEQ ID NO: 209792 - RNA, 21 nt, Artificial Sequence
  Synthetic
uuuuuuuuuuuuugauuugca

SEQ ID NO: 209793 - RNA, 22 nt, Artificial Sequence
  Synthetic
uuuuuuuuuuuuuugauuugca

SEQ ID NO: 209794 - RNA, 23 nt, Artificial Sequence
  Synthetic
uuuuuuuuuuuuuuugauuugca

SEQ ID NO: 209795 - RNA, 24 nt, Artificial Sequence
  Synthetic
uuuuuuuuuuuuuuuugauuugca

SEQ ID NO: 209796 - RNA, 18 nt, Artificial Sequence
  Synthetic
uuuucuaguuuauuugca

SEQ ID NO: 209797 - RNA, 19 nt, Artificial Sequence
  Synthetic
auuuucuaguuuauuugca

SEQ ID NO: 209798 - RNA, 20 nt, Artificial Sequence
  Synthetic
gauuuucuaguuuauuugca

SEQ ID NO: 209799 - RNA, 21 nt, Artificial Sequence
  Synthetic
agauuuucuaguuuauuugca

SEQ ID NO: 209800 - RNA, 22 nt, Artificial Sequence
  Synthetic
uagauuuucuaguuuauuugca

SEQ ID NO: 209801 - RNA, 23 nt, Artificial Sequence
  Synthetic
cuagauuuucuaguuuauuugca

SEQ ID NO: 209802 - RNA, 24 nt, Artificial Sequence
  Synthetic
ucuagauuuucuaguuuauuugca

SEQ ID NO: 209803 - RNA, 18 nt, Artificial Sequence
  Synthetic
ugucacauuuuauuugca

SEQ ID NO: 209804 - RNA, 19 nt, Artificial Sequence
  Synthetic
augucacauuuuauuugca

SEQ ID NO: 209805 - RNA, 20 nt, Artificial Sequence
  Synthetic
uaugucacauuuuauuugca

SEQ ID NO: 209806 - RNA, 21 nt, Artificial Sequence
  Synthetic
cuaugucacauuuuauuugca

SEQ ID NO: 209807 - RNA, 22 nt, Artificial Sequence
  Synthetic
ucuaugucacauuuuauuugca

SEQ ID NO: 209808 - RNA, 23 nt, Artificial Sequence
  Synthetic
uucuaugucacauuuuauuugca

SEQ ID NO: 209809 - RNA, 24 nt, Artificial Sequence
  Synthetic
uuucuaugucacauuuuauuugca

SEQ ID NO: 209810 - RNA, 18 nt, Artificial Sequence
  Synthetic
gguuaggaaaacuuugca

SEQ ID NO: 209811 - RNA, 19 nt, Artificial Sequence
  Synthetic
agguuaggaaaacuuugca

SEQ ID NO: 209812 - RNA, 20 nt, Artificial Sequence
  Synthetic
uagguuaggaaaacuuugca

SEQ ID NO: 209813 - RNA, 21 nt, Artificial Sequence
  Synthetic
guagguuaggaaaacuuugca

SEQ ID NO: 209814 - RNA, 22 nt, Artificial Sequence
  Synthetic
gguagguuaggaaaacuuugca

SEQ ID NO: 209815 - RNA, 23 nt, Artificial Sequence
  Synthetic
agguagguuaggaaaacuuugca

SEQ ID NO: 209816 - RNA, 24 nt, Artificial Sequence
  Synthetic
cagguagguuaggaaaacuuugca

SEQ ID NO: 209817 - RNA, 18 nt, Artificial Sequence
  Synthetic
aacagaucauccuuugca

SEQ ID NO: 209818 - RNA, 19 nt, Artificial Sequence
  Synthetic
aaacagaucauccuuugca

SEQ ID NO: 209819 - RNA, 20 nt, Artificial Sequence
  Synthetic
caaacagaucauccuuugca

SEQ ID NO: 209820 - RNA, 21 nt, Artificial Sequence
  Synthetic
acaaacagaucauccuuugca

SEQ ID NO: 209821 - RNA, 22 nt, Artificial Sequence
  Synthetic
aacaaacagaucauccuuugca

SEQ ID NO: 209822 - RNA, 23 nt, Artificial Sequence
  Synthetic
aaacaaacagaucauccuuugca

SEQ ID NO: 209823 - RNA, 24 nt, Artificial Sequence
  Synthetic
aaaacaaacagaucauccuuugca

SEQ ID NO: 209824 - RNA, 18 nt, Artificial Sequence
  Synthetic
acaggguuugucuuugca

SEQ ID NO: 209825 - RNA, 19 nt, Artificial Sequence
  Synthetic
aacaggguuugucuuugca

SEQ ID NO: 209826 - RNA, 20 nt, Artificial Sequence
  Synthetic
gaacaggguuugucuuugca

SEQ ID NO: 209827 - RNA, 21 nt, Artificial Sequence
  Synthetic
agaacaggguuugucuuugca

SEQ ID NO: 209828 - RNA, 22 nt, Artificial Sequence
  Synthetic
uagaacaggguuugucuuugca

SEQ ID NO: 209829 - RNA, 23 nt, Artificial Sequence
  Synthetic
cuagaacaggguuugucuuugca

SEQ ID NO: 209830 - RNA, 24 nt, Artificial Sequence
  Synthetic
gcuagaacaggguuugucuuugca

SEQ ID NO: 209831 - RNA, 18 nt, Artificial Sequence
  Synthetic
uguuaaacuaaguuugca

SEQ ID NO: 209832 - RNA, 19 nt, Artificial Sequence
  Synthetic
uuguuaaacuaaguuugca

SEQ ID NO: 209833 - RNA, 20 nt, Artificial Sequence
  Synthetic
guuguuaaacuaaguuugca

SEQ ID NO: 209834 - RNA, 21 nt, Artificial Sequence
  Synthetic
uguuguuaaacuaaguuugca

SEQ ID NO: 209835 - RNA, 22 nt, Artificial Sequence
  Synthetic
uuguuguuaaacuaaguuugca

SEQ ID NO: 209836 - RNA, 23 nt, Artificial Sequence
  Synthetic
cuuguuguuaaacuaaguuugca

SEQ ID NO: 209837 - RNA, 24 nt, Artificial Sequence
  Synthetic
acuuguuguuaaacuaaguuugca

SEQ ID NO: 209838 - RNA, 18 nt, Artificial Sequence
  Synthetic
cuggaggcagaguuugca

SEQ ID NO: 209839 - RNA, 19 nt, Artificial Sequence
  Synthetic
ccuggaggcagaguuugca

SEQ ID NO: 209840 - RNA, 20 nt, Artificial Sequence
  Synthetic
cccuggaggcagaguuugca

SEQ ID NO: 209841 - RNA, 21 nt, Artificial Sequence
  Synthetic
acccuggaggcagaguuugca

SEQ ID NO: 209842 - RNA, 22 nt, Artificial Sequence
  Synthetic
aacccuggaggcagaguuugca

SEQ ID NO: 209843 - RNA, 23 nt, Artificial Sequence
  Synthetic
gaacccuggaggcagaguuugca

SEQ ID NO: 209844 - RNA, 24 nt, Artificial Sequence
  Synthetic
cgaacccuggaggcagaguuugca

SEQ ID NO: 209845 - RNA, 18 nt, Artificial Sequence
  Synthetic
cgggaggcggaguuugca

SEQ ID NO: 209846 - RNA, 19 nt, Artificial Sequence
  Synthetic
ccgggaggcggaguuugca

SEQ ID NO: 209847 - RNA, 20 nt, Artificial Sequence
  Synthetic
cccgggaggcggaguuugca

SEQ ID NO: 209848 - RNA, 21 nt, Artificial Sequence
  Synthetic
acccgggaggcggaguuugca

SEQ ID NO: 209849 - RNA, 22 nt, Artificial Sequence
  Synthetic
aacccgggaggcggaguuugca

SEQ ID NO: 209850 - RNA, 23 nt, Artificial Sequence
  Synthetic
gaacccgggaggcggaguuugca

SEQ ID NO: 209851 - RNA, 24 nt, Artificial Sequence
  Synthetic
ugaacccgggaggcggaguuugca

SEQ ID NO: 209852 - RNA, 18 nt, Artificial Sequence
  Synthetic
ugggaaguguaguuugca

SEQ ID NO: 209853 - RNA, 19 nt, Artificial Sequence
  Synthetic
cugggaaguguaguuugca

SEQ ID NO: 209854 - RNA, 20 nt, Artificial Sequence
  Synthetic
ccugggaaguguaguuugca

SEQ ID NO: 209855 - RNA, 21 nt, Artificial Sequence
  Synthetic
accugggaaguguaguuugca

SEQ ID NO: 209856 - RNA, 22 nt, Artificial Sequence
  Synthetic
aaccugggaaguguaguuugca

SEQ ID NO: 209857 - RNA, 23 nt, Artificial Sequence
  Synthetic
gaaccugggaaguguaguuugca

SEQ ID NO: 209858 - RNA, 24 nt, Artificial Sequence
  Synthetic
ugaaccugggaaguguaguuugca

SEQ ID NO: 209859 - RNA, 18 nt, Artificial Sequence
  Synthetic
uauuauucuuaguuugca

SEQ ID NO: 209860 - RNA, 19 nt, Artificial Sequence
  Synthetic
uuauuauucuuaguuugca

SEQ ID NO: 209861 - RNA, 20 nt, Artificial Sequence
  Synthetic
cuuauuauucuuaguuugca

SEQ ID NO: 209862 - RNA, 21 nt, Artificial Sequence
  Synthetic
ucuuauuauucuuaguuugca

SEQ ID NO: 209863 - RNA, 22 nt, Artificial Sequence
  Synthetic
cucuuauuauucuuaguuugca

SEQ ID NO: 209864 - RNA, 23 nt, Artificial Sequence
  Synthetic
acucuuauuauucuuaguuugca

SEQ ID NO: 209865 - RNA, 24 nt, Artificial Sequence
  Synthetic
uacucuuauuauucuuaguuugca

SEQ ID NO: 209866 - RNA, 18 nt, Artificial Sequence
  Synthetic
ucuguuccaaauuuugca

SEQ ID NO: 209867 - RNA, 19 nt, Artificial Sequence
  Synthetic
uucuguuccaaauuuugca

SEQ ID NO: 209868 - RNA, 20 nt, Artificial Sequence
  Synthetic
uuucuguuccaaauuuugca

SEQ ID NO: 209869 - RNA, 21 nt, Artificial Sequence
  Synthetic
auuucuguuccaaauuuugca

SEQ ID NO: 209870 - RNA, 22 nt, Artificial Sequence
  Synthetic
uauuucuguuccaaauuuugca

SEQ ID NO: 209871 - RNA, 23 nt, Artificial Sequence
  Synthetic
uuauuucuguuccaaauuuugca

SEQ ID NO: 209872 - RNA, 24 nt, Artificial Sequence
  Synthetic
cuuauuucuguuccaaauuuugca

SEQ ID NO: 209873 - RNA, 18 nt, Artificial Sequence
  Synthetic
cucuucuuuaauuuugca

SEQ ID NO: 209874 - RNA, 19 nt, Artificial Sequence
  Synthetic
gcucuucuuuaauuuugca

SEQ ID NO: 209875 - RNA, 20 nt, Artificial Sequence
  Synthetic
agcucuucuuuaauuuugca

SEQ ID NO: 209876 - RNA, 21 nt, Artificial Sequence
  Synthetic
uagcucuucuuuaauuuugca

SEQ ID NO: 209877 - RNA, 22 nt, Artificial Sequence
  Synthetic
guagcucuucuuuaauuuugca

SEQ ID NO: 209878 - RNA, 23 nt, Artificial Sequence
  Synthetic
gguagcucuucuuuaauuuugca

SEQ ID NO: 209879 - RNA, 24 nt, Artificial Sequence
  Synthetic
cgguagcucuucuuuaauuuugca

SEQ ID NO: 209880 - RNA, 18 nt, Artificial Sequence
  Synthetic
ugucuuuuauauuuugca

SEQ ID NO: 209881 - RNA, 19 nt, Artificial Sequence
  Synthetic
augucuuuuauauuuugca

SEQ ID NO: 209882 - RNA, 20 nt, Artificial Sequence
  Synthetic
aaugucuuuuauauuuugca

SEQ ID NO: 209883 - RNA, 21 nt, Artificial Sequence
  Synthetic
aaaugucuuuuauauuuugca

SEQ ID NO: 209884 - RNA, 22 nt, Artificial Sequence
  Synthetic
aaaaugucuuuuauauuuugca

SEQ ID NO: 209885 - RNA, 23 nt, Artificial Sequence
  Synthetic
aaaaaugucuuuuauauuuugca

SEQ ID NO: 209886 - RNA, 24 nt, Artificial Sequence
  Synthetic
caaaaaugucuuuuauauuuugca

SEQ ID NO: 209887 - RNA, 18 nt, Artificial Sequence
  Synthetic
aaauggagguauuuugca

SEQ ID NO: 209888 - RNA, 19 nt, Artificial Sequence
  Synthetic
aaaauggagguauuuugca

SEQ ID NO: 209889 - RNA, 20 nt, Artificial Sequence
  Synthetic
aaaaauggagguauuuugca

SEQ ID NO: 209890 - RNA, 21 nt, Artificial Sequence
  Synthetic
aaaaaauggagguauuuugca

SEQ ID NO: 209891 - RNA, 22 nt, Artificial Sequence
  Synthetic
caaaaaauggagguauuuugca

SEQ ID NO: 209892 - RNA, 23 nt, Artificial Sequence
  Synthetic
ccaaaaaauggagguauuuugca

SEQ ID NO: 209893 - RNA, 24 nt, Artificial Sequence
  Synthetic
cccaaaaaauggagguauuuugca

SEQ ID NO: 209894 - RNA, 18 nt, Artificial Sequence
  Synthetic
agcugggaccuuuuugca

SEQ ID NO: 209895 - RNA, 19 nt, Artificial Sequence
  Synthetic
cagcugggaccuuuuugca

SEQ ID NO: 209896 - RNA, 20 nt, Artificial Sequence
  Synthetic
gcagcugggaccuuuuugca

SEQ ID NO: 209897 - RNA, 21 nt, Artificial Sequence
  Synthetic
agcagcugggaccuuuuugca

SEQ ID NO: 209898 - RNA, 22 nt, Artificial Sequence
  Synthetic
aagcagcugggaccuuuuugca

SEQ ID NO: 209899 - RNA, 23 nt, Artificial Sequence
  Synthetic
aaagcagcugggaccuuuuugca

SEQ ID NO: 209900 - RNA, 24 nt, Artificial Sequence
  Synthetic
caaagcagcugggaccuuuuugca

SEQ ID NO: 209901 - RNA, 18 nt, Artificial Sequence
  Synthetic
aaauccuucaaaaaauca

SEQ ID NO: 209902 - RNA, 19 nt, Artificial Sequence
  Synthetic
gaaauccuucaaaaaauca

SEQ ID NO: 209903 - RNA, 20 nt, Artificial Sequence
  Synthetic
agaaauccuucaaaaaauca

SEQ ID NO: 209904 - RNA, 21 nt, Artificial Sequence
  Synthetic
gagaaauccuucaaaaaauca

SEQ ID NO: 209905 - RNA, 22 nt, Artificial Sequence
  Synthetic
ugagaaauccuucaaaaaauca

SEQ ID NO: 209906 - RNA, 23 nt, Artificial Sequence
  Synthetic
augagaaauccuucaaaaaauca

SEQ ID NO: 209907 - RNA, 24 nt, Artificial Sequence
  Synthetic
caugagaaauccuucaaaaaauca

SEQ ID NO: 209908 - RNA, 18 nt, Artificial Sequence
  Synthetic
guaugucuacaaaaauca

SEQ ID NO: 209909 - RNA, 19 nt, Artificial Sequence
  Synthetic
aguaugucuacaaaaauca

SEQ ID NO: 209910 - RNA, 20 nt, Artificial Sequence
  Synthetic
aaguaugucuacaaaaauca

SEQ ID NO: 209911 - RNA, 21 nt, Artificial Sequence
  Synthetic
caaguaugucuacaaaaauca

SEQ ID NO: 209912 - RNA, 22 nt, Artificial Sequence
  Synthetic
acaaguaugucuacaaaaauca

SEQ ID NO: 209913 - RNA, 23 nt, Artificial Sequence
  Synthetic
gacaaguaugucuacaaaaauca

SEQ ID NO: 209914 - RNA, 24 nt, Artificial Sequence
  Synthetic
ggacaaguaugucuacaaaaauca

SEQ ID NO: 209915 - RNA, 18 nt, Artificial Sequence
  Synthetic
cuguugucucaaaaauca

SEQ ID NO: 209916 - RNA, 19 nt, Artificial Sequence
  Synthetic
acuguugucucaaaaauca

SEQ ID NO: 209917 - RNA, 20 nt, Artificial Sequence
  Synthetic
cacuguugucucaaaaauca

SEQ ID NO: 209918 - RNA, 21 nt, Artificial Sequence
  Synthetic
ucacuguugucucaaaaauca

SEQ ID NO: 209919 - RNA, 22 nt, Artificial Sequence
  Synthetic
aucacuguugucucaaaaauca

SEQ ID NO: 209920 - RNA, 23 nt, Artificial Sequence
  Synthetic
aaucacuguugucucaaaaauca

SEQ ID NO: 209921 - RNA, 24 nt, Artificial Sequence
  Synthetic
aaaucacuguugucucaaaaauca

SEQ ID NO: 209922 - RNA, 18 nt, Artificial Sequence
  Synthetic
aagaagaaagaaaaauca

SEQ ID NO: 209923 - RNA, 19 nt, Artificial Sequence
  Synthetic
gaagaagaaagaaaaauca

SEQ ID NO: 209924 - RNA, 20 nt, Artificial Sequence
  Synthetic
agaagaagaaagaaaaauca

SEQ ID NO: 209925 - RNA, 21 nt, Artificial Sequence
  Synthetic
aagaagaagaaagaaaaauca

SEQ ID NO: 209926 - RNA, 22 nt, Artificial Sequence
  Synthetic
gaagaagaagaaagaaaaauca

SEQ ID NO: 209927 - RNA, 23 nt, Artificial Sequence
  Synthetic
agaagaagaagaaagaaaaauca

SEQ ID NO: 209928 - RNA, 24 nt, Artificial Sequence
  Synthetic
uagaagaagaagaaagaaaaauca

SEQ ID NO: 209929 - RNA, 18 nt, Artificial Sequence
  Synthetic
acuuugauggaaaaauca

SEQ ID NO: 209930 - RNA, 19 nt, Artificial Sequence
  Synthetic
aacuuugauggaaaaauca

SEQ ID NO: 209931 - RNA, 20 nt, Artificial Sequence
  Synthetic
aaacuuugauggaaaaauca

SEQ ID NO: 209932 - RNA, 21 nt, Artificial Sequence
  Synthetic
gaaacuuugauggaaaaauca

SEQ ID NO: 209933 - RNA, 22 nt, Artificial Sequence
  Synthetic
agaaacuuugauggaaaaauca

SEQ ID NO: 209934 - RNA, 23 nt, Artificial Sequence
  Synthetic
uagaaacuuugauggaaaaauca

SEQ ID NO: 209935 - RNA, 24 nt, Artificial Sequence
  Synthetic
auagaaacuuugauggaaaaauca

SEQ ID NO: 209936 - RNA, 18 nt, Artificial Sequence
  Synthetic
guggacuaauaaaaauca

SEQ ID NO: 209937 - RNA, 19 nt, Artificial Sequence
  Synthetic
uguggacuaauaaaaauca

SEQ ID NO: 209938 - RNA, 20 nt, Artificial Sequence
  Synthetic
cuguggacuaauaaaaauca

SEQ ID NO: 209939 - RNA, 21 nt, Artificial Sequence
  Synthetic
acuguggacuaauaaaaauca

SEQ ID NO: 209940 - RNA, 22 nt, Artificial Sequence
  Synthetic
uacuguggacuaauaaaaauca

SEQ ID NO: 209941 - RNA, 23 nt, Artificial Sequence
  Synthetic
cuacuguggacuaauaaaaauca

SEQ ID NO: 209942 - RNA, 24 nt, Artificial Sequence
  Synthetic
ccuacuguggacuaauaaaaauca

SEQ ID NO: 209943 - RNA, 18 nt, Artificial Sequence
  Synthetic
ccagcuauuccaaaauca

SEQ ID NO: 209944 - RNA, 19 nt, Artificial Sequence
  Synthetic
accagcuauuccaaaauca

SEQ ID NO: 209945 - RNA, 20 nt, Artificial Sequence
  Synthetic
aaccagcuauuccaaaauca

SEQ ID NO: 209946 - RNA, 21 nt, Artificial Sequence
  Synthetic
aaaccagcuauuccaaaauca

SEQ ID NO: 209947 - RNA, 22 nt, Artificial Sequence
  Synthetic
gaaaccagcuauuccaaaauca

SEQ ID NO: 209948 - RNA, 23 nt, Artificial Sequence
  Synthetic
ggaaaccagcuauuccaaaauca

SEQ ID NO: 209949 - RNA, 24 nt, Artificial Sequence
  Synthetic
aggaaaccagcuauuccaaaauca

SEQ ID NO: 209950 - RNA, 18 nt, Artificial Sequence
  Synthetic
gugacaggagcaaaauca

SEQ ID NO: 209951 - RNA, 19 nt, Artificial Sequence
  Synthetic
agugacaggagcaaaauca

SEQ ID NO: 209952 - RNA, 20 nt, Artificial Sequence
  Synthetic
aagugacaggagcaaaauca

SEQ ID NO: 209953 - RNA, 21 nt, Artificial Sequence
  Synthetic
aaagugacaggagcaaaauca

SEQ ID NO: 209954 - RNA, 22 nt, Artificial Sequence
  Synthetic
aaaagugacaggagcaaaauca

SEQ ID NO: 209955 - RNA, 23 nt, Artificial Sequence
  Synthetic
aaaaagugacaggagcaaaauca

SEQ ID NO: 209956 - RNA, 24 nt, Artificial Sequence
  Synthetic
gaaaaagugacaggagcaaaauca

SEQ ID NO: 209957 - RNA, 18 nt, Artificial Sequence
  Synthetic
uuugccucaucaaaauca

SEQ ID NO: 209958 - RNA, 19 nt, Artificial Sequence
  Synthetic
auuugccucaucaaaauca

SEQ ID NO: 209959 - RNA, 20 nt, Artificial Sequence
  Synthetic
aauuugccucaucaaaauca

SEQ ID NO: 209960 - RNA, 21 nt, Artificial Sequence
  Synthetic
caauuugccucaucaaaauca

SEQ ID NO: 209961 - RNA, 22 nt, Artificial Sequence
  Synthetic
gcaauuugccucaucaaaauca

SEQ ID NO: 209962 - RNA, 23 nt, Artificial Sequence
  Synthetic
ggcaauuugccucaucaaaauca

SEQ ID NO: 209963 - RNA, 24 nt, Artificial Sequence
  Synthetic
uggcaauuugccucaucaaaauca

SEQ ID NO: 209964 - RNA, 18 nt, Artificial Sequence
  Synthetic
caauccaaaagaaaauca

SEQ ID NO: 209965 - RNA, 19 nt, Artificial Sequence
  Synthetic
gcaauccaaaagaaaauca

SEQ ID NO: 209966 - RNA, 20 nt, Artificial Sequence
  Synthetic
ugcaauccaaaagaaaauca

SEQ ID NO: 209967 - RNA, 21 nt, Artificial Sequence
  Synthetic
augcaauccaaaagaaaauca

SEQ ID NO: 209968 - RNA, 22 nt, Artificial Sequence
  Synthetic
gaugcaauccaaaagaaaauca

SEQ ID NO: 209969 - RNA, 23 nt, Artificial Sequence
  Synthetic
agaugcaauccaaaagaaaauca

SEQ ID NO: 209970 - RNA, 24 nt, Artificial Sequence
  Synthetic
uagaugcaauccaaaagaaaauca

SEQ ID NO: 209971 - RNA, 18 nt, Artificial Sequence
  Synthetic
agaauauggguaaaauca

SEQ ID NO: 209972 - RNA, 19 nt, Artificial Sequence
  Synthetic
uagaauauggguaaaauca

SEQ ID NO: 209973 - RNA, 20 nt, Artificial Sequence
  Synthetic
uuagaauauggguaaaauca

SEQ ID NO: 209974 - RNA, 21 nt, Artificial Sequence
  Synthetic
uuuagaauauggguaaaauca

SEQ ID NO: 209975 - RNA, 22 nt, Artificial Sequence
  Synthetic
guuuagaauauggguaaaauca

SEQ ID NO: 209976 - RNA, 23 nt, Artificial Sequence
  Synthetic
uguuuagaauauggguaaaauca

SEQ ID NO: 209977 - RNA, 24 nt, Artificial Sequence
  Synthetic
auguuuagaauauggguaaaauca

SEQ ID NO: 209978 - RNA, 18 nt, Artificial Sequence
  Synthetic
uucgcauuauacaaauca

SEQ ID NO: 209979 - RNA, 19 nt, Artificial Sequence
  Synthetic
auucgcauuauacaaauca

SEQ ID NO: 209980 - RNA, 20 nt, Artificial Sequence
  Synthetic
aauucgcauuauacaaauca

SEQ ID NO: 209981 - RNA, 21 nt, Artificial Sequence
  Synthetic
aaauucgcauuauacaaauca

SEQ ID NO: 209982 - RNA, 22 nt, Artificial Sequence
  Synthetic
aaaauucgcauuauacaaauca

SEQ ID NO: 209983 - RNA, 23 nt, Artificial Sequence
  Synthetic
aaaaauucgcauuauacaaauca

SEQ ID NO: 209984 - RNA, 24 nt, Artificial Sequence
  Synthetic
uaaaaauucgcauuauacaaauca

SEQ ID NO: 209985 - RNA, 18 nt, Artificial Sequence
  Synthetic
guuaauucaagcaaauca

SEQ ID NO: 209986 - RNA, 19 nt, Artificial Sequence
  Synthetic
uguuaauucaagcaaauca

SEQ ID NO: 209987 - RNA, 20 nt, Artificial Sequence
  Synthetic
uuguuaauucaagcaaauca

SEQ ID NO: 209988 - RNA, 21 nt, Artificial Sequence
  Synthetic
auuguuaauucaagcaaauca

SEQ ID NO: 209989 - RNA, 22 nt, Artificial Sequence
  Synthetic
aauuguuaauucaagcaaauca

SEQ ID NO: 209990 - RNA, 23 nt, Artificial Sequence
  Synthetic
aaauuguuaauucaagcaaauca

SEQ ID NO: 209991 - RNA, 24 nt, Artificial Sequence
  Synthetic
uaaauuguuaauucaagcaaauca

SEQ ID NO: 209992 - RNA, 18 nt, Artificial Sequence
  Synthetic
uaaagcuaacucaaauca

SEQ ID NO: 209993 - RNA, 19 nt, Artificial Sequence
  Synthetic
uuaaagcuaacucaaauca

SEQ ID NO: 209994 - RNA, 20 nt, Artificial Sequence
  Synthetic
auuaaagcuaacucaaauca

SEQ ID NO: 209995 - RNA, 21 nt, Artificial Sequence
  Synthetic
uauuaaagcuaacucaaauca

SEQ ID NO: 209996 - RNA, 22 nt, Artificial Sequence
  Synthetic
guauuaaagcuaacucaaauca

SEQ ID NO: 209997 - RNA, 23 nt, Artificial Sequence
  Synthetic
aguauuaaagcuaacucaaauca

SEQ ID NO: 209998 - RNA, 24 nt, Artificial Sequence
  Synthetic
aaguauuaaagcuaacucaaauca

SEQ ID NO: 209999 - RNA, 18 nt, Artificial Sequence
  Synthetic
cacuggaguuucaaauca

SEQ ID NO: 210000 - RNA, 19 nt, Artificial Sequence
  Synthetic
gcacuggaguuucaaauca

SEQ ID NO: 210001 - RNA, 20 nt, Artificial Sequence
  Synthetic
ugcacuggaguuucaaauca

SEQ ID NO: 210002 - RNA, 21 nt, Artificial Sequence
  Synthetic
uugcacuggaguuucaaauca

SEQ ID NO: 210003 - RNA, 22 nt, Artificial Sequence
  Synthetic
auugcacuggaguuucaaauca

SEQ ID NO: 210004 - RNA, 23 nt, Artificial Sequence
  Synthetic
cauugcacuggaguuucaaauca

SEQ ID NO: 210005 - RNA, 24 nt, Artificial Sequence
  Synthetic
acauugcacuggaguuucaaauca

SEQ ID NO: 210006 - RNA, 18 nt, Artificial Sequence
  Synthetic
aauuuguuucagaaauca

SEQ ID NO: 210007 - RNA, 19 nt, Artificial Sequence
  Synthetic
aaauuuguuucagaaauca

SEQ ID NO: 210008 - RNA, 20 nt, Artificial Sequence
  Synthetic
uaaauuuguuucagaaauca

SEQ ID NO: 210009 - RNA, 21 nt, Artificial Sequence
  Synthetic
uuaaauuuguuucagaaauca

SEQ ID NO: 210010 - RNA, 22 nt, Artificial Sequence
  Synthetic
uuuaaauuuguuucagaaauca

SEQ ID NO: 210011 - RNA, 23 nt, Artificial Sequence
  Synthetic
guuuaaauuuguuucagaaauca

SEQ ID NO: 210012 - RNA, 24 nt, Artificial Sequence
  Synthetic
uguuuaaauuuguuucagaaauca

SEQ ID NO: 210013 - RNA, 18 nt, Artificial Sequence
  Synthetic
gaaacuauuaggaaauca

SEQ ID NO: 210014 - RNA, 19 nt, Artificial Sequence
  Synthetic
ggaaacuauuaggaaauca

SEQ ID NO: 210015 - RNA, 20 nt, Artificial Sequence
  Synthetic
uggaaacuauuaggaaauca

SEQ ID NO: 210016 - RNA, 21 nt, Artificial Sequence
  Synthetic
cuggaaacuauuaggaaauca

SEQ ID NO: 210017 - RNA, 22 nt, Artificial Sequence
  Synthetic
ucuggaaacuauuaggaaauca

SEQ ID NO: 210018 - RNA, 23 nt, Artificial Sequence
  Synthetic
uucuggaaacuauuaggaaauca

SEQ ID NO: 210019 - RNA, 24 nt, Artificial Sequence
  Synthetic
auucuggaaacuauuaggaaauca

SEQ ID NO: 210020 - RNA, 18 nt, Artificial Sequence
  Synthetic
aauauuggggauaaauca

SEQ ID NO: 210021 - RNA, 19 nt, Artificial Sequence
  Synthetic
aaauauuggggauaaauca

SEQ ID NO: 210022 - RNA, 20 nt, Artificial Sequence
  Synthetic
aaaauauuggggauaaauca

SEQ ID NO: 210023 - RNA, 21 nt, Artificial Sequence
  Synthetic
caaaauauuggggauaaauca

SEQ ID NO: 210024 - RNA, 22 nt, Artificial Sequence
  Synthetic
acaaaauauuggggauaaauca

SEQ ID NO: 210025 - RNA, 23 nt, Artificial Sequence
  Synthetic
aacaaaauauuggggauaaauca

SEQ ID NO: 210026 - RNA, 24 nt, Artificial Sequence
  Synthetic
aaacaaaauauuggggauaaauca

SEQ ID NO: 210027 - RNA, 18 nt, Artificial Sequence
  Synthetic
uuccuguuagcuaaauca

SEQ ID NO: 210028 - RNA, 19 nt, Artificial Sequence
  Synthetic
uuuccuguuagcuaaauca

SEQ ID NO: 210029 - RNA, 20 nt, Artificial Sequence
  Synthetic
auuuccuguuagcuaaauca

SEQ ID NO: 210030 - RNA, 21 nt, Artificial Sequence
  Synthetic
aauuuccuguuagcuaaauca

SEQ ID NO: 210031 - RNA, 22 nt, Artificial Sequence
  Synthetic
uaauuuccuguuagcuaaauca

SEQ ID NO: 210032 - RNA, 23 nt, Artificial Sequence
  Synthetic
uuaauuuccuguuagcuaaauca

SEQ ID NO: 210033 - RNA, 24 nt, Artificial Sequence
  Synthetic
auuaauuuccuguuagcuaaauca

SEQ ID NO: 210034 - RNA, 18 nt, Artificial Sequence
  Synthetic
ugacaggucaguaaauca

SEQ ID NO: 210035 - RNA, 19 nt, Artificial Sequence
  Synthetic
gugacaggucaguaaauca

SEQ ID NO: 210036 - RNA, 20 nt, Artificial Sequence
  Synthetic
ugugacaggucaguaaauca

SEQ ID NO: 210037 - RNA, 21 nt, Artificial Sequence
  Synthetic
cugugacaggucaguaaauca

SEQ ID NO: 210038 - RNA, 22 nt, Artificial Sequence
  Synthetic
ucugugacaggucaguaaauca

SEQ ID NO: 210039 - RNA, 23 nt, Artificial Sequence
  Synthetic
aucugugacaggucaguaaauca

SEQ ID NO: 210040 - RNA, 24 nt, Artificial Sequence
  Synthetic
uaucugugacaggucaguaaauca

SEQ ID NO: 210041 - RNA, 18 nt, Artificial Sequence
  Synthetic
uuuuaaaaaauuaaauca

SEQ ID NO: 210042 - RNA, 19 nt, Artificial Sequence
  Synthetic
uuuuuaaaaaauuaaauca

SEQ ID NO: 210043 - RNA, 20 nt, Artificial Sequence
  Synthetic
uuuuuuaaaaaauuaaauca

SEQ ID NO: 210044 - RNA, 21 nt, Artificial Sequence
  Synthetic
uuuuuuuaaaaaauuaaauca

SEQ ID NO: 210045 - RNA, 22 nt, Artificial Sequence
  Synthetic
guuuuuuuaaaaaauuaaauca

SEQ ID NO: 210046 - RNA, 23 nt, Artificial Sequence
  Synthetic
uguuuuuuuaaaaaauuaaauca

SEQ ID NO: 210047 - RNA, 24 nt, Artificial Sequence
  Synthetic
cuguuuuuuuaaaaaauuaaauca

SEQ ID NO: 210048 - RNA, 18 nt, Artificial Sequence
  Synthetic
gacuugguuauuaaauca

SEQ ID NO: 210049 - RNA, 19 nt, Artificial Sequence
  Synthetic
ugacuugguuauuaaauca

SEQ ID NO: 210050 - RNA, 20 nt, Artificial Sequence
  Synthetic
uugacuugguuauuaaauca

SEQ ID NO: 210051 - RNA, 21 nt, Artificial Sequence
  Synthetic
auugacuugguuauuaaauca

SEQ ID NO: 210052 - RNA, 22 nt, Artificial Sequence
  Synthetic
aauugacuugguuauuaaauca

SEQ ID NO: 210053 - RNA, 23 nt, Artificial Sequence
  Synthetic
aaauugacuugguuauuaaauca

SEQ ID NO: 210054 - RNA, 24 nt, Artificial Sequence
  Synthetic
aaaauugacuugguuauuaaauca

SEQ ID NO: 210055 - RNA, 18 nt, Artificial Sequence
  Synthetic
aagaagucuuuuaaauca

SEQ ID NO: 210056 - RNA, 19 nt, Artificial Sequence
  Synthetic
aaagaagucuuuuaaauca

SEQ ID NO: 210057 - RNA, 20 nt, Artificial Sequence
  Synthetic
gaaagaagucuuuuaaauca

SEQ ID NO: 210058 - RNA, 21 nt, Artificial Sequence
  Synthetic
agaaagaagucuuuuaaauca

SEQ ID NO: 210059 - RNA, 22 nt, Artificial Sequence
  Synthetic
gagaaagaagucuuuuaaauca

SEQ ID NO: 210060 - RNA, 23 nt, Artificial Sequence
  Synthetic
ggagaaagaagucuuuuaaauca

SEQ ID NO: 210061 - RNA, 24 nt, Artificial Sequence
  Synthetic
aggagaaagaagucuuuuaaauca

SEQ ID NO: 210062 - RNA, 18 nt, Artificial Sequence
  Synthetic
gcagcuuguuuuaaauca

SEQ ID NO: 210063 - RNA, 19 nt, Artificial Sequence
  Synthetic
ugcagcuuguuuuaaauca

SEQ ID NO: 210064 - RNA, 20 nt, Artificial Sequence
  Synthetic
cugcagcuuguuuuaaauca

SEQ ID NO: 210065 - RNA, 21 nt, Artificial Sequence
  Synthetic
ccugcagcuuguuuuaaauca

SEQ ID NO: 210066 - RNA, 22 nt, Artificial Sequence
  Synthetic
uccugcagcuuguuuuaaauca

SEQ ID NO: 210067 - RNA, 23 nt, Artificial Sequence
  Synthetic
cuccugcagcuuguuuuaaauca

SEQ ID NO: 210068 - RNA, 24 nt, Artificial Sequence
  Synthetic
ccuccugcagcuuguuuuaaauca

SEQ ID NO: 210069 - RNA, 18 nt, Artificial Sequence
  Synthetic
auguugaguacacaauca

SEQ ID NO: 210070 - RNA, 19 nt, Artificial Sequence
  Synthetic
aauguugaguacacaauca

SEQ ID NO: 210071 - RNA, 20 nt, Artificial Sequence
  Synthetic
aaauguugaguacacaauca

SEQ ID NO: 210072 - RNA, 21 nt, Artificial Sequence
  Synthetic
aaaauguugaguacacaauca

SEQ ID NO: 210073 - RNA, 22 nt, Artificial Sequence
  Synthetic
gaaaauguugaguacacaauca

SEQ ID NO: 210074 - RNA, 23 nt, Artificial Sequence
  Synthetic
agaaaauguugaguacacaauca

SEQ ID NO: 210075 - RNA, 24 nt, Artificial Sequence
  Synthetic
gagaaaauguugaguacacaauca

SEQ ID NO: 210076 - RNA, 18 nt, Artificial Sequence
  Synthetic
ucagguaaccaccaauca

SEQ ID NO: 210077 - RNA, 19 nt, Artificial Sequence
  Synthetic
aucagguaaccaccaauca

SEQ ID NO: 210078 - RNA, 20 nt, Artificial Sequence
  Synthetic
caucagguaaccaccaauca

SEQ ID NO: 210079 - RNA, 21 nt, Artificial Sequence
  Synthetic
gcaucagguaaccaccaauca

SEQ ID NO: 210080 - RNA, 22 nt, Artificial Sequence
  Synthetic
agcaucagguaaccaccaauca

SEQ ID NO: 210081 - RNA, 23 nt, Artificial Sequence
  Synthetic
cagcaucagguaaccaccaauca

SEQ ID NO: 210082 - RNA, 24 nt, Artificial Sequence
  Synthetic
ccagcaucagguaaccaccaauca

SEQ ID NO: 210083 - RNA, 18 nt, Artificial Sequence
  Synthetic
ucccuucugccccaauca

SEQ ID NO: 210084 - RNA, 19 nt, Artificial Sequence
  Synthetic
cucccuucugccccaauca

SEQ ID NO: 210085 - RNA, 20 nt, Artificial Sequence
  Synthetic
ucucccuucugccccaauca

SEQ ID NO: 210086 - RNA, 21 nt, Artificial Sequence
  Synthetic
uucucccuucugccccaauca

SEQ ID NO: 210087 - RNA, 22 nt, Artificial Sequence
  Synthetic
cuucucccuucugccccaauca

SEQ ID NO: 210088 - RNA, 23 nt, Artificial Sequence
  Synthetic
ccuucucccuucugccccaauca

SEQ ID NO: 210089 - RNA, 24 nt, Artificial Sequence
  Synthetic
accuucucccuucugccccaauca

SEQ ID NO: 210090 - RNA, 18 nt, Artificial Sequence
  Synthetic
uaauccguuuaucaauca

SEQ ID NO: 210091 - RNA, 19 nt, Artificial Sequence
  Synthetic
uuaauccguuuaucaauca

SEQ ID NO: 210092 - RNA, 20 nt, Artificial Sequence
  Synthetic
uuuaauccguuuaucaauca

SEQ ID NO: 210093 - RNA, 21 nt, Artificial Sequence
  Synthetic
uuuuaauccguuuaucaauca

SEQ ID NO: 210094 - RNA, 22 nt, Artificial Sequence
  Synthetic
uuuuuaauccguuuaucaauca

SEQ ID NO: 210095 - RNA, 23 nt, Artificial Sequence
  Synthetic
uuuuuuaauccguuuaucaauca

SEQ ID NO: 210096 - RNA, 24 nt, Artificial Sequence
  Synthetic
auuuuuuaauccguuuaucaauca

SEQ ID NO: 210097 - RNA, 18 nt, Artificial Sequence
  Synthetic
guauaaaagguucaauca

SEQ ID NO: 210098 - RNA, 19 nt, Artificial Sequence
  Synthetic
cguauaaaagguucaauca

SEQ ID NO: 210099 - RNA, 20 nt, Artificial Sequence
  Synthetic
ccguauaaaagguucaauca

SEQ ID NO: 210100 - RNA, 21 nt, Artificial Sequence
  Synthetic
uccguauaaaagguucaauca

SEQ ID NO: 210101 - RNA, 22 nt, Artificial Sequence
  Synthetic
cuccguauaaaagguucaauca

SEQ ID NO: 210102 - RNA, 23 nt, Artificial Sequence
  Synthetic
acuccguauaaaagguucaauca

SEQ ID NO: 210103 - RNA, 24 nt, Artificial Sequence
  Synthetic
uacuccguauaaaagguucaauca

SEQ ID NO: 210104 - RNA, 18 nt, Artificial Sequence
  Synthetic
aaaugacccaaagaauca

SEQ ID NO: 210105 - RNA, 19 nt, Artificial Sequence
  Synthetic
gaaaugacccaaagaauca

SEQ ID NO: 210106 - RNA, 20 nt, Artificial Sequence
  Synthetic
agaaaugacccaaagaauca

SEQ ID NO: 210107 - RNA, 21 nt, Artificial Sequence
  Synthetic
cagaaaugacccaaagaauca

SEQ ID NO: 210108 - RNA, 22 nt, Artificial Sequence
  Synthetic
ucagaaaugacccaaagaauca

SEQ ID NO: 210109 - RNA, 23 nt, Artificial Sequence
  Synthetic
uucagaaaugacccaaagaauca

SEQ ID NO: 210110 - RNA, 24 nt, Artificial Sequence
  Synthetic
cuucagaaaugacccaaagaauca

SEQ ID NO: 210111 - RNA, 18 nt, Artificial Sequence
  Synthetic
ugaagagauaaagaauca

SEQ ID NO: 210112 - RNA, 19 nt, Artificial Sequence
  Synthetic
augaagagauaaagaauca

SEQ ID NO: 210113 - RNA, 20 nt, Artificial Sequence
  Synthetic
aaugaagagauaaagaauca

SEQ ID NO: 210114 - RNA, 21 nt, Artificial Sequence
  Synthetic
aaaugaagagauaaagaauca

SEQ ID NO: 210115 - RNA, 22 nt, Artificial Sequence
  Synthetic
caaaugaagagauaaagaauca

SEQ ID NO: 210116 - RNA, 23 nt, Artificial Sequence
  Synthetic
ccaaaugaagagauaaagaauca

SEQ ID NO: 210117 - RNA, 24 nt, Artificial Sequence
  Synthetic
cccaaaugaagagauaaagaauca

SEQ ID NO: 210118 - RNA, 18 nt, Artificial Sequence
  Synthetic
gcuuaccaaccagaauca

SEQ ID NO: 210119 - RNA, 19 nt, Artificial Sequence
  Synthetic
ugcuuaccaaccagaauca

SEQ ID NO: 210120 - RNA, 20 nt, Artificial Sequence
  Synthetic
cugcuuaccaaccagaauca

SEQ ID NO: 210121 - RNA, 21 nt, Artificial Sequence
  Synthetic
acugcuuaccaaccagaauca

SEQ ID NO: 210122 - RNA, 22 nt, Artificial Sequence
  Synthetic
cacugcuuaccaaccagaauca

SEQ ID NO: 210123 - RNA, 23 nt, Artificial Sequence
  Synthetic
ucacugcuuaccaaccagaauca

SEQ ID NO: 210124 - RNA, 24 nt, Artificial Sequence
  Synthetic
aucacugcuuaccaaccagaauca

SEQ ID NO: 210125 - RNA, 18 nt, Artificial Sequence
  Synthetic
ugaaagaauucagaauca

SEQ ID NO: 210126 - RNA, 19 nt, Artificial Sequence
  Synthetic
uugaaagaauucagaauca

SEQ ID NO: 210127 - RNA, 20 nt, Artificial Sequence
  Synthetic
guugaaagaauucagaauca

SEQ ID NO: 210128 - RNA, 21 nt, Artificial Sequence
  Synthetic
aguugaaagaauucagaauca

SEQ ID NO: 210129 - RNA, 22 nt, Artificial Sequence
  Synthetic
uaguugaaagaauucagaauca

SEQ ID NO: 210130 - RNA, 23 nt, Artificial Sequence
  Synthetic
cuaguugaaagaauucagaauca

SEQ ID NO: 210131 - RNA, 24 nt, Artificial Sequence
  Synthetic
ucuaguugaaagaauucagaauca

SEQ ID NO: 210132 - RNA, 18 nt, Artificial Sequence
  Synthetic
gagacuucgagagaauca

SEQ ID NO: 210133 - RNA, 19 nt, Artificial Sequence
  Synthetic
agagacuucgagagaauca

SEQ ID NO: 210134 - RNA, 20 nt, Artificial Sequence
  Synthetic
uagagacuucgagagaauca

SEQ ID NO: 210135 - RNA, 21 nt, Artificial Sequence
  Synthetic
guagagacuucgagagaauca

SEQ ID NO: 210136 - RNA, 22 nt, Artificial Sequence
  Synthetic
aguagagacuucgagagaauca

SEQ ID NO: 210137 - RNA, 23 nt, Artificial Sequence
  Synthetic
aaguagagacuucgagagaauca

SEQ ID NO: 210138 - RNA, 24 nt, Artificial Sequence
  Synthetic
gaaguagagacuucgagagaauca

SEQ ID NO: 210139 - RNA, 18 nt, Artificial Sequence
  Synthetic
aaagugauuagagaauca

SEQ ID NO: 210140 - RNA, 19 nt, Artificial Sequence
  Synthetic
aaaagugauuagagaauca

SEQ ID NO: 210141 - RNA, 20 nt, Artificial Sequence
  Synthetic
caaaagugauuagagaauca

SEQ ID NO: 210142 - RNA, 21 nt, Artificial Sequence
  Synthetic
ucaaaagugauuagagaauca

SEQ ID NO: 210143 - RNA, 22 nt, Artificial Sequence
  Synthetic
aucaaaagugauuagagaauca

SEQ ID NO: 210144 - RNA, 23 nt, Artificial Sequence
  Synthetic
aaucaaaagugauuagagaauca

SEQ ID NO: 210145 - RNA, 24 nt, Artificial Sequence
  Synthetic
aaaucaaaagugauuagagaauca

SEQ ID NO: 210146 - RNA, 18 nt, Artificial Sequence
  Synthetic
gcugaggcaggagaauca

SEQ ID NO: 210147 - RNA, 19 nt, Artificial Sequence
  Synthetic
ggcugaggcaggagaauca

SEQ ID NO: 210148 - RNA, 20 nt, Artificial Sequence
  Synthetic
aggcugaggcaggagaauca

SEQ ID NO: 210149 - RNA, 21 nt, Artificial Sequence
  Synthetic
gaggcugaggcaggagaauca

SEQ ID NO: 210150 - RNA, 22 nt, Artificial Sequence
  Synthetic
ggaggcugaggcaggagaauca

SEQ ID NO: 210151 - RNA, 23 nt, Artificial Sequence
  Synthetic
gggaggcugaggcaggagaauca

SEQ ID NO: 210152 - RNA, 24 nt, Artificial Sequence
  Synthetic
ugggaggcugaggcaggagaauca

SEQ ID NO: 210153 - RNA, 18 nt, Artificial Sequence
  Synthetic
augagaaacugagaauca

SEQ ID NO: 210154 - RNA, 19 nt, Artificial Sequence
  Synthetic
gaugagaaacugagaauca

SEQ ID NO: 210155 - RNA, 20 nt, Artificial Sequence
  Synthetic
agaugagaaacugagaauca

SEQ ID NO: 210156 - RNA, 21 nt, Artificial Sequence
  Synthetic
cagaugagaaacugagaauca

SEQ ID NO: 210157 - RNA, 22 nt, Artificial Sequence
  Synthetic
gcagaugagaaacugagaauca

SEQ ID NO: 210158 - RNA, 23 nt, Artificial Sequence
  Synthetic
ugcagaugagaaacugagaauca

SEQ ID NO: 210159 - RNA, 24 nt, Artificial Sequence
  Synthetic
uugcagaugagaaacugagaauca

SEQ ID NO: 210160 - RNA, 18 nt, Artificial Sequence
  Synthetic
ucagugauguuagaauca

SEQ ID NO: 210161 - RNA, 19 nt, Artificial Sequence
  Synthetic
aucagugauguuagaauca

SEQ ID NO: 210162 - RNA, 20 nt, Artificial Sequence
  Synthetic
uaucagugauguuagaauca

SEQ ID NO: 210163 - RNA, 21 nt, Artificial Sequence
  Synthetic
uuaucagugauguuagaauca

SEQ ID NO: 210164 - RNA, 22 nt, Artificial Sequence
  Synthetic
uuuaucagugauguuagaauca

SEQ ID NO: 210165 - RNA, 23 nt, Artificial Sequence
  Synthetic
uuuuaucagugauguuagaauca

SEQ ID NO: 210166 - RNA, 24 nt, Artificial Sequence
  Synthetic
auuuuaucagugauguuagaauca

SEQ ID NO: 210167 - RNA, 18 nt, Artificial Sequence
  Synthetic
ugguacaugaaggaauca

SEQ ID NO: 210168 - RNA, 19 nt, Artificial Sequence
  Synthetic
uugguacaugaaggaauca

SEQ ID NO: 210169 - RNA, 20 nt, Artificial Sequence
  Synthetic
auugguacaugaaggaauca

SEQ ID NO: 210170 - RNA, 21 nt, Artificial Sequence
  Synthetic
aauugguacaugaaggaauca

SEQ ID NO: 210171 - RNA, 22 nt, Artificial Sequence
  Synthetic
caauugguacaugaaggaauca

SEQ ID NO: 210172 - RNA, 23 nt, Artificial Sequence
  Synthetic
acaauugguacaugaaggaauca

SEQ ID NO: 210173 - RNA, 24 nt, Artificial Sequence
  Synthetic
cacaauugguacaugaaggaauca

SEQ ID NO: 210174 - RNA, 18 nt, Artificial Sequence
  Synthetic
uuucuagaaagggaauca

SEQ ID NO: 210175 - RNA, 19 nt, Artificial Sequence
  Synthetic
auuucuagaaagggaauca

SEQ ID NO: 210176 - RNA, 20 nt, Artificial Sequence
  Synthetic
uauuucuagaaagggaauca

SEQ ID NO: 210177 - RNA, 21 nt, Artificial Sequence
  Synthetic
uuauuucuagaaagggaauca

SEQ ID NO: 210178 - RNA, 22 nt, Artificial Sequence
  Synthetic
uuuauuucuagaaagggaauca

SEQ ID NO: 210179 - RNA, 23 nt, Artificial Sequence
  Synthetic
cuuuauuucuagaaagggaauca

SEQ ID NO: 210180 - RNA, 24 nt, Artificial Sequence
  Synthetic
ucuuuauuucuagaaagggaauca

SEQ ID NO: 210181 - RNA, 18 nt, Artificial Sequence
  Synthetic
ucagagcugauggaauca

SEQ ID NO: 210182 - RNA, 19 nt, Artificial Sequence
  Synthetic
gucagagcugauggaauca

SEQ ID NO: 210183 - RNA, 20 nt, Artificial Sequence
  Synthetic
ggucagagcugauggaauca

SEQ ID NO: 210184 - RNA, 21 nt, Artificial Sequence
  Synthetic
cggucagagcugauggaauca

SEQ ID NO: 210185 - RNA, 22 nt, Artificial Sequence
  Synthetic
ucggucagagcugauggaauca

SEQ ID NO: 210186 - RNA, 23 nt, Artificial Sequence
  Synthetic
uucggucagagcugauggaauca

SEQ ID NO: 210187 - RNA, 24 nt, Artificial Sequence
  Synthetic
auucggucagagcugauggaauca

SEQ ID NO: 210188 - RNA, 18 nt, Artificial Sequence
  Synthetic
accaaagaaaaugaauca

SEQ ID NO: 210189 - RNA, 19 nt, Artificial Sequence
  Synthetic
aaccaaagaaaaugaauca

SEQ ID NO: 210190 - RNA, 20 nt, Artificial Sequence
  Synthetic
aaaccaaagaaaaugaauca

SEQ ID NO: 210191 - RNA, 21 nt, Artificial Sequence
  Synthetic
gaaaccaaagaaaaugaauca

SEQ ID NO: 210192 - RNA, 22 nt, Artificial Sequence
  Synthetic
agaaaccaaagaaaaugaauca

SEQ ID NO: 210193 - RNA, 23 nt, Artificial Sequence
  Synthetic
cagaaaccaaagaaaaugaauca

SEQ ID NO: 210194 - RNA, 24 nt, Artificial Sequence
  Synthetic
ccagaaaccaaagaaaaugaauca

SEQ ID NO: 210195 - RNA, 18 nt, Artificial Sequence
  Synthetic
uauauuuuuaaugaauca

SEQ ID NO: 210196 - RNA, 19 nt, Artificial Sequence
  Synthetic
auauauuuuuaaugaauca

SEQ ID NO: 210197 - RNA, 20 nt, Artificial Sequence
  Synthetic
aauauauuuuuaaugaauca

SEQ ID NO: 210198 - RNA, 21 nt, Artificial Sequence
  Synthetic
uaauauauuuuuaaugaauca

SEQ ID NO: 210199 - RNA, 22 nt, Artificial Sequence
  Synthetic
auaauauauuuuuaaugaauca

SEQ ID NO: 210200 - RNA, 23 nt, Artificial Sequence
  Synthetic
aauaauauauuuuuaaugaauca

SEQ ID NO: 210201 - RNA, 24 nt, Artificial Sequence
  Synthetic
uaauaauauauuuuuaaugaauca

SEQ ID NO: 210202 - RNA, 18 nt, Artificial Sequence
  Synthetic
guggagguaacugaauca

SEQ ID NO: 210203 - RNA, 19 nt, Artificial Sequence
  Synthetic
gguggagguaacugaauca

SEQ ID NO: 210204 - RNA, 20 nt, Artificial Sequence
  Synthetic
agguggagguaacugaauca

SEQ ID NO: 210205 - RNA, 21 nt, Artificial Sequence
  Synthetic
cagguggagguaacugaauca

SEQ ID NO: 210206 - RNA, 22 nt, Artificial Sequence
  Synthetic
ccagguggagguaacugaauca

SEQ ID NO: 210207 - RNA, 23 nt, Artificial Sequence
  Synthetic
accagguggagguaacugaauca

SEQ ID NO: 210208 - RNA, 24 nt, Artificial Sequence
  Synthetic
gaccagguggagguaacugaauca

SEQ ID NO: 210209 - RNA, 18 nt, Artificial Sequence
  Synthetic
aguguugucugugaauca

SEQ ID NO: 210210 - RNA, 19 nt, Artificial Sequence
  Synthetic
aaguguugucugugaauca

SEQ ID NO: 210211 - RNA, 20 nt, Artificial Sequence
  Synthetic
caaguguugucugugaauca

SEQ ID NO: 210212 - RNA, 21 nt, Artificial Sequence
  Synthetic
ucaaguguugucugugaauca

SEQ ID NO: 210213 - RNA, 22 nt, Artificial Sequence
  Synthetic
cucaaguguugucugugaauca

SEQ ID NO: 210214 - RNA, 23 nt, Artificial Sequence
  Synthetic
ccucaaguguugucugugaauca

SEQ ID NO: 210215 - RNA, 24 nt, Artificial Sequence
  Synthetic
accucaaguguugucugugaauca

SEQ ID NO: 210216 - RNA, 18 nt, Artificial Sequence
  Synthetic
gugcagauaauugaauca

SEQ ID NO: 210217 - RNA, 19 nt, Artificial Sequence
  Synthetic
ggugcagauaauugaauca

SEQ ID NO: 210218 - RNA, 20 nt, Artificial Sequence
  Synthetic
aggugcagauaauugaauca

SEQ ID NO: 210219 - RNA, 21 nt, Artificial Sequence
  Synthetic
caggugcagauaauugaauca

SEQ ID NO: 210220 - RNA, 22 nt, Artificial Sequence
  Synthetic
ccaggugcagauaauugaauca

SEQ ID NO: 210221 - RNA, 23 nt, Artificial Sequence
  Synthetic
gccaggugcagauaauugaauca

SEQ ID NO: 210222 - RNA, 24 nt, Artificial Sequence
  Synthetic
agccaggugcagauaauugaauca

SEQ ID NO: 210223 - RNA, 18 nt, Artificial Sequence
  Synthetic
ugagagguaauugaauca

SEQ ID NO: 210224 - RNA, 19 nt, Artificial Sequence
  Synthetic
gugagagguaauugaauca

SEQ ID NO: 210225 - RNA, 20 nt, Artificial Sequence
  Synthetic
agugagagguaauugaauca

SEQ ID NO: 210226 - RNA, 21 nt, Artificial Sequence
  Synthetic
cagugagagguaauugaauca

SEQ ID NO: 210227 - RNA, 22 nt, Artificial Sequence
  Synthetic
ccagugagagguaauugaauca

SEQ ID NO: 210228 - RNA, 23 nt, Artificial Sequence
  Synthetic
cccagugagagguaauugaauca

SEQ ID NO: 210229 - RNA, 24 nt, Artificial Sequence
  Synthetic
acccagugagagguaauugaauca

SEQ ID NO: 210230 - RNA, 18 nt, Artificial Sequence
  Synthetic
gggaggucauuugaauca

SEQ ID NO: 210231 - RNA, 19 nt, Artificial Sequence
  Synthetic
ugggaggucauuugaauca

SEQ ID NO: 210232 - RNA, 20 nt, Artificial Sequence
  Synthetic
gugggaggucauuugaauca

SEQ ID NO: 210233 - RNA, 21 nt, Artificial Sequence
  Synthetic
agugggaggucauuugaauca

SEQ ID NO: 210234 - RNA, 22 nt, Artificial Sequence
  Synthetic
cagugggaggucauuugaauca

SEQ ID NO: 210235 - RNA, 23 nt, Artificial Sequence
  Synthetic
ccagugggaggucauuugaauca

SEQ ID NO: 210236 - RNA, 24 nt, Artificial Sequence
  Synthetic
uccagugggaggucauuugaauca

SEQ ID NO: 210237 - RNA, 18 nt, Artificial Sequence
  Synthetic
ugucuuucguuugaauca

SEQ ID NO: 210238 - RNA, 19 nt, Artificial Sequence
  Synthetic
gugucuuucguuugaauca

SEQ ID NO: 210239 - RNA, 20 nt, Artificial Sequence
  Synthetic
ugugucuuucguuugaauca

SEQ ID NO: 210240 - RNA, 21 nt, Artificial Sequence
  Synthetic
gugugucuuucguuugaauca

SEQ ID NO: 210241 - RNA, 22 nt, Artificial Sequence
  Synthetic
ugugugucuuucguuugaauca

SEQ ID NO: 210242 - RNA, 23 nt, Artificial Sequence
  Synthetic
uugugugucuuucguuugaauca

SEQ ID NO: 210243 - RNA, 24 nt, Artificial Sequence
  Synthetic
uuugugugucuuucguuugaauca

SEQ ID NO: 210244 - RNA, 18 nt, Artificial Sequence
  Synthetic
agcugagaaacauaauca

SEQ ID NO: 210245 - RNA, 19 nt, Artificial Sequence
  Synthetic
aagcugagaaacauaauca

SEQ ID NO: 210246 - RNA, 20 nt, Artificial Sequence
  Synthetic
caagcugagaaacauaauca

SEQ ID NO: 210247 - RNA, 21 nt, Artificial Sequence
  Synthetic
gcaagcugagaaacauaauca

SEQ ID NO: 210248 - RNA, 22 nt, Artificial Sequence
  Synthetic
agcaagcugagaaacauaauca

SEQ ID NO: 210249 - RNA, 23 nt, Artificial Sequence
  Synthetic
uagcaagcugagaaacauaauca

SEQ ID NO: 210250 - RNA, 24 nt, Artificial Sequence
  Synthetic
uuagcaagcugagaaacauaauca

SEQ ID NO: 210251 - RNA, 18 nt, Artificial Sequence
  Synthetic
uacacggucacauaauca

SEQ ID NO: 210252 - RNA, 19 nt, Artificial Sequence
  Synthetic
uuacacggucacauaauca

SEQ ID NO: 210253 - RNA, 20 nt, Artificial Sequence
  Synthetic
uuuacacggucacauaauca

SEQ ID NO: 210254 - RNA, 21 nt, Artificial Sequence
  Synthetic
uuuuacacggucacauaauca

SEQ ID NO: 210255 - RNA, 22 nt, Artificial Sequence
  Synthetic
auuuuacacggucacauaauca

SEQ ID NO: 210256 - RNA, 23 nt, Artificial Sequence
  Synthetic
cauuuuacacggucacauaauca

SEQ ID NO: 210257 - RNA, 24 nt, Artificial Sequence
  Synthetic
ucauuuuacacggucacauaauca

SEQ ID NO: 210258 - RNA, 18 nt, Artificial Sequence
  Synthetic
uggacccuuacauaauca

SEQ ID NO: 210259 - RNA, 19 nt, Artificial Sequence
  Synthetic
cuggacccuuacauaauca

SEQ ID NO: 210260 - RNA, 20 nt, Artificial Sequence
  Synthetic
ccuggacccuuacauaauca

SEQ ID NO: 210261 - RNA, 21 nt, Artificial Sequence
  Synthetic
gccuggacccuuacauaauca

SEQ ID NO: 210262 - RNA, 22 nt, Artificial Sequence
  Synthetic
agccuggacccuuacauaauca

SEQ ID NO: 210263 - RNA, 23 nt, Artificial Sequence
  Synthetic
uagccuggacccuuacauaauca

SEQ ID NO: 210264 - RNA, 24 nt, Artificial Sequence
  Synthetic
uuagccuggacccuuacauaauca

SEQ ID NO: 210265 - RNA, 18 nt, Artificial Sequence
  Synthetic
cguaaggaaggauaauca

SEQ ID NO: 210266 - RNA, 19 nt, Artificial Sequence
  Synthetic
acguaaggaaggauaauca

SEQ ID NO: 210267 - RNA, 20 nt, Artificial Sequence
  Synthetic
cacguaaggaaggauaauca

SEQ ID NO: 210268 - RNA, 21 nt, Artificial Sequence
  Synthetic
gcacguaaggaaggauaauca

SEQ ID NO: 210269 - RNA, 22 nt, Artificial Sequence
  Synthetic
agcacguaaggaaggauaauca

SEQ ID NO: 210270 - RNA, 23 nt, Artificial Sequence
  Synthetic
aagcacguaaggaaggauaauca

SEQ ID NO: 210271 - RNA, 24 nt, Artificial Sequence
  Synthetic
uaagcacguaaggaaggauaauca

SEQ ID NO: 210272 - RNA, 18 nt, Artificial Sequence
  Synthetic
guggacuauuuauaauca

SEQ ID NO: 210273 - RNA, 19 nt, Artificial Sequence
  Synthetic
cguggacuauuuauaauca

SEQ ID NO: 210274 - RNA, 20 nt, Artificial Sequence
  Synthetic
acguggacuauuuauaauca

SEQ ID NO: 210275 - RNA, 21 nt, Artificial Sequence
  Synthetic
gacguggacuauuuauaauca

SEQ ID NO: 210276 - RNA, 22 nt, Artificial Sequence
  Synthetic
ugacguggacuauuuauaauca

SEQ ID NO: 210277 - RNA, 23 nt, Artificial Sequence
  Synthetic
uugacguggacuauuuauaauca

SEQ ID NO: 210278 - RNA, 24 nt, Artificial Sequence
  Synthetic
auugacguggacuauuuauaauca

SEQ ID NO: 210279 - RNA, 18 nt, Artificial Sequence
  Synthetic
gcucaacaucacuaauca

SEQ ID NO: 210280 - RNA, 19 nt, Artificial Sequence
  Synthetic
ugcucaacaucacuaauca

SEQ ID NO: 210281 - RNA, 20 nt, Artificial Sequence
  Synthetic
augcucaacaucacuaauca

SEQ ID NO: 210282 - RNA, 21 nt, Artificial Sequence
  Synthetic
aaugcucaacaucacuaauca

SEQ ID NO: 210283 - RNA, 22 nt, Artificial Sequence
  Synthetic
aaaugcucaacaucacuaauca

SEQ ID NO: 210284 - RNA, 23 nt, Artificial Sequence
  Synthetic
aaaaugcucaacaucacuaauca

SEQ ID NO: 210285 - RNA, 24 nt, Artificial Sequence
  Synthetic
aaaaaugcucaacaucacuaauca

SEQ ID NO: 210286 - RNA, 18 nt, Artificial Sequence
  Synthetic
uauccauucugcuaauca

SEQ ID NO: 210287 - RNA, 19 nt, Artificial Sequence
  Synthetic
uuauccauucugcuaauca

SEQ ID NO: 210288 - RNA, 20 nt, Artificial Sequence
  Synthetic
uuuauccauucugcuaauca

SEQ ID NO: 210289 - RNA, 21 nt, Artificial Sequence
  Synthetic
guuuauccauucugcuaauca

SEQ ID NO: 210290 - RNA, 22 nt, Artificial Sequence
  Synthetic
aguuuauccauucugcuaauca

SEQ ID NO: 210291 - RNA, 23 nt, Artificial Sequence
  Synthetic
caguuuauccauucugcuaauca

SEQ ID NO: 210292 - RNA, 24 nt, Artificial Sequence
  Synthetic
acaguuuauccauucugcuaauca

SEQ ID NO: 210293 - RNA, 18 nt, Artificial Sequence
  Synthetic
uuauuaguugucuaauca

SEQ ID NO: 210294 - RNA, 19 nt, Artificial Sequence
  Synthetic
uuuauuaguugucuaauca

SEQ ID NO: 210295 - RNA, 20 nt, Artificial Sequence
  Synthetic
auuuauuaguugucuaauca

SEQ ID NO: 210296 - RNA, 21 nt, Artificial Sequence
  Synthetic
uauuuauuaguugucuaauca

SEQ ID NO: 210297 - RNA, 22 nt, Artificial Sequence
  Synthetic
uuauuuauuaguugucuaauca

SEQ ID NO: 210298 - RNA, 23 nt, Artificial Sequence
  Synthetic
cuuauuuauuaguugucuaauca

SEQ ID NO: 210299 - RNA, 24 nt, Artificial Sequence
  Synthetic
gcuuauuuauuaguugucuaauca

SEQ ID NO: 210300 - RNA, 18 nt, Artificial Sequence
  Synthetic
caaguucaaaaguaauca

SEQ ID NO: 210301 - RNA, 19 nt, Artificial Sequence
  Synthetic
ccaaguucaaaaguaauca

SEQ ID NO: 210302 - RNA, 20 nt, Artificial Sequence
  Synthetic
accaaguucaaaaguaauca

SEQ ID NO: 210303 - RNA, 21 nt, Artificial Sequence
  Synthetic
uaccaaguucaaaaguaauca

SEQ ID NO: 210304 - RNA, 22 nt, Artificial Sequence
  Synthetic
cuaccaaguucaaaaguaauca

SEQ ID NO: 210305 - RNA, 23 nt, Artificial Sequence
  Synthetic
gcuaccaaguucaaaaguaauca

SEQ ID NO: 210306 - RNA, 24 nt, Artificial Sequence
  Synthetic
ugcuaccaaguucaaaaguaauca

SEQ ID NO: 210307 - RNA, 18 nt, Artificial Sequence
  Synthetic
uaaguugaaauguaauca

SEQ ID NO: 210308 - RNA, 19 nt, Artificial Sequence
  Synthetic
auaaguugaaauguaauca

SEQ ID NO: 210309 - RNA, 20 nt, Artificial Sequence
  Synthetic
uauaaguugaaauguaauca

SEQ ID NO: 210310 - RNA, 21 nt, Artificial Sequence
  Synthetic
auauaaguugaaauguaauca

SEQ ID NO: 210311 - RNA, 22 nt, Artificial Sequence
  Synthetic
aauauaaguugaaauguaauca

SEQ ID NO: 210312 - RNA, 23 nt, Artificial Sequence
  Synthetic
gaauauaaguugaaauguaauca

SEQ ID NO: 210313 - RNA, 24 nt, Artificial Sequence
  Synthetic
ggaauauaaguugaaauguaauca

SEQ ID NO: 210314 - RNA, 18 nt, Artificial Sequence
  Synthetic
uaaaauaaaaauuaauca

SEQ ID NO: 210315 - RNA, 19 nt, Artificial Sequence
  Synthetic
uuaaaauaaaaauuaauca

SEQ ID NO: 210316 - RNA, 20 nt, Artificial Sequence
  Synthetic
cuuaaaauaaaaauuaauca

SEQ ID NO: 210317 - RNA, 21 nt, Artificial Sequence
  Synthetic
acuuaaaauaaaaauuaauca

SEQ ID NO: 210318 - RNA, 22 nt, Artificial Sequence
  Synthetic
aacuuaaaauaaaaauuaauca

SEQ ID NO: 210319 - RNA, 23 nt, Artificial Sequence
  Synthetic
gaacuuaaaauaaaaauuaauca

SEQ ID NO: 210320 - RNA, 24 nt, Artificial Sequence
  Synthetic
ggaacuuaaaauaaaaauuaauca

SEQ ID NO: 210321 - RNA, 18 nt, Artificial Sequence
  Synthetic
gggaugucuaauuaauca

SEQ ID NO: 210322 - RNA, 19 nt, Artificial Sequence
  Synthetic
ggggaugucuaauuaauca

SEQ ID NO: 210323 - RNA, 20 nt, Artificial Sequence
  Synthetic
uggggaugucuaauuaauca

SEQ ID NO: 210324 - RNA, 21 nt, Artificial Sequence
  Synthetic
uuggggaugucuaauuaauca

SEQ ID NO: 210325 - RNA, 22 nt, Artificial Sequence
  Synthetic
guuggggaugucuaauuaauca

SEQ ID NO: 210326 - RNA, 23 nt, Artificial Sequence
  Synthetic
gguuggggaugucuaauuaauca

SEQ ID NO: 210327 - RNA, 24 nt, Artificial Sequence
  Synthetic
ggguuggggaugucuaauuaauca

SEQ ID NO: 210328 - RNA, 18 nt, Artificial Sequence
  Synthetic
auacuuucaucuuaauca

SEQ ID NO: 210329 - RNA, 19 nt, Artificial Sequence
  Synthetic
aauacuuucaucuuaauca

SEQ ID NO: 210330 - RNA, 20 nt, Artificial Sequence
  Synthetic
aaauacuuucaucuuaauca

SEQ ID NO: 210331 - RNA, 21 nt, Artificial Sequence
  Synthetic
gaaauacuuucaucuuaauca

SEQ ID NO: 210332 - RNA, 22 nt, Artificial Sequence
  Synthetic
ugaaauacuuucaucuuaauca

SEQ ID NO: 210333 - RNA, 23 nt, Artificial Sequence
  Synthetic
cugaaauacuuucaucuuaauca

SEQ ID NO: 210334 - RNA, 24 nt, Artificial Sequence
  Synthetic
acugaaauacuuucaucuuaauca

SEQ ID NO: 210335 - RNA, 18 nt, Artificial Sequence
  Synthetic
ugacaggacauuuaauca

SEQ ID NO: 210336 - RNA, 19 nt, Artificial Sequence
  Synthetic
augacaggacauuuaauca

SEQ ID NO: 210337 - RNA, 20 nt, Artificial Sequence
  Synthetic
caugacaggacauuuaauca

SEQ ID NO: 210338 - RNA, 21 nt, Artificial Sequence
  Synthetic
ucaugacaggacauuuaauca

SEQ ID NO: 210339 - RNA, 22 nt, Artificial Sequence
  Synthetic
uucaugacaggacauuuaauca

SEQ ID NO: 210340 - RNA, 23 nt, Artificial Sequence
  Synthetic
uuucaugacaggacauuuaauca

SEQ ID NO: 210341 - RNA, 24 nt, Artificial Sequence
  Synthetic
uuuucaugacaggacauuuaauca

SEQ ID NO: 210342 - RNA, 18 nt, Artificial Sequence
  Synthetic
ucgguugugauuuaauca

SEQ ID NO: 210343 - RNA, 19 nt, Artificial Sequence
  Synthetic
uucgguugugauuuaauca

SEQ ID NO: 210344 - RNA, 20 nt, Artificial Sequence
  Synthetic
cuucgguugugauuuaauca

SEQ ID NO: 210345 - RNA, 21 nt, Artificial Sequence
  Synthetic
acuucgguugugauuuaauca

SEQ ID NO: 210346 - RNA, 22 nt, Artificial Sequence
  Synthetic
cacuucgguugugauuuaauca

SEQ ID NO: 210347 - RNA, 23 nt, Artificial Sequence
  Synthetic
acacuucgguugugauuuaauca

SEQ ID NO: 210348 - RNA, 24 nt, Artificial Sequence
  Synthetic
uacacuucgguugugauuuaauca

SEQ ID NO: 210349 - RNA, 18 nt, Artificial Sequence
  Synthetic
ucuuuuuuuuuuuaauca

SEQ ID NO: 210350 - RNA, 19 nt, Artificial Sequence
  Synthetic
aucuuuuuuuuuuuaauca

SEQ ID NO: 210351 - RNA, 20 nt, Artificial Sequence
  Synthetic
aaucuuuuuuuuuuuaauca

SEQ ID NO: 210352 - RNA, 21 nt, Artificial Sequence
  Synthetic
uaaucuuuuuuuuuuuaauca

SEQ ID NO: 210353 - RNA, 22 nt, Artificial Sequence
  Synthetic
auaaucuuuuuuuuuuuaauca

SEQ ID NO: 210354 - RNA, 23 nt, Artificial Sequence
  Synthetic
aauaaucuuuuuuuuuuuaauca

SEQ ID NO: 210355 - RNA, 24 nt, Artificial Sequence
  Synthetic
caauaaucuuuuuuuuuuuaauca

SEQ ID NO: 210356 - RNA, 18 nt, Artificial Sequence
  Synthetic
augcaugagaaaacauca

SEQ ID NO: 210357 - RNA, 19 nt, Artificial Sequence
  Synthetic
caugcaugagaaaacauca

SEQ ID NO: 210358 - RNA, 20 nt, Artificial Sequence
  Synthetic
ucaugcaugagaaaacauca

SEQ ID NO: 210359 - RNA, 21 nt, Artificial Sequence
  Synthetic
uucaugcaugagaaaacauca

SEQ ID NO: 210360 - RNA, 22 nt, Artificial Sequence
  Synthetic
auucaugcaugagaaaacauca

SEQ ID NO: 210361 - RNA, 23 nt, Artificial Sequence
  Synthetic
uauucaugcaugagaaaacauca

SEQ ID NO: 210362 - RNA, 24 nt, Artificial Sequence
  Synthetic
auauucaugcaugagaaaacauca

SEQ ID NO: 210363 - RNA, 18 nt, Artificial Sequence
  Synthetic
ggaaguaaggaaacauca

SEQ ID NO: 210364 - RNA, 19 nt, Artificial Sequence
  Synthetic
uggaaguaaggaaacauca

SEQ ID NO: 210365 - RNA, 20 nt, Artificial Sequence
  Synthetic
cuggaaguaaggaaacauca

SEQ ID NO: 210366 - RNA, 21 nt, Artificial Sequence
  Synthetic
acuggaaguaaggaaacauca

SEQ ID NO: 210367 - RNA, 22 nt, Artificial Sequence
  Synthetic
cacuggaaguaaggaaacauca

SEQ ID NO: 210368 - RNA, 23 nt, Artificial Sequence
  Synthetic
ucacuggaaguaaggaaacauca

SEQ ID NO: 210369 - RNA, 24 nt, Artificial Sequence
  Synthetic
aucacuggaaguaaggaaacauca

SEQ ID NO: 210370 - RNA, 18 nt, Artificial Sequence
  Synthetic
gcuucuauuacaacauca

SEQ ID NO: 210371 - RNA, 19 nt, Artificial Sequence
  Synthetic
agcuucuauuacaacauca

SEQ ID NO: 210372 - RNA, 20 nt, Artificial Sequence
  Synthetic
cagcuucuauuacaacauca

SEQ ID NO: 210373 - RNA, 21 nt, Artificial Sequence
  Synthetic
acagcuucuauuacaacauca

SEQ ID NO: 210374 - RNA, 22 nt, Artificial Sequence
  Synthetic
uacagcuucuauuacaacauca

SEQ ID NO: 210375 - RNA, 23 nt, Artificial Sequence
  Synthetic
guacagcuucuauuacaacauca

SEQ ID NO: 210376 - RNA, 24 nt, Artificial Sequence
  Synthetic
aguacagcuucuauuacaacauca

SEQ ID NO: 210377 - RNA, 18 nt, Artificial Sequence
  Synthetic
acccagcccagaacauca

SEQ ID NO: 210378 - RNA, 19 nt, Artificial Sequence
  Synthetic
gacccagcccagaacauca

SEQ ID NO: 210379 - RNA, 20 nt, Artificial Sequence
  Synthetic
agacccagcccagaacauca

SEQ ID NO: 210380 - RNA, 21 nt, Artificial Sequence
  Synthetic
gagacccagcccagaacauca

SEQ ID NO: 210381 - RNA, 22 nt, Artificial Sequence
  Synthetic
ggagacccagcccagaacauca

SEQ ID NO: 210382 - RNA, 23 nt, Artificial Sequence
  Synthetic
aggagacccagcccagaacauca

SEQ ID NO: 210383 - RNA, 24 nt, Artificial Sequence
  Synthetic
caggagacccagcccagaacauca

SEQ ID NO: 210384 - RNA, 18 nt, Artificial Sequence
  Synthetic
gauucaaugauaacauca

SEQ ID NO: 210385 - RNA, 19 nt, Artificial Sequence
  Synthetic
agauucaaugauaacauca

SEQ ID NO: 210386 - RNA, 20 nt, Artificial Sequence
  Synthetic
gagauucaaugauaacauca

SEQ ID NO: 210387 - RNA, 21 nt, Artificial Sequence
  Synthetic
ggagauucaaugauaacauca

SEQ ID NO: 210388 - RNA, 22 nt, Artificial Sequence
  Synthetic
uggagauucaaugauaacauca

SEQ ID NO: 210389 - RNA, 23 nt, Artificial Sequence
  Synthetic
cuggagauucaaugauaacauca

SEQ ID NO: 210390 - RNA, 24 nt, Artificial Sequence
  Synthetic
acuggagauucaaugauaacauca

SEQ ID NO: 210391 - RNA, 18 nt, Artificial Sequence
  Synthetic
cuaauuaaagacacauca

SEQ ID NO: 210392 - RNA, 19 nt, Artificial Sequence
  Synthetic
ucuaauuaaagacacauca

SEQ ID NO: 210393 - RNA, 20 nt, Artificial Sequence
  Synthetic
uucuaauuaaagacacauca

SEQ ID NO: 210394 - RNA, 21 nt, Artificial Sequence
  Synthetic
auucuaauuaaagacacauca

SEQ ID NO: 210395 - RNA, 22 nt, Artificial Sequence
  Synthetic
cauucuaauuaaagacacauca

SEQ ID NO: 210396 - RNA, 23 nt, Artificial Sequence
  Synthetic
acauucuaauuaaagacacauca

SEQ ID NO: 210397 - RNA, 24 nt, Artificial Sequence
  Synthetic
aacauucuaauuaaagacacauca

SEQ ID NO: 210398 - RNA, 18 nt, Artificial Sequence
  Synthetic
uaaaauguugccacauca

SEQ ID NO: 210399 - RNA, 19 nt, Artificial Sequence
  Synthetic
cuaaaauguugccacauca

SEQ ID NO: 210400 - RNA, 20 nt, Artificial Sequence
  Synthetic
ccuaaaauguugccacauca

SEQ ID NO: 210401 - RNA, 21 nt, Artificial Sequence
  Synthetic
gccuaaaauguugccacauca

SEQ ID NO: 210402 - RNA, 22 nt, Artificial Sequence
  Synthetic
agccuaaaauguugccacauca

SEQ ID NO: 210403 - RNA, 23 nt, Artificial Sequence
  Synthetic
gagccuaaaauguugccacauca

SEQ ID NO: 210404 - RNA, 24 nt, Artificial Sequence
  Synthetic
agagccuaaaauguugccacauca

SEQ ID NO: 210405 - RNA, 18 nt, Artificial Sequence
  Synthetic
uaacauuuuuccacauca

SEQ ID NO: 210406 - RNA, 19 nt, Artificial Sequence
  Synthetic
cuaacauuuuuccacauca

SEQ ID NO: 210407 - RNA, 20 nt, Artificial Sequence
  Synthetic
acuaacauuuuuccacauca

SEQ ID NO: 210408 - RNA, 21 nt, Artificial Sequence
  Synthetic
uacuaacauuuuuccacauca

SEQ ID NO: 210409 - RNA, 22 nt, Artificial Sequence
  Synthetic
uuacuaacauuuuuccacauca

SEQ ID NO: 210410 - RNA, 23 nt, Artificial Sequence
  Synthetic
auuacuaacauuuuuccacauca

SEQ ID NO: 210411 - RNA, 24 nt, Artificial Sequence
  Synthetic
cauuacuaacauuuuuccacauca

SEQ ID NO: 210412 - RNA, 18 nt, Artificial Sequence
  Synthetic
ugugaaacaagcacauca

SEQ ID NO: 210413 - RNA, 19 nt, Artificial Sequence
  Synthetic
augugaaacaagcacauca

SEQ ID NO: 210414 - RNA, 20 nt, Artificial Sequence
  Synthetic
aaugugaaacaagcacauca

SEQ ID NO: 210415 - RNA, 21 nt, Artificial Sequence
  Synthetic
uaaugugaaacaagcacauca

SEQ ID NO: 210416 - RNA, 22 nt, Artificial Sequence
  Synthetic
guaaugugaaacaagcacauca

SEQ ID NO: 210417 - RNA, 23 nt, Artificial Sequence
  Synthetic
uguaaugugaaacaagcacauca

SEQ ID NO: 210418 - RNA, 24 nt, Artificial Sequence
  Synthetic
auguaaugugaaacaagcacauca

SEQ ID NO: 210419 - RNA, 18 nt, Artificial Sequence
  Synthetic
ugcauaauaaucacauca

SEQ ID NO: 210420 - RNA, 19 nt, Artificial Sequence
  Synthetic
augcauaauaaucacauca

SEQ ID NO: 210421 - RNA, 20 nt, Artificial Sequence
  Synthetic
aaugcauaauaaucacauca

SEQ ID NO: 210422 - RNA, 21 nt, Artificial Sequence
  Synthetic
caaugcauaauaaucacauca

SEQ ID NO: 210423 - RNA, 22 nt, Artificial Sequence
  Synthetic
gcaaugcauaauaaucacauca

SEQ ID NO: 210424 - RNA, 23 nt, Artificial Sequence
  Synthetic
ugcaaugcauaauaaucacauca

SEQ ID NO: 210425 - RNA, 24 nt, Artificial Sequence
  Synthetic
augcaaugcauaauaaucacauca

SEQ ID NO: 210426 - RNA, 18 nt, Artificial Sequence
  Synthetic
uaugaaauagucacauca

SEQ ID NO: 210427 - RNA, 19 nt, Artificial Sequence
  Synthetic
auaugaaauagucacauca

SEQ ID NO: 210428 - RNA, 20 nt, Artificial Sequence
  Synthetic
aauaugaaauagucacauca

SEQ ID NO: 210429 - RNA, 21 nt, Artificial Sequence
  Synthetic
caauaugaaauagucacauca

SEQ ID NO: 210430 - RNA, 22 nt, Artificial Sequence
  Synthetic
ucaauaugaaauagucacauca

SEQ ID NO: 210431 - RNA, 23 nt, Artificial Sequence
  Synthetic
uucaauaugaaauagucacauca

SEQ ID NO: 210432 - RNA, 24 nt, Artificial Sequence
  Synthetic
auucaauaugaaauagucacauca

SEQ ID NO: 210433 - RNA, 18 nt, Artificial Sequence
  Synthetic
augcucuuggucacauca

SEQ ID NO: 210434 - RNA, 19 nt, Artificial Sequence
  Synthetic
uaugcucuuggucacauca

SEQ ID NO: 210435 - RNA, 20 nt, Artificial Sequence
  Synthetic
uuaugcucuuggucacauca

SEQ ID NO: 210436 - RNA, 21 nt, Artificial Sequence
  Synthetic
uuuaugcucuuggucacauca

SEQ ID NO: 210437 - RNA, 22 nt, Artificial Sequence
  Synthetic
uuuuaugcucuuggucacauca

SEQ ID NO: 210438 - RNA, 23 nt, Artificial Sequence
  Synthetic
guuuuaugcucuuggucacauca

SEQ ID NO: 210439 - RNA, 24 nt, Artificial Sequence
  Synthetic
aguuuuaugcucuuggucacauca

SEQ ID NO: 210440 - RNA, 18 nt, Artificial Sequence
  Synthetic
agacauguccagacauca

SEQ ID NO: 210441 - RNA, 19 nt, Artificial Sequence
  Synthetic
cagacauguccagacauca

SEQ ID NO: 210442 - RNA, 20 nt, Artificial Sequence
  Synthetic
ucagacauguccagacauca

SEQ ID NO: 210443 - RNA, 21 nt, Artificial Sequence
  Synthetic
uucagacauguccagacauca

SEQ ID NO: 210444 - RNA, 22 nt, Artificial Sequence
  Synthetic
auucagacauguccagacauca

SEQ ID NO: 210445 - RNA, 23 nt, Artificial Sequence
  Synthetic
cauucagacauguccagacauca

SEQ ID NO: 210446 - RNA, 24 nt, Artificial Sequence
  Synthetic
gcauucagacauguccagacauca

SEQ ID NO: 210447 - RNA, 18 nt, Artificial Sequence
  Synthetic
gugaguaaagagacauca

SEQ ID NO: 210448 - RNA, 19 nt, Artificial Sequence
  Synthetic
ugugaguaaagagacauca

SEQ ID NO: 210449 - RNA, 20 nt, Artificial Sequence
  Synthetic
cugugaguaaagagacauca

SEQ ID NO: 210450 - RNA, 21 nt, Artificial Sequence
  Synthetic
ucugugaguaaagagacauca

SEQ ID NO: 210451 - RNA, 22 nt, Artificial Sequence
  Synthetic
uucugugaguaaagagacauca

SEQ ID NO: 210452 - RNA, 23 nt, Artificial Sequence
  Synthetic
auucugugaguaaagagacauca

SEQ ID NO: 210453 - RNA, 24 nt, Artificial Sequence
  Synthetic
uauucugugaguaaagagacauca

SEQ ID NO: 210454 - RNA, 18 nt, Artificial Sequence
  Synthetic
aauuuugacaggacauca

SEQ ID NO: 210455 - RNA, 19 nt, Artificial Sequence
  Synthetic
uaauuuugacaggacauca

SEQ ID NO: 210456 - RNA, 20 nt, Artificial Sequence
  Synthetic
auaauuuugacaggacauca

SEQ ID NO: 210457 - RNA, 21 nt, Artificial Sequence
  Synthetic
cauaauuuugacaggacauca

SEQ ID NO: 210458 - RNA, 22 nt, Artificial Sequence
  Synthetic
ucauaauuuugacaggacauca

SEQ ID NO: 210459 - RNA, 23 nt, Artificial Sequence
  Synthetic
uucauaauuuugacaggacauca

SEQ ID NO: 210460 - RNA, 24 nt, Artificial Sequence
  Synthetic
uuucauaauuuugacaggacauca

SEQ ID NO: 210461 - RNA, 18 nt, Artificial Sequence
  Synthetic
uuuaguccagggacauca

SEQ ID NO: 210462 - RNA, 19 nt, Artificial Sequence
  Synthetic
uuuuaguccagggacauca

SEQ ID NO: 210463 - RNA, 20 nt, Artificial Sequence
  Synthetic
uuuuuaguccagggacauca

SEQ ID NO: 210464 - RNA, 21 nt, Artificial Sequence
  Synthetic
uuuuuuaguccagggacauca

SEQ ID NO: 210465 - RNA, 22 nt, Artificial Sequence
  Synthetic
auuuuuuaguccagggacauca

SEQ ID NO: 210466 - RNA, 23 nt, Artificial Sequence
  Synthetic
cauuuuuuaguccagggacauca

SEQ ID NO: 210467 - RNA, 24 nt, Artificial Sequence
  Synthetic
acauuuuuuaguccagggacauca

SEQ ID NO: 210468 - RNA, 18 nt, Artificial Sequence
  Synthetic
gacuacagcuggacauca

SEQ ID NO: 210469 - RNA, 19 nt, Artificial Sequence
  Synthetic
ggacuacagcuggacauca

SEQ ID NO: 210470 - RNA, 20 nt, Artificial Sequence
  Synthetic
aggacuacagcuggacauca

SEQ ID NO: 210471 - RNA, 21 nt, Artificial Sequence
  Synthetic
caggacuacagcuggacauca

SEQ ID NO: 210472 - RNA, 22 nt, Artificial Sequence
  Synthetic
acaggacuacagcuggacauca

SEQ ID NO: 210473 - RNA, 23 nt, Artificial Sequence
  Synthetic
gacaggacuacagcuggacauca

SEQ ID NO: 210474 - RNA, 24 nt, Artificial Sequence
  Synthetic
agacaggacuacagcuggacauca

SEQ ID NO: 210475 - RNA, 18 nt, Artificial Sequence
  Synthetic
gaaaaaugcuggacauca

SEQ ID NO: 210476 - RNA, 19 nt, Artificial Sequence
  Synthetic
agaaaaaugcuggacauca

SEQ ID NO: 210477 - RNA, 20 nt, Artificial Sequence
  Synthetic
cagaaaaaugcuggacauca

SEQ ID NO: 210478 - RNA, 21 nt, Artificial Sequence
  Synthetic
acagaaaaaugcuggacauca

SEQ ID NO: 210479 - RNA, 22 nt, Artificial Sequence
  Synthetic
aacagaaaaaugcuggacauca

SEQ ID NO: 210480 - RNA, 23 nt, Artificial Sequence
  Synthetic
aaacagaaaaaugcuggacauca

SEQ ID NO: 210481 - RNA, 24 nt, Artificial Sequence
  Synthetic
aaaacagaaaaaugcuggacauca

SEQ ID NO: 210482 - RNA, 18 nt, Artificial Sequence
  Synthetic
uuugggauacauacauca

SEQ ID NO: 210483 - RNA, 19 nt, Artificial Sequence
  Synthetic
auuugggauacauacauca

SEQ ID NO: 210484 - RNA, 20 nt, Artificial Sequence
  Synthetic
cauuugggauacauacauca

SEQ ID NO: 210485 - RNA, 21 nt, Artificial Sequence
  Synthetic
acauuugggauacauacauca

SEQ ID NO: 210486 - RNA, 22 nt, Artificial Sequence
  Synthetic
gacauuugggauacauacauca

SEQ ID NO: 210487 - RNA, 23 nt, Artificial Sequence
  Synthetic
agacauuugggauacauacauca

SEQ ID NO: 210488 - RNA, 24 nt, Artificial Sequence
  Synthetic
gagacauuugggauacauacauca

SEQ ID NO: 210489 - RNA, 18 nt, Artificial Sequence
  Synthetic
aagcagaaucaaccauca

SEQ ID NO: 210490 - RNA, 19 nt, Artificial Sequence
  Synthetic
uaagcagaaucaaccauca

SEQ ID NO: 210491 - RNA, 20 nt, Artificial Sequence
  Synthetic
uuaagcagaaucaaccauca

SEQ ID NO: 210492 - RNA, 21 nt, Artificial Sequence
  Synthetic
cuuaagcagaaucaaccauca

SEQ ID NO: 210493 - RNA, 22 nt, Artificial Sequence
  Synthetic
ccuuaagcagaaucaaccauca

SEQ ID NO: 210494 - RNA, 23 nt, Artificial Sequence
  Synthetic
gccuuaagcagaaucaaccauca

SEQ ID NO: 210495 - RNA, 24 nt, Artificial Sequence
  Synthetic
agccuuaagcagaaucaaccauca

SEQ ID NO: 210496 - RNA, 18 nt, Artificial Sequence
  Synthetic
caggagaugucaccauca

SEQ ID NO: 210497 - RNA, 19 nt, Artificial Sequence
  Synthetic
gcaggagaugucaccauca

SEQ ID NO: 210498 - RNA, 20 nt, Artificial Sequence
  Synthetic
agcaggagaugucaccauca

SEQ ID NO: 210499 - RNA, 21 nt, Artificial Sequence
  Synthetic
cagcaggagaugucaccauca

SEQ ID NO: 210500 - RNA, 22 nt, Artificial Sequence
  Synthetic
gcagcaggagaugucaccauca

SEQ ID NO: 210501 - RNA, 23 nt, Artificial Sequence
  Synthetic
ggcagcaggagaugucaccauca

SEQ ID NO: 210502 - RNA, 24 nt, Artificial Sequence
  Synthetic
aggcagcaggagaugucaccauca

SEQ ID NO: 210503 - RNA, 18 nt, Artificial Sequence
  Synthetic
uguaaaacaacgccauca

SEQ ID NO: 210504 - RNA, 19 nt, Artificial Sequence
  Synthetic
auguaaaacaacgccauca

SEQ ID NO: 210505 - RNA, 20 nt, Artificial Sequence
  Synthetic
uauguaaaacaacgccauca

SEQ ID NO: 210506 - RNA, 21 nt, Artificial Sequence
  Synthetic
uuauguaaaacaacgccauca

SEQ ID NO: 210507 - RNA, 22 nt, Artificial Sequence
  Synthetic
uuuauguaaaacaacgccauca

SEQ ID NO: 210508 - RNA, 23 nt, Artificial Sequence
  Synthetic
uuuuauguaaaacaacgccauca

SEQ ID NO: 210509 - RNA, 24 nt, Artificial Sequence
  Synthetic
auuuuauguaaaacaacgccauca

SEQ ID NO: 210510 - RNA, 18 nt, Artificial Sequence
  Synthetic
caccaucacuggccauca

SEQ ID NO: 210511 - RNA, 19 nt, Artificial Sequence
  Synthetic
ucaccaucacuggccauca

SEQ ID NO: 210512 - RNA, 20 nt, Artificial Sequence
  Synthetic
cucaccaucacuggccauca

SEQ ID NO: 210513 - RNA, 21 nt, Artificial Sequence
  Synthetic
gcucaccaucacuggccauca

SEQ ID NO: 210514 - RNA, 22 nt, Artificial Sequence
  Synthetic
ugcucaccaucacuggccauca

SEQ ID NO: 210515 - RNA, 23 nt, Artificial Sequence
  Synthetic
augcucaccaucacuggccauca

SEQ ID NO: 210516 - RNA, 24 nt, Artificial Sequence
  Synthetic
aaugcucaccaucacuggccauca

SEQ ID NO: 210517 - RNA, 18 nt, Artificial Sequence
  Synthetic
caucaucacuggccauca

SEQ ID NO: 210518 - RNA, 19 nt, Artificial Sequence
  Synthetic
ucaucaucacuggccauca

SEQ ID NO: 210519 - RNA, 20 nt, Artificial Sequence
  Synthetic
cucaucaucacuggccauca

SEQ ID NO: 210520 - RNA, 18 nt, Artificial Sequence
  Synthetic
guuuacccagauccauca

SEQ ID NO: 210521 - RNA, 19 nt, Artificial Sequence
  Synthetic
aguuuacccagauccauca

SEQ ID NO: 210522 - RNA, 20 nt, Artificial Sequence
  Synthetic
caguuuacccagauccauca

SEQ ID NO: 210523 - RNA, 21 nt, Artificial Sequence
  Synthetic
ucaguuuacccagauccauca

SEQ ID NO: 210524 - RNA, 22 nt, Artificial Sequence
  Synthetic
uucaguuuacccagauccauca

SEQ ID NO: 210525 - RNA, 23 nt, Artificial Sequence
  Synthetic
uuucaguuuacccagauccauca

SEQ ID NO: 210526 - RNA, 24 nt, Artificial Sequence
  Synthetic
uuuucaguuuacccagauccauca

SEQ ID NO: 210527 - RNA, 18 nt, Artificial Sequence
  Synthetic
uucuucuauacuccauca

SEQ ID NO: 210528 - RNA, 19 nt, Artificial Sequence
  Synthetic
uuucuucuauacuccauca

SEQ ID NO: 210529 - RNA, 20 nt, Artificial Sequence
  Synthetic
cuuucuucuauacuccauca

SEQ ID NO: 210530 - RNA, 21 nt, Artificial Sequence
  Synthetic
ucuuucuucuauacuccauca

SEQ ID NO: 210531 - RNA, 22 nt, Artificial Sequence
  Synthetic
uucuuucuucuauacuccauca

SEQ ID NO: 210532 - RNA, 23 nt, Artificial Sequence
  Synthetic
uuucuuucuucuauacuccauca

SEQ ID NO: 210533 - RNA, 24 nt, Artificial Sequence
  Synthetic
auuucuuucuucuauacuccauca

SEQ ID NO: 210534 - RNA, 18 nt, Artificial Sequence
  Synthetic
gacauaggguuuccauca

SEQ ID NO: 210535 - RNA, 19 nt, Artificial Sequence
  Synthetic
agacauaggguuuccauca

SEQ ID NO: 210536 - RNA, 20 nt, Artificial Sequence
  Synthetic
aagacauaggguuuccauca

SEQ ID NO: 210537 - RNA, 21 nt, Artificial Sequence
  Synthetic
gaagacauaggguuuccauca

SEQ ID NO: 210538 - RNA, 22 nt, Artificial Sequence
  Synthetic
ggaagacauaggguuuccauca

SEQ ID NO: 210539 - RNA, 23 nt, Artificial Sequence
  Synthetic
aggaagacauaggguuuccauca

SEQ ID NO: 210540 - RNA, 24 nt, Artificial Sequence
  Synthetic
gaggaagacauaggguuuccauca

SEQ ID NO: 210541 - RNA, 18 nt, Artificial Sequence
  Synthetic
uauacuccuaaagcauca

SEQ ID NO: 210542 - RNA, 19 nt, Artificial Sequence
  Synthetic
uuauacuccuaaagcauca

SEQ ID NO: 210543 - RNA, 20 nt, Artificial Sequence
  Synthetic
uuuauacuccuaaagcauca

SEQ ID NO: 210544 - RNA, 21 nt, Artificial Sequence
  Synthetic
cuuuauacuccuaaagcauca

SEQ ID NO: 210545 - RNA, 22 nt, Artificial Sequence
  Synthetic
ucuuuauacuccuaaagcauca

SEQ ID NO: 210546 - RNA, 23 nt, Artificial Sequence
  Synthetic
aucuuuauacuccuaaagcauca

SEQ ID NO: 210547 - RNA, 24 nt, Artificial Sequence
  Synthetic
caucuuuauacuccuaaagcauca

SEQ ID NO: 210548 - RNA, 18 nt, Artificial Sequence
  Synthetic
ggucccagaucagcauca

SEQ ID NO: 210549 - RNA, 19 nt, Artificial Sequence
  Synthetic
gggucccagaucagcauca

SEQ ID NO: 210550 - RNA, 20 nt, Artificial Sequence
  Synthetic
ugggucccagaucagcauca

SEQ ID NO: 210551 - RNA, 21 nt, Artificial Sequence
  Synthetic
gugggucccagaucagcauca

SEQ ID NO: 210552 - RNA, 22 nt, Artificial Sequence
  Synthetic
ugugggucccagaucagcauca

SEQ ID NO: 210553 - RNA, 23 nt, Artificial Sequence
  Synthetic
gugugggucccagaucagcauca

SEQ ID NO: 210554 - RNA, 24 nt, Artificial Sequence
  Synthetic
agugugggucccagaucagcauca

SEQ ID NO: 210555 - RNA, 18 nt, Artificial Sequence
  Synthetic
uuagauaugggagcauca

SEQ ID NO: 210556 - RNA, 19 nt, Artificial Sequence
  Synthetic
uuuagauaugggagcauca

SEQ ID NO: 210557 - RNA, 20 nt, Artificial Sequence
  Synthetic
guuuagauaugggagcauca

SEQ ID NO: 210558 - RNA, 21 nt, Artificial Sequence
  Synthetic
aguuuagauaugggagcauca

SEQ ID NO: 210559 - RNA, 22 nt, Artificial Sequence
  Synthetic
uaguuuagauaugggagcauca

SEQ ID NO: 210560 - RNA, 23 nt, Artificial Sequence
  Synthetic
auaguuuagauaugggagcauca

SEQ ID NO: 210561 - RNA, 24 nt, Artificial Sequence
  Synthetic
aauaguuuagauaugggagcauca

SEQ ID NO: 210562 - RNA, 18 nt, Artificial Sequence
  Synthetic
uuauuuccccuagcauca

SEQ ID NO: 210563 - RNA, 19 nt, Artificial Sequence
  Synthetic
guuauuuccccuagcauca

SEQ ID NO: 210564 - RNA, 20 nt, Artificial Sequence
  Synthetic
aguuauuuccccuagcauca

SEQ ID NO: 210565 - RNA, 21 nt, Artificial Sequence
  Synthetic
gaguuauuuccccuagcauca

SEQ ID NO: 210566 - RNA, 22 nt, Artificial Sequence
  Synthetic
agaguuauuuccccuagcauca

SEQ ID NO: 210567 - RNA, 23 nt, Artificial Sequence
  Synthetic
cagaguuauuuccccuagcauca

SEQ ID NO: 210568 - RNA, 24 nt, Artificial Sequence
  Synthetic
ucagaguuauuuccccuagcauca

SEQ ID NO: 210569 - RNA, 18 nt, Artificial Sequence
  Synthetic
gaaaauucauuggcauca

SEQ ID NO: 210570 - RNA, 19 nt, Artificial Sequence
  Synthetic
ugaaaauucauuggcauca

SEQ ID NO: 210571 - RNA, 20 nt, Artificial Sequence
  Synthetic
uugaaaauucauuggcauca

SEQ ID NO: 210572 - RNA, 21 nt, Artificial Sequence
  Synthetic
uuugaaaauucauuggcauca

SEQ ID NO: 210573 - RNA, 22 nt, Artificial Sequence
  Synthetic
guuugaaaauucauuggcauca

SEQ ID NO: 210574 - RNA, 23 nt, Artificial Sequence
  Synthetic
aguuugaaaauucauuggcauca

SEQ ID NO: 210575 - RNA, 24 nt, Artificial Sequence
  Synthetic
uaguuugaaaauucauuggcauca

SEQ ID NO: 210576 - RNA, 18 nt, Artificial Sequence
  Synthetic
ucacaucacucaucauca

SEQ ID NO: 210577 - RNA, 19 nt, Artificial Sequence
  Synthetic
gucacaucacucaucauca

SEQ ID NO: 210578 - RNA, 20 nt, Artificial Sequence
  Synthetic
cgucacaucacucaucauca

SEQ ID NO: 210579 - RNA, 21 nt, Artificial Sequence
  Synthetic
gcgucacaucacucaucauca

SEQ ID NO: 210580 - RNA, 22 nt, Artificial Sequence
  Synthetic
ugcgucacaucacucaucauca

SEQ ID NO: 210581 - RNA, 23 nt, Artificial Sequence
  Synthetic
augcgucacaucacucaucauca

SEQ ID NO: 210582 - RNA, 24 nt, Artificial Sequence
  Synthetic
aaugcgucacaucacucaucauca

SEQ ID NO: 210583 - RNA, 18 nt, Artificial Sequence
  Synthetic
acuaaagauggaucauca

SEQ ID NO: 210584 - RNA, 19 nt, Artificial Sequence
  Synthetic
uacuaaagauggaucauca

SEQ ID NO: 210585 - RNA, 20 nt, Artificial Sequence
  Synthetic
uuacuaaagauggaucauca

SEQ ID NO: 210586 - RNA, 21 nt, Artificial Sequence
  Synthetic
uuuacuaaagauggaucauca

SEQ ID NO: 210587 - RNA, 22 nt, Artificial Sequence
  Synthetic
uuuuacuaaagauggaucauca

SEQ ID NO: 210588 - RNA, 23 nt, Artificial Sequence
  Synthetic
uuuuuacuaaagauggaucauca

SEQ ID NO: 210589 - RNA, 24 nt, Artificial Sequence
  Synthetic
auuuuuacuaaagauggaucauca

SEQ ID NO: 210590 - RNA, 18 nt, Artificial Sequence
  Synthetic
agauucuaaauaucauca

SEQ ID NO: 210591 - RNA, 19 nt, Artificial Sequence
  Synthetic
uagauucuaaauaucauca

SEQ ID NO: 210592 - RNA, 20 nt, Artificial Sequence
  Synthetic
cuagauucuaaauaucauca

SEQ ID NO: 210593 - RNA, 21 nt, Artificial Sequence
  Synthetic
acuagauucuaaauaucauca

SEQ ID NO: 210594 - RNA, 22 nt, Artificial Sequence
  Synthetic
cacuagauucuaaauaucauca

SEQ ID NO: 210595 - RNA, 23 nt, Artificial Sequence
  Synthetic
ucacuagauucuaaauaucauca

SEQ ID NO: 210596 - RNA, 24 nt, Artificial Sequence
  Synthetic
aucacuagauucuaaauaucauca

SEQ ID NO: 210597 - RNA, 18 nt, Artificial Sequence
  Synthetic
aaaauauuacagucauca

SEQ ID NO: 210598 - RNA, 19 nt, Artificial Sequence
  Synthetic
caaaauauuacagucauca

SEQ ID NO: 210599 - RNA, 20 nt, Artificial Sequence
  Synthetic
ccaaaauauuacagucauca

SEQ ID NO: 210600 - RNA, 21 nt, Artificial Sequence
  Synthetic
accaaaauauuacagucauca

SEQ ID NO: 210601 - RNA, 22 nt, Artificial Sequence
  Synthetic
aaccaaaauauuacagucauca

SEQ ID NO: 210602 - RNA, 23 nt, Artificial Sequence
  Synthetic
gaaccaaaauauuacagucauca

SEQ ID NO: 210603 - RNA, 24 nt, Artificial Sequence
  Synthetic
ggaaccaaaauauuacagucauca

SEQ ID NO: 210604 - RNA, 18 nt, Artificial Sequence
  Synthetic
caugaccaugagucauca

SEQ ID NO: 210605 - RNA, 19 nt, Artificial Sequence
  Synthetic
ccaugaccaugagucauca

SEQ ID NO: 210606 - RNA, 20 nt, Artificial Sequence
  Synthetic
uccaugaccaugagucauca

SEQ ID NO: 210607 - RNA, 21 nt, Artificial Sequence
  Synthetic
cuccaugaccaugagucauca

SEQ ID NO: 210608 - RNA, 22 nt, Artificial Sequence
  Synthetic
ucuccaugaccaugagucauca

SEQ ID NO: 210609 - RNA, 23 nt, Artificial Sequence
  Synthetic
aucuccaugaccaugagucauca

SEQ ID NO: 210610 - RNA, 24 nt, Artificial Sequence
  Synthetic
caucuccaugaccaugagucauca

SEQ ID NO: 210611 - RNA, 18 nt, Artificial Sequence
  Synthetic
cagcaucacuagucauca

SEQ ID NO: 210612 - RNA, 19 nt, Artificial Sequence
  Synthetic
ucagcaucacuagucauca

SEQ ID NO: 210613 - RNA, 20 nt, Artificial Sequence
  Synthetic
cucagcaucacuagucauca

SEQ ID NO: 210614 - RNA, 21 nt, Artificial Sequence
  Synthetic
gcucagcaucacuagucauca

SEQ ID NO: 210615 - RNA, 22 nt, Artificial Sequence
  Synthetic
ugcucagcaucacuagucauca

SEQ ID NO: 210616 - RNA, 23 nt, Artificial Sequence
  Synthetic
gugcucagcaucacuagucauca

SEQ ID NO: 210617 - RNA, 24 nt, Artificial Sequence
  Synthetic
ggugcucagcaucacuagucauca

SEQ ID NO: 210618 - RNA, 18 nt, Artificial Sequence
  Synthetic
ggcugaccucugucauca

SEQ ID NO: 210619 - RNA, 19 nt, Artificial Sequence
  Synthetic
aggcugaccucugucauca

SEQ ID NO: 210620 - RNA, 20 nt, Artificial Sequence
  Synthetic
gaggcugaccucugucauca

SEQ ID NO: 210621 - RNA, 21 nt, Artificial Sequence
  Synthetic
ggaggcugaccucugucauca

SEQ ID NO: 210622 - RNA, 22 nt, Artificial Sequence
  Synthetic
gggaggcugaccucugucauca

SEQ ID NO: 210623 - RNA, 23 nt, Artificial Sequence
  Synthetic
ugggaggcugaccucugucauca

SEQ ID NO: 210624 - RNA, 24 nt, Artificial Sequence
  Synthetic
cugggaggcugaccucugucauca

SEQ ID NO: 210625 - RNA, 18 nt, Artificial Sequence
  Synthetic
ucaacaugauuuucauca

SEQ ID NO: 210626 - RNA, 19 nt, Artificial Sequence
  Synthetic
gucaacaugauuuucauca

SEQ ID NO: 210627 - RNA, 20 nt, Artificial Sequence
  Synthetic
ugucaacaugauuuucauca

SEQ ID NO: 210628 - RNA, 21 nt, Artificial Sequence
  Synthetic
augucaacaugauuuucauca

SEQ ID NO: 210629 - RNA, 22 nt, Artificial Sequence
  Synthetic
aaugucaacaugauuuucauca

SEQ ID NO: 210630 - RNA, 23 nt, Artificial Sequence
  Synthetic
caaugucaacaugauuuucauca

SEQ ID NO: 210631 - RNA, 24 nt, Artificial Sequence
  Synthetic
acaaugucaacaugauuuucauca

SEQ ID NO: 210632 - RNA, 18 nt, Artificial Sequence
  Synthetic
gugaaaacaaaaagauca

SEQ ID NO: 210633 - RNA, 19 nt, Artificial Sequence
  Synthetic
agugaaaacaaaaagauca

SEQ ID NO: 210634 - RNA, 20 nt, Artificial Sequence
  Synthetic
aagugaaaacaaaaagauca

SEQ ID NO: 210635 - RNA, 21 nt, Artificial Sequence
  Synthetic
aaagugaaaacaaaaagauca

SEQ ID NO: 210636 - RNA, 22 nt, Artificial Sequence
  Synthetic
uaaagugaaaacaaaaagauca

SEQ ID NO: 210637 - RNA, 23 nt, Artificial Sequence
  Synthetic
guaaagugaaaacaaaaagauca

SEQ ID NO: 210638 - RNA, 24 nt, Artificial Sequence
  Synthetic
uguaaagugaaaacaaaaagauca

SEQ ID NO: 210639 - RNA, 18 nt, Artificial Sequence
  Synthetic
cugcgaaguccaagauca

SEQ ID NO: 210640 - RNA, 19 nt, Artificial Sequence
  Synthetic
gcugcgaaguccaagauca

SEQ ID NO: 210641 - RNA, 20 nt, Artificial Sequence
  Synthetic
ggcugcgaaguccaagauca

SEQ ID NO: 210642 - RNA, 21 nt, Artificial Sequence
  Synthetic
aggcugcgaaguccaagauca

SEQ ID NO: 210643 - RNA, 22 nt, Artificial Sequence
  Synthetic
gaggcugcgaaguccaagauca

SEQ ID NO: 210644 - RNA, 23 nt, Artificial Sequence
  Synthetic
ggaggcugcgaaguccaagauca

SEQ ID NO: 210645 - RNA, 24 nt, Artificial Sequence
  Synthetic
uggaggcugcgaaguccaagauca

SEQ ID NO: 210646 - RNA, 18 nt, Artificial Sequence
  Synthetic
auuaucuaggcaagauca

SEQ ID NO: 210647 - RNA, 19 nt, Artificial Sequence
  Synthetic
gauuaucuaggcaagauca

SEQ ID NO: 210648 - RNA, 20 nt, Artificial Sequence
  Synthetic
agauuaucuaggcaagauca

SEQ ID NO: 210649 - RNA, 21 nt, Artificial Sequence
  Synthetic
cagauuaucuaggcaagauca

SEQ ID NO: 210650 - RNA, 22 nt, Artificial Sequence
  Synthetic
ucagauuaucuaggcaagauca

SEQ ID NO: 210651 - RNA, 23 nt, Artificial Sequence
  Synthetic
cucagauuaucuaggcaagauca

SEQ ID NO: 210652 - RNA, 24 nt, Artificial Sequence
  Synthetic
ucucagauuaucuaggcaagauca

SEQ ID NO: 210653 - RNA, 18 nt, Artificial Sequence
  Synthetic
aagaauucaucaagauca

SEQ ID NO: 210654 - RNA, 19 nt, Artificial Sequence
  Synthetic
aaagaauucaucaagauca

SEQ ID NO: 210655 - RNA, 20 nt, Artificial Sequence
  Synthetic
gaaagaauucaucaagauca

SEQ ID NO: 210656 - RNA, 21 nt, Artificial Sequence
  Synthetic
agaaagaauucaucaagauca

SEQ ID NO: 210657 - RNA, 22 nt, Artificial Sequence
  Synthetic
aagaaagaauucaucaagauca

SEQ ID NO: 210658 - RNA, 23 nt, Artificial Sequence
  Synthetic
caagaaagaauucaucaagauca

SEQ ID NO: 210659 - RNA, 24 nt, Artificial Sequence
  Synthetic
ccaagaaagaauucaucaagauca

SEQ ID NO: 210660 - RNA, 18 nt, Artificial Sequence
  Synthetic
cccuuaugaguaagauca

SEQ ID NO: 210661 - RNA, 19 nt, Artificial Sequence
  Synthetic
ucccuuaugaguaagauca

SEQ ID NO: 210662 - RNA, 20 nt, Artificial Sequence
  Synthetic
aucccuuaugaguaagauca

SEQ ID NO: 210663 - RNA, 21 nt, Artificial Sequence
  Synthetic
caucccuuaugaguaagauca

SEQ ID NO: 210664 - RNA, 22 nt, Artificial Sequence
  Synthetic
gcaucccuuaugaguaagauca

SEQ ID NO: 210665 - RNA, 23 nt, Artificial Sequence
  Synthetic
ugcaucccuuaugaguaagauca

SEQ ID NO: 210666 - RNA, 24 nt, Artificial Sequence
  Synthetic
cugcaucccuuaugaguaagauca

SEQ ID NO: 210667 - RNA, 18 nt, Artificial Sequence
  Synthetic
auucugaaugccagauca

SEQ ID NO: 210668 - RNA, 19 nt, Artificial Sequence
  Synthetic
gauucugaaugccagauca

SEQ ID NO: 210669 - RNA, 20 nt, Artificial Sequence
  Synthetic
ggauucugaaugccagauca

SEQ ID NO: 210670 - RNA, 21 nt, Artificial Sequence
  Synthetic
gggauucugaaugccagauca

SEQ ID NO: 210671 - RNA, 22 nt, Artificial Sequence
  Synthetic
agggauucugaaugccagauca

SEQ ID NO: 210672 - RNA, 23 nt, Artificial Sequence
  Synthetic
gagggauucugaaugccagauca

SEQ ID NO: 210673 - RNA, 24 nt, Artificial Sequence
  Synthetic
ugagggauucugaaugccagauca

SEQ ID NO: 210674 - RNA, 18 nt, Artificial Sequence
  Synthetic
gcugggaugggcagauca

SEQ ID NO: 210675 - RNA, 19 nt, Artificial Sequence
  Synthetic
ggcugggaugggcagauca

SEQ ID NO: 210676 - RNA, 20 nt, Artificial Sequence
  Synthetic
aggcugggaugggcagauca

SEQ ID NO: 210677 - RNA, 21 nt, Artificial Sequence
  Synthetic
gaggcugggaugggcagauca

SEQ ID NO: 210678 - RNA, 22 nt, Artificial Sequence
  Synthetic
ggaggcugggaugggcagauca

SEQ ID NO: 210679 - RNA, 23 nt, Artificial Sequence
  Synthetic
gggaggcugggaugggcagauca

SEQ ID NO: 210680 - RNA, 24 nt, Artificial Sequence
  Synthetic
ugggaggcugggaugggcagauca

SEQ ID NO: 210681 - RNA, 18 nt, Artificial Sequence
  Synthetic
ucuuauugccagagauca

SEQ ID NO: 210682 - RNA, 19 nt, Artificial Sequence
  Synthetic
uucuuauugccagagauca

SEQ ID NO: 210683 - RNA, 20 nt, Artificial Sequence
  Synthetic
guucuuauugccagagauca

SEQ ID NO: 210684 - RNA, 21 nt, Artificial Sequence
  Synthetic
gguucuuauugccagagauca

SEQ ID NO: 210685 - RNA, 22 nt, Artificial Sequence
  Synthetic
agguucuuauugccagagauca

SEQ ID NO: 210686 - RNA, 23 nt, Artificial Sequence
  Synthetic
uagguucuuauugccagagauca

SEQ ID NO: 210687 - RNA, 24 nt, Artificial Sequence
  Synthetic
cuagguucuuauugccagagauca

SEQ ID NO: 210688 - RNA, 18 nt, Artificial Sequence
  Synthetic
ggaauauuaaggagauca

SEQ ID NO: 210689 - RNA, 19 nt, Artificial Sequence
  Synthetic
cggaauauuaaggagauca

SEQ ID NO: 210690 - RNA, 20 nt, Artificial Sequence
  Synthetic
acggaauauuaaggagauca

SEQ ID NO: 210691 - RNA, 21 nt, Artificial Sequence
  Synthetic
gacggaauauuaaggagauca

SEQ ID NO: 210692 - RNA, 22 nt, Artificial Sequence
  Synthetic
ugacggaauauuaaggagauca

SEQ ID NO: 210693 - RNA, 23 nt, Artificial Sequence
  Synthetic
augacggaauauuaaggagauca

SEQ ID NO: 210694 - RNA, 24 nt, Artificial Sequence
  Synthetic
gaugacggaauauuaaggagauca

SEQ ID NO: 210695 - RNA, 18 nt, Artificial Sequence
  Synthetic
aaacagacauauagauca

SEQ ID NO: 210696 - RNA, 19 nt, Artificial Sequence
  Synthetic
aaaacagacauauagauca

SEQ ID NO: 210697 - RNA, 20 nt, Artificial Sequence
  Synthetic
caaaacagacauauagauca

SEQ ID NO: 210698 - RNA, 21 nt, Artificial Sequence
  Synthetic
ccaaaacagacauauagauca

SEQ ID NO: 210699 - RNA, 22 nt, Artificial Sequence
  Synthetic
accaaaacagacauauagauca

SEQ ID NO: 210700 - RNA, 23 nt, Artificial Sequence
  Synthetic
uaccaaaacagacauauagauca

SEQ ID NO: 210701 - RNA, 24 nt, Artificial Sequence
  Synthetic
guaccaaaacagacauauagauca

SEQ ID NO: 210702 - RNA, 18 nt, Artificial Sequence
  Synthetic
gaauagacauauagauca

SEQ ID NO: 210703 - RNA, 19 nt, Artificial Sequence
  Synthetic
ugaauagacauauagauca

SEQ ID NO: 210704 - RNA, 20 nt, Artificial Sequence
  Synthetic
gugaauagacauauagauca

SEQ ID NO: 210705 - RNA, 21 nt, Artificial Sequence
  Synthetic
ugugaauagacauauagauca

SEQ ID NO: 210706 - RNA, 22 nt, Artificial Sequence
  Synthetic
augugaauagacauauagauca

SEQ ID NO: 210707 - RNA, 23 nt, Artificial Sequence
  Synthetic
aaugugaauagacauauagauca

SEQ ID NO: 210708 - RNA, 24 nt, Artificial Sequence
  Synthetic
gaaugugaauagacauauagauca

SEQ ID NO: 210709 - RNA, 18 nt, Artificial Sequence
  Synthetic
aacaagacaaguagauca

SEQ ID NO: 210710 - RNA, 19 nt, Artificial Sequence
  Synthetic
aaacaagacaaguagauca

SEQ ID NO: 210711 - RNA, 20 nt, Artificial Sequence
  Synthetic
aaaacaagacaaguagauca

SEQ ID NO: 210712 - RNA, 21 nt, Artificial Sequence
  Synthetic
caaaacaagacaaguagauca

SEQ ID NO: 210713 - RNA, 22 nt, Artificial Sequence
  Synthetic
acaaaacaagacaaguagauca

SEQ ID NO: 210714 - RNA, 23 nt, Artificial Sequence
  Synthetic
cacaaaacaagacaaguagauca

SEQ ID NO: 210715 - RNA, 24 nt, Artificial Sequence
  Synthetic
gcacaaaacaagacaaguagauca

SEQ ID NO: 210716 - RNA, 18 nt, Artificial Sequence
  Synthetic
acuuaaaugaguagauca

SEQ ID NO: 210717 - RNA, 19 nt, Artificial Sequence
  Synthetic
gacuuaaaugaguagauca

SEQ ID NO: 210718 - RNA, 20 nt, Artificial Sequence
  Synthetic
ugacuuaaaugaguagauca

SEQ ID NO: 210719 - RNA, 21 nt, Artificial Sequence
  Synthetic
uugacuuaaaugaguagauca

SEQ ID NO: 210720 - RNA, 22 nt, Artificial Sequence
  Synthetic
uuugacuuaaaugaguagauca

SEQ ID NO: 210721 - RNA, 23 nt, Artificial Sequence
  Synthetic
guuugacuuaaaugaguagauca

SEQ ID NO: 210722 - RNA, 24 nt, Artificial Sequence
  Synthetic
uguuugacuuaaaugaguagauca

SEQ ID NO: 210723 - RNA, 18 nt, Artificial Sequence
  Synthetic
cccauguuggaaggauca

SEQ ID NO: 210724 - RNA, 19 nt, Artificial Sequence
  Synthetic
ucccauguuggaaggauca

SEQ ID NO: 210725 - RNA, 20 nt, Artificial Sequence
  Synthetic
uucccauguuggaaggauca

SEQ ID NO: 210726 - RNA, 21 nt, Artificial Sequence
  Synthetic
cuucccauguuggaaggauca

SEQ ID NO: 210727 - RNA, 22 nt, Artificial Sequence
  Synthetic
ucuucccauguuggaaggauca

SEQ ID NO: 210728 - RNA, 23 nt, Artificial Sequence
  Synthetic
aucuucccauguuggaaggauca

SEQ ID NO: 210729 - RNA, 24 nt, Artificial Sequence
  Synthetic
uaucuucccauguuggaaggauca

SEQ ID NO: 210730 - RNA, 18 nt, Artificial Sequence
  Synthetic
agaaggggaagaggauca

SEQ ID NO: 210731 - RNA, 19 nt, Artificial Sequence
  Synthetic
gagaaggggaagaggauca

SEQ ID NO: 210732 - RNA, 20 nt, Artificial Sequence
  Synthetic
ugagaaggggaagaggauca

SEQ ID NO: 210733 - RNA, 21 nt, Artificial Sequence
  Synthetic
uugagaaggggaagaggauca

SEQ ID NO: 210734 - RNA, 22 nt, Artificial Sequence
  Synthetic
auugagaaggggaagaggauca

SEQ ID NO: 210735 - RNA, 23 nt, Artificial Sequence
  Synthetic
uauugagaaggggaagaggauca

SEQ ID NO: 210736 - RNA, 24 nt, Artificial Sequence
  Synthetic
guauugagaaggggaagaggauca

SEQ ID NO: 210737 - RNA, 18 nt, Artificial Sequence
  Synthetic
uaaaagucacuaggauca

SEQ ID NO: 210738 - RNA, 19 nt, Artificial Sequence
  Synthetic
guaaaagucacuaggauca

SEQ ID NO: 210739 - RNA, 20 nt, Artificial Sequence
  Synthetic
gguaaaagucacuaggauca

SEQ ID NO: 210740 - RNA, 21 nt, Artificial Sequence
  Synthetic
cgguaaaagucacuaggauca

SEQ ID NO: 210741 - RNA, 22 nt, Artificial Sequence
  Synthetic
acgguaaaagucacuaggauca

SEQ ID NO: 210742 - RNA, 23 nt, Artificial Sequence
  Synthetic
aacgguaaaagucacuaggauca

SEQ ID NO: 210743 - RNA, 24 nt, Artificial Sequence
  Synthetic
aaacgguaaaagucacuaggauca

SEQ ID NO: 210744 - RNA, 18 nt, Artificial Sequence
  Synthetic
ucaauauuagacggauca

SEQ ID NO: 210745 - RNA, 19 nt, Artificial Sequence
  Synthetic
gucaauauuagacggauca

SEQ ID NO: 210746 - RNA, 20 nt, Artificial Sequence
  Synthetic
ugucaauauuagacggauca

SEQ ID NO: 210747 - RNA, 21 nt, Artificial Sequence
  Synthetic
cugucaauauuagacggauca

SEQ ID NO: 210748 - RNA, 22 nt, Artificial Sequence
  Synthetic
acugucaauauuagacggauca

SEQ ID NO: 210749 - RNA, 23 nt, Artificial Sequence
  Synthetic
cacugucaauauuagacggauca

SEQ ID NO: 210750 - RNA, 24 nt, Artificial Sequence
  Synthetic
ccacugucaauauuagacggauca

SEQ ID NO: 210751 - RNA, 18 nt, Artificial Sequence
  Synthetic
agaauaaaacugggauca

SEQ ID NO: 210752 - RNA, 19 nt, Artificial Sequence
  Synthetic
aagaauaaaacugggauca

SEQ ID NO: 210753 - RNA, 20 nt, Artificial Sequence
  Synthetic
aaagaauaaaacugggauca

SEQ ID NO: 210754 - RNA, 21 nt, Artificial Sequence
  Synthetic
caaagaauaaaacugggauca

SEQ ID NO: 210755 - RNA, 22 nt, Artificial Sequence
  Synthetic
acaaagaauaaaacugggauca

SEQ ID NO: 210756 - RNA, 23 nt, Artificial Sequence
  Synthetic
gacaaagaauaaaacugggauca

SEQ ID NO: 210757 - RNA, 24 nt, Artificial Sequence
  Synthetic
ugacaaagaauaaaacugggauca

SEQ ID NO: 210758 - RNA, 18 nt, Artificial Sequence
  Synthetic
gcguacucugugggauca

SEQ ID NO: 210759 - RNA, 19 nt, Artificial Sequence
  Synthetic
ggcguacucugugggauca

SEQ ID NO: 210760 - RNA, 20 nt, Artificial Sequence
  Synthetic
uggcguacucugugggauca

SEQ ID NO: 210761 - RNA, 21 nt, Artificial Sequence
  Synthetic
cuggcguacucugugggauca

SEQ ID NO: 210762 - RNA, 22 nt, Artificial Sequence
  Synthetic
ucuggcguacucugugggauca

SEQ ID NO: 210763 - RNA, 23 nt, Artificial Sequence
  Synthetic
cucuggcguacucugugggauca

SEQ ID NO: 210764 - RNA, 24 nt, Artificial Sequence
  Synthetic
acucuggcguacucugugggauca

SEQ ID NO: 210765 - RNA, 18 nt, Artificial Sequence
  Synthetic
agugggauugcuggauca

SEQ ID NO: 210766 - RNA, 19 nt, Artificial Sequence
  Synthetic
cagugggauugcuggauca

SEQ ID NO: 210767 - RNA, 20 nt, Artificial Sequence
  Synthetic
gcagugggauugcuggauca

SEQ ID NO: 210768 - RNA, 21 nt, Artificial Sequence
  Synthetic
agcagugggauugcuggauca

SEQ ID NO: 210769 - RNA, 22 nt, Artificial Sequence
  Synthetic
cagcagugggauugcuggauca

SEQ ID NO: 210770 - RNA, 23 nt, Artificial Sequence
  Synthetic
ccagcagugggauugcuggauca

SEQ ID NO: 210771 - RNA, 24 nt, Artificial Sequence
  Synthetic
cccagcagugggauugcuggauca

SEQ ID NO: 210772 - RNA, 18 nt, Artificial Sequence
  Synthetic
ccuccaaaugguggauca

SEQ ID NO: 210773 - RNA, 19 nt, Artificial Sequence
  Synthetic
uccuccaaaugguggauca

SEQ ID NO: 210774 - RNA, 20 nt, Artificial Sequence
  Synthetic
uuccuccaaaugguggauca

SEQ ID NO: 210775 - RNA, 21 nt, Artificial Sequence
  Synthetic
uuuccuccaaaugguggauca

SEQ ID NO: 210776 - RNA, 22 nt, Artificial Sequence
  Synthetic
auuuccuccaaaugguggauca

SEQ ID NO: 210777 - RNA, 23 nt, Artificial Sequence
  Synthetic
gauuuccuccaaaugguggauca

SEQ ID NO: 210778 - RNA, 24 nt, Artificial Sequence
  Synthetic
agauuuccuccaaaugguggauca

SEQ ID NO: 210779 - RNA, 18 nt, Artificial Sequence
  Synthetic
uuugacccucuuggauca

SEQ ID NO: 210780 - RNA, 19 nt, Artificial Sequence
  Synthetic
guuugacccucuuggauca

SEQ ID NO: 210781 - RNA, 20 nt, Artificial Sequence
  Synthetic
cguuugacccucuuggauca

SEQ ID NO: 210782 - RNA, 21 nt, Artificial Sequence
  Synthetic
ccguuugacccucuuggauca

SEQ ID NO: 210783 - RNA, 22 nt, Artificial Sequence
  Synthetic
accguuugacccucuuggauca

SEQ ID NO: 210784 - RNA, 23 nt, Artificial Sequence
  Synthetic
aaccguuugacccucuuggauca

SEQ ID NO: 210785 - RNA, 24 nt, Artificial Sequence
  Synthetic
uaaccguuugacccucuuggauca

SEQ ID NO: 210786 - RNA, 18 nt, Artificial Sequence
  Synthetic
uacauucuuucaugauca

SEQ ID NO: 210787 - RNA, 19 nt, Artificial Sequence
  Synthetic
guacauucuuucaugauca

SEQ ID NO: 210788 - RNA, 20 nt, Artificial Sequence
  Synthetic
gguacauucuuucaugauca

SEQ ID NO: 210789 - RNA, 21 nt, Artificial Sequence
  Synthetic
ugguacauucuuucaugauca

SEQ ID NO: 210790 - RNA, 22 nt, Artificial Sequence
  Synthetic
uugguacauucuuucaugauca

SEQ ID NO: 210791 - RNA, 23 nt, Artificial Sequence
  Synthetic
cuugguacauucuuucaugauca

SEQ ID NO: 210792 - RNA, 24 nt, Artificial Sequence
  Synthetic
ucuugguacauucuuucaugauca

SEQ ID NO: 210793 - RNA, 18 nt, Artificial Sequence
  Synthetic
agauuacagugcugauca

SEQ ID NO: 210794 - RNA, 19 nt, Artificial Sequence
  Synthetic
aagauuacagugcugauca

SEQ ID NO: 210795 - RNA, 20 nt, Artificial Sequence
  Synthetic
uaagauuacagugcugauca

SEQ ID NO: 210796 - RNA, 21 nt, Artificial Sequence
  Synthetic
uuaagauuacagugcugauca

SEQ ID NO: 210797 - RNA, 22 nt, Artificial Sequence
  Synthetic
uuuaagauuacagugcugauca

SEQ ID NO: 210798 - RNA, 23 nt, Artificial Sequence
  Synthetic
uuuuaagauuacagugcugauca

SEQ ID NO: 210799 - RNA, 24 nt, Artificial Sequence
  Synthetic
uuuuuaagauuacagugcugauca

SEQ ID NO: 210800 - RNA, 18 nt, Artificial Sequence
  Synthetic
aaagaaaaggagugauca

SEQ ID NO: 210801 - RNA, 19 nt, Artificial Sequence
  Synthetic
aaaagaaaaggagugauca

SEQ ID NO: 210802 - RNA, 20 nt, Artificial Sequence
  Synthetic
gaaaagaaaaggagugauca

SEQ ID NO: 210803 - RNA, 21 nt, Artificial Sequence
  Synthetic
agaaaagaaaaggagugauca

SEQ ID NO: 210804 - RNA, 22 nt, Artificial Sequence
  Synthetic
aagaaaagaaaaggagugauca

SEQ ID NO: 210805 - RNA, 23 nt, Artificial Sequence
  Synthetic
aaagaaaagaaaaggagugauca

SEQ ID NO: 210806 - RNA, 24 nt, Artificial Sequence
  Synthetic
aaaagaaaagaaaaggagugauca

SEQ ID NO: 210807 - RNA, 18 nt, Artificial Sequence
  Synthetic
guagauuuuuggugauca

SEQ ID NO: 210808 - RNA, 19 nt, Artificial Sequence
  Synthetic
uguagauuuuuggugauca

SEQ ID NO: 210809 - RNA, 20 nt, Artificial Sequence
  Synthetic
uuguagauuuuuggugauca

SEQ ID NO: 210810 - RNA, 21 nt, Artificial Sequence
  Synthetic
auuguagauuuuuggugauca

SEQ ID NO: 210811 - RNA, 22 nt, Artificial Sequence
  Synthetic
uauuguagauuuuuggugauca

SEQ ID NO: 210812 - RNA, 23 nt, Artificial Sequence
  Synthetic
guauuguagauuuuuggugauca

SEQ ID NO: 210813 - RNA, 24 nt, Artificial Sequence
  Synthetic
uguauuguagauuuuuggugauca

SEQ ID NO: 210814 - RNA, 18 nt, Artificial Sequence
  Synthetic
guggaccauaugugauca

SEQ ID NO: 210815 - RNA, 19 nt, Artificial Sequence
  Synthetic
aguggaccauaugugauca

SEQ ID NO: 210816 - RNA, 20 nt, Artificial Sequence
  Synthetic
uaguggaccauaugugauca

SEQ ID NO: 210817 - RNA, 21 nt, Artificial Sequence
  Synthetic
uuaguggaccauaugugauca

SEQ ID NO: 210818 - RNA, 22 nt, Artificial Sequence
  Synthetic
cuuaguggaccauaugugauca

SEQ ID NO: 210819 - RNA, 23 nt, Artificial Sequence
  Synthetic
ucuuaguggaccauaugugauca

SEQ ID NO: 210820 - RNA, 24 nt, Artificial Sequence
  Synthetic
cucuuaguggaccauaugugauca

SEQ ID NO: 210821 - RNA, 18 nt, Artificial Sequence
  Synthetic
cuauuuuuagauugauca

SEQ ID NO: 210822 - RNA, 19 nt, Artificial Sequence
  Synthetic
gcuauuuuuagauugauca

SEQ ID NO: 210823 - RNA, 20 nt, Artificial Sequence
  Synthetic
agcuauuuuuagauugauca

SEQ ID NO: 210824 - RNA, 21 nt, Artificial Sequence
  Synthetic
gagcuauuuuuagauugauca

SEQ ID NO: 210825 - RNA, 22 nt, Artificial Sequence
  Synthetic
agagcuauuuuuagauugauca

SEQ ID NO: 210826 - RNA, 23 nt, Artificial Sequence
  Synthetic
aagagcuauuuuuagauugauca

SEQ ID NO: 210827 - RNA, 24 nt, Artificial Sequence
  Synthetic
aaagagcuauuuuuagauugauca

SEQ ID NO: 210828 - RNA, 18 nt, Artificial Sequence
  Synthetic
uuuuauuaugcuugauca

SEQ ID NO: 210829 - RNA, 19 nt, Artificial Sequence
  Synthetic
auuuuauuaugcuugauca

SEQ ID NO: 210830 - RNA, 20 nt, Artificial Sequence
  Synthetic
uauuuuauuaugcuugauca

SEQ ID NO: 210831 - RNA, 21 nt, Artificial Sequence
  Synthetic
guauuuuauuaugcuugauca

SEQ ID NO: 210832 - RNA, 22 nt, Artificial Sequence
  Synthetic
uguauuuuauuaugcuugauca

SEQ ID NO: 210833 - RNA, 23 nt, Artificial Sequence
  Synthetic
auguauuuuauuaugcuugauca

SEQ ID NO: 210834 - RNA, 24 nt, Artificial Sequence
  Synthetic
gauguauuuuauuaugcuugauca

SEQ ID NO: 210835 - RNA, 18 nt, Artificial Sequence
  Synthetic
aagcagacugcuugauca

SEQ ID NO: 210836 - RNA, 19 nt, Artificial Sequence
  Synthetic
uaagcagacugcuugauca

SEQ ID NO: 210837 - RNA, 20 nt, Artificial Sequence
  Synthetic
cuaagcagacugcuugauca

SEQ ID NO: 210838 - RNA, 21 nt, Artificial Sequence
  Synthetic
acuaagcagacugcuugauca

SEQ ID NO: 210839 - RNA, 22 nt, Artificial Sequence
  Synthetic
cacuaagcagacugcuugauca

SEQ ID NO: 210840 - RNA, 23 nt, Artificial Sequence
  Synthetic
ucacuaagcagacugcuugauca

SEQ ID NO: 210841 - RNA, 24 nt, Artificial Sequence
  Synthetic
aucacuaagcagacugcuugauca

SEQ ID NO: 210842 - RNA, 18 nt, Artificial Sequence
  Synthetic
auuacccugauuugauca

SEQ ID NO: 210843 - RNA, 19 nt, Artificial Sequence
  Synthetic
aauuacccugauuugauca

SEQ ID NO: 210844 - RNA, 20 nt, Artificial Sequence
  Synthetic
caauuacccugauuugauca

SEQ ID NO: 210845 - RNA, 21 nt, Artificial Sequence
  Synthetic
ucaauuacccugauuugauca

SEQ ID NO: 210846 - RNA, 22 nt, Artificial Sequence
  Synthetic
cucaauuacccugauuugauca

SEQ ID NO: 210847 - RNA, 23 nt, Artificial Sequence
  Synthetic
ucucaauuacccugauuugauca

SEQ ID NO: 210848 - RNA, 24 nt, Artificial Sequence
  Synthetic
aucucaauuacccugauuugauca

SEQ ID NO: 210849 - RNA, 18 nt, Artificial Sequence
  Synthetic
auaauuucaaaaauauca

SEQ ID NO: 210850 - RNA, 19 nt, Artificial Sequence
  Synthetic
aauaauuucaaaaauauca

SEQ ID NO: 210851 - RNA, 20 nt, Artificial Sequence
  Synthetic
caauaauuucaaaaauauca

SEQ ID NO: 210852 - RNA, 21 nt, Artificial Sequence
  Synthetic
ccaauaauuucaaaaauauca

SEQ ID NO: 210853 - RNA, 22 nt, Artificial Sequence
  Synthetic
uccaauaauuucaaaaauauca

SEQ ID NO: 210854 - RNA, 23 nt, Artificial Sequence
  Synthetic
cuccaauaauuucaaaaauauca

SEQ ID NO: 210855 - RNA, 24 nt, Artificial Sequence
  Synthetic
ccuccaauaauuucaaaaauauca

SEQ ID NO: 210856 - RNA, 18 nt, Artificial Sequence
  Synthetic
uuggauaugaaaauauca

SEQ ID NO: 210857 - RNA, 19 nt, Artificial Sequence
  Synthetic
auuggauaugaaaauauca

SEQ ID NO: 210858 - RNA, 20 nt, Artificial Sequence
  Synthetic
uauuggauaugaaaauauca

SEQ ID NO: 210859 - RNA, 21 nt, Artificial Sequence
  Synthetic
auauuggauaugaaaauauca

SEQ ID NO: 210860 - RNA, 22 nt, Artificial Sequence
  Synthetic
uauauuggauaugaaaauauca

SEQ ID NO: 210861 - RNA, 23 nt, Artificial Sequence
  Synthetic
uuauauuggauaugaaaauauca

SEQ ID NO: 210862 - RNA, 24 nt, Artificial Sequence
  Synthetic
uuuauauuggauaugaaaauauca

SEQ ID NO: 210863 - RNA, 18 nt, Artificial Sequence
  Synthetic
cuuucuccuaaaauauca

SEQ ID NO: 210864 - RNA, 19 nt, Artificial Sequence
  Synthetic
ucuuucuccuaaaauauca

SEQ ID NO: 210865 - RNA, 20 nt, Artificial Sequence
  Synthetic
aucuuucuccuaaaauauca

SEQ ID NO: 210866 - RNA, 21 nt, Artificial Sequence
  Synthetic
aaucuuucuccuaaaauauca

SEQ ID NO: 210867 - RNA, 22 nt, Artificial Sequence
  Synthetic
uaaucuuucuccuaaaauauca

SEQ ID NO: 210868 - RNA, 23 nt, Artificial Sequence
  Synthetic
uuaaucuuucuccuaaaauauca

SEQ ID NO: 210869 - RNA, 24 nt, Artificial Sequence
  Synthetic
uuuaaucuuucuccuaaaauauca

SEQ ID NO: 210870 - RNA, 18 nt, Artificial Sequence
  Synthetic
uugagccaguaaauauca

SEQ ID NO: 210871 - RNA, 19 nt, Artificial Sequence
  Synthetic
guugagccaguaaauauca

SEQ ID NO: 210872 - RNA, 20 nt, Artificial Sequence
  Synthetic
uguugagccaguaaauauca

SEQ ID NO: 210873 - RNA, 21 nt, Artificial Sequence
  Synthetic
auguugagccaguaaauauca

SEQ ID NO: 210874 - RNA, 22 nt, Artificial Sequence
  Synthetic
gauguugagccaguaaauauca

SEQ ID NO: 210875 - RNA, 23 nt, Artificial Sequence
  Synthetic
agauguugagccaguaaauauca

SEQ ID NO: 210876 - RNA, 24 nt, Artificial Sequence
  Synthetic
aagauguugagccaguaaauauca

SEQ ID NO: 210877 - RNA, 18 nt, Artificial Sequence
  Synthetic
auuaaauucacaauauca

SEQ ID NO: 210878 - RNA, 19 nt, Artificial Sequence
  Synthetic
aauuaaauucacaauauca

SEQ ID NO: 210879 - RNA, 20 nt, Artificial Sequence
  Synthetic
uaauuaaauucacaauauca

SEQ ID NO: 210880 - RNA, 21 nt, Artificial Sequence
  Synthetic
cuaauuaaauucacaauauca

SEQ ID NO: 210881 - RNA, 22 nt, Artificial Sequence
  Synthetic
acuaauuaaauucacaauauca

SEQ ID NO: 210882 - RNA, 23 nt, Artificial Sequence
  Synthetic
uacuaauuaaauucacaauauca

SEQ ID NO: 210883 - RNA, 24 nt, Artificial Sequence
  Synthetic
cuacuaauuaaauucacaauauca

SEQ ID NO: 210884 - RNA, 18 nt, Artificial Sequence
  Synthetic
uacaaagggacaauauca

SEQ ID NO: 210885 - RNA, 19 nt, Artificial Sequence
  Synthetic
auacaaagggacaauauca

SEQ ID NO: 210886 - RNA, 20 nt, Artificial Sequence
  Synthetic
gauacaaagggacaauauca

SEQ ID NO: 210887 - RNA, 21 nt, Artificial Sequence
  Synthetic
ugauacaaagggacaauauca

SEQ ID NO: 210888 - RNA, 22 nt, Artificial Sequence
  Synthetic
uugauacaaagggacaauauca

SEQ ID NO: 210889 - RNA, 23 nt, Artificial Sequence
  Synthetic
guugauacaaagggacaauauca

SEQ ID NO: 210890 - RNA, 24 nt, Artificial Sequence
  Synthetic
aguugauacaaagggacaauauca

SEQ ID NO: 210891 - RNA, 18 nt, Artificial Sequence
  Synthetic
uuucaaaccagaauauca

SEQ ID NO: 210892 - RNA, 19 nt, Artificial Sequence
  Synthetic
auuucaaaccagaauauca

SEQ ID NO: 210893 - RNA, 20 nt, Artificial Sequence
  Synthetic
uauuucaaaccagaauauca

SEQ ID NO: 210894 - RNA, 21 nt, Artificial Sequence
  Synthetic
auauuucaaaccagaauauca

SEQ ID NO: 210895 - RNA, 22 nt, Artificial Sequence
  Synthetic
uauauuucaaaccagaauauca

SEQ ID NO: 210896 - RNA, 23 nt, Artificial Sequence
  Synthetic
auauauuucaaaccagaauauca

SEQ ID NO: 210897 - RNA, 24 nt, Artificial Sequence
  Synthetic
aauauauuucaaaccagaauauca

SEQ ID NO: 210898 - RNA, 18 nt, Artificial Sequence
  Synthetic
ucaaugaacauaauauca

SEQ ID NO: 210899 - RNA, 19 nt, Artificial Sequence
  Synthetic
aucaaugaacauaauauca

SEQ ID NO: 210900 - RNA, 20 nt, Artificial Sequence
  Synthetic
uaucaaugaacauaauauca

SEQ ID NO: 210901 - RNA, 21 nt, Artificial Sequence
  Synthetic
cuaucaaugaacauaauauca

SEQ ID NO: 210902 - RNA, 22 nt, Artificial Sequence
  Synthetic
acuaucaaugaacauaauauca

SEQ ID NO: 210903 - RNA, 23 nt, Artificial Sequence
  Synthetic
uacuaucaaugaacauaauauca

SEQ ID NO: 210904 - RNA, 24 nt, Artificial Sequence
  Synthetic
auacuaucaaugaacauaauauca

SEQ ID NO: 210905 - RNA, 18 nt, Artificial Sequence
  Synthetic
uggauacuuauaauauca

SEQ ID NO: 210906 - RNA, 19 nt, Artificial Sequence
  Synthetic
guggauacuuauaauauca

SEQ ID NO: 210907 - RNA, 20 nt, Artificial Sequence
  Synthetic
uguggauacuuauaauauca

SEQ ID NO: 210908 - RNA, 21 nt, Artificial Sequence
  Synthetic
auguggauacuuauaauauca

SEQ ID NO: 210909 - RNA, 22 nt, Artificial Sequence
  Synthetic
uauguggauacuuauaauauca

SEQ ID NO: 210910 - RNA, 23 nt, Artificial Sequence
  Synthetic
cuauguggauacuuauaauauca

SEQ ID NO: 210911 - RNA, 24 nt, Artificial Sequence
  Synthetic
ccuauguggauacuuauaauauca

SEQ ID NO: 210912 - RNA, 18 nt, Artificial Sequence
  Synthetic
uaauuguggaacauauca

SEQ ID NO: 210913 - RNA, 19 nt, Artificial Sequence
  Synthetic
guaauuguggaacauauca

SEQ ID NO: 210914 - RNA, 20 nt, Artificial Sequence
  Synthetic
aguaauuguggaacauauca

SEQ ID NO: 210915 - RNA, 21 nt, Artificial Sequence
  Synthetic
aaguaauuguggaacauauca

SEQ ID NO: 210916 - RNA, 22 nt, Artificial Sequence
  Synthetic
gaaguaauuguggaacauauca

SEQ ID NO: 210917 - RNA, 23 nt, Artificial Sequence
  Synthetic
ugaaguaauuguggaacauauca

SEQ ID NO: 210918 - RNA, 24 nt, Artificial Sequence
  Synthetic
cugaaguaauuguggaacauauca

SEQ ID NO: 210919 - RNA, 18 nt, Artificial Sequence
  Synthetic
uucucuucauacauauca

SEQ ID NO: 210920 - RNA, 19 nt, Artificial Sequence
  Synthetic
uuucucuucauacauauca

SEQ ID NO: 210921 - RNA, 20 nt, Artificial Sequence
  Synthetic
auuucucuucauacauauca

SEQ ID NO: 210922 - RNA, 21 nt, Artificial Sequence
  Synthetic
uauuucucuucauacauauca

SEQ ID NO: 210923 - RNA, 22 nt, Artificial Sequence
  Synthetic
auauuucucuucauacauauca

SEQ ID NO: 210924 - RNA, 23 nt, Artificial Sequence
  Synthetic
aauauuucucuucauacauauca

SEQ ID NO: 210925 - RNA, 24 nt, Artificial Sequence
  Synthetic
uaauauuucucuucauacauauca

SEQ ID NO: 210926 - RNA, 18 nt, Artificial Sequence
  Synthetic
ugagaaaacuacauauca

SEQ ID NO: 210927 - RNA, 19 nt, Artificial Sequence
  Synthetic
cugagaaaacuacauauca

SEQ ID NO: 210928 - RNA, 20 nt, Artificial Sequence
  Synthetic
acugagaaaacuacauauca

SEQ ID NO: 210929 - RNA, 21 nt, Artificial Sequence
  Synthetic
gacugagaaaacuacauauca

SEQ ID NO: 210930 - RNA, 22 nt, Artificial Sequence
  Synthetic
agacugagaaaacuacauauca

SEQ ID NO: 210931 - RNA, 23 nt, Artificial Sequence
  Synthetic
aagacugagaaaacuacauauca

SEQ ID NO: 210932 - RNA, 24 nt, Artificial Sequence
  Synthetic
gaagacugagaaaacuacauauca

SEQ ID NO: 210933 - RNA, 18 nt, Artificial Sequence
  Synthetic
auauucacggccauauca

SEQ ID NO: 210934 - RNA, 19 nt, Artificial Sequence
  Synthetic
gauauucacggccauauca

SEQ ID NO: 210935 - RNA, 20 nt, Artificial Sequence
  Synthetic
cgauauucacggccauauca

SEQ ID NO: 210936 - RNA, 21 nt, Artificial Sequence
  Synthetic
ccgauauucacggccauauca

SEQ ID NO: 210937 - RNA, 22 nt, Artificial Sequence
  Synthetic
gccgauauucacggccauauca

SEQ ID NO: 210938 - RNA, 23 nt, Artificial Sequence
  Synthetic
ugccgauauucacggccauauca

SEQ ID NO: 210939 - RNA, 24 nt, Artificial Sequence
  Synthetic
cugccgauauucacggccauauca

SEQ ID NO: 210940 - RNA, 18 nt, Artificial Sequence
  Synthetic
acuuagccuagcauauca

SEQ ID NO: 210941 - RNA, 19 nt, Artificial Sequence
  Synthetic
uacuuagccuagcauauca

SEQ ID NO: 210942 - RNA, 20 nt, Artificial Sequence
  Synthetic
cuacuuagccuagcauauca

SEQ ID NO: 210943 - RNA, 21 nt, Artificial Sequence
  Synthetic
ccuacuuagccuagcauauca

SEQ ID NO: 210944 - RNA, 22 nt, Artificial Sequence
  Synthetic
cccuacuuagccuagcauauca

SEQ ID NO: 210945 - RNA, 23 nt, Artificial Sequence
  Synthetic
gcccuacuuagccuagcauauca

SEQ ID NO: 210946 - RNA, 24 nt, Artificial Sequence
  Synthetic
ugcccuacuuagccuagcauauca

SEQ ID NO: 210947 - RNA, 18 nt, Artificial Sequence
  Synthetic
augccacaucgcauauca

SEQ ID NO: 210948 - RNA, 19 nt, Artificial Sequence
  Synthetic
gaugccacaucgcauauca

SEQ ID NO: 210949 - RNA, 20 nt, Artificial Sequence
  Synthetic
agaugccacaucgcauauca

SEQ ID NO: 210950 - RNA, 21 nt, Artificial Sequence
  Synthetic
gagaugccacaucgcauauca

SEQ ID NO: 210951 - RNA, 22 nt, Artificial Sequence
  Synthetic
ggagaugccacaucgcauauca

SEQ ID NO: 210952 - RNA, 23 nt, Artificial Sequence
  Synthetic
aggagaugccacaucgcauauca

SEQ ID NO: 210953 - RNA, 24 nt, Artificial Sequence
  Synthetic
gaggagaugccacaucgcauauca

SEQ ID NO: 210954 - RNA, 18 nt, Artificial Sequence
  Synthetic
uuuuuauuaaucauauca

SEQ ID NO: 210955 - RNA, 19 nt, Artificial Sequence
  Synthetic
auuuuuauuaaucauauca

SEQ ID NO: 210956 - RNA, 20 nt, Artificial Sequence
  Synthetic
uauuuuuauuaaucauauca

SEQ ID NO: 210957 - RNA, 21 nt, Artificial Sequence
  Synthetic
auauuuuuauuaaucauauca

SEQ ID NO: 210958 - RNA, 22 nt, Artificial Sequence
  Synthetic
cauauuuuuauuaaucauauca

SEQ ID NO: 210959 - RNA, 23 nt, Artificial Sequence
  Synthetic
acauauuuuuauuaaucauauca

SEQ ID NO: 210960 - RNA, 24 nt, Artificial Sequence
  Synthetic
gacauauuuuuauuaaucauauca

SEQ ID NO: 210961 - RNA, 18 nt, Artificial Sequence
  Synthetic
auaucugggaucauauca

SEQ ID NO: 210962 - RNA, 19 nt, Artificial Sequence
  Synthetic
aauaucugggaucauauca

SEQ ID NO: 210963 - RNA, 20 nt, Artificial Sequence
  Synthetic
aaauaucugggaucauauca

SEQ ID NO: 210964 - RNA, 21 nt, Artificial Sequence
  Synthetic
caaauaucugggaucauauca

SEQ ID NO: 210965 - RNA, 22 nt, Artificial Sequence
  Synthetic
acaaauaucugggaucauauca

SEQ ID NO: 210966 - RNA, 23 nt, Artificial Sequence
  Synthetic
cacaaauaucugggaucauauca

SEQ ID NO: 210967 - RNA, 24 nt, Artificial Sequence
  Synthetic
ucacaaauaucugggaucauauca

SEQ ID NO: 210968 - RNA, 18 nt, Artificial Sequence
  Synthetic
gugaccuugaggauauca

SEQ ID NO: 210969 - RNA, 19 nt, Artificial Sequence
  Synthetic
ggugaccuugaggauauca

SEQ ID NO: 210970 - RNA, 20 nt, Artificial Sequence
  Synthetic
gggugaccuugaggauauca

SEQ ID NO: 210971 - RNA, 21 nt, Artificial Sequence
  Synthetic
ugggugaccuugaggauauca

SEQ ID NO: 210972 - RNA, 22 nt, Artificial Sequence
  Synthetic
gugggugaccuugaggauauca

SEQ ID NO: 210973 - RNA, 23 nt, Artificial Sequence
  Synthetic
ggugggugaccuugaggauauca

SEQ ID NO: 210974 - RNA, 24 nt, Artificial Sequence
  Synthetic
uggugggugaccuugaggauauca

SEQ ID NO: 210975 - RNA, 18 nt, Artificial Sequence
  Synthetic
aguacaaugaauauauca

SEQ ID NO: 210976 - RNA, 19 nt, Artificial Sequence
  Synthetic
uaguacaaugaauauauca

SEQ ID NO: 210977 - RNA, 20 nt, Artificial Sequence
  Synthetic
uuaguacaaugaauauauca

SEQ ID NO: 210978 - RNA, 21 nt, Artificial Sequence
  Synthetic
uuuaguacaaugaauauauca

SEQ ID NO: 210979 - RNA, 22 nt, Artificial Sequence
  Synthetic
uuuuaguacaaugaauauauca

SEQ ID NO: 210980 - RNA, 23 nt, Artificial Sequence
  Synthetic
cuuuuaguacaaugaauauauca

SEQ ID NO: 210981 - RNA, 24 nt, Artificial Sequence
  Synthetic
ucuuuuaguacaaugaauauauca

SEQ ID NO: 210982 - RNA, 18 nt, Artificial Sequence
  Synthetic
auauggcacuauauauca

SEQ ID NO: 210983 - RNA, 19 nt, Artificial Sequence
  Synthetic
uauauggcacuauauauca

SEQ ID NO: 210984 - RNA, 20 nt, Artificial Sequence
  Synthetic
auauauggcacuauauauca

SEQ ID NO: 210985 - RNA, 21 nt, Artificial Sequence
  Synthetic
uauauauggcacuauauauca

SEQ ID NO: 210986 - RNA, 22 nt, Artificial Sequence
  Synthetic
auauauauggcacuauauauca

SEQ ID NO: 210987 - RNA, 23 nt, Artificial Sequence
  Synthetic
uauauauauggcacuauauauca

SEQ ID NO: 210988 - RNA, 24 nt, Artificial Sequence
  Synthetic
auauauauauggcacuauauauca

SEQ ID NO: 210989 - RNA, 18 nt, Artificial Sequence
  Synthetic
aaaaaacagaguauauca

SEQ ID NO: 210990 - RNA, 19 nt, Artificial Sequence
  Synthetic
aaaaaaacagaguauauca

SEQ ID NO: 210991 - RNA, 20 nt, Artificial Sequence
  Synthetic
aaaaaaaacagaguauauca

SEQ ID NO: 210992 - RNA, 21 nt, Artificial Sequence
  Synthetic
gaaaaaaaacagaguauauca

SEQ ID NO: 210993 - RNA, 22 nt, Artificial Sequence
  Synthetic
ggaaaaaaaacagaguauauca

SEQ ID NO: 210994 - RNA, 23 nt, Artificial Sequence
  Synthetic
uggaaaaaaaacagaguauauca

SEQ ID NO: 210995 - RNA, 24 nt, Artificial Sequence
  Synthetic
guggaaaaaaaacagaguauauca

SEQ ID NO: 210996 - RNA, 18 nt, Artificial Sequence
  Synthetic
aauugaacacuuauauca

SEQ ID NO: 210997 - RNA, 19 nt, Artificial Sequence
  Synthetic
aaauugaacacuuauauca

SEQ ID NO: 210998 - RNA, 20 nt, Artificial Sequence
  Synthetic
uaaauugaacacuuauauca

SEQ ID NO: 210999 - RNA, 21 nt, Artificial Sequence
  Synthetic
uuaaauugaacacuuauauca

SEQ ID NO: 211000 - RNA, 22 nt, Artificial Sequence
  Synthetic
uuuaaauugaacacuuauauca

SEQ ID NO: 211001 - RNA, 23 nt, Artificial Sequence
  Synthetic
auuuaaauugaacacuuauauca

SEQ ID NO: 211002 - RNA, 24 nt, Artificial Sequence
  Synthetic
aauuuaaauugaacacuuauauca

SEQ ID NO: 211003 - RNA, 18 nt, Artificial Sequence
  Synthetic
auuuuaaggauacuauca

SEQ ID NO: 211004 - RNA, 19 nt, Artificial Sequence
  Synthetic
aauuuuaaggauacuauca

SEQ ID NO: 211005 - RNA, 20 nt, Artificial Sequence
  Synthetic
caauuuuaaggauacuauca

SEQ ID NO: 211006 - RNA, 21 nt, Artificial Sequence
  Synthetic
acaauuuuaaggauacuauca

SEQ ID NO: 211007 - RNA, 22 nt, Artificial Sequence
  Synthetic
cacaauuuuaaggauacuauca

SEQ ID NO: 211008 - RNA, 23 nt, Artificial Sequence
  Synthetic
ccacaauuuuaaggauacuauca

SEQ ID NO: 211009 - RNA, 24 nt, Artificial Sequence
  Synthetic
gccacaauuuuaaggauacuauca

SEQ ID NO: 211010 - RNA, 18 nt, Artificial Sequence
  Synthetic
caacuuaaaugccuauca

SEQ ID NO: 211011 - RNA, 19 nt, Artificial Sequence
  Synthetic
ucaacuuaaaugccuauca

SEQ ID NO: 211012 - RNA, 20 nt, Artificial Sequence
  Synthetic
uucaacuuaaaugccuauca

SEQ ID NO: 211013 - RNA, 21 nt, Artificial Sequence
  Synthetic
auucaacuuaaaugccuauca

SEQ ID NO: 211014 - RNA, 22 nt, Artificial Sequence
  Synthetic
gauucaacuuaaaugccuauca

SEQ ID NO: 211015 - RNA, 23 nt, Artificial Sequence
  Synthetic
ggauucaacuuaaaugccuauca

SEQ ID NO: 211016 - RNA, 24 nt, Artificial Sequence
  Synthetic
uggauucaacuuaaaugccuauca

SEQ ID NO: 211017 - RNA, 18 nt, Artificial Sequence
  Synthetic
guauuuaaaaugcuauca

SEQ ID NO: 211018 - RNA, 19 nt, Artificial Sequence
  Synthetic
gguauuuaaaaugcuauca

SEQ ID NO: 211019 - RNA, 20 nt, Artificial Sequence
  Synthetic
ggguauuuaaaaugcuauca

SEQ ID NO: 211020 - RNA, 21 nt, Artificial Sequence
  Synthetic
uggguauuuaaaaugcuauca

SEQ ID NO: 211021 - RNA, 22 nt, Artificial Sequence
  Synthetic
auggguauuuaaaaugcuauca

SEQ ID NO: 211022 - RNA, 23 nt, Artificial Sequence
  Synthetic
uauggguauuuaaaaugcuauca

SEQ ID NO: 211023 - RNA, 24 nt, Artificial Sequence
  Synthetic
cuauggguauuuaaaaugcuauca

SEQ ID NO: 211024 - RNA, 18 nt, Artificial Sequence
  Synthetic
aagacauagagucuauca

SEQ ID NO: 211025 - RNA, 19 nt, Artificial Sequence
  Synthetic
caagacauagagucuauca

SEQ ID NO: 211026 - RNA, 20 nt, Artificial Sequence
  Synthetic
ccaagacauagagucuauca

SEQ ID NO: 211027 - RNA, 21 nt, Artificial Sequence
  Synthetic
cccaagacauagagucuauca

SEQ ID NO: 211028 - RNA, 22 nt, Artificial Sequence
  Synthetic
ccccaagacauagagucuauca

SEQ ID NO: 211029 - RNA, 23 nt, Artificial Sequence
  Synthetic
uccccaagacauagagucuauca

SEQ ID NO: 211030 - RNA, 24 nt, Artificial Sequence
  Synthetic
uuccccaagacauagagucuauca

SEQ ID NO: 211031 - RNA, 18 nt, Artificial Sequence
  Synthetic
gucacucuacaaguauca

SEQ ID NO: 211032 - RNA, 19 nt, Artificial Sequence
  Synthetic
agucacucuacaaguauca

SEQ ID NO: 211033 - RNA, 20 nt, Artificial Sequence
  Synthetic
cagucacucuacaaguauca

SEQ ID NO: 211034 - RNA, 21 nt, Artificial Sequence
  Synthetic
ucagucacucuacaaguauca

SEQ ID NO: 211035 - RNA, 22 nt, Artificial Sequence
  Synthetic
uucagucacucuacaaguauca

SEQ ID NO: 211036 - RNA, 23 nt, Artificial Sequence
  Synthetic
cuucagucacucuacaaguauca

SEQ ID NO: 211037 - RNA, 24 nt, Artificial Sequence
  Synthetic
ucuucagucacucuacaaguauca

SEQ ID NO: 211038 - RNA, 18 nt, Artificial Sequence
  Synthetic
auaggcaugcaaguauca

SEQ ID NO: 211039 - RNA, 19 nt, Artificial Sequence
  Synthetic
uauaggcaugcaaguauca

SEQ ID NO: 211040 - RNA, 20 nt, Artificial Sequence
  Synthetic
auauaggcaugcaaguauca

SEQ ID NO: 211041 - RNA, 21 nt, Artificial Sequence
  Synthetic
gauauaggcaugcaaguauca

SEQ ID NO: 211042 - RNA, 22 nt, Artificial Sequence
  Synthetic
ugauauaggcaugcaaguauca

SEQ ID NO: 211043 - RNA, 23 nt, Artificial Sequence
  Synthetic
uugauauaggcaugcaaguauca

SEQ ID NO: 211044 - RNA, 24 nt, Artificial Sequence
  Synthetic
uuugauauaggcaugcaaguauca

SEQ ID NO: 211045 - RNA, 18 nt, Artificial Sequence
  Synthetic
aaaagaaugaacguauca

SEQ ID NO: 211046 - RNA, 19 nt, Artificial Sequence
  Synthetic
aaaaagaaugaacguauca

SEQ ID NO: 211047 - RNA, 20 nt, Artificial Sequence
  Synthetic
aaaaaagaaugaacguauca

SEQ ID NO: 211048 - RNA, 21 nt, Artificial Sequence
  Synthetic
gaaaaaagaaugaacguauca

SEQ ID NO: 211049 - RNA, 22 nt, Artificial Sequence
  Synthetic
agaaaaaagaaugaacguauca

SEQ ID NO: 211050 - RNA, 23 nt, Artificial Sequence
  Synthetic
uagaaaaaagaaugaacguauca

SEQ ID NO: 211051 - RNA, 24 nt, Artificial Sequence
  Synthetic
guagaaaaaagaaugaacguauca

SEQ ID NO: 211052 - RNA, 18 nt, Artificial Sequence
  Synthetic
cuuagcucccacguauca

SEQ ID NO: 211053 - RNA, 19 nt, Artificial Sequence
  Synthetic
gcuuagcucccacguauca

SEQ ID NO: 211054 - RNA, 20 nt, Artificial Sequence
  Synthetic
agcuuagcucccacguauca

SEQ ID NO: 211055 - RNA, 21 nt, Artificial Sequence
  Synthetic
uagcuuagcucccacguauca

SEQ ID NO: 211056 - RNA, 22 nt, Artificial Sequence
  Synthetic
auagcuuagcucccacguauca

SEQ ID NO: 211057 - RNA, 23 nt, Artificial Sequence
  Synthetic
cauagcuuagcucccacguauca

SEQ ID NO: 211058 - RNA, 24 nt, Artificial Sequence
  Synthetic
ucauagcuuagcucccacguauca

SEQ ID NO: 211059 - RNA, 18 nt, Artificial Sequence
  Synthetic
ucauauuuguauguauca

SEQ ID NO: 211060 - RNA, 19 nt, Artificial Sequence
  Synthetic
uucauauuuguauguauca

SEQ ID NO: 211061 - RNA, 20 nt, Artificial Sequence
  Synthetic
auucauauuuguauguauca

SEQ ID NO: 211062 - RNA, 21 nt, Artificial Sequence
  Synthetic
aauucauauuuguauguauca

SEQ ID NO: 211063 - RNA, 22 nt, Artificial Sequence
  Synthetic
aaauucauauuuguauguauca

SEQ ID NO: 211064 - RNA, 23 nt, Artificial Sequence
  Synthetic
aaaauucauauuuguauguauca

SEQ ID NO: 211065 - RNA, 24 nt, Artificial Sequence
  Synthetic
aaaaauucauauuuguauguauca

SEQ ID NO: 211066 - RNA, 18 nt, Artificial Sequence
  Synthetic
aaggacucaccuguauca

SEQ ID NO: 211067 - RNA, 19 nt, Artificial Sequence
  Synthetic
aaaggacucaccuguauca

SEQ ID NO: 211068 - RNA, 20 nt, Artificial Sequence
  Synthetic
caaaggacucaccuguauca

SEQ ID NO: 211069 - RNA, 21 nt, Artificial Sequence
  Synthetic
acaaaggacucaccuguauca

SEQ ID NO: 211070 - RNA, 22 nt, Artificial Sequence
  Synthetic
cacaaaggacucaccuguauca

SEQ ID NO: 211071 - RNA, 23 nt, Artificial Sequence
  Synthetic
gcacaaaggacucaccuguauca

SEQ ID NO: 211072 - RNA, 24 nt, Artificial Sequence
  Synthetic
agcacaaaggacucaccuguauca

SEQ ID NO: 211073 - RNA, 18 nt, Artificial Sequence
  Synthetic
aauaaaaugucuguauca

SEQ ID NO: 211074 - RNA, 19 nt, Artificial Sequence
  Synthetic
aaauaaaaugucuguauca

SEQ ID NO: 211075 - RNA, 20 nt, Artificial Sequence
  Synthetic
aaaauaaaaugucuguauca

SEQ ID NO: 211076 - RNA, 21 nt, Artificial Sequence
  Synthetic
aaaaauaaaaugucuguauca

SEQ ID NO: 211077 - RNA, 22 nt, Artificial Sequence
  Synthetic
aaaaaauaaaaugucuguauca

SEQ ID NO: 211078 - RNA, 23 nt, Artificial Sequence
  Synthetic
uaaaaaauaaaaugucuguauca

SEQ ID NO: 211079 - RNA, 24 nt, Artificial Sequence
  Synthetic
uuaaaaaauaaaaugucuguauca

SEQ ID NO: 211080 - RNA, 18 nt, Artificial Sequence
  Synthetic
auauuaaguucuguauca

SEQ ID NO: 211081 - RNA, 19 nt, Artificial Sequence
  Synthetic
uauauuaaguucuguauca

SEQ ID NO: 211082 - RNA, 20 nt, Artificial Sequence
  Synthetic
guauauuaaguucuguauca

SEQ ID NO: 211083 - RNA, 21 nt, Artificial Sequence
  Synthetic
aguauauuaaguucuguauca

SEQ ID NO: 211084 - RNA, 22 nt, Artificial Sequence
  Synthetic
uaguauauuaaguucuguauca

SEQ ID NO: 211085 - RNA, 23 nt, Artificial Sequence
  Synthetic
uuaguauauuaaguucuguauca

SEQ ID NO: 211086 - RNA, 24 nt, Artificial Sequence
  Synthetic
cuuaguauauuaaguucuguauca

SEQ ID NO: 211087 - RNA, 18 nt, Artificial Sequence
  Synthetic
agguuuuucuuuguauca

SEQ ID NO: 211088 - RNA, 19 nt, Artificial Sequence
  Synthetic
gagguuuuucuuuguauca

SEQ ID NO: 211089 - RNA, 20 nt, Artificial Sequence
  Synthetic
ugagguuuuucuuuguauca

SEQ ID NO: 211090 - RNA, 21 nt, Artificial Sequence
  Synthetic
augagguuuuucuuuguauca

SEQ ID NO: 211091 - RNA, 22 nt, Artificial Sequence
  Synthetic
aaugagguuuuucuuuguauca

SEQ ID NO: 211092 - RNA, 23 nt, Artificial Sequence
  Synthetic
uaaugagguuuuucuuuguauca

SEQ ID NO: 211093 - RNA, 24 nt, Artificial Sequence
  Synthetic
auaaugagguuuuucuuuguauca

SEQ ID NO: 211094 - RNA, 18 nt, Artificial Sequence
  Synthetic
guggagagaaaauuauca

SEQ ID NO: 211095 - RNA, 19 nt, Artificial Sequence
  Synthetic
uguggagagaaaauuauca

SEQ ID NO: 211096 - RNA, 20 nt, Artificial Sequence
  Synthetic
cuguggagagaaaauuauca

SEQ ID NO: 211097 - RNA, 21 nt, Artificial Sequence
  Synthetic
acuguggagagaaaauuauca

SEQ ID NO: 211098 - RNA, 22 nt, Artificial Sequence
  Synthetic
aacuguggagagaaaauuauca

SEQ ID NO: 211099 - RNA, 23 nt, Artificial Sequence
  Synthetic
caacuguggagagaaaauuauca

SEQ ID NO: 211100 - RNA, 24 nt, Artificial Sequence
  Synthetic
gcaacuguggagagaaaauuauca

SEQ ID NO: 211101 - RNA, 18 nt, Artificial Sequence
  Synthetic
guucaacucccauuauca

SEQ ID NO: 211102 - RNA, 19 nt, Artificial Sequence
  Synthetic
uguucaacucccauuauca

SEQ ID NO: 211103 - RNA, 20 nt, Artificial Sequence
  Synthetic
uuguucaacucccauuauca

SEQ ID NO: 211104 - RNA, 21 nt, Artificial Sequence
  Synthetic
auuguucaacucccauuauca

SEQ ID NO: 211105 - RNA, 22 nt, Artificial Sequence
  Synthetic
cauuguucaacucccauuauca

SEQ ID NO: 211106 - RNA, 23 nt, Artificial Sequence
  Synthetic
ucauuguucaacucccauuauca

SEQ ID NO: 211107 - RNA, 24 nt, Artificial Sequence
  Synthetic
uucauuguucaacucccauuauca

SEQ ID NO: 211108 - RNA, 18 nt, Artificial Sequence
  Synthetic
accucuuaaggauuauca

SEQ ID NO: 211109 - RNA, 19 nt, Artificial Sequence
  Synthetic
uaccucuuaaggauuauca

SEQ ID NO: 211110 - RNA, 20 nt, Artificial Sequence
  Synthetic
uuaccucuuaaggauuauca

SEQ ID NO: 211111 - RNA, 21 nt, Artificial Sequence
  Synthetic
guuaccucuuaaggauuauca

SEQ ID NO: 211112 - RNA, 22 nt, Artificial Sequence
  Synthetic
uguuaccucuuaaggauuauca

SEQ ID NO: 211113 - RNA, 23 nt, Artificial Sequence
  Synthetic
auguuaccucuuaaggauuauca

SEQ ID NO: 211114 - RNA, 24 nt, Artificial Sequence
  Synthetic
aauguuaccucuuaaggauuauca

SEQ ID NO: 211115 - RNA, 18 nt, Artificial Sequence
  Synthetic
agugauucucuauuauca

SEQ ID NO: 211116 - RNA, 19 nt, Artificial Sequence
  Synthetic
uagugauucucuauuauca

SEQ ID NO: 211117 - RNA, 20 nt, Artificial Sequence
  Synthetic
auagugauucucuauuauca

SEQ ID NO: 211118 - RNA, 21 nt, Artificial Sequence
  Synthetic
cauagugauucucuauuauca

SEQ ID NO: 211119 - RNA, 22 nt, Artificial Sequence
  Synthetic
ccauagugauucucuauuauca

SEQ ID NO: 211120 - RNA, 23 nt, Artificial Sequence
  Synthetic
cccauagugauucucuauuauca

SEQ ID NO: 211121 - RNA, 24 nt, Artificial Sequence
  Synthetic
acccauagugauucucuauuauca

SEQ ID NO: 211122 - RNA, 18 nt, Artificial Sequence
  Synthetic
ugucgcuuaggcuuauca

SEQ ID NO: 211123 - RNA, 19 nt, Artificial Sequence
  Synthetic
uugucgcuuaggcuuauca

SEQ ID NO: 211124 - RNA, 20 nt, Artificial Sequence
  Synthetic
auugucgcuuaggcuuauca

SEQ ID NO: 211125 - RNA, 21 nt, Artificial Sequence
  Synthetic
aauugucgcuuaggcuuauca

SEQ ID NO: 211126 - RNA, 22 nt, Artificial Sequence
  Synthetic
gaauugucgcuuaggcuuauca

SEQ ID NO: 211127 - RNA, 23 nt, Artificial Sequence
  Synthetic
ggaauugucgcuuaggcuuauca

SEQ ID NO: 211128 - RNA, 24 nt, Artificial Sequence
  Synthetic
gggaauugucgcuuaggcuuauca

SEQ ID NO: 211129 - RNA, 18 nt, Artificial Sequence
  Synthetic
uaaucaaacugcuuauca

SEQ ID NO: 211130 - RNA, 19 nt, Artificial Sequence
  Synthetic
auaaucaaacugcuuauca

SEQ ID NO: 211131 - RNA, 20 nt, Artificial Sequence
  Synthetic
uauaaucaaacugcuuauca

SEQ ID NO: 211132 - RNA, 21 nt, Artificial Sequence
  Synthetic
uuauaaucaaacugcuuauca

SEQ ID NO: 211133 - RNA, 22 nt, Artificial Sequence
  Synthetic
uuuauaaucaaacugcuuauca

SEQ ID NO: 211134 - RNA, 23 nt, Artificial Sequence
  Synthetic
uuuuauaaucaaacugcuuauca

SEQ ID NO: 211135 - RNA, 24 nt, Artificial Sequence
  Synthetic
cuuuuauaaucaaacugcuuauca

SEQ ID NO: 211136 - RNA, 18 nt, Artificial Sequence
  Synthetic
auaggagcauucuuauca

SEQ ID NO: 211137 - RNA, 19 nt, Artificial Sequence
  Synthetic
cauaggagcauucuuauca

SEQ ID NO: 211138 - RNA, 20 nt, Artificial Sequence
  Synthetic
ccauaggagcauucuuauca

SEQ ID NO: 211139 - RNA, 21 nt, Artificial Sequence
  Synthetic
accauaggagcauucuuauca

SEQ ID NO: 211140 - RNA, 22 nt, Artificial Sequence
  Synthetic
aaccauaggagcauucuuauca

SEQ ID NO: 211141 - RNA, 23 nt, Artificial Sequence
  Synthetic
aaaccauaggagcauucuuauca

SEQ ID NO: 211142 - RNA, 24 nt, Artificial Sequence
  Synthetic
aaaaccauaggagcauucuuauca

SEQ ID NO: 211143 - RNA, 18 nt, Artificial Sequence
  Synthetic
gaacauuuucaguuauca

SEQ ID NO: 211144 - RNA, 19 nt, Artificial Sequence
  Synthetic
ugaacauuuucaguuauca

SEQ ID NO: 211145 - RNA, 20 nt, Artificial Sequence
  Synthetic
gugaacauuuucaguuauca

SEQ ID NO: 211146 - RNA, 21 nt, Artificial Sequence
  Synthetic
ugugaacauuuucaguuauca

SEQ ID NO: 211147 - RNA, 22 nt, Artificial Sequence
  Synthetic
uugugaacauuuucaguuauca

SEQ ID NO: 211148 - RNA, 23 nt, Artificial Sequence
  Synthetic
uuugugaacauuuucaguuauca

SEQ ID NO: 211149 - RNA, 24 nt, Artificial Sequence
  Synthetic
auuugugaacauuuucaguuauca

SEQ ID NO: 211150 - RNA, 18 nt, Artificial Sequence
  Synthetic
accagguaagauuuauca

SEQ ID NO: 211151 - RNA, 19 nt, Artificial Sequence
  Synthetic
aaccagguaagauuuauca

SEQ ID NO: 211152 - RNA, 20 nt, Artificial Sequence
  Synthetic
uaaccagguaagauuuauca

SEQ ID NO: 211153 - RNA, 21 nt, Artificial Sequence
  Synthetic
auaaccagguaagauuuauca

SEQ ID NO: 211154 - RNA, 22 nt, Artificial Sequence
  Synthetic
cauaaccagguaagauuuauca

SEQ ID NO: 211155 - RNA, 23 nt, Artificial Sequence
  Synthetic
ccauaaccagguaagauuuauca

SEQ ID NO: 211156 - RNA, 24 nt, Artificial Sequence
  Synthetic
accauaaccagguaagauuuauca

SEQ ID NO: 211157 - RNA, 18 nt, Artificial Sequence
  Synthetic
uaauuugguuauuuauca

SEQ ID NO: 211158 - RNA, 19 nt, Artificial Sequence
  Synthetic
guaauuugguuauuuauca

SEQ ID NO: 211159 - RNA, 20 nt, Artificial Sequence
  Synthetic
uguaauuugguuauuuauca

SEQ ID NO: 211160 - RNA, 21 nt, Artificial Sequence
  Synthetic
uuguaauuugguuauuuauca

SEQ ID NO: 211161 - RNA, 22 nt, Artificial Sequence
  Synthetic
auuguaauuugguuauuuauca

SEQ ID NO: 211162 - RNA, 23 nt, Artificial Sequence
  Synthetic
gauuguaauuugguuauuuauca

SEQ ID NO: 211163 - RNA, 24 nt, Artificial Sequence
  Synthetic
agauuguaauuugguuauuuauca

SEQ ID NO: 211164 - RNA, 18 nt, Artificial Sequence
  Synthetic
aacuugcuuuauuuauca

SEQ ID NO: 211165 - RNA, 19 nt, Artificial Sequence
  Synthetic
uaacuugcuuuauuuauca

SEQ ID NO: 211166 - RNA, 20 nt, Artificial Sequence
  Synthetic
uuaacuugcuuuauuuauca

SEQ ID NO: 211167 - RNA, 21 nt, Artificial Sequence
  Synthetic
guuaacuugcuuuauuuauca

SEQ ID NO: 211168 - RNA, 22 nt, Artificial Sequence
  Synthetic
gguuaacuugcuuuauuuauca

SEQ ID NO: 211169 - RNA, 23 nt, Artificial Sequence
  Synthetic
ugguuaacuugcuuuauuuauca

SEQ ID NO: 211170 - RNA, 24 nt, Artificial Sequence
  Synthetic
cugguuaacuugcuuuauuuauca

SEQ ID NO: 211171 - RNA, 18 nt, Artificial Sequence
  Synthetic
caccaggaaacuuuauca

SEQ ID NO: 211172 - RNA, 19 nt, Artificial Sequence
  Synthetic
acaccaggaaacuuuauca

SEQ ID NO: 211173 - RNA, 20 nt, Artificial Sequence
  Synthetic
cacaccaggaaacuuuauca

SEQ ID NO: 211174 - RNA, 21 nt, Artificial Sequence
  Synthetic
gcacaccaggaaacuuuauca

SEQ ID NO: 211175 - RNA, 22 nt, Artificial Sequence
  Synthetic
ggcacaccaggaaacuuuauca

SEQ ID NO: 211176 - RNA, 23 nt, Artificial Sequence
  Synthetic
gggcacaccaggaaacuuuauca

SEQ ID NO: 211177 - RNA, 24 nt, Artificial Sequence
  Synthetic
cgggcacaccaggaaacuuuauca

SEQ ID NO: 211178 - RNA, 18 nt, Artificial Sequence
  Synthetic
cuuucuuaugcuuuauca

SEQ ID NO: 211179 - RNA, 19 nt, Artificial Sequence
  Synthetic
ucuuucuuaugcuuuauca

SEQ ID NO: 211180 - RNA, 20 nt, Artificial Sequence
  Synthetic
uucuuucuuaugcuuuauca

SEQ ID NO: 211181 - RNA, 21 nt, Artificial Sequence
  Synthetic
uuucuuucuuaugcuuuauca

SEQ ID NO: 211182 - RNA, 22 nt, Artificial Sequence
  Synthetic
uuuucuuucuuaugcuuuauca

SEQ ID NO: 211183 - RNA, 23 nt, Artificial Sequence
  Synthetic
uuuuucuuucuuaugcuuuauca

SEQ ID NO: 211184 - RNA, 24 nt, Artificial Sequence
  Synthetic
auuuuucuuucuuaugcuuuauca

SEQ ID NO: 211185 - RNA, 18 nt, Artificial Sequence
  Synthetic
cugaaaauaauuuuauca

SEQ ID NO: 211186 - RNA, 19 nt, Artificial Sequence
  Synthetic
ucugaaaauaauuuuauca

SEQ ID NO: 211187 - RNA, 20 nt, Artificial Sequence
  Synthetic
uucugaaaauaauuuuauca

SEQ ID NO: 211188 - RNA, 21 nt, Artificial Sequence
  Synthetic
uuucugaaaauaauuuuauca

SEQ ID NO: 211189 - RNA, 22 nt, Artificial Sequence
  Synthetic
uuuucugaaaauaauuuuauca

SEQ ID NO: 211190 - RNA, 23 nt, Artificial Sequence
  Synthetic
auuuucugaaaauaauuuuauca

SEQ ID NO: 211191 - RNA, 24 nt, Artificial Sequence
  Synthetic
aauuuucugaaaauaauuuuauca

SEQ ID NO: 211192 - RNA, 18 nt, Artificial Sequence
  Synthetic
caagaugccuuuuuauca

SEQ ID NO: 211193 - RNA, 19 nt, Artificial Sequence
  Synthetic
acaagaugccuuuuuauca

SEQ ID NO: 211194 - RNA, 20 nt, Artificial Sequence
  Synthetic
gacaagaugccuuuuuauca

SEQ ID NO: 211195 - RNA, 21 nt, Artificial Sequence
  Synthetic
ggacaagaugccuuuuuauca

SEQ ID NO: 211196 - RNA, 22 nt, Artificial Sequence
  Synthetic
uggacaagaugccuuuuuauca

SEQ ID NO: 211197 - RNA, 23 nt, Artificial Sequence
  Synthetic
guggacaagaugccuuuuuauca

SEQ ID NO: 211198 - RNA, 24 nt, Artificial Sequence
  Synthetic
uguggacaagaugccuuuuuauca

SEQ ID NO: 211199 - RNA, 18 nt, Artificial Sequence
  Synthetic
aucagugcugaaaacuca

SEQ ID NO: 211200 - RNA, 19 nt, Artificial Sequence
  Synthetic
caucagugcugaaaacuca

SEQ ID NO: 211201 - RNA, 20 nt, Artificial Sequence
  Synthetic
ucaucagugcugaaaacuca

SEQ ID NO: 211202 - RNA, 21 nt, Artificial Sequence
  Synthetic
uucaucagugcugaaaacuca

SEQ ID NO: 211203 - RNA, 22 nt, Artificial Sequence
  Synthetic
guucaucagugcugaaaacuca

SEQ ID NO: 211204 - RNA, 23 nt, Artificial Sequence
  Synthetic
uguucaucagugcugaaaacuca

SEQ ID NO: 211205 - RNA, 24 nt, Artificial Sequence
  Synthetic
guguucaucagugcugaaaacuca

SEQ ID NO: 211206 - RNA, 18 nt, Artificial Sequence
  Synthetic
cuaaaaaagucaaacuca

SEQ ID NO: 211207 - RNA, 19 nt, Artificial Sequence
  Synthetic
ucuaaaaaagucaaacuca

SEQ ID NO: 211208 - RNA, 20 nt, Artificial Sequence
  Synthetic
aucuaaaaaagucaaacuca

SEQ ID NO: 211209 - RNA, 21 nt, Artificial Sequence
  Synthetic
aaucuaaaaaagucaaacuca

SEQ ID NO: 211210 - RNA, 22 nt, Artificial Sequence
  Synthetic
gaaucuaaaaaagucaaacuca

SEQ ID NO: 211211 - RNA, 23 nt, Artificial Sequence
  Synthetic
ggaaucuaaaaaagucaaacuca

SEQ ID NO: 211212 - RNA, 24 nt, Artificial Sequence
  Synthetic
uggaaucuaaaaaagucaaacuca

SEQ ID NO: 211213 - RNA, 18 nt, Artificial Sequence
  Synthetic
auuauuuagucaaacuca

SEQ ID NO: 211214 - RNA, 19 nt, Artificial Sequence
  Synthetic
gauuauuuagucaaacuca

SEQ ID NO: 211215 - RNA, 20 nt, Artificial Sequence
  Synthetic
ugauuauuuagucaaacuca

SEQ ID NO: 211216 - RNA, 21 nt, Artificial Sequence
  Synthetic
augauuauuuagucaaacuca

SEQ ID NO: 211217 - RNA, 22 nt, Artificial Sequence
  Synthetic
gaugauuauuuagucaaacuca

SEQ ID NO: 211218 - RNA, 23 nt, Artificial Sequence
  Synthetic
agaugauuauuuagucaaacuca

SEQ ID NO: 211219 - RNA, 24 nt, Artificial Sequence
  Synthetic
uagaugauuauuuagucaaacuca

SEQ ID NO: 211220 - RNA, 18 nt, Artificial Sequence
  Synthetic
uugaaagggagaaacuca

SEQ ID NO: 211221 - RNA, 19 nt, Artificial Sequence
  Synthetic
uuugaaagggagaaacuca

SEQ ID NO: 211222 - RNA, 20 nt, Artificial Sequence
  Synthetic
uuuugaaagggagaaacuca

SEQ ID NO: 211223 - RNA, 21 nt, Artificial Sequence
  Synthetic
guuuugaaagggagaaacuca

SEQ ID NO: 211224 - RNA, 22 nt, Artificial Sequence
  Synthetic
uguuuugaaagggagaaacuca

SEQ ID NO: 211225 - RNA, 23 nt, Artificial Sequence
  Synthetic
uuguuuugaaagggagaaacuca

SEQ ID NO: 211226 - RNA, 24 nt, Artificial Sequence
  Synthetic
cuuguuuugaaagggagaaacuca

SEQ ID NO: 211227 - RNA, 18 nt, Artificial Sequence
  Synthetic
gggucaucaguaaacuca

SEQ ID NO: 211228 - RNA, 19 nt, Artificial Sequence
  Synthetic
agggucaucaguaaacuca

SEQ ID NO: 211229 - RNA, 20 nt, Artificial Sequence
  Synthetic
uagggucaucaguaaacuca

SEQ ID NO: 211230 - RNA, 21 nt, Artificial Sequence
  Synthetic
cuagggucaucaguaaacuca

SEQ ID NO: 211231 - RNA, 22 nt, Artificial Sequence
  Synthetic
ucuagggucaucaguaaacuca

SEQ ID NO: 211232 - RNA, 23 nt, Artificial Sequence
  Synthetic
uucuagggucaucaguaaacuca

SEQ ID NO: 211233 - RNA, 24 nt, Artificial Sequence
  Synthetic
uuucuagggucaucaguaaacuca

SEQ ID NO: 211234 - RNA, 18 nt, Artificial Sequence
  Synthetic
ccauuaccuuacaacuca

SEQ ID NO: 211235 - RNA, 19 nt, Artificial Sequence
  Synthetic
uccauuaccuuacaacuca

SEQ ID NO: 211236 - RNA, 20 nt, Artificial Sequence
  Synthetic
cuccauuaccuuacaacuca

SEQ ID NO: 211237 - RNA, 21 nt, Artificial Sequence
  Synthetic
acuccauuaccuuacaacuca

SEQ ID NO: 211238 - RNA, 22 nt, Artificial Sequence
  Synthetic
uacuccauuaccuuacaacuca

SEQ ID NO: 211239 - RNA, 23 nt, Artificial Sequence
  Synthetic
uuacuccauuaccuuacaacuca

SEQ ID NO: 211240 - RNA, 24 nt, Artificial Sequence
  Synthetic
uuuacuccauuaccuuacaacuca

SEQ ID NO: 211241 - RNA, 18 nt, Artificial Sequence
  Synthetic
gccagauggaagaacuca

SEQ ID NO: 211242 - RNA, 19 nt, Artificial Sequence
  Synthetic
cgccagauggaagaacuca

SEQ ID NO: 211243 - RNA, 20 nt, Artificial Sequence
  Synthetic
acgccagauggaagaacuca

SEQ ID NO: 211244 - RNA, 21 nt, Artificial Sequence
  Synthetic
gacgccagauggaagaacuca

SEQ ID NO: 211245 - RNA, 22 nt, Artificial Sequence
  Synthetic
agacgccagauggaagaacuca

SEQ ID NO: 211246 - RNA, 23 nt, Artificial Sequence
  Synthetic
cagacgccagauggaagaacuca

SEQ ID NO: 211247 - RNA, 24 nt, Artificial Sequence
  Synthetic
acagacgccagauggaagaacuca

SEQ ID NO: 211248 - RNA, 18 nt, Artificial Sequence
  Synthetic
auuguaaauaagaacuca

SEQ ID NO: 211249 - RNA, 19 nt, Artificial Sequence
  Synthetic
aauuguaaauaagaacuca

SEQ ID NO: 211250 - RNA, 20 nt, Artificial Sequence
  Synthetic
aaauuguaaauaagaacuca

SEQ ID NO: 211251 - RNA, 21 nt, Artificial Sequence
  Synthetic
gaaauuguaaauaagaacuca

SEQ ID NO: 211252 - RNA, 22 nt, Artificial Sequence
  Synthetic
agaaauuguaaauaagaacuca

SEQ ID NO: 211253 - RNA, 23 nt, Artificial Sequence
  Synthetic
uagaaauuguaaauaagaacuca

SEQ ID NO: 211254 - RNA, 24 nt, Artificial Sequence
  Synthetic
auagaaauuguaaauaagaacuca

SEQ ID NO: 211255 - RNA, 18 nt, Artificial Sequence
  Synthetic
agcccuugucagaacuca

SEQ ID NO: 211256 - RNA, 19 nt, Artificial Sequence
  Synthetic
aagcccuugucagaacuca

SEQ ID NO: 211257 - RNA, 20 nt, Artificial Sequence
  Synthetic
uaagcccuugucagaacuca

SEQ ID NO: 211258 - RNA, 21 nt, Artificial Sequence
  Synthetic
cuaagcccuugucagaacuca

SEQ ID NO: 211259 - RNA, 22 nt, Artificial Sequence
  Synthetic
acuaagcccuugucagaacuca

SEQ ID NO: 211260 - RNA, 23 nt, Artificial Sequence
  Synthetic
gacuaagcccuugucagaacuca

SEQ ID NO: 211261 - RNA, 24 nt, Artificial Sequence
  Synthetic
cgacuaagcccuugucagaacuca

SEQ ID NO: 211262 - RNA, 18 nt, Artificial Sequence
  Synthetic
ucagugaugaguaacuca

SEQ ID NO: 211263 - RNA, 19 nt, Artificial Sequence
  Synthetic
cucagugaugaguaacuca

SEQ ID NO: 211264 - RNA, 20 nt, Artificial Sequence
  Synthetic
acucagugaugaguaacuca

SEQ ID NO: 211265 - RNA, 21 nt, Artificial Sequence
  Synthetic
aacucagugaugaguaacuca

SEQ ID NO: 211266 - RNA, 22 nt, Artificial Sequence
  Synthetic
aaacucagugaugaguaacuca

SEQ ID NO: 211267 - RNA, 23 nt, Artificial Sequence
  Synthetic
gaaacucagugaugaguaacuca

SEQ ID NO: 211268 - RNA, 24 nt, Artificial Sequence
  Synthetic
agaaacucagugaugaguaacuca

SEQ ID NO: 211269 - RNA, 18 nt, Artificial Sequence
  Synthetic
uagacagaaauuaacuca

SEQ ID NO: 211270 - RNA, 19 nt, Artificial Sequence
  Synthetic
guagacagaaauuaacuca

SEQ ID NO: 211271 - RNA, 20 nt, Artificial Sequence
  Synthetic
aguagacagaaauuaacuca

SEQ ID NO: 211272 - RNA, 21 nt, Artificial Sequence
  Synthetic
uaguagacagaaauuaacuca

SEQ ID NO: 211273 - RNA, 22 nt, Artificial Sequence
  Synthetic
guaguagacagaaauuaacuca

SEQ ID NO: 211274 - RNA, 23 nt, Artificial Sequence
  Synthetic
gguaguagacagaaauuaacuca

SEQ ID NO: 211275 - RNA, 24 nt, Artificial Sequence
  Synthetic
ugguaguagacagaaauuaacuca

SEQ ID NO: 211276 - RNA, 18 nt, Artificial Sequence
  Synthetic
gcucggacugaacacuca

SEQ ID NO: 211277 - RNA, 19 nt, Artificial Sequence
  Synthetic
ggcucggacugaacacuca

SEQ ID NO: 211278 - RNA, 20 nt, Artificial Sequence
  Synthetic
gggcucggacugaacacuca

SEQ ID NO: 211279 - RNA, 21 nt, Artificial Sequence
  Synthetic
agggcucggacugaacacuca

SEQ ID NO: 211280 - RNA, 22 nt, Artificial Sequence
  Synthetic
uagggcucggacugaacacuca

SEQ ID NO: 211281 - RNA, 23 nt, Artificial Sequence
  Synthetic
uuagggcucggacugaacacuca

SEQ ID NO: 211282 - RNA, 24 nt, Artificial Sequence
  Synthetic
uuuagggcucggacugaacacuca

SEQ ID NO: 211283 - RNA, 18 nt, Artificial Sequence
  Synthetic
uuauagcguuuacacuca

SEQ ID NO: 211284 - RNA, 19 nt, Artificial Sequence
  Synthetic
auuauagcguuuacacuca

SEQ ID NO: 211285 - RNA, 20 nt, Artificial Sequence
  Synthetic
gauuauagcguuuacacuca

SEQ ID NO: 211286 - RNA, 21 nt, Artificial Sequence
  Synthetic
ugauuauagcguuuacacuca

SEQ ID NO: 211287 - RNA, 22 nt, Artificial Sequence
  Synthetic
gugauuauagcguuuacacuca

SEQ ID NO: 211288 - RNA, 23 nt, Artificial Sequence
  Synthetic
agugauuauagcguuuacacuca

SEQ ID NO: 211289 - RNA, 24 nt, Artificial Sequence
  Synthetic
aagugauuauagcguuuacacuca

SEQ ID NO: 211290 - RNA, 18 nt, Artificial Sequence
  Synthetic
cauuuauaaagccacuca

SEQ ID NO: 211291 - RNA, 19 nt, Artificial Sequence
  Synthetic
acauuuauaaagccacuca

SEQ ID NO: 211292 - RNA, 20 nt, Artificial Sequence
  Synthetic
gacauuuauaaagccacuca

SEQ ID NO: 211293 - RNA, 21 nt, Artificial Sequence
  Synthetic
ggacauuuauaaagccacuca

SEQ ID NO: 211294 - RNA, 22 nt, Artificial Sequence
  Synthetic
uggacauuuauaaagccacuca

SEQ ID NO: 211295 - RNA, 23 nt, Artificial Sequence
  Synthetic
auggacauuuauaaagccacuca

SEQ ID NO: 211296 - RNA, 24 nt, Artificial Sequence
  Synthetic
aauggacauuuauaaagccacuca

SEQ ID NO: 211297 - RNA, 18 nt, Artificial Sequence
  Synthetic
auacugauaauccacuca

SEQ ID NO: 211298 - RNA, 19 nt, Artificial Sequence
  Synthetic
aauacugauaauccacuca

SEQ ID NO: 211299 - RNA, 20 nt, Artificial Sequence
  Synthetic
aaauacugauaauccacuca

SEQ ID NO: 211300 - RNA, 21 nt, Artificial Sequence
  Synthetic
caaauacugauaauccacuca

SEQ ID NO: 211301 - RNA, 22 nt, Artificial Sequence
  Synthetic
acaaauacugauaauccacuca

SEQ ID NO: 211302 - RNA, 23 nt, Artificial Sequence
  Synthetic
aacaaauacugauaauccacuca

SEQ ID NO: 211303 - RNA, 24 nt, Artificial Sequence
  Synthetic
caacaaauacugauaauccacuca

SEQ ID NO: 211304 - RNA, 18 nt, Artificial Sequence
  Synthetic
cauauagaaaagcacuca

SEQ ID NO: 211305 - RNA, 19 nt, Artificial Sequence
  Synthetic
acauauagaaaagcacuca

SEQ ID NO: 211306 - RNA, 20 nt, Artificial Sequence
  Synthetic
uacauauagaaaagcacuca

SEQ ID NO: 211307 - RNA, 21 nt, Artificial Sequence
  Synthetic
guacauauagaaaagcacuca

SEQ ID NO: 211308 - RNA, 22 nt, Artificial Sequence
  Synthetic
uguacauauagaaaagcacuca

SEQ ID NO: 211309 - RNA, 23 nt, Artificial Sequence
  Synthetic
guguacauauagaaaagcacuca

SEQ ID NO: 211310 - RNA, 24 nt, Artificial Sequence
  Synthetic
gguguacauauagaaaagcacuca

SEQ ID NO: 211311 - RNA, 18 nt, Artificial Sequence
  Synthetic
aguacccaacagcacuca

SEQ ID NO: 211312 - RNA, 19 nt, Artificial Sequence
  Synthetic
caguacccaacagcacuca

SEQ ID NO: 211313 - RNA, 20 nt, Artificial Sequence
  Synthetic
ucaguacccaacagcacuca

SEQ ID NO: 211314 - RNA, 21 nt, Artificial Sequence
  Synthetic
cucaguacccaacagcacuca

SEQ ID NO: 211315 - RNA, 22 nt, Artificial Sequence
  Synthetic
gcucaguacccaacagcacuca

SEQ ID NO: 211316 - RNA, 23 nt, Artificial Sequence
  Synthetic
ggcucaguacccaacagcacuca

SEQ ID NO: 211317 - RNA, 24 nt, Artificial Sequence
  Synthetic
uggcucaguacccaacagcacuca

SEQ ID NO: 211318 - RNA, 18 nt, Artificial Sequence
  Synthetic
ugauuguaagagcacuca

SEQ ID NO: 211319 - RNA, 19 nt, Artificial Sequence
  Synthetic
cugauuguaagagcacuca

SEQ ID NO: 211320 - RNA, 20 nt, Artificial Sequence
  Synthetic
acugauuguaagagcacuca

SEQ ID NO: 211321 - RNA, 21 nt, Artificial Sequence
  Synthetic
aacugauuguaagagcacuca

SEQ ID NO: 211322 - RNA, 22 nt, Artificial Sequence
  Synthetic
uaacugauuguaagagcacuca

SEQ ID NO: 211323 - RNA, 23 nt, Artificial Sequence
  Synthetic
cuaacugauuguaagagcacuca

SEQ ID NO: 211324 - RNA, 24 nt, Artificial Sequence
  Synthetic
ucuaacugauuguaagagcacuca

SEQ ID NO: 211325 - RNA, 18 nt, Artificial Sequence
  Synthetic
uagggcacuucucacuca

SEQ ID NO: 211326 - RNA, 19 nt, Artificial Sequence
  Synthetic
cuagggcacuucucacuca

SEQ ID NO: 211327 - RNA, 20 nt, Artificial Sequence
  Synthetic
ccuagggcacuucucacuca

SEQ ID NO: 211328 - RNA, 21 nt, Artificial Sequence
  Synthetic
accuagggcacuucucacuca

SEQ ID NO: 211329 - RNA, 22 nt, Artificial Sequence
  Synthetic
uaccuagggcacuucucacuca

SEQ ID NO: 211330 - RNA, 23 nt, Artificial Sequence
  Synthetic
cuaccuagggcacuucucacuca

SEQ ID NO: 211331 - RNA, 24 nt, Artificial Sequence
  Synthetic
ucuaccuagggcacuucucacuca

SEQ ID NO: 211332 - RNA, 18 nt, Artificial Sequence
  Synthetic
cucacagauaaagacuca

SEQ ID NO: 211333 - RNA, 19 nt, Artificial Sequence
  Synthetic
ucucacagauaaagacuca

SEQ ID NO: 211334 - RNA, 20 nt, Artificial Sequence
  Synthetic
aucucacagauaaagacuca

SEQ ID NO: 211335 - RNA, 21 nt, Artificial Sequence
  Synthetic
uaucucacagauaaagacuca

SEQ ID NO: 211336 - RNA, 22 nt, Artificial Sequence
  Synthetic
uuaucucacagauaaagacuca

SEQ ID NO: 211337 - RNA, 23 nt, Artificial Sequence
  Synthetic
cuuaucucacagauaaagacuca

SEQ ID NO: 211338 - RNA, 24 nt, Artificial Sequence
  Synthetic
ccuuaucucacagauaaagacuca

SEQ ID NO: 211339 - RNA, 18 nt, Artificial Sequence
  Synthetic
ugggaauaacaagacuca

SEQ ID NO: 211340 - RNA, 19 nt, Artificial Sequence
  Synthetic
uugggaauaacaagacuca

SEQ ID NO: 211341 - RNA, 20 nt, Artificial Sequence
  Synthetic
uuugggaauaacaagacuca

SEQ ID NO: 211342 - RNA, 21 nt, Artificial Sequence
  Synthetic
guuugggaauaacaagacuca

SEQ ID NO: 211343 - RNA, 22 nt, Artificial Sequence
  Synthetic
uguuugggaauaacaagacuca

SEQ ID NO: 211344 - RNA, 23 nt, Artificial Sequence
  Synthetic
auguuugggaauaacaagacuca

SEQ ID NO: 211345 - RNA, 24 nt, Artificial Sequence
  Synthetic
gauguuugggaauaacaagacuca

SEQ ID NO: 211346 - RNA, 18 nt, Artificial Sequence
  Synthetic
ugagaacacauggacuca

SEQ ID NO: 211347 - RNA, 19 nt, Artificial Sequence
  Synthetic
augagaacacauggacuca

SEQ ID NO: 211348 - RNA, 20 nt, Artificial Sequence
  Synthetic
aaugagaacacauggacuca

SEQ ID NO: 211349 - RNA, 21 nt, Artificial Sequence
  Synthetic
caaugagaacacauggacuca

SEQ ID NO: 211350 - RNA, 22 nt, Artificial Sequence
  Synthetic
acaaugagaacacauggacuca

SEQ ID NO: 211351 - RNA, 23 nt, Artificial Sequence
  Synthetic
aacaaugagaacacauggacuca

SEQ ID NO: 211352 - RNA, 24 nt, Artificial Sequence
  Synthetic
gaacaaugagaacacauggacuca

SEQ ID NO: 211353 - RNA, 18 nt, Artificial Sequence
  Synthetic
uggguauuuauugacuca

SEQ ID NO: 211354 - RNA, 19 nt, Artificial Sequence
  Synthetic
uuggguauuuauugacuca

SEQ ID NO: 211355 - RNA, 20 nt, Artificial Sequence
  Synthetic
auuggguauuuauugacuca

SEQ ID NO: 211356 - RNA, 21 nt, Artificial Sequence
  Synthetic
uauuggguauuuauugacuca

SEQ ID NO: 211357 - RNA, 22 nt, Artificial Sequence
  Synthetic
auauuggguauuuauugacuca

SEQ ID NO: 211358 - RNA, 23 nt, Artificial Sequence
  Synthetic
cauauuggguauuuauugacuca

SEQ ID NO: 211359 - RNA, 24 nt, Artificial Sequence
  Synthetic
acauauuggguauuuauugacuca

SEQ ID NO: 211360 - RNA, 18 nt, Artificial Sequence
  Synthetic
gaagaaaaaaaauacuca

SEQ ID NO: 211361 - RNA, 19 nt, Artificial Sequence
  Synthetic
ggaagaaaaaaaauacuca

SEQ ID NO: 211362 - RNA, 20 nt, Artificial Sequence
  Synthetic
aggaagaaaaaaaauacuca

SEQ ID NO: 211363 - RNA, 21 nt, Artificial Sequence
  Synthetic
gaggaagaaaaaaaauacuca

SEQ ID NO: 211364 - RNA, 22 nt, Artificial Sequence
  Synthetic
ggaggaagaaaaaaaauacuca

SEQ ID NO: 211365 - RNA, 23 nt, Artificial Sequence
  Synthetic
aggaggaagaaaaaaaauacuca

SEQ ID NO: 211366 - RNA, 24 nt, Artificial Sequence
  Synthetic
caggaggaagaaaaaaaauacuca

SEQ ID NO: 211367 - RNA, 18 nt, Artificial Sequence
  Synthetic
ggauugaacaaauacuca

SEQ ID NO: 211368 - RNA, 19 nt, Artificial Sequence
  Synthetic
uggauugaacaaauacuca

SEQ ID NO: 211369 - RNA, 20 nt, Artificial Sequence
  Synthetic
auggauugaacaaauacuca

SEQ ID NO: 211370 - RNA, 21 nt, Artificial Sequence
  Synthetic
uauggauugaacaaauacuca

SEQ ID NO: 211371 - RNA, 22 nt, Artificial Sequence
  Synthetic
guauggauugaacaaauacuca

SEQ ID NO: 211372 - RNA, 23 nt, Artificial Sequence
  Synthetic
uguauggauugaacaaauacuca

SEQ ID NO: 211373 - RNA, 24 nt, Artificial Sequence
  Synthetic
auguauggauugaacaaauacuca

SEQ ID NO: 211374 - RNA, 18 nt, Artificial Sequence
  Synthetic
cacagguuuuaauacuca

SEQ ID NO: 211375 - RNA, 19 nt, Artificial Sequence
  Synthetic
ucacagguuuuaauacuca

SEQ ID NO: 211376 - RNA, 20 nt, Artificial Sequence
  Synthetic
aucacagguuuuaauacuca

SEQ ID NO: 211377 - RNA, 21 nt, Artificial Sequence
  Synthetic
caucacagguuuuaauacuca

SEQ ID NO: 211378 - RNA, 22 nt, Artificial Sequence
  Synthetic
acaucacagguuuuaauacuca

SEQ ID NO: 211379 - RNA, 23 nt, Artificial Sequence
  Synthetic
uacaucacagguuuuaauacuca

SEQ ID NO: 211380 - RNA, 24 nt, Artificial Sequence
  Synthetic
guacaucacagguuuuaauacuca

SEQ ID NO: 211381 - RNA, 18 nt, Artificial Sequence
  Synthetic
caguuccaaggauacuca

SEQ ID NO: 211382 - RNA, 19 nt, Artificial Sequence
  Synthetic
ucaguuccaaggauacuca

SEQ ID NO: 211383 - RNA, 20 nt, Artificial Sequence
  Synthetic
uucaguuccaaggauacuca

SEQ ID NO: 211384 - RNA, 21 nt, Artificial Sequence
  Synthetic
uuucaguuccaaggauacuca

SEQ ID NO: 211385 - RNA, 22 nt, Artificial Sequence
  Synthetic
uuuucaguuccaaggauacuca

SEQ ID NO: 211386 - RNA, 23 nt, Artificial Sequence
  Synthetic
uuuuucaguuccaaggauacuca

SEQ ID NO: 211387 - RNA, 24 nt, Artificial Sequence
  Synthetic
auuuuucaguuccaaggauacuca

SEQ ID NO: 211388 - RNA, 18 nt, Artificial Sequence
  Synthetic
gccucgaaaugauacuca

SEQ ID NO: 211389 - RNA, 19 nt, Artificial Sequence
  Synthetic
ugccucgaaaugauacuca

SEQ ID NO: 211390 - RNA, 20 nt, Artificial Sequence
  Synthetic
uugccucgaaaugauacuca

SEQ ID NO: 211391 - RNA, 21 nt, Artificial Sequence
  Synthetic
uuugccucgaaaugauacuca

SEQ ID NO: 211392 - RNA, 22 nt, Artificial Sequence
  Synthetic
auuugccucgaaaugauacuca

SEQ ID NO: 211393 - RNA, 23 nt, Artificial Sequence
  Synthetic
aauuugccucgaaaugauacuca

SEQ ID NO: 211394 - RNA, 24 nt, Artificial Sequence
  Synthetic
gaauuugccucgaaaugauacuca

SEQ ID NO: 211395 - RNA, 18 nt, Artificial Sequence
  Synthetic
uuauuuuccuuauacuca

SEQ ID NO: 211396 - RNA, 19 nt, Artificial Sequence
  Synthetic
uuuauuuuccuuauacuca

SEQ ID NO: 211397 - RNA, 20 nt, Artificial Sequence
  Synthetic
guuuauuuuccuuauacuca

SEQ ID NO: 211398 - RNA, 21 nt, Artificial Sequence
  Synthetic
aguuuauuuuccuuauacuca

SEQ ID NO: 211399 - RNA, 22 nt, Artificial Sequence
  Synthetic
caguuuauuuuccuuauacuca

SEQ ID NO: 211400 - RNA, 23 nt, Artificial Sequence
  Synthetic
acaguuuauuuuccuuauacuca

SEQ ID NO: 211401 - RNA, 24 nt, Artificial Sequence
  Synthetic
uacaguuuauuuuccuuauacuca

SEQ ID NO: 211402 - RNA, 18 nt, Artificial Sequence
  Synthetic
aucuuuguuuuauacuca

SEQ ID NO: 211403 - RNA, 19 nt, Artificial Sequence
  Synthetic
caucuuuguuuuauacuca

SEQ ID NO: 211404 - RNA, 20 nt, Artificial Sequence
  Synthetic
acaucuuuguuuuauacuca

SEQ ID NO: 211405 - RNA, 21 nt, Artificial Sequence
  Synthetic
cacaucuuuguuuuauacuca

SEQ ID NO: 211406 - RNA, 22 nt, Artificial Sequence
  Synthetic
acacaucuuuguuuuauacuca

SEQ ID NO: 211407 - RNA, 23 nt, Artificial Sequence
  Synthetic
cacacaucuuuguuuuauacuca

SEQ ID NO: 211408 - RNA, 24 nt, Artificial Sequence
  Synthetic
gcacacaucuuuguuuuauacuca

SEQ ID NO: 211409 - RNA, 18 nt, Artificial Sequence
  Synthetic
uuaaauaccaccuacuca

SEQ ID NO: 211410 - RNA, 19 nt, Artificial Sequence
  Synthetic
uuuaaauaccaccuacuca

SEQ ID NO: 211411 - RNA, 20 nt, Artificial Sequence
  Synthetic
auuuaaauaccaccuacuca

SEQ ID NO: 211412 - RNA, 21 nt, Artificial Sequence
  Synthetic
uauuuaaauaccaccuacuca

SEQ ID NO: 211413 - RNA, 22 nt, Artificial Sequence
  Synthetic
uuauuuaaauaccaccuacuca

SEQ ID NO: 211414 - RNA, 23 nt, Artificial Sequence
  Synthetic
uuuauuuaaauaccaccuacuca

SEQ ID NO: 211415 - RNA, 24 nt, Artificial Sequence
  Synthetic
cuuuauuuaaauaccaccuacuca

SEQ ID NO: 211416 - RNA, 18 nt, Artificial Sequence
  Synthetic
uucaauguuacuuacuca

SEQ ID NO: 211417 - RNA, 19 nt, Artificial Sequence
  Synthetic
uuucaauguuacuuacuca

SEQ ID NO: 211418 - RNA, 20 nt, Artificial Sequence
  Synthetic
auuucaauguuacuuacuca

SEQ ID NO: 211419 - RNA, 21 nt, Artificial Sequence
  Synthetic
aauuucaauguuacuuacuca

SEQ ID NO: 211420 - RNA, 22 nt, Artificial Sequence
  Synthetic
caauuucaauguuacuuacuca

SEQ ID NO: 211421 - RNA, 23 nt, Artificial Sequence
  Synthetic
ucaauuucaauguuacuuacuca

SEQ ID NO: 211422 - RNA, 24 nt, Artificial Sequence
  Synthetic
cucaauuucaauguuacuuacuca

SEQ ID NO: 211423 - RNA, 18 nt, Artificial Sequence
  Synthetic
aggaauaucuuuuacuca

SEQ ID NO: 211424 - RNA, 19 nt, Artificial Sequence
  Synthetic
aaggaauaucuuuuacuca

SEQ ID NO: 211425 - RNA, 20 nt, Artificial Sequence
  Synthetic
gaaggaauaucuuuuacuca

SEQ ID NO: 211426 - RNA, 21 nt, Artificial Sequence
  Synthetic
ggaaggaauaucuuuuacuca

SEQ ID NO: 211427 - RNA, 22 nt, Artificial Sequence
  Synthetic
uggaaggaauaucuuuuacuca

SEQ ID NO: 211428 - RNA, 23 nt, Artificial Sequence
  Synthetic
cuggaaggaauaucuuuuacuca

SEQ ID NO: 211429 - RNA, 24 nt, Artificial Sequence
  Synthetic
ucuggaaggaauaucuuuuacuca

SEQ ID NO: 211430 - RNA, 18 nt, Artificial Sequence
  Synthetic
ugcacucacgaaaccuca

SEQ ID NO: 211431 - RNA, 19 nt, Artificial Sequence
  Synthetic
uugcacucacgaaaccuca

SEQ ID NO: 211432 - RNA, 20 nt, Artificial Sequence
  Synthetic
auugcacucacgaaaccuca

SEQ ID NO: 211433 - RNA, 21 nt, Artificial Sequence
  Synthetic
aauugcacucacgaaaccuca

SEQ ID NO: 211434 - RNA, 22 nt, Artificial Sequence
  Synthetic
caauugcacucacgaaaccuca

SEQ ID NO: 211435 - RNA, 23 nt, Artificial Sequence
  Synthetic
acaauugcacucacgaaaccuca

SEQ ID NO: 211436 - RNA, 24 nt, Artificial Sequence
  Synthetic
cacaauugcacucacgaaaccuca

SEQ ID NO: 211437 - RNA, 18 nt, Artificial Sequence
  Synthetic
auuuggaaaauaaccuca

SEQ ID NO: 211438 - RNA, 19 nt, Artificial Sequence
  Synthetic
cauuuggaaaauaaccuca

SEQ ID NO: 211439 - RNA, 20 nt, Artificial Sequence
  Synthetic
gcauuuggaaaauaaccuca

SEQ ID NO: 211440 - RNA, 21 nt, Artificial Sequence
  Synthetic
agcauuuggaaaauaaccuca

SEQ ID NO: 211441 - RNA, 22 nt, Artificial Sequence
  Synthetic
uagcauuuggaaaauaaccuca

SEQ ID NO: 211442 - RNA, 23 nt, Artificial Sequence
  Synthetic
guagcauuuggaaaauaaccuca

SEQ ID NO: 211443 - RNA, 24 nt, Artificial Sequence
  Synthetic
uguagcauuuggaaaauaaccuca

SEQ ID NO: 211444 - RNA, 18 nt, Artificial Sequence
  Synthetic
aucuugaaaaucaccuca

SEQ ID NO: 211445 - RNA, 19 nt, Artificial Sequence
  Synthetic
caucuugaaaaucaccuca

SEQ ID NO: 211446 - RNA, 20 nt, Artificial Sequence
  Synthetic
ucaucuugaaaaucaccuca

SEQ ID NO: 211447 - RNA, 21 nt, Artificial Sequence
  Synthetic
uucaucuugaaaaucaccuca

SEQ ID NO: 211448 - RNA, 22 nt, Artificial Sequence
  Synthetic
auucaucuugaaaaucaccuca

SEQ ID NO: 211449 - RNA, 23 nt, Artificial Sequence
  Synthetic
uauucaucuugaaaaucaccuca

SEQ ID NO: 211450 - RNA, 24 nt, Artificial Sequence
  Synthetic
auauucaucuugaaaaucaccuca

SEQ ID NO: 211451 - RNA, 18 nt, Artificial Sequence
  Synthetic
uaugucacugagaccuca

SEQ ID NO: 211452 - RNA, 19 nt, Artificial Sequence
  Synthetic
auaugucacugagaccuca

SEQ ID NO: 211453 - RNA, 20 nt, Artificial Sequence
  Synthetic
uauaugucacugagaccuca

SEQ ID NO: 211454 - RNA, 21 nt, Artificial Sequence
  Synthetic
cuauaugucacugagaccuca

SEQ ID NO: 211455 - RNA, 22 nt, Artificial Sequence
  Synthetic
ccuauaugucacugagaccuca

SEQ ID NO: 211456 - RNA, 23 nt, Artificial Sequence
  Synthetic
accuauaugucacugagaccuca

SEQ ID NO: 211457 - RNA, 24 nt, Artificial Sequence
  Synthetic
gaccuauaugucacugagaccuca

SEQ ID NO: 211458 - RNA, 18 nt, Artificial Sequence
  Synthetic
uugugcuucuggaccuca

SEQ ID NO: 211459 - RNA, 19 nt, Artificial Sequence
  Synthetic
uuugugcuucuggaccuca

SEQ ID NO: 211460 - RNA, 20 nt, Artificial Sequence
  Synthetic
cuuugugcuucuggaccuca

SEQ ID NO: 211461 - RNA, 21 nt, Artificial Sequence
  Synthetic
gcuuugugcuucuggaccuca

SEQ ID NO: 211462 - RNA, 22 nt, Artificial Sequence
  Synthetic
ugcuuugugcuucuggaccuca

SEQ ID NO: 211463 - RNA, 23 nt, Artificial Sequence
  Synthetic
augcuuugugcuucuggaccuca

SEQ ID NO: 211464 - RNA, 24 nt, Artificial Sequence
  Synthetic
aaugcuuugugcuucuggaccuca

SEQ ID NO: 211465 - RNA, 18 nt, Artificial Sequence
  Synthetic
aaaauaauuuggaccuca

SEQ ID NO: 211466 - RNA, 19 nt, Artificial Sequence
  Synthetic
gaaaauaauuuggaccuca

SEQ ID NO: 211467 - RNA, 20 nt, Artificial Sequence
  Synthetic
cgaaaauaauuuggaccuca

SEQ ID NO: 211468 - RNA, 21 nt, Artificial Sequence
  Synthetic
acgaaaauaauuuggaccuca

SEQ ID NO: 211469 - RNA, 22 nt, Artificial Sequence
  Synthetic
uacgaaaauaauuuggaccuca

SEQ ID NO: 211470 - RNA, 23 nt, Artificial Sequence
  Synthetic
uuacgaaaauaauuuggaccuca

SEQ ID NO: 211471 - RNA, 24 nt, Artificial Sequence
  Synthetic
auuacgaaaauaauuuggaccuca

SEQ ID NO: 211472 - RNA, 18 nt, Artificial Sequence
  Synthetic
aucuacuauuauaccuca

SEQ ID NO: 211473 - RNA, 19 nt, Artificial Sequence
  Synthetic
uaucuacuauuauaccuca

SEQ ID NO: 211474 - RNA, 20 nt, Artificial Sequence
  Synthetic
auaucuacuauuauaccuca

SEQ ID NO: 211475 - RNA, 21 nt, Artificial Sequence
  Synthetic
cauaucuacuauuauaccuca

SEQ ID NO: 211476 - RNA, 22 nt, Artificial Sequence
  Synthetic
gcauaucuacuauuauaccuca

SEQ ID NO: 211477 - RNA, 23 nt, Artificial Sequence
  Synthetic
agcauaucuacuauuauaccuca

SEQ ID NO: 211478 - RNA, 24 nt, Artificial Sequence
  Synthetic
gagcauaucuacuauuauaccuca

SEQ ID NO: 211479 - RNA, 18 nt, Artificial Sequence
  Synthetic
gcucccaauaaacccuca

SEQ ID NO: 211480 - RNA, 19 nt, Artificial Sequence
  Synthetic
agcucccaauaaacccuca

SEQ ID NO: 211481 - RNA, 20 nt, Artificial Sequence
  Synthetic
aagcucccaauaaacccuca

SEQ ID NO: 211482 - RNA, 21 nt, Artificial Sequence
  Synthetic
caagcucccaauaaacccuca

SEQ ID NO: 211483 - RNA, 22 nt, Artificial Sequence
  Synthetic
acaagcucccaauaaacccuca

SEQ ID NO: 211484 - RNA, 23 nt, Artificial Sequence
  Synthetic
cacaagcucccaauaaacccuca

SEQ ID NO: 211485 - RNA, 24 nt, Artificial Sequence
  Synthetic
ucacaagcucccaauaaacccuca

SEQ ID NO: 211486 - RNA, 18 nt, Artificial Sequence
  Synthetic
ugaaaaagcauacccuca

SEQ ID NO: 211487 - RNA, 19 nt, Artificial Sequence
  Synthetic
gugaaaaagcauacccuca

SEQ ID NO: 211488 - RNA, 20 nt, Artificial Sequence
  Synthetic
ggugaaaaagcauacccuca

SEQ ID NO: 211489 - RNA, 21 nt, Artificial Sequence
  Synthetic
gggugaaaaagcauacccuca

SEQ ID NO: 211490 - RNA, 22 nt, Artificial Sequence
  Synthetic
agggugaaaaagcauacccuca

SEQ ID NO: 211491 - RNA, 23 nt, Artificial Sequence
  Synthetic
aagggugaaaaagcauacccuca

SEQ ID NO: 211492 - RNA, 24 nt, Artificial Sequence
  Synthetic
caagggugaaaaagcauacccuca

SEQ ID NO: 211493 - RNA, 18 nt, Artificial Sequence
  Synthetic
ugauuugaugcccccuca

SEQ ID NO: 211494 - RNA, 19 nt, Artificial Sequence
  Synthetic
cugauuugaugcccccuca

SEQ ID NO: 211495 - RNA, 20 nt, Artificial Sequence
  Synthetic
acugauuugaugcccccuca

SEQ ID NO: 211496 - RNA, 21 nt, Artificial Sequence
  Synthetic
uacugauuugaugcccccuca

SEQ ID NO: 211497 - RNA, 22 nt, Artificial Sequence
  Synthetic
cuacugauuugaugcccccuca

SEQ ID NO: 211498 - RNA, 23 nt, Artificial Sequence
  Synthetic
acuacugauuugaugcccccuca

SEQ ID NO: 211499 - RNA, 24 nt, Artificial Sequence
  Synthetic
gacuacugauuugaugcccccuca

SEQ ID NO: 211500 - RNA, 18 nt, Artificial Sequence
  Synthetic
cagcuuucucuccccuca

SEQ ID NO: 211501 - RNA, 19 nt, Artificial Sequence
  Synthetic
ucagcuuucucuccccuca

SEQ ID NO: 211502 - RNA, 20 nt, Artificial Sequence
  Synthetic
cucagcuuucucuccccuca

SEQ ID NO: 211503 - RNA, 21 nt, Artificial Sequence
  Synthetic
ucucagcuuucucuccccuca

SEQ ID NO: 211504 - RNA, 22 nt, Artificial Sequence
  Synthetic
aucucagcuuucucuccccuca

SEQ ID NO: 211505 - RNA, 23 nt, Artificial Sequence
  Synthetic
aaucucagcuuucucuccccuca

SEQ ID NO: 211506 - RNA, 24 nt, Artificial Sequence
  Synthetic
aaaucucagcuuucucuccccuca

SEQ ID NO: 211507 - RNA, 18 nt, Artificial Sequence
  Synthetic
gaaaaaaaaaagcccuca

SEQ ID NO: 211508 - RNA, 19 nt, Artificial Sequence
  Synthetic
agaaaaaaaaaagcccuca

SEQ ID NO: 211509 - RNA, 20 nt, Artificial Sequence
  Synthetic
aagaaaaaaaaaagcccuca

SEQ ID NO: 211510 - RNA, 21 nt, Artificial Sequence
  Synthetic
aaagaaaaaaaaaagcccuca

SEQ ID NO: 211511 - RNA, 22 nt, Artificial Sequence
  Synthetic
aaaagaaaaaaaaaagcccuca

SEQ ID NO: 211512 - RNA, 23 nt, Artificial Sequence
  Synthetic
uaaaagaaaaaaaaaagcccuca

SEQ ID NO: 211513 - RNA, 24 nt, Artificial Sequence
  Synthetic
auaaaagaaaaaaaaaagcccuca

SEQ ID NO: 211514 - RNA, 18 nt, Artificial Sequence
  Synthetic
guuauuucaaagcccuca

SEQ ID NO: 211515 - RNA, 19 nt, Artificial Sequence
  Synthetic
uguuauuucaaagcccuca

SEQ ID NO: 211516 - RNA, 20 nt, Artificial Sequence
  Synthetic
guguuauuucaaagcccuca

SEQ ID NO: 211517 - RNA, 21 nt, Artificial Sequence
  Synthetic
gguguuauuucaaagcccuca

SEQ ID NO: 211518 - RNA, 22 nt, Artificial Sequence
  Synthetic
ugguguuauuucaaagcccuca

SEQ ID NO: 211519 - RNA, 23 nt, Artificial Sequence
  Synthetic
augguguuauuucaaagcccuca

SEQ ID NO: 211520 - RNA, 24 nt, Artificial Sequence
  Synthetic
gaugguguuauuucaaagcccuca

SEQ ID NO: 211521 - RNA, 18 nt, Artificial Sequence
  Synthetic
cuagagcucaggcccuca

SEQ ID NO: 211522 - RNA, 19 nt, Artificial Sequence
  Synthetic
ccuagagcucaggcccuca

SEQ ID NO: 211523 - RNA, 20 nt, Artificial Sequence
  Synthetic
gccuagagcucaggcccuca

SEQ ID NO: 211524 - RNA, 21 nt, Artificial Sequence
  Synthetic
ggccuagagcucaggcccuca

SEQ ID NO: 211525 - RNA, 22 nt, Artificial Sequence
  Synthetic
aggccuagagcucaggcccuca

SEQ ID NO: 211526 - RNA, 23 nt, Artificial Sequence
  Synthetic
gaggccuagagcucaggcccuca

SEQ ID NO: 211527 - RNA, 24 nt, Artificial Sequence
  Synthetic
agaggccuagagcucaggcccuca

SEQ ID NO: 211528 - RNA, 18 nt, Artificial Sequence
  Synthetic
agaccauugaggcccuca

SEQ ID NO: 211529 - RNA, 19 nt, Artificial Sequence
  Synthetic
cagaccauugaggcccuca

SEQ ID NO: 211530 - RNA, 20 nt, Artificial Sequence
  Synthetic
acagaccauugaggcccuca

SEQ ID NO: 211531 - RNA, 21 nt, Artificial Sequence
  Synthetic
aacagaccauugaggcccuca

SEQ ID NO: 211532 - RNA, 22 nt, Artificial Sequence
  Synthetic
aaacagaccauugaggcccuca

SEQ ID NO: 211533 - RNA, 23 nt, Artificial Sequence
  Synthetic
gaaacagaccauugaggcccuca

SEQ ID NO: 211534 - RNA, 24 nt, Artificial Sequence
  Synthetic
cgaaacagaccauugaggcccuca

SEQ ID NO: 211535 - RNA, 18 nt, Artificial Sequence
  Synthetic
gcaggggcagggcccuca

SEQ ID NO: 211536 - RNA, 19 nt, Artificial Sequence
  Synthetic
ugcaggggcagggcccuca

SEQ ID NO: 211537 - RNA, 20 nt, Artificial Sequence
  Synthetic
cugcaggggcagggcccuca

SEQ ID NO: 211538 - RNA, 21 nt, Artificial Sequence
  Synthetic
gcugcaggggcagggcccuca

SEQ ID NO: 211539 - RNA, 22 nt, Artificial Sequence
  Synthetic
ugcugcaggggcagggcccuca

SEQ ID NO: 211540 - RNA, 23 nt, Artificial Sequence
  Synthetic
uugcugcaggggcagggcccuca

SEQ ID NO: 211541 - RNA, 24 nt, Artificial Sequence
  Synthetic
uuugcugcaggggcagggcccuca

SEQ ID NO: 211542 - RNA, 18 nt, Artificial Sequence
  Synthetic
cugcugauuccucccuca

SEQ ID NO: 211543 - RNA, 19 nt, Artificial Sequence
  Synthetic
ucugcugauuccucccuca

SEQ ID NO: 211544 - RNA, 20 nt, Artificial Sequence
  Synthetic
uucugcugauuccucccuca

SEQ ID NO: 211545 - RNA, 21 nt, Artificial Sequence
  Synthetic
auucugcugauuccucccuca

SEQ ID NO: 211546 - RNA, 22 nt, Artificial Sequence
  Synthetic
cauucugcugauuccucccuca

SEQ ID NO: 211547 - RNA, 23 nt, Artificial Sequence
  Synthetic
ucauucugcugauuccucccuca

SEQ ID NO: 211548 - RNA, 24 nt, Artificial Sequence
  Synthetic
uucauucugcugauuccucccuca

SEQ ID NO: 211549 - RNA, 18 nt, Artificial Sequence
  Synthetic
gugagccaccgcgccuca

SEQ ID NO: 211550 - RNA, 19 nt, Artificial Sequence
  Synthetic
ugugagccaccgcgccuca

SEQ ID NO: 211551 - RNA, 20 nt, Artificial Sequence
  Synthetic
gugugagccaccgcgccuca

SEQ ID NO: 211552 - RNA, 21 nt, Artificial Sequence
  Synthetic
ggugugagccaccgcgccuca

SEQ ID NO: 211553 - RNA, 22 nt, Artificial Sequence
  Synthetic
aggugugagccaccgcgccuca

SEQ ID NO: 211554 - RNA, 23 nt, Artificial Sequence
  Synthetic
caggugugagccaccgcgccuca

SEQ ID NO: 211555 - RNA, 24 nt, Artificial Sequence
  Synthetic
acaggugugagccaccgcgccuca

SEQ ID NO: 211556 - RNA, 18 nt, Artificial Sequence
  Synthetic
auggcuggggaggccuca

SEQ ID NO: 211557 - RNA, 19 nt, Artificial Sequence
  Synthetic
cauggcuggggaggccuca

SEQ ID NO: 211558 - RNA, 20 nt, Artificial Sequence
  Synthetic
acauggcuggggaggccuca

SEQ ID NO: 211559 - RNA, 21 nt, Artificial Sequence
  Synthetic
cacauggcuggggaggccuca

SEQ ID NO: 211560 - RNA, 22 nt, Artificial Sequence
  Synthetic
ccacauggcuggggaggccuca

SEQ ID NO: 211561 - RNA, 23 nt, Artificial Sequence
  Synthetic
uccacauggcuggggaggccuca

SEQ ID NO: 211562 - RNA, 24 nt, Artificial Sequence
  Synthetic
uuccacauggcuggggaggccuca

SEQ ID NO: 211563 - RNA, 18 nt, Artificial Sequence
  Synthetic
guuucuggggaggccuca

SEQ ID NO: 211564 - RNA, 19 nt, Artificial Sequence
  Synthetic
uguuucuggggaggccuca

SEQ ID NO: 211565 - RNA, 20 nt, Artificial Sequence
  Synthetic
cuguuucuggggaggccuca

SEQ ID NO: 211566 - RNA, 21 nt, Artificial Sequence
  Synthetic
ucuguuucuggggaggccuca

SEQ ID NO: 211567 - RNA, 22 nt, Artificial Sequence
  Synthetic
aucuguuucuggggaggccuca

SEQ ID NO: 211568 - RNA, 23 nt, Artificial Sequence
  Synthetic
caucuguuucuggggaggccuca

SEQ ID NO: 211569 - RNA, 24 nt, Artificial Sequence
  Synthetic
acaucuguuucuggggaggccuca

SEQ ID NO: 211570 - RNA, 18 nt, Artificial Sequence
  Synthetic
gauaguuuuggggccuca

SEQ ID NO: 211571 - RNA, 19 nt, Artificial Sequence
  Synthetic
agauaguuuuggggccuca

SEQ ID NO: 211572 - RNA, 20 nt, Artificial Sequence
  Synthetic
aagauaguuuuggggccuca

SEQ ID NO: 211573 - RNA, 21 nt, Artificial Sequence
  Synthetic
aaagauaguuuuggggccuca

SEQ ID NO: 211574 - RNA, 22 nt, Artificial Sequence
  Synthetic
aaaagauaguuuuggggccuca

SEQ ID NO: 211575 - RNA, 23 nt, Artificial Sequence
  Synthetic
aaaaagauaguuuuggggccuca

SEQ ID NO: 211576 - RNA, 24 nt, Artificial Sequence
  Synthetic
caaaaagauaguuuuggggccuca

SEQ ID NO: 211577 - RNA, 18 nt, Artificial Sequence
  Synthetic
uggcaaucuacugccuca

SEQ ID NO: 211578 - RNA, 19 nt, Artificial Sequence
  Synthetic
auggcaaucuacugccuca

SEQ ID NO: 211579 - RNA, 20 nt, Artificial Sequence
  Synthetic
cauggcaaucuacugccuca

SEQ ID NO: 211580 - RNA, 21 nt, Artificial Sequence
  Synthetic
acauggcaaucuacugccuca

SEQ ID NO: 211581 - RNA, 22 nt, Artificial Sequence
  Synthetic
aacauggcaaucuacugccuca

SEQ ID NO: 211582 - RNA, 23 nt, Artificial Sequence
  Synthetic
uaacauggcaaucuacugccuca

SEQ ID NO: 211583 - RNA, 24 nt, Artificial Sequence
  Synthetic
cuaacauggcaaucuacugccuca

SEQ ID NO: 211584 - RNA, 18 nt, Artificial Sequence
  Synthetic
acaggcgagcuugccuca

SEQ ID NO: 211585 - RNA, 19 nt, Artificial Sequence
  Synthetic
gacaggcgagcuugccuca

SEQ ID NO: 211586 - RNA, 20 nt, Artificial Sequence
  Synthetic
ugacaggcgagcuugccuca

SEQ ID NO: 211587 - RNA, 21 nt, Artificial Sequence
  Synthetic
augacaggcgagcuugccuca

SEQ ID NO: 211588 - RNA, 22 nt, Artificial Sequence
  Synthetic
aaugacaggcgagcuugccuca

SEQ ID NO: 211589 - RNA, 23 nt, Artificial Sequence
  Synthetic
uaaugacaggcgagcuugccuca

SEQ ID NO: 211590 - RNA, 24 nt, Artificial Sequence
  Synthetic
uuaaugacaggcgagcuugccuca

SEQ ID NO: 211591 - RNA, 18 nt, Artificial Sequence
  Synthetic
aaucagcagccauccuca

SEQ ID NO: 211592 - RNA, 19 nt, Artificial Sequence
  Synthetic
caaucagcagccauccuca

SEQ ID NO: 211593 - RNA, 20 nt, Artificial Sequence
  Synthetic
ucaaucagcagccauccuca

SEQ ID NO: 211594 - RNA, 21 nt, Artificial Sequence
  Synthetic
aucaaucagcagccauccuca

SEQ ID NO: 211595 - RNA, 22 nt, Artificial Sequence
  Synthetic
gaucaaucagcagccauccuca

SEQ ID NO: 211596 - RNA, 23 nt, Artificial Sequence
  Synthetic
ugaucaaucagcagccauccuca

SEQ ID NO: 211597 - RNA, 24 nt, Artificial Sequence
  Synthetic
cugaucaaucagcagccauccuca

SEQ ID NO: 211598 - RNA, 18 nt, Artificial Sequence
  Synthetic
guuacugagaaguccuca

SEQ ID NO: 211599 - RNA, 19 nt, Artificial Sequence
  Synthetic
gguuacugagaaguccuca

SEQ ID NO: 211600 - RNA, 20 nt, Artificial Sequence
  Synthetic
ggguuacugagaaguccuca

SEQ ID NO: 211601 - RNA, 21 nt, Artificial Sequence
  Synthetic
aggguuacugagaaguccuca

SEQ ID NO: 211602 - RNA, 22 nt, Artificial Sequence
  Synthetic
uaggguuacugagaaguccuca

SEQ ID NO: 211603 - RNA, 23 nt, Artificial Sequence
  Synthetic
uuaggguuacugagaaguccuca

SEQ ID NO: 211604 - RNA, 24 nt, Artificial Sequence
  Synthetic
uuuaggguuacugagaaguccuca

SEQ ID NO: 211605 - RNA, 18 nt, Artificial Sequence
  Synthetic
aaaaaaaauuuguccuca

SEQ ID NO: 211606 - RNA, 19 nt, Artificial Sequence
  Synthetic
aaaaaaaaauuuguccuca

SEQ ID NO: 211607 - RNA, 20 nt, Artificial Sequence
  Synthetic
aaaaaaaaaauuuguccuca

SEQ ID NO: 211608 - RNA, 21 nt, Artificial Sequence
  Synthetic
gaaaaaaaaaauuuguccuca

SEQ ID NO: 211609 - RNA, 22 nt, Artificial Sequence
  Synthetic
ugaaaaaaaaaauuuguccuca

SEQ ID NO: 211610 - RNA, 23 nt, Artificial Sequence
  Synthetic
cugaaaaaaaaaauuuguccuca

SEQ ID NO: 211611 - RNA, 24 nt, Artificial Sequence
  Synthetic
acugaaaaaaaaaauuuguccuca

SEQ ID NO: 211612 - RNA, 18 nt, Artificial Sequence
  Synthetic
uaggugcaaaguuccuca

SEQ ID NO: 211613 - RNA, 19 nt, Artificial Sequence
  Synthetic
guaggugcaaaguuccuca

SEQ ID NO: 211614 - RNA, 20 nt, Artificial Sequence
  Synthetic
aguaggugcaaaguuccuca

SEQ ID NO: 211615 - RNA, 21 nt, Artificial Sequence
  Synthetic
aaguaggugcaaaguuccuca

SEQ ID NO: 211616 - RNA, 22 nt, Artificial Sequence
  Synthetic
gaaguaggugcaaaguuccuca

SEQ ID NO: 211617 - RNA, 23 nt, Artificial Sequence
  Synthetic
agaaguaggugcaaaguuccuca

SEQ ID NO: 211618 - RNA, 24 nt, Artificial Sequence
  Synthetic
gagaaguaggugcaaaguuccuca

SEQ ID NO: 211619 - RNA, 18 nt, Artificial Sequence
  Synthetic
guguaauucuguuccuca

SEQ ID NO: 211620 - RNA, 19 nt, Artificial Sequence
  Synthetic
gguguaauucuguuccuca

SEQ ID NO: 211621 - RNA, 20 nt, Artificial Sequence
  Synthetic
agguguaauucuguuccuca

SEQ ID NO: 211622 - RNA, 21 nt, Artificial Sequence
  Synthetic
aagguguaauucuguuccuca

SEQ ID NO: 211623 - RNA, 22 nt, Artificial Sequence
  Synthetic
aaagguguaauucuguuccuca

SEQ ID NO: 211624 - RNA, 23 nt, Artificial Sequence
  Synthetic
gaaagguguaauucuguuccuca

SEQ ID NO: 211625 - RNA, 24 nt, Artificial Sequence
  Synthetic
agaaagguguaauucuguuccuca

SEQ ID NO: 211626 - RNA, 18 nt, Artificial Sequence
  Synthetic
guuugaaggcaaagcuca

SEQ ID NO: 211627 - RNA, 19 nt, Artificial Sequence
  Synthetic
gguuugaaggcaaagcuca

SEQ ID NO: 211628 - RNA, 20 nt, Artificial Sequence
  Synthetic
ugguuugaaggcaaagcuca

SEQ ID NO: 211629 - RNA, 21 nt, Artificial Sequence
  Synthetic
uugguuugaaggcaaagcuca

SEQ ID NO: 211630 - RNA, 22 nt, Artificial Sequence
  Synthetic
uuugguuugaaggcaaagcuca

SEQ ID NO: 211631 - RNA, 23 nt, Artificial Sequence
  Synthetic
auuugguuugaaggcaaagcuca

SEQ ID NO: 211632 - RNA, 24 nt, Artificial Sequence
  Synthetic
gauuugguuugaaggcaaagcuca

SEQ ID NO: 211633 - RNA, 18 nt, Artificial Sequence
  Synthetic
cagcuacccggaagcuca

SEQ ID NO: 211634 - RNA, 19 nt, Artificial Sequence
  Synthetic
ucagcuacccggaagcuca

SEQ ID NO: 211635 - RNA, 20 nt, Artificial Sequence
  Synthetic
uucagcuacccggaagcuca

SEQ ID NO: 211636 - RNA, 21 nt, Artificial Sequence
  Synthetic
guucagcuacccggaagcuca

SEQ ID NO: 211637 - RNA, 22 nt, Artificial Sequence
  Synthetic
uguucagcuacccggaagcuca

SEQ ID NO: 211638 - RNA, 23 nt, Artificial Sequence
  Synthetic
cuguucagcuacccggaagcuca

SEQ ID NO: 211639 - RNA, 24 nt, Artificial Sequence
  Synthetic
ccuguucagcuacccggaagcuca

SEQ ID NO: 211640 - RNA, 18 nt, Artificial Sequence
  Synthetic
ugggaugaucuaagcuca

SEQ ID NO: 211641 - RNA, 19 nt, Artificial Sequence
  Synthetic
cugggaugaucuaagcuca

SEQ ID NO: 211642 - RNA, 20 nt, Artificial Sequence
  Synthetic
ccugggaugaucuaagcuca

SEQ ID NO: 211643 - RNA, 21 nt, Artificial Sequence
  Synthetic
cccugggaugaucuaagcuca

SEQ ID NO: 211644 - RNA, 22 nt, Artificial Sequence
  Synthetic
gcccugggaugaucuaagcuca

SEQ ID NO: 211645 - RNA, 23 nt, Artificial Sequence
  Synthetic
ugcccugggaugaucuaagcuca

SEQ ID NO: 211646 - RNA, 24 nt, Artificial Sequence
  Synthetic
gugcccugggaugaucuaagcuca

SEQ ID NO: 211647 - RNA, 18 nt, Artificial Sequence
  Synthetic
guucugcucuccagcuca

SEQ ID NO: 211648 - RNA, 19 nt, Artificial Sequence
  Synthetic
cguucugcucuccagcuca

SEQ ID NO: 211649 - RNA, 20 nt, Artificial Sequence
  Synthetic
gcguucugcucuccagcuca

SEQ ID NO: 211650 - RNA, 21 nt, Artificial Sequence
  Synthetic
agcguucugcucuccagcuca

SEQ ID NO: 211651 - RNA, 22 nt, Artificial Sequence
  Synthetic
aagcguucugcucuccagcuca

SEQ ID NO: 211652 - RNA, 23 nt, Artificial Sequence
  Synthetic
gaagcguucugcucuccagcuca

SEQ ID NO: 211653 - RNA, 24 nt, Artificial Sequence
  Synthetic
ggaagcguucugcucuccagcuca

SEQ ID NO: 211654 - RNA, 18 nt, Artificial Sequence
  Synthetic
acuugcuggagcagcuca

SEQ ID NO: 211655 - RNA, 19 nt, Artificial Sequence
  Synthetic
aacuugcuggagcagcuca

SEQ ID NO: 211656 - RNA, 20 nt, Artificial Sequence
  Synthetic
uaacuugcuggagcagcuca

SEQ ID NO: 211657 - RNA, 21 nt, Artificial Sequence
  Synthetic
cuaacuugcuggagcagcuca

SEQ ID NO: 211658 - RNA, 22 nt, Artificial Sequence
  Synthetic
acuaacuugcuggagcagcuca

SEQ ID NO: 211659 - RNA, 23 nt, Artificial Sequence
  Synthetic
aacuaacuugcuggagcagcuca

SEQ ID NO: 211660 - RNA, 24 nt, Artificial Sequence
  Synthetic
caacuaacuugcuggagcagcuca

SEQ ID NO: 211661 - RNA, 18 nt, Artificial Sequence
  Synthetic
gaaguaugugggagcuca

SEQ ID NO: 211662 - RNA, 19 nt, Artificial Sequence
  Synthetic
agaaguaugugggagcuca

SEQ ID NO: 211663 - RNA, 20 nt, Artificial Sequence
  Synthetic
gagaaguaugugggagcuca

SEQ ID NO: 211664 - RNA, 21 nt, Artificial Sequence
  Synthetic
agagaaguaugugggagcuca

SEQ ID NO: 211665 - RNA, 22 nt, Artificial Sequence
  Synthetic
cagagaaguaugugggagcuca

SEQ ID NO: 211666 - RNA, 23 nt, Artificial Sequence
  Synthetic
ucagagaaguaugugggagcuca

SEQ ID NO: 211667 - RNA, 24 nt, Artificial Sequence
  Synthetic
uucagagaaguaugugggagcuca

SEQ ID NO: 211668 - RNA, 18 nt, Artificial Sequence
  Synthetic
cacagaaaacauagcuca

SEQ ID NO: 211669 - RNA, 19 nt, Artificial Sequence
  Synthetic
ucacagaaaacauagcuca

SEQ ID NO: 211670 - RNA, 20 nt, Artificial Sequence
  Synthetic
cucacagaaaacauagcuca

SEQ ID NO: 211671 - RNA, 21 nt, Artificial Sequence
  Synthetic
gcucacagaaaacauagcuca

SEQ ID NO: 211672 - RNA, 22 nt, Artificial Sequence
  Synthetic
agcucacagaaaacauagcuca

SEQ ID NO: 211673 - RNA, 23 nt, Artificial Sequence
  Synthetic
gagcucacagaaaacauagcuca

SEQ ID NO: 211674 - RNA, 24 nt, Artificial Sequence
  Synthetic
ggagcucacagaaaacauagcuca

SEQ ID NO: 211675 - RNA, 18 nt, Artificial Sequence
  Synthetic
uggcacaaucauagcuca

SEQ ID NO: 211676 - RNA, 19 nt, Artificial Sequence
  Synthetic
guggcacaaucauagcuca

SEQ ID NO: 211677 - RNA, 20 nt, Artificial Sequence
  Synthetic
aguggcacaaucauagcuca

SEQ ID NO: 211678 - RNA, 21 nt, Artificial Sequence
  Synthetic
caguggcacaaucauagcuca

SEQ ID NO: 211679 - RNA, 22 nt, Artificial Sequence
  Synthetic
gcaguggcacaaucauagcuca

SEQ ID NO: 211680 - RNA, 23 nt, Artificial Sequence
  Synthetic
ugcaguggcacaaucauagcuca

SEQ ID NO: 211681 - RNA, 24 nt, Artificial Sequence
  Synthetic
gugcaguggcacaaucauagcuca

SEQ ID NO: 211682 - RNA, 18 nt, Artificial Sequence
  Synthetic
guaacuuacucacgcuca

SEQ ID NO: 211683 - RNA, 19 nt, Artificial Sequence
  Synthetic
gguaacuuacucacgcuca

SEQ ID NO: 211684 - RNA, 20 nt, Artificial Sequence
  Synthetic
ggguaacuuacucacgcuca

SEQ ID NO: 211685 - RNA, 21 nt, Artificial Sequence
  Synthetic
aggguaacuuacucacgcuca

SEQ ID NO: 211686 - RNA, 22 nt, Artificial Sequence
  Synthetic
uaggguaacuuacucacgcuca

SEQ ID NO: 211687 - RNA, 23 nt, Artificial Sequence
  Synthetic
cuaggguaacuuacucacgcuca

SEQ ID NO: 211688 - RNA, 24 nt, Artificial Sequence
  Synthetic
gcuaggguaacuuacucacgcuca

SEQ ID NO: 211689 - RNA, 18 nt, Artificial Sequence
  Synthetic
ucuagcagcaaaggcuca

SEQ ID NO: 211690 - RNA, 19 nt, Artificial Sequence
  Synthetic
uucuagcagcaaaggcuca

SEQ ID NO: 211691 - RNA, 20 nt, Artificial Sequence
  Synthetic
cuucuagcagcaaaggcuca

SEQ ID NO: 211692 - RNA, 21 nt, Artificial Sequence
  Synthetic
acuucuagcagcaaaggcuca

SEQ ID NO: 211693 - RNA, 22 nt, Artificial Sequence
  Synthetic
gacuucuagcagcaaaggcuca

SEQ ID NO: 211694 - RNA, 23 nt, Artificial Sequence
  Synthetic
ugacuucuagcagcaaaggcuca

SEQ ID NO: 211695 - RNA, 24 nt, Artificial Sequence
  Synthetic
uugacuucuagcagcaaaggcuca

SEQ ID NO: 211696 - RNA, 18 nt, Artificial Sequence
  Synthetic
auuuuguacguaggcuca

SEQ ID NO: 211697 - RNA, 19 nt, Artificial Sequence
  Synthetic
cauuuuguacguaggcuca

SEQ ID NO: 211698 - RNA, 20 nt, Artificial Sequence
  Synthetic
ucauuuuguacguaggcuca

SEQ ID NO: 211699 - RNA, 21 nt, Artificial Sequence
  Synthetic
gucauuuuguacguaggcuca

SEQ ID NO: 211700 - RNA, 22 nt, Artificial Sequence
  Synthetic
ggucauuuuguacguaggcuca

SEQ ID NO: 211701 - RNA, 23 nt, Artificial Sequence
  Synthetic
gggucauuuuguacguaggcuca

SEQ ID NO: 211702 - RNA, 24 nt, Artificial Sequence
  Synthetic
cgggucauuuuguacguaggcuca

SEQ ID NO: 211703 - RNA, 18 nt, Artificial Sequence
  Synthetic
ugagaaaacuuaggcuca

SEQ ID NO: 211704 - RNA, 19 nt, Artificial Sequence
  Synthetic
cugagaaaacuuaggcuca

SEQ ID NO: 211705 - RNA, 20 nt, Artificial Sequence
  Synthetic
ucugagaaaacuuaggcuca

SEQ ID NO: 211706 - RNA, 21 nt, Artificial Sequence
  Synthetic
aucugagaaaacuuaggcuca

SEQ ID NO: 211707 - RNA, 22 nt, Artificial Sequence
  Synthetic
caucugagaaaacuuaggcuca

SEQ ID NO: 211708 - RNA, 23 nt, Artificial Sequence
  Synthetic
ucaucugagaaaacuuaggcuca

SEQ ID NO: 211709 - RNA, 24 nt, Artificial Sequence
  Synthetic
uucaucugagaaaacuuaggcuca

SEQ ID NO: 211710 - RNA, 18 nt, Artificial Sequence
  Synthetic
guggucucagugggcuca

SEQ ID NO: 211711 - RNA, 19 nt, Artificial Sequence
  Synthetic
cguggucucagugggcuca

SEQ ID NO: 211712 - RNA, 20 nt, Artificial Sequence
  Synthetic
gcguggucucagugggcuca

SEQ ID NO: 211713 - RNA, 21 nt, Artificial Sequence
  Synthetic
cgcguggucucagugggcuca

SEQ ID NO: 211714 - RNA, 22 nt, Artificial Sequence
  Synthetic
ccgcguggucucagugggcuca

SEQ ID NO: 211715 - RNA, 23 nt, Artificial Sequence
  Synthetic
cccgcguggucucagugggcuca

SEQ ID NO: 211716 - RNA, 24 nt, Artificial Sequence
  Synthetic
gcccgcguggucucagugggcuca

SEQ ID NO: 211717 - RNA, 18 nt, Artificial Sequence
  Synthetic
auuguacuuccuggcuca

SEQ ID NO: 211718 - RNA, 19 nt, Artificial Sequence
  Synthetic
aauuguacuuccuggcuca

SEQ ID NO: 211719 - RNA, 20 nt, Artificial Sequence
  Synthetic
aaauuguacuuccuggcuca

SEQ ID NO: 211720 - RNA, 21 nt, Artificial Sequence
  Synthetic
caaauuguacuuccuggcuca

SEQ ID NO: 211721 - RNA, 22 nt, Artificial Sequence
  Synthetic
acaaauuguacuuccuggcuca

SEQ ID NO: 211722 - RNA, 23 nt, Artificial Sequence
  Synthetic
uacaaauuguacuuccuggcuca

SEQ ID NO: 211723 - RNA, 24 nt, Artificial Sequence
  Synthetic
auacaaauuguacuuccuggcuca

SEQ ID NO: 211724 - RNA, 18 nt, Artificial Sequence
  Synthetic
cauaccagcuguggcuca

SEQ ID NO: 211725 - RNA, 19 nt, Artificial Sequence
  Synthetic
gcauaccagcuguggcuca

SEQ ID NO: 211726 - RNA, 20 nt, Artificial Sequence
  Synthetic
ugcauaccagcuguggcuca

SEQ ID NO: 211727 - RNA, 21 nt, Artificial Sequence
  Synthetic
cugcauaccagcuguggcuca

SEQ ID NO: 211728 - RNA, 22 nt, Artificial Sequence
  Synthetic
ccugcauaccagcuguggcuca

SEQ ID NO: 211729 - RNA, 23 nt, Artificial Sequence
  Synthetic
cccugcauaccagcuguggcuca

SEQ ID NO: 211730 - RNA, 24 nt, Artificial Sequence
  Synthetic
gcccugcauaccagcuguggcuca

SEQ ID NO: 211731 - RNA, 18 nt, Artificial Sequence
  Synthetic
aauaaccaaaaaugcuca

SEQ ID NO: 211732 - RNA, 19 nt, Artificial Sequence
  Synthetic
aaauaaccaaaaaugcuca

SEQ ID NO: 211733 - RNA, 20 nt, Artificial Sequence
  Synthetic
aaaauaaccaaaaaugcuca

SEQ ID NO: 211734 - RNA, 21 nt, Artificial Sequence
  Synthetic
aaaaauaaccaaaaaugcuca

SEQ ID NO: 211735 - RNA, 22 nt, Artificial Sequence
  Synthetic
caaaaauaaccaaaaaugcuca

SEQ ID NO: 211736 - RNA, 23 nt, Artificial Sequence
  Synthetic
gcaaaaauaaccaaaaaugcuca

SEQ ID NO: 211737 - RNA, 24 nt, Artificial Sequence
  Synthetic
agcaaaaauaaccaaaaaugcuca

SEQ ID NO: 211738 - RNA, 18 nt, Artificial Sequence
  Synthetic
uaagauuuacaaugcuca

SEQ ID NO: 211739 - RNA, 19 nt, Artificial Sequence
  Synthetic
cuaagauuuacaaugcuca

SEQ ID NO: 211740 - RNA, 20 nt, Artificial Sequence
  Synthetic
ucuaagauuuacaaugcuca

SEQ ID NO: 211741 - RNA, 21 nt, Artificial Sequence
  Synthetic
gucuaagauuuacaaugcuca

SEQ ID NO: 211742 - RNA, 22 nt, Artificial Sequence
  Synthetic
agucuaagauuuacaaugcuca

SEQ ID NO: 211743 - RNA, 23 nt, Artificial Sequence
  Synthetic
cagucuaagauuuacaaugcuca

SEQ ID NO: 211744 - RNA, 24 nt, Artificial Sequence
  Synthetic
ucagucuaagauuuacaaugcuca

SEQ ID NO: 211745 - RNA, 18 nt, Artificial Sequence
  Synthetic
gccagaagaagaugcuca

SEQ ID NO: 211746 - RNA, 19 nt, Artificial Sequence
  Synthetic
agccagaagaagaugcuca

SEQ ID NO: 211747 - RNA, 20 nt, Artificial Sequence
  Synthetic
aagccagaagaagaugcuca

SEQ ID NO: 211748 - RNA, 21 nt, Artificial Sequence
  Synthetic
gaagccagaagaagaugcuca

SEQ ID NO: 211749 - RNA, 22 nt, Artificial Sequence
  Synthetic
agaagccagaagaagaugcuca

SEQ ID NO: 211750 - RNA, 23 nt, Artificial Sequence
  Synthetic
uagaagccagaagaagaugcuca

SEQ ID NO: 211751 - RNA, 24 nt, Artificial Sequence
  Synthetic
auagaagccagaagaagaugcuca

SEQ ID NO: 211752 - RNA, 18 nt, Artificial Sequence
  Synthetic
acuacaaaccacugcuca

SEQ ID NO: 211753 - RNA, 19 nt, Artificial Sequence
  Synthetic
aacuacaaaccacugcuca

SEQ ID NO: 211754 - RNA, 20 nt, Artificial Sequence
  Synthetic
gaacuacaaaccacugcuca

SEQ ID NO: 211755 - RNA, 18 nt, Artificial Sequence
  Synthetic
guuuuaauggccugcuca

SEQ ID NO: 211756 - RNA, 19 nt, Artificial Sequence
  Synthetic
aguuuuaauggccugcuca

SEQ ID NO: 211757 - RNA, 20 nt, Artificial Sequence
  Synthetic
uaguuuuaauggccugcuca

SEQ ID NO: 211758 - RNA, 21 nt, Artificial Sequence
  Synthetic
auaguuuuaauggccugcuca

SEQ ID NO: 211759 - RNA, 22 nt, Artificial Sequence
  Synthetic
gauaguuuuaauggccugcuca

SEQ ID NO: 211760 - RNA, 23 nt, Artificial Sequence
  Synthetic
agauaguuuuaauggccugcuca

SEQ ID NO: 211761 - RNA, 24 nt, Artificial Sequence
  Synthetic
cagauaguuuuaauggccugcuca

SEQ ID NO: 211762 - RNA, 18 nt, Artificial Sequence
  Synthetic
cuggcugugagcugcuca

SEQ ID NO: 211763 - RNA, 19 nt, Artificial Sequence
  Synthetic
gcuggcugugagcugcuca

SEQ ID NO: 211764 - RNA, 20 nt, Artificial Sequence
  Synthetic
ggcuggcugugagcugcuca

SEQ ID NO: 211765 - RNA, 21 nt, Artificial Sequence
  Synthetic
uggcuggcugugagcugcuca

SEQ ID NO: 211766 - RNA, 22 nt, Artificial Sequence
  Synthetic
cuggcuggcugugagcugcuca

SEQ ID NO: 211767 - RNA, 23 nt, Artificial Sequence
  Synthetic
gcuggcuggcugugagcugcuca

SEQ ID NO: 211768 - RNA, 24 nt, Artificial Sequence
  Synthetic
agcuggcuggcugugagcugcuca

SEQ ID NO: 211769 - RNA, 18 nt, Artificial Sequence
  Synthetic
aauccuagccucugcuca

SEQ ID NO: 211770 - RNA, 19 nt, Artificial Sequence
  Synthetic
aaauccuagccucugcuca

SEQ ID NO: 211771 - RNA, 20 nt, Artificial Sequence
  Synthetic
uaaauccuagccucugcuca

SEQ ID NO: 211772 - RNA, 21 nt, Artificial Sequence
  Synthetic
auaaauccuagccucugcuca

SEQ ID NO: 211773 - RNA, 22 nt, Artificial Sequence
  Synthetic
aauaaauccuagccucugcuca

SEQ ID NO: 211774 - RNA, 23 nt, Artificial Sequence
  Synthetic
uaauaaauccuagccucugcuca

SEQ ID NO: 211775 - RNA, 24 nt, Artificial Sequence
  Synthetic
auaauaaauccuagccucugcuca

SEQ ID NO: 211776 - RNA, 18 nt, Artificial Sequence
  Synthetic
gcucuacagaagugcuca

SEQ ID NO: 211777 - RNA, 19 nt, Artificial Sequence
  Synthetic
ugcucuacagaagugcuca

SEQ ID NO: 211778 - RNA, 20 nt, Artificial Sequence
  Synthetic
augcucuacagaagugcuca

SEQ ID NO: 211779 - RNA, 21 nt, Artificial Sequence
  Synthetic
gaugcucuacagaagugcuca

SEQ ID NO: 211780 - RNA, 22 nt, Artificial Sequence
  Synthetic
ugaugcucuacagaagugcuca

SEQ ID NO: 211781 - RNA, 23 nt, Artificial Sequence
  Synthetic
uugaugcucuacagaagugcuca

SEQ ID NO: 211782 - RNA, 24 nt, Artificial Sequence
  Synthetic
auugaugcucuacagaagugcuca

SEQ ID NO: 211783 - RNA, 18 nt, Artificial Sequence
  Synthetic
gcacauagugagugcuca

SEQ ID NO: 211784 - RNA, 19 nt, Artificial Sequence
  Synthetic
cgcacauagugagugcuca

SEQ ID NO: 211785 - RNA, 20 nt, Artificial Sequence
  Synthetic
ucgcacauagugagugcuca

SEQ ID NO: 211786 - RNA, 21 nt, Artificial Sequence
  Synthetic
cucgcacauagugagugcuca

SEQ ID NO: 211787 - RNA, 22 nt, Artificial Sequence
  Synthetic
acucgcacauagugagugcuca

SEQ ID NO: 211788 - RNA, 23 nt, Artificial Sequence
  Synthetic
aacucgcacauagugagugcuca

SEQ ID NO: 211789 - RNA, 24 nt, Artificial Sequence
  Synthetic
uaacucgcacauagugagugcuca

SEQ ID NO: 211790 - RNA, 18 nt, Artificial Sequence
  Synthetic
aaggagaaacuuugcuca

SEQ ID NO: 211791 - RNA, 19 nt, Artificial Sequence
  Synthetic
caaggagaaacuuugcuca

SEQ ID NO: 211792 - RNA, 20 nt, Artificial Sequence
  Synthetic
ucaaggagaaacuuugcuca

SEQ ID NO: 211793 - RNA, 21 nt, Artificial Sequence
  Synthetic
gucaaggagaaacuuugcuca

SEQ ID NO: 211794 - RNA, 22 nt, Artificial Sequence
  Synthetic
ggucaaggagaaacuuugcuca

SEQ ID NO: 211795 - RNA, 23 nt, Artificial Sequence
  Synthetic
cggucaaggagaaacuuugcuca

SEQ ID NO: 211796 - RNA, 24 nt, Artificial Sequence
  Synthetic
ucggucaaggagaaacuuugcuca

SEQ ID NO: 211797 - RNA, 18 nt, Artificial Sequence
  Synthetic
cucaauaaauuuugcuca

SEQ ID NO: 211798 - RNA, 19 nt, Artificial Sequence
  Synthetic
acucaauaaauuuugcuca

SEQ ID NO: 211799 - RNA, 20 nt, Artificial Sequence
  Synthetic
aacucaauaaauuuugcuca

SEQ ID NO: 211800 - RNA, 21 nt, Artificial Sequence
  Synthetic
gaacucaauaaauuuugcuca

SEQ ID NO: 211801 - RNA, 22 nt, Artificial Sequence
  Synthetic
agaacucaauaaauuuugcuca

SEQ ID NO: 211802 - RNA, 23 nt, Artificial Sequence
  Synthetic
aagaacucaauaaauuuugcuca

SEQ ID NO: 211803 - RNA, 24 nt, Artificial Sequence
  Synthetic
gaagaacucaauaaauuuugcuca

SEQ ID NO: 211804 - RNA, 18 nt, Artificial Sequence
  Synthetic
uuagagccuuuuugcuca

SEQ ID NO: 211805 - RNA, 19 nt, Artificial Sequence
  Synthetic
guuagagccuuuuugcuca

SEQ ID NO: 211806 - RNA, 20 nt, Artificial Sequence
  Synthetic
uguuagagccuuuuugcuca

SEQ ID NO: 211807 - RNA, 21 nt, Artificial Sequence
  Synthetic
uuguuagagccuuuuugcuca

SEQ ID NO: 211808 - RNA, 22 nt, Artificial Sequence
  Synthetic
cuuguuagagccuuuuugcuca

SEQ ID NO: 211809 - RNA, 23 nt, Artificial Sequence
  Synthetic
acuuguuagagccuuuuugcuca

SEQ ID NO: 211810 - RNA, 24 nt, Artificial Sequence
  Synthetic
gacuuguuagagccuuuuugcuca

SEQ ID NO: 211811 - RNA, 18 nt, Artificial Sequence
  Synthetic
uuuuccuucaaaaucuca

SEQ ID NO: 211812 - RNA, 19 nt, Artificial Sequence
  Synthetic
cuuuuccuucaaaaucuca

SEQ ID NO: 211813 - RNA, 20 nt, Artificial Sequence
  Synthetic
acuuuuccuucaaaaucuca

SEQ ID NO: 211814 - RNA, 21 nt, Artificial Sequence
  Synthetic
uacuuuuccuucaaaaucuca

SEQ ID NO: 211815 - RNA, 22 nt, Artificial Sequence
  Synthetic
uuacuuuuccuucaaaaucuca

SEQ ID NO: 211816 - RNA, 23 nt, Artificial Sequence
  Synthetic
uuuacuuuuccuucaaaaucuca

SEQ ID NO: 211817 - RNA, 24 nt, Artificial Sequence
  Synthetic
uuuuacuuuuccuucaaaaucuca

SEQ ID NO: 211818 - RNA, 18 nt, Artificial Sequence
  Synthetic
auuugaacagaaaucuca

SEQ ID NO: 211819 - RNA, 19 nt, Artificial Sequence
  Synthetic
cauuugaacagaaaucuca

SEQ ID NO: 211820 - RNA, 20 nt, Artificial Sequence
  Synthetic
acauuugaacagaaaucuca

SEQ ID NO: 211821 - RNA, 21 nt, Artificial Sequence
  Synthetic
gacauuugaacagaaaucuca

SEQ ID NO: 211822 - RNA, 22 nt, Artificial Sequence
  Synthetic
ugacauuugaacagaaaucuca

SEQ ID NO: 211823 - RNA, 23 nt, Artificial Sequence
  Synthetic
gugacauuugaacagaaaucuca

SEQ ID NO: 211824 - RNA, 24 nt, Artificial Sequence
  Synthetic
ggugacauuugaacagaaaucuca

SEQ ID NO: 211825 - RNA, 18 nt, Artificial Sequence
  Synthetic
cgaauaaugggaaucuca

SEQ ID NO: 211826 - RNA, 19 nt, Artificial Sequence
  Synthetic
ccgaauaaugggaaucuca

SEQ ID NO: 211827 - RNA, 20 nt, Artificial Sequence
  Synthetic
accgaauaaugggaaucuca

SEQ ID NO: 211828 - RNA, 21 nt, Artificial Sequence
  Synthetic
uaccgaauaaugggaaucuca

SEQ ID NO: 211829 - RNA, 22 nt, Artificial Sequence
  Synthetic
guaccgaauaaugggaaucuca

SEQ ID NO: 211830 - RNA, 23 nt, Artificial Sequence
  Synthetic
aguaccgaauaaugggaaucuca

SEQ ID NO: 211831 - RNA, 24 nt, Artificial Sequence
  Synthetic
caguaccgaauaaugggaaucuca

SEQ ID NO: 211832 - RNA, 18 nt, Artificial Sequence
  Synthetic
aauauuaauaccaucuca

SEQ ID NO: 211833 - RNA, 19 nt, Artificial Sequence
  Synthetic
caauauuaauaccaucuca

SEQ ID NO: 211834 - RNA, 20 nt, Artificial Sequence
  Synthetic
gcaauauuaauaccaucuca

SEQ ID NO: 211835 - RNA, 21 nt, Artificial Sequence
  Synthetic
ggcaauauuaauaccaucuca

SEQ ID NO: 211836 - RNA, 22 nt, Artificial Sequence
  Synthetic
uggcaauauuaauaccaucuca

SEQ ID NO: 211837 - RNA, 23 nt, Artificial Sequence
  Synthetic
uuggcaauauuaauaccaucuca

SEQ ID NO: 211838 - RNA, 24 nt, Artificial Sequence
  Synthetic
uuuggcaauauuaauaccaucuca

SEQ ID NO: 211839 - RNA, 18 nt, Artificial Sequence
  Synthetic
aguacccggcucaucuca

SEQ ID NO: 211840 - RNA, 19 nt, Artificial Sequence
  Synthetic
caguacccggcucaucuca

SEQ ID NO: 211841 - RNA, 20 nt, Artificial Sequence
  Synthetic
gcaguacccggcucaucuca

SEQ ID NO: 211842 - RNA, 21 nt, Artificial Sequence
  Synthetic
ugcaguacccggcucaucuca

SEQ ID NO: 211843 - RNA, 22 nt, Artificial Sequence
  Synthetic
cugcaguacccggcucaucuca

SEQ ID NO: 211844 - RNA, 23 nt, Artificial Sequence
  Synthetic
acugcaguacccggcucaucuca

SEQ ID NO: 211845 - RNA, 24 nt, Artificial Sequence
  Synthetic
aacugcaguacccggcucaucuca

SEQ ID NO: 211846 - RNA, 18 nt, Artificial Sequence
  Synthetic
guaaacagccagaucuca

SEQ ID NO: 211847 - RNA, 19 nt, Artificial Sequence
  Synthetic
uguaaacagccagaucuca

SEQ ID NO: 211848 - RNA, 20 nt, Artificial Sequence
  Synthetic
guguaaacagccagaucuca

SEQ ID NO: 211849 - RNA, 21 nt, Artificial Sequence
  Synthetic
cguguaaacagccagaucuca

SEQ ID NO: 211850 - RNA, 22 nt, Artificial Sequence
  Synthetic
acguguaaacagccagaucuca

SEQ ID NO: 211851 - RNA, 23 nt, Artificial Sequence
  Synthetic
cacguguaaacagccagaucuca

SEQ ID NO: 211852 - RNA, 24 nt, Artificial Sequence
  Synthetic
acacguguaaacagccagaucuca

SEQ ID NO: 211853 - RNA, 18 nt, Artificial Sequence
  Synthetic
gauuacaaauagaucuca

SEQ ID NO: 211854 - RNA, 19 nt, Artificial Sequence
  Synthetic
ugauuacaaauagaucuca

SEQ ID NO: 211855 - RNA, 20 nt, Artificial Sequence
  Synthetic
uugauuacaaauagaucuca

SEQ ID NO: 211856 - RNA, 21 nt, Artificial Sequence
  Synthetic
uuugauuacaaauagaucuca

SEQ ID NO: 211857 - RNA, 22 nt, Artificial Sequence
  Synthetic
auuugauuacaaauagaucuca

SEQ ID NO: 211858 - RNA, 23 nt, Artificial Sequence
  Synthetic
aauuugauuacaaauagaucuca

SEQ ID NO: 211859 - RNA, 24 nt, Artificial Sequence
  Synthetic
aaauuugauuacaaauagaucuca

SEQ ID NO: 211860 - RNA, 18 nt, Artificial Sequence
  Synthetic
gaauuccuguagaucuca

SEQ ID NO: 211861 - RNA, 19 nt, Artificial Sequence
  Synthetic
ugaauuccuguagaucuca

SEQ ID NO: 211862 - RNA, 20 nt, Artificial Sequence
  Synthetic
cugaauuccuguagaucuca

SEQ ID NO: 211863 - RNA, 21 nt, Artificial Sequence
  Synthetic
ccugaauuccuguagaucuca

SEQ ID NO: 211864 - RNA, 22 nt, Artificial Sequence
  Synthetic
cccugaauuccuguagaucuca

SEQ ID NO: 211865 - RNA, 23 nt, Artificial Sequence
  Synthetic
acccugaauuccuguagaucuca

SEQ ID NO: 211866 - RNA, 24 nt, Artificial Sequence
  Synthetic
gacccugaauuccuguagaucuca

SEQ ID NO: 211867 - RNA, 18 nt, Artificial Sequence
  Synthetic
cuaaaaacaucgaucuca

SEQ ID NO: 211868 - RNA, 19 nt, Artificial Sequence
  Synthetic
ucuaaaaacaucgaucuca

SEQ ID NO: 211869 - RNA, 20 nt, Artificial Sequence
  Synthetic
aucuaaaaacaucgaucuca

SEQ ID NO: 211870 - RNA, 21 nt, Artificial Sequence
  Synthetic
aaucuaaaaacaucgaucuca

SEQ ID NO: 211871 - RNA, 22 nt, Artificial Sequence
  Synthetic
caaucuaaaaacaucgaucuca

SEQ ID NO: 211872 - RNA, 23 nt, Artificial Sequence
  Synthetic
acaaucuaaaaacaucgaucuca

SEQ ID NO: 211873 - RNA, 24 nt, Artificial Sequence
  Synthetic
cacaaucuaaaaacaucgaucuca

SEQ ID NO: 211874 - RNA, 18 nt, Artificial Sequence
  Synthetic
aaauagaaaaggaucuca

SEQ ID NO: 211875 - RNA, 19 nt, Artificial Sequence
  Synthetic
caaauagaaaaggaucuca

SEQ ID NO: 211876 - RNA, 20 nt, Artificial Sequence
  Synthetic
ccaaauagaaaaggaucuca

SEQ ID NO: 211877 - RNA, 21 nt, Artificial Sequence
  Synthetic
accaaauagaaaaggaucuca

SEQ ID NO: 211878 - RNA, 22 nt, Artificial Sequence
  Synthetic
aaccaaauagaaaaggaucuca

SEQ ID NO: 211879 - RNA, 23 nt, Artificial Sequence
  Synthetic
gaaccaaauagaaaaggaucuca

SEQ ID NO: 211880 - RNA, 24 nt, Artificial Sequence
  Synthetic
ugaaccaaauagaaaaggaucuca

SEQ ID NO: 211881 - RNA, 18 nt, Artificial Sequence
  Synthetic
gaugagcuguguaucuca

SEQ ID NO: 211882 - RNA, 19 nt, Artificial Sequence
  Synthetic
agaugagcuguguaucuca

SEQ ID NO: 211883 - RNA, 20 nt, Artificial Sequence
  Synthetic
aagaugagcuguguaucuca

SEQ ID NO: 211884 - RNA, 21 nt, Artificial Sequence
  Synthetic
caagaugagcuguguaucuca

SEQ ID NO: 211885 - RNA, 22 nt, Artificial Sequence
  Synthetic
gcaagaugagcuguguaucuca

SEQ ID NO: 211886 - RNA, 23 nt, Artificial Sequence
  Synthetic
agcaagaugagcuguguaucuca

SEQ ID NO: 211887 - RNA, 24 nt, Artificial Sequence
  Synthetic
uagcaagaugagcuguguaucuca

SEQ ID NO: 211888 - RNA, 18 nt, Artificial Sequence
  Synthetic
cguaucuguuguaucuca

SEQ ID NO: 211889 - RNA, 19 nt, Artificial Sequence
  Synthetic
ucguaucuguuguaucuca

SEQ ID NO: 211890 - RNA, 20 nt, Artificial Sequence
  Synthetic
uucguaucuguuguaucuca

SEQ ID NO: 211891 - RNA, 21 nt, Artificial Sequence
  Synthetic
cuucguaucuguuguaucuca

SEQ ID NO: 211892 - RNA, 22 nt, Artificial Sequence
  Synthetic
acuucguaucuguuguaucuca

SEQ ID NO: 211893 - RNA, 23 nt, Artificial Sequence
  Synthetic
uacuucguaucuguuguaucuca

SEQ ID NO: 211894 - RNA, 24 nt, Artificial Sequence
  Synthetic
cuacuucguaucuguuguaucuca

SEQ ID NO: 211895 - RNA, 18 nt, Artificial Sequence
  Synthetic
caaagcacucuuaucuca

SEQ ID NO: 211896 - RNA, 19 nt, Artificial Sequence
  Synthetic
acaaagcacucuuaucuca

SEQ ID NO: 211897 - RNA, 20 nt, Artificial Sequence
  Synthetic
aacaaagcacucuuaucuca

SEQ ID NO: 211898 - RNA, 21 nt, Artificial Sequence
  Synthetic
aaacaaagcacucuuaucuca

SEQ ID NO: 211899 - RNA, 22 nt, Artificial Sequence
  Synthetic
uaaacaaagcacucuuaucuca

SEQ ID NO: 211900 - RNA, 23 nt, Artificial Sequence
  Synthetic
auaaacaaagcacucuuaucuca

SEQ ID NO: 211901 - RNA, 24 nt, Artificial Sequence
  Synthetic
cauaaacaaagcacucuuaucuca

SEQ ID NO: 211902 - RNA, 18 nt, Artificial Sequence
  Synthetic
aagucuugaccacucuca

SEQ ID NO: 211903 - RNA, 19 nt, Artificial Sequence
  Synthetic
aaagucuugaccacucuca

SEQ ID NO: 211904 - RNA, 20 nt, Artificial Sequence
  Synthetic
aaaagucuugaccacucuca

SEQ ID NO: 211905 - RNA, 21 nt, Artificial Sequence
  Synthetic
caaaagucuugaccacucuca

SEQ ID NO: 211906 - RNA, 22 nt, Artificial Sequence
  Synthetic
ucaaaagucuugaccacucuca

SEQ ID NO: 211907 - RNA, 23 nt, Artificial Sequence
  Synthetic
gucaaaagucuugaccacucuca

SEQ ID NO: 211908 - RNA, 24 nt, Artificial Sequence
  Synthetic
agucaaaagucuugaccacucuca

SEQ ID NO: 211909 - RNA, 18 nt, Artificial Sequence
  Synthetic
aaagaaguaucacucuca

SEQ ID NO: 211910 - RNA, 19 nt, Artificial Sequence
  Synthetic
aaaagaaguaucacucuca

SEQ ID NO: 211911 - RNA, 20 nt, Artificial Sequence
  Synthetic
aaaaagaaguaucacucuca

SEQ ID NO: 211912 - RNA, 21 nt, Artificial Sequence
  Synthetic
gaaaaagaaguaucacucuca

SEQ ID NO: 211913 - RNA, 22 nt, Artificial Sequence
  Synthetic
ggaaaaagaaguaucacucuca

SEQ ID NO: 211914 - RNA, 23 nt, Artificial Sequence
  Synthetic
gggaaaaagaaguaucacucuca

SEQ ID NO: 211915 - RNA, 24 nt, Artificial Sequence
  Synthetic
agggaaaaagaaguaucacucuca

SEQ ID NO: 211916 - RNA, 18 nt, Artificial Sequence
  Synthetic
agccucuuuucacucuca

SEQ ID NO: 211917 - RNA, 19 nt, Artificial Sequence
  Synthetic
cagccucuuuucacucuca

SEQ ID NO: 211918 - RNA, 20 nt, Artificial Sequence
  Synthetic
acagccucuuuucacucuca

SEQ ID NO: 211919 - RNA, 21 nt, Artificial Sequence
  Synthetic
gacagccucuuuucacucuca

SEQ ID NO: 211920 - RNA, 22 nt, Artificial Sequence
  Synthetic
ugacagccucuuuucacucuca

SEQ ID NO: 211921 - RNA, 23 nt, Artificial Sequence
  Synthetic
uugacagccucuuuucacucuca

SEQ ID NO: 211922 - RNA, 24 nt, Artificial Sequence
  Synthetic
cuugacagccucuuuucacucuca

SEQ ID NO: 211923 - RNA, 18 nt, Artificial Sequence
  Synthetic
ugcuggcuuugacucuca

SEQ ID NO: 211924 - RNA, 19 nt, Artificial Sequence
  Synthetic
augcuggcuuugacucuca

SEQ ID NO: 211925 - RNA, 20 nt, Artificial Sequence
  Synthetic
aaugcuggcuuugacucuca

SEQ ID NO: 211926 - RNA, 21 nt, Artificial Sequence
  Synthetic
uaaugcuggcuuugacucuca

SEQ ID NO: 211927 - RNA, 22 nt, Artificial Sequence
  Synthetic
uuaaugcuggcuuugacucuca

SEQ ID NO: 211928 - RNA, 23 nt, Artificial Sequence
  Synthetic
guuaaugcuggcuuugacucuca

SEQ ID NO: 211929 - RNA, 24 nt, Artificial Sequence
  Synthetic
uguuaaugcuggcuuugacucuca

SEQ ID NO: 211930 - RNA, 18 nt, Artificial Sequence
  Synthetic
uuaugggucuuacucuca

SEQ ID NO: 211931 - RNA, 19 nt, Artificial Sequence
  Synthetic
guuaugggucuuacucuca

SEQ ID NO: 211932 - RNA, 20 nt, Artificial Sequence
  Synthetic
aguuaugggucuuacucuca

SEQ ID NO: 211933 - RNA, 21 nt, Artificial Sequence
  Synthetic
uaguuaugggucuuacucuca

SEQ ID NO: 211934 - RNA, 22 nt, Artificial Sequence
  Synthetic
guaguuaugggucuuacucuca

SEQ ID NO: 211935 - RNA, 23 nt, Artificial Sequence
  Synthetic
gguaguuaugggucuuacucuca

SEQ ID NO: 211936 - RNA, 24 nt, Artificial Sequence
  Synthetic
agguaguuaugggucuuacucuca

SEQ ID NO: 211937 - RNA, 18 nt, Artificial Sequence
  Synthetic
ugucuucagcuccucuca

SEQ ID NO: 211938 - RNA, 19 nt, Artificial Sequence
  Synthetic
cugucuucagcuccucuca

SEQ ID NO: 211939 - RNA, 20 nt, Artificial Sequence
  Synthetic
ccugucuucagcuccucuca

SEQ ID NO: 211940 - RNA, 21 nt, Artificial Sequence
  Synthetic
gccugucuucagcuccucuca

SEQ ID NO: 211941 - RNA, 22 nt, Artificial Sequence
  Synthetic
cgccugucuucagcuccucuca

SEQ ID NO: 211942 - RNA, 23 nt, Artificial Sequence
  Synthetic
acgccugucuucagcuccucuca

SEQ ID NO: 211943 - RNA, 24 nt, Artificial Sequence
  Synthetic
cacgccugucuucagcuccucuca

SEQ ID NO: 211944 - RNA, 18 nt, Artificial Sequence
  Synthetic
uacuucaaagagcucuca

SEQ ID NO: 211945 - RNA, 19 nt, Artificial Sequence
  Synthetic
guacuucaaagagcucuca

SEQ ID NO: 211946 - RNA, 20 nt, Artificial Sequence
  Synthetic
uguacuucaaagagcucuca

SEQ ID NO: 211947 - RNA, 21 nt, Artificial Sequence
  Synthetic
cuguacuucaaagagcucuca

SEQ ID NO: 211948 - RNA, 22 nt, Artificial Sequence
  Synthetic
ccuguacuucaaagagcucuca

SEQ ID NO: 211949 - RNA, 23 nt, Artificial Sequence
  Synthetic
cccuguacuucaaagagcucuca

SEQ ID NO: 211950 - RNA, 24 nt, Artificial Sequence
  Synthetic
ucccuguacuucaaagagcucuca

SEQ ID NO: 211951 - RNA, 18 nt, Artificial Sequence
  Synthetic
gaacagccaaugcucuca

SEQ ID NO: 211952 - RNA, 19 nt, Artificial Sequence
  Synthetic
agaacagccaaugcucuca

SEQ ID NO: 211953 - RNA, 20 nt, Artificial Sequence
  Synthetic
aagaacagccaaugcucuca

SEQ ID NO: 211954 - RNA, 21 nt, Artificial Sequence
  Synthetic
aaagaacagccaaugcucuca

SEQ ID NO: 211955 - RNA, 22 nt, Artificial Sequence
  Synthetic
uaaagaacagccaaugcucuca

SEQ ID NO: 211956 - RNA, 23 nt, Artificial Sequence
  Synthetic
auaaagaacagccaaugcucuca

SEQ ID NO: 211957 - RNA, 24 nt, Artificial Sequence
  Synthetic
aauaaagaacagccaaugcucuca

SEQ ID NO: 211958 - RNA, 18 nt, Artificial Sequence
  Synthetic
uacaugaacagucucuca

SEQ ID NO: 211959 - RNA, 19 nt, Artificial Sequence
  Synthetic
auacaugaacagucucuca

SEQ ID NO: 211960 - RNA, 20 nt, Artificial Sequence
  Synthetic
gauacaugaacagucucuca

SEQ ID NO: 211961 - RNA, 21 nt, Artificial Sequence
  Synthetic
agauacaugaacagucucuca

SEQ ID NO: 211962 - RNA, 22 nt, Artificial Sequence
  Synthetic
gagauacaugaacagucucuca

SEQ ID NO: 211963 - RNA, 23 nt, Artificial Sequence
  Synthetic
ggagauacaugaacagucucuca

SEQ ID NO: 211964 - RNA, 24 nt, Artificial Sequence
  Synthetic
uggagauacaugaacagucucuca

SEQ ID NO: 211965 - RNA, 18 nt, Artificial Sequence
  Synthetic
agcuaccaucgucucuca

SEQ ID NO: 211966 - RNA, 19 nt, Artificial Sequence
  Synthetic
aagcuaccaucgucucuca

SEQ ID NO: 211967 - RNA, 20 nt, Artificial Sequence
  Synthetic
caagcuaccaucgucucuca

SEQ ID NO: 211968 - RNA, 21 nt, Artificial Sequence
  Synthetic
gcaagcuaccaucgucucuca

SEQ ID NO: 211969 - RNA, 22 nt, Artificial Sequence
  Synthetic
ugcaagcuaccaucgucucuca

SEQ ID NO: 211970 - RNA, 23 nt, Artificial Sequence
  Synthetic
gugcaagcuaccaucgucucuca

SEQ ID NO: 211971 - RNA, 24 nt, Artificial Sequence
  Synthetic
agugcaagcuaccaucgucucuca

SEQ ID NO: 211972 - RNA, 18 nt, Artificial Sequence
  Synthetic
ggauauuacauucucuca

SEQ ID NO: 211973 - RNA, 19 nt, Artificial Sequence
  Synthetic
uggauauuacauucucuca

SEQ ID NO: 211974 - RNA, 20 nt, Artificial Sequence
  Synthetic
auggauauuacauucucuca

SEQ ID NO: 211975 - RNA, 21 nt, Artificial Sequence
  Synthetic
cauggauauuacauucucuca

SEQ ID NO: 211976 - RNA, 22 nt, Artificial Sequence
  Synthetic
acauggauauuacauucucuca

SEQ ID NO: 211977 - RNA, 23 nt, Artificial Sequence
  Synthetic
gacauggauauuacauucucuca

SEQ ID NO: 211978 - RNA, 24 nt, Artificial Sequence
  Synthetic
cgacauggauauuacauucucuca

SEQ ID NO: 211979 - RNA, 18 nt, Artificial Sequence
  Synthetic
aauuagaaagcagucuca

SEQ ID NO: 211980 - RNA, 19 nt, Artificial Sequence
  Synthetic
uaauuagaaagcagucuca

SEQ ID NO: 211981 - RNA, 20 nt, Artificial Sequence
  Synthetic
cuaauuagaaagcagucuca

SEQ ID NO: 211982 - RNA, 21 nt, Artificial Sequence
  Synthetic
gcuaauuagaaagcagucuca

SEQ ID NO: 211983 - RNA, 22 nt, Artificial Sequence
  Synthetic
agcuaauuagaaagcagucuca

SEQ ID NO: 211984 - RNA, 23 nt, Artificial Sequence
  Synthetic
gagcuaauuagaaagcagucuca

SEQ ID NO: 211985 - RNA, 24 nt, Artificial Sequence
  Synthetic
cgagcuaauuagaaagcagucuca

SEQ ID NO: 211986 - RNA, 18 nt, Artificial Sequence
  Synthetic
aaaucacuuuuagucuca

SEQ ID NO: 211987 - RNA, 19 nt, Artificial Sequence
  Synthetic
uaaaucacuuuuagucuca

SEQ ID NO: 211988 - RNA, 20 nt, Artificial Sequence
  Synthetic
guaaaucacuuuuagucuca

SEQ ID NO: 211989 - RNA, 21 nt, Artificial Sequence
  Synthetic
uguaaaucacuuuuagucuca

SEQ ID NO: 211990 - RNA, 22 nt, Artificial Sequence
  Synthetic
auguaaaucacuuuuagucuca

SEQ ID NO: 211991 - RNA, 23 nt, Artificial Sequence
  Synthetic
cauguaaaucacuuuuagucuca

SEQ ID NO: 211992 - RNA, 24 nt, Artificial Sequence
  Synthetic
gcauguaaaucacuuuuagucuca

SEQ ID NO: 211993 - RNA, 18 nt, Artificial Sequence
  Synthetic
aaacacaucaucgucuca

SEQ ID NO: 211994 - RNA, 19 nt, Artificial Sequence
  Synthetic
aaaacacaucaucgucuca

SEQ ID NO: 211995 - RNA, 20 nt, Artificial Sequence
  Synthetic
caaaacacaucaucgucuca

SEQ ID NO: 211996 - RNA, 21 nt, Artificial Sequence
  Synthetic
acaaaacacaucaucgucuca

SEQ ID NO: 211997 - RNA, 22 nt, Artificial Sequence
  Synthetic
uacaaaacacaucaucgucuca

SEQ ID NO: 211998 - RNA, 23 nt, Artificial Sequence
  Synthetic
guacaaaacacaucaucgucuca

SEQ ID NO: 211999 - RNA, 24 nt, Artificial Sequence
  Synthetic
cguacaaaacacaucaucgucuca

SEQ ID NO: 212000 - RNA, 18 nt, Artificial Sequence
  Synthetic
uuggcccgcguggucuca

SEQ ID NO: 212001 - RNA, 19 nt, Artificial Sequence
  Synthetic
uuuggcccgcguggucuca

SEQ ID NO: 212002 - RNA, 20 nt, Artificial Sequence
  Synthetic
uuuuggcccgcguggucuca

SEQ ID NO: 212003 - RNA, 21 nt, Artificial Sequence
  Synthetic
cuuuuggcccgcguggucuca

SEQ ID NO: 212004 - RNA, 22 nt, Artificial Sequence
  Synthetic
gcuuuuggcccgcguggucuca

SEQ ID NO: 212005 - RNA, 23 nt, Artificial Sequence
  Synthetic
agcuuuuggcccgcguggucuca

SEQ ID NO: 212006 - RNA, 24 nt, Artificial Sequence
  Synthetic
cagcuuuuggcccgcguggucuca

SEQ ID NO: 212007 - RNA, 18 nt, Artificial Sequence
  Synthetic
aacugugacccauucuca

SEQ ID NO: 212008 - RNA, 19 nt, Artificial Sequence
  Synthetic
caacugugacccauucuca

SEQ ID NO: 212009 - RNA, 20 nt, Artificial Sequence
  Synthetic
ucaacugugacccauucuca

SEQ ID NO: 212010 - RNA, 21 nt, Artificial Sequence
  Synthetic
uucaacugugacccauucuca

SEQ ID NO: 212011 - RNA, 22 nt, Artificial Sequence
  Synthetic
guucaacugugacccauucuca

SEQ ID NO: 212012 - RNA, 23 nt, Artificial Sequence
  Synthetic
cguucaacugugacccauucuca

SEQ ID NO: 212013 - RNA, 24 nt, Artificial Sequence
  Synthetic
acguucaacugugacccauucuca

SEQ ID NO: 212014 - RNA, 18 nt, Artificial Sequence
  Synthetic
acauuucuacuauucuca

SEQ ID NO: 212015 - RNA, 19 nt, Artificial Sequence
  Synthetic
aacauuucuacuauucuca

SEQ ID NO: 212016 - RNA, 20 nt, Artificial Sequence
  Synthetic
aaacauuucuacuauucuca

SEQ ID NO: 212017 - RNA, 21 nt, Artificial Sequence
  Synthetic
aaaacauuucuacuauucuca

SEQ ID NO: 212018 - RNA, 22 nt, Artificial Sequence
  Synthetic
caaaacauuucuacuauucuca

SEQ ID NO: 212019 - RNA, 23 nt, Artificial Sequence
  Synthetic
ucaaaacauuucuacuauucuca

SEQ ID NO: 212020 - RNA, 24 nt, Artificial Sequence
  Synthetic
cucaaaacauuucuacuauucuca

SEQ ID NO: 212021 - RNA, 18 nt, Artificial Sequence
  Synthetic
gcuucuuaauuauucuca

SEQ ID NO: 212022 - RNA, 19 nt, Artificial Sequence
  Synthetic
ggcuucuuaauuauucuca

SEQ ID NO: 212023 - RNA, 20 nt, Artificial Sequence
  Synthetic
aggcuucuuaauuauucuca

SEQ ID NO: 212024 - RNA, 21 nt, Artificial Sequence
  Synthetic
uaggcuucuuaauuauucuca

SEQ ID NO: 212025 - RNA, 22 nt, Artificial Sequence
  Synthetic
guaggcuucuuaauuauucuca

SEQ ID NO: 212026 - RNA, 23 nt, Artificial Sequence
  Synthetic
gguaggcuucuuaauuauucuca

SEQ ID NO: 212027 - RNA, 24 nt, Artificial Sequence
  Synthetic
agguaggcuucuuaauuauucuca

SEQ ID NO: 212028 - RNA, 18 nt, Artificial Sequence
  Synthetic
gacucuucuuuauucuca

SEQ ID NO: 212029 - RNA, 19 nt, Artificial Sequence
  Synthetic
ggacucuucuuuauucuca

SEQ ID NO: 212030 - RNA, 20 nt, Artificial Sequence
  Synthetic
aggacucuucuuuauucuca

SEQ ID NO: 212031 - RNA, 21 nt, Artificial Sequence
  Synthetic
caggacucuucuuuauucuca

SEQ ID NO: 212032 - RNA, 22 nt, Artificial Sequence
  Synthetic
ccaggacucuucuuuauucuca

SEQ ID NO: 212033 - RNA, 23 nt, Artificial Sequence
  Synthetic
cccaggacucuucuuuauucuca

SEQ ID NO: 212034 - RNA, 24 nt, Artificial Sequence
  Synthetic
ucccaggacucuucuuuauucuca

SEQ ID NO: 212035 - RNA, 18 nt, Artificial Sequence
  Synthetic
agauggaaucacuucuca

SEQ ID NO: 212036 - RNA, 19 nt, Artificial Sequence
  Synthetic
aagauggaaucacuucuca

SEQ ID NO: 212037 - RNA, 20 nt, Artificial Sequence
  Synthetic
aaagauggaaucacuucuca

SEQ ID NO: 212038 - RNA, 21 nt, Artificial Sequence
  Synthetic
aaaagauggaaucacuucuca

SEQ ID NO: 212039 - RNA, 22 nt, Artificial Sequence
  Synthetic
uaaaagauggaaucacuucuca

SEQ ID NO: 212040 - RNA, 23 nt, Artificial Sequence
  Synthetic
guaaaagauggaaucacuucuca

SEQ ID NO: 212041 - RNA, 24 nt, Artificial Sequence
  Synthetic
gguaaaagauggaaucacuucuca

SEQ ID NO: 212042 - RNA, 18 nt, Artificial Sequence
  Synthetic
gaagguguucacuucuca

SEQ ID NO: 212043 - RNA, 19 nt, Artificial Sequence
  Synthetic
agaagguguucacuucuca

SEQ ID NO: 212044 - RNA, 20 nt, Artificial Sequence
  Synthetic
cagaagguguucacuucuca

SEQ ID NO: 212045 - RNA, 21 nt, Artificial Sequence
  Synthetic
acagaagguguucacuucuca

SEQ ID NO: 212046 - RNA, 22 nt, Artificial Sequence
  Synthetic
gacagaagguguucacuucuca

SEQ ID NO: 212047 - RNA, 23 nt, Artificial Sequence
  Synthetic
ugacagaagguguucacuucuca

SEQ ID NO: 212048 - RNA, 24 nt, Artificial Sequence
  Synthetic
gugacagaagguguucacuucuca

SEQ ID NO: 212049 - RNA, 18 nt, Artificial Sequence
  Synthetic
gguaguagccccuucuca

SEQ ID NO: 212050 - RNA, 19 nt, Artificial Sequence
  Synthetic
ggguaguagccccuucuca

SEQ ID NO: 212051 - RNA, 20 nt, Artificial Sequence
  Synthetic
uggguaguagccccuucuca

SEQ ID NO: 212052 - RNA, 21 nt, Artificial Sequence
  Synthetic
cuggguaguagccccuucuca

SEQ ID NO: 212053 - RNA, 22 nt, Artificial Sequence
  Synthetic
ucuggguaguagccccuucuca

SEQ ID NO: 212054 - RNA, 23 nt, Artificial Sequence
  Synthetic
aucuggguaguagccccuucuca

SEQ ID NO: 212055 - RNA, 24 nt, Artificial Sequence
  Synthetic
caucuggguaguagccccuucuca

SEQ ID NO: 212056 - RNA, 18 nt, Artificial Sequence
  Synthetic
gagaaaguuuccuucuca

SEQ ID NO: 212057 - RNA, 19 nt, Artificial Sequence
  Synthetic
ugagaaaguuuccuucuca

SEQ ID NO: 212058 - RNA, 20 nt, Artificial Sequence
  Synthetic
cugagaaaguuuccuucuca

SEQ ID NO: 212059 - RNA, 21 nt, Artificial Sequence
  Synthetic
ccugagaaaguuuccuucuca

SEQ ID NO: 212060 - RNA, 22 nt, Artificial Sequence
  Synthetic
accugagaaaguuuccuucuca

SEQ ID NO: 212061 - RNA, 23 nt, Artificial Sequence
  Synthetic
gaccugagaaaguuuccuucuca

SEQ ID NO: 212062 - RNA, 24 nt, Artificial Sequence
  Synthetic
agaccugagaaaguuuccuucuca

SEQ ID NO: 212063 - RNA, 18 nt, Artificial Sequence
  Synthetic
ucaggagaaagcuucuca

SEQ ID NO: 212064 - RNA, 19 nt, Artificial Sequence
  Synthetic
cucaggagaaagcuucuca

SEQ ID NO: 212065 - RNA, 20 nt, Artificial Sequence
  Synthetic
ccucaggagaaagcuucuca

SEQ ID NO: 212066 - RNA, 21 nt, Artificial Sequence
  Synthetic
gccucaggagaaagcuucuca

SEQ ID NO: 212067 - RNA, 22 nt, Artificial Sequence
  Synthetic
ugccucaggagaaagcuucuca

SEQ ID NO: 212068 - RNA, 23 nt, Artificial Sequence
  Synthetic
gugccucaggagaaagcuucuca

SEQ ID NO: 212069 - RNA, 24 nt, Artificial Sequence
  Synthetic
ggugccucaggagaaagcuucuca

SEQ ID NO: 212070 - RNA, 18 nt, Artificial Sequence
  Synthetic
ggaaauaucugcuucuca

SEQ ID NO: 212071 - RNA, 19 nt, Artificial Sequence
  Synthetic
gggaaauaucugcuucuca

SEQ ID NO: 212072 - RNA, 20 nt, Artificial Sequence
  Synthetic
ugggaaauaucugcuucuca

SEQ ID NO: 212073 - RNA, 21 nt, Artificial Sequence
  Synthetic
gugggaaauaucugcuucuca

SEQ ID NO: 212074 - RNA, 22 nt, Artificial Sequence
  Synthetic
agugggaaauaucugcuucuca

SEQ ID NO: 212075 - RNA, 23 nt, Artificial Sequence
  Synthetic
uagugggaaauaucugcuucuca

SEQ ID NO: 212076 - RNA, 24 nt, Artificial Sequence
  Synthetic
uuagugggaaauaucugcuucuca

SEQ ID NO: 212077 - RNA, 18 nt, Artificial Sequence
  Synthetic
auagaacaugucuucuca

SEQ ID NO: 212078 - RNA, 19 nt, Artificial Sequence
  Synthetic
uauagaacaugucuucuca

SEQ ID NO: 212079 - RNA, 20 nt, Artificial Sequence
  Synthetic
cuauagaacaugucuucuca

SEQ ID NO: 212080 - RNA, 21 nt, Artificial Sequence
  Synthetic
ccuauagaacaugucuucuca

SEQ ID NO: 212081 - RNA, 22 nt, Artificial Sequence
  Synthetic
uccuauagaacaugucuucuca

SEQ ID NO: 212082 - RNA, 23 nt, Artificial Sequence
  Synthetic
cuccuauagaacaugucuucuca

SEQ ID NO: 212083 - RNA, 24 nt, Artificial Sequence
  Synthetic
ucuccuauagaacaugucuucuca

SEQ ID NO: 212084 - RNA, 18 nt, Artificial Sequence
  Synthetic
gauuacucacaguucuca

SEQ ID NO: 212085 - RNA, 19 nt, Artificial Sequence
  Synthetic
ugauuacucacaguucuca

SEQ ID NO: 212086 - RNA, 20 nt, Artificial Sequence
  Synthetic
uugauuacucacaguucuca

SEQ ID NO: 212087 - RNA, 21 nt, Artificial Sequence
  Synthetic
uuugauuacucacaguucuca

SEQ ID NO: 212088 - RNA, 22 nt, Artificial Sequence
  Synthetic
guuugauuacucacaguucuca

SEQ ID NO: 212089 - RNA, 23 nt, Artificial Sequence
  Synthetic
aguuugauuacucacaguucuca

SEQ ID NO: 212090 - RNA, 24 nt, Artificial Sequence
  Synthetic
aaguuugauuacucacaguucuca

SEQ ID NO: 212091 - RNA, 18 nt, Artificial Sequence
  Synthetic
acauauucagaguucuca

SEQ ID NO: 212092 - RNA, 19 nt, Artificial Sequence
  Synthetic
gacauauucagaguucuca

SEQ ID NO: 212093 - RNA, 20 nt, Artificial Sequence
  Synthetic
ugacauauucagaguucuca

SEQ ID NO: 212094 - RNA, 21 nt, Artificial Sequence
  Synthetic
augacauauucagaguucuca

SEQ ID NO: 212095 - RNA, 22 nt, Artificial Sequence
  Synthetic
aaugacauauucagaguucuca

SEQ ID NO: 212096 - RNA, 23 nt, Artificial Sequence
  Synthetic
aaaugacauauucagaguucuca

SEQ ID NO: 212097 - RNA, 24 nt, Artificial Sequence
  Synthetic
gaaaugacauauucagaguucuca

SEQ ID NO: 212098 - RNA, 18 nt, Artificial Sequence
  Synthetic
cuagaguaguaguucuca

SEQ ID NO: 212099 - RNA, 19 nt, Artificial Sequence
  Synthetic
ucuagaguaguaguucuca

SEQ ID NO: 212100 - RNA, 20 nt, Artificial Sequence
  Synthetic
aucuagaguaguaguucuca

SEQ ID NO: 212101 - RNA, 21 nt, Artificial Sequence
  Synthetic
uaucuagaguaguaguucuca

SEQ ID NO: 212102 - RNA, 22 nt, Artificial Sequence
  Synthetic
uuaucuagaguaguaguucuca

SEQ ID NO: 212103 - RNA, 23 nt, Artificial Sequence
  Synthetic
uuuaucuagaguaguaguucuca

SEQ ID NO: 212104 - RNA, 24 nt, Artificial Sequence
  Synthetic
uuuuaucuagaguaguaguucuca

SEQ ID NO: 212105 - RNA, 18 nt, Artificial Sequence
  Synthetic
guaucagaaagguucuca

SEQ ID NO: 212106 - RNA, 19 nt, Artificial Sequence
  Synthetic
aguaucagaaagguucuca

SEQ ID NO: 212107 - RNA, 20 nt, Artificial Sequence
  Synthetic
uaguaucagaaagguucuca

SEQ ID NO: 212108 - RNA, 21 nt, Artificial Sequence
  Synthetic
guaguaucagaaagguucuca

SEQ ID NO: 212109 - RNA, 22 nt, Artificial Sequence
  Synthetic
gguaguaucagaaagguucuca

SEQ ID NO: 212110 - RNA, 23 nt, Artificial Sequence
  Synthetic
ugguaguaucagaaagguucuca

SEQ ID NO: 212111 - RNA, 24 nt, Artificial Sequence
  Synthetic
uugguaguaucagaaagguucuca

SEQ ID NO: 212112 - RNA, 18 nt, Artificial Sequence
  Synthetic
cugggguuaugguucuca

SEQ ID NO: 212113 - RNA, 19 nt, Artificial Sequence
  Synthetic
ccugggguuaugguucuca

SEQ ID NO: 212114 - RNA, 20 nt, Artificial Sequence
  Synthetic
gccugggguuaugguucuca

SEQ ID NO: 212115 - RNA, 21 nt, Artificial Sequence
  Synthetic
ggccugggguuaugguucuca

SEQ ID NO: 212116 - RNA, 22 nt, Artificial Sequence
  Synthetic
uggccugggguuaugguucuca

SEQ ID NO: 212117 - RNA, 23 nt, Artificial Sequence
  Synthetic
cuggccugggguuaugguucuca

SEQ ID NO: 212118 - RNA, 24 nt, Artificial Sequence
  Synthetic
ccuggccugggguuaugguucuca

SEQ ID NO: 212119 - RNA, 18 nt, Artificial Sequence
  Synthetic
aaaauaucaguguucuca

SEQ ID NO: 212120 - RNA, 19 nt, Artificial Sequence
  Synthetic
gaaaauaucaguguucuca

SEQ ID NO: 212121 - RNA, 20 nt, Artificial Sequence
  Synthetic
ugaaaauaucaguguucuca

SEQ ID NO: 212122 - RNA, 21 nt, Artificial Sequence
  Synthetic
uugaaaauaucaguguucuca

SEQ ID NO: 212123 - RNA, 22 nt, Artificial Sequence
  Synthetic
cuugaaaauaucaguguucuca

SEQ ID NO: 212124 - RNA, 23 nt, Artificial Sequence
  Synthetic
ucuugaaaauaucaguguucuca

SEQ ID NO: 212125 - RNA, 24 nt, Artificial Sequence
  Synthetic
cucuugaaaauaucaguguucuca

SEQ ID NO: 212126 - RNA, 18 nt, Artificial Sequence
  Synthetic
caguuugaaaauuucuca

SEQ ID NO: 212127 - RNA, 19 nt, Artificial Sequence
  Synthetic
gcaguuugaaaauuucuca

SEQ ID NO: 212128 - RNA, 20 nt, Artificial Sequence
  Synthetic
agcaguuugaaaauuucuca

SEQ ID NO: 212129 - RNA, 21 nt, Artificial Sequence
  Synthetic
gagcaguuugaaaauuucuca

SEQ ID NO: 212130 - RNA, 22 nt, Artificial Sequence
  Synthetic
agagcaguuugaaaauuucuca

SEQ ID NO: 212131 - RNA, 23 nt, Artificial Sequence
  Synthetic
gagagcaguuugaaaauuucuca

SEQ ID NO: 212132 - RNA, 24 nt, Artificial Sequence
  Synthetic
ggagagcaguuugaaaauuucuca

SEQ ID NO: 212133 - RNA, 18 nt, Artificial Sequence
  Synthetic
cauaguuuuaauuucuca

SEQ ID NO: 212134 - RNA, 19 nt, Artificial Sequence
  Synthetic
ucauaguuuuaauuucuca

SEQ ID NO: 212135 - RNA, 20 nt, Artificial Sequence
  Synthetic
aucauaguuuuaauuucuca

SEQ ID NO: 212136 - RNA, 21 nt, Artificial Sequence
  Synthetic
uaucauaguuuuaauuucuca

SEQ ID NO: 212137 - RNA, 22 nt, Artificial Sequence
  Synthetic
auaucauaguuuuaauuucuca

SEQ ID NO: 212138 - RNA, 23 nt, Artificial Sequence
  Synthetic
aauaucauaguuuuaauuucuca

SEQ ID NO: 212139 - RNA, 24 nt, Artificial Sequence
  Synthetic
aaauaucauaguuuuaauuucuca

SEQ ID NO: 212140 - RNA, 18 nt, Artificial Sequence
  Synthetic
caguuuggacauuucuca

SEQ ID NO: 212141 - RNA, 19 nt, Artificial Sequence
  Synthetic
gcaguuuggacauuucuca

SEQ ID NO: 212142 - RNA, 20 nt, Artificial Sequence
  Synthetic
agcaguuuggacauuucuca

SEQ ID NO: 212143 - RNA, 21 nt, Artificial Sequence
  Synthetic
aagcaguuuggacauuucuca

SEQ ID NO: 212144 - RNA, 22 nt, Artificial Sequence
  Synthetic
aaagcaguuuggacauuucuca

SEQ ID NO: 212145 - RNA, 23 nt, Artificial Sequence
  Synthetic
gaaagcaguuuggacauuucuca

SEQ ID NO: 212146 - RNA, 24 nt, Artificial Sequence
  Synthetic
agaaagcaguuuggacauuucuca

SEQ ID NO: 212147 - RNA, 18 nt, Artificial Sequence
  Synthetic
gauaguuucuuuuucuca

SEQ ID NO: 212148 - RNA, 19 nt, Artificial Sequence
  Synthetic
agauaguuucuuuuucuca

SEQ ID NO: 212149 - RNA, 20 nt, Artificial Sequence
  Synthetic
cagauaguuucuuuuucuca

SEQ ID NO: 212150 - RNA, 21 nt, Artificial Sequence
  Synthetic
ccagauaguuucuuuuucuca

SEQ ID NO: 212151 - RNA, 22 nt, Artificial Sequence
  Synthetic
uccagauaguuucuuuuucuca

SEQ ID NO: 212152 - RNA, 23 nt, Artificial Sequence
  Synthetic
auccagauaguuucuuuuucuca

SEQ ID NO: 212153 - RNA, 24 nt, Artificial Sequence
  Synthetic
uauccagauaguuucuuuuucuca

SEQ ID NO: 212154 - RNA, 18 nt, Artificial Sequence
  Synthetic
aaaaugagacaaaaguca

SEQ ID NO: 212155 - RNA, 19 nt, Artificial Sequence
  Synthetic
aaaaaugagacaaaaguca

SEQ ID NO: 212156 - RNA, 20 nt, Artificial Sequence
  Synthetic
gaaaaaugagacaaaaguca

SEQ ID NO: 212157 - RNA, 21 nt, Artificial Sequence
  Synthetic
ugaaaaaugagacaaaaguca

SEQ ID NO: 212158 - RNA, 22 nt, Artificial Sequence
  Synthetic
augaaaaaugagacaaaaguca

SEQ ID NO: 212159 - RNA, 23 nt, Artificial Sequence
  Synthetic
caugaaaaaugagacaaaaguca

SEQ ID NO: 212160 - RNA, 24 nt, Artificial Sequence
  Synthetic
ccaugaaaaaugagacaaaaguca

SEQ ID NO: 212161 - RNA, 18 nt, Artificial Sequence
  Synthetic
uaaaaauacuaaaaguca

SEQ ID NO: 212162 - RNA, 19 nt, Artificial Sequence
  Synthetic
uuaaaaauacuaaaaguca

SEQ ID NO: 212163 - RNA, 20 nt, Artificial Sequence
  Synthetic
uuuaaaaauacuaaaaguca

SEQ ID NO: 212164 - RNA, 21 nt, Artificial Sequence
  Synthetic
cuuuaaaaauacuaaaaguca

SEQ ID NO: 212165 - RNA, 22 nt, Artificial Sequence
  Synthetic
gcuuuaaaaauacuaaaaguca

SEQ ID NO: 212166 - RNA, 23 nt, Artificial Sequence
  Synthetic
ugcuuuaaaaauacuaaaaguca

SEQ ID NO: 212167 - RNA, 24 nt, Artificial Sequence
  Synthetic
augcuuuaaaaauacuaaaaguca

SEQ ID NO: 212168 - RNA, 18 nt, Artificial Sequence
  Synthetic
cagucaagcccaaaguca

SEQ ID NO: 212169 - RNA, 19 nt, Artificial Sequence
  Synthetic
acagucaagcccaaaguca

SEQ ID NO: 212170 - RNA, 20 nt, Artificial Sequence
  Synthetic
cacagucaagcccaaaguca

SEQ ID NO: 212171 - RNA, 21 nt, Artificial Sequence
  Synthetic
acacagucaagcccaaaguca

SEQ ID NO: 212172 - RNA, 22 nt, Artificial Sequence
  Synthetic
uacacagucaagcccaaaguca

SEQ ID NO: 212173 - RNA, 23 nt, Artificial Sequence
  Synthetic
guacacagucaagcccaaaguca

SEQ ID NO: 212174 - RNA, 24 nt, Artificial Sequence
  Synthetic
gguacacagucaagcccaaaguca

SEQ ID NO: 212175 - RNA, 18 nt, Artificial Sequence
  Synthetic
uacaguugcgcaaaguca

SEQ ID NO: 212176 - RNA, 19 nt, Artificial Sequence
  Synthetic
cuacaguugcgcaaaguca

SEQ ID NO: 212177 - RNA, 20 nt, Artificial Sequence
  Synthetic
ccuacaguugcgcaaaguca

SEQ ID NO: 212178 - RNA, 21 nt, Artificial Sequence
  Synthetic
accuacaguugcgcaaaguca

SEQ ID NO: 212179 - RNA, 22 nt, Artificial Sequence
  Synthetic
aaccuacaguugcgcaaaguca

SEQ ID NO: 212180 - RNA, 23 nt, Artificial Sequence
  Synthetic
uaaccuacaguugcgcaaaguca

SEQ ID NO: 212181 - RNA, 24 nt, Artificial Sequence
  Synthetic
uuaaccuacaguugcgcaaaguca

SEQ ID NO: 212182 - RNA, 18 nt, Artificial Sequence
  Synthetic
uugaacaugucaaaguca

SEQ ID NO: 212183 - RNA, 19 nt, Artificial Sequence
  Synthetic
uuugaacaugucaaaguca

SEQ ID NO: 212184 - RNA, 20 nt, Artificial Sequence
  Synthetic
auuugaacaugucaaaguca

SEQ ID NO: 212185 - RNA, 21 nt, Artificial Sequence
  Synthetic
aauuugaacaugucaaaguca

SEQ ID NO: 212186 - RNA, 22 nt, Artificial Sequence
  Synthetic
gaauuugaacaugucaaaguca

SEQ ID NO: 212187 - RNA, 23 nt, Artificial Sequence
  Synthetic
ugaauuugaacaugucaaaguca

SEQ ID NO: 212188 - RNA, 24 nt, Artificial Sequence
  Synthetic
uugaauuugaacaugucaaaguca

SEQ ID NO: 212189 - RNA, 18 nt, Artificial Sequence
  Synthetic
gacugaccauuaaaguca

SEQ ID NO: 212190 - RNA, 19 nt, Artificial Sequence
  Synthetic
ugacugaccauuaaaguca

SEQ ID NO: 212191 - RNA, 20 nt, Artificial Sequence
  Synthetic
gugacugaccauuaaaguca

SEQ ID NO: 212192 - RNA, 21 nt, Artificial Sequence
  Synthetic
agugacugaccauuaaaguca

SEQ ID NO: 212193 - RNA, 22 nt, Artificial Sequence
  Synthetic
uagugacugaccauuaaaguca

SEQ ID NO: 212194 - RNA, 23 nt, Artificial Sequence
  Synthetic
guagugacugaccauuaaaguca

SEQ ID NO: 212195 - RNA, 24 nt, Artificial Sequence
  Synthetic
uguagugacugaccauuaaaguca

SEQ ID NO: 212196 - RNA, 18 nt, Artificial Sequence
  Synthetic
uuauugucuuuaaaguca

SEQ ID NO: 212197 - RNA, 19 nt, Artificial Sequence
  Synthetic
auuauugucuuuaaaguca

SEQ ID NO: 212198 - RNA, 20 nt, Artificial Sequence
  Synthetic
aauuauugucuuuaaaguca

SEQ ID NO: 212199 - RNA, 21 nt, Artificial Sequence
  Synthetic
aaauuauugucuuuaaaguca

SEQ ID NO: 212200 - RNA, 22 nt, Artificial Sequence
  Synthetic
caaauuauugucuuuaaaguca

SEQ ID NO: 212201 - RNA, 23 nt, Artificial Sequence
  Synthetic
ucaaauuauugucuuuaaaguca

SEQ ID NO: 212202 - RNA, 24 nt, Artificial Sequence
  Synthetic
uucaaauuauugucuuuaaaguca

SEQ ID NO: 212203 - RNA, 18 nt, Artificial Sequence
  Synthetic
cacagacauaucaaguca

SEQ ID NO: 212204 - RNA, 19 nt, Artificial Sequence
  Synthetic
gcacagacauaucaaguca

SEQ ID NO: 212205 - RNA, 20 nt, Artificial Sequence
  Synthetic
ugcacagacauaucaaguca

SEQ ID NO: 212206 - RNA, 21 nt, Artificial Sequence
  Synthetic
cugcacagacauaucaaguca

SEQ ID NO: 212207 - RNA, 22 nt, Artificial Sequence
  Synthetic
ucugcacagacauaucaaguca

SEQ ID NO: 212208 - RNA, 23 nt, Artificial Sequence
  Synthetic
aucugcacagacauaucaaguca

SEQ ID NO: 212209 - RNA, 24 nt, Artificial Sequence
  Synthetic
caucugcacagacauaucaaguca

SEQ ID NO: 212210 - RNA, 18 nt, Artificial Sequence
  Synthetic
uugugucauuucaaguca

SEQ ID NO: 212211 - RNA, 19 nt, Artificial Sequence
  Synthetic
uuugugucauuucaaguca

SEQ ID NO: 212212 - RNA, 20 nt, Artificial Sequence
  Synthetic
uuuugugucauuucaaguca

SEQ ID NO: 212213 - RNA, 21 nt, Artificial Sequence
  Synthetic
uuuuugugucauuucaaguca

SEQ ID NO: 212214 - RNA, 22 nt, Artificial Sequence
  Synthetic
auuuuugugucauuucaaguca

SEQ ID NO: 212215 - RNA, 23 nt, Artificial Sequence
  Synthetic
gauuuuugugucauuucaaguca

SEQ ID NO: 212216 - RNA, 24 nt, Artificial Sequence
  Synthetic
agauuuuugugucauuucaaguca

SEQ ID NO: 212217 - RNA, 18 nt, Artificial Sequence
  Synthetic
uuaguuuaaaggaaguca

SEQ ID NO: 212218 - RNA, 19 nt, Artificial Sequence
  Synthetic
uuuaguuuaaaggaaguca

SEQ ID NO: 212219 - RNA, 20 nt, Artificial Sequence
  Synthetic
uuuuaguuuaaaggaaguca

SEQ ID NO: 212220 - RNA, 21 nt, Artificial Sequence
  Synthetic
auuuuaguuuaaaggaaguca

SEQ ID NO: 212221 - RNA, 22 nt, Artificial Sequence
  Synthetic
aauuuuaguuuaaaggaaguca

SEQ ID NO: 212222 - RNA, 23 nt, Artificial Sequence
  Synthetic
gaauuuuaguuuaaaggaaguca

SEQ ID NO: 212223 - RNA, 24 nt, Artificial Sequence
  Synthetic
ggaauuuuaguuuaaaggaaguca

SEQ ID NO: 212224 - RNA, 18 nt, Artificial Sequence
  Synthetic
aaagcuguugggaaguca

SEQ ID NO: 212225 - RNA, 19 nt, Artificial Sequence
  Synthetic
caaagcuguugggaaguca

SEQ ID NO: 212226 - RNA, 20 nt, Artificial Sequence
  Synthetic
gcaaagcuguugggaaguca

SEQ ID NO: 212227 - RNA, 21 nt, Artificial Sequence
  Synthetic
ggcaaagcuguugggaaguca

SEQ ID NO: 212228 - RNA, 22 nt, Artificial Sequence
  Synthetic
uggcaaagcuguugggaaguca

SEQ ID NO: 212229 - RNA, 23 nt, Artificial Sequence
  Synthetic
uuggcaaagcuguugggaaguca

SEQ ID NO: 212230 - RNA, 24 nt, Artificial Sequence
  Synthetic
uuuggcaaagcuguugggaaguca

SEQ ID NO: 212231 - RNA, 18 nt, Artificial Sequence
  Synthetic
gaaaggggacugaaguca

SEQ ID NO: 212232 - RNA, 19 nt, Artificial Sequence
  Synthetic
ggaaaggggacugaaguca

SEQ ID NO: 212233 - RNA, 20 nt, Artificial Sequence
  Synthetic
uggaaaggggacugaaguca

SEQ ID NO: 212234 - RNA, 21 nt, Artificial Sequence
  Synthetic
cuggaaaggggacugaaguca

SEQ ID NO: 212235 - RNA, 22 nt, Artificial Sequence
  Synthetic
ccuggaaaggggacugaaguca

SEQ ID NO: 212236 - RNA, 23 nt, Artificial Sequence
  Synthetic
cccuggaaaggggacugaaguca

SEQ ID NO: 212237 - RNA, 24 nt, Artificial Sequence
  Synthetic
ccccuggaaaggggacugaaguca

SEQ ID NO: 212238 - RNA, 18 nt, Artificial Sequence
  Synthetic
ugcacaagucugaaguca

SEQ ID NO: 212239 - RNA, 19 nt, Artificial Sequence
  Synthetic
gugcacaagucugaaguca

SEQ ID NO: 212240 - RNA, 20 nt, Artificial Sequence
  Synthetic
ugugcacaagucugaaguca

SEQ ID NO: 212241 - RNA, 21 nt, Artificial Sequence
  Synthetic
cugugcacaagucugaaguca

SEQ ID NO: 212242 - RNA, 22 nt, Artificial Sequence
  Synthetic
acugugcacaagucugaaguca

SEQ ID NO: 212243 - RNA, 23 nt, Artificial Sequence
  Synthetic
uacugugcacaagucugaaguca

SEQ ID NO: 212244 - RNA, 24 nt, Artificial Sequence
  Synthetic
auacugugcacaagucugaaguca

SEQ ID NO: 212245 - RNA, 18 nt, Artificial Sequence
  Synthetic
aaaacuaaguugaaguca

SEQ ID NO: 212246 - RNA, 19 nt, Artificial Sequence
  Synthetic
uaaaacuaaguugaaguca

SEQ ID NO: 212247 - RNA, 20 nt, Artificial Sequence
  Synthetic
auaaaacuaaguugaaguca

SEQ ID NO: 212248 - RNA, 21 nt, Artificial Sequence
  Synthetic
uauaaaacuaaguugaaguca

SEQ ID NO: 212249 - RNA, 22 nt, Artificial Sequence
  Synthetic
uuauaaaacuaaguugaaguca

SEQ ID NO: 212250 - RNA, 23 nt, Artificial Sequence
  Synthetic
auuauaaaacuaaguugaaguca

SEQ ID NO: 212251 - RNA, 24 nt, Artificial Sequence
  Synthetic
aauuauaaaacuaaguugaaguca

SEQ ID NO: 212252 - RNA, 18 nt, Artificial Sequence
  Synthetic
aggacccccaauaaguca

SEQ ID NO: 212253 - RNA, 19 nt, Artificial Sequence
  Synthetic
uaggacccccaauaaguca

SEQ ID NO: 212254 - RNA, 20 nt, Artificial Sequence
  Synthetic
auaggacccccaauaaguca

SEQ ID NO: 212255 - RNA, 21 nt, Artificial Sequence
  Synthetic
aauaggacccccaauaaguca

SEQ ID NO: 212256 - RNA, 22 nt, Artificial Sequence
  Synthetic
aaauaggacccccaauaaguca

SEQ ID NO: 212257 - RNA, 23 nt, Artificial Sequence
  Synthetic
gaaauaggacccccaauaaguca

SEQ ID NO: 212258 - RNA, 24 nt, Artificial Sequence
  Synthetic
agaaauaggacccccaauaaguca

SEQ ID NO: 212259 - RNA, 18 nt, Artificial Sequence
  Synthetic
ccaaauuauucuaaguca

SEQ ID NO: 212260 - RNA, 19 nt, Artificial Sequence
  Synthetic
uccaaauuauucuaaguca

SEQ ID NO: 212261 - RNA, 20 nt, Artificial Sequence
  Synthetic
uuccaaauuauucuaaguca

SEQ ID NO: 212262 - RNA, 21 nt, Artificial Sequence
  Synthetic
cuuccaaauuauucuaaguca

SEQ ID NO: 212263 - RNA, 22 nt, Artificial Sequence
  Synthetic
gcuuccaaauuauucuaaguca

SEQ ID NO: 212264 - RNA, 23 nt, Artificial Sequence
  Synthetic
ggcuuccaaauuauucuaaguca

SEQ ID NO: 212265 - RNA, 24 nt, Artificial Sequence
  Synthetic
uggcuuccaaauuauucuaaguca

SEQ ID NO: 212266 - RNA, 18 nt, Artificial Sequence
  Synthetic
gagauuuuaaaccaguca

SEQ ID NO: 212267 - RNA, 19 nt, Artificial Sequence
  Synthetic
agagauuuuaaaccaguca

SEQ ID NO: 212268 - RNA, 20 nt, Artificial Sequence
  Synthetic
aagagauuuuaaaccaguca

SEQ ID NO: 212269 - RNA, 21 nt, Artificial Sequence
  Synthetic
caagagauuuuaaaccaguca

SEQ ID NO: 212270 - RNA, 22 nt, Artificial Sequence
  Synthetic
acaagagauuuuaaaccaguca

SEQ ID NO: 212271 - RNA, 23 nt, Artificial Sequence
  Synthetic
uacaagagauuuuaaaccaguca

SEQ ID NO: 212272 - RNA, 24 nt, Artificial Sequence
  Synthetic
uuacaagagauuuuaaaccaguca

SEQ ID NO: 212273 - RNA, 18 nt, Artificial Sequence
  Synthetic
cugccugucucccaguca

SEQ ID NO: 212274 - RNA, 19 nt, Artificial Sequence
  Synthetic
ccugccugucucccaguca

SEQ ID NO: 212275 - RNA, 20 nt, Artificial Sequence
  Synthetic
cccugccugucucccaguca

SEQ ID NO: 212276 - RNA, 21 nt, Artificial Sequence
  Synthetic
ccccugccugucucccaguca

SEQ ID NO: 212277 - RNA, 22 nt, Artificial Sequence
  Synthetic
uccccugccugucucccaguca

SEQ ID NO: 212278 - RNA, 23 nt, Artificial Sequence
  Synthetic
uuccccugccugucucccaguca

SEQ ID NO: 212279 - RNA, 24 nt, Artificial Sequence
  Synthetic
auuccccugccugucucccaguca

SEQ ID NO: 212280 - RNA, 18 nt, Artificial Sequence
  Synthetic
cugucugagggccaguca

SEQ ID NO: 212281 - RNA, 19 nt, Artificial Sequence
  Synthetic
gcugucugagggccaguca

SEQ ID NO: 212282 - RNA, 20 nt, Artificial Sequence
  Synthetic
ugcugucugagggccaguca

SEQ ID NO: 212283 - RNA, 21 nt, Artificial Sequence
  Synthetic
augcugucugagggccaguca

SEQ ID NO: 212284 - RNA, 22 nt, Artificial Sequence
  Synthetic
gaugcugucugagggccaguca

SEQ ID NO: 212285 - RNA, 23 nt, Artificial Sequence
  Synthetic
agaugcugucugagggccaguca

SEQ ID NO: 212286 - RNA, 24 nt, Artificial Sequence
  Synthetic
gagaugcugucugagggccaguca

SEQ ID NO: 212287 - RNA, 18 nt, Artificial Sequence
  Synthetic
guggaugggcagcaguca

SEQ ID NO: 212288 - RNA, 19 nt, Artificial Sequence
  Synthetic
cguggaugggcagcaguca

SEQ ID NO: 212289 - RNA, 20 nt, Artificial Sequence
  Synthetic
acguggaugggcagcaguca

SEQ ID NO: 212290 - RNA, 21 nt, Artificial Sequence
  Synthetic
uacguggaugggcagcaguca

SEQ ID NO: 212291 - RNA, 22 nt, Artificial Sequence
  Synthetic
uuacguggaugggcagcaguca

SEQ ID NO: 212292 - RNA, 23 nt, Artificial Sequence
  Synthetic
cuuacguggaugggcagcaguca

SEQ ID NO: 212293 - RNA, 24 nt, Artificial Sequence
  Synthetic
ucuuacguggaugggcagcaguca

SEQ ID NO: 212294 - RNA, 18 nt, Artificial Sequence
  Synthetic
ugggcaucagagcaguca

SEQ ID NO: 212295 - RNA, 19 nt, Artificial Sequence
  Synthetic
cugggcaucagagcaguca

SEQ ID NO: 212296 - RNA, 20 nt, Artificial Sequence
  Synthetic
ucugggcaucagagcaguca

SEQ ID NO: 212297 - RNA, 21 nt, Artificial Sequence
  Synthetic
uucugggcaucagagcaguca

SEQ ID NO: 212298 - RNA, 22 nt, Artificial Sequence
  Synthetic
auucugggcaucagagcaguca

SEQ ID NO: 212299 - RNA, 23 nt, Artificial Sequence
  Synthetic
cauucugggcaucagagcaguca

SEQ ID NO: 212300 - RNA, 24 nt, Artificial Sequence
  Synthetic
acauucugggcaucagagcaguca

SEQ ID NO: 212301 - RNA, 18 nt, Artificial Sequence
  Synthetic
gugacccuaccucaguca

SEQ ID NO: 212302 - RNA, 19 nt, Artificial Sequence
  Synthetic
agugacccuaccucaguca

SEQ ID NO: 212303 - RNA, 20 nt, Artificial Sequence
  Synthetic
cagugacccuaccucaguca

SEQ ID NO: 212304 - RNA, 21 nt, Artificial Sequence
  Synthetic
gcagugacccuaccucaguca

SEQ ID NO: 212305 - RNA, 22 nt, Artificial Sequence
  Synthetic
ugcagugacccuaccucaguca

SEQ ID NO: 212306 - RNA, 23 nt, Artificial Sequence
  Synthetic
gugcagugacccuaccucaguca

SEQ ID NO: 212307 - RNA, 24 nt, Artificial Sequence
  Synthetic
ugugcagugacccuaccucaguca

SEQ ID NO: 212308 - RNA, 18 nt, Artificial Sequence
  Synthetic
aucccguggauucaguca

SEQ ID NO: 212309 - RNA, 19 nt, Artificial Sequence
  Synthetic
aaucccguggauucaguca

SEQ ID NO: 212310 - RNA, 20 nt, Artificial Sequence
  Synthetic
gaaucccguggauucaguca

SEQ ID NO: 212311 - RNA, 21 nt, Artificial Sequence
  Synthetic
ggaaucccguggauucaguca

SEQ ID NO: 212312 - RNA, 22 nt, Artificial Sequence
  Synthetic
aggaaucccguggauucaguca

SEQ ID NO: 212313 - RNA, 23 nt, Artificial Sequence
  Synthetic
aaggaaucccguggauucaguca

SEQ ID NO: 212314 - RNA, 24 nt, Artificial Sequence
  Synthetic
aaaggaaucccguggauucaguca

SEQ ID NO: 212315 - RNA, 18 nt, Artificial Sequence
  Synthetic
agaggaagcaaagaguca

SEQ ID NO: 212316 - RNA, 19 nt, Artificial Sequence
  Synthetic
gagaggaagcaaagaguca

SEQ ID NO: 212317 - RNA, 20 nt, Artificial Sequence
  Synthetic
ugagaggaagcaaagaguca

SEQ ID NO: 212318 - RNA, 21 nt, Artificial Sequence
  Synthetic
uugagaggaagcaaagaguca

SEQ ID NO: 212319 - RNA, 22 nt, Artificial Sequence
  Synthetic
uuugagaggaagcaaagaguca

SEQ ID NO: 212320 - RNA, 23 nt, Artificial Sequence
  Synthetic
guuugagaggaagcaaagaguca

SEQ ID NO: 212321 - RNA, 24 nt, Artificial Sequence
  Synthetic
aguuugagaggaagcaaagaguca

SEQ ID NO: 212322 - RNA, 18 nt, Artificial Sequence
  Synthetic
gcaugagaaccagaguca

SEQ ID NO: 212323 - RNA, 19 nt, Artificial Sequence
  Synthetic
ggcaugagaaccagaguca

SEQ ID NO: 212324 - RNA, 20 nt, Artificial Sequence
  Synthetic
uggcaugagaaccagaguca

SEQ ID NO: 212325 - RNA, 21 nt, Artificial Sequence
  Synthetic
guggcaugagaaccagaguca

SEQ ID NO: 212326 - RNA, 22 nt, Artificial Sequence
  Synthetic
gguggcaugagaaccagaguca

SEQ ID NO: 212327 - RNA, 23 nt, Artificial Sequence
  Synthetic
ugguggcaugagaaccagaguca

SEQ ID NO: 212328 - RNA, 24 nt, Artificial Sequence
  Synthetic
uugguggcaugagaaccagaguca

SEQ ID NO: 212329 - RNA, 18 nt, Artificial Sequence
  Synthetic
uuaaacgugccagaguca

SEQ ID NO: 212330 - RNA, 19 nt, Artificial Sequence
  Synthetic
uuuaaacgugccagaguca

SEQ ID NO: 212331 - RNA, 20 nt, Artificial Sequence
  Synthetic
guuuaaacgugccagaguca

SEQ ID NO: 212332 - RNA, 21 nt, Artificial Sequence
  Synthetic
uguuuaaacgugccagaguca

SEQ ID NO: 212333 - RNA, 22 nt, Artificial Sequence
  Synthetic
auguuuaaacgugccagaguca

SEQ ID NO: 212334 - RNA, 23 nt, Artificial Sequence
  Synthetic
uauguuuaaacgugccagaguca

SEQ ID NO: 212335 - RNA, 24 nt, Artificial Sequence
  Synthetic
cuauguuuaaacgugccagaguca

SEQ ID NO: 212336 - RNA, 18 nt, Artificial Sequence
  Synthetic
auaggguguugagaguca

SEQ ID NO: 212337 - RNA, 19 nt, Artificial Sequence
  Synthetic
aauaggguguugagaguca

SEQ ID NO: 212338 - RNA, 20 nt, Artificial Sequence
  Synthetic
aaauaggguguugagaguca

SEQ ID NO: 212339 - RNA, 21 nt, Artificial Sequence
  Synthetic
aaaauaggguguugagaguca

SEQ ID NO: 212340 - RNA, 22 nt, Artificial Sequence
  Synthetic
gaaaauaggguguugagaguca

SEQ ID NO: 212341 - RNA, 23 nt, Artificial Sequence
  Synthetic
ggaaaauaggguguugagaguca

SEQ ID NO: 212342 - RNA, 24 nt, Artificial Sequence
  Synthetic
aggaaaauaggguguugagaguca

SEQ ID NO: 212343 - RNA, 18 nt, Artificial Sequence
  Synthetic
guuuagaaaagggaguca

SEQ ID NO: 212344 - RNA, 19 nt, Artificial Sequence
  Synthetic
aguuuagaaaagggaguca

SEQ ID NO: 212345 - RNA, 20 nt, Artificial Sequence
  Synthetic
aaguuuagaaaagggaguca

SEQ ID NO: 212346 - RNA, 21 nt, Artificial Sequence
  Synthetic
aaaguuuagaaaagggaguca

SEQ ID NO: 212347 - RNA, 22 nt, Artificial Sequence
  Synthetic
aaaaguuuagaaaagggaguca

SEQ ID NO: 212348 - RNA, 23 nt, Artificial Sequence
  Synthetic
uaaaaguuuagaaaagggaguca

SEQ ID NO: 212349 - RNA, 24 nt, Artificial Sequence
  Synthetic
uuaaaaguuuagaaaagggaguca

SEQ ID NO: 212350 - RNA, 18 nt, Artificial Sequence
  Synthetic
gcaggagagugggaguca

SEQ ID NO: 212351 - RNA, 19 nt, Artificial Sequence
  Synthetic
agcaggagagugggaguca

SEQ ID NO: 212352 - RNA, 20 nt, Artificial Sequence
  Synthetic
aagcaggagagugggaguca

SEQ ID NO: 212353 - RNA, 21 nt, Artificial Sequence
  Synthetic
gaagcaggagagugggaguca

SEQ ID NO: 212354 - RNA, 22 nt, Artificial Sequence
  Synthetic
ggaagcaggagagugggaguca

SEQ ID NO: 212355 - RNA, 23 nt, Artificial Sequence
  Synthetic
uggaagcaggagagugggaguca

SEQ ID NO: 212356 - RNA, 24 nt, Artificial Sequence
  Synthetic
auggaagcaggagagugggaguca

SEQ ID NO: 212357 - RNA, 18 nt, Artificial Sequence
  Synthetic
gcaggggcucuggaguca

SEQ ID NO: 212358 - RNA, 19 nt, Artificial Sequence
  Synthetic
ugcaggggcucuggaguca

SEQ ID NO: 212359 - RNA, 20 nt, Artificial Sequence
  Synthetic
uugcaggggcucuggaguca

SEQ ID NO: 212360 - RNA, 21 nt, Artificial Sequence
  Synthetic
cuugcaggggcucuggaguca

SEQ ID NO: 212361 - RNA, 22 nt, Artificial Sequence
  Synthetic
ucuugcaggggcucuggaguca

SEQ ID NO: 212362 - RNA, 23 nt, Artificial Sequence
  Synthetic
uucuugcaggggcucuggaguca

SEQ ID NO: 212363 - RNA, 24 nt, Artificial Sequence
  Synthetic
uuucuugcaggggcucuggaguca

SEQ ID NO: 212364 - RNA, 18 nt, Artificial Sequence
  Synthetic
aauguucucacugaguca

SEQ ID NO: 212365 - RNA, 19 nt, Artificial Sequence
  Synthetic
aaauguucucacugaguca

SEQ ID NO: 212366 - RNA, 20 nt, Artificial Sequence
  Synthetic
uaaauguucucacugaguca

SEQ ID NO: 212367 - RNA, 21 nt, Artificial Sequence
  Synthetic
auaaauguucucacugaguca

SEQ ID NO: 212368 - RNA, 22 nt, Artificial Sequence
  Synthetic
aauaaauguucucacugaguca

SEQ ID NO: 212369 - RNA, 23 nt, Artificial Sequence
  Synthetic
uaauaaauguucucacugaguca

SEQ ID NO: 212370 - RNA, 24 nt, Artificial Sequence
  Synthetic
auaauaaauguucucacugaguca

SEQ ID NO: 212371 - RNA, 18 nt, Artificial Sequence
  Synthetic
auaaggugaauugaguca

SEQ ID NO: 212372 - RNA, 19 nt, Artificial Sequence
  Synthetic
cauaaggugaauugaguca

SEQ ID NO: 212373 - RNA, 20 nt, Artificial Sequence
  Synthetic
gcauaaggugaauugaguca

SEQ ID NO: 212374 - RNA, 21 nt, Artificial Sequence
  Synthetic
ggcauaaggugaauugaguca

SEQ ID NO: 212375 - RNA, 22 nt, Artificial Sequence
  Synthetic
aggcauaaggugaauugaguca

SEQ ID NO: 212376 - RNA, 23 nt, Artificial Sequence
  Synthetic
aaggcauaaggugaauugaguca

SEQ ID NO: 212377 - RNA, 24 nt, Artificial Sequence
  Synthetic
aaaggcauaaggugaauugaguca

SEQ ID NO: 212378 - RNA, 18 nt, Artificial Sequence
  Synthetic
agugagauuauugaguca

SEQ ID NO: 212379 - RNA, 19 nt, Artificial Sequence
  Synthetic
aagugagauuauugaguca

SEQ ID NO: 212380 - RNA, 20 nt, Artificial Sequence
  Synthetic
aaagugagauuauugaguca

SEQ ID NO: 212381 - RNA, 21 nt, Artificial Sequence
  Synthetic
aaaagugagauuauugaguca

SEQ ID NO: 212382 - RNA, 22 nt, Artificial Sequence
  Synthetic
caaaagugagauuauugaguca

SEQ ID NO: 212383 - RNA, 23 nt, Artificial Sequence
  Synthetic
ccaaaagugagauuauugaguca

SEQ ID NO: 212384 - RNA, 24 nt, Artificial Sequence
  Synthetic
accaaaagugagauuauugaguca

SEQ ID NO: 212385 - RNA, 18 nt, Artificial Sequence
  Synthetic
auuagcucauuugaguca

SEQ ID NO: 212386 - RNA, 19 nt, Artificial Sequence
  Synthetic
cauuagcucauuugaguca

SEQ ID NO: 212387 - RNA, 20 nt, Artificial Sequence
  Synthetic
acauuagcucauuugaguca

SEQ ID NO: 212388 - RNA, 21 nt, Artificial Sequence
  Synthetic
uacauuagcucauuugaguca

SEQ ID NO: 212389 - RNA, 22 nt, Artificial Sequence
  Synthetic
auacauuagcucauuugaguca

SEQ ID NO: 212390 - RNA, 23 nt, Artificial Sequence
  Synthetic
uauacauuagcucauuugaguca

SEQ ID NO: 212391 - RNA, 24 nt, Artificial Sequence
  Synthetic
cuauacauuagcucauuugaguca

SEQ ID NO: 212392 - RNA, 18 nt, Artificial Sequence
  Synthetic
uauaaacaggaauaguca

SEQ ID NO: 212393 - RNA, 19 nt, Artificial Sequence
  Synthetic
auauaaacaggaauaguca

SEQ ID NO: 212394 - RNA, 20 nt, Artificial Sequence
  Synthetic
aauauaaacaggaauaguca

SEQ ID NO: 212395 - RNA, 21 nt, Artificial Sequence
  Synthetic
gaauauaaacaggaauaguca

SEQ ID NO: 212396 - RNA, 22 nt, Artificial Sequence
  Synthetic
agaauauaaacaggaauaguca

SEQ ID NO: 212397 - RNA, 23 nt, Artificial Sequence
  Synthetic
aagaauauaaacaggaauaguca

SEQ ID NO: 212398 - RNA, 24 nt, Artificial Sequence
  Synthetic
caagaauauaaacaggaauaguca

SEQ ID NO: 212399 - RNA, 18 nt, Artificial Sequence
  Synthetic
gaagaucaaaaguaguca

SEQ ID NO: 212400 - RNA, 19 nt, Artificial Sequence
  Synthetic
ggaagaucaaaaguaguca

SEQ ID NO: 212401 - RNA, 20 nt, Artificial Sequence
  Synthetic
gggaagaucaaaaguaguca

SEQ ID NO: 212402 - RNA, 21 nt, Artificial Sequence
  Synthetic
agggaagaucaaaaguaguca

SEQ ID NO: 212403 - RNA, 22 nt, Artificial Sequence
  Synthetic
aagggaagaucaaaaguaguca

SEQ ID NO: 212404 - RNA, 23 nt, Artificial Sequence
  Synthetic
aaagggaagaucaaaaguaguca

SEQ ID NO: 212405 - RNA, 24 nt, Artificial Sequence
  Synthetic
uaaagggaagaucaaaaguaguca

SEQ ID NO: 212406 - RNA, 18 nt, Artificial Sequence
  Synthetic
ugagggguuggguaguca

SEQ ID NO: 212407 - RNA, 19 nt, Artificial Sequence
  Synthetic
gugagggguuggguaguca

SEQ ID NO: 212408 - RNA, 20 nt, Artificial Sequence
  Synthetic
agugagggguuggguaguca

SEQ ID NO: 212409 - RNA, 21 nt, Artificial Sequence
  Synthetic
aagugagggguuggguaguca

SEQ ID NO: 212410 - RNA, 22 nt, Artificial Sequence
  Synthetic
caagugagggguuggguaguca

SEQ ID NO: 212411 - RNA, 23 nt, Artificial Sequence
  Synthetic
ccaagugagggguuggguaguca

SEQ ID NO: 212412 - RNA, 24 nt, Artificial Sequence
  Synthetic
uccaagugagggguuggguaguca

SEQ ID NO: 212413 - RNA, 18 nt, Artificial Sequence
  Synthetic
augugagacauguaguca

SEQ ID NO: 212414 - RNA, 19 nt, Artificial Sequence
  Synthetic
gaugugagacauguaguca

SEQ ID NO: 212415 - RNA, 20 nt, Artificial Sequence
  Synthetic
ggaugugagacauguaguca

SEQ ID NO: 212416 - RNA, 21 nt, Artificial Sequence
  Synthetic
uggaugugagacauguaguca

SEQ ID NO: 212417 - RNA, 22 nt, Artificial Sequence
  Synthetic
cuggaugugagacauguaguca

SEQ ID NO: 212418 - RNA, 23 nt, Artificial Sequence
  Synthetic
ccuggaugugagacauguaguca

SEQ ID NO: 212419 - RNA, 24 nt, Artificial Sequence
  Synthetic
accuggaugugagacauguaguca

SEQ ID NO: 212420 - RNA, 18 nt, Artificial Sequence
  Synthetic
uaagaugguaauuaguca

SEQ ID NO: 212421 - RNA, 19 nt, Artificial Sequence
  Synthetic
uuaagaugguaauuaguca

SEQ ID NO: 212422 - RNA, 20 nt, Artificial Sequence
  Synthetic
auuaagaugguaauuaguca

SEQ ID NO: 212423 - RNA, 21 nt, Artificial Sequence
  Synthetic
uauuaagaugguaauuaguca

SEQ ID NO: 212424 - RNA, 22 nt, Artificial Sequence
  Synthetic
auauuaagaugguaauuaguca

SEQ ID NO: 212425 - RNA, 23 nt, Artificial Sequence
  Synthetic
aauauuaagaugguaauuaguca

SEQ ID NO: 212426 - RNA, 24 nt, Artificial Sequence
  Synthetic
caauauuaagaugguaauuaguca

SEQ ID NO: 212427 - RNA, 18 nt, Artificial Sequence
  Synthetic
uagagucccccuuaguca

SEQ ID NO: 212428 - RNA, 19 nt, Artificial Sequence
  Synthetic
uuagagucccccuuaguca

SEQ ID NO: 212429 - RNA, 20 nt, Artificial Sequence
  Synthetic
auuagagucccccuuaguca

SEQ ID NO: 212430 - RNA, 21 nt, Artificial Sequence
  Synthetic
uauuagagucccccuuaguca

SEQ ID NO: 212431 - RNA, 22 nt, Artificial Sequence
  Synthetic
uuauuagagucccccuuaguca

SEQ ID NO: 212432 - RNA, 23 nt, Artificial Sequence
  Synthetic
cuuauuagagucccccuuaguca

SEQ ID NO: 212433 - RNA, 24 nt, Artificial Sequence
  Synthetic
acuuauuagagucccccuuaguca

SEQ ID NO: 212434 - RNA, 18 nt, Artificial Sequence
  Synthetic
aacuuaacaguaucguca

SEQ ID NO: 212435 - RNA, 19 nt, Artificial Sequence
  Synthetic
caacuuaacaguaucguca

SEQ ID NO: 212436 - RNA, 20 nt, Artificial Sequence
  Synthetic
acaacuuaacaguaucguca

SEQ ID NO: 212437 - RNA, 21 nt, Artificial Sequence
  Synthetic
uacaacuuaacaguaucguca

SEQ ID NO: 212438 - RNA, 22 nt, Artificial Sequence
  Synthetic
auacaacuuaacaguaucguca

SEQ ID NO: 212439 - RNA, 23 nt, Artificial Sequence
  Synthetic
uauacaacuuaacaguaucguca

SEQ ID NO: 212440 - RNA, 24 nt, Artificial Sequence
  Synthetic
cuauacaacuuaacaguaucguca

SEQ ID NO: 212441 - RNA, 18 nt, Artificial Sequence
  Synthetic
gcacccauuaacucguca

SEQ ID NO: 212442 - RNA, 19 nt, Artificial Sequence
  Synthetic
ugcacccauuaacucguca

SEQ ID NO: 212443 - RNA, 20 nt, Artificial Sequence
  Synthetic
cugcacccauuaacucguca

SEQ ID NO: 212444 - RNA, 21 nt, Artificial Sequence
  Synthetic
gcugcacccauuaacucguca

SEQ ID NO: 212445 - RNA, 22 nt, Artificial Sequence
  Synthetic
ugcugcacccauuaacucguca

SEQ ID NO: 212446 - RNA, 23 nt, Artificial Sequence
  Synthetic
gugcugcacccauuaacucguca

SEQ ID NO: 212447 - RNA, 24 nt, Artificial Sequence
  Synthetic
ugugcugcacccauuaacucguca

SEQ ID NO: 212448 - RNA, 18 nt, Artificial Sequence
  Synthetic
guucacuuugcuucguca

SEQ ID NO: 212449 - RNA, 19 nt, Artificial Sequence
  Synthetic
gguucacuuugcuucguca

SEQ ID NO: 212450 - RNA, 20 nt, Artificial Sequence
  Synthetic
agguucacuuugcuucguca

SEQ ID NO: 212451 - RNA, 21 nt, Artificial Sequence
  Synthetic
gagguucacuuugcuucguca

SEQ ID NO: 212452 - RNA, 22 nt, Artificial Sequence
  Synthetic
agagguucacuuugcuucguca

SEQ ID NO: 212453 - RNA, 23 nt, Artificial Sequence
  Synthetic
aagagguucacuuugcuucguca

SEQ ID NO: 212454 - RNA, 24 nt, Artificial Sequence
  Synthetic
caagagguucacuuugcuucguca

SEQ ID NO: 212455 - RNA, 18 nt, Artificial Sequence
  Synthetic
gggacgagauuuucguca

SEQ ID NO: 212456 - RNA, 19 nt, Artificial Sequence
  Synthetic
agggacgagauuuucguca

SEQ ID NO: 212457 - RNA, 20 nt, Artificial Sequence
  Synthetic
aagggacgagauuuucguca

SEQ ID NO: 212458 - RNA, 21 nt, Artificial Sequence
  Synthetic
uaagggacgagauuuucguca

SEQ ID NO: 212459 - RNA, 22 nt, Artificial Sequence
  Synthetic
auaagggacgagauuuucguca

SEQ ID NO: 212460 - RNA, 23 nt, Artificial Sequence
  Synthetic
uauaagggacgagauuuucguca

SEQ ID NO: 212461 - RNA, 24 nt, Artificial Sequence
  Synthetic
auauaagggacgagauuuucguca

SEQ ID NO: 212462 - RNA, 18 nt, Artificial Sequence
  Synthetic
cccagaaaucaaagguca

SEQ ID NO: 212463 - RNA, 19 nt, Artificial Sequence
  Synthetic
acccagaaaucaaagguca

SEQ ID NO: 212464 - RNA, 20 nt, Artificial Sequence
  Synthetic
gacccagaaaucaaagguca

SEQ ID NO: 212465 - RNA, 21 nt, Artificial Sequence
  Synthetic
ugacccagaaaucaaagguca

SEQ ID NO: 212466 - RNA, 22 nt, Artificial Sequence
  Synthetic
uugacccagaaaucaaagguca

SEQ ID NO: 212467 - RNA, 23 nt, Artificial Sequence
  Synthetic
uuugacccagaaaucaaagguca

SEQ ID NO: 212468 - RNA, 24 nt, Artificial Sequence
  Synthetic
guuugacccagaaaucaaagguca

SEQ ID NO: 212469 - RNA, 18 nt, Artificial Sequence
  Synthetic
aaaguguaggaaagguca

SEQ ID NO: 212470 - RNA, 19 nt, Artificial Sequence
  Synthetic
aaaaguguaggaaagguca

SEQ ID NO: 212471 - RNA, 20 nt, Artificial Sequence
  Synthetic
aaaaaguguaggaaagguca

SEQ ID NO: 212472 - RNA, 21 nt, Artificial Sequence
  Synthetic
uaaaaaguguaggaaagguca

SEQ ID NO: 212473 - RNA, 22 nt, Artificial Sequence
  Synthetic
auaaaaaguguaggaaagguca

SEQ ID NO: 212474 - RNA, 23 nt, Artificial Sequence
  Synthetic
aauaaaaaguguaggaaagguca

SEQ ID NO: 212475 - RNA, 24 nt, Artificial Sequence
  Synthetic
gaauaaaaaguguaggaaagguca

SEQ ID NO: 212476 - RNA, 18 nt, Artificial Sequence
  Synthetic
gugacuuuaccaagguca

SEQ ID NO: 212477 - RNA, 19 nt, Artificial Sequence
  Synthetic
agugacuuuaccaagguca

SEQ ID NO: 212478 - RNA, 20 nt, Artificial Sequence
  Synthetic
aagugacuuuaccaagguca

SEQ ID NO: 212479 - RNA, 21 nt, Artificial Sequence
  Synthetic
caagugacuuuaccaagguca

SEQ ID NO: 212480 - RNA, 22 nt, Artificial Sequence
  Synthetic
ucaagugacuuuaccaagguca

SEQ ID NO: 212481 - RNA, 23 nt, Artificial Sequence
  Synthetic
gucaagugacuuuaccaagguca

SEQ ID NO: 212482 - RNA, 24 nt, Artificial Sequence
  Synthetic
ggucaagugacuuuaccaagguca

SEQ ID NO: 212483 - RNA, 18 nt, Artificial Sequence
  Synthetic
caaugucagucaagguca

SEQ ID NO: 212484 - RNA, 19 nt, Artificial Sequence
  Synthetic
ucaaugucagucaagguca

SEQ ID NO: 212485 - RNA, 20 nt, Artificial Sequence
  Synthetic
cucaaugucagucaagguca

SEQ ID NO: 212486 - RNA, 21 nt, Artificial Sequence
  Synthetic
ccucaaugucagucaagguca

SEQ ID NO: 212487 - RNA, 22 nt, Artificial Sequence
  Synthetic
cccucaaugucagucaagguca

SEQ ID NO: 212488 - RNA, 23 nt, Artificial Sequence
  Synthetic
ccccucaaugucagucaagguca

SEQ ID NO: 212489 - RNA, 24 nt, Artificial Sequence
  Synthetic
cccccucaaugucagucaagguca

SEQ ID NO: 212490 - RNA, 18 nt, Artificial Sequence
  Synthetic
aucuccauaguaagguca

SEQ ID NO: 212491 - RNA, 19 nt, Artificial Sequence
  Synthetic
caucuccauaguaagguca

SEQ ID NO: 212492 - RNA, 20 nt, Artificial Sequence
  Synthetic
acaucuccauaguaagguca

SEQ ID NO: 212493 - RNA, 21 nt, Artificial Sequence
  Synthetic
uacaucuccauaguaagguca

SEQ ID NO: 212494 - RNA, 22 nt, Artificial Sequence
  Synthetic
guacaucuccauaguaagguca

SEQ ID NO: 212495 - RNA, 23 nt, Artificial Sequence
  Synthetic
uguacaucuccauaguaagguca

SEQ ID NO: 212496 - RNA, 24 nt, Artificial Sequence
  Synthetic
auguacaucuccauaguaagguca

SEQ ID NO: 212497 - RNA, 18 nt, Artificial Sequence
  Synthetic
ugucacgucaacagguca

SEQ ID NO: 212498 - RNA, 19 nt, Artificial Sequence
  Synthetic
uugucacgucaacagguca

SEQ ID NO: 212499 - RNA, 20 nt, Artificial Sequence
  Synthetic
uuugucacgucaacagguca

SEQ ID NO: 212500 - RNA, 21 nt, Artificial Sequence
  Synthetic
cuuugucacgucaacagguca

SEQ ID NO: 212501 - RNA, 22 nt, Artificial Sequence
  Synthetic
ucuuugucacgucaacagguca

SEQ ID NO: 212502 - RNA, 23 nt, Artificial Sequence
  Synthetic
cucuuugucacgucaacagguca

SEQ ID NO: 212503 - RNA, 24 nt, Artificial Sequence
  Synthetic
ccucuuugucacgucaacagguca

SEQ ID NO: 212504 - RNA, 18 nt, Artificial Sequence
  Synthetic
uguuggugguacagguca

SEQ ID NO: 212505 - RNA, 19 nt, Artificial Sequence
  Synthetic
auguuggugguacagguca

SEQ ID NO: 212506 - RNA, 20 nt, Artificial Sequence
  Synthetic
gauguuggugguacagguca

SEQ ID NO: 212507 - RNA, 21 nt, Artificial Sequence
  Synthetic
ugauguuggugguacagguca

SEQ ID NO: 212508 - RNA, 22 nt, Artificial Sequence
  Synthetic
uugauguuggugguacagguca

SEQ ID NO: 212509 - RNA, 23 nt, Artificial Sequence
  Synthetic
guugauguuggugguacagguca

SEQ ID NO: 212510 - RNA, 24 nt, Artificial Sequence
  Synthetic
uguugauguuggugguacagguca

SEQ ID NO: 212511 - RNA, 18 nt, Artificial Sequence
  Synthetic
ucaagauggaccagguca

SEQ ID NO: 212512 - RNA, 19 nt, Artificial Sequence
  Synthetic
gucaagauggaccagguca

SEQ ID NO: 212513 - RNA, 20 nt, Artificial Sequence
  Synthetic
ugucaagauggaccagguca

SEQ ID NO: 212514 - RNA, 21 nt, Artificial Sequence
  Synthetic
uugucaagauggaccagguca

SEQ ID NO: 212515 - RNA, 22 nt, Artificial Sequence
  Synthetic
auugucaagauggaccagguca

SEQ ID NO: 212516 - RNA, 23 nt, Artificial Sequence
  Synthetic
aauugucaagauggaccagguca

SEQ ID NO: 212517 - RNA, 24 nt, Artificial Sequence
  Synthetic
aaauugucaagauggaccagguca

SEQ ID NO: 212518 - RNA, 18 nt, Artificial Sequence
  Synthetic
aucauuuuccccagguca

SEQ ID NO: 212519 - RNA, 19 nt, Artificial Sequence
  Synthetic
aaucauuuuccccagguca

SEQ ID NO: 212520 - RNA, 20 nt, Artificial Sequence
  Synthetic
aaaucauuuuccccagguca

SEQ ID NO: 212521 - RNA, 21 nt, Artificial Sequence
  Synthetic
uaaaucauuuuccccagguca

SEQ ID NO: 212522 - RNA, 22 nt, Artificial Sequence
  Synthetic
uuaaaucauuuuccccagguca

SEQ ID NO: 212523 - RNA, 23 nt, Artificial Sequence
  Synthetic
uuuaaaucauuuuccccagguca

SEQ ID NO: 212524 - RNA, 24 nt, Artificial Sequence
  Synthetic
cuuuaaaucauuuuccccagguca

SEQ ID NO: 212525 - RNA, 18 nt, Artificial Sequence
  Synthetic
uccacaugaggcagguca

SEQ ID NO: 212526 - RNA, 19 nt, Artificial Sequence
  Synthetic
auccacaugaggcagguca

SEQ ID NO: 212527 - RNA, 20 nt, Artificial Sequence
  Synthetic
aauccacaugaggcagguca

SEQ ID NO: 212528 - RNA, 21 nt, Artificial Sequence
  Synthetic
gaauccacaugaggcagguca

SEQ ID NO: 212529 - RNA, 22 nt, Artificial Sequence
  Synthetic
agaauccacaugaggcagguca

SEQ ID NO: 212530 - RNA, 23 nt, Artificial Sequence
  Synthetic
cagaauccacaugaggcagguca

SEQ ID NO: 212531 - RNA, 24 nt, Artificial Sequence
  Synthetic
ucagaauccacaugaggcagguca

SEQ ID NO: 212532 - RNA, 18 nt, Artificial Sequence
  Synthetic
auugagucaaugagguca

SEQ ID NO: 212533 - RNA, 19 nt, Artificial Sequence
  Synthetic
aauugagucaaugagguca

SEQ ID NO: 212534 - RNA, 20 nt, Artificial Sequence
  Synthetic
gaauugagucaaugagguca

SEQ ID NO: 212535 - RNA, 21 nt, Artificial Sequence
  Synthetic
ugaauugagucaaugagguca

SEQ ID NO: 212536 - RNA, 22 nt, Artificial Sequence
  Synthetic
gugaauugagucaaugagguca

SEQ ID NO: 212537 - RNA, 23 nt, Artificial Sequence
  Synthetic
ggugaauugagucaaugagguca

SEQ ID NO: 212538 - RNA, 24 nt, Artificial Sequence
  Synthetic
aggugaauugagucaaugagguca

SEQ ID NO: 212539 - RNA, 18 nt, Artificial Sequence
  Synthetic
caccagugggauagguca

SEQ ID NO: 212540 - RNA, 19 nt, Artificial Sequence
  Synthetic
gcaccagugggauagguca

SEQ ID NO: 212541 - RNA, 20 nt, Artificial Sequence
  Synthetic
ugcaccagugggauagguca

SEQ ID NO: 212542 - RNA, 21 nt, Artificial Sequence
  Synthetic
augcaccagugggauagguca

SEQ ID NO: 212543 - RNA, 22 nt, Artificial Sequence
  Synthetic
aaugcaccagugggauagguca

SEQ ID NO: 212544 - RNA, 23 nt, Artificial Sequence
  Synthetic
caaugcaccagugggauagguca

SEQ ID NO: 212545 - RNA, 24 nt, Artificial Sequence
  Synthetic
acaaugcaccagugggauagguca

SEQ ID NO: 212546 - RNA, 18 nt, Artificial Sequence
  Synthetic
uaugaaaauccuagguca

SEQ ID NO: 212547 - RNA, 19 nt, Artificial Sequence
  Synthetic
guaugaaaauccuagguca

SEQ ID NO: 212548 - RNA, 20 nt, Artificial Sequence
  Synthetic
aguaugaaaauccuagguca

SEQ ID NO: 212549 - RNA, 21 nt, Artificial Sequence
  Synthetic
gaguaugaaaauccuagguca

SEQ ID NO: 212550 - RNA, 22 nt, Artificial Sequence
  Synthetic
ugaguaugaaaauccuagguca

SEQ ID NO: 212551 - RNA, 23 nt, Artificial Sequence
  Synthetic
uugaguaugaaaauccuagguca

SEQ ID NO: 212552 - RNA, 24 nt, Artificial Sequence
  Synthetic
auugaguaugaaaauccuagguca

SEQ ID NO: 212553 - RNA, 18 nt, Artificial Sequence
  Synthetic
aaaccagagcuucgguca

SEQ ID NO: 212554 - RNA, 19 nt, Artificial Sequence
  Synthetic
aaaaccagagcuucgguca

SEQ ID NO: 212555 - RNA, 20 nt, Artificial Sequence
  Synthetic
uaaaaccagagcuucgguca

SEQ ID NO: 212556 - RNA, 21 nt, Artificial Sequence
  Synthetic
auaaaaccagagcuucgguca

SEQ ID NO: 212557 - RNA, 22 nt, Artificial Sequence
  Synthetic
uauaaaaccagagcuucgguca

SEQ ID NO: 212558 - RNA, 23 nt, Artificial Sequence
  Synthetic
auauaaaaccagagcuucgguca

SEQ ID NO: 212559 - RNA, 24 nt, Artificial Sequence
  Synthetic
cauauaaaaccagagcuucgguca

SEQ ID NO: 212560 - RNA, 18 nt, Artificial Sequence
  Synthetic
ugauccuggguaggguca

SEQ ID NO: 212561 - RNA, 19 nt, Artificial Sequence
  Synthetic
cugauccuggguaggguca

SEQ ID NO: 212562 - RNA, 20 nt, Artificial Sequence
  Synthetic
ucugauccuggguaggguca

SEQ ID NO: 212563 - RNA, 21 nt, Artificial Sequence
  Synthetic
uucugauccuggguaggguca

SEQ ID NO: 212564 - RNA, 22 nt, Artificial Sequence
  Synthetic
guucugauccuggguaggguca

SEQ ID NO: 212565 - RNA, 23 nt, Artificial Sequence
  Synthetic
gguucugauccuggguaggguca

SEQ ID NO: 212566 - RNA, 24 nt, Artificial Sequence
  Synthetic
ugguucugauccuggguaggguca

SEQ ID NO: 212567 - RNA, 18 nt, Artificial Sequence
  Synthetic
aguuccacaaagggguca

SEQ ID NO: 212568 - RNA, 19 nt, Artificial Sequence
  Synthetic
gaguuccacaaagggguca

SEQ ID NO: 212569 - RNA, 20 nt, Artificial Sequence
  Synthetic
cgaguuccacaaagggguca

SEQ ID NO: 212570 - RNA, 21 nt, Artificial Sequence
  Synthetic
gcgaguuccacaaagggguca

SEQ ID NO: 212571 - RNA, 22 nt, Artificial Sequence
  Synthetic
ugcgaguuccacaaagggguca

SEQ ID NO: 212572 - RNA, 23 nt, Artificial Sequence
  Synthetic
uugcgaguuccacaaagggguca

SEQ ID NO: 212573 - RNA, 24 nt, Artificial Sequence
  Synthetic
guugcgaguuccacaaagggguca

SEQ ID NO: 212574 - RNA, 18 nt, Artificial Sequence
  Synthetic
auuuggacuaauggguca

SEQ ID NO: 212575 - RNA, 19 nt, Artificial Sequence
  Synthetic
uauuuggacuaauggguca

SEQ ID NO: 212576 - RNA, 20 nt, Artificial Sequence
  Synthetic
guauuuggacuaauggguca

SEQ ID NO: 212577 - RNA, 21 nt, Artificial Sequence
  Synthetic
uguauuuggacuaauggguca

SEQ ID NO: 212578 - RNA, 22 nt, Artificial Sequence
  Synthetic
guguauuuggacuaauggguca

SEQ ID NO: 212579 - RNA, 23 nt, Artificial Sequence
  Synthetic
uguguauuuggacuaauggguca

SEQ ID NO: 212580 - RNA, 24 nt, Artificial Sequence
  Synthetic
guguguauuuggacuaauggguca

SEQ ID NO: 212581 - RNA, 18 nt, Artificial Sequence
  Synthetic
ugcugaagaccuggguca

SEQ ID NO: 212582 - RNA, 19 nt, Artificial Sequence
  Synthetic
gugcugaagaccuggguca

SEQ ID NO: 212583 - RNA, 20 nt, Artificial Sequence
  Synthetic
ggugcugaagaccuggguca

SEQ ID NO: 212584 - RNA, 21 nt, Artificial Sequence
  Synthetic
aggugcugaagaccuggguca

SEQ ID NO: 212585 - RNA, 22 nt, Artificial Sequence
  Synthetic
aaggugcugaagaccuggguca

SEQ ID NO: 212586 - RNA, 23 nt, Artificial Sequence
  Synthetic
aaaggugcugaagaccuggguca

SEQ ID NO: 212587 - RNA, 24 nt, Artificial Sequence
  Synthetic
gaaaggugcugaagaccuggguca

SEQ ID NO: 212588 - RNA, 18 nt, Artificial Sequence
  Synthetic
aagucuaacccuggguca

SEQ ID NO: 212589 - RNA, 19 nt, Artificial Sequence
  Synthetic
uaagucuaacccuggguca

SEQ ID NO: 212590 - RNA, 20 nt, Artificial Sequence
  Synthetic
cuaagucuaacccuggguca

SEQ ID NO: 212591 - RNA, 21 nt, Artificial Sequence
  Synthetic
ucuaagucuaacccuggguca

SEQ ID NO: 212592 - RNA, 22 nt, Artificial Sequence
  Synthetic
cucuaagucuaacccuggguca

SEQ ID NO: 212593 - RNA, 23 nt, Artificial Sequence
  Synthetic
ucucuaagucuaacccuggguca

SEQ ID NO: 212594 - RNA, 24 nt, Artificial Sequence
  Synthetic
aucucuaagucuaacccuggguca

SEQ ID NO: 212595 - RNA, 18 nt, Artificial Sequence
  Synthetic
ugcaaaagggcuggguca

SEQ ID NO: 212596 - RNA, 19 nt, Artificial Sequence
  Synthetic
cugcaaaagggcuggguca

SEQ ID NO: 212597 - RNA, 20 nt, Artificial Sequence
  Synthetic
ucugcaaaagggcuggguca

SEQ ID NO: 212598 - RNA, 21 nt, Artificial Sequence
  Synthetic
uucugcaaaagggcuggguca

SEQ ID NO: 212599 - RNA, 22 nt, Artificial Sequence
  Synthetic
cuucugcaaaagggcuggguca

SEQ ID NO: 212600 - RNA, 23 nt, Artificial Sequence
  Synthetic
ucuucugcaaaagggcuggguca

SEQ ID NO: 212601 - RNA, 24 nt, Artificial Sequence
  Synthetic
uucuucugcaaaagggcuggguca

SEQ ID NO: 212602 - RNA, 18 nt, Artificial Sequence
  Synthetic
gacuagaggaguggguca

SEQ ID NO: 212603 - RNA, 19 nt, Artificial Sequence
  Synthetic
agacuagaggaguggguca

SEQ ID NO: 212604 - RNA, 20 nt, Artificial Sequence
  Synthetic
gagacuagaggaguggguca

SEQ ID NO: 212605 - RNA, 21 nt, Artificial Sequence
  Synthetic
ugagacuagaggaguggguca

SEQ ID NO: 212606 - RNA, 22 nt, Artificial Sequence
  Synthetic
gugagacuagaggaguggguca

SEQ ID NO: 212607 - RNA, 23 nt, Artificial Sequence
  Synthetic
agugagacuagaggaguggguca

SEQ ID NO: 212608 - RNA, 24 nt, Artificial Sequence
  Synthetic
cagugagacuagaggaguggguca

SEQ ID NO: 212609 - RNA, 18 nt, Artificial Sequence
  Synthetic
agcugcuguuguggguca

SEQ ID NO: 212610 - RNA, 19 nt, Artificial Sequence
  Synthetic
cagcugcuguuguggguca

SEQ ID NO: 212611 - RNA, 20 nt, Artificial Sequence
  Synthetic
ccagcugcuguuguggguca

SEQ ID NO: 212612 - RNA, 21 nt, Artificial Sequence
  Synthetic
gccagcugcuguuguggguca

SEQ ID NO: 212613 - RNA, 22 nt, Artificial Sequence
  Synthetic
agccagcugcuguuguggguca

SEQ ID NO: 212614 - RNA, 23 nt, Artificial Sequence
  Synthetic
aagccagcugcuguuguggguca

SEQ ID NO: 212615 - RNA, 24 nt, Artificial Sequence
  Synthetic
caagccagcugcuguuguggguca

SEQ ID NO: 212616 - RNA, 18 nt, Artificial Sequence
  Synthetic
gcuagcagaacaugguca

SEQ ID NO: 212617 - RNA, 19 nt, Artificial Sequence
  Synthetic
ggcuagcagaacaugguca

SEQ ID NO: 212618 - RNA, 20 nt, Artificial Sequence
  Synthetic
aggcuagcagaacaugguca

SEQ ID NO: 212619 - RNA, 21 nt, Artificial Sequence
  Synthetic
aaggcuagcagaacaugguca

SEQ ID NO: 212620 - RNA, 22 nt, Artificial Sequence
  Synthetic
uaaggcuagcagaacaugguca

SEQ ID NO: 212621 - RNA, 23 nt, Artificial Sequence
  Synthetic
auaaggcuagcagaacaugguca

SEQ ID NO: 212622 - RNA, 24 nt, Artificial Sequence
  Synthetic
cauaaggcuagcagaacaugguca

SEQ ID NO: 212623 - RNA, 18 nt, Artificial Sequence
  Synthetic
acgggcuuaacaugguca

SEQ ID NO: 212624 - RNA, 19 nt, Artificial Sequence
  Synthetic
cacgggcuuaacaugguca

SEQ ID NO: 212625 - RNA, 20 nt, Artificial Sequence
  Synthetic
ucacgggcuuaacaugguca

SEQ ID NO: 212626 - RNA, 21 nt, Artificial Sequence
  Synthetic
uucacgggcuuaacaugguca

SEQ ID NO: 212627 - RNA, 22 nt, Artificial Sequence
  Synthetic
uuucacgggcuuaacaugguca

SEQ ID NO: 212628 - RNA, 23 nt, Artificial Sequence
  Synthetic
auuucacgggcuuaacaugguca

SEQ ID NO: 212629 - RNA, 24 nt, Artificial Sequence
  Synthetic
cauuucacgggcuuaacaugguca

SEQ ID NO: 212630 - RNA, 18 nt, Artificial Sequence
  Synthetic
uagggggaugacugguca

SEQ ID NO: 212631 - RNA, 19 nt, Artificial Sequence
  Synthetic
guagggggaugacugguca

SEQ ID NO: 212632 - RNA, 20 nt, Artificial Sequence
  Synthetic
gguagggggaugacugguca

SEQ ID NO: 212633 - RNA, 21 nt, Artificial Sequence
  Synthetic
agguagggggaugacugguca

SEQ ID NO: 212634 - RNA, 22 nt, Artificial Sequence
  Synthetic
gagguagggggaugacugguca

SEQ ID NO: 212635 - RNA, 23 nt, Artificial Sequence
  Synthetic
agagguagggggaugacugguca

SEQ ID NO: 212636 - RNA, 24 nt, Artificial Sequence
  Synthetic
gagagguagggggaugacugguca

SEQ ID NO: 212637 - RNA, 18 nt, Artificial Sequence
  Synthetic
ucuggucucucgugguca

SEQ ID NO: 212638 - RNA, 19 nt, Artificial Sequence
  Synthetic
uucuggucucucgugguca

SEQ ID NO: 212639 - RNA, 20 nt, Artificial Sequence
  Synthetic
uuucuggucucucgugguca

SEQ ID NO: 212640 - RNA, 21 nt, Artificial Sequence
  Synthetic
cuuucuggucucucgugguca

SEQ ID NO: 212641 - RNA, 22 nt, Artificial Sequence
  Synthetic
ucuuucuggucucucgugguca

SEQ ID NO: 212642 - RNA, 23 nt, Artificial Sequence
  Synthetic
uucuuucuggucucucgugguca

SEQ ID NO: 212643 - RNA, 24 nt, Artificial Sequence
  Synthetic
auucuuucuggucucucgugguca

SEQ ID NO: 212644 - RNA, 18 nt, Artificial Sequence
  Synthetic
uugucuauagugugguca

SEQ ID NO: 212645 - RNA, 19 nt, Artificial Sequence
  Synthetic
auugucuauagugugguca

SEQ ID NO: 212646 - RNA, 20 nt, Artificial Sequence
  Synthetic
uauugucuauagugugguca

SEQ ID NO: 212647 - RNA, 21 nt, Artificial Sequence
  Synthetic
uuauugucuauagugugguca

SEQ ID NO: 212648 - RNA, 22 nt, Artificial Sequence
  Synthetic
auuauugucuauagugugguca

SEQ ID NO: 212649 - RNA, 23 nt, Artificial Sequence
  Synthetic
uauuauugucuauagugugguca

SEQ ID NO: 212650 - RNA, 24 nt, Artificial Sequence
  Synthetic
guauuauugucuauagugugguca

SEQ ID NO: 212651 - RNA, 18 nt, Artificial Sequence
  Synthetic
cucauuccauugugguca

SEQ ID NO: 212652 - RNA, 19 nt, Artificial Sequence
  Synthetic
ucucauuccauugugguca

SEQ ID NO: 212653 - RNA, 20 nt, Artificial Sequence
  Synthetic
gucucauuccauugugguca

SEQ ID NO: 212654 - RNA, 21 nt, Artificial Sequence
  Synthetic
agucucauuccauugugguca

SEQ ID NO: 212655 - RNA, 22 nt, Artificial Sequence
  Synthetic
uagucucauuccauugugguca

SEQ ID NO: 212656 - RNA, 23 nt, Artificial Sequence
  Synthetic
cuagucucauuccauugugguca

SEQ ID NO: 212657 - RNA, 24 nt, Artificial Sequence
  Synthetic
ucuagucucauuccauugugguca

SEQ ID NO: 212658 - RNA, 18 nt, Artificial Sequence
  Synthetic
gcaauaucaucuugguca

SEQ ID NO: 212659 - RNA, 19 nt, Artificial Sequence
  Synthetic
ggcaauaucaucuugguca

SEQ ID NO: 212660 - RNA, 20 nt, Artificial Sequence
  Synthetic
gggcaauaucaucuugguca

SEQ ID NO: 212661 - RNA, 21 nt, Artificial Sequence
  Synthetic
cgggcaauaucaucuugguca

SEQ ID NO: 212662 - RNA, 22 nt, Artificial Sequence
  Synthetic
ccgggcaauaucaucuugguca

SEQ ID NO: 212663 - RNA, 23 nt, Artificial Sequence
  Synthetic
uccgggcaauaucaucuugguca

SEQ ID NO: 212664 - RNA, 24 nt, Artificial Sequence
  Synthetic
uuccgggcaauaucaucuugguca

SEQ ID NO: 212665 - RNA, 18 nt, Artificial Sequence
  Synthetic
gccaagauaaaaauguca

SEQ ID NO: 212666 - RNA, 19 nt, Artificial Sequence
  Synthetic
agccaagauaaaaauguca

SEQ ID NO: 212667 - RNA, 20 nt, Artificial Sequence
  Synthetic
gagccaagauaaaaauguca

SEQ ID NO: 212668 - RNA, 21 nt, Artificial Sequence
  Synthetic
agagccaagauaaaaauguca

SEQ ID NO: 212669 - RNA, 22 nt, Artificial Sequence
  Synthetic
aagagccaagauaaaaauguca

SEQ ID NO: 212670 - RNA, 23 nt, Artificial Sequence
  Synthetic
gaagagccaagauaaaaauguca

SEQ ID NO: 212671 - RNA, 24 nt, Artificial Sequence
  Synthetic
cgaagagccaagauaaaaauguca

SEQ ID NO: 212672 - RNA, 18 nt, Artificial Sequence
  Synthetic
gcagaguacacaauguca

SEQ ID NO: 212673 - RNA, 19 nt, Artificial Sequence
  Synthetic
ggcagaguacacaauguca

SEQ ID NO: 212674 - RNA, 20 nt, Artificial Sequence
  Synthetic
uggcagaguacacaauguca

SEQ ID NO: 212675 - RNA, 21 nt, Artificial Sequence
  Synthetic
auggcagaguacacaauguca

SEQ ID NO: 212676 - RNA, 22 nt, Artificial Sequence
  Synthetic
aauggcagaguacacaauguca

SEQ ID NO: 212677 - RNA, 23 nt, Artificial Sequence
  Synthetic
uaauggcagaguacacaauguca

SEQ ID NO: 212678 - RNA, 24 nt, Artificial Sequence
  Synthetic
uuaauggcagaguacacaauguca

SEQ ID NO: 212679 - RNA, 18 nt, Artificial Sequence
  Synthetic
cugcccagaccaauguca

SEQ ID NO: 212680 - RNA, 19 nt, Artificial Sequence
  Synthetic
acugcccagaccaauguca

SEQ ID NO: 212681 - RNA, 20 nt, Artificial Sequence
  Synthetic
cacugcccagaccaauguca

SEQ ID NO: 212682 - RNA, 21 nt, Artificial Sequence
  Synthetic
ccacugcccagaccaauguca

SEQ ID NO: 212683 - RNA, 22 nt, Artificial Sequence
  Synthetic
accacugcccagaccaauguca

SEQ ID NO: 212684 - RNA, 23 nt, Artificial Sequence
  Synthetic
aaccacugcccagaccaauguca

SEQ ID NO: 212685 - RNA, 24 nt, Artificial Sequence
  Synthetic
aaaccacugcccagaccaauguca

SEQ ID NO: 212686 - RNA, 18 nt, Artificial Sequence
  Synthetic
aagaugccuccaauguca

SEQ ID NO: 212687 - RNA, 19 nt, Artificial Sequence
  Synthetic
caagaugccuccaauguca

SEQ ID NO: 212688 - RNA, 20 nt, Artificial Sequence
  Synthetic
ucaagaugccuccaauguca

SEQ ID NO: 212689 - RNA, 21 nt, Artificial Sequence
  Synthetic
cucaagaugccuccaauguca

SEQ ID NO: 212690 - RNA, 22 nt, Artificial Sequence
  Synthetic
ccucaagaugccuccaauguca

SEQ ID NO: 212691 - RNA, 23 nt, Artificial Sequence
  Synthetic
accucaagaugccuccaauguca

SEQ ID NO: 212692 - RNA, 24 nt, Artificial Sequence
  Synthetic
uaccucaagaugccuccaauguca

SEQ ID NO: 212693 - RNA, 18 nt, Artificial Sequence
  Synthetic
caaaugauaagaauguca

SEQ ID NO: 212694 - RNA, 19 nt, Artificial Sequence
  Synthetic
ucaaaugauaagaauguca

SEQ ID NO: 212695 - RNA, 20 nt, Artificial Sequence
  Synthetic
uucaaaugauaagaauguca

SEQ ID NO: 212696 - RNA, 21 nt, Artificial Sequence
  Synthetic
cuucaaaugauaagaauguca

SEQ ID NO: 212697 - RNA, 22 nt, Artificial Sequence
  Synthetic
acuucaaaugauaagaauguca

SEQ ID NO: 212698 - RNA, 23 nt, Artificial Sequence
  Synthetic
gacuucaaaugauaagaauguca

SEQ ID NO: 212699 - RNA, 24 nt, Artificial Sequence
  Synthetic
ugacuucaaaugauaagaauguca

SEQ ID NO: 212700 - RNA, 18 nt, Artificial Sequence
  Synthetic
cacaauccccacauguca

SEQ ID NO: 212701 - RNA, 19 nt, Artificial Sequence
  Synthetic
ccacaauccccacauguca

SEQ ID NO: 212702 - RNA, 20 nt, Artificial Sequence
  Synthetic
cccacaauccccacauguca

SEQ ID NO: 212703 - RNA, 21 nt, Artificial Sequence
  Synthetic
ccccacaauccccacauguca

SEQ ID NO: 212704 - RNA, 22 nt, Artificial Sequence
  Synthetic
uccccacaauccccacauguca

SEQ ID NO: 212705 - RNA, 23 nt, Artificial Sequence
  Synthetic
auccccacaauccccacauguca

SEQ ID NO: 212706 - RNA, 24 nt, Artificial Sequence
  Synthetic
aauccccacaauccccacauguca

SEQ ID NO: 212707 - RNA, 18 nt, Artificial Sequence
  Synthetic
ugacagcaucccauguca

SEQ ID NO: 212708 - RNA, 19 nt, Artificial Sequence
  Synthetic
cugacagcaucccauguca

SEQ ID NO: 212709 - RNA, 20 nt, Artificial Sequence
  Synthetic
gcugacagcaucccauguca

SEQ ID NO: 212710 - RNA, 21 nt, Artificial Sequence
  Synthetic
agcugacagcaucccauguca

SEQ ID NO: 212711 - RNA, 22 nt, Artificial Sequence
  Synthetic
uagcugacagcaucccauguca

SEQ ID NO: 212712 - RNA, 23 nt, Artificial Sequence
  Synthetic
uuagcugacagcaucccauguca

SEQ ID NO: 212713 - RNA, 24 nt, Artificial Sequence
  Synthetic
uuuagcugacagcaucccauguca

SEQ ID NO: 212714 - RNA, 18 nt, Artificial Sequence
  Synthetic
uggguaaauugcauguca

SEQ ID NO: 212715 - RNA, 19 nt, Artificial Sequence
  Synthetic
auggguaaauugcauguca

SEQ ID NO: 212716 - RNA, 20 nt, Artificial Sequence
  Synthetic
cauggguaaauugcauguca

SEQ ID NO: 212717 - RNA, 21 nt, Artificial Sequence
  Synthetic
acauggguaaauugcauguca

SEQ ID NO: 212718 - RNA, 22 nt, Artificial Sequence
  Synthetic
uacauggguaaauugcauguca

SEQ ID NO: 212719 - RNA, 23 nt, Artificial Sequence
  Synthetic
uuacauggguaaauugcauguca

SEQ ID NO: 212720 - RNA, 24 nt, Artificial Sequence
  Synthetic
guuacauggguaaauugcauguca

SEQ ID NO: 212721 - RNA, 18 nt, Artificial Sequence
  Synthetic
auagguaaacucauguca

SEQ ID NO: 212722 - RNA, 19 nt, Artificial Sequence
  Synthetic
uauagguaaacucauguca

SEQ ID NO: 212723 - RNA, 20 nt, Artificial Sequence
  Synthetic
auauagguaaacucauguca

SEQ ID NO: 212724 - RNA, 21 nt, Artificial Sequence
  Synthetic
uauauagguaaacucauguca

SEQ ID NO: 212725 - RNA, 22 nt, Artificial Sequence
  Synthetic
uuauauagguaaacucauguca

SEQ ID NO: 212726 - RNA, 23 nt, Artificial Sequence
  Synthetic
guuauauagguaaacucauguca

SEQ ID NO: 212727 - RNA, 24 nt, Artificial Sequence
  Synthetic
uguuauauagguaaacucauguca

SEQ ID NO: 212728 - RNA, 18 nt, Artificial Sequence
  Synthetic
uuguauuuauucauguca

SEQ ID NO: 212729 - RNA, 19 nt, Artificial Sequence
  Synthetic
uuuguauuuauucauguca

SEQ ID NO: 212730 - RNA, 20 nt, Artificial Sequence
  Synthetic
cuuuguauuuauucauguca

SEQ ID NO: 212731 - RNA, 21 nt, Artificial Sequence
  Synthetic
ccuuuguauuuauucauguca

SEQ ID NO: 212732 - RNA, 22 nt, Artificial Sequence
  Synthetic
gccuuuguauuuauucauguca

SEQ ID NO: 212733 - RNA, 23 nt, Artificial Sequence
  Synthetic
ugccuuuguauuuauucauguca

SEQ ID NO: 212734 - RNA, 24 nt, Artificial Sequence
  Synthetic
augccuuuguauuuauucauguca

SEQ ID NO: 212735 - RNA, 18 nt, Artificial Sequence
  Synthetic
ugcaacagagcgauguca

SEQ ID NO: 212736 - RNA, 19 nt, Artificial Sequence
  Synthetic
uugcaacagagcgauguca

SEQ ID NO: 212737 - RNA, 20 nt, Artificial Sequence
  Synthetic
auugcaacagagcgauguca

SEQ ID NO: 212738 - RNA, 21 nt, Artificial Sequence
  Synthetic
uauugcaacagagcgauguca

SEQ ID NO: 212739 - RNA, 22 nt, Artificial Sequence
  Synthetic
guauugcaacagagcgauguca

SEQ ID NO: 212740 - RNA, 23 nt, Artificial Sequence
  Synthetic
aguauugcaacagagcgauguca

SEQ ID NO: 212741 - RNA, 24 nt, Artificial Sequence
  Synthetic
gaguauugcaacagagcgauguca

SEQ ID NO: 212742 - RNA, 18 nt, Artificial Sequence
  Synthetic
ucccugaccuauauguca

SEQ ID NO: 212743 - RNA, 19 nt, Artificial Sequence
  Synthetic
gucccugaccuauauguca

SEQ ID NO: 212744 - RNA, 20 nt, Artificial Sequence
  Synthetic
cgucccugaccuauauguca

SEQ ID NO: 212745 - RNA, 21 nt, Artificial Sequence
  Synthetic
acgucccugaccuauauguca

SEQ ID NO: 212746 - RNA, 22 nt, Artificial Sequence
  Synthetic
gacgucccugaccuauauguca

SEQ ID NO: 212747 - RNA, 23 nt, Artificial Sequence
  Synthetic
agacgucccugaccuauauguca

SEQ ID NO: 212748 - RNA, 24 nt, Artificial Sequence
  Synthetic
aagacgucccugaccuauauguca

SEQ ID NO: 212749 - RNA, 18 nt, Artificial Sequence
  Synthetic
ugguagguguauauguca

SEQ ID NO: 212750 - RNA, 19 nt, Artificial Sequence
  Synthetic
augguagguguauauguca

SEQ ID NO: 212751 - RNA, 20 nt, Artificial Sequence
  Synthetic
caugguagguguauauguca

SEQ ID NO: 212752 - RNA, 21 nt, Artificial Sequence
  Synthetic
acaugguagguguauauguca

SEQ ID NO: 212753 - RNA, 22 nt, Artificial Sequence
  Synthetic
uacaugguagguguauauguca

SEQ ID NO: 212754 - RNA, 23 nt, Artificial Sequence
  Synthetic
guacaugguagguguauauguca

SEQ ID NO: 212755 - RNA, 24 nt, Artificial Sequence
  Synthetic
aguacaugguagguguauauguca

SEQ ID NO: 212756 - RNA, 18 nt, Artificial Sequence
  Synthetic
aaaaucuguacuauguca

SEQ ID NO: 212757 - RNA, 19 nt, Artificial Sequence
  Synthetic
uaaaaucuguacuauguca

SEQ ID NO: 212758 - RNA, 20 nt, Artificial Sequence
  Synthetic
uuaaaaucuguacuauguca

SEQ ID NO: 212759 - RNA, 21 nt, Artificial Sequence
  Synthetic
cuuaaaaucuguacuauguca

SEQ ID NO: 212760 - RNA, 22 nt, Artificial Sequence
  Synthetic
acuuaaaaucuguacuauguca

SEQ ID NO: 212761 - RNA, 23 nt, Artificial Sequence
  Synthetic
uacuuaaaaucuguacuauguca

SEQ ID NO: 212762 - RNA, 24 nt, Artificial Sequence
  Synthetic
guacuuaaaaucuguacuauguca

SEQ ID NO: 212763 - RNA, 18 nt, Artificial Sequence
  Synthetic
auuuaaaccaguauguca

SEQ ID NO: 212764 - RNA, 19 nt, Artificial Sequence
  Synthetic
aauuuaaaccaguauguca

SEQ ID NO: 212765 - RNA, 20 nt, Artificial Sequence
  Synthetic
gaauuuaaaccaguauguca

SEQ ID NO: 212766 - RNA, 21 nt, Artificial Sequence
  Synthetic
agaauuuaaaccaguauguca

SEQ ID NO: 212767 - RNA, 22 nt, Artificial Sequence
  Synthetic
aagaauuuaaaccaguauguca

SEQ ID NO: 212768 - RNA, 23 nt, Artificial Sequence
  Synthetic
aaagaauuuaaaccaguauguca

SEQ ID NO: 212769 - RNA, 24 nt, Artificial Sequence
  Synthetic
aaaagaauuuaaaccaguauguca

SEQ ID NO: 212770 - RNA, 18 nt, Artificial Sequence
  Synthetic
auuuauagcaguauguca

SEQ ID NO: 212771 - RNA, 19 nt, Artificial Sequence
  Synthetic
cauuuauagcaguauguca

SEQ ID NO: 212772 - RNA, 20 nt, Artificial Sequence
  Synthetic
gcauuuauagcaguauguca

SEQ ID NO: 212773 - RNA, 21 nt, Artificial Sequence
  Synthetic
ggcauuuauagcaguauguca

SEQ ID NO: 212774 - RNA, 22 nt, Artificial Sequence
  Synthetic
gggcauuuauagcaguauguca

SEQ ID NO: 212775 - RNA, 23 nt, Artificial Sequence
  Synthetic
ugggcauuuauagcaguauguca

SEQ ID NO: 212776 - RNA, 24 nt, Artificial Sequence
  Synthetic
augggcauuuauagcaguauguca

SEQ ID NO: 212777 - RNA, 18 nt, Artificial Sequence
  Synthetic
aaaaaaaaaauuauguca

SEQ ID NO: 212778 - RNA, 19 nt, Artificial Sequence
  Synthetic
aaaaaaaaaaauuauguca

SEQ ID NO: 212779 - RNA, 20 nt, Artificial Sequence
  Synthetic
aaaaaaaaaaaauuauguca

SEQ ID NO: 212780 - RNA, 21 nt, Artificial Sequence
  Synthetic
aaaaaaaaaaaaauuauguca

SEQ ID NO: 212781 - RNA, 22 nt, Artificial Sequence
  Synthetic
aaaaaaaaaaaaaauuauguca

SEQ ID NO: 212782 - RNA, 23 nt, Artificial Sequence
  Synthetic
aaaaaaaaaaaaaaauuauguca

SEQ ID NO: 212783 - RNA, 24 nt, Artificial Sequence
  Synthetic
aaaaaaaaaaaaaaaauuauguca

SEQ ID NO: 212784 - RNA, 18 nt, Artificial Sequence
  Synthetic
uaucuguggauccuguca

SEQ ID NO: 212785 - RNA, 19 nt, Artificial Sequence
  Synthetic
cuaucuguggauccuguca

SEQ ID NO: 212786 - RNA, 20 nt, Artificial Sequence
  Synthetic
gcuaucuguggauccuguca

SEQ ID NO: 212787 - RNA, 21 nt, Artificial Sequence
  Synthetic
ugcuaucuguggauccuguca

SEQ ID NO: 212788 - RNA, 22 nt, Artificial Sequence
  Synthetic
gugcuaucuguggauccuguca

SEQ ID NO: 212789 - RNA, 23 nt, Artificial Sequence
  Synthetic
ggugcuaucuguggauccuguca

SEQ ID NO: 212790 - RNA, 24 nt, Artificial Sequence
  Synthetic
aggugcuaucuguggauccuguca

SEQ ID NO: 212791 - RNA, 18 nt, Artificial Sequence
  Synthetic
auuuuaggugugcuguca

SEQ ID NO: 212792 - RNA, 19 nt, Artificial Sequence
  Synthetic
cauuuuaggugugcuguca

SEQ ID NO: 212793 - RNA, 20 nt, Artificial Sequence
  Synthetic
ccauuuuaggugugcuguca

SEQ ID NO: 212794 - RNA, 21 nt, Artificial Sequence
  Synthetic
cccauuuuaggugugcuguca

SEQ ID NO: 212795 - RNA, 22 nt, Artificial Sequence
  Synthetic
ucccauuuuaggugugcuguca

SEQ ID NO: 212796 - RNA, 23 nt, Artificial Sequence
  Synthetic
cucccauuuuaggugugcuguca

SEQ ID NO: 212797 - RNA, 24 nt, Artificial Sequence
  Synthetic
ccucccauuuuaggugugcuguca

SEQ ID NO: 212798 - RNA, 18 nt, Artificial Sequence
  Synthetic
caauaucaauugcuguca

SEQ ID NO: 212799 - RNA, 19 nt, Artificial Sequence
  Synthetic
ucaauaucaauugcuguca

SEQ ID NO: 212800 - RNA, 20 nt, Artificial Sequence
  Synthetic
gucaauaucaauugcuguca

SEQ ID NO: 212801 - RNA, 21 nt, Artificial Sequence
  Synthetic
agucaauaucaauugcuguca

SEQ ID NO: 212802 - RNA, 22 nt, Artificial Sequence
  Synthetic
cagucaauaucaauugcuguca

SEQ ID NO: 212803 - RNA, 23 nt, Artificial Sequence
  Synthetic
acagucaauaucaauugcuguca

SEQ ID NO: 212804 - RNA, 24 nt, Artificial Sequence
  Synthetic
uacagucaauaucaauugcuguca

SEQ ID NO: 212805 - RNA, 18 nt, Artificial Sequence
  Synthetic
cucuccuauuaucuguca

SEQ ID NO: 212806 - RNA, 19 nt, Artificial Sequence
  Synthetic
acucuccuauuaucuguca

SEQ ID NO: 212807 - RNA, 20 nt, Artificial Sequence
  Synthetic
cacucuccuauuaucuguca

SEQ ID NO: 212808 - RNA, 21 nt, Artificial Sequence
  Synthetic
ucacucuccuauuaucuguca

SEQ ID NO: 212809 - RNA, 22 nt, Artificial Sequence
  Synthetic
uucacucuccuauuaucuguca

SEQ ID NO: 212810 - RNA, 23 nt, Artificial Sequence
  Synthetic
cuucacucuccuauuaucuguca

SEQ ID NO: 212811 - RNA, 24 nt, Artificial Sequence
  Synthetic
ccuucacucuccuauuaucuguca

SEQ ID NO: 212812 - RNA, 18 nt, Artificial Sequence
  Synthetic
accuucugugaaguguca

SEQ ID NO: 212813 - RNA, 19 nt, Artificial Sequence
  Synthetic
caccuucugugaaguguca

SEQ ID NO: 212814 - RNA, 20 nt, Artificial Sequence
  Synthetic
ucaccuucugugaaguguca

SEQ ID NO: 212815 - RNA, 21 nt, Artificial Sequence
  Synthetic
uucaccuucugugaaguguca

SEQ ID NO: 212816 - RNA, 22 nt, Artificial Sequence
  Synthetic
cuucaccuucugugaaguguca

SEQ ID NO: 212817 - RNA, 23 nt, Artificial Sequence
  Synthetic
ucuucaccuucugugaaguguca

SEQ ID NO: 212818 - RNA, 24 nt, Artificial Sequence
  Synthetic
aucuucaccuucugugaaguguca

SEQ ID NO: 212819 - RNA, 18 nt, Artificial Sequence
  Synthetic
cuuugagcaauaguguca

SEQ ID NO: 212820 - RNA, 19 nt, Artificial Sequence
  Synthetic
ccuuugagcaauaguguca

SEQ ID NO: 212821 - RNA, 20 nt, Artificial Sequence
  Synthetic
uccuuugagcaauaguguca

SEQ ID NO: 212822 - RNA, 21 nt, Artificial Sequence
  Synthetic
cuccuuugagcaauaguguca

SEQ ID NO: 212823 - RNA, 22 nt, Artificial Sequence
  Synthetic
ccuccuuugagcaauaguguca

SEQ ID NO: 212824 - RNA, 23 nt, Artificial Sequence
  Synthetic
cccuccuuugagcaauaguguca

SEQ ID NO: 212825 - RNA, 24 nt, Artificial Sequence
  Synthetic
acccuccuuugagcaauaguguca

SEQ ID NO: 212826 - RNA, 18 nt, Artificial Sequence
  Synthetic
auucagguaguaguguca

SEQ ID NO: 212827 - RNA, 19 nt, Artificial Sequence
  Synthetic
cauucagguaguaguguca

SEQ ID NO: 212828 - RNA, 20 nt, Artificial Sequence
  Synthetic
acauucagguaguaguguca

SEQ ID NO: 212829 - RNA, 21 nt, Artificial Sequence
  Synthetic
cacauucagguaguaguguca

SEQ ID NO: 212830 - RNA, 22 nt, Artificial Sequence
  Synthetic
acacauucagguaguaguguca

SEQ ID NO: 212831 - RNA, 23 nt, Artificial Sequence
  Synthetic
uacacauucagguaguaguguca

SEQ ID NO: 212832 - RNA, 24 nt, Artificial Sequence
  Synthetic
uuacacauucagguaguaguguca

SEQ ID NO: 212833 - RNA, 18 nt, Artificial Sequence
  Synthetic
uaaauuaagguaguguca

SEQ ID NO: 212834 - RNA, 19 nt, Artificial Sequence
  Synthetic
guaaauuaagguaguguca

SEQ ID NO: 212835 - RNA, 20 nt, Artificial Sequence
  Synthetic
cguaaauuaagguaguguca

SEQ ID NO: 212836 - RNA, 21 nt, Artificial Sequence
  Synthetic
acguaaauuaagguaguguca

SEQ ID NO: 212837 - RNA, 22 nt, Artificial Sequence
  Synthetic
gacguaaauuaagguaguguca

SEQ ID NO: 212838 - RNA, 23 nt, Artificial Sequence
  Synthetic
ggacguaaauuaagguaguguca

SEQ ID NO: 212839 - RNA, 24 nt, Artificial Sequence
  Synthetic
gggacguaaauuaagguaguguca

SEQ ID NO: 212840 - RNA, 18 nt, Artificial Sequence
  Synthetic
uauuauucacagguguca

SEQ ID NO: 212841 - RNA, 19 nt, Artificial Sequence
  Synthetic
uuauuauucacagguguca

SEQ ID NO: 212842 - RNA, 20 nt, Artificial Sequence
  Synthetic
auuauuauucacagguguca

SEQ ID NO: 212843 - RNA, 21 nt, Artificial Sequence
  Synthetic
uauuauuauucacagguguca

SEQ ID NO: 212844 - RNA, 22 nt, Artificial Sequence
  Synthetic
auauuauuauucacagguguca

SEQ ID NO: 212845 - RNA, 23 nt, Artificial Sequence
  Synthetic
gauauuauuauucacagguguca

SEQ ID NO: 212846 - RNA, 24 nt, Artificial Sequence
  Synthetic
agauauuauuauucacagguguca

SEQ ID NO: 212847 - RNA, 18 nt, Artificial Sequence
  Synthetic
caaaauccccagguguca

SEQ ID NO: 212848 - RNA, 19 nt, Artificial Sequence
  Synthetic
ccaaaauccccagguguca

SEQ ID NO: 212849 - RNA, 20 nt, Artificial Sequence
  Synthetic
uccaaaauccccagguguca

SEQ ID NO: 212850 - RNA, 21 nt, Artificial Sequence
  Synthetic
cuccaaaauccccagguguca

SEQ ID NO: 212851 - RNA, 22 nt, Artificial Sequence
  Synthetic
ucuccaaaauccccagguguca

SEQ ID NO: 212852 - RNA, 23 nt, Artificial Sequence
  Synthetic
aucuccaaaauccccagguguca

SEQ ID NO: 212853 - RNA, 24 nt, Artificial Sequence
  Synthetic
aaucuccaaaauccccagguguca

SEQ ID NO: 212854 - RNA, 18 nt, Artificial Sequence
  Synthetic
ggguuauuguagguguca

SEQ ID NO: 212855 - RNA, 19 nt, Artificial Sequence
  Synthetic
aggguuauuguagguguca

SEQ ID NO: 212856 - RNA, 20 nt, Artificial Sequence
  Synthetic
caggguuauuguagguguca

SEQ ID NO: 212857 - RNA, 21 nt, Artificial Sequence
  Synthetic
gcaggguuauuguagguguca

SEQ ID NO: 212858 - RNA, 22 nt, Artificial Sequence
  Synthetic
ugcaggguuauuguagguguca

SEQ ID NO: 212859 - RNA, 23 nt, Artificial Sequence
  Synthetic
cugcaggguuauuguagguguca

SEQ ID NO: 212860 - RNA, 24 nt, Artificial Sequence
  Synthetic
gcugcaggguuauuguagguguca

SEQ ID NO: 212861 - RNA, 18 nt, Artificial Sequence
  Synthetic
auaggcaaaccgguguca

SEQ ID NO: 212862 - RNA, 19 nt, Artificial Sequence
  Synthetic
cauaggcaaaccgguguca

SEQ ID NO: 212863 - RNA, 20 nt, Artificial Sequence
  Synthetic
acauaggcaaaccgguguca

SEQ ID NO: 212864 - RNA, 21 nt, Artificial Sequence
  Synthetic
uacauaggcaaaccgguguca

SEQ ID NO: 212865 - RNA, 22 nt, Artificial Sequence
  Synthetic
uuacauaggcaaaccgguguca

SEQ ID NO: 212866 - RNA, 23 nt, Artificial Sequence
  Synthetic
auuacauaggcaaaccgguguca

SEQ ID NO: 212867 - RNA, 24 nt, Artificial Sequence
  Synthetic
uauuacauaggcaaaccgguguca

SEQ ID NO: 212868 - RNA, 18 nt, Artificial Sequence
  Synthetic
gauguuuugaauguguca

SEQ ID NO: 212869 - RNA, 19 nt, Artificial Sequence
  Synthetic
agauguuuugaauguguca

SEQ ID NO: 212870 - RNA, 20 nt, Artificial Sequence
  Synthetic
uagauguuuugaauguguca

SEQ ID NO: 212871 - RNA, 21 nt, Artificial Sequence
  Synthetic
guagauguuuugaauguguca

SEQ ID NO: 212872 - RNA, 22 nt, Artificial Sequence
  Synthetic
uguagauguuuugaauguguca

SEQ ID NO: 212873 - RNA, 23 nt, Artificial Sequence
  Synthetic
cuguagauguuuugaauguguca

SEQ ID NO: 212874 - RNA, 24 nt, Artificial Sequence
  Synthetic
acuguagauguuuugaauguguca

SEQ ID NO: 212875 - RNA, 18 nt, Artificial Sequence
  Synthetic
cuacuguuuaauguguca

SEQ ID NO: 212876 - RNA, 19 nt, Artificial Sequence
  Synthetic
ucuacuguuuaauguguca

SEQ ID NO: 212877 - RNA, 20 nt, Artificial Sequence
  Synthetic
uucuacuguuuaauguguca

SEQ ID NO: 212878 - RNA, 21 nt, Artificial Sequence
  Synthetic
auucuacuguuuaauguguca

SEQ ID NO: 212879 - RNA, 22 nt, Artificial Sequence
  Synthetic
gauucuacuguuuaauguguca

SEQ ID NO: 212880 - RNA, 23 nt, Artificial Sequence
  Synthetic
ugauucuacuguuuaauguguca

SEQ ID NO: 212881 - RNA, 24 nt, Artificial Sequence
  Synthetic
uugauucuacuguuuaauguguca

SEQ ID NO: 212882 - RNA, 18 nt, Artificial Sequence
  Synthetic
gugaggagcgauguguca

SEQ ID NO: 212883 - RNA, 19 nt, Artificial Sequence
  Synthetic
ggugaggagcgauguguca

SEQ ID NO: 212884 - RNA, 20 nt, Artificial Sequence
  Synthetic
gggugaggagcgauguguca

SEQ ID NO: 212885 - RNA, 21 nt, Artificial Sequence
  Synthetic
ugggugaggagcgauguguca

SEQ ID NO: 212886 - RNA, 22 nt, Artificial Sequence
  Synthetic
augggugaggagcgauguguca

SEQ ID NO: 212887 - RNA, 23 nt, Artificial Sequence
  Synthetic
aaugggugaggagcgauguguca

SEQ ID NO: 212888 - RNA, 24 nt, Artificial Sequence
  Synthetic
gaaugggugaggagcgauguguca

SEQ ID NO: 212889 - RNA, 18 nt, Artificial Sequence
  Synthetic
gauaggauauauguguca

SEQ ID NO: 212890 - RNA, 19 nt, Artificial Sequence
  Synthetic
agauaggauauauguguca

SEQ ID NO: 212891 - RNA, 20 nt, Artificial Sequence
  Synthetic
uagauaggauauauguguca

SEQ ID NO: 212892 - RNA, 21 nt, Artificial Sequence
  Synthetic
uuagauaggauauauguguca

SEQ ID NO: 212893 - RNA, 22 nt, Artificial Sequence
  Synthetic
auuagauaggauauauguguca

SEQ ID NO: 212894 - RNA, 23 nt, Artificial Sequence
  Synthetic
uauuagauaggauauauguguca

SEQ ID NO: 212895 - RNA, 24 nt, Artificial Sequence
  Synthetic
auauuagauaggauauauguguca

SEQ ID NO: 212896 - RNA, 18 nt, Artificial Sequence
  Synthetic
uccaguuagucuguguca

SEQ ID NO: 212897 - RNA, 19 nt, Artificial Sequence
  Synthetic
cuccaguuagucuguguca

SEQ ID NO: 212898 - RNA, 20 nt, Artificial Sequence
  Synthetic
ucuccaguuagucuguguca

SEQ ID NO: 212899 - RNA, 21 nt, Artificial Sequence
  Synthetic
uucuccaguuagucuguguca

SEQ ID NO: 212900 - RNA, 22 nt, Artificial Sequence
  Synthetic
uuucuccaguuagucuguguca

SEQ ID NO: 212901 - RNA, 23 nt, Artificial Sequence
  Synthetic
uuuucuccaguuagucuguguca

SEQ ID NO: 212902 - RNA, 24 nt, Artificial Sequence
  Synthetic
uuuuucuccaguuagucuguguca

SEQ ID NO: 212903 - RNA, 18 nt, Artificial Sequence
  Synthetic
cagucauugucuguguca

SEQ ID NO: 212904 - RNA, 19 nt, Artificial Sequence
  Synthetic
ccagucauugucuguguca

SEQ ID NO: 212905 - RNA, 20 nt, Artificial Sequence
  Synthetic
accagucauugucuguguca

SEQ ID NO: 212906 - RNA, 21 nt, Artificial Sequence
  Synthetic
uaccagucauugucuguguca

SEQ ID NO: 212907 - RNA, 22 nt, Artificial Sequence
  Synthetic
auaccagucauugucuguguca

SEQ ID NO: 212908 - RNA, 23 nt, Artificial Sequence
  Synthetic
uauaccagucauugucuguguca

SEQ ID NO: 212909 - RNA, 24 nt, Artificial Sequence
  Synthetic
uuauaccagucauugucuguguca

SEQ ID NO: 212910 - RNA, 18 nt, Artificial Sequence
  Synthetic
uauaauccccguguguca

SEQ ID NO: 212911 - RNA, 19 nt, Artificial Sequence
  Synthetic
uuauaauccccguguguca

SEQ ID NO: 212912 - RNA, 20 nt, Artificial Sequence
  Synthetic
auuauaauccccguguguca

SEQ ID NO: 212913 - RNA, 21 nt, Artificial Sequence
  Synthetic
aauuauaauccccguguguca

SEQ ID NO: 212914 - RNA, 22 nt, Artificial Sequence
  Synthetic
gaauuauaauccccguguguca

SEQ ID NO: 212915 - RNA, 23 nt, Artificial Sequence
  Synthetic
ugaauuauaauccccguguguca

SEQ ID NO: 212916 - RNA, 24 nt, Artificial Sequence
  Synthetic
uugaauuauaauccccguguguca

SEQ ID NO: 212917 - RNA, 18 nt, Artificial Sequence
  Synthetic
uuuguuuuaauuguguca

SEQ ID NO: 212918 - RNA, 19 nt, Artificial Sequence
  Synthetic
auuuguuuuaauuguguca

SEQ ID NO: 212919 - RNA, 20 nt, Artificial Sequence
  Synthetic
uauuuguuuuaauuguguca

SEQ ID NO: 212920 - RNA, 21 nt, Artificial Sequence
  Synthetic
uuauuuguuuuaauuguguca

SEQ ID NO: 212921 - RNA, 22 nt, Artificial Sequence
  Synthetic
uuuauuuguuuuaauuguguca

SEQ ID NO: 212922 - RNA, 23 nt, Artificial Sequence
  Synthetic
uuuuauuuguuuuaauuguguca

SEQ ID NO: 212923 - RNA, 24 nt, Artificial Sequence
  Synthetic
uuuuuauuuguuuuaauuguguca

SEQ ID NO: 212924 - RNA, 18 nt, Artificial Sequence
  Synthetic
gaacauuauauuguguca

SEQ ID NO: 212925 - RNA, 19 nt, Artificial Sequence
  Synthetic
ggaacauuauauuguguca

SEQ ID NO: 212926 - RNA, 20 nt, Artificial Sequence
  Synthetic
uggaacauuauauuguguca

SEQ ID NO: 212927 - RNA, 21 nt, Artificial Sequence
  Synthetic
cuggaacauuauauuguguca

SEQ ID NO: 212928 - RNA, 22 nt, Artificial Sequence
  Synthetic
gcuggaacauuauauuguguca

SEQ ID NO: 212929 - RNA, 23 nt, Artificial Sequence
  Synthetic
ugcuggaacauuauauuguguca

SEQ ID NO: 212930 - RNA, 24 nt, Artificial Sequence
  Synthetic
cugcuggaacauuauauuguguca

SEQ ID NO: 212931 - RNA, 18 nt, Artificial Sequence
  Synthetic
auagguaaacuuguguca

SEQ ID NO: 212932 - RNA, 19 nt, Artificial Sequence
  Synthetic
cauagguaaacuuguguca

SEQ ID NO: 212933 - RNA, 20 nt, Artificial Sequence
  Synthetic
acauagguaaacuuguguca

SEQ ID NO: 212934 - RNA, 21 nt, Artificial Sequence
  Synthetic
uacauagguaaacuuguguca

SEQ ID NO: 212935 - RNA, 22 nt, Artificial Sequence
  Synthetic
uuacauagguaaacuuguguca

SEQ ID NO: 212936 - RNA, 23 nt, Artificial Sequence
  Synthetic
guuacauagguaaacuuguguca

SEQ ID NO: 212937 - RNA, 24 nt, Artificial Sequence
  Synthetic
uguuacauagguaaacuuguguca

SEQ ID NO: 212938 - RNA, 18 nt, Artificial Sequence
  Synthetic
gaaaaauguuuuguguca

SEQ ID NO: 212939 - RNA, 19 nt, Artificial Sequence
  Synthetic
agaaaaauguuuuguguca

SEQ ID NO: 212940 - RNA, 20 nt, Artificial Sequence
  Synthetic
aagaaaaauguuuuguguca

SEQ ID NO: 212941 - RNA, 21 nt, Artificial Sequence
  Synthetic
caagaaaaauguuuuguguca

SEQ ID NO: 212942 - RNA, 22 nt, Artificial Sequence
  Synthetic
ccaagaaaaauguuuuguguca

SEQ ID NO: 212943 - RNA, 23 nt, Artificial Sequence
  Synthetic
accaagaaaaauguuuuguguca

SEQ ID NO: 212944 - RNA, 24 nt, Artificial Sequence
  Synthetic
uaccaagaaaaauguuuuguguca

SEQ ID NO: 212945 - RNA, 18 nt, Artificial Sequence
  Synthetic
guuuauggaaaauuguca

SEQ ID NO: 212946 - RNA, 19 nt, Artificial Sequence
  Synthetic
aguuuauggaaaauuguca

SEQ ID NO: 212947 - RNA, 20 nt, Artificial Sequence
  Synthetic
aaguuuauggaaaauuguca

SEQ ID NO: 212948 - RNA, 21 nt, Artificial Sequence
  Synthetic
uaaguuuauggaaaauuguca

SEQ ID NO: 212949 - RNA, 22 nt, Artificial Sequence
  Synthetic
guaaguuuauggaaaauuguca

SEQ ID NO: 212950 - RNA, 23 nt, Artificial Sequence
  Synthetic
aguaaguuuauggaaaauuguca

SEQ ID NO: 212951 - RNA, 24 nt, Artificial Sequence
  Synthetic
caguaaguuuauggaaaauuguca

SEQ ID NO: 212952 - RNA, 18 nt, Artificial Sequence
  Synthetic
ugguguacaccauuguca

SEQ ID NO: 212953 - RNA, 19 nt, Artificial Sequence
  Synthetic
gugguguacaccauuguca

SEQ ID NO: 212954 - RNA, 20 nt, Artificial Sequence
  Synthetic
ugugguguacaccauuguca

SEQ ID NO: 212955 - RNA, 21 nt, Artificial Sequence
  Synthetic
cugugguguacaccauuguca

SEQ ID NO: 212956 - RNA, 22 nt, Artificial Sequence
  Synthetic
ccugugguguacaccauuguca

SEQ ID NO: 212957 - RNA, 23 nt, Artificial Sequence
  Synthetic
cccugugguguacaccauuguca

SEQ ID NO: 212958 - RNA, 24 nt, Artificial Sequence
  Synthetic
ucccugugguguacaccauuguca

SEQ ID NO: 212959 - RNA, 18 nt, Artificial Sequence
  Synthetic
uuuucacuugcauuguca

SEQ ID NO: 212960 - RNA, 19 nt, Artificial Sequence
  Synthetic
uuuuucacuugcauuguca

SEQ ID NO: 212961 - RNA, 20 nt, Artificial Sequence
  Synthetic
guuuuucacuugcauuguca

SEQ ID NO: 212962 - RNA, 21 nt, Artificial Sequence
  Synthetic
gguuuuucacuugcauuguca

SEQ ID NO: 212963 - RNA, 22 nt, Artificial Sequence
  Synthetic
ugguuuuucacuugcauuguca

SEQ ID NO: 212964 - RNA, 23 nt, Artificial Sequence
  Synthetic
uugguuuuucacuugcauuguca

SEQ ID NO: 212965 - RNA, 24 nt, Artificial Sequence
  Synthetic
uuugguuuuucacuugcauuguca

SEQ ID NO: 212966 - RNA, 18 nt, Artificial Sequence
  Synthetic
aaaauuuauucauuguca

SEQ ID NO: 212967 - RNA, 19 nt, Artificial Sequence
  Synthetic
aaaaauuuauucauuguca

SEQ ID NO: 212968 - RNA, 20 nt, Artificial Sequence
  Synthetic
uaaaaauuuauucauuguca

SEQ ID NO: 212969 - RNA, 21 nt, Artificial Sequence
  Synthetic
guaaaaauuuauucauuguca

SEQ ID NO: 212970 - RNA, 22 nt, Artificial Sequence
  Synthetic
aguaaaaauuuauucauuguca

SEQ ID NO: 212971 - RNA, 23 nt, Artificial Sequence
  Synthetic
aaguaaaaauuuauucauuguca

SEQ ID NO: 212972 - RNA, 24 nt, Artificial Sequence
  Synthetic
aaaguaaaaauuuauucauuguca

SEQ ID NO: 212973 - RNA, 18 nt, Artificial Sequence
  Synthetic
acauuuuuauuauuguca

SEQ ID NO: 212974 - RNA, 19 nt, Artificial Sequence
  Synthetic
aacauuuuuauuauuguca

SEQ ID NO: 212975 - RNA, 20 nt, Artificial Sequence
  Synthetic
aaacauuuuuauuauuguca

SEQ ID NO: 212976 - RNA, 21 nt, Artificial Sequence
  Synthetic
uaaacauuuuuauuauuguca

SEQ ID NO: 212977 - RNA, 22 nt, Artificial Sequence
  Synthetic
auaaacauuuuuauuauuguca

SEQ ID NO: 212978 - RNA, 23 nt, Artificial Sequence
  Synthetic
aauaaacauuuuuauuauuguca

SEQ ID NO: 212979 - RNA, 24 nt, Artificial Sequence
  Synthetic
aaauaaacauuuuuauuauuguca

SEQ ID NO: 212980 - RNA, 18 nt, Artificial Sequence
  Synthetic
gcaucaaauuacuuguca

SEQ ID NO: 212981 - RNA, 19 nt, Artificial Sequence
  Synthetic
ggcaucaaauuacuuguca

SEQ ID NO: 212982 - RNA, 20 nt, Artificial Sequence
  Synthetic
aggcaucaaauuacuuguca

SEQ ID NO: 212983 - RNA, 21 nt, Artificial Sequence
  Synthetic
uaggcaucaaauuacuuguca

SEQ ID NO: 212984 - RNA, 22 nt, Artificial Sequence
  Synthetic
cuaggcaucaaauuacuuguca

SEQ ID NO: 212985 - RNA, 23 nt, Artificial Sequence
  Synthetic
ccuaggcaucaaauuacuuguca

SEQ ID NO: 212986 - RNA, 24 nt, Artificial Sequence
  Synthetic
cccuaggcaucaaauuacuuguca

SEQ ID NO: 212987 - RNA, 18 nt, Artificial Sequence
  Synthetic
acauguacaggcuuguca

SEQ ID NO: 212988 - RNA, 19 nt, Artificial Sequence
  Synthetic
uacauguacaggcuuguca

SEQ ID NO: 212989 - RNA, 20 nt, Artificial Sequence
  Synthetic
guacauguacaggcuuguca

SEQ ID NO: 212990 - RNA, 21 nt, Artificial Sequence
  Synthetic
gguacauguacaggcuuguca

SEQ ID NO: 212991 - RNA, 22 nt, Artificial Sequence
  Synthetic
ggguacauguacaggcuuguca

SEQ ID NO: 212992 - RNA, 23 nt, Artificial Sequence
  Synthetic
aggguacauguacaggcuuguca

SEQ ID NO: 212993 - RNA, 24 nt, Artificial Sequence
  Synthetic
gaggguacauguacaggcuuguca

SEQ ID NO: 212994 - RNA, 18 nt, Artificial Sequence
  Synthetic
ugcggucgggcguuguca

SEQ ID NO: 212995 - RNA, 19 nt, Artificial Sequence
  Synthetic
gugcggucgggcguuguca

SEQ ID NO: 212996 - RNA, 20 nt, Artificial Sequence
  Synthetic
cgugcggucgggcguuguca

SEQ ID NO: 212997 - RNA, 21 nt, Artificial Sequence
  Synthetic
acgugcggucgggcguuguca

SEQ ID NO: 212998 - RNA, 22 nt, Artificial Sequence
  Synthetic
gacgugcggucgggcguuguca

SEQ ID NO: 212999 - RNA, 23 nt, Artificial Sequence
  Synthetic
cgacgugcggucgggcguuguca

SEQ ID NO: 213000 - RNA, 24 nt, Artificial Sequence
  Synthetic
gcgacgugcggucgggcguuguca

SEQ ID NO: 213001 - RNA, 18 nt, Artificial Sequence
  Synthetic
uugcugugaguguuguca

SEQ ID NO: 213002 - RNA, 19 nt, Artificial Sequence
  Synthetic
auugcugugaguguuguca

SEQ ID NO: 213003 - RNA, 20 nt, Artificial Sequence
  Synthetic
cauugcugugaguguuguca

SEQ ID NO: 213004 - RNA, 21 nt, Artificial Sequence
  Synthetic
acauugcugugaguguuguca

SEQ ID NO: 213005 - RNA, 22 nt, Artificial Sequence
  Synthetic
cacauugcugugaguguuguca

SEQ ID NO: 213006 - RNA, 23 nt, Artificial Sequence
  Synthetic
ucacauugcugugaguguuguca

SEQ ID NO: 213007 - RNA, 24 nt, Artificial Sequence
  Synthetic
uucacauugcugugaguguuguca

SEQ ID NO: 213008 - RNA, 18 nt, Artificial Sequence
  Synthetic
uguccauuuguguuguca

SEQ ID NO: 213009 - RNA, 19 nt, Artificial Sequence
  Synthetic
guguccauuuguguuguca

SEQ ID NO: 213010 - RNA, 20 nt, Artificial Sequence
  Synthetic
uguguccauuuguguuguca

SEQ ID NO: 213011 - RNA, 21 nt, Artificial Sequence
  Synthetic
auguguccauuuguguuguca

SEQ ID NO: 213012 - RNA, 22 nt, Artificial Sequence
  Synthetic
gauguguccauuuguguuguca

SEQ ID NO: 213013 - RNA, 23 nt, Artificial Sequence
  Synthetic
ugauguguccauuuguguuguca

SEQ ID NO: 213014 - RNA, 24 nt, Artificial Sequence
  Synthetic
uugauguguccauuuguguuguca

SEQ ID NO: 213015 - RNA, 18 nt, Artificial Sequence
  Synthetic
uuuuugagaaauuuguca

SEQ ID NO: 213016 - RNA, 19 nt, Artificial Sequence
  Synthetic
uuuuuugagaaauuuguca

SEQ ID NO: 213017 - RNA, 20 nt, Artificial Sequence
  Synthetic
uuuuuuugagaaauuuguca

SEQ ID NO: 213018 - RNA, 21 nt, Artificial Sequence
  Synthetic
guuuuuuugagaaauuuguca

SEQ ID NO: 213019 - RNA, 22 nt, Artificial Sequence
  Synthetic
gguuuuuuugagaaauuuguca

SEQ ID NO: 213020 - RNA, 23 nt, Artificial Sequence
  Synthetic
ggguuuuuuugagaaauuuguca

SEQ ID NO: 213021 - RNA, 24 nt, Artificial Sequence
  Synthetic
uggguuuuuuugagaaauuuguca

SEQ ID NO: 213022 - RNA, 18 nt, Artificial Sequence
  Synthetic
ucccauuuuaauuuguca

SEQ ID NO: 213023 - RNA, 19 nt, Artificial Sequence
  Synthetic
aucccauuuuaauuuguca

SEQ ID NO: 213024 - RNA, 20 nt, Artificial Sequence
  Synthetic
aaucccauuuuaauuuguca

SEQ ID NO: 213025 - RNA, 21 nt, Artificial Sequence
  Synthetic
uaaucccauuuuaauuuguca

SEQ ID NO: 213026 - RNA, 22 nt, Artificial Sequence
  Synthetic
auaaucccauuuuaauuuguca

SEQ ID NO: 213027 - RNA, 23 nt, Artificial Sequence
  Synthetic
aauaaucccauuuuaauuuguca

SEQ ID NO: 213028 - RNA, 24 nt, Artificial Sequence
  Synthetic
aaauaaucccauuuuaauuuguca

SEQ ID NO: 213029 - RNA, 18 nt, Artificial Sequence
  Synthetic
uucaauaaguauuuguca

SEQ ID NO: 213030 - RNA, 19 nt, Artificial Sequence
  Synthetic
guucaauaaguauuuguca

SEQ ID NO: 213031 - RNA, 20 nt, Artificial Sequence
  Synthetic
uguucaauaaguauuuguca

SEQ ID NO: 213032 - RNA, 21 nt, Artificial Sequence
  Synthetic
guguucaauaaguauuuguca

SEQ ID NO: 213033 - RNA, 22 nt, Artificial Sequence
  Synthetic
aguguucaauaaguauuuguca

SEQ ID NO: 213034 - RNA, 23 nt, Artificial Sequence
  Synthetic
aaguguucaauaaguauuuguca

SEQ ID NO: 213035 - RNA, 24 nt, Artificial Sequence
  Synthetic
aaaguguucaauaaguauuuguca

SEQ ID NO: 213036 - RNA, 18 nt, Artificial Sequence
  Synthetic
augauugucacuuuguca

SEQ ID NO: 213037 - RNA, 19 nt, Artificial Sequence
  Synthetic
gaugauugucacuuuguca

SEQ ID NO: 213038 - RNA, 20 nt, Artificial Sequence
  Synthetic
ugaugauugucacuuuguca

SEQ ID NO: 213039 - RNA, 21 nt, Artificial Sequence
  Synthetic
uugaugauugucacuuuguca

SEQ ID NO: 213040 - RNA, 22 nt, Artificial Sequence
  Synthetic
cuugaugauugucacuuuguca

SEQ ID NO: 213041 - RNA, 23 nt, Artificial Sequence
  Synthetic
ccuugaugauugucacuuuguca

SEQ ID NO: 213042 - RNA, 24 nt, Artificial Sequence
  Synthetic
cccuugaugauugucacuuuguca

SEQ ID NO: 213043 - RNA, 18 nt, Artificial Sequence
  Synthetic
aguuuucucuuuuuguca

SEQ ID NO: 213044 - RNA, 19 nt, Artificial Sequence
  Synthetic
uaguuuucucuuuuuguca

SEQ ID NO: 213045 - RNA, 20 nt, Artificial Sequence
  Synthetic
guaguuuucucuuuuuguca

SEQ ID NO: 213046 - RNA, 21 nt, Artificial Sequence
  Synthetic
aguaguuuucucuuuuuguca

SEQ ID NO: 213047 - RNA, 22 nt, Artificial Sequence
  Synthetic
aaguaguuuucucuuuuuguca

SEQ ID NO: 213048 - RNA, 23 nt, Artificial Sequence
  Synthetic
caaguaguuuucucuuuuuguca

SEQ ID NO: 213049 - RNA, 24 nt, Artificial Sequence
  Synthetic
acaaguaguuuucucuuuuuguca

SEQ ID NO: 213050 - RNA, 18 nt, Artificial Sequence
  Synthetic
aacauguucuuuuuguca

SEQ ID NO: 213051 - RNA, 19 nt, Artificial Sequence
  Synthetic
gaacauguucuuuuuguca

SEQ ID NO: 213052 - RNA, 20 nt, Artificial Sequence
  Synthetic
ggaacauguucuuuuuguca

SEQ ID NO: 213053 - RNA, 21 nt, Artificial Sequence
  Synthetic
aggaacauguucuuuuuguca

SEQ ID NO: 213054 - RNA, 22 nt, Artificial Sequence
  Synthetic
aaggaacauguucuuuuuguca

SEQ ID NO: 213055 - RNA, 23 nt, Artificial Sequence
  Synthetic
aaaggaacauguucuuuuuguca

SEQ ID NO: 213056 - RNA, 24 nt, Artificial Sequence
  Synthetic
aaaaggaacauguucuuuuuguca

SEQ ID NO: 213057 - RNA, 18 nt, Artificial Sequence
  Synthetic
uuccccuaggaaaauuca

SEQ ID NO: 213058 - RNA, 19 nt, Artificial Sequence
  Synthetic
auuccccuaggaaaauuca

SEQ ID NO: 213059 - RNA, 20 nt, Artificial Sequence
  Synthetic
uauuccccuaggaaaauuca

SEQ ID NO: 213060 - RNA, 21 nt, Artificial Sequence
  Synthetic
auauuccccuaggaaaauuca

SEQ ID NO: 213061 - RNA, 22 nt, Artificial Sequence
  Synthetic
gauauuccccuaggaaaauuca

SEQ ID NO: 213062 - RNA, 23 nt, Artificial Sequence
  Synthetic
ugauauuccccuaggaaaauuca

SEQ ID NO: 213063 - RNA, 24 nt, Artificial Sequence
  Synthetic
cugauauuccccuaggaaaauuca

SEQ ID NO: 213064 - RNA, 18 nt, Artificial Sequence
  Synthetic
gguuguggugaaaauuca

SEQ ID NO: 213065 - RNA, 19 nt, Artificial Sequence
  Synthetic
agguuguggugaaaauuca

SEQ ID NO: 213066 - RNA, 20 nt, Artificial Sequence
  Synthetic
cagguuguggugaaaauuca

SEQ ID NO: 213067 - RNA, 21 nt, Artificial Sequence
  Synthetic
ccagguuguggugaaaauuca

SEQ ID NO: 213068 - RNA, 22 nt, Artificial Sequence
  Synthetic
cccagguuguggugaaaauuca

SEQ ID NO: 213069 - RNA, 23 nt, Artificial Sequence
  Synthetic
ccccagguuguggugaaaauuca

SEQ ID NO: 213070 - RNA, 24 nt, Artificial Sequence
  Synthetic
uccccagguuguggugaaaauuca

SEQ ID NO: 213071 - RNA, 18 nt, Artificial Sequence
  Synthetic
agaaacaaaggaaauuca

SEQ ID NO: 213072 - RNA, 19 nt, Artificial Sequence
  Synthetic
aagaaacaaaggaaauuca

SEQ ID NO: 213073 - RNA, 20 nt, Artificial Sequence
  Synthetic
uaagaaacaaaggaaauuca

SEQ ID NO: 213074 - RNA, 21 nt, Artificial Sequence
  Synthetic
auaagaaacaaaggaaauuca

SEQ ID NO: 213075 - RNA, 22 nt, Artificial Sequence
  Synthetic
aauaagaaacaaaggaaauuca

SEQ ID NO: 213076 - RNA, 23 nt, Artificial Sequence
  Synthetic
aaauaagaaacaaaggaaauuca

SEQ ID NO: 213077 - RNA, 24 nt, Artificial Sequence
  Synthetic
uaaauaagaaacaaaggaaauuca

SEQ ID NO: 213078 - RNA, 18 nt, Artificial Sequence
  Synthetic
uggcauaucugaaauuca

SEQ ID NO: 213079 - RNA, 19 nt, Artificial Sequence
  Synthetic
auggcauaucugaaauuca

SEQ ID NO: 213080 - RNA, 20 nt, Artificial Sequence
  Synthetic
aauggcauaucugaaauuca

SEQ ID NO: 213081 - RNA, 21 nt, Artificial Sequence
  Synthetic
uaauggcauaucugaaauuca

SEQ ID NO: 213082 - RNA, 22 nt, Artificial Sequence
  Synthetic
auaauggcauaucugaaauuca

SEQ ID NO: 213083 - RNA, 23 nt, Artificial Sequence
  Synthetic
cauaauggcauaucugaaauuca

SEQ ID NO: 213084 - RNA, 24 nt, Artificial Sequence
  Synthetic
acauaauggcauaucugaaauuca

SEQ ID NO: 213085 - RNA, 18 nt, Artificial Sequence
  Synthetic
guacaauuucacaauuca

SEQ ID NO: 213086 - RNA, 19 nt, Artificial Sequence
  Synthetic
uguacaauuucacaauuca

SEQ ID NO: 213087 - RNA, 20 nt, Artificial Sequence
  Synthetic
guguacaauuucacaauuca

SEQ ID NO: 213088 - RNA, 21 nt, Artificial Sequence
  Synthetic
aguguacaauuucacaauuca

SEQ ID NO: 213089 - RNA, 22 nt, Artificial Sequence
  Synthetic
aaguguacaauuucacaauuca

SEQ ID NO: 213090 - RNA, 23 nt, Artificial Sequence
  Synthetic
aaaguguacaauuucacaauuca

SEQ ID NO: 213091 - RNA, 24 nt, Artificial Sequence
  Synthetic
gaaaguguacaauuucacaauuca

SEQ ID NO: 213092 - RNA, 18 nt, Artificial Sequence
  Synthetic
cacagccaagucaauuca

SEQ ID NO: 213093 - RNA, 19 nt, Artificial Sequence
  Synthetic
acacagccaagucaauuca

SEQ ID NO: 213094 - RNA, 20 nt, Artificial Sequence
  Synthetic
gacacagccaagucaauuca

SEQ ID NO: 213095 - RNA, 21 nt, Artificial Sequence
  Synthetic
agacacagccaagucaauuca

SEQ ID NO: 213096 - RNA, 22 nt, Artificial Sequence
  Synthetic
gagacacagccaagucaauuca

SEQ ID NO: 213097 - RNA, 23 nt, Artificial Sequence
  Synthetic
agagacacagccaagucaauuca

SEQ ID NO: 213098 - RNA, 24 nt, Artificial Sequence
  Synthetic
aagagacacagccaagucaauuca

SEQ ID NO: 213099 - RNA, 18 nt, Artificial Sequence
  Synthetic
agugaaguggucaauuca

SEQ ID NO: 213100 - RNA, 19 nt, Artificial Sequence
  Synthetic
uagugaaguggucaauuca

SEQ ID NO: 213101 - RNA, 20 nt, Artificial Sequence
  Synthetic
auagugaaguggucaauuca

SEQ ID NO: 213102 - RNA, 21 nt, Artificial Sequence
  Synthetic
aauagugaaguggucaauuca

SEQ ID NO: 213103 - RNA, 22 nt, Artificial Sequence
  Synthetic
gaauagugaaguggucaauuca

SEQ ID NO: 213104 - RNA, 23 nt, Artificial Sequence
  Synthetic
ggaauagugaaguggucaauuca

SEQ ID NO: 213105 - RNA, 24 nt, Artificial Sequence
  Synthetic
cggaauagugaaguggucaauuca

SEQ ID NO: 213106 - RNA, 18 nt, Artificial Sequence
  Synthetic
agaaauugacagaauuca

SEQ ID NO: 213107 - RNA, 19 nt, Artificial Sequence
  Synthetic
cagaaauugacagaauuca

SEQ ID NO: 213108 - RNA, 20 nt, Artificial Sequence
  Synthetic
gcagaaauugacagaauuca

SEQ ID NO: 213109 - RNA, 21 nt, Artificial Sequence
  Synthetic
ugcagaaauugacagaauuca

SEQ ID NO: 213110 - RNA, 22 nt, Artificial Sequence
  Synthetic
augcagaaauugacagaauuca

SEQ ID NO: 213111 - RNA, 23 nt, Artificial Sequence
  Synthetic
gaugcagaaauugacagaauuca

SEQ ID NO: 213112 - RNA, 24 nt, Artificial Sequence
  Synthetic
ugaugcagaaauugacagaauuca

SEQ ID NO: 213113 - RNA, 18 nt, Artificial Sequence
  Synthetic
ggguaccaagagaauuca

SEQ ID NO: 213114 - RNA, 19 nt, Artificial Sequence
  Synthetic
aggguaccaagagaauuca

SEQ ID NO: 213115 - RNA, 20 nt, Artificial Sequence
  Synthetic
aaggguaccaagagaauuca

SEQ ID NO: 213116 - RNA, 21 nt, Artificial Sequence
  Synthetic
caaggguaccaagagaauuca

SEQ ID NO: 213117 - RNA, 22 nt, Artificial Sequence
  Synthetic
acaaggguaccaagagaauuca

SEQ ID NO: 213118 - RNA, 23 nt, Artificial Sequence
  Synthetic
gacaaggguaccaagagaauuca

SEQ ID NO: 213119 - RNA, 24 nt, Artificial Sequence
  Synthetic
ugacaaggguaccaagagaauuca

SEQ ID NO: 213120 - RNA, 18 nt, Artificial Sequence
  Synthetic
aacccuaaguggaauuca

SEQ ID NO: 213121 - RNA, 19 nt, Artificial Sequence
  Synthetic
gaacccuaaguggaauuca

SEQ ID NO: 213122 - RNA, 20 nt, Artificial Sequence
  Synthetic
agaacccuaaguggaauuca

SEQ ID NO: 213123 - RNA, 21 nt, Artificial Sequence
  Synthetic
aagaacccuaaguggaauuca

SEQ ID NO: 213124 - RNA, 22 nt, Artificial Sequence
  Synthetic
aaagaacccuaaguggaauuca

SEQ ID NO: 213125 - RNA, 23 nt, Artificial Sequence
  Synthetic
aaaagaacccuaaguggaauuca

SEQ ID NO: 213126 - RNA, 24 nt, Artificial Sequence
  Synthetic
gaaaagaacccuaaguggaauuca

SEQ ID NO: 213127 - RNA, 18 nt, Artificial Sequence
  Synthetic
uacucaccacugaauuca

SEQ ID NO: 213128 - RNA, 19 nt, Artificial Sequence
  Synthetic
uuacucaccacugaauuca

SEQ ID NO: 213129 - RNA, 20 nt, Artificial Sequence
  Synthetic
cuuacucaccacugaauuca

SEQ ID NO: 213130 - RNA, 21 nt, Artificial Sequence
  Synthetic
acuuacucaccacugaauuca

SEQ ID NO: 213131 - RNA, 22 nt, Artificial Sequence
  Synthetic
uacuuacucaccacugaauuca

SEQ ID NO: 213132 - RNA, 23 nt, Artificial Sequence
  Synthetic
uuacuuacucaccacugaauuca

SEQ ID NO: 213133 - RNA, 24 nt, Artificial Sequence
  Synthetic
uuuacuuacucaccacugaauuca

SEQ ID NO: 213134 - RNA, 18 nt, Artificial Sequence
  Synthetic
uaagaaaaguugaauuca

SEQ ID NO: 213135 - RNA, 19 nt, Artificial Sequence
  Synthetic
guaagaaaaguugaauuca

SEQ ID NO: 213136 - RNA, 20 nt, Artificial Sequence
  Synthetic
uguaagaaaaguugaauuca

SEQ ID NO: 213137 - RNA, 21 nt, Artificial Sequence
  Synthetic
auguaagaaaaguugaauuca

SEQ ID NO: 213138 - RNA, 22 nt, Artificial Sequence
  Synthetic
aauguaagaaaaguugaauuca

SEQ ID NO: 213139 - RNA, 23 nt, Artificial Sequence
  Synthetic
caauguaagaaaaguugaauuca

SEQ ID NO: 213140 - RNA, 24 nt, Artificial Sequence
  Synthetic
gcaauguaagaaaaguugaauuca

SEQ ID NO: 213141 - RNA, 18 nt, Artificial Sequence
  Synthetic
aaguaugaacauaauuca

SEQ ID NO: 213142 - RNA, 19 nt, Artificial Sequence
  Synthetic
aaaguaugaacauaauuca

SEQ ID NO: 213143 - RNA, 20 nt, Artificial Sequence
  Synthetic
uaaaguaugaacauaauuca

SEQ ID NO: 213144 - RNA, 21 nt, Artificial Sequence
  Synthetic
uuaaaguaugaacauaauuca

SEQ ID NO: 213145 - RNA, 22 nt, Artificial Sequence
  Synthetic
uuuaaaguaugaacauaauuca

SEQ ID NO: 213146 - RNA, 23 nt, Artificial Sequence
  Synthetic
uuuuaaaguaugaacauaauuca

SEQ ID NO: 213147 - RNA, 24 nt, Artificial Sequence
  Synthetic
cuuuuaaaguaugaacauaauuca

SEQ ID NO: 213148 - RNA, 18 nt, Artificial Sequence
  Synthetic
aaaucugacuguaauuca

SEQ ID NO: 213149 - RNA, 19 nt, Artificial Sequence
  Synthetic
caaaucugacuguaauuca

SEQ ID NO: 213150 - RNA, 20 nt, Artificial Sequence
  Synthetic
ccaaaucugacuguaauuca

SEQ ID NO: 213151 - RNA, 21 nt, Artificial Sequence
  Synthetic
uccaaaucugacuguaauuca

SEQ ID NO: 213152 - RNA, 22 nt, Artificial Sequence
  Synthetic
cuccaaaucugacuguaauuca

SEQ ID NO: 213153 - RNA, 23 nt, Artificial Sequence
  Synthetic
ucuccaaaucugacuguaauuca

SEQ ID NO: 213154 - RNA, 24 nt, Artificial Sequence
  Synthetic
aucuccaaaucugacuguaauuca

SEQ ID NO: 213155 - RNA, 18 nt, Artificial Sequence
  Synthetic
uuaaaaugaguuaauuca

SEQ ID NO: 213156 - RNA, 19 nt, Artificial Sequence
  Synthetic
uuuaaaaugaguuaauuca

SEQ ID NO: 213157 - RNA, 20 nt, Artificial Sequence
  Synthetic
uuuuaaaaugaguuaauuca

SEQ ID NO: 213158 - RNA, 21 nt, Artificial Sequence
  Synthetic
cuuuuaaaaugaguuaauuca

SEQ ID NO: 213159 - RNA, 22 nt, Artificial Sequence
  Synthetic
ucuuuuaaaaugaguuaauuca

SEQ ID NO: 213160 - RNA, 23 nt, Artificial Sequence
  Synthetic
gucuuuuaaaaugaguuaauuca

SEQ ID NO: 213161 - RNA, 24 nt, Artificial Sequence
  Synthetic
ugucuuuuaaaaugaguuaauuca

SEQ ID NO: 213162 - RNA, 18 nt, Artificial Sequence
  Synthetic
agauuaaguguuaauuca

SEQ ID NO: 213163 - RNA, 19 nt, Artificial Sequence
  Synthetic
aagauuaaguguuaauuca

SEQ ID NO: 213164 - RNA, 20 nt, Artificial Sequence
  Synthetic
aaagauuaaguguuaauuca

SEQ ID NO: 213165 - RNA, 21 nt, Artificial Sequence
  Synthetic
uaaagauuaaguguuaauuca

SEQ ID NO: 213166 - RNA, 22 nt, Artificial Sequence
  Synthetic
auaaagauuaaguguuaauuca

SEQ ID NO: 213167 - RNA, 23 nt, Artificial Sequence
  Synthetic
cauaaagauuaaguguuaauuca

SEQ ID NO: 213168 - RNA, 24 nt, Artificial Sequence
  Synthetic
acauaaagauuaaguguuaauuca

SEQ ID NO: 213169 - RNA, 18 nt, Artificial Sequence
  Synthetic
uaagucucacuacauuca

SEQ ID NO: 213170 - RNA, 19 nt, Artificial Sequence
  Synthetic
auaagucucacuacauuca

SEQ ID NO: 213171 - RNA, 20 nt, Artificial Sequence
  Synthetic
aauaagucucacuacauuca

SEQ ID NO: 213172 - RNA, 21 nt, Artificial Sequence
  Synthetic
aaauaagucucacuacauuca

SEQ ID NO: 213173 - RNA, 22 nt, Artificial Sequence
  Synthetic
aaaauaagucucacuacauuca

SEQ ID NO: 213174 - RNA, 23 nt, Artificial Sequence
  Synthetic
uaaaauaagucucacuacauuca

SEQ ID NO: 213175 - RNA, 24 nt, Artificial Sequence
  Synthetic
auaaaauaagucucacuacauuca

SEQ ID NO: 213176 - RNA, 18 nt, Artificial Sequence
  Synthetic
gcaacauguuaccauuca

SEQ ID NO: 213177 - RNA, 19 nt, Artificial Sequence
  Synthetic
ugcaacauguuaccauuca

SEQ ID NO: 213178 - RNA, 20 nt, Artificial Sequence
  Synthetic
uugcaacauguuaccauuca

SEQ ID NO: 213179 - RNA, 21 nt, Artificial Sequence
  Synthetic
uuugcaacauguuaccauuca

SEQ ID NO: 213180 - RNA, 22 nt, Artificial Sequence
  Synthetic
guuugcaacauguuaccauuca

SEQ ID NO: 213181 - RNA, 23 nt, Artificial Sequence
  Synthetic
uguuugcaacauguuaccauuca

SEQ ID NO: 213182 - RNA, 24 nt, Artificial Sequence
  Synthetic
cuguuugcaacauguuaccauuca

SEQ ID NO: 213183 - RNA, 18 nt, Artificial Sequence
  Synthetic
gaccaccaaucccauuca

SEQ ID NO: 213184 - RNA, 19 nt, Artificial Sequence
  Synthetic
ugaccaccaaucccauuca

SEQ ID NO: 213185 - RNA, 20 nt, Artificial Sequence
  Synthetic
uugaccaccaaucccauuca

SEQ ID NO: 213186 - RNA, 21 nt, Artificial Sequence
  Synthetic
guugaccaccaaucccauuca

SEQ ID NO: 213187 - RNA, 22 nt, Artificial Sequence
  Synthetic
aguugaccaccaaucccauuca

SEQ ID NO: 213188 - RNA, 23 nt, Artificial Sequence
  Synthetic
gaguugaccaccaaucccauuca

SEQ ID NO: 213189 - RNA, 24 nt, Artificial Sequence
  Synthetic
ggaguugaccaccaaucccauuca

SEQ ID NO: 213190 - RNA, 18 nt, Artificial Sequence
  Synthetic
ucucgggccagccauuca

SEQ ID NO: 213191 - RNA, 19 nt, Artificial Sequence
  Synthetic
uucucgggccagccauuca

SEQ ID NO: 213192 - RNA, 20 nt, Artificial Sequence
  Synthetic
uuucucgggccagccauuca

SEQ ID NO: 213193 - RNA, 21 nt, Artificial Sequence
  Synthetic
uuuucucgggccagccauuca

SEQ ID NO: 213194 - RNA, 22 nt, Artificial Sequence
  Synthetic
auuuucucgggccagccauuca

SEQ ID NO: 213195 - RNA, 23 nt, Artificial Sequence
  Synthetic
cauuuucucgggccagccauuca

SEQ ID NO: 213196 - RNA, 24 nt, Artificial Sequence
  Synthetic
ccauuuucucgggccagccauuca

SEQ ID NO: 213197 - RNA, 18 nt, Artificial Sequence
  Synthetic
uauguagacuagcauuca

SEQ ID NO: 213198 - RNA, 19 nt, Artificial Sequence
  Synthetic
cuauguagacuagcauuca

SEQ ID NO: 213199 - RNA, 20 nt, Artificial Sequence
  Synthetic
ccuauguagacuagcauuca

SEQ ID NO: 213200 - RNA, 21 nt, Artificial Sequence
  Synthetic
accuauguagacuagcauuca

SEQ ID NO: 213201 - RNA, 22 nt, Artificial Sequence
  Synthetic
caccuauguagacuagcauuca

SEQ ID NO: 213202 - RNA, 23 nt, Artificial Sequence
  Synthetic
gcaccuauguagacuagcauuca

SEQ ID NO: 213203 - RNA, 24 nt, Artificial Sequence
  Synthetic
ugcaccuauguagacuagcauuca

SEQ ID NO: 213204 - RNA, 18 nt, Artificial Sequence
  Synthetic
uuugucuccuugcauuca

SEQ ID NO: 213205 - RNA, 19 nt, Artificial Sequence
  Synthetic
cuuugucuccuugcauuca

SEQ ID NO: 213206 - RNA, 20 nt, Artificial Sequence
  Synthetic
ucuuugucuccuugcauuca

SEQ ID NO: 213207 - RNA, 21 nt, Artificial Sequence
  Synthetic
cucuuugucuccuugcauuca

SEQ ID NO: 213208 - RNA, 22 nt, Artificial Sequence
  Synthetic
ucucuuugucuccuugcauuca

SEQ ID NO: 213209 - RNA, 23 nt, Artificial Sequence
  Synthetic
cucucuuugucuccuugcauuca

SEQ ID NO: 213210 - RNA, 24 nt, Artificial Sequence
  Synthetic
gcucucuuugucuccuugcauuca

SEQ ID NO: 213211 - RNA, 18 nt, Artificial Sequence
  Synthetic
aauuuaauagaucauuca

SEQ ID NO: 213212 - RNA, 19 nt, Artificial Sequence
  Synthetic
caauuuaauagaucauuca

SEQ ID NO: 213213 - RNA, 20 nt, Artificial Sequence
  Synthetic
ucaauuuaauagaucauuca

SEQ ID NO: 213214 - RNA, 21 nt, Artificial Sequence
  Synthetic
cucaauuuaauagaucauuca

SEQ ID NO: 213215 - RNA, 22 nt, Artificial Sequence
  Synthetic
ccucaauuuaauagaucauuca

SEQ ID NO: 213216 - RNA, 23 nt, Artificial Sequence
  Synthetic
accucaauuuaauagaucauuca

SEQ ID NO: 213217 - RNA, 24 nt, Artificial Sequence
  Synthetic
caccucaauuuaauagaucauuca

SEQ ID NO: 213218 - RNA, 18 nt, Artificial Sequence
  Synthetic
cacacauuggcucauuca

SEQ ID NO: 213219 - RNA, 19 nt, Artificial Sequence
  Synthetic
acacacauuggcucauuca

SEQ ID NO: 213220 - RNA, 20 nt, Artificial Sequence
  Synthetic
aacacacauuggcucauuca

SEQ ID NO: 213221 - RNA, 21 nt, Artificial Sequence
  Synthetic
gaacacacauuggcucauuca

SEQ ID NO: 213222 - RNA, 22 nt, Artificial Sequence
  Synthetic
ggaacacacauuggcucauuca

SEQ ID NO: 213223 - RNA, 23 nt, Artificial Sequence
  Synthetic
gggaacacacauuggcucauuca

SEQ ID NO: 213224 - RNA, 24 nt, Artificial Sequence
  Synthetic
agggaacacacauuggcucauuca

SEQ ID NO: 213225 - RNA, 18 nt, Artificial Sequence
  Synthetic
uaaggguuaauucauuca

SEQ ID NO: 213226 - RNA, 19 nt, Artificial Sequence
  Synthetic
cuaaggguuaauucauuca

SEQ ID NO: 213227 - RNA, 20 nt, Artificial Sequence
  Synthetic
ucuaaggguuaauucauuca

SEQ ID NO: 213228 - RNA, 21 nt, Artificial Sequence
  Synthetic
cucuaaggguuaauucauuca

SEQ ID NO: 213229 - RNA, 22 nt, Artificial Sequence
  Synthetic
acucuaaggguuaauucauuca

SEQ ID NO: 213230 - RNA, 23 nt, Artificial Sequence
  Synthetic
cacucuaaggguuaauucauuca

SEQ ID NO: 213231 - RNA, 24 nt, Artificial Sequence
  Synthetic
acacucuaaggguuaauucauuca

SEQ ID NO: 213232 - RNA, 18 nt, Artificial Sequence
  Synthetic
aagugugcuauucauuca

SEQ ID NO: 213233 - RNA, 19 nt, Artificial Sequence
  Synthetic
gaagugugcuauucauuca

SEQ ID NO: 213234 - RNA, 20 nt, Artificial Sequence
  Synthetic
ugaagugugcuauucauuca

SEQ ID NO: 213235 - RNA, 21 nt, Artificial Sequence
  Synthetic
augaagugugcuauucauuca

SEQ ID NO: 213236 - RNA, 22 nt, Artificial Sequence
  Synthetic
aaugaagugugcuauucauuca

SEQ ID NO: 213237 - RNA, 23 nt, Artificial Sequence
  Synthetic
aaaugaagugugcuauucauuca

SEQ ID NO: 213238 - RNA, 24 nt, Artificial Sequence
  Synthetic
caaaugaagugugcuauucauuca

SEQ ID NO: 213239 - RNA, 18 nt, Artificial Sequence
  Synthetic
cacacuccccuucauuca

SEQ ID NO: 213240 - RNA, 19 nt, Artificial Sequence
  Synthetic
ccacacuccccuucauuca

SEQ ID NO: 213241 - RNA, 20 nt, Artificial Sequence
  Synthetic
uccacacuccccuucauuca

SEQ ID NO: 213242 - RNA, 21 nt, Artificial Sequence
  Synthetic
uuccacacuccccuucauuca

SEQ ID NO: 213243 - RNA, 22 nt, Artificial Sequence
  Synthetic
auuccacacuccccuucauuca

SEQ ID NO: 213244 - RNA, 23 nt, Artificial Sequence
  Synthetic
cauuccacacuccccuucauuca

SEQ ID NO: 213245 - RNA, 24 nt, Artificial Sequence
  Synthetic
ucauuccacacuccccuucauuca

SEQ ID NO: 213246 - RNA, 18 nt, Artificial Sequence
  Synthetic
aauuaguuccuucauuca

SEQ ID NO: 213247 - RNA, 19 nt, Artificial Sequence
  Synthetic
aaauuaguuccuucauuca

SEQ ID NO: 213248 - RNA, 20 nt, Artificial Sequence
  Synthetic
aaaauuaguuccuucauuca

SEQ ID NO: 213249 - RNA, 21 nt, Artificial Sequence
  Synthetic
caaaauuaguuccuucauuca

SEQ ID NO: 213250 - RNA, 22 nt, Artificial Sequence
  Synthetic
ucaaaauuaguuccuucauuca

SEQ ID NO: 213251 - RNA, 23 nt, Artificial Sequence
  Synthetic
aucaaaauuaguuccuucauuca

SEQ ID NO: 213252 - RNA, 24 nt, Artificial Sequence
  Synthetic
gaucaaaauuaguuccuucauuca

SEQ ID NO: 213253 - RNA, 18 nt, Artificial Sequence
  Synthetic
ggaguaaauggagauuca

SEQ ID NO: 213254 - RNA, 19 nt, Artificial Sequence
  Synthetic
aggaguaaauggagauuca

SEQ ID NO: 213255 - RNA, 20 nt, Artificial Sequence
  Synthetic
gaggaguaaauggagauuca

SEQ ID NO: 213256 - RNA, 21 nt, Artificial Sequence
  Synthetic
agaggaguaaauggagauuca

SEQ ID NO: 213257 - RNA, 22 nt, Artificial Sequence
  Synthetic
cagaggaguaaauggagauuca

SEQ ID NO: 213258 - RNA, 23 nt, Artificial Sequence
  Synthetic
acagaggaguaaauggagauuca

SEQ ID NO: 213259 - RNA, 24 nt, Artificial Sequence
  Synthetic
uacagaggaguaaauggagauuca

SEQ ID NO: 213260 - RNA, 18 nt, Artificial Sequence
  Synthetic
ugggagaccauagauuca

SEQ ID NO: 213261 - RNA, 19 nt, Artificial Sequence
  Synthetic
augggagaccauagauuca

SEQ ID NO: 213262 - RNA, 20 nt, Artificial Sequence
  Synthetic
aaugggagaccauagauuca

SEQ ID NO: 213263 - RNA, 21 nt, Artificial Sequence
  Synthetic
aaaugggagaccauagauuca

SEQ ID NO: 213264 - RNA, 22 nt, Artificial Sequence
  Synthetic
caaaugggagaccauagauuca

SEQ ID NO: 213265 - RNA, 23 nt, Artificial Sequence
  Synthetic
acaaaugggagaccauagauuca

SEQ ID NO: 213266 - RNA, 24 nt, Artificial Sequence
  Synthetic
aacaaaugggagaccauagauuca

SEQ ID NO: 213267 - RNA, 18 nt, Artificial Sequence
  Synthetic
gacuuuucuuuagauuca

SEQ ID NO: 213268 - RNA, 19 nt, Artificial Sequence
  Synthetic
ugacuuuucuuuagauuca

SEQ ID NO: 213269 - RNA, 20 nt, Artificial Sequence
  Synthetic
uugacuuuucuuuagauuca

SEQ ID NO: 213270 - RNA, 21 nt, Artificial Sequence
  Synthetic
auugacuuuucuuuagauuca

SEQ ID NO: 213271 - RNA, 22 nt, Artificial Sequence
  Synthetic
cauugacuuuucuuuagauuca

SEQ ID NO: 213272 - RNA, 23 nt, Artificial Sequence
  Synthetic
acauugacuuuucuuuagauuca

SEQ ID NO: 213273 - RNA, 24 nt, Artificial Sequence
  Synthetic
cacauugacuuuucuuuagauuca

SEQ ID NO: 213274 - RNA, 18 nt, Artificial Sequence
  Synthetic
cugaagaguuuagauuca

SEQ ID NO: 213275 - RNA, 19 nt, Artificial Sequence
  Synthetic
ucugaagaguuuagauuca

SEQ ID NO: 213276 - RNA, 20 nt, Artificial Sequence
  Synthetic
uucugaagaguuuagauuca

SEQ ID NO: 213277 - RNA, 21 nt, Artificial Sequence
  Synthetic
auucugaagaguuuagauuca

SEQ ID NO: 213278 - RNA, 22 nt, Artificial Sequence
  Synthetic
aauucugaagaguuuagauuca

SEQ ID NO: 213279 - RNA, 23 nt, Artificial Sequence
  Synthetic
caauucugaagaguuuagauuca

SEQ ID NO: 213280 - RNA, 24 nt, Artificial Sequence
  Synthetic
ccaauucugaagaguuuagauuca

SEQ ID NO: 213281 - RNA, 18 nt, Artificial Sequence
  Synthetic
guagccaaccacgauuca

SEQ ID NO: 213282 - RNA, 19 nt, Artificial Sequence
  Synthetic
uguagccaaccacgauuca

SEQ ID NO: 213283 - RNA, 20 nt, Artificial Sequence
  Synthetic
auguagccaaccacgauuca

SEQ ID NO: 213284 - RNA, 21 nt, Artificial Sequence
  Synthetic
gauguagccaaccacgauuca

SEQ ID NO: 213285 - RNA, 22 nt, Artificial Sequence
  Synthetic
ugauguagccaaccacgauuca

SEQ ID NO: 213286 - RNA, 23 nt, Artificial Sequence
  Synthetic
cugauguagccaaccacgauuca

SEQ ID NO: 213287 - RNA, 24 nt, Artificial Sequence
  Synthetic
ccugauguagccaaccacgauuca

SEQ ID NO: 213288 - RNA, 18 nt, Artificial Sequence
  Synthetic
guuugguguuaggauuca

SEQ ID NO: 213289 - RNA, 19 nt, Artificial Sequence
  Synthetic
aguuugguguuaggauuca

SEQ ID NO: 213290 - RNA, 20 nt, Artificial Sequence
  Synthetic
uaguuugguguuaggauuca

SEQ ID NO: 213291 - RNA, 21 nt, Artificial Sequence
  Synthetic
cuaguuugguguuaggauuca

SEQ ID NO: 213292 - RNA, 22 nt, Artificial Sequence
  Synthetic
acuaguuugguguuaggauuca

SEQ ID NO: 213293 - RNA, 23 nt, Artificial Sequence
  Synthetic
uacuaguuugguguuaggauuca

SEQ ID NO: 213294 - RNA, 24 nt, Artificial Sequence
  Synthetic
auacuaguuugguguuaggauuca

SEQ ID NO: 213295 - RNA, 18 nt, Artificial Sequence
  Synthetic
augaaaguaugggauuca

SEQ ID NO: 213296 - RNA, 19 nt, Artificial Sequence
  Synthetic
gaugaaaguaugggauuca

SEQ ID NO: 213297 - RNA, 20 nt, Artificial Sequence
  Synthetic
ggaugaaaguaugggauuca

SEQ ID NO: 213298 - RNA, 21 nt, Artificial Sequence
  Synthetic
uggaugaaaguaugggauuca

SEQ ID NO: 213299 - RNA, 22 nt, Artificial Sequence
  Synthetic
uuggaugaaaguaugggauuca

SEQ ID NO: 213300 - RNA, 23 nt, Artificial Sequence
  Synthetic
guuggaugaaaguaugggauuca

SEQ ID NO: 213301 - RNA, 24 nt, Artificial Sequence
  Synthetic
aguuggaugaaaguaugggauuca

SEQ ID NO: 213302 - RNA, 18 nt, Artificial Sequence
  Synthetic
uucaugcuuugggauuca

SEQ ID NO: 213303 - RNA, 19 nt, Artificial Sequence
  Synthetic
auucaugcuuugggauuca

SEQ ID NO: 213304 - RNA, 20 nt, Artificial Sequence
  Synthetic
aauucaugcuuugggauuca

SEQ ID NO: 213305 - RNA, 21 nt, Artificial Sequence
  Synthetic
aaauucaugcuuugggauuca

SEQ ID NO: 213306 - RNA, 22 nt, Artificial Sequence
  Synthetic
aaaauucaugcuuugggauuca

SEQ ID NO: 213307 - RNA, 23 nt, Artificial Sequence
  Synthetic
aaaaauucaugcuuugggauuca

SEQ ID NO: 213308 - RNA, 24 nt, Artificial Sequence
  Synthetic
uaaaaauucaugcuuugggauuca

SEQ ID NO: 213309 - RNA, 18 nt, Artificial Sequence
  Synthetic
uuccauugucuggauuca

SEQ ID NO: 213310 - RNA, 19 nt, Artificial Sequence
  Synthetic
auuccauugucuggauuca

SEQ ID NO: 213311 - RNA, 20 nt, Artificial Sequence
  Synthetic
uauuccauugucuggauuca

SEQ ID NO: 213312 - RNA, 21 nt, Artificial Sequence
  Synthetic
uuauuccauugucuggauuca

SEQ ID NO: 213313 - RNA, 22 nt, Artificial Sequence
  Synthetic
auuauuccauugucuggauuca

SEQ ID NO: 213314 - RNA, 23 nt, Artificial Sequence
  Synthetic
aauuauuccauugucuggauuca

SEQ ID NO: 213315 - RNA, 24 nt, Artificial Sequence
  Synthetic
caauuauuccauugucuggauuca

SEQ ID NO: 213316 - RNA, 18 nt, Artificial Sequence
  Synthetic
gauugauugacugauuca

SEQ ID NO: 213317 - RNA, 19 nt, Artificial Sequence
  Synthetic
ugauugauugacugauuca

SEQ ID NO: 213318 - RNA, 20 nt, Artificial Sequence
  Synthetic
uugauugauugacugauuca

SEQ ID NO: 213319 - RNA, 21 nt, Artificial Sequence
  Synthetic
auugauugauugacugauuca

SEQ ID NO: 213320 - RNA, 22 nt, Artificial Sequence
  Synthetic
gauugauugauugacugauuca

SEQ ID NO: 213321 - RNA, 23 nt, Artificial Sequence
  Synthetic
ugauugauugauugacugauuca

SEQ ID NO: 213322 - RNA, 24 nt, Artificial Sequence
  Synthetic
uugauugauugauugacugauuca

SEQ ID NO: 213323 - RNA, 18 nt, Artificial Sequence
  Synthetic
ugacagagcucugauuca

SEQ ID NO: 213324 - RNA, 19 nt, Artificial Sequence
  Synthetic
gugacagagcucugauuca

SEQ ID NO: 213325 - RNA, 20 nt, Artificial Sequence
  Synthetic
agugacagagcucugauuca

SEQ ID NO: 213326 - RNA, 21 nt, Artificial Sequence
  Synthetic
cagugacagagcucugauuca

SEQ ID NO: 213327 - RNA, 22 nt, Artificial Sequence
  Synthetic
ucagugacagagcucugauuca

SEQ ID NO: 213328 - RNA, 23 nt, Artificial Sequence
  Synthetic
aucagugacagagcucugauuca

SEQ ID NO: 213329 - RNA, 24 nt, Artificial Sequence
  Synthetic
aaucagugacagagcucugauuca

SEQ ID NO: 213330 - RNA, 18 nt, Artificial Sequence
  Synthetic
agauguuuaagugauuca

SEQ ID NO: 213331 - RNA, 19 nt, Artificial Sequence
  Synthetic
cagauguuuaagugauuca

SEQ ID NO: 213332 - RNA, 20 nt, Artificial Sequence
  Synthetic
ccagauguuuaagugauuca

SEQ ID NO: 213333 - RNA, 21 nt, Artificial Sequence
  Synthetic
uccagauguuuaagugauuca

SEQ ID NO: 213334 - RNA, 22 nt, Artificial Sequence
  Synthetic
uuccagauguuuaagugauuca

SEQ ID NO: 213335 - RNA, 23 nt, Artificial Sequence
  Synthetic
auuccagauguuuaagugauuca

SEQ ID NO: 213336 - RNA, 24 nt, Artificial Sequence
  Synthetic
uauuccagauguuuaagugauuca

SEQ ID NO: 213337 - RNA, 18 nt, Artificial Sequence
  Synthetic
gacaaguuaacauauuca

SEQ ID NO: 213338 - RNA, 19 nt, Artificial Sequence
  Synthetic
agacaaguuaacauauuca

SEQ ID NO: 213339 - RNA, 20 nt, Artificial Sequence
  Synthetic
aagacaaguuaacauauuca

SEQ ID NO: 213340 - RNA, 21 nt, Artificial Sequence
  Synthetic
aaagacaaguuaacauauuca

SEQ ID NO: 213341 - RNA, 22 nt, Artificial Sequence
  Synthetic
uaaagacaaguuaacauauuca

SEQ ID NO: 213342 - RNA, 23 nt, Artificial Sequence
  Synthetic
guaaagacaaguuaacauauuca

SEQ ID NO: 213343 - RNA, 24 nt, Artificial Sequence
  Synthetic
uguaaagacaaguuaacauauuca

SEQ ID NO: 213344 - RNA, 18 nt, Artificial Sequence
  Synthetic
aauaauuguacauauuca

SEQ ID NO: 213345 - RNA, 19 nt, Artificial Sequence
  Synthetic
uaauaauuguacauauuca

SEQ ID NO: 213346 - RNA, 20 nt, Artificial Sequence
  Synthetic
auaauaauuguacauauuca

SEQ ID NO: 213347 - RNA, 21 nt, Artificial Sequence
  Synthetic
aauaauaauuguacauauuca

SEQ ID NO: 213348 - RNA, 22 nt, Artificial Sequence
  Synthetic
aaauaauaauuguacauauuca

SEQ ID NO: 213349 - RNA, 23 nt, Artificial Sequence
  Synthetic
caaauaauaauuguacauauuca

SEQ ID NO: 213350 - RNA, 24 nt, Artificial Sequence
  Synthetic
acaaauaauaauuguacauauuca

SEQ ID NO: 213351 - RNA, 18 nt, Artificial Sequence
  Synthetic
gacaacauaggauauuca

SEQ ID NO: 213352 - RNA, 19 nt, Artificial Sequence
  Synthetic
ugacaacauaggauauuca

SEQ ID NO: 213353 - RNA, 20 nt, Artificial Sequence
  Synthetic
gugacaacauaggauauuca

SEQ ID NO: 213354 - RNA, 21 nt, Artificial Sequence
  Synthetic
ugugacaacauaggauauuca

SEQ ID NO: 213355 - RNA, 22 nt, Artificial Sequence
  Synthetic
uugugacaacauaggauauuca

SEQ ID NO: 213356 - RNA, 23 nt, Artificial Sequence
  Synthetic
uuugugacaacauaggauauuca

SEQ ID NO: 213357 - RNA, 24 nt, Artificial Sequence
  Synthetic
uuuugugacaacauaggauauuca

SEQ ID NO: 213358 - RNA, 18 nt, Artificial Sequence
  Synthetic
acaacucaccuauauuca

SEQ ID NO: 213359 - RNA, 19 nt, Artificial Sequence
  Synthetic
uacaacucaccuauauuca

SEQ ID NO: 213360 - RNA, 20 nt, Artificial Sequence
  Synthetic
auacaacucaccuauauuca

SEQ ID NO: 213361 - RNA, 21 nt, Artificial Sequence
  Synthetic
cauacaacucaccuauauuca

SEQ ID NO: 213362 - RNA, 22 nt, Artificial Sequence
  Synthetic
ccauacaacucaccuauauuca

SEQ ID NO: 213363 - RNA, 23 nt, Artificial Sequence
  Synthetic
uccauacaacucaccuauauuca

SEQ ID NO: 213364 - RNA, 24 nt, Artificial Sequence
  Synthetic
uuccauacaacucaccuauauuca

SEQ ID NO: 213365 - RNA, 18 nt, Artificial Sequence
  Synthetic
uacuuuuugguauauuca

SEQ ID NO: 213366 - RNA, 19 nt, Artificial Sequence
  Synthetic
guacuuuuugguauauuca

SEQ ID NO: 213367 - RNA, 20 nt, Artificial Sequence
  Synthetic
uguacuuuuugguauauuca

SEQ ID NO: 213368 - RNA, 21 nt, Artificial Sequence
  Synthetic
auguacuuuuugguauauuca

SEQ ID NO: 213369 - RNA, 22 nt, Artificial Sequence
  Synthetic
uauguacuuuuugguauauuca

SEQ ID NO: 213370 - RNA, 23 nt, Artificial Sequence
  Synthetic
auauguacuuuuugguauauuca

SEQ ID NO: 213371 - RNA, 24 nt, Artificial Sequence
  Synthetic
uauauguacuuuuugguauauuca

SEQ ID NO: 213372 - RNA, 18 nt, Artificial Sequence
  Synthetic
cuaagugaauuauauuca

SEQ ID NO: 213373 - RNA, 19 nt, Artificial Sequence
  Synthetic
acuaagugaauuauauuca

SEQ ID NO: 213374 - RNA, 20 nt, Artificial Sequence
  Synthetic
uacuaagugaauuauauuca

SEQ ID NO: 213375 - RNA, 21 nt, Artificial Sequence
  Synthetic
uuacuaagugaauuauauuca

SEQ ID NO: 213376 - RNA, 22 nt, Artificial Sequence
  Synthetic
uuuacuaagugaauuauauuca

SEQ ID NO: 213377 - RNA, 23 nt, Artificial Sequence
  Synthetic
uuuuacuaagugaauuauauuca

SEQ ID NO: 213378 - RNA, 24 nt, Artificial Sequence
  Synthetic
uuuuuacuaagugaauuauauuca

SEQ ID NO: 213379 - RNA, 18 nt, Artificial Sequence
  Synthetic
uacacuguauuauauuca

SEQ ID NO: 213380 - RNA, 19 nt, Artificial Sequence
  Synthetic
guacacuguauuauauuca

SEQ ID NO: 213381 - RNA, 20 nt, Artificial Sequence
  Synthetic
aguacacuguauuauauuca

SEQ ID NO: 213382 - RNA, 21 nt, Artificial Sequence
  Synthetic
aaguacacuguauuauauuca

SEQ ID NO: 213383 - RNA, 22 nt, Artificial Sequence
  Synthetic
aaaguacacuguauuauauuca

SEQ ID NO: 213384 - RNA, 23 nt, Artificial Sequence
  Synthetic
uaaaguacacuguauuauauuca

SEQ ID NO: 213385 - RNA, 24 nt, Artificial Sequence
  Synthetic
uuaaaguacacuguauuauauuca

SEQ ID NO: 213386 - RNA, 18 nt, Artificial Sequence
  Synthetic
aagauaaggaacuauuca

SEQ ID NO: 213387 - RNA, 19 nt, Artificial Sequence
  Synthetic
uaagauaaggaacuauuca

SEQ ID NO: 213388 - RNA, 20 nt, Artificial Sequence
  Synthetic
auaagauaaggaacuauuca

SEQ ID NO: 213389 - RNA, 21 nt, Artificial Sequence
  Synthetic
gauaagauaaggaacuauuca

SEQ ID NO: 213390 - RNA, 22 nt, Artificial Sequence
  Synthetic
agauaagauaaggaacuauuca

SEQ ID NO: 213391 - RNA, 23 nt, Artificial Sequence
  Synthetic
cagauaagauaaggaacuauuca

SEQ ID NO: 213392 - RNA, 24 nt, Artificial Sequence
  Synthetic
ucagauaagauaaggaacuauuca

SEQ ID NO: 213393 - RNA, 18 nt, Artificial Sequence
  Synthetic
gggacaugugacuauuca

SEQ ID NO: 213394 - RNA, 19 nt, Artificial Sequence
  Synthetic
agggacaugugacuauuca

SEQ ID NO: 213395 - RNA, 20 nt, Artificial Sequence
  Synthetic
cagggacaugugacuauuca

SEQ ID NO: 213396 - RNA, 21 nt, Artificial Sequence
  Synthetic
ucagggacaugugacuauuca

SEQ ID NO: 213397 - RNA, 22 nt, Artificial Sequence
  Synthetic
uucagggacaugugacuauuca

SEQ ID NO: 213398 - RNA, 23 nt, Artificial Sequence
  Synthetic
uuucagggacaugugacuauuca

SEQ ID NO: 213399 - RNA, 24 nt, Artificial Sequence
  Synthetic
guuucagggacaugugacuauuca

SEQ ID NO: 213400 - RNA, 18 nt, Artificial Sequence
  Synthetic
acaauaacaaccuauuca

SEQ ID NO: 213401 - RNA, 19 nt, Artificial Sequence
  Synthetic
gacaauaacaaccuauuca

SEQ ID NO: 213402 - RNA, 20 nt, Artificial Sequence
  Synthetic
ggacaauaacaaccuauuca

SEQ ID NO: 213403 - RNA, 21 nt, Artificial Sequence
  Synthetic
gggacaauaacaaccuauuca

SEQ ID NO: 213404 - RNA, 22 nt, Artificial Sequence
  Synthetic
ggggacaauaacaaccuauuca

SEQ ID NO: 213405 - RNA, 23 nt, Artificial Sequence
  Synthetic
uggggacaauaacaaccuauuca

SEQ ID NO: 213406 - RNA, 24 nt, Artificial Sequence
  Synthetic
auggggacaauaacaaccuauuca

SEQ ID NO: 213407 - RNA, 18 nt, Artificial Sequence
  Synthetic
uaauuuacuuccuauuca

SEQ ID NO: 213408 - RNA, 19 nt, Artificial Sequence
  Synthetic
uuaauuuacuuccuauuca

SEQ ID NO: 213409 - RNA, 20 nt, Artificial Sequence
  Synthetic
auuaauuuacuuccuauuca

SEQ ID NO: 213410 - RNA, 21 nt, Artificial Sequence
  Synthetic
aauuaauuuacuuccuauuca

SEQ ID NO: 213411 - RNA, 22 nt, Artificial Sequence
  Synthetic
aaauuaauuuacuuccuauuca

SEQ ID NO: 213412 - RNA, 23 nt, Artificial Sequence
  Synthetic
caaauuaauuuacuuccuauuca

SEQ ID NO: 213413 - RNA, 24 nt, Artificial Sequence
  Synthetic
ucaaauuaauuuacuuccuauuca

SEQ ID NO: 213414 - RNA, 18 nt, Artificial Sequence
  Synthetic
aaaccugggcaguauuca

SEQ ID NO: 213415 - RNA, 19 nt, Artificial Sequence
  Synthetic
aaaaccugggcaguauuca

SEQ ID NO: 213416 - RNA, 20 nt, Artificial Sequence
  Synthetic
caaaaccugggcaguauuca

SEQ ID NO: 213417 - RNA, 21 nt, Artificial Sequence
  Synthetic
acaaaaccugggcaguauuca

SEQ ID NO: 213418 - RNA, 22 nt, Artificial Sequence
  Synthetic
cacaaaaccugggcaguauuca

SEQ ID NO: 213419 - RNA, 23 nt, Artificial Sequence
  Synthetic
ucacaaaaccugggcaguauuca

SEQ ID NO: 213420 - RNA, 24 nt, Artificial Sequence
  Synthetic
cucacaaaaccugggcaguauuca

SEQ ID NO: 213421 - RNA, 18 nt, Artificial Sequence
  Synthetic
gucugucaucaguauuca

SEQ ID NO: 213422 - RNA, 19 nt, Artificial Sequence
  Synthetic
cgucugucaucaguauuca

SEQ ID NO: 213423 - RNA, 20 nt, Artificial Sequence
  Synthetic
ccgucugucaucaguauuca

SEQ ID NO: 213424 - RNA, 21 nt, Artificial Sequence
  Synthetic
uccgucugucaucaguauuca

SEQ ID NO: 213425 - RNA, 22 nt, Artificial Sequence
  Synthetic
uuccgucugucaucaguauuca

SEQ ID NO: 213426 - RNA, 23 nt, Artificial Sequence
  Synthetic
auuccgucugucaucaguauuca

SEQ ID NO: 213427 - RNA, 24 nt, Artificial Sequence
  Synthetic
cauuccgucugucaucaguauuca

SEQ ID NO: 213428 - RNA, 18 nt, Artificial Sequence
  Synthetic
auuugcuuucaguauuca

SEQ ID NO: 213429 - RNA, 19 nt, Artificial Sequence
  Synthetic
cauuugcuuucaguauuca

SEQ ID NO: 213430 - RNA, 20 nt, Artificial Sequence
  Synthetic
acauuugcuuucaguauuca

SEQ ID NO: 213431 - RNA, 21 nt, Artificial Sequence
  Synthetic
cacauuugcuuucaguauuca

SEQ ID NO: 213432 - RNA, 22 nt, Artificial Sequence
  Synthetic
ccacauuugcuuucaguauuca

SEQ ID NO: 213433 - RNA, 23 nt, Artificial Sequence
  Synthetic
cccacauuugcuuucaguauuca

SEQ ID NO: 213434 - RNA, 24 nt, Artificial Sequence
  Synthetic
acccacauuugcuuucaguauuca

SEQ ID NO: 213435 - RNA, 18 nt, Artificial Sequence
  Synthetic
gaaaaaauauaguauuca

SEQ ID NO: 213436 - RNA, 19 nt, Artificial Sequence
  Synthetic
ugaaaaaauauaguauuca

SEQ ID NO: 213437 - RNA, 20 nt, Artificial Sequence
  Synthetic
gugaaaaaauauaguauuca

SEQ ID NO: 213438 - RNA, 21 nt, Artificial Sequence
  Synthetic
ugugaaaaaauauaguauuca

SEQ ID NO: 213439 - RNA, 22 nt, Artificial Sequence
  Synthetic
augugaaaaaauauaguauuca

SEQ ID NO: 213440 - RNA, 23 nt, Artificial Sequence
  Synthetic
aaugugaaaaaauauaguauuca

SEQ ID NO: 213441 - RNA, 24 nt, Artificial Sequence
  Synthetic
uaaugugaaaaaauauaguauuca

SEQ ID NO: 213442 - RNA, 18 nt, Artificial Sequence
  Synthetic
cacaaccucauguauuca

SEQ ID NO: 213443 - RNA, 19 nt, Artificial Sequence
  Synthetic
ucacaaccucauguauuca

SEQ ID NO: 213444 - RNA, 20 nt, Artificial Sequence
  Synthetic
uucacaaccucauguauuca

SEQ ID NO: 213445 - RNA, 21 nt, Artificial Sequence
  Synthetic
uuucacaaccucauguauuca

SEQ ID NO: 213446 - RNA, 22 nt, Artificial Sequence
  Synthetic
uuuucacaaccucauguauuca

SEQ ID NO: 213447 - RNA, 23 nt, Artificial Sequence
  Synthetic
cuuuucacaaccucauguauuca

SEQ ID NO: 213448 - RNA, 24 nt, Artificial Sequence
  Synthetic
acuuuucacaaccucauguauuca

SEQ ID NO: 213449 - RNA, 18 nt, Artificial Sequence
  Synthetic
uauguaaauauguauuca

SEQ ID NO: 213450 - RNA, 19 nt, Artificial Sequence
  Synthetic
uuauguaaauauguauuca

SEQ ID NO: 213451 - RNA, 20 nt, Artificial Sequence
  Synthetic
uuuauguaaauauguauuca

SEQ ID NO: 213452 - RNA, 21 nt, Artificial Sequence
  Synthetic
uuuuauguaaauauguauuca

SEQ ID NO: 213453 - RNA, 22 nt, Artificial Sequence
  Synthetic
auuuuauguaaauauguauuca

SEQ ID NO: 213454 - RNA, 23 nt, Artificial Sequence
  Synthetic
cauuuuauguaaauauguauuca

SEQ ID NO: 213455 - RNA, 24 nt, Artificial Sequence
  Synthetic
acauuuuauguaaauauguauuca

SEQ ID NO: 213456 - RNA, 18 nt, Artificial Sequence
  Synthetic
uauauaggcccuuauuca

SEQ ID NO: 213457 - RNA, 19 nt, Artificial Sequence
  Synthetic
cuauauaggcccuuauuca

SEQ ID NO: 213458 - RNA, 20 nt, Artificial Sequence
  Synthetic
gcuauauaggcccuuauuca

SEQ ID NO: 213459 - RNA, 21 nt, Artificial Sequence
  Synthetic
ugcuauauaggcccuuauuca

SEQ ID NO: 213460 - RNA, 22 nt, Artificial Sequence
  Synthetic
gugcuauauaggcccuuauuca

SEQ ID NO: 213461 - RNA, 23 nt, Artificial Sequence
  Synthetic
ggugcuauauaggcccuuauuca

SEQ ID NO: 213462 - RNA, 24 nt, Artificial Sequence
  Synthetic
aggugcuauauaggcccuuauuca

SEQ ID NO: 213463 - RNA, 18 nt, Artificial Sequence
  Synthetic
agugaccccauuuauuca

SEQ ID NO: 213464 - RNA, 19 nt, Artificial Sequence
  Synthetic
cagugaccccauuuauuca

SEQ ID NO: 213465 - RNA, 20 nt, Artificial Sequence
  Synthetic
ccagugaccccauuuauuca

SEQ ID NO: 213466 - RNA, 21 nt, Artificial Sequence
  Synthetic
accagugaccccauuuauuca

SEQ ID NO: 213467 - RNA, 22 nt, Artificial Sequence
  Synthetic
gaccagugaccccauuuauuca

SEQ ID NO: 213468 - RNA, 23 nt, Artificial Sequence
  Synthetic
ugaccagugaccccauuuauuca

SEQ ID NO: 213469 - RNA, 24 nt, Artificial Sequence
  Synthetic
cugaccagugaccccauuuauuca

SEQ ID NO: 213470 - RNA, 18 nt, Artificial Sequence
  Synthetic
uccuucuucauuuauuca

SEQ ID NO: 213471 - RNA, 19 nt, Artificial Sequence
  Synthetic
uuccuucuucauuuauuca

SEQ ID NO: 213472 - RNA, 20 nt, Artificial Sequence
  Synthetic
auuccuucuucauuuauuca

SEQ ID NO: 213473 - RNA, 21 nt, Artificial Sequence
  Synthetic
cauuccuucuucauuuauuca

SEQ ID NO: 213474 - RNA, 22 nt, Artificial Sequence
  Synthetic
ccauuccuucuucauuuauuca

SEQ ID NO: 213475 - RNA, 23 nt, Artificial Sequence
  Synthetic
accauuccuucuucauuuauuca

SEQ ID NO: 213476 - RNA, 24 nt, Artificial Sequence
  Synthetic
uaccauuccuucuucauuuauuca

SEQ ID NO: 213477 - RNA, 18 nt, Artificial Sequence
  Synthetic
acaauauugauuuauuca

SEQ ID NO: 213478 - RNA, 19 nt, Artificial Sequence
  Synthetic
aacaauauugauuuauuca

SEQ ID NO: 213479 - RNA, 20 nt, Artificial Sequence
  Synthetic
caacaauauugauuuauuca

SEQ ID NO: 213480 - RNA, 21 nt, Artificial Sequence
  Synthetic
acaacaauauugauuuauuca

SEQ ID NO: 213481 - RNA, 22 nt, Artificial Sequence
  Synthetic
aacaacaauauugauuuauuca

SEQ ID NO: 213482 - RNA, 23 nt, Artificial Sequence
  Synthetic
uaacaacaauauugauuuauuca

SEQ ID NO: 213483 - RNA, 24 nt, Artificial Sequence
  Synthetic
auaacaacaauauugauuuauuca

SEQ ID NO: 213484 - RNA, 18 nt, Artificial Sequence
  Synthetic
aaccaauuacuuuauuca

SEQ ID NO: 213485 - RNA, 19 nt, Artificial Sequence
  Synthetic
caaccaauuacuuuauuca

SEQ ID NO: 213486 - RNA, 20 nt, Artificial Sequence
  Synthetic
ucaaccaauuacuuuauuca

SEQ ID NO: 213487 - RNA, 21 nt, Artificial Sequence
  Synthetic
uucaaccaauuacuuuauuca

SEQ ID NO: 213488 - RNA, 22 nt, Artificial Sequence
  Synthetic
uuucaaccaauuacuuuauuca

SEQ ID NO: 213489 - RNA, 23 nt, Artificial Sequence
  Synthetic
auuucaaccaauuacuuuauuca

SEQ ID NO: 213490 - RNA, 24 nt, Artificial Sequence
  Synthetic
aauuucaaccaauuacuuuauuca

SEQ ID NO: 213491 - RNA, 18 nt, Artificial Sequence
  Synthetic
aaagacaaaguuuauuca

SEQ ID NO: 213492 - RNA, 19 nt, Artificial Sequence
  Synthetic
aaaagacaaaguuuauuca

SEQ ID NO: 213493 - RNA, 20 nt, Artificial Sequence
  Synthetic
gaaaagacaaaguuuauuca

SEQ ID NO: 213494 - RNA, 21 nt, Artificial Sequence
  Synthetic
agaaaagacaaaguuuauuca

SEQ ID NO: 213495 - RNA, 22 nt, Artificial Sequence
  Synthetic
uagaaaagacaaaguuuauuca

SEQ ID NO: 213496 - RNA, 23 nt, Artificial Sequence
  Synthetic
auagaaaagacaaaguuuauuca

SEQ ID NO: 213497 - RNA, 24 nt, Artificial Sequence
  Synthetic
aauagaaaagacaaaguuuauuca

SEQ ID NO: 213498 - RNA, 18 nt, Artificial Sequence
  Synthetic
aggguuacagaaacuuca

SEQ ID NO: 213499 - RNA, 19 nt, Artificial Sequence
  Synthetic
uaggguuacagaaacuuca

SEQ ID NO: 213500 - RNA, 20 nt, Artificial Sequence
  Synthetic
guaggguuacagaaacuuca

SEQ ID NO: 213501 - RNA, 21 nt, Artificial Sequence
  Synthetic
uguaggguuacagaaacuuca

SEQ ID NO: 213502 - RNA, 22 nt, Artificial Sequence
  Synthetic
uuguaggguuacagaaacuuca

SEQ ID NO: 213503 - RNA, 23 nt, Artificial Sequence
  Synthetic
uuuguaggguuacagaaacuuca

SEQ ID NO: 213504 - RNA, 24 nt, Artificial Sequence
  Synthetic
cuuuguaggguuacagaaacuuca

SEQ ID NO: 213505 - RNA, 18 nt, Artificial Sequence
  Synthetic
uaaccuguagcaacuuca

SEQ ID NO: 213506 - RNA, 19 nt, Artificial Sequence
  Synthetic
auaaccuguagcaacuuca

SEQ ID NO: 213507 - RNA, 20 nt, Artificial Sequence
  Synthetic
aauaaccuguagcaacuuca

SEQ ID NO: 213508 - RNA, 21 nt, Artificial Sequence
  Synthetic
aaauaaccuguagcaacuuca

SEQ ID NO: 213509 - RNA, 22 nt, Artificial Sequence
  Synthetic
aaaauaaccuguagcaacuuca

SEQ ID NO: 213510 - RNA, 23 nt, Artificial Sequence
  Synthetic
gaaaauaaccuguagcaacuuca

SEQ ID NO: 213511 - RNA, 24 nt, Artificial Sequence
  Synthetic
ggaaaauaaccuguagcaacuuca

SEQ ID NO: 213512 - RNA, 18 nt, Artificial Sequence
  Synthetic
guggggcacucaacuuca

SEQ ID NO: 213513 - RNA, 19 nt, Artificial Sequence
  Synthetic
cguggggcacucaacuuca

SEQ ID NO: 213514 - RNA, 20 nt, Artificial Sequence
  Synthetic
acguggggcacucaacuuca

SEQ ID NO: 213515 - RNA, 21 nt, Artificial Sequence
  Synthetic
aacguggggcacucaacuuca

SEQ ID NO: 213516 - RNA, 22 nt, Artificial Sequence
  Synthetic
uaacguggggcacucaacuuca

SEQ ID NO: 213517 - RNA, 23 nt, Artificial Sequence
  Synthetic
auaacguggggcacucaacuuca

SEQ ID NO: 213518 - RNA, 24 nt, Artificial Sequence
  Synthetic
uauaacguggggcacucaacuuca

SEQ ID NO: 213519 - RNA, 18 nt, Artificial Sequence
  Synthetic
aucuuaaauauaacuuca

SEQ ID NO: 213520 - RNA, 19 nt, Artificial Sequence
  Synthetic
aaucuuaaauauaacuuca

SEQ ID NO: 213521 - RNA, 20 nt, Artificial Sequence
  Synthetic
gaaucuuaaauauaacuuca

SEQ ID NO: 213522 - RNA, 21 nt, Artificial Sequence
  Synthetic
ugaaucuuaaauauaacuuca

SEQ ID NO: 213523 - RNA, 22 nt, Artificial Sequence
  Synthetic
uugaaucuuaaauauaacuuca

SEQ ID NO: 213524 - RNA, 23 nt, Artificial Sequence
  Synthetic
auugaaucuuaaauauaacuuca

SEQ ID NO: 213525 - RNA, 24 nt, Artificial Sequence
  Synthetic
aauugaaucuuaaauauaacuuca

SEQ ID NO: 213526 - RNA, 18 nt, Artificial Sequence
  Synthetic
ugaccagccuacacuuca

SEQ ID NO: 213527 - RNA, 19 nt, Artificial Sequence
  Synthetic
cugaccagccuacacuuca

SEQ ID NO: 213528 - RNA, 20 nt, Artificial Sequence
  Synthetic
ucugaccagccuacacuuca

SEQ ID NO: 213529 - RNA, 21 nt, Artificial Sequence
  Synthetic
aucugaccagccuacacuuca

SEQ ID NO: 213530 - RNA, 22 nt, Artificial Sequence
  Synthetic
aaucugaccagccuacacuuca

SEQ ID NO: 213531 - RNA, 23 nt, Artificial Sequence
  Synthetic
aaaucugaccagccuacacuuca

SEQ ID NO: 213532 - RNA, 24 nt, Artificial Sequence
  Synthetic
caaaucugaccagccuacacuuca

SEQ ID NO: 213533 - RNA, 18 nt, Artificial Sequence
  Synthetic
aaaaaaaagcccacuuca

SEQ ID NO: 213534 - RNA, 19 nt, Artificial Sequence
  Synthetic
caaaaaaaagcccacuuca

SEQ ID NO: 213535 - RNA, 20 nt, Artificial Sequence
  Synthetic
acaaaaaaaagcccacuuca

SEQ ID NO: 213536 - RNA, 21 nt, Artificial Sequence
  Synthetic
uacaaaaaaaagcccacuuca

SEQ ID NO: 213537 - RNA, 22 nt, Artificial Sequence
  Synthetic
auacaaaaaaaagcccacuuca

SEQ ID NO: 213538 - RNA, 23 nt, Artificial Sequence
  Synthetic
aauacaaaaaaaagcccacuuca

SEQ ID NO: 213539 - RNA, 24 nt, Artificial Sequence
  Synthetic
aaauacaaaaaaaagcccacuuca

SEQ ID NO: 213540 - RNA, 18 nt, Artificial Sequence
  Synthetic
aaaaaauuauucacuuca

SEQ ID NO: 213541 - RNA, 19 nt, Artificial Sequence
  Synthetic
uaaaaaauuauucacuuca

SEQ ID NO: 213542 - RNA, 20 nt, Artificial Sequence
  Synthetic
uuaaaaaauuauucacuuca

SEQ ID NO: 213543 - RNA, 21 nt, Artificial Sequence
  Synthetic
auuaaaaaauuauucacuuca

SEQ ID NO: 213544 - RNA, 22 nt, Artificial Sequence
  Synthetic
aauuaaaaaauuauucacuuca

SEQ ID NO: 213545 - RNA, 23 nt, Artificial Sequence
  Synthetic
uaauuaaaaaauuauucacuuca

SEQ ID NO: 213546 - RNA, 24 nt, Artificial Sequence
  Synthetic
uuaauuaaaaaauuauucacuuca

SEQ ID NO: 213547 - RNA, 18 nt, Artificial Sequence
  Synthetic
uuugcuuuuuucacuuca

SEQ ID NO: 213548 - RNA, 19 nt, Artificial Sequence
  Synthetic
uuuugcuuuuuucacuuca

SEQ ID NO: 213549 - RNA, 20 nt, Artificial Sequence
  Synthetic
uuuuugcuuuuuucacuuca

SEQ ID NO: 213550 - RNA, 21 nt, Artificial Sequence
  Synthetic
uuuuuugcuuuuuucacuuca

SEQ ID NO: 213551 - RNA, 22 nt, Artificial Sequence
  Synthetic
uuuuuuugcuuuuuucacuuca

SEQ ID NO: 213552 - RNA, 23 nt, Artificial Sequence
  Synthetic
uuuuuuuugcuuuuuucacuuca

SEQ ID NO: 213553 - RNA, 24 nt, Artificial Sequence
  Synthetic
uuuuuuuuugcuuuuuucacuuca

SEQ ID NO: 213554 - RNA, 18 nt, Artificial Sequence
  Synthetic
uugucaacaaagacuuca

SEQ ID NO: 213555 - RNA, 19 nt, Artificial Sequence
  Synthetic
guugucaacaaagacuuca

SEQ ID NO: 213556 - RNA, 20 nt, Artificial Sequence
  Synthetic
aguugucaacaaagacuuca

SEQ ID NO: 213557 - RNA, 21 nt, Artificial Sequence
  Synthetic
gaguugucaacaaagacuuca

SEQ ID NO: 213558 - RNA, 22 nt, Artificial Sequence
  Synthetic
agaguugucaacaaagacuuca

SEQ ID NO: 213559 - RNA, 23 nt, Artificial Sequence
  Synthetic
uagaguugucaacaaagacuuca

SEQ ID NO: 213560 - RNA, 24 nt, Artificial Sequence
  Synthetic
cuagaguugucaacaaagacuuca

SEQ ID NO: 213561 - RNA, 18 nt, Artificial Sequence
  Synthetic
agagguugcacgacuuca

SEQ ID NO: 213562 - RNA, 19 nt, Artificial Sequence
  Synthetic
aagagguugcacgacuuca

SEQ ID NO: 213563 - RNA, 20 nt, Artificial Sequence
  Synthetic
gaagagguugcacgacuuca

SEQ ID NO: 213564 - RNA, 21 nt, Artificial Sequence
  Synthetic
ggaagagguugcacgacuuca

SEQ ID NO: 213565 - RNA, 22 nt, Artificial Sequence
  Synthetic
uggaagagguugcacgacuuca

SEQ ID NO: 213566 - RNA, 23 nt, Artificial Sequence
  Synthetic
uuggaagagguugcacgacuuca

SEQ ID NO: 213567 - RNA, 24 nt, Artificial Sequence
  Synthetic
auuggaagagguugcacgacuuca

SEQ ID NO: 213568 - RNA, 18 nt, Artificial Sequence
  Synthetic
ccuuuuaaagggacuuca

SEQ ID NO: 213569 - RNA, 19 nt, Artificial Sequence
  Synthetic
cccuuuuaaagggacuuca

SEQ ID NO: 213570 - RNA, 20 nt, Artificial Sequence
  Synthetic
acccuuuuaaagggacuuca

SEQ ID NO: 213571 - RNA, 21 nt, Artificial Sequence
  Synthetic
uacccuuuuaaagggacuuca

SEQ ID NO: 213572 - RNA, 22 nt, Artificial Sequence
  Synthetic
cuacccuuuuaaagggacuuca

SEQ ID NO: 213573 - RNA, 23 nt, Artificial Sequence
  Synthetic
ucuacccuuuuaaagggacuuca

SEQ ID NO: 213574 - RNA, 24 nt, Artificial Sequence
  Synthetic
cucuacccuuuuaaagggacuuca

SEQ ID NO: 213575 - RNA, 18 nt, Artificial Sequence
  Synthetic
gaauccggcuggacuuca

SEQ ID NO: 213576 - RNA, 19 nt, Artificial Sequence
  Synthetic
agaauccggcuggacuuca

SEQ ID NO: 213577 - RNA, 20 nt, Artificial Sequence
  Synthetic
aagaauccggcuggacuuca

SEQ ID NO: 213578 - RNA, 21 nt, Artificial Sequence
  Synthetic
gaagaauccggcuggacuuca

SEQ ID NO: 213579 - RNA, 22 nt, Artificial Sequence
  Synthetic
agaagaauccggcuggacuuca

SEQ ID NO: 213580 - RNA, 23 nt, Artificial Sequence
  Synthetic
gagaagaauccggcuggacuuca

SEQ ID NO: 213581 - RNA, 24 nt, Artificial Sequence
  Synthetic
agagaagaauccggcuggacuuca

SEQ ID NO: 213582 - RNA, 18 nt, Artificial Sequence
  Synthetic
auuuccaaaaugacuuca

SEQ ID NO: 213583 - RNA, 19 nt, Artificial Sequence
  Synthetic
aauuuccaaaaugacuuca

SEQ ID NO: 213584 - RNA, 20 nt, Artificial Sequence
  Synthetic
uaauuuccaaaaugacuuca

SEQ ID NO: 213585 - RNA, 21 nt, Artificial Sequence
  Synthetic
auaauuuccaaaaugacuuca

SEQ ID NO: 213586 - RNA, 22 nt, Artificial Sequence
  Synthetic
cauaauuuccaaaaugacuuca

SEQ ID NO: 213587 - RNA, 23 nt, Artificial Sequence
  Synthetic
acauaauuuccaaaaugacuuca

SEQ ID NO: 213588 - RNA, 24 nt, Artificial Sequence
  Synthetic
uacauaauuuccaaaaugacuuca

SEQ ID NO: 213589 - RNA, 18 nt, Artificial Sequence
  Synthetic
agaagcagcuugacuuca

SEQ ID NO: 213590 - RNA, 19 nt, Artificial Sequence
  Synthetic
gagaagcagcuugacuuca

SEQ ID NO: 213591 - RNA, 20 nt, Artificial Sequence
  Synthetic
agagaagcagcuugacuuca

SEQ ID NO: 213592 - RNA, 21 nt, Artificial Sequence
  Synthetic
gagagaagcagcuugacuuca

SEQ ID NO: 213593 - RNA, 22 nt, Artificial Sequence
  Synthetic
agagagaagcagcuugacuuca

SEQ ID NO: 213594 - RNA, 23 nt, Artificial Sequence
  Synthetic
cagagagaagcagcuugacuuca

SEQ ID NO: 213595 - RNA, 24 nt, Artificial Sequence
  Synthetic
ucagagagaagcagcuugacuuca

SEQ ID NO: 213596 - RNA, 18 nt, Artificial Sequence
  Synthetic
ccaugugugaauacuuca

SEQ ID NO: 213597 - RNA, 19 nt, Artificial Sequence
  Synthetic
accaugugugaauacuuca

SEQ ID NO: 213598 - RNA, 20 nt, Artificial Sequence
  Synthetic
aaccaugugugaauacuuca

SEQ ID NO: 213599 - RNA, 21 nt, Artificial Sequence
  Synthetic
aaaccaugugugaauacuuca

SEQ ID NO: 213600 - RNA, 22 nt, Artificial Sequence
  Synthetic
aaaaccaugugugaauacuuca

SEQ ID NO: 213601 - RNA, 23 nt, Artificial Sequence
  Synthetic
gaaaaccaugugugaauacuuca

SEQ ID NO: 213602 - RNA, 24 nt, Artificial Sequence
  Synthetic
ggaaaaccaugugugaauacuuca

SEQ ID NO: 213603 - RNA, 18 nt, Artificial Sequence
  Synthetic
cuguugauuccuacuuca

SEQ ID NO: 213604 - RNA, 19 nt, Artificial Sequence
  Synthetic
ucuguugauuccuacuuca

SEQ ID NO: 213605 - RNA, 20 nt, Artificial Sequence
  Synthetic
gucuguugauuccuacuuca

SEQ ID NO: 213606 - RNA, 21 nt, Artificial Sequence
  Synthetic
ggucuguugauuccuacuuca

SEQ ID NO: 213607 - RNA, 22 nt, Artificial Sequence
  Synthetic
aggucuguugauuccuacuuca

SEQ ID NO: 213608 - RNA, 23 nt, Artificial Sequence
  Synthetic
caggucuguugauuccuacuuca

SEQ ID NO: 213609 - RNA, 24 nt, Artificial Sequence
  Synthetic
ccaggucuguugauuccuacuuca

SEQ ID NO: 213610 - RNA, 18 nt, Artificial Sequence
  Synthetic
aaaaugugauguacuuca

SEQ ID NO: 213611 - RNA, 19 nt, Artificial Sequence
  Synthetic
gaaaaugugauguacuuca

SEQ ID NO: 213612 - RNA, 20 nt, Artificial Sequence
  Synthetic
agaaaaugugauguacuuca

SEQ ID NO: 213613 - RNA, 21 nt, Artificial Sequence
  Synthetic
cagaaaaugugauguacuuca

SEQ ID NO: 213614 - RNA, 22 nt, Artificial Sequence
  Synthetic
acagaaaaugugauguacuuca

SEQ ID NO: 213615 - RNA, 23 nt, Artificial Sequence
  Synthetic
aacagaaaaugugauguacuuca

SEQ ID NO: 213616 - RNA, 24 nt, Artificial Sequence
  Synthetic
aaacagaaaaugugauguacuuca

SEQ ID NO: 213617 - RNA, 18 nt, Artificial Sequence
  Synthetic
gacagucccuguacuuca

SEQ ID NO: 213618 - RNA, 19 nt, Artificial Sequence
  Synthetic
agacagucccuguacuuca

SEQ ID NO: 213619 - RNA, 20 nt, Artificial Sequence
  Synthetic
aagacagucccuguacuuca

SEQ ID NO: 213620 - RNA, 21 nt, Artificial Sequence
  Synthetic
uaagacagucccuguacuuca

SEQ ID NO: 213621 - RNA, 22 nt, Artificial Sequence
  Synthetic
auaagacagucccuguacuuca

SEQ ID NO: 213622 - RNA, 23 nt, Artificial Sequence
  Synthetic
aauaagacagucccuguacuuca

SEQ ID NO: 213623 - RNA, 24 nt, Artificial Sequence
  Synthetic
gaauaagacagucccuguacuuca

SEQ ID NO: 213624 - RNA, 18 nt, Artificial Sequence
  Synthetic
uccauuauauuuacuuca

SEQ ID NO: 213625 - RNA, 19 nt, Artificial Sequence
  Synthetic
auccauuauauuuacuuca

SEQ ID NO: 213626 - RNA, 20 nt, Artificial Sequence
  Synthetic
uauccauuauauuuacuuca

SEQ ID NO: 213627 - RNA, 21 nt, Artificial Sequence
  Synthetic
auauccauuauauuuacuuca

SEQ ID NO: 213628 - RNA, 22 nt, Artificial Sequence
  Synthetic
aauauccauuauauuuacuuca

SEQ ID NO: 213629 - RNA, 23 nt, Artificial Sequence
  Synthetic
uaauauccauuauauuuacuuca

SEQ ID NO: 213630 - RNA, 24 nt, Artificial Sequence
  Synthetic
uuaauauccauuauauuuacuuca

SEQ ID NO: 213631 - RNA, 18 nt, Artificial Sequence
  Synthetic
gacagcuagaaaccuuca

SEQ ID NO: 213632 - RNA, 19 nt, Artificial Sequence
  Synthetic
ggacagcuagaaaccuuca

SEQ ID NO: 213633 - RNA, 20 nt, Artificial Sequence
  Synthetic
uggacagcuagaaaccuuca

SEQ ID NO: 213634 - RNA, 21 nt, Artificial Sequence
  Synthetic
uuggacagcuagaaaccuuca

SEQ ID NO: 213635 - RNA, 22 nt, Artificial Sequence
  Synthetic
uuuggacagcuagaaaccuuca

SEQ ID NO: 213636 - RNA, 23 nt, Artificial Sequence
  Synthetic
uuuuggacagcuagaaaccuuca

SEQ ID NO: 213637 - RNA, 24 nt, Artificial Sequence
  Synthetic
uuuuuggacagcuagaaaccuuca

SEQ ID NO: 213638 - RNA, 18 nt, Artificial Sequence
  Synthetic
acuaaauggcaaccuuca

SEQ ID NO: 213639 - RNA, 19 nt, Artificial Sequence
  Synthetic
aacuaaauggcaaccuuca

SEQ ID NO: 213640 - RNA, 20 nt, Artificial Sequence
  Synthetic
uaacuaaauggcaaccuuca

SEQ ID NO: 213641 - RNA, 21 nt, Artificial Sequence
  Synthetic
uuaacuaaauggcaaccuuca

SEQ ID NO: 213642 - RNA, 22 nt, Artificial Sequence
  Synthetic
auuaacuaaauggcaaccuuca

SEQ ID NO: 213643 - RNA, 23 nt, Artificial Sequence
  Synthetic
aauuaacuaaauggcaaccuuca

SEQ ID NO: 213644 - RNA, 24 nt, Artificial Sequence
  Synthetic
uaauuaacuaaauggcaaccuuca

SEQ ID NO: 213645 - RNA, 18 nt, Artificial Sequence
  Synthetic
uaauuauaacuaccuuca

SEQ ID NO: 213646 - RNA, 19 nt, Artificial Sequence
  Synthetic
uuaauuauaacuaccuuca

SEQ ID NO: 213647 - RNA, 20 nt, Artificial Sequence
  Synthetic
guuaauuauaacuaccuuca

SEQ ID NO: 213648 - RNA, 21 nt, Artificial Sequence
  Synthetic
uguuaauuauaacuaccuuca

SEQ ID NO: 213649 - RNA, 22 nt, Artificial Sequence
  Synthetic
uuguuaauuauaacuaccuuca

SEQ ID NO: 213650 - RNA, 23 nt, Artificial Sequence
  Synthetic
cuuguuaauuauaacuaccuuca

SEQ ID NO: 213651 - RNA, 24 nt, Artificial Sequence
  Synthetic
ucuuguuaauuauaacuaccuuca

SEQ ID NO: 213652 - RNA, 18 nt, Artificial Sequence
  Synthetic
aauauaacuuuaccuuca

SEQ ID NO: 213653 - RNA, 19 nt, Artificial Sequence
  Synthetic
gaauauaacuuuaccuuca

SEQ ID NO: 213654 - RNA, 20 nt, Artificial Sequence
  Synthetic
ugaauauaacuuuaccuuca

SEQ ID NO: 213655 - RNA, 21 nt, Artificial Sequence
  Synthetic
uugaauauaacuuuaccuuca

SEQ ID NO: 213656 - RNA, 22 nt, Artificial Sequence
  Synthetic
auugaauauaacuuuaccuuca

SEQ ID NO: 213657 - RNA, 23 nt, Artificial Sequence
  Synthetic
aauugaauauaacuuuaccuuca

SEQ ID NO: 213658 - RNA, 24 nt, Artificial Sequence
  Synthetic
aaauugaauauaacuuuaccuuca

SEQ ID NO: 213659 - RNA, 18 nt, Artificial Sequence
  Synthetic
ugcaagguuuuaccuuca

SEQ ID NO: 213660 - RNA, 19 nt, Artificial Sequence
  Synthetic
uugcaagguuuuaccuuca

SEQ ID NO: 213661 - RNA, 20 nt, Artificial Sequence
  Synthetic
uuugcaagguuuuaccuuca

SEQ ID NO: 213662 - RNA, 21 nt, Artificial Sequence
  Synthetic
uuuugcaagguuuuaccuuca

SEQ ID NO: 213663 - RNA, 22 nt, Artificial Sequence
  Synthetic
uuuuugcaagguuuuaccuuca

SEQ ID NO: 213664 - RNA, 23 nt, Artificial Sequence
  Synthetic
auuuuugcaagguuuuaccuuca

SEQ ID NO: 213665 - RNA, 24 nt, Artificial Sequence
  Synthetic
uauuuuugcaagguuuuaccuuca

SEQ ID NO: 213666 - RNA, 18 nt, Artificial Sequence
  Synthetic
accaucuguugcccuuca

SEQ ID NO: 213667 - RNA, 19 nt, Artificial Sequence
  Synthetic
uaccaucuguugcccuuca

SEQ ID NO: 213668 - RNA, 20 nt, Artificial Sequence
  Synthetic
cuaccaucuguugcccuuca

SEQ ID NO: 213669 - RNA, 21 nt, Artificial Sequence
  Synthetic
ucuaccaucuguugcccuuca

SEQ ID NO: 213670 - RNA, 22 nt, Artificial Sequence
  Synthetic
uucuaccaucuguugcccuuca

SEQ ID NO: 213671 - RNA, 23 nt, Artificial Sequence
  Synthetic
uuucuaccaucuguugcccuuca

SEQ ID NO: 213672 - RNA, 24 nt, Artificial Sequence
  Synthetic
auuucuaccaucuguugcccuuca

SEQ ID NO: 213673 - RNA, 18 nt, Artificial Sequence
  Synthetic
ugcuuucaagucccuuca

SEQ ID NO: 213674 - RNA, 19 nt, Artificial Sequence
  Synthetic
gugcuuucaagucccuuca

SEQ ID NO: 213675 - RNA, 20 nt, Artificial Sequence
  Synthetic
ugugcuuucaagucccuuca

SEQ ID NO: 213676 - RNA, 21 nt, Artificial Sequence
  Synthetic
gugugcuuucaagucccuuca

SEQ ID NO: 213677 - RNA, 22 nt, Artificial Sequence
  Synthetic
ugugugcuuucaagucccuuca

SEQ ID NO: 213678 - RNA, 23 nt, Artificial Sequence
  Synthetic
uugugugcuuucaagucccuuca

SEQ ID NO: 213679 - RNA, 24 nt, Artificial Sequence
  Synthetic
uuugugugcuuucaagucccuuca

SEQ ID NO: 213680 - RNA, 18 nt, Artificial Sequence
  Synthetic
uucauccaugucccuuca

SEQ ID NO: 213681 - RNA, 19 nt, Artificial Sequence
  Synthetic
cuucauccaugucccuuca

SEQ ID NO: 213682 - RNA, 20 nt, Artificial Sequence
  Synthetic
gcuucauccaugucccuuca

SEQ ID NO: 213683 - RNA, 21 nt, Artificial Sequence
  Synthetic
agcuucauccaugucccuuca

SEQ ID NO: 213684 - RNA, 22 nt, Artificial Sequence
  Synthetic
cagcuucauccaugucccuuca

SEQ ID NO: 213685 - RNA, 23 nt, Artificial Sequence
  Synthetic
ccagcuucauccaugucccuuca

SEQ ID NO: 213686 - RNA, 24 nt, Artificial Sequence
  Synthetic
uccagcuucauccaugucccuuca

SEQ ID NO: 213687 - RNA, 18 nt, Artificial Sequence
  Synthetic
cuucaauuuucuccuuca

SEQ ID NO: 213688 - RNA, 19 nt, Artificial Sequence
  Synthetic
acuucaauuuucuccuuca

SEQ ID NO: 213689 - RNA, 20 nt, Artificial Sequence
  Synthetic
gacuucaauuuucuccuuca

SEQ ID NO: 213690 - RNA, 21 nt, Artificial Sequence
  Synthetic
agacuucaauuuucuccuuca

SEQ ID NO: 213691 - RNA, 22 nt, Artificial Sequence
  Synthetic
cagacuucaauuuucuccuuca

SEQ ID NO: 213692 - RNA, 23 nt, Artificial Sequence
  Synthetic
ucagacuucaauuuucuccuuca

SEQ ID NO: 213693 - RNA, 24 nt, Artificial Sequence
  Synthetic
uucagacuucaauuuucuccuuca

SEQ ID NO: 213694 - RNA, 18 nt, Artificial Sequence
  Synthetic
gcuaauguuaguccuuca

SEQ ID NO: 213695 - RNA, 19 nt, Artificial Sequence
  Synthetic
ugcuaauguuaguccuuca

SEQ ID NO: 213696 - RNA, 20 nt, Artificial Sequence
  Synthetic
cugcuaauguuaguccuuca

SEQ ID NO: 213697 - RNA, 21 nt, Artificial Sequence
  Synthetic
ucugcuaauguuaguccuuca

SEQ ID NO: 213698 - RNA, 22 nt, Artificial Sequence
  Synthetic
gucugcuaauguuaguccuuca

SEQ ID NO: 213699 - RNA, 23 nt, Artificial Sequence
  Synthetic
ugucugcuaauguuaguccuuca

SEQ ID NO: 213700 - RNA, 24 nt, Artificial Sequence
  Synthetic
cugucugcuaauguuaguccuuca

SEQ ID NO: 213701 - RNA, 18 nt, Artificial Sequence
  Synthetic
agaauugggaaagcuuca

SEQ ID NO: 213702 - RNA, 19 nt, Artificial Sequence
  Synthetic
aagaauugggaaagcuuca

SEQ ID NO: 213703 - RNA, 20 nt, Artificial Sequence
  Synthetic
gaagaauugggaaagcuuca

SEQ ID NO: 213704 - RNA, 21 nt, Artificial Sequence
  Synthetic
agaagaauugggaaagcuuca

SEQ ID NO: 213705 - RNA, 22 nt, Artificial Sequence
  Synthetic
cagaagaauugggaaagcuuca

SEQ ID NO: 213706 - RNA, 23 nt, Artificial Sequence
  Synthetic
ccagaagaauugggaaagcuuca

SEQ ID NO: 213707 - RNA, 24 nt, Artificial Sequence
  Synthetic
gccagaagaauugggaaagcuuca

SEQ ID NO: 213708 - RNA, 18 nt, Artificial Sequence
  Synthetic
uuggaguuacaagcuuca

SEQ ID NO: 213709 - RNA, 19 nt, Artificial Sequence
  Synthetic
auuggaguuacaagcuuca

SEQ ID NO: 213710 - RNA, 20 nt, Artificial Sequence
  Synthetic
cauuggaguuacaagcuuca

SEQ ID NO: 213711 - RNA, 21 nt, Artificial Sequence
  Synthetic
acauuggaguuacaagcuuca

SEQ ID NO: 213712 - RNA, 22 nt, Artificial Sequence
  Synthetic
aacauuggaguuacaagcuuca

SEQ ID NO: 213713 - RNA, 23 nt, Artificial Sequence
  Synthetic
gaacauuggaguuacaagcuuca

SEQ ID NO: 213714 - RNA, 24 nt, Artificial Sequence
  Synthetic
agaacauuggaguuacaagcuuca

SEQ ID NO: 213715 - RNA, 18 nt, Artificial Sequence
  Synthetic
aggacuuuauaagcuuca

SEQ ID NO: 213716 - RNA, 19 nt, Artificial Sequence
  Synthetic
uaggacuuuauaagcuuca

SEQ ID NO: 213717 - RNA, 20 nt, Artificial Sequence
  Synthetic
guaggacuuuauaagcuuca

SEQ ID NO: 213718 - RNA, 21 nt, Artificial Sequence
  Synthetic
uguaggacuuuauaagcuuca

SEQ ID NO: 213719 - RNA, 22 nt, Artificial Sequence
  Synthetic
guguaggacuuuauaagcuuca

SEQ ID NO: 213720 - RNA, 23 nt, Artificial Sequence
  Synthetic
aguguaggacuuuauaagcuuca

SEQ ID NO: 213721 - RNA, 24 nt, Artificial Sequence
  Synthetic
aaguguaggacuuuauaagcuuca

SEQ ID NO: 213722 - RNA, 18 nt, Artificial Sequence
  Synthetic
gcguaagacccagcuuca

SEQ ID NO: 213723 - RNA, 19 nt, Artificial Sequence
  Synthetic
agcguaagacccagcuuca

SEQ ID NO: 213724 - RNA, 20 nt, Artificial Sequence
  Synthetic
gagcguaagacccagcuuca

SEQ ID NO: 213725 - RNA, 21 nt, Artificial Sequence
  Synthetic
agagcguaagacccagcuuca

SEQ ID NO: 213726 - RNA, 22 nt, Artificial Sequence
  Synthetic
cagagcguaagacccagcuuca

SEQ ID NO: 213727 - RNA, 23 nt, Artificial Sequence
  Synthetic
acagagcguaagacccagcuuca

SEQ ID NO: 213728 - RNA, 24 nt, Artificial Sequence
  Synthetic
aacagagcguaagacccagcuuca

SEQ ID NO: 213729 - RNA, 18 nt, Artificial Sequence
  Synthetic
uuuuuagucaucgcuuca

SEQ ID NO: 213730 - RNA, 19 nt, Artificial Sequence
  Synthetic
uuuuuuagucaucgcuuca

SEQ ID NO: 213731 - RNA, 20 nt, Artificial Sequence
  Synthetic
uuuuuuuagucaucgcuuca

SEQ ID NO: 213732 - RNA, 21 nt, Artificial Sequence
  Synthetic
uuuuuuuuagucaucgcuuca

SEQ ID NO: 213733 - RNA, 22 nt, Artificial Sequence
  Synthetic
uuuuuuuuuagucaucgcuuca

SEQ ID NO: 213734 - RNA, 23 nt, Artificial Sequence
  Synthetic
uuuuuuuuuuagucaucgcuuca

SEQ ID NO: 213735 - RNA, 24 nt, Artificial Sequence
  Synthetic
uuuuuuuuuuuagucaucgcuuca

SEQ ID NO: 213736 - RNA, 18 nt, Artificial Sequence
  Synthetic
aaaucaaggaaggcuuca

SEQ ID NO: 213737 - RNA, 19 nt, Artificial Sequence
  Synthetic
uaaaucaaggaaggcuuca

SEQ ID NO: 213738 - RNA, 20 nt, Artificial Sequence
  Synthetic
cuaaaucaaggaaggcuuca

SEQ ID NO: 213739 - RNA, 21 nt, Artificial Sequence
  Synthetic
gcuaaaucaaggaaggcuuca

SEQ ID NO: 213740 - RNA, 22 nt, Artificial Sequence
  Synthetic
agcuaaaucaaggaaggcuuca

SEQ ID NO: 213741 - RNA, 23 nt, Artificial Sequence
  Synthetic
uagcuaaaucaaggaaggcuuca

SEQ ID NO: 213742 - RNA, 24 nt, Artificial Sequence
  Synthetic
uuagcuaaaucaaggaaggcuuca

SEQ ID NO: 213743 - RNA, 18 nt, Artificial Sequence
  Synthetic
gaugauggugaggcuuca

SEQ ID NO: 213744 - RNA, 19 nt, Artificial Sequence
  Synthetic
agaugauggugaggcuuca

SEQ ID NO: 213745 - RNA, 20 nt, Artificial Sequence
  Synthetic
cagaugauggugaggcuuca

SEQ ID NO: 213746 - RNA, 21 nt, Artificial Sequence
  Synthetic
acagaugauggugaggcuuca

SEQ ID NO: 213747 - RNA, 22 nt, Artificial Sequence
  Synthetic
aacagaugauggugaggcuuca

SEQ ID NO: 213748 - RNA, 23 nt, Artificial Sequence
  Synthetic
caacagaugauggugaggcuuca

SEQ ID NO: 213749 - RNA, 24 nt, Artificial Sequence
  Synthetic
acaacagaugauggugaggcuuca

SEQ ID NO: 213750 - RNA, 18 nt, Artificial Sequence
  Synthetic
ccaaggaagagggcuuca

SEQ ID NO: 213751 - RNA, 19 nt, Artificial Sequence
  Synthetic
gccaaggaagagggcuuca

SEQ ID NO: 213752 - RNA, 20 nt, Artificial Sequence
  Synthetic
agccaaggaagagggcuuca

SEQ ID NO: 213753 - RNA, 21 nt, Artificial Sequence
  Synthetic
aagccaaggaagagggcuuca

SEQ ID NO: 213754 - RNA, 22 nt, Artificial Sequence
  Synthetic
caagccaaggaagagggcuuca

SEQ ID NO: 213755 - RNA, 23 nt, Artificial Sequence
  Synthetic
ccaagccaaggaagagggcuuca

SEQ ID NO: 213756 - RNA, 24 nt, Artificial Sequence
  Synthetic
gccaagccaaggaagagggcuuca

SEQ ID NO: 213757 - RNA, 18 nt, Artificial Sequence
  Synthetic
cauacuuaaaaugcuuca

SEQ ID NO: 213758 - RNA, 19 nt, Artificial Sequence
  Synthetic
ccauacuuaaaaugcuuca

SEQ ID NO: 213759 - RNA, 20 nt, Artificial Sequence
  Synthetic
accauacuuaaaaugcuuca

SEQ ID NO: 213760 - RNA, 21 nt, Artificial Sequence
  Synthetic
caccauacuuaaaaugcuuca

SEQ ID NO: 213761 - RNA, 22 nt, Artificial Sequence
  Synthetic
ucaccauacuuaaaaugcuuca

SEQ ID NO: 213762 - RNA, 23 nt, Artificial Sequence
  Synthetic
aucaccauacuuaaaaugcuuca

SEQ ID NO: 213763 - RNA, 24 nt, Artificial Sequence
  Synthetic
uaucaccauacuuaaaaugcuuca

SEQ ID NO: 213764 - RNA, 18 nt, Artificial Sequence
  Synthetic
uacccuggaccugcuuca

SEQ ID NO: 213765 - RNA, 19 nt, Artificial Sequence
  Synthetic
auacccuggaccugcuuca

SEQ ID NO: 213766 - RNA, 20 nt, Artificial Sequence
  Synthetic
aauacccuggaccugcuuca

SEQ ID NO: 213767 - RNA, 21 nt, Artificial Sequence
  Synthetic
aaauacccuggaccugcuuca

SEQ ID NO: 213768 - RNA, 22 nt, Artificial Sequence
  Synthetic
aaaauacccuggaccugcuuca

SEQ ID NO: 213769 - RNA, 23 nt, Artificial Sequence
  Synthetic
aaaaauacccuggaccugcuuca

SEQ ID NO: 213770 - RNA, 24 nt, Artificial Sequence
  Synthetic
aaaaaauacccuggaccugcuuca

SEQ ID NO: 213771 - RNA, 18 nt, Artificial Sequence
  Synthetic
gucucaugaccugcuuca

SEQ ID NO: 213772 - RNA, 19 nt, Artificial Sequence
  Synthetic
agucucaugaccugcuuca

SEQ ID NO: 213773 - RNA, 20 nt, Artificial Sequence
  Synthetic
uagucucaugaccugcuuca

SEQ ID NO: 213774 - RNA, 21 nt, Artificial Sequence
  Synthetic
auagucucaugaccugcuuca

SEQ ID NO: 213775 - RNA, 22 nt, Artificial Sequence
  Synthetic
gauagucucaugaccugcuuca

SEQ ID NO: 213776 - RNA, 23 nt, Artificial Sequence
  Synthetic
ugauagucucaugaccugcuuca

SEQ ID NO: 213777 - RNA, 24 nt, Artificial Sequence
  Synthetic
augauagucucaugaccugcuuca

SEQ ID NO: 213778 - RNA, 18 nt, Artificial Sequence
  Synthetic
ggggcucuuccugcuuca

SEQ ID NO: 213779 - RNA, 19 nt, Artificial Sequence
  Synthetic
aggggcucuuccugcuuca

SEQ ID NO: 213780 - RNA, 20 nt, Artificial Sequence
  Synthetic
aaggggcucuuccugcuuca

SEQ ID NO: 213781 - RNA, 21 nt, Artificial Sequence
  Synthetic
uaaggggcucuuccugcuuca

SEQ ID NO: 213782 - RNA, 22 nt, Artificial Sequence
  Synthetic
auaaggggcucuuccugcuuca

SEQ ID NO: 213783 - RNA, 23 nt, Artificial Sequence
  Synthetic
uauaaggggcucuuccugcuuca

SEQ ID NO: 213784 - RNA, 24 nt, Artificial Sequence
  Synthetic
uuauaaggggcucuuccugcuuca

SEQ ID NO: 213785 - RNA, 18 nt, Artificial Sequence
  Synthetic
ggugggauuggugcuuca

SEQ ID NO: 213786 - RNA, 19 nt, Artificial Sequence
  Synthetic
uggugggauuggugcuuca

SEQ ID NO: 213787 - RNA, 20 nt, Artificial Sequence
  Synthetic
auggugggauuggugcuuca

SEQ ID NO: 213788 - RNA, 21 nt, Artificial Sequence
  Synthetic
gauggugggauuggugcuuca

SEQ ID NO: 213789 - RNA, 22 nt, Artificial Sequence
  Synthetic
agauggugggauuggugcuuca

SEQ ID NO: 213790 - RNA, 23 nt, Artificial Sequence
  Synthetic
cagauggugggauuggugcuuca

SEQ ID NO: 213791 - RNA, 24 nt, Artificial Sequence
  Synthetic
gcagauggugggauuggugcuuca

SEQ ID NO: 213792 - RNA, 18 nt, Artificial Sequence
  Synthetic
gaauuugauugugcuuca

SEQ ID NO: 213793 - RNA, 19 nt, Artificial Sequence
  Synthetic
ggaauuugauugugcuuca

SEQ ID NO: 213794 - RNA, 20 nt, Artificial Sequence
  Synthetic
aggaauuugauugugcuuca

SEQ ID NO: 213795 - RNA, 21 nt, Artificial Sequence
  Synthetic
caggaauuugauugugcuuca

SEQ ID NO: 213796 - RNA, 22 nt, Artificial Sequence
  Synthetic
ccaggaauuugauugugcuuca

SEQ ID NO: 213797 - RNA, 23 nt, Artificial Sequence
  Synthetic
uccaggaauuugauugugcuuca

SEQ ID NO: 213798 - RNA, 24 nt, Artificial Sequence
  Synthetic
cuccaggaauuugauugugcuuca

SEQ ID NO: 213799 - RNA, 18 nt, Artificial Sequence
  Synthetic
ccauucacaauugcuuca

SEQ ID NO: 213800 - RNA, 19 nt, Artificial Sequence
  Synthetic
cccauucacaauugcuuca

SEQ ID NO: 213801 - RNA, 20 nt, Artificial Sequence
  Synthetic
ucccauucacaauugcuuca

SEQ ID NO: 213802 - RNA, 21 nt, Artificial Sequence
  Synthetic
cucccauucacaauugcuuca

SEQ ID NO: 213803 - RNA, 22 nt, Artificial Sequence
  Synthetic
acucccauucacaauugcuuca

SEQ ID NO: 213804 - RNA, 23 nt, Artificial Sequence
  Synthetic
aacucccauucacaauugcuuca

SEQ ID NO: 213805 - RNA, 24 nt, Artificial Sequence
  Synthetic
gaacucccauucacaauugcuuca

SEQ ID NO: 213806 - RNA, 21 nt, Artificial Sequence
  Synthetic
uucccauucacaauugcuuca

SEQ ID NO: 213807 - RNA, 22 nt, Artificial Sequence
  Synthetic
auucccauucacaauugcuuca

SEQ ID NO: 213808 - RNA, 23 nt, Artificial Sequence
  Synthetic
aauucccauucacaauugcuuca

SEQ ID NO: 213809 - RNA, 24 nt, Artificial Sequence
  Synthetic
gaauucccauucacaauugcuuca

SEQ ID NO: 213810 - RNA, 18 nt, Artificial Sequence
  Synthetic
ugauauugacuugcuuca

SEQ ID NO: 213811 - RNA, 19 nt, Artificial Sequence
  Synthetic
uugauauugacuugcuuca

SEQ ID NO: 213812 - RNA, 20 nt, Artificial Sequence
  Synthetic
cuugauauugacuugcuuca

SEQ ID NO: 213813 - RNA, 21 nt, Artificial Sequence
  Synthetic
acuugauauugacuugcuuca

SEQ ID NO: 213814 - RNA, 22 nt, Artificial Sequence
  Synthetic
uacuugauauugacuugcuuca

SEQ ID NO: 213815 - RNA, 23 nt, Artificial Sequence
  Synthetic
cuacuugauauugacuugcuuca

SEQ ID NO: 213816 - RNA, 24 nt, Artificial Sequence
  Synthetic
ucuacuugauauugacuugcuuca

SEQ ID NO: 213817 - RNA, 18 nt, Artificial Sequence
  Synthetic
aucuucuguuuugcuuca

SEQ ID NO: 213818 - RNA, 19 nt, Artificial Sequence
  Synthetic
uaucuucuguuuugcuuca

SEQ ID NO: 213819 - RNA, 20 nt, Artificial Sequence
  Synthetic
auaucuucuguuuugcuuca

SEQ ID NO: 213820 - RNA, 21 nt, Artificial Sequence
  Synthetic
aauaucuucuguuuugcuuca

SEQ ID NO: 213821 - RNA, 22 nt, Artificial Sequence
  Synthetic
gaauaucuucuguuuugcuuca

SEQ ID NO: 213822 - RNA, 23 nt, Artificial Sequence
  Synthetic
ugaauaucuucuguuuugcuuca

SEQ ID NO: 213823 - RNA, 24 nt, Artificial Sequence
  Synthetic
uugaauaucuucuguuuugcuuca

SEQ ID NO: 213824 - RNA, 18 nt, Artificial Sequence
  Synthetic
aauccacuauuaucuuca

SEQ ID NO: 213825 - RNA, 19 nt, Artificial Sequence
  Synthetic
aaauccacuauuaucuuca

SEQ ID NO: 213826 - RNA, 20 nt, Artificial Sequence
  Synthetic
caaauccacuauuaucuuca

SEQ ID NO: 213827 - RNA, 21 nt, Artificial Sequence
  Synthetic
ccaaauccacuauuaucuuca

SEQ ID NO: 213828 - RNA, 22 nt, Artificial Sequence
  Synthetic
accaaauccacuauuaucuuca

SEQ ID NO: 213829 - RNA, 23 nt, Artificial Sequence
  Synthetic
gaccaaauccacuauuaucuuca

SEQ ID NO: 213830 - RNA, 24 nt, Artificial Sequence
  Synthetic
agaccaaauccacuauuaucuuca

SEQ ID NO: 213831 - RNA, 18 nt, Artificial Sequence
  Synthetic
augugaaagaccucuuca

SEQ ID NO: 213832 - RNA, 19 nt, Artificial Sequence
  Synthetic
gaugugaaagaccucuuca

SEQ ID NO: 213833 - RNA, 20 nt, Artificial Sequence
  Synthetic
ggaugugaaagaccucuuca

SEQ ID NO: 213834 - RNA, 21 nt, Artificial Sequence
  Synthetic
gggaugugaaagaccucuuca

SEQ ID NO: 213835 - RNA, 22 nt, Artificial Sequence
  Synthetic
agggaugugaaagaccucuuca

SEQ ID NO: 213836 - RNA, 23 nt, Artificial Sequence
  Synthetic
aagggaugugaaagaccucuuca

SEQ ID NO: 213837 - RNA, 24 nt, Artificial Sequence
  Synthetic
gaagggaugugaaagaccucuuca

SEQ ID NO: 213838 - RNA, 18 nt, Artificial Sequence
  Synthetic
augugaaggaccucuuca

SEQ ID NO: 213839 - RNA, 19 nt, Artificial Sequence
  Synthetic
gaugugaaggaccucuuca

SEQ ID NO: 213840 - RNA, 20 nt, Artificial Sequence
  Synthetic
ggaugugaaggaccucuuca

SEQ ID NO: 213841 - RNA, 18 nt, Artificial Sequence
  Synthetic
ugucucccuaccucuuca

SEQ ID NO: 213842 - RNA, 19 nt, Artificial Sequence
  Synthetic
cugucucccuaccucuuca

SEQ ID NO: 213843 - RNA, 20 nt, Artificial Sequence
  Synthetic
ccugucucccuaccucuuca

SEQ ID NO: 213844 - RNA, 21 nt, Artificial Sequence
  Synthetic
gccugucucccuaccucuuca

SEQ ID NO: 213845 - RNA, 22 nt, Artificial Sequence
  Synthetic
agccugucucccuaccucuuca

SEQ ID NO: 213846 - RNA, 23 nt, Artificial Sequence
  Synthetic
aagccugucucccuaccucuuca

SEQ ID NO: 213847 - RNA, 24 nt, Artificial Sequence
  Synthetic
aaagccugucucccuaccucuuca

SEQ ID NO: 213848 - RNA, 18 nt, Artificial Sequence
  Synthetic
ggggcgccaugcucuuca

SEQ ID NO: 213849 - RNA, 19 nt, Artificial Sequence
  Synthetic
aggggcgccaugcucuuca

SEQ ID NO: 213850 - RNA, 20 nt, Artificial Sequence
  Synthetic
aaggggcgccaugcucuuca

SEQ ID NO: 213851 - RNA, 21 nt, Artificial Sequence
  Synthetic
caaggggcgccaugcucuuca

SEQ ID NO: 213852 - RNA, 22 nt, Artificial Sequence
  Synthetic
gcaaggggcgccaugcucuuca

SEQ ID NO: 213853 - RNA, 23 nt, Artificial Sequence
  Synthetic
agcaaggggcgccaugcucuuca

SEQ ID NO: 213854 - RNA, 24 nt, Artificial Sequence
  Synthetic
uagcaaggggcgccaugcucuuca

SEQ ID NO: 213855 - RNA, 18 nt, Artificial Sequence
  Synthetic
uugccaaauugcucuuca

SEQ ID NO: 213856 - RNA, 19 nt, Artificial Sequence
  Synthetic
uuugccaaauugcucuuca

SEQ ID NO: 213857 - RNA, 20 nt, Artificial Sequence
  Synthetic
uuuugccaaauugcucuuca

SEQ ID NO: 213858 - RNA, 21 nt, Artificial Sequence
  Synthetic
auuuugccaaauugcucuuca

SEQ ID NO: 213859 - RNA, 22 nt, Artificial Sequence
  Synthetic
cauuuugccaaauugcucuuca

SEQ ID NO: 213860 - RNA, 23 nt, Artificial Sequence
  Synthetic
acauuuugccaaauugcucuuca

SEQ ID NO: 213861 - RNA, 24 nt, Artificial Sequence
  Synthetic
uacauuuugccaaauugcucuuca

SEQ ID NO: 213862 - RNA, 18 nt, Artificial Sequence
  Synthetic
augcuucccgucucuuca

SEQ ID NO: 213863 - RNA, 19 nt, Artificial Sequence
  Synthetic
uaugcuucccgucucuuca

SEQ ID NO: 213864 - RNA, 20 nt, Artificial Sequence
  Synthetic
uuaugcuucccgucucuuca

SEQ ID NO: 213865 - RNA, 21 nt, Artificial Sequence
  Synthetic
guuaugcuucccgucucuuca

SEQ ID NO: 213866 - RNA, 22 nt, Artificial Sequence
  Synthetic
gguuaugcuucccgucucuuca

SEQ ID NO: 213867 - RNA, 23 nt, Artificial Sequence
  Synthetic
agguuaugcuucccgucucuuca

SEQ ID NO: 213868 - RNA, 24 nt, Artificial Sequence
  Synthetic
aagguuaugcuucccgucucuuca

SEQ ID NO: 213869 - RNA, 18 nt, Artificial Sequence
  Synthetic
aaucagcaguagucuuca

SEQ ID NO: 213870 - RNA, 19 nt, Artificial Sequence
  Synthetic
uaaucagcaguagucuuca

SEQ ID NO: 213871 - RNA, 20 nt, Artificial Sequence
  Synthetic
cuaaucagcaguagucuuca

SEQ ID NO: 213872 - RNA, 21 nt, Artificial Sequence
  Synthetic
ucuaaucagcaguagucuuca

SEQ ID NO: 213873 - RNA, 22 nt, Artificial Sequence
  Synthetic
aucuaaucagcaguagucuuca

SEQ ID NO: 213874 - RNA, 23 nt, Artificial Sequence
  Synthetic
caucuaaucagcaguagucuuca

SEQ ID NO: 213875 - RNA, 24 nt, Artificial Sequence
  Synthetic
gcaucuaaucagcaguagucuuca

SEQ ID NO: 213876 - RNA, 18 nt, Artificial Sequence
  Synthetic
gaaccccagcugucuuca

SEQ ID NO: 213877 - RNA, 19 nt, Artificial Sequence
  Synthetic
ugaaccccagcugucuuca

SEQ ID NO: 213878 - RNA, 20 nt, Artificial Sequence
  Synthetic
uugaaccccagcugucuuca

SEQ ID NO: 213879 - RNA, 21 nt, Artificial Sequence
  Synthetic
uuugaaccccagcugucuuca

SEQ ID NO: 213880 - RNA, 22 nt, Artificial Sequence
  Synthetic
auuugaaccccagcugucuuca

SEQ ID NO: 213881 - RNA, 23 nt, Artificial Sequence
  Synthetic
cauuugaaccccagcugucuuca

SEQ ID NO: 213882 - RNA, 24 nt, Artificial Sequence
  Synthetic
ucauuugaaccccagcugucuuca

SEQ ID NO: 213883 - RNA, 18 nt, Artificial Sequence
  Synthetic
aggucucuggauucuuca

SEQ ID NO: 213884 - RNA, 19 nt, Artificial Sequence
  Synthetic
aaggucucuggauucuuca

SEQ ID NO: 213885 - RNA, 20 nt, Artificial Sequence
  Synthetic
caaggucucuggauucuuca

SEQ ID NO: 213886 - RNA, 21 nt, Artificial Sequence
  Synthetic
ucaaggucucuggauucuuca

SEQ ID NO: 213887 - RNA, 22 nt, Artificial Sequence
  Synthetic
aucaaggucucuggauucuuca

SEQ ID NO: 213888 - RNA, 23 nt, Artificial Sequence
  Synthetic
uaucaaggucucuggauucuuca

SEQ ID NO: 213889 - RNA, 24 nt, Artificial Sequence
  Synthetic
uuaucaaggucucuggauucuuca

SEQ ID NO: 213890 - RNA, 18 nt, Artificial Sequence
  Synthetic
agcauuuuauauucuuca

SEQ ID NO: 213891 - RNA, 19 nt, Artificial Sequence
  Synthetic
uagcauuuuauauucuuca

SEQ ID NO: 213892 - RNA, 20 nt, Artificial Sequence
  Synthetic
uuagcauuuuauauucuuca

SEQ ID NO: 213893 - RNA, 21 nt, Artificial Sequence
  Synthetic
uuuagcauuuuauauucuuca

SEQ ID NO: 213894 - RNA, 22 nt, Artificial Sequence
  Synthetic
auuuagcauuuuauauucuuca

SEQ ID NO: 213895 - RNA, 23 nt, Artificial Sequence
  Synthetic
gauuuagcauuuuauauucuuca

SEQ ID NO: 213896 - RNA, 24 nt, Artificial Sequence
  Synthetic
ggauuuagcauuuuauauucuuca

SEQ ID NO: 213897 - RNA, 18 nt, Artificial Sequence
  Synthetic
guaucaugguauucuuca

SEQ ID NO: 213898 - RNA, 19 nt, Artificial Sequence
  Synthetic
gguaucaugguauucuuca

SEQ ID NO: 213899 - RNA, 20 nt, Artificial Sequence
  Synthetic
ggguaucaugguauucuuca

SEQ ID NO: 213900 - RNA, 21 nt, Artificial Sequence
  Synthetic
aggguaucaugguauucuuca

SEQ ID NO: 213901 - RNA, 22 nt, Artificial Sequence
  Synthetic
uaggguaucaugguauucuuca

SEQ ID NO: 213902 - RNA, 23 nt, Artificial Sequence
  Synthetic
auaggguaucaugguauucuuca

SEQ ID NO: 213903 - RNA, 24 nt, Artificial Sequence
  Synthetic
aauaggguaucaugguauucuuca

SEQ ID NO: 213904 - RNA, 18 nt, Artificial Sequence
  Synthetic
uaaaaaauguauucuuca

SEQ ID NO: 213905 - RNA, 19 nt, Artificial Sequence
  Synthetic
uuaaaaaauguauucuuca

SEQ ID NO: 213906 - RNA, 20 nt, Artificial Sequence
  Synthetic
uuuaaaaaauguauucuuca

SEQ ID NO: 213907 - RNA, 21 nt, Artificial Sequence
  Synthetic
uuuuaaaaaauguauucuuca

SEQ ID NO: 213908 - RNA, 22 nt, Artificial Sequence
  Synthetic
uuuuuaaaaaauguauucuuca

SEQ ID NO: 213909 - RNA, 23 nt, Artificial Sequence
  Synthetic
auuuuuaaaaaauguauucuuca

SEQ ID NO: 213910 - RNA, 24 nt, Artificial Sequence
  Synthetic
gauuuuuaaaaaauguauucuuca

SEQ ID NO: 213911 - RNA, 18 nt, Artificial Sequence
  Synthetic
cacacacuuuguucuuca

SEQ ID NO: 213912 - RNA, 19 nt, Artificial Sequence
  Synthetic
acacacacuuuguucuuca

SEQ ID NO: 213913 - RNA, 20 nt, Artificial Sequence
  Synthetic
cacacacacuuuguucuuca

SEQ ID NO: 213914 - RNA, 21 nt, Artificial Sequence
  Synthetic
acacacacacuuuguucuuca

SEQ ID NO: 213915 - RNA, 22 nt, Artificial Sequence
  Synthetic
uacacacacacuuuguucuuca

SEQ ID NO: 213916 - RNA, 23 nt, Artificial Sequence
  Synthetic
auacacacacacuuuguucuuca

SEQ ID NO: 213917 - RNA, 24 nt, Artificial Sequence
  Synthetic
cauacacacacacuuuguucuuca

SEQ ID NO: 213918 - RNA, 18 nt, Artificial Sequence
  Synthetic
uagaaaugcauuucuuca

SEQ ID NO: 213919 - RNA, 19 nt, Artificial Sequence
  Synthetic
auagaaaugcauuucuuca

SEQ ID NO: 213920 - RNA, 20 nt, Artificial Sequence
  Synthetic
cauagaaaugcauuucuuca

SEQ ID NO: 213921 - RNA, 21 nt, Artificial Sequence
  Synthetic
acauagaaaugcauuucuuca

SEQ ID NO: 213922 - RNA, 22 nt, Artificial Sequence
  Synthetic
gacauagaaaugcauuucuuca

SEQ ID NO: 213923 - RNA, 23 nt, Artificial Sequence
  Synthetic
agacauagaaaugcauuucuuca

SEQ ID NO: 213924 - RNA, 24 nt, Artificial Sequence
  Synthetic
uagacauagaaaugcauuucuuca

SEQ ID NO: 213925 - RNA, 18 nt, Artificial Sequence
  Synthetic
aaauucuaacuuucuuca

SEQ ID NO: 213926 - RNA, 19 nt, Artificial Sequence
  Synthetic
aaaauucuaacuuucuuca

SEQ ID NO: 213927 - RNA, 20 nt, Artificial Sequence
  Synthetic
uaaaauucuaacuuucuuca

SEQ ID NO: 213928 - RNA, 21 nt, Artificial Sequence
  Synthetic
uuaaaauucuaacuuucuuca

SEQ ID NO: 213929 - RNA, 22 nt, Artificial Sequence
  Synthetic
uuuaaaauucuaacuuucuuca

SEQ ID NO: 213930 - RNA, 23 nt, Artificial Sequence
  Synthetic
auuuaaaauucuaacuuucuuca

SEQ ID NO: 213931 - RNA, 24 nt, Artificial Sequence
  Synthetic
uauuuaaaauucuaacuuucuuca

SEQ ID NO: 213932 - RNA, 18 nt, Artificial Sequence
  Synthetic
cuguuggggcuuucuuca

SEQ ID NO: 213933 - RNA, 19 nt, Artificial Sequence
  Synthetic
gcuguuggggcuuucuuca

SEQ ID NO: 213934 - RNA, 20 nt, Artificial Sequence
  Synthetic
ugcuguuggggcuuucuuca

SEQ ID NO: 213935 - RNA, 21 nt, Artificial Sequence
  Synthetic
augcuguuggggcuuucuuca

SEQ ID NO: 213936 - RNA, 22 nt, Artificial Sequence
  Synthetic
gaugcuguuggggcuuucuuca

SEQ ID NO: 213937 - RNA, 23 nt, Artificial Sequence
  Synthetic
ugaugcuguuggggcuuucuuca

SEQ ID NO: 213938 - RNA, 24 nt, Artificial Sequence
  Synthetic
gugaugcuguuggggcuuucuuca

SEQ ID NO: 213939 - RNA, 18 nt, Artificial Sequence
  Synthetic
agaacuucaguuucuuca

SEQ ID NO: 213940 - RNA, 19 nt, Artificial Sequence
  Synthetic
uagaacuucaguuucuuca

SEQ ID NO: 213941 - RNA, 20 nt, Artificial Sequence
  Synthetic
cuagaacuucaguuucuuca

SEQ ID NO: 213942 - RNA, 21 nt, Artificial Sequence
  Synthetic
ucuagaacuucaguuucuuca

SEQ ID NO: 213943 - RNA, 22 nt, Artificial Sequence
  Synthetic
cucuagaacuucaguuucuuca

SEQ ID NO: 213944 - RNA, 23 nt, Artificial Sequence
  Synthetic
ucucuagaacuucaguuucuuca

SEQ ID NO: 213945 - RNA, 24 nt, Artificial Sequence
  Synthetic
aucucuagaacuucaguuucuuca

SEQ ID NO: 213946 - RNA, 18 nt, Artificial Sequence
  Synthetic
augguauuuuuuucuuca

SEQ ID NO: 213947 - RNA, 19 nt, Artificial Sequence
  Synthetic
gaugguauuuuuuucuuca

SEQ ID NO: 213948 - RNA, 20 nt, Artificial Sequence
  Synthetic
agaugguauuuuuuucuuca

SEQ ID NO: 213949 - RNA, 21 nt, Artificial Sequence
  Synthetic
cagaugguauuuuuuucuuca

SEQ ID NO: 213950 - RNA, 22 nt, Artificial Sequence
  Synthetic
acagaugguauuuuuuucuuca

SEQ ID NO: 213951 - RNA, 23 nt, Artificial Sequence
  Synthetic
cacagaugguauuuuuuucuuca

SEQ ID NO: 213952 - RNA, 24 nt, Artificial Sequence
  Synthetic
ccacagaugguauuuuuuucuuca

SEQ ID NO: 213953 - RNA, 18 nt, Artificial Sequence
  Synthetic
ccuggcuucaaaaguuca

SEQ ID NO: 213954 - RNA, 19 nt, Artificial Sequence
  Synthetic
gccuggcuucaaaaguuca

SEQ ID NO: 213955 - RNA, 20 nt, Artificial Sequence
  Synthetic
ugccuggcuucaaaaguuca

SEQ ID NO: 213956 - RNA, 21 nt, Artificial Sequence
  Synthetic
augccuggcuucaaaaguuca

SEQ ID NO: 213957 - RNA, 22 nt, Artificial Sequence
  Synthetic
aaugccuggcuucaaaaguuca

SEQ ID NO: 213958 - RNA, 23 nt, Artificial Sequence
  Synthetic
caaugccuggcuucaaaaguuca

SEQ ID NO: 213959 - RNA, 24 nt, Artificial Sequence
  Synthetic
ucaaugccuggcuucaaaaguuca

SEQ ID NO: 213960 - RNA, 18 nt, Artificial Sequence
  Synthetic
uaaguguuauaaaguuca

SEQ ID NO: 213961 - RNA, 19 nt, Artificial Sequence
  Synthetic
guaaguguuauaaaguuca

SEQ ID NO: 213962 - RNA, 20 nt, Artificial Sequence
  Synthetic
uguaaguguuauaaaguuca

SEQ ID NO: 213963 - RNA, 21 nt, Artificial Sequence
  Synthetic
cuguaaguguuauaaaguuca

SEQ ID NO: 213964 - RNA, 22 nt, Artificial Sequence
  Synthetic
acuguaaguguuauaaaguuca

SEQ ID NO: 213965 - RNA, 23 nt, Artificial Sequence
  Synthetic
aacuguaaguguuauaaaguuca

SEQ ID NO: 213966 - RNA, 24 nt, Artificial Sequence
  Synthetic
aaacuguaaguguuauaaaguuca

SEQ ID NO: 213967 - RNA, 18 nt, Artificial Sequence
  Synthetic
agggaucucucaaguuca

SEQ ID NO: 213968 - RNA, 19 nt, Artificial Sequence
  Synthetic
gagggaucucucaaguuca

SEQ ID NO: 213969 - RNA, 20 nt, Artificial Sequence
  Synthetic
ugagggaucucucaaguuca

SEQ ID NO: 213970 - RNA, 21 nt, Artificial Sequence
  Synthetic
cugagggaucucucaaguuca

SEQ ID NO: 213971 - RNA, 22 nt, Artificial Sequence
  Synthetic
ucugagggaucucucaaguuca

SEQ ID NO: 213972 - RNA, 23 nt, Artificial Sequence
  Synthetic
aucugagggaucucucaaguuca

SEQ ID NO: 213973 - RNA, 24 nt, Artificial Sequence
  Synthetic
aaucugagggaucucucaaguuca

SEQ ID NO: 213974 - RNA, 18 nt, Artificial Sequence
  Synthetic
uuauagcuuagaaguuca

SEQ ID NO: 213975 - RNA, 19 nt, Artificial Sequence
  Synthetic
guuauagcuuagaaguuca

SEQ ID NO: 213976 - RNA, 20 nt, Artificial Sequence
  Synthetic
uguuauagcuuagaaguuca

SEQ ID NO: 213977 - RNA, 21 nt, Artificial Sequence
  Synthetic
auguuauagcuuagaaguuca

SEQ ID NO: 213978 - RNA, 22 nt, Artificial Sequence
  Synthetic
gauguuauagcuuagaaguuca

SEQ ID NO: 213979 - RNA, 23 nt, Artificial Sequence
  Synthetic
ggauguuauagcuuagaaguuca

SEQ ID NO: 213980 - RNA, 24 nt, Artificial Sequence
  Synthetic
aggauguuauagcuuagaaguuca

SEQ ID NO: 213981 - RNA, 18 nt, Artificial Sequence
  Synthetic
aaaauaauagacaguuca

SEQ ID NO: 213982 - RNA, 19 nt, Artificial Sequence
  Synthetic
aaaaauaauagacaguuca

SEQ ID NO: 213983 - RNA, 20 nt, Artificial Sequence
  Synthetic
aaaaaauaauagacaguuca

SEQ ID NO: 213984 - RNA, 21 nt, Artificial Sequence
  Synthetic
uaaaaaauaauagacaguuca

SEQ ID NO: 213985 - RNA, 22 nt, Artificial Sequence
  Synthetic
uuaaaaaauaauagacaguuca

SEQ ID NO: 213986 - RNA, 23 nt, Artificial Sequence
  Synthetic
uuuaaaaaauaauagacaguuca

SEQ ID NO: 213987 - RNA, 24 nt, Artificial Sequence
  Synthetic
guuuaaaaaauaauagacaguuca

SEQ ID NO: 213988 - RNA, 18 nt, Artificial Sequence
  Synthetic
agaguucaguucaguuca

SEQ ID NO: 213989 - RNA, 19 nt, Artificial Sequence
  Synthetic
aagaguucaguucaguuca

SEQ ID NO: 213990 - RNA, 20 nt, Artificial Sequence
  Synthetic
aaagaguucaguucaguuca

SEQ ID NO: 213991 - RNA, 21 nt, Artificial Sequence
  Synthetic
caaagaguucaguucaguuca

SEQ ID NO: 213992 - RNA, 22 nt, Artificial Sequence
  Synthetic
ccaaagaguucaguucaguuca

SEQ ID NO: 213993 - RNA, 23 nt, Artificial Sequence
  Synthetic
accaaagaguucaguucaguuca

SEQ ID NO: 213994 - RNA, 24 nt, Artificial Sequence
  Synthetic
aaccaaagaguucaguucaguuca

SEQ ID NO: 213995 - RNA, 18 nt, Artificial Sequence
  Synthetic
uggccauuccugaguuca

SEQ ID NO: 213996 - RNA, 19 nt, Artificial Sequence
  Synthetic
auggccauuccugaguuca

SEQ ID NO: 213997 - RNA, 20 nt, Artificial Sequence
  Synthetic
cauggccauuccugaguuca

SEQ ID NO: 213998 - RNA, 21 nt, Artificial Sequence
  Synthetic
acauggccauuccugaguuca

SEQ ID NO: 213999 - RNA, 22 nt, Artificial Sequence
  Synthetic
cacauggccauuccugaguuca

SEQ ID NO: 214000 - RNA, 23 nt, Artificial Sequence
  Synthetic
ucacauggccauuccugaguuca

SEQ ID NO: 214001 - RNA, 24 nt, Artificial Sequence
  Synthetic
gucacauggccauuccugaguuca

SEQ ID NO: 214002 - RNA, 18 nt, Artificial Sequence
  Synthetic
ggaaaacuuaauaguuca

SEQ ID NO: 214003 - RNA, 19 nt, Artificial Sequence
  Synthetic
gggaaaacuuaauaguuca

SEQ ID NO: 214004 - RNA, 20 nt, Artificial Sequence
  Synthetic
agggaaaacuuaauaguuca

SEQ ID NO: 214005 - RNA, 21 nt, Artificial Sequence
  Synthetic
aagggaaaacuuaauaguuca

SEQ ID NO: 214006 - RNA, 22 nt, Artificial Sequence
  Synthetic
caagggaaaacuuaauaguuca

SEQ ID NO: 214007 - RNA, 23 nt, Artificial Sequence
  Synthetic
ucaagggaaaacuuaauaguuca

SEQ ID NO: 214008 - RNA, 24 nt, Artificial Sequence
  Synthetic
aucaagggaaaacuuaauaguuca

SEQ ID NO: 214009 - RNA, 18 nt, Artificial Sequence
  Synthetic
cacucaacugauaguuca

SEQ ID NO: 214010 - RNA, 19 nt, Artificial Sequence
  Synthetic
ucacucaacugauaguuca

SEQ ID NO: 214011 - RNA, 20 nt, Artificial Sequence
  Synthetic
uucacucaacugauaguuca

SEQ ID NO: 214012 - RNA, 21 nt, Artificial Sequence
  Synthetic
auucacucaacugauaguuca

SEQ ID NO: 214013 - RNA, 22 nt, Artificial Sequence
  Synthetic
aauucacucaacugauaguuca

SEQ ID NO: 214014 - RNA, 23 nt, Artificial Sequence
  Synthetic
aaauucacucaacugauaguuca

SEQ ID NO: 214015 - RNA, 24 nt, Artificial Sequence
  Synthetic
caaauucacucaacugauaguuca

SEQ ID NO: 214016 - RNA, 18 nt, Artificial Sequence
  Synthetic
uaaguggagauuaguuca

SEQ ID NO: 214017 - RNA, 19 nt, Artificial Sequence
  Synthetic
uuaaguggagauuaguuca

SEQ ID NO: 214018 - RNA, 20 nt, Artificial Sequence
  Synthetic
cuuaaguggagauuaguuca

SEQ ID NO: 214019 - RNA, 21 nt, Artificial Sequence
  Synthetic
ucuuaaguggagauuaguuca

SEQ ID NO: 214020 - RNA, 22 nt, Artificial Sequence
  Synthetic
gucuuaaguggagauuaguuca

SEQ ID NO: 214021 - RNA, 23 nt, Artificial Sequence
  Synthetic
agucuuaaguggagauuaguuca

SEQ ID NO: 214022 - RNA, 24 nt, Artificial Sequence
  Synthetic
gagucuuaaguggagauuaguuca

SEQ ID NO: 214023 - RNA, 18 nt, Artificial Sequence
  Synthetic
gggaagggacagcguuca

SEQ ID NO: 214024 - RNA, 19 nt, Artificial Sequence
  Synthetic
ggggaagggacagcguuca

SEQ ID NO: 214025 - RNA, 20 nt, Artificial Sequence
  Synthetic
cggggaagggacagcguuca

SEQ ID NO: 214026 - RNA, 21 nt, Artificial Sequence
  Synthetic
gcggggaagggacagcguuca

SEQ ID NO: 214027 - RNA, 22 nt, Artificial Sequence
  Synthetic
agcggggaagggacagcguuca

SEQ ID NO: 214028 - RNA, 23 nt, Artificial Sequence
  Synthetic
uagcggggaagggacagcguuca

SEQ ID NO: 214029 - RNA, 24 nt, Artificial Sequence
  Synthetic
uuagcggggaagggacagcguuca

SEQ ID NO: 214030 - RNA, 18 nt, Artificial Sequence
  Synthetic
caacagauaucucguuca

SEQ ID NO: 214031 - RNA, 19 nt, Artificial Sequence
  Synthetic
acaacagauaucucguuca

SEQ ID NO: 214032 - RNA, 20 nt, Artificial Sequence
  Synthetic
aacaacagauaucucguuca

SEQ ID NO: 214033 - RNA, 21 nt, Artificial Sequence
  Synthetic
uaacaacagauaucucguuca

SEQ ID NO: 214034 - RNA, 22 nt, Artificial Sequence
  Synthetic
uuaacaacagauaucucguuca

SEQ ID NO: 214035 - RNA, 23 nt, Artificial Sequence
  Synthetic
guuaacaacagauaucucguuca

SEQ ID NO: 214036 - RNA, 24 nt, Artificial Sequence
  Synthetic
uguuaacaacagauaucucguuca

SEQ ID NO: 214037 - RNA, 18 nt, Artificial Sequence
  Synthetic
guuuguauaaaagguuca

SEQ ID NO: 214038 - RNA, 19 nt, Artificial Sequence
  Synthetic
aguuuguauaaaagguuca

SEQ ID NO: 214039 - RNA, 20 nt, Artificial Sequence
  Synthetic
uaguuuguauaaaagguuca

SEQ ID NO: 214040 - RNA, 21 nt, Artificial Sequence
  Synthetic
uuaguuuguauaaaagguuca

SEQ ID NO: 214041 - RNA, 22 nt, Artificial Sequence
  Synthetic
guuaguuuguauaaaagguuca

SEQ ID NO: 214042 - RNA, 23 nt, Artificial Sequence
  Synthetic
gguuaguuuguauaaaagguuca

SEQ ID NO: 214043 - RNA, 24 nt, Artificial Sequence
  Synthetic
ugguuaguuuguauaaaagguuca

SEQ ID NO: 214044 - RNA, 18 nt, Artificial Sequence
  Synthetic
caguuugcucaagguuca

SEQ ID NO: 214045 - RNA, 19 nt, Artificial Sequence
  Synthetic
acaguuugcucaagguuca

SEQ ID NO: 214046 - RNA, 20 nt, Artificial Sequence
  Synthetic
uacaguuugcucaagguuca

SEQ ID NO: 214047 - RNA, 21 nt, Artificial Sequence
  Synthetic
cuacaguuugcucaagguuca

SEQ ID NO: 214048 - RNA, 22 nt, Artificial Sequence
  Synthetic
ucuacaguuugcucaagguuca

SEQ ID NO: 214049 - RNA, 23 nt, Artificial Sequence
  Synthetic
aucuacaguuugcucaagguuca

SEQ ID NO: 214050 - RNA, 24 nt, Artificial Sequence
  Synthetic
aaucuacaguuugcucaagguuca

SEQ ID NO: 214051 - RNA, 18 nt, Artificial Sequence
  Synthetic
aagagaaauccagguuca

SEQ ID NO: 214052 - RNA, 19 nt, Artificial Sequence
  Synthetic
aaagagaaauccagguuca

SEQ ID NO: 214053 - RNA, 20 nt, Artificial Sequence
  Synthetic
gaaagagaaauccagguuca

SEQ ID NO: 214054 - RNA, 21 nt, Artificial Sequence
  Synthetic
agaaagagaaauccagguuca

SEQ ID NO: 214055 - RNA, 22 nt, Artificial Sequence
  Synthetic
cagaaagagaaauccagguuca

SEQ ID NO: 214056 - RNA, 23 nt, Artificial Sequence
  Synthetic
ucagaaagagaaauccagguuca

SEQ ID NO: 214057 - RNA, 24 nt, Artificial Sequence
  Synthetic
uucagaaagagaaauccagguuca

SEQ ID NO: 214058 - RNA, 18 nt, Artificial Sequence
  Synthetic
agaucacuggcagguuca

SEQ ID NO: 214059 - RNA, 19 nt, Artificial Sequence
  Synthetic
gagaucacuggcagguuca

SEQ ID NO: 214060 - RNA, 20 nt, Artificial Sequence
  Synthetic
agagaucacuggcagguuca

SEQ ID NO: 214061 - RNA, 21 nt, Artificial Sequence
  Synthetic
cagagaucacuggcagguuca

SEQ ID NO: 214062 - RNA, 22 nt, Artificial Sequence
  Synthetic
ucagagaucacuggcagguuca

SEQ ID NO: 214063 - RNA, 23 nt, Artificial Sequence
  Synthetic
gucagagaucacuggcagguuca

SEQ ID NO: 214064 - RNA, 24 nt, Artificial Sequence
  Synthetic
agucagagaucacuggcagguuca

SEQ ID NO: 214065 - RNA, 18 nt, Artificial Sequence
  Synthetic
ggaguauuuuaggguuca

SEQ ID NO: 214066 - RNA, 19 nt, Artificial Sequence
  Synthetic
uggaguauuuuaggguuca

SEQ ID NO: 214067 - RNA, 20 nt, Artificial Sequence
  Synthetic
auggaguauuuuaggguuca

SEQ ID NO: 214068 - RNA, 21 nt, Artificial Sequence
  Synthetic
uauggaguauuuuaggguuca

SEQ ID NO: 214069 - RNA, 22 nt, Artificial Sequence
  Synthetic
cuauggaguauuuuaggguuca

SEQ ID NO: 214070 - RNA, 23 nt, Artificial Sequence
  Synthetic
acuauggaguauuuuaggguuca

SEQ ID NO: 214071 - RNA, 24 nt, Artificial Sequence
  Synthetic
aacuauggaguauuuuaggguuca

SEQ ID NO: 214072 - RNA, 18 nt, Artificial Sequence
  Synthetic
aguguggagaaugguuca

SEQ ID NO: 214073 - RNA, 19 nt, Artificial Sequence
  Synthetic
aaguguggagaaugguuca

SEQ ID NO: 214074 - RNA, 20 nt, Artificial Sequence
  Synthetic
gaaguguggagaaugguuca

SEQ ID NO: 214075 - RNA, 21 nt, Artificial Sequence
  Synthetic
ugaaguguggagaaugguuca

SEQ ID NO: 214076 - RNA, 22 nt, Artificial Sequence
  Synthetic
cugaaguguggagaaugguuca

SEQ ID NO: 214077 - RNA, 23 nt, Artificial Sequence
  Synthetic
gcugaaguguggagaaugguuca

SEQ ID NO: 214078 - RNA, 24 nt, Artificial Sequence
  Synthetic
cgcugaaguguggagaaugguuca

SEQ ID NO: 214079 - RNA, 18 nt, Artificial Sequence
  Synthetic
agcgauuuaggugguuca

SEQ ID NO: 214080 - RNA, 19 nt, Artificial Sequence
  Synthetic
cagcgauuuaggugguuca

SEQ ID NO: 214081 - RNA, 20 nt, Artificial Sequence
  Synthetic
acagcgauuuaggugguuca

SEQ ID NO: 214082 - RNA, 21 nt, Artificial Sequence
  Synthetic
aacagcgauuuaggugguuca

SEQ ID NO: 214083 - RNA, 22 nt, Artificial Sequence
  Synthetic
aaacagcgauuuaggugguuca

SEQ ID NO: 214084 - RNA, 23 nt, Artificial Sequence
  Synthetic
gaaacagcgauuuaggugguuca

SEQ ID NO: 214085 - RNA, 24 nt, Artificial Sequence
  Synthetic
ggaaacagcgauuuaggugguuca

SEQ ID NO: 214086 - RNA, 18 nt, Artificial Sequence
  Synthetic
ugcuuggggcuugguuca

SEQ ID NO: 214087 - RNA, 19 nt, Artificial Sequence
  Synthetic
cugcuuggggcuugguuca

SEQ ID NO: 214088 - RNA, 20 nt, Artificial Sequence
  Synthetic
ucugcuuggggcuugguuca

SEQ ID NO: 214089 - RNA, 21 nt, Artificial Sequence
  Synthetic
uucugcuuggggcuugguuca

SEQ ID NO: 214090 - RNA, 22 nt, Artificial Sequence
  Synthetic
auucugcuuggggcuugguuca

SEQ ID NO: 214091 - RNA, 23 nt, Artificial Sequence
  Synthetic
gauucugcuuggggcuugguuca

SEQ ID NO: 214092 - RNA, 24 nt, Artificial Sequence
  Synthetic
ugauucugcuuggggcuugguuca

SEQ ID NO: 214093 - RNA, 18 nt, Artificial Sequence
  Synthetic
uuaguuacaguugguuca

SEQ ID NO: 214094 - RNA, 19 nt, Artificial Sequence
  Synthetic
guuaguuacaguugguuca

SEQ ID NO: 214095 - RNA, 20 nt, Artificial Sequence
  Synthetic
uguuaguuacaguugguuca

SEQ ID NO: 214096 - RNA, 21 nt, Artificial Sequence
  Synthetic
auguuaguuacaguugguuca

SEQ ID NO: 214097 - RNA, 22 nt, Artificial Sequence
  Synthetic
gauguuaguuacaguugguuca

SEQ ID NO: 214098 - RNA, 23 nt, Artificial Sequence
  Synthetic
agauguuaguuacaguugguuca

SEQ ID NO: 214099 - RNA, 24 nt, Artificial Sequence
  Synthetic
aagauguuaguuacaguugguuca

SEQ ID NO: 214100 - RNA, 18 nt, Artificial Sequence
  Synthetic
uccuaaaagcaauguuca

SEQ ID NO: 214101 - RNA, 19 nt, Artificial Sequence
  Synthetic
uuccuaaaagcaauguuca

SEQ ID NO: 214102 - RNA, 20 nt, Artificial Sequence
  Synthetic
auuccuaaaagcaauguuca

SEQ ID NO: 214103 - RNA, 21 nt, Artificial Sequence
  Synthetic
uauuccuaaaagcaauguuca

SEQ ID NO: 214104 - RNA, 22 nt, Artificial Sequence
  Synthetic
uuauuccuaaaagcaauguuca

SEQ ID NO: 214105 - RNA, 23 nt, Artificial Sequence
  Synthetic
uuuauuccuaaaagcaauguuca

SEQ ID NO: 214106 - RNA, 24 nt, Artificial Sequence
  Synthetic
auuuauuccuaaaagcaauguuca

SEQ ID NO: 214107 - RNA, 18 nt, Artificial Sequence
  Synthetic
caauuugauuaauguuca

SEQ ID NO: 214108 - RNA, 19 nt, Artificial Sequence
  Synthetic
gcaauuugauuaauguuca

SEQ ID NO: 214109 - RNA, 20 nt, Artificial Sequence
  Synthetic
agcaauuugauuaauguuca

SEQ ID NO: 214110 - RNA, 21 nt, Artificial Sequence
  Synthetic
aagcaauuugauuaauguuca

SEQ ID NO: 214111 - RNA, 22 nt, Artificial Sequence
  Synthetic
gaagcaauuugauuaauguuca

SEQ ID NO: 214112 - RNA, 23 nt, Artificial Sequence
  Synthetic
agaagcaauuugauuaauguuca

SEQ ID NO: 214113 - RNA, 24 nt, Artificial Sequence
  Synthetic
uagaagcaauuugauuaauguuca

SEQ ID NO: 214114 - RNA, 18 nt, Artificial Sequence
  Synthetic
gugauacaaacauguuca

SEQ ID NO: 214115 - RNA, 19 nt, Artificial Sequence
  Synthetic
ggugauacaaacauguuca

SEQ ID NO: 214116 - RNA, 20 nt, Artificial Sequence
  Synthetic
uggugauacaaacauguuca

SEQ ID NO: 214117 - RNA, 21 nt, Artificial Sequence
  Synthetic
cuggugauacaaacauguuca

SEQ ID NO: 214118 - RNA, 22 nt, Artificial Sequence
  Synthetic
ucuggugauacaaacauguuca

SEQ ID NO: 214119 - RNA, 23 nt, Artificial Sequence
  Synthetic
gucuggugauacaaacauguuca

SEQ ID NO: 214120 - RNA, 24 nt, Artificial Sequence
  Synthetic
ggucuggugauacaaacauguuca

SEQ ID NO: 214121 - RNA, 18 nt, Artificial Sequence
  Synthetic
uuccagaauaaguguuca

SEQ ID NO: 214122 - RNA, 19 nt, Artificial Sequence
  Synthetic
cuuccagaauaaguguuca

SEQ ID NO: 214123 - RNA, 20 nt, Artificial Sequence
  Synthetic
ucuuccagaauaaguguuca

SEQ ID NO: 214124 - RNA, 21 nt, Artificial Sequence
  Synthetic
uucuuccagaauaaguguuca

SEQ ID NO: 214125 - RNA, 22 nt, Artificial Sequence
  Synthetic
uuucuuccagaauaaguguuca

SEQ ID NO: 214126 - RNA, 23 nt, Artificial Sequence
  Synthetic
uuuucuuccagaauaaguguuca

SEQ ID NO: 214127 - RNA, 24 nt, Artificial Sequence
  Synthetic
uuuuucuuccagaauaaguguuca

SEQ ID NO: 214128 - RNA, 18 nt, Artificial Sequence
  Synthetic
auguccucuaaguguuca

SEQ ID NO: 214129 - RNA, 19 nt, Artificial Sequence
  Synthetic
aauguccucuaaguguuca

SEQ ID NO: 214130 - RNA, 20 nt, Artificial Sequence
  Synthetic
caauguccucuaaguguuca

SEQ ID NO: 214131 - RNA, 21 nt, Artificial Sequence
  Synthetic
acaauguccucuaaguguuca

SEQ ID NO: 214132 - RNA, 22 nt, Artificial Sequence
  Synthetic
uacaauguccucuaaguguuca

SEQ ID NO: 214133 - RNA, 23 nt, Artificial Sequence
  Synthetic
cuacaauguccucuaaguguuca

SEQ ID NO: 214134 - RNA, 24 nt, Artificial Sequence
  Synthetic
ccuacaauguccucuaaguguuca

SEQ ID NO: 214135 - RNA, 18 nt, Artificial Sequence
  Synthetic
cuugaggcucuguguuca

SEQ ID NO: 214136 - RNA, 19 nt, Artificial Sequence
  Synthetic
ccuugaggcucuguguuca

SEQ ID NO: 214137 - RNA, 20 nt, Artificial Sequence
  Synthetic
cccuugaggcucuguguuca

SEQ ID NO: 214138 - RNA, 21 nt, Artificial Sequence
  Synthetic
ccccuugaggcucuguguuca

SEQ ID NO: 214139 - RNA, 22 nt, Artificial Sequence
  Synthetic
accccuugaggcucuguguuca

SEQ ID NO: 214140 - RNA, 23 nt, Artificial Sequence
  Synthetic
caccccuugaggcucuguguuca

SEQ ID NO: 214141 - RNA, 24 nt, Artificial Sequence
  Synthetic
ccaccccuugaggcucuguguuca

SEQ ID NO: 214142 - RNA, 18 nt, Artificial Sequence
  Synthetic
aaaugaccaaauuguuca

SEQ ID NO: 214143 - RNA, 19 nt, Artificial Sequence
  Synthetic
gaaaugaccaaauuguuca

SEQ ID NO: 214144 - RNA, 20 nt, Artificial Sequence
  Synthetic
ggaaaugaccaaauuguuca

SEQ ID NO: 214145 - RNA, 21 nt, Artificial Sequence
  Synthetic
aggaaaugaccaaauuguuca

SEQ ID NO: 214146 - RNA, 22 nt, Artificial Sequence
  Synthetic
aaggaaaugaccaaauuguuca

SEQ ID NO: 214147 - RNA, 23 nt, Artificial Sequence
  Synthetic
uaaggaaaugaccaaauuguuca

SEQ ID NO: 214148 - RNA, 24 nt, Artificial Sequence
  Synthetic
auaaggaaaugaccaaauuguuca

SEQ ID NO: 214149 - RNA, 18 nt, Artificial Sequence
  Synthetic
caaauauuaaauuguuca

SEQ ID NO: 214150 - RNA, 19 nt, Artificial Sequence
  Synthetic
ccaaauauuaaauuguuca

SEQ ID NO: 214151 - RNA, 20 nt, Artificial Sequence
  Synthetic
gccaaauauuaaauuguuca

SEQ ID NO: 214152 - RNA, 21 nt, Artificial Sequence
  Synthetic
agccaaauauuaaauuguuca

SEQ ID NO: 214153 - RNA, 22 nt, Artificial Sequence
  Synthetic
aagccaaauauuaaauuguuca

SEQ ID NO: 214154 - RNA, 23 nt, Artificial Sequence
  Synthetic
gaagccaaauauuaaauuguuca

SEQ ID NO: 214155 - RNA, 24 nt, Artificial Sequence
  Synthetic
agaagccaaauauuaaauuguuca

SEQ ID NO: 214156 - RNA, 18 nt, Artificial Sequence
  Synthetic
ccaugaaucuauuguuca

SEQ ID NO: 214157 - RNA, 19 nt, Artificial Sequence
  Synthetic
cccaugaaucuauuguuca

SEQ ID NO: 214158 - RNA, 20 nt, Artificial Sequence
  Synthetic
acccaugaaucuauuguuca

SEQ ID NO: 214159 - RNA, 21 nt, Artificial Sequence
  Synthetic
uacccaugaaucuauuguuca

SEQ ID NO: 214160 - RNA, 22 nt, Artificial Sequence
  Synthetic
cuacccaugaaucuauuguuca

SEQ ID NO: 214161 - RNA, 23 nt, Artificial Sequence
  Synthetic
ucuacccaugaaucuauuguuca

SEQ ID NO: 214162 - RNA, 24 nt, Artificial Sequence
  Synthetic
uucuacccaugaaucuauuguuca

SEQ ID NO: 214163 - RNA, 18 nt, Artificial Sequence
  Synthetic
gaaacaucuccuuguuca

SEQ ID NO: 214164 - RNA, 19 nt, Artificial Sequence
  Synthetic
ugaaacaucuccuuguuca

SEQ ID NO: 214165 - RNA, 20 nt, Artificial Sequence
  Synthetic
uugaaacaucuccuuguuca

SEQ ID NO: 214166 - RNA, 21 nt, Artificial Sequence
  Synthetic
cuugaaacaucuccuuguuca

SEQ ID NO: 214167 - RNA, 22 nt, Artificial Sequence
  Synthetic
ucuugaaacaucuccuuguuca

SEQ ID NO: 214168 - RNA, 23 nt, Artificial Sequence
  Synthetic
uucuugaaacaucuccuuguuca

SEQ ID NO: 214169 - RNA, 24 nt, Artificial Sequence
  Synthetic
auucuugaaacaucuccuuguuca

SEQ ID NO: 214170 - RNA, 18 nt, Artificial Sequence
  Synthetic
ggguuuuuuaguuguuca

SEQ ID NO: 214171 - RNA, 19 nt, Artificial Sequence
  Synthetic
gggguuuuuuaguuguuca

SEQ ID NO: 214172 - RNA, 20 nt, Artificial Sequence
  Synthetic
ugggguuuuuuaguuguuca

SEQ ID NO: 214173 - RNA, 21 nt, Artificial Sequence
  Synthetic
uugggguuuuuuaguuguuca

SEQ ID NO: 214174 - RNA, 22 nt, Artificial Sequence
  Synthetic
auugggguuuuuuaguuguuca

SEQ ID NO: 214175 - RNA, 23 nt, Artificial Sequence
  Synthetic
gauugggguuuuuuaguuguuca

SEQ ID NO: 214176 - RNA, 24 nt, Artificial Sequence
  Synthetic
agauugggguuuuuuaguuguuca

SEQ ID NO: 214177 - RNA, 18 nt, Artificial Sequence
  Synthetic
ccaguuaauauuuguuca

SEQ ID NO: 214178 - RNA, 19 nt, Artificial Sequence
  Synthetic
cccaguuaauauuuguuca

SEQ ID NO: 214179 - RNA, 20 nt, Artificial Sequence
  Synthetic
acccaguuaauauuuguuca

SEQ ID NO: 214180 - RNA, 21 nt, Artificial Sequence
  Synthetic
uacccaguuaauauuuguuca

SEQ ID NO: 214181 - RNA, 22 nt, Artificial Sequence
  Synthetic
guacccaguuaauauuuguuca

SEQ ID NO: 214182 - RNA, 23 nt, Artificial Sequence
  Synthetic
gguacccaguuaauauuuguuca

SEQ ID NO: 214183 - RNA, 24 nt, Artificial Sequence
  Synthetic
agguacccaguuaauauuuguuca

SEQ ID NO: 214184 - RNA, 18 nt, Artificial Sequence
  Synthetic
aacccuccauuuuguuca

SEQ ID NO: 214185 - RNA, 19 nt, Artificial Sequence
  Synthetic
caacccuccauuuuguuca

SEQ ID NO: 214186 - RNA, 20 nt, Artificial Sequence
  Synthetic
ucaacccuccauuuuguuca

SEQ ID NO: 214187 - RNA, 21 nt, Artificial Sequence
  Synthetic
gucaacccuccauuuuguuca

SEQ ID NO: 214188 - RNA, 22 nt, Artificial Sequence
  Synthetic
ugucaacccuccauuuuguuca

SEQ ID NO: 214189 - RNA, 23 nt, Artificial Sequence
  Synthetic
uugucaacccuccauuuuguuca

SEQ ID NO: 214190 - RNA, 24 nt, Artificial Sequence
  Synthetic
uuugucaacccuccauuuuguuca

SEQ ID NO: 214191 - RNA, 18 nt, Artificial Sequence
  Synthetic
acaucuuacagaauuuca

SEQ ID NO: 214192 - RNA, 19 nt, Artificial Sequence
  Synthetic
aacaucuuacagaauuuca

SEQ ID NO: 214193 - RNA, 20 nt, Artificial Sequence
  Synthetic
aaacaucuuacagaauuuca

SEQ ID NO: 214194 - RNA, 21 nt, Artificial Sequence
  Synthetic
uaaacaucuuacagaauuuca

SEQ ID NO: 214195 - RNA, 22 nt, Artificial Sequence
  Synthetic
auaaacaucuuacagaauuuca

SEQ ID NO: 214196 - RNA, 23 nt, Artificial Sequence
  Synthetic
aauaaacaucuuacagaauuuca

SEQ ID NO: 214197 - RNA, 24 nt, Artificial Sequence
  Synthetic
aaauaaacaucuuacagaauuuca

SEQ ID NO: 214198 - RNA, 18 nt, Artificial Sequence
  Synthetic
uaucuugucagaauuuca

SEQ ID NO: 214199 - RNA, 19 nt, Artificial Sequence
  Synthetic
auaucuugucagaauuuca

SEQ ID NO: 214200 - RNA, 20 nt, Artificial Sequence
  Synthetic
aauaucuugucagaauuuca

SEQ ID NO: 214201 - RNA, 21 nt, Artificial Sequence
  Synthetic
gaauaucuugucagaauuuca

SEQ ID NO: 214202 - RNA, 22 nt, Artificial Sequence
  Synthetic
agaauaucuugucagaauuuca

SEQ ID NO: 214203 - RNA, 23 nt, Artificial Sequence
  Synthetic
aagaauaucuugucagaauuuca

SEQ ID NO: 214204 - RNA, 24 nt, Artificial Sequence
  Synthetic
aaagaauaucuugucagaauuuca

SEQ ID NO: 214205 - RNA, 18 nt, Artificial Sequence
  Synthetic
aaccuuucgugaauuuca

SEQ ID NO: 214206 - RNA, 19 nt, Artificial Sequence
  Synthetic
uaaccuuucgugaauuuca

SEQ ID NO: 214207 - RNA, 20 nt, Artificial Sequence
  Synthetic
uuaaccuuucgugaauuuca

SEQ ID NO: 214208 - RNA, 21 nt, Artificial Sequence
  Synthetic
guuaaccuuucgugaauuuca

SEQ ID NO: 214209 - RNA, 22 nt, Artificial Sequence
  Synthetic
uguuaaccuuucgugaauuuca

SEQ ID NO: 214210 - RNA, 23 nt, Artificial Sequence
  Synthetic
cuguuaaccuuucgugaauuuca

SEQ ID NO: 214211 - RNA, 24 nt, Artificial Sequence
  Synthetic
ccuguuaaccuuucgugaauuuca

SEQ ID NO: 214212 - RNA, 18 nt, Artificial Sequence
  Synthetic
ccacgcaagauaauuuca

SEQ ID NO: 214213 - RNA, 19 nt, Artificial Sequence
  Synthetic
accacgcaagauaauuuca

SEQ ID NO: 214214 - RNA, 20 nt, Artificial Sequence
  Synthetic
gaccacgcaagauaauuuca

SEQ ID NO: 214215 - RNA, 21 nt, Artificial Sequence
  Synthetic
ugaccacgcaagauaauuuca

SEQ ID NO: 214216 - RNA, 22 nt, Artificial Sequence
  Synthetic
augaccacgcaagauaauuuca

SEQ ID NO: 214217 - RNA, 23 nt, Artificial Sequence
  Synthetic
caugaccacgcaagauaauuuca

SEQ ID NO: 214218 - RNA, 24 nt, Artificial Sequence
  Synthetic
acaugaccacgcaagauaauuuca

SEQ ID NO: 214219 - RNA, 18 nt, Artificial Sequence
  Synthetic
gggggcaauauaauuuca

SEQ ID NO: 214220 - RNA, 19 nt, Artificial Sequence
  Synthetic
ugggggcaauauaauuuca

SEQ ID NO: 214221 - RNA, 20 nt, Artificial Sequence
  Synthetic
uugggggcaauauaauuuca

SEQ ID NO: 214222 - RNA, 21 nt, Artificial Sequence
  Synthetic
uuugggggcaauauaauuuca

SEQ ID NO: 214223 - RNA, 22 nt, Artificial Sequence
  Synthetic
guuugggggcaauauaauuuca

SEQ ID NO: 214224 - RNA, 23 nt, Artificial Sequence
  Synthetic
uguuugggggcaauauaauuuca

SEQ ID NO: 214225 - RNA, 24 nt, Artificial Sequence
  Synthetic
guguuugggggcaauauaauuuca

SEQ ID NO: 214226 - RNA, 18 nt, Artificial Sequence
  Synthetic
caaaaccauauaauuuca

SEQ ID NO: 214227 - RNA, 19 nt, Artificial Sequence
  Synthetic
ccaaaaccauauaauuuca

SEQ ID NO: 214228 - RNA, 20 nt, Artificial Sequence
  Synthetic
gccaaaaccauauaauuuca

SEQ ID NO: 214229 - RNA, 21 nt, Artificial Sequence
  Synthetic
agccaaaaccauauaauuuca

SEQ ID NO: 214230 - RNA, 22 nt, Artificial Sequence
  Synthetic
gagccaaaaccauauaauuuca

SEQ ID NO: 214231 - RNA, 23 nt, Artificial Sequence
  Synthetic
agagccaaaaccauauaauuuca

SEQ ID NO: 214232 - RNA, 24 nt, Artificial Sequence
  Synthetic
uagagccaaaaccauauaauuuca

SEQ ID NO: 214233 - RNA, 18 nt, Artificial Sequence
  Synthetic
uugcugcauguaauuuca

SEQ ID NO: 214234 - RNA, 19 nt, Artificial Sequence
  Synthetic
uuugcugcauguaauuuca

SEQ ID NO: 214235 - RNA, 20 nt, Artificial Sequence
  Synthetic
auuugcugcauguaauuuca

SEQ ID NO: 214236 - RNA, 21 nt, Artificial Sequence
  Synthetic
aauuugcugcauguaauuuca

SEQ ID NO: 214237 - RNA, 22 nt, Artificial Sequence
  Synthetic
aaauuugcugcauguaauuuca

SEQ ID NO: 214238 - RNA, 23 nt, Artificial Sequence
  Synthetic
caaauuugcugcauguaauuuca

SEQ ID NO: 214239 - RNA, 24 nt, Artificial Sequence
  Synthetic
acaaauuugcugcauguaauuuca

SEQ ID NO: 214240 - RNA, 18 nt, Artificial Sequence
  Synthetic
gugcuuccuuuaauuuca

SEQ ID NO: 214241 - RNA, 19 nt, Artificial Sequence
  Synthetic
cgugcuuccuuuaauuuca

SEQ ID NO: 214242 - RNA, 20 nt, Artificial Sequence
  Synthetic
acgugcuuccuuuaauuuca

SEQ ID NO: 214243 - RNA, 21 nt, Artificial Sequence
  Synthetic
uacgugcuuccuuuaauuuca

SEQ ID NO: 214244 - RNA, 22 nt, Artificial Sequence
  Synthetic
auacgugcuuccuuuaauuuca

SEQ ID NO: 214245 - RNA, 23 nt, Artificial Sequence
  Synthetic
aauacgugcuuccuuuaauuuca

SEQ ID NO: 214246 - RNA, 24 nt, Artificial Sequence
  Synthetic
uaauacgugcuuccuuuaauuuca

SEQ ID NO: 214247 - RNA, 18 nt, Artificial Sequence
  Synthetic
guauuaaaauacauuuca

SEQ ID NO: 214248 - RNA, 19 nt, Artificial Sequence
  Synthetic
uguauuaaaauacauuuca

SEQ ID NO: 214249 - RNA, 20 nt, Artificial Sequence
  Synthetic
uuguauuaaaauacauuuca

SEQ ID NO: 214250 - RNA, 21 nt, Artificial Sequence
  Synthetic
uuuguauuaaaauacauuuca

SEQ ID NO: 214251 - RNA, 22 nt, Artificial Sequence
  Synthetic
auuuguauuaaaauacauuuca

SEQ ID NO: 214252 - RNA, 23 nt, Artificial Sequence
  Synthetic
uauuuguauuaaaauacauuuca

SEQ ID NO: 214253 - RNA, 24 nt, Artificial Sequence
  Synthetic
guauuuguauuaaaauacauuuca

SEQ ID NO: 214254 - RNA, 18 nt, Artificial Sequence
  Synthetic
aauauuauuaccauuuca

SEQ ID NO: 214255 - RNA, 19 nt, Artificial Sequence
  Synthetic
uaauauuauuaccauuuca

SEQ ID NO: 214256 - RNA, 20 nt, Artificial Sequence
  Synthetic
uuaauauuauuaccauuuca

SEQ ID NO: 214257 - RNA, 21 nt, Artificial Sequence
  Synthetic
auuaauauuauuaccauuuca

SEQ ID NO: 214258 - RNA, 22 nt, Artificial Sequence
  Synthetic
gauuaauauuauuaccauuuca

SEQ ID NO: 214259 - RNA, 23 nt, Artificial Sequence
  Synthetic
agauuaauauuauuaccauuuca

SEQ ID NO: 214260 - RNA, 24 nt, Artificial Sequence
  Synthetic
uagauuaauauuauuaccauuuca

SEQ ID NO: 214261 - RNA, 18 nt, Artificial Sequence
  Synthetic
uaaacucuaagcauuuca

SEQ ID NO: 214262 - RNA, 19 nt, Artificial Sequence
  Synthetic
auaaacucuaagcauuuca

SEQ ID NO: 214263 - RNA, 20 nt, Artificial Sequence
  Synthetic
uauaaacucuaagcauuuca

SEQ ID NO: 214264 - RNA, 21 nt, Artificial Sequence
  Synthetic
auauaaacucuaagcauuuca

SEQ ID NO: 214265 - RNA, 22 nt, Artificial Sequence
  Synthetic
uauauaaacucuaagcauuuca

SEQ ID NO: 214266 - RNA, 23 nt, Artificial Sequence
  Synthetic
auauauaaacucuaagcauuuca

SEQ ID NO: 214267 - RNA, 24 nt, Artificial Sequence
  Synthetic
aauauauaaacucuaagcauuuca

SEQ ID NO: 214268 - RNA, 18 nt, Artificial Sequence
  Synthetic
gccuuaucucucauuuca

SEQ ID NO: 214269 - RNA, 19 nt, Artificial Sequence
  Synthetic
agccuuaucucucauuuca

SEQ ID NO: 214270 - RNA, 20 nt, Artificial Sequence
  Synthetic
aagccuuaucucucauuuca

SEQ ID NO: 214271 - RNA, 21 nt, Artificial Sequence
  Synthetic
aaagccuuaucucucauuuca

SEQ ID NO: 214272 - RNA, 22 nt, Artificial Sequence
  Synthetic
gaaagccuuaucucucauuuca

SEQ ID NO: 214273 - RNA, 23 nt, Artificial Sequence
  Synthetic
agaaagccuuaucucucauuuca

SEQ ID NO: 214274 - RNA, 24 nt, Artificial Sequence
  Synthetic
cagaaagccuuaucucucauuuca

SEQ ID NO: 214275 - RNA, 18 nt, Artificial Sequence
  Synthetic
aggugagguuggauuuca

SEQ ID NO: 214276 - RNA, 19 nt, Artificial Sequence
  Synthetic
aaggugagguuggauuuca

SEQ ID NO: 214277 - RNA, 20 nt, Artificial Sequence
  Synthetic
aaaggugagguuggauuuca

SEQ ID NO: 214278 - RNA, 21 nt, Artificial Sequence
  Synthetic
gaaaggugagguuggauuuca

SEQ ID NO: 214279 - RNA, 22 nt, Artificial Sequence
  Synthetic
agaaaggugagguuggauuuca

SEQ ID NO: 214280 - RNA, 23 nt, Artificial Sequence
  Synthetic
gagaaaggugagguuggauuuca

SEQ ID NO: 214281 - RNA, 24 nt, Artificial Sequence
  Synthetic
ggagaaaggugagguuggauuuca

SEQ ID NO: 214282 - RNA, 18 nt, Artificial Sequence
  Synthetic
auucuggacaugauuuca

SEQ ID NO: 214283 - RNA, 19 nt, Artificial Sequence
  Synthetic
gauucuggacaugauuuca

SEQ ID NO: 214284 - RNA, 20 nt, Artificial Sequence
  Synthetic
agauucuggacaugauuuca

SEQ ID NO: 214285 - RNA, 21 nt, Artificial Sequence
  Synthetic
uagauucuggacaugauuuca

SEQ ID NO: 214286 - RNA, 22 nt, Artificial Sequence
  Synthetic
auagauucuggacaugauuuca

SEQ ID NO: 214287 - RNA, 23 nt, Artificial Sequence
  Synthetic
cauagauucuggacaugauuuca

SEQ ID NO: 214288 - RNA, 24 nt, Artificial Sequence
  Synthetic
gcauagauucuggacaugauuuca

SEQ ID NO: 214289 - RNA, 18 nt, Artificial Sequence
  Synthetic
auucuuagugugauuuca

SEQ ID NO: 214290 - RNA, 19 nt, Artificial Sequence
  Synthetic
aauucuuagugugauuuca

SEQ ID NO: 214291 - RNA, 20 nt, Artificial Sequence
  Synthetic
gaauucuuagugugauuuca

SEQ ID NO: 214292 - RNA, 21 nt, Artificial Sequence
  Synthetic
agaauucuuagugugauuuca

SEQ ID NO: 214293 - RNA, 22 nt, Artificial Sequence
  Synthetic
gagaauucuuagugugauuuca

SEQ ID NO: 214294 - RNA, 23 nt, Artificial Sequence
  Synthetic
agagaauucuuagugugauuuca

SEQ ID NO: 214295 - RNA, 24 nt, Artificial Sequence
  Synthetic
cagagaauucuuagugugauuuca

SEQ ID NO: 214296 - RNA, 18 nt, Artificial Sequence
  Synthetic
ggcuauugcaauauuuca

SEQ ID NO: 214297 - RNA, 19 nt, Artificial Sequence
  Synthetic
aggcuauugcaauauuuca

SEQ ID NO: 214298 - RNA, 20 nt, Artificial Sequence
  Synthetic
uaggcuauugcaauauuuca

SEQ ID NO: 214299 - RNA, 21 nt, Artificial Sequence
  Synthetic
guaggcuauugcaauauuuca

SEQ ID NO: 214300 - RNA, 22 nt, Artificial Sequence
  Synthetic
aguaggcuauugcaauauuuca

SEQ ID NO: 214301 - RNA, 23 nt, Artificial Sequence
  Synthetic
uaguaggcuauugcaauauuuca

SEQ ID NO: 214302 - RNA, 24 nt, Artificial Sequence
  Synthetic
uuaguaggcuauugcaauauuuca

SEQ ID NO: 214303 - RNA, 18 nt, Artificial Sequence
  Synthetic
auuguugcuaauauuuca

SEQ ID NO: 214304 - RNA, 19 nt, Artificial Sequence
  Synthetic
uauuguugcuaauauuuca

SEQ ID NO: 214305 - RNA, 20 nt, Artificial Sequence
  Synthetic
uuauuguugcuaauauuuca

SEQ ID NO: 214306 - RNA, 21 nt, Artificial Sequence
  Synthetic
uuuauuguugcuaauauuuca

SEQ ID NO: 214307 - RNA, 22 nt, Artificial Sequence
  Synthetic
uuuuauuguugcuaauauuuca

SEQ ID NO: 214308 - RNA, 23 nt, Artificial Sequence
  Synthetic
auuuuauuguugcuaauauuuca

SEQ ID NO: 214309 - RNA, 24 nt, Artificial Sequence
  Synthetic
aauuuuauuguugcuaauauuuca

SEQ ID NO: 214310 - RNA, 18 nt, Artificial Sequence
  Synthetic
uuaagguuacauauuuca

SEQ ID NO: 214311 - RNA, 19 nt, Artificial Sequence
  Synthetic
guuaagguuacauauuuca

SEQ ID NO: 214312 - RNA, 20 nt, Artificial Sequence
  Synthetic
gguuaagguuacauauuuca

SEQ ID NO: 214313 - RNA, 21 nt, Artificial Sequence
  Synthetic
ugguuaagguuacauauuuca

SEQ ID NO: 214314 - RNA, 22 nt, Artificial Sequence
  Synthetic
cugguuaagguuacauauuuca

SEQ ID NO: 214315 - RNA, 23 nt, Artificial Sequence
  Synthetic
ucugguuaagguuacauauuuca

SEQ ID NO: 214316 - RNA, 24 nt, Artificial Sequence
  Synthetic
aucugguuaagguuacauauuuca

SEQ ID NO: 214317 - RNA, 18 nt, Artificial Sequence
  Synthetic
auuguugugcauauuuca

SEQ ID NO: 214318 - RNA, 19 nt, Artificial Sequence
  Synthetic
aauuguugugcauauuuca

SEQ ID NO: 214319 - RNA, 20 nt, Artificial Sequence
  Synthetic
aaauuguugugcauauuuca

SEQ ID NO: 214320 - RNA, 21 nt, Artificial Sequence
  Synthetic
gaaauuguugugcauauuuca

SEQ ID NO: 214321 - RNA, 22 nt, Artificial Sequence
  Synthetic
ugaaauuguugugcauauuuca

SEQ ID NO: 214322 - RNA, 23 nt, Artificial Sequence
  Synthetic
augaaauuguugugcauauuuca

SEQ ID NO: 214323 - RNA, 24 nt, Artificial Sequence
  Synthetic
uaugaaauuguugugcauauuuca

SEQ ID NO: 214324 - RNA, 18 nt, Artificial Sequence
  Synthetic
uguuauugucauauuuca

SEQ ID NO: 214325 - RNA, 19 nt, Artificial Sequence
  Synthetic
uuguuauugucauauuuca

SEQ ID NO: 214326 - RNA, 20 nt, Artificial Sequence
  Synthetic
uuuguuauugucauauuuca

SEQ ID NO: 214327 - RNA, 21 nt, Artificial Sequence
  Synthetic
auuuguuauugucauauuuca

SEQ ID NO: 214328 - RNA, 22 nt, Artificial Sequence
  Synthetic
aauuuguuauugucauauuuca

SEQ ID NO: 214329 - RNA, 23 nt, Artificial Sequence
  Synthetic
caauuuguuauugucauauuuca

SEQ ID NO: 214330 - RNA, 24 nt, Artificial Sequence
  Synthetic
ccaauuuguuauugucauauuuca

SEQ ID NO: 214331 - RNA, 18 nt, Artificial Sequence
  Synthetic
aguaguaucccuauuuca

SEQ ID NO: 214332 - RNA, 19 nt, Artificial Sequence
  Synthetic
uaguaguaucccuauuuca

SEQ ID NO: 214333 - RNA, 20 nt, Artificial Sequence
  Synthetic
guaguaguaucccuauuuca

SEQ ID NO: 214334 - RNA, 21 nt, Artificial Sequence
  Synthetic
aguaguaguaucccuauuuca

SEQ ID NO: 214335 - RNA, 22 nt, Artificial Sequence
  Synthetic
caguaguaguaucccuauuuca

SEQ ID NO: 214336 - RNA, 23 nt, Artificial Sequence
  Synthetic
acaguaguaguaucccuauuuca

SEQ ID NO: 214337 - RNA, 24 nt, Artificial Sequence
  Synthetic
gacaguaguaguaucccuauuuca

SEQ ID NO: 214338 - RNA, 18 nt, Artificial Sequence
  Synthetic
gauauguuggcuauuuca

SEQ ID NO: 214339 - RNA, 19 nt, Artificial Sequence
  Synthetic
ggauauguuggcuauuuca

SEQ ID NO: 214340 - RNA, 20 nt, Artificial Sequence
  Synthetic
uggauauguuggcuauuuca

SEQ ID NO: 214341 - RNA, 21 nt, Artificial Sequence
  Synthetic
uuggauauguuggcuauuuca

SEQ ID NO: 214342 - RNA, 22 nt, Artificial Sequence
  Synthetic
uuuggauauguuggcuauuuca

SEQ ID NO: 214343 - RNA, 23 nt, Artificial Sequence
  Synthetic
guuuggauauguuggcuauuuca

SEQ ID NO: 214344 - RNA, 24 nt, Artificial Sequence
  Synthetic
aguuuggauauguuggcuauuuca

SEQ ID NO: 214345 - RNA, 18 nt, Artificial Sequence
  Synthetic
ugguucacuaguauuuca

SEQ ID NO: 214346 - RNA, 19 nt, Artificial Sequence
  Synthetic
augguucacuaguauuuca

SEQ ID NO: 214347 - RNA, 20 nt, Artificial Sequence
  Synthetic
uaugguucacuaguauuuca

SEQ ID NO: 214348 - RNA, 21 nt, Artificial Sequence
  Synthetic
auaugguucacuaguauuuca

SEQ ID NO: 214349 - RNA, 22 nt, Artificial Sequence
  Synthetic
aauaugguucacuaguauuuca

SEQ ID NO: 214350 - RNA, 23 nt, Artificial Sequence
  Synthetic
aaauaugguucacuaguauuuca

SEQ ID NO: 214351 - RNA, 24 nt, Artificial Sequence
  Synthetic
uaaauaugguucacuaguauuuca

SEQ ID NO: 214352 - RNA, 18 nt, Artificial Sequence
  Synthetic
ggacagauccuuauuuca

SEQ ID NO: 214353 - RNA, 19 nt, Artificial Sequence
  Synthetic
uggacagauccuuauuuca

SEQ ID NO: 214354 - RNA, 20 nt, Artificial Sequence
  Synthetic
uuggacagauccuuauuuca

SEQ ID NO: 214355 - RNA, 21 nt, Artificial Sequence
  Synthetic
auuggacagauccuuauuuca

SEQ ID NO: 214356 - RNA, 22 nt, Artificial Sequence
  Synthetic
aauuggacagauccuuauuuca

SEQ ID NO: 214357 - RNA, 23 nt, Artificial Sequence
  Synthetic
aaauuggacagauccuuauuuca

SEQ ID NO: 214358 - RNA, 24 nt, Artificial Sequence
  Synthetic
uaaauuggacagauccuuauuuca

SEQ ID NO: 214359 - RNA, 18 nt, Artificial Sequence
  Synthetic
ccuaggcaaguuauuuca

SEQ ID NO: 214360 - RNA, 19 nt, Artificial Sequence
  Synthetic
gccuaggcaaguuauuuca

SEQ ID NO: 214361 - RNA, 20 nt, Artificial Sequence
  Synthetic
ggccuaggcaaguuauuuca

SEQ ID NO: 214362 - RNA, 21 nt, Artificial Sequence
  Synthetic
aggccuaggcaaguuauuuca

SEQ ID NO: 214363 - RNA, 22 nt, Artificial Sequence
  Synthetic
aaggccuaggcaaguuauuuca

SEQ ID NO: 214364 - RNA, 23 nt, Artificial Sequence
  Synthetic
uaaggccuaggcaaguuauuuca

SEQ ID NO: 214365 - RNA, 24 nt, Artificial Sequence
  Synthetic
cuaaggccuaggcaaguuauuuca

SEQ ID NO: 214366 - RNA, 18 nt, Artificial Sequence
  Synthetic
ucaugucauguuauuuca

SEQ ID NO: 214367 - RNA, 19 nt, Artificial Sequence
  Synthetic
gucaugucauguuauuuca

SEQ ID NO: 214368 - RNA, 20 nt, Artificial Sequence
  Synthetic
agucaugucauguuauuuca

SEQ ID NO: 214369 - RNA, 21 nt, Artificial Sequence
  Synthetic
aagucaugucauguuauuuca

SEQ ID NO: 214370 - RNA, 22 nt, Artificial Sequence
  Synthetic
aaagucaugucauguuauuuca

SEQ ID NO: 214371 - RNA, 23 nt, Artificial Sequence
  Synthetic
gaaagucaugucauguuauuuca

SEQ ID NO: 214372 - RNA, 24 nt, Artificial Sequence
  Synthetic
agaaagucaugucauguuauuuca

SEQ ID NO: 214373 - RNA, 18 nt, Artificial Sequence
  Synthetic
agaguuguccaacuuuca

SEQ ID NO: 214374 - RNA, 19 nt, Artificial Sequence
  Synthetic
cagaguuguccaacuuuca

SEQ ID NO: 214375 - RNA, 20 nt, Artificial Sequence
  Synthetic
ucagaguuguccaacuuuca

SEQ ID NO: 214376 - RNA, 21 nt, Artificial Sequence
  Synthetic
uucagaguuguccaacuuuca

SEQ ID NO: 214377 - RNA, 22 nt, Artificial Sequence
  Synthetic
guucagaguuguccaacuuuca

SEQ ID NO: 214378 - RNA, 23 nt, Artificial Sequence
  Synthetic
uguucagaguuguccaacuuuca

SEQ ID NO: 214379 - RNA, 24 nt, Artificial Sequence
  Synthetic
guguucagaguuguccaacuuuca

SEQ ID NO: 214380 - RNA, 18 nt, Artificial Sequence
  Synthetic
cguccuaagucacuuuca

SEQ ID NO: 214381 - RNA, 19 nt, Artificial Sequence
  Synthetic
ccguccuaagucacuuuca

SEQ ID NO: 214382 - RNA, 20 nt, Artificial Sequence
  Synthetic
cccguccuaagucacuuuca

SEQ ID NO: 214383 - RNA, 21 nt, Artificial Sequence
  Synthetic
ccccguccuaagucacuuuca

SEQ ID NO: 214384 - RNA, 22 nt, Artificial Sequence
  Synthetic
gccccguccuaagucacuuuca

SEQ ID NO: 214385 - RNA, 23 nt, Artificial Sequence
  Synthetic
ugccccguccuaagucacuuuca

SEQ ID NO: 214386 - RNA, 24 nt, Artificial Sequence
  Synthetic
augccccguccuaagucacuuuca

SEQ ID NO: 214387 - RNA, 18 nt, Artificial Sequence
  Synthetic
uucuacuugacccuuuca

SEQ ID NO: 214388 - RNA, 19 nt, Artificial Sequence
  Synthetic
auucuacuugacccuuuca

SEQ ID NO: 214389 - RNA, 20 nt, Artificial Sequence
  Synthetic
cauucuacuugacccuuuca

SEQ ID NO: 214390 - RNA, 21 nt, Artificial Sequence
  Synthetic
gcauucuacuugacccuuuca

SEQ ID NO: 214391 - RNA, 22 nt, Artificial Sequence
  Synthetic
ggcauucuacuugacccuuuca

SEQ ID NO: 214392 - RNA, 23 nt, Artificial Sequence
  Synthetic
aggcauucuacuugacccuuuca

SEQ ID NO: 214393 - RNA, 24 nt, Artificial Sequence
  Synthetic
uaggcauucuacuugacccuuuca

SEQ ID NO: 214394 - RNA, 18 nt, Artificial Sequence
  Synthetic
uucuguguuugccuuuca

SEQ ID NO: 214395 - RNA, 19 nt, Artificial Sequence
  Synthetic
guucuguguuugccuuuca

SEQ ID NO: 214396 - RNA, 20 nt, Artificial Sequence
  Synthetic
aguucuguguuugccuuuca

SEQ ID NO: 214397 - RNA, 21 nt, Artificial Sequence
  Synthetic
aaguucuguguuugccuuuca

SEQ ID NO: 214398 - RNA, 22 nt, Artificial Sequence
  Synthetic
caaguucuguguuugccuuuca

SEQ ID NO: 214399 - RNA, 23 nt, Artificial Sequence
  Synthetic
gcaaguucuguguuugccuuuca

SEQ ID NO: 214400 - RNA, 24 nt, Artificial Sequence
  Synthetic
agcaaguucuguguuugccuuuca

SEQ ID NO: 214401 - RNA, 18 nt, Artificial Sequence
  Synthetic
acaaacgcuguccuuuca

SEQ ID NO: 214402 - RNA, 19 nt, Artificial Sequence
  Synthetic
gacaaacgcuguccuuuca

SEQ ID NO: 214403 - RNA, 20 nt, Artificial Sequence
  Synthetic
agacaaacgcuguccuuuca

SEQ ID NO: 214404 - RNA, 21 nt, Artificial Sequence
  Synthetic
cagacaaacgcuguccuuuca

SEQ ID NO: 214405 - RNA, 22 nt, Artificial Sequence
  Synthetic
acagacaaacgcuguccuuuca

SEQ ID NO: 214406 - RNA, 23 nt, Artificial Sequence
  Synthetic
aacagacaaacgcuguccuuuca

SEQ ID NO: 214407 - RNA, 24 nt, Artificial Sequence
  Synthetic
aaacagacaaacgcuguccuuuca

SEQ ID NO: 214408 - RNA, 18 nt, Artificial Sequence
  Synthetic
uaaaccaggaagcuuuca

SEQ ID NO: 214409 - RNA, 19 nt, Artificial Sequence
  Synthetic
cuaaaccaggaagcuuuca

SEQ ID NO: 214410 - RNA, 20 nt, Artificial Sequence
  Synthetic
ucuaaaccaggaagcuuuca

SEQ ID NO: 214411 - RNA, 21 nt, Artificial Sequence
  Synthetic
uucuaaaccaggaagcuuuca

SEQ ID NO: 214412 - RNA, 22 nt, Artificial Sequence
  Synthetic
auucuaaaccaggaagcuuuca

SEQ ID NO: 214413 - RNA, 23 nt, Artificial Sequence
  Synthetic
gauucuaaaccaggaagcuuuca

SEQ ID NO: 214414 - RNA, 24 nt, Artificial Sequence
  Synthetic
ugauucuaaaccaggaagcuuuca

SEQ ID NO: 214415 - RNA, 18 nt, Artificial Sequence
  Synthetic
aagaaaaauaagcuuuca

SEQ ID NO: 214416 - RNA, 19 nt, Artificial Sequence
  Synthetic
aaagaaaaauaagcuuuca

SEQ ID NO: 214417 - RNA, 20 nt, Artificial Sequence
  Synthetic
uaaagaaaaauaagcuuuca

SEQ ID NO: 214418 - RNA, 21 nt, Artificial Sequence
  Synthetic
auaaagaaaaauaagcuuuca

SEQ ID NO: 214419 - RNA, 22 nt, Artificial Sequence
  Synthetic
aauaaagaaaaauaagcuuuca

SEQ ID NO: 214420 - RNA, 23 nt, Artificial Sequence
  Synthetic
aaauaaagaaaaauaagcuuuca

SEQ ID NO: 214421 - RNA, 24 nt, Artificial Sequence
  Synthetic
uaaauaaagaaaaauaagcuuuca

SEQ ID NO: 214422 - RNA, 18 nt, Artificial Sequence
  Synthetic
acaugagcagagcuuuca

SEQ ID NO: 214423 - RNA, 19 nt, Artificial Sequence
  Synthetic
cacaugagcagagcuuuca

SEQ ID NO: 214424 - RNA, 20 nt, Artificial Sequence
  Synthetic
acacaugagcagagcuuuca

SEQ ID NO: 214425 - RNA, 21 nt, Artificial Sequence
  Synthetic
aacacaugagcagagcuuuca

SEQ ID NO: 214426 - RNA, 22 nt, Artificial Sequence
  Synthetic
aaacacaugagcagagcuuuca

SEQ ID NO: 214427 - RNA, 23 nt, Artificial Sequence
  Synthetic
uaaacacaugagcagagcuuuca

SEQ ID NO: 214428 - RNA, 24 nt, Artificial Sequence
  Synthetic
uuaaacacaugagcagagcuuuca

SEQ ID NO: 214429 - RNA, 18 nt, Artificial Sequence
  Synthetic
ccucuuccuuggcuuuca

SEQ ID NO: 214430 - RNA, 19 nt, Artificial Sequence
  Synthetic
uccucuuccuuggcuuuca

SEQ ID NO: 214431 - RNA, 20 nt, Artificial Sequence
  Synthetic
guccucuuccuuggcuuuca

SEQ ID NO: 214432 - RNA, 21 nt, Artificial Sequence
  Synthetic
uguccucuuccuuggcuuuca

SEQ ID NO: 214433 - RNA, 22 nt, Artificial Sequence
  Synthetic
uuguccucuuccuuggcuuuca

SEQ ID NO: 214434 - RNA, 23 nt, Artificial Sequence
  Synthetic
guuguccucuuccuuggcuuuca

SEQ ID NO: 214435 - RNA, 24 nt, Artificial Sequence
  Synthetic
aguuguccucuuccuuggcuuuca

SEQ ID NO: 214436 - RNA, 18 nt, Artificial Sequence
  Synthetic
acuugguuugcucuuuca

SEQ ID NO: 214437 - RNA, 19 nt, Artificial Sequence
  Synthetic
gacuugguuugcucuuuca

SEQ ID NO: 214438 - RNA, 20 nt, Artificial Sequence
  Synthetic
agacuugguuugcucuuuca

SEQ ID NO: 214439 - RNA, 21 nt, Artificial Sequence
  Synthetic
uagacuugguuugcucuuuca

SEQ ID NO: 214440 - RNA, 22 nt, Artificial Sequence
  Synthetic
uuagacuugguuugcucuuuca

SEQ ID NO: 214441 - RNA, 23 nt, Artificial Sequence
  Synthetic
auuagacuugguuugcucuuuca

SEQ ID NO: 214442 - RNA, 24 nt, Artificial Sequence
  Synthetic
aauuagacuugguuugcucuuuca

SEQ ID NO: 214443 - RNA, 18 nt, Artificial Sequence
  Synthetic
gaguuaguuauucuuuca

SEQ ID NO: 214444 - RNA, 19 nt, Artificial Sequence
  Synthetic
agaguuaguuauucuuuca

SEQ ID NO: 214445 - RNA, 20 nt, Artificial Sequence
  Synthetic
aagaguuaguuauucuuuca

SEQ ID NO: 214446 - RNA, 21 nt, Artificial Sequence
  Synthetic
uaagaguuaguuauucuuuca

SEQ ID NO: 214447 - RNA, 22 nt, Artificial Sequence
  Synthetic
uuaagaguuaguuauucuuuca

SEQ ID NO: 214448 - RNA, 23 nt, Artificial Sequence
  Synthetic
uuuaagaguuaguuauucuuuca

SEQ ID NO: 214449 - RNA, 24 nt, Artificial Sequence
  Synthetic
guuuaagaguuaguuauucuuuca

SEQ ID NO: 214450 - RNA, 18 nt, Artificial Sequence
  Synthetic
ucauuuggucuucuuuca

SEQ ID NO: 214451 - RNA, 19 nt, Artificial Sequence
  Synthetic
gucauuuggucuucuuuca

SEQ ID NO: 214452 - RNA, 20 nt, Artificial Sequence
  Synthetic
ugucauuuggucuucuuuca

SEQ ID NO: 214453 - RNA, 21 nt, Artificial Sequence
  Synthetic
uugucauuuggucuucuuuca

SEQ ID NO: 214454 - RNA, 22 nt, Artificial Sequence
  Synthetic
guugucauuuggucuucuuuca

SEQ ID NO: 214455 - RNA, 23 nt, Artificial Sequence
  Synthetic
gguugucauuuggucuucuuuca

SEQ ID NO: 214456 - RNA, 24 nt, Artificial Sequence
  Synthetic
ugguugucauuuggucuucuuuca

SEQ ID NO: 214457 - RNA, 18 nt, Artificial Sequence
  Synthetic
agcucuuuucuucuuuca

SEQ ID NO: 214458 - RNA, 19 nt, Artificial Sequence
  Synthetic
aagcucuuuucuucuuuca

SEQ ID NO: 214459 - RNA, 20 nt, Artificial Sequence
  Synthetic
aaagcucuuuucuucuuuca

SEQ ID NO: 214460 - RNA, 21 nt, Artificial Sequence
  Synthetic
caaagcucuuuucuucuuuca

SEQ ID NO: 214461 - RNA, 22 nt, Artificial Sequence
  Synthetic
acaaagcucuuuucuucuuuca

SEQ ID NO: 214462 - RNA, 23 nt, Artificial Sequence
  Synthetic
aacaaagcucuuuucuucuuuca

SEQ ID NO: 214463 - RNA, 24 nt, Artificial Sequence
  Synthetic
aaacaaagcucuuuucuucuuuca

SEQ ID NO: 214464 - RNA, 18 nt, Artificial Sequence
  Synthetic
auguagcccucaguuuca

SEQ ID NO: 214465 - RNA, 19 nt, Artificial Sequence
  Synthetic
aauguagcccucaguuuca

SEQ ID NO: 214466 - RNA, 20 nt, Artificial Sequence
  Synthetic
aaauguagcccucaguuuca

SEQ ID NO: 214467 - RNA, 21 nt, Artificial Sequence
  Synthetic
aaaauguagcccucaguuuca

SEQ ID NO: 214468 - RNA, 22 nt, Artificial Sequence
  Synthetic
uaaaauguagcccucaguuuca

SEQ ID NO: 214469 - RNA, 23 nt, Artificial Sequence
  Synthetic
uuaaaauguagcccucaguuuca

SEQ ID NO: 214470 - RNA, 24 nt, Artificial Sequence
  Synthetic
uuuaaaauguagcccucaguuuca

SEQ ID NO: 214471 - RNA, 18 nt, Artificial Sequence
  Synthetic
augggcaugucaguuuca

SEQ ID NO: 214472 - RNA, 19 nt, Artificial Sequence
  Synthetic
uaugggcaugucaguuuca

SEQ ID NO: 214473 - RNA, 20 nt, Artificial Sequence
  Synthetic
auaugggcaugucaguuuca

SEQ ID NO: 214474 - RNA, 21 nt, Artificial Sequence
  Synthetic
gauaugggcaugucaguuuca

SEQ ID NO: 214475 - RNA, 22 nt, Artificial Sequence
  Synthetic
ggauaugggcaugucaguuuca

SEQ ID NO: 214476 - RNA, 23 nt, Artificial Sequence
  Synthetic
uggauaugggcaugucaguuuca

SEQ ID NO: 214477 - RNA, 24 nt, Artificial Sequence
  Synthetic
uuggauaugggcaugucaguuuca

SEQ ID NO: 214478 - RNA, 18 nt, Artificial Sequence
  Synthetic
ucaaaagagaagguuuca

SEQ ID NO: 214479 - RNA, 19 nt, Artificial Sequence
  Synthetic
aucaaaagagaagguuuca

SEQ ID NO: 214480 - RNA, 20 nt, Artificial Sequence
  Synthetic
aaucaaaagagaagguuuca

SEQ ID NO: 214481 - RNA, 21 nt, Artificial Sequence
  Synthetic
uaaucaaaagagaagguuuca

SEQ ID NO: 214482 - RNA, 22 nt, Artificial Sequence
  Synthetic
uuaaucaaaagagaagguuuca

SEQ ID NO: 214483 - RNA, 23 nt, Artificial Sequence
  Synthetic
auuaaucaaaagagaagguuuca

SEQ ID NO: 214484 - RNA, 24 nt, Artificial Sequence
  Synthetic
uauuaaucaaaagagaagguuuca

SEQ ID NO: 214485 - RNA, 18 nt, Artificial Sequence
  Synthetic
uaauugguauggguuuca

SEQ ID NO: 214486 - RNA, 19 nt, Artificial Sequence
  Synthetic
uuaauugguauggguuuca

SEQ ID NO: 214487 - RNA, 20 nt, Artificial Sequence
  Synthetic
guuaauugguauggguuuca

SEQ ID NO: 214488 - RNA, 21 nt, Artificial Sequence
  Synthetic
uguuaauugguauggguuuca

SEQ ID NO: 214489 - RNA, 22 nt, Artificial Sequence
  Synthetic
cuguuaauugguauggguuuca

SEQ ID NO: 214490 - RNA, 23 nt, Artificial Sequence
  Synthetic
acuguuaauugguauggguuuca

SEQ ID NO: 214491 - RNA, 24 nt, Artificial Sequence
  Synthetic
gacuguuaauugguauggguuuca

SEQ ID NO: 214492 - RNA, 18 nt, Artificial Sequence
  Synthetic
aauaaaguaaugguuuca

SEQ ID NO: 214493 - RNA, 19 nt, Artificial Sequence
  Synthetic
aaauaaaguaaugguuuca

SEQ ID NO: 214494 - RNA, 20 nt, Artificial Sequence
  Synthetic
uaaauaaaguaaugguuuca

SEQ ID NO: 214495 - RNA, 21 nt, Artificial Sequence
  Synthetic
auaaauaaaguaaugguuuca

SEQ ID NO: 214496 - RNA, 22 nt, Artificial Sequence
  Synthetic
aauaaauaaaguaaugguuuca

SEQ ID NO: 214497 - RNA, 23 nt, Artificial Sequence
  Synthetic
gaauaaauaaaguaaugguuuca

SEQ ID NO: 214498 - RNA, 24 nt, Artificial Sequence
  Synthetic
ggaauaaauaaaguaaugguuuca

SEQ ID NO: 214499 - RNA, 18 nt, Artificial Sequence
  Synthetic
uuguucucguugguuuca

SEQ ID NO: 214500 - RNA, 19 nt, Artificial Sequence
  Synthetic
uuuguucucguugguuuca

SEQ ID NO: 214501 - RNA, 20 nt, Artificial Sequence
  Synthetic
cuuuguucucguugguuuca

SEQ ID NO: 214502 - RNA, 21 nt, Artificial Sequence
  Synthetic
ucuuuguucucguugguuuca

SEQ ID NO: 214503 - RNA, 22 nt, Artificial Sequence
  Synthetic
gucuuuguucucguugguuuca

SEQ ID NO: 214504 - RNA, 23 nt, Artificial Sequence
  Synthetic
ugucuuuguucucguugguuuca

SEQ ID NO: 214505 - RNA, 24 nt, Artificial Sequence
  Synthetic
gugucuuuguucucguugguuuca

SEQ ID NO: 214506 - RNA, 18 nt, Artificial Sequence
  Synthetic
uuacaauuugauguuuca

SEQ ID NO: 214507 - RNA, 19 nt, Artificial Sequence
  Synthetic
guuacaauuugauguuuca

SEQ ID NO: 214508 - RNA, 20 nt, Artificial Sequence
  Synthetic
uguuacaauuugauguuuca

SEQ ID NO: 214509 - RNA, 21 nt, Artificial Sequence
  Synthetic
uuguuacaauuugauguuuca

SEQ ID NO: 214510 - RNA, 22 nt, Artificial Sequence
  Synthetic
guuguuacaauuugauguuuca

SEQ ID NO: 214511 - RNA, 23 nt, Artificial Sequence
  Synthetic
aguuguuacaauuugauguuuca

SEQ ID NO: 214512 - RNA, 24 nt, Artificial Sequence
  Synthetic
uaguuguuacaauuugauguuuca

SEQ ID NO: 214513 - RNA, 18 nt, Artificial Sequence
  Synthetic
auauaauuuacuguuuca

SEQ ID NO: 214514 - RNA, 19 nt, Artificial Sequence
  Synthetic
uauauaauuuacuguuuca

SEQ ID NO: 214515 - RNA, 20 nt, Artificial Sequence
  Synthetic
uuauauaauuuacuguuuca

SEQ ID NO: 214516 - RNA, 21 nt, Artificial Sequence
  Synthetic
uuuauauaauuuacuguuuca

SEQ ID NO: 214517 - RNA, 22 nt, Artificial Sequence
  Synthetic
guuuauauaauuuacuguuuca

SEQ ID NO: 214518 - RNA, 23 nt, Artificial Sequence
  Synthetic
gguuuauauaauuuacuguuuca

SEQ ID NO: 214519 - RNA, 24 nt, Artificial Sequence
  Synthetic
ugguuuauauaauuuacuguuuca

SEQ ID NO: 214520 - RNA, 18 nt, Artificial Sequence
  Synthetic
aaacucguaccuguuuca

SEQ ID NO: 214521 - RNA, 19 nt, Artificial Sequence
  Synthetic
aaaacucguaccuguuuca

SEQ ID NO: 214522 - RNA, 20 nt, Artificial Sequence
  Synthetic
gaaaacucguaccuguuuca

SEQ ID NO: 214523 - RNA, 21 nt, Artificial Sequence
  Synthetic
agaaaacucguaccuguuuca

SEQ ID NO: 214524 - RNA, 22 nt, Artificial Sequence
  Synthetic
aagaaaacucguaccuguuuca

SEQ ID NO: 214525 - RNA, 23 nt, Artificial Sequence
  Synthetic
caagaaaacucguaccuguuuca

SEQ ID NO: 214526 - RNA, 24 nt, Artificial Sequence
  Synthetic
acaagaaaacucguaccuguuuca

SEQ ID NO: 214527 - RNA, 18 nt, Artificial Sequence
  Synthetic
cuuuacuucuguguuuca

SEQ ID NO: 214528 - RNA, 19 nt, Artificial Sequence
  Synthetic
acuuuacuucuguguuuca

SEQ ID NO: 214529 - RNA, 20 nt, Artificial Sequence
  Synthetic
uacuuuacuucuguguuuca

SEQ ID NO: 214530 - RNA, 21 nt, Artificial Sequence
  Synthetic
uuacuuuacuucuguguuuca

SEQ ID NO: 214531 - RNA, 22 nt, Artificial Sequence
  Synthetic
cuuacuuuacuucuguguuuca

SEQ ID NO: 214532 - RNA, 23 nt, Artificial Sequence
  Synthetic
ucuuacuuuacuucuguguuuca

SEQ ID NO: 214533 - RNA, 24 nt, Artificial Sequence
  Synthetic
aucuuacuuuacuucuguguuuca

SEQ ID NO: 214534 - RNA, 18 nt, Artificial Sequence
  Synthetic
uugaauaauguuguuuca

SEQ ID NO: 214535 - RNA, 19 nt, Artificial Sequence
  Synthetic
cuugaauaauguuguuuca

SEQ ID NO: 214536 - RNA, 20 nt, Artificial Sequence
  Synthetic
ccuugaauaauguuguuuca

SEQ ID NO: 214537 - RNA, 21 nt, Artificial Sequence
  Synthetic
uccuugaauaauguuguuuca

SEQ ID NO: 214538 - RNA, 22 nt, Artificial Sequence
  Synthetic
guccuugaauaauguuguuuca

SEQ ID NO: 214539 - RNA, 23 nt, Artificial Sequence
  Synthetic
gguccuugaauaauguuguuuca

SEQ ID NO: 214540 - RNA, 24 nt, Artificial Sequence
  Synthetic
agguccuugaauaauguuguuuca

SEQ ID NO: 214541 - RNA, 18 nt, Artificial Sequence
  Synthetic
uggauggucuuuguuuca

SEQ ID NO: 214542 - RNA, 19 nt, Artificial Sequence
  Synthetic
auggauggucuuuguuuca

SEQ ID NO: 214543 - RNA, 20 nt, Artificial Sequence
  Synthetic
aauggauggucuuuguuuca

SEQ ID NO: 214544 - RNA, 21 nt, Artificial Sequence
  Synthetic
aaauggauggucuuuguuuca

SEQ ID NO: 214545 - RNA, 22 nt, Artificial Sequence
  Synthetic
aaaauggauggucuuuguuuca

SEQ ID NO: 214546 - RNA, 23 nt, Artificial Sequence
  Synthetic
gaaaauggauggucuuuguuuca

SEQ ID NO: 214547 - RNA, 24 nt, Artificial Sequence
  Synthetic
agaaaauggauggucuuuguuuca

SEQ ID NO: 214548 - RNA, 18 nt, Artificial Sequence
  Synthetic
cccauuuaaaaauuuuca

SEQ ID NO: 214549 - RNA, 19 nt, Artificial Sequence
  Synthetic
ucccauuuaaaaauuuuca

SEQ ID NO: 214550 - RNA, 20 nt, Artificial Sequence
  Synthetic
aucccauuuaaaaauuuuca

SEQ ID NO: 214551 - RNA, 21 nt, Artificial Sequence
  Synthetic
aaucccauuuaaaaauuuuca

SEQ ID NO: 214552 - RNA, 22 nt, Artificial Sequence
  Synthetic
caaucccauuuaaaaauuuuca

SEQ ID NO: 214553 - RNA, 23 nt, Artificial Sequence
  Synthetic
gcaaucccauuuaaaaauuuuca

SEQ ID NO: 214554 - RNA, 24 nt, Artificial Sequence
  Synthetic
ugcaaucccauuuaaaaauuuuca

SEQ ID NO: 214555 - RNA, 18 nt, Artificial Sequence
  Synthetic
cguucuuucaaauuuuca

SEQ ID NO: 214556 - RNA, 19 nt, Artificial Sequence
  Synthetic
ccguucuuucaaauuuuca

SEQ ID NO: 214557 - RNA, 20 nt, Artificial Sequence
  Synthetic
accguucuuucaaauuuuca

SEQ ID NO: 214558 - RNA, 21 nt, Artificial Sequence
  Synthetic
caccguucuuucaaauuuuca

SEQ ID NO: 214559 - RNA, 22 nt, Artificial Sequence
  Synthetic
gcaccguucuuucaaauuuuca

SEQ ID NO: 214560 - RNA, 23 nt, Artificial Sequence
  Synthetic
agcaccguucuuucaaauuuuca

SEQ ID NO: 214561 - RNA, 24 nt, Artificial Sequence
  Synthetic
aagcaccguucuuucaaauuuuca

SEQ ID NO: 214562 - RNA, 18 nt, Artificial Sequence
  Synthetic
ugauaaaagacauuuuca

SEQ ID NO: 214563 - RNA, 19 nt, Artificial Sequence
  Synthetic
uugauaaaagacauuuuca

SEQ ID NO: 214564 - RNA, 20 nt, Artificial Sequence
  Synthetic
cuugauaaaagacauuuuca

SEQ ID NO: 214565 - RNA, 21 nt, Artificial Sequence
  Synthetic
ccuugauaaaagacauuuuca

SEQ ID NO: 214566 - RNA, 22 nt, Artificial Sequence
  Synthetic
accuugauaaaagacauuuuca

SEQ ID NO: 214567 - RNA, 23 nt, Artificial Sequence
  Synthetic
gaccuugauaaaagacauuuuca

SEQ ID NO: 214568 - RNA, 24 nt, Artificial Sequence
  Synthetic
ugaccuugauaaaagacauuuuca

SEQ ID NO: 214569 - RNA, 18 nt, Artificial Sequence
  Synthetic
uugaacauagcauuuuca

SEQ ID NO: 214570 - RNA, 19 nt, Artificial Sequence
  Synthetic
uuugaacauagcauuuuca

SEQ ID NO: 214571 - RNA, 20 nt, Artificial Sequence
  Synthetic
auuugaacauagcauuuuca

SEQ ID NO: 214572 - RNA, 21 nt, Artificial Sequence
  Synthetic
cauuugaacauagcauuuuca

SEQ ID NO: 214573 - RNA, 22 nt, Artificial Sequence
  Synthetic
ucauuugaacauagcauuuuca

SEQ ID NO: 214574 - RNA, 23 nt, Artificial Sequence
  Synthetic
gucauuugaacauagcauuuuca

SEQ ID NO: 214575 - RNA, 24 nt, Artificial Sequence
  Synthetic
ggucauuugaacauagcauuuuca

SEQ ID NO: 214576 - RNA, 18 nt, Artificial Sequence
  Synthetic
ccgggugcugcauuuuca

SEQ ID NO: 214577 - RNA, 19 nt, Artificial Sequence
  Synthetic
uccgggugcugcauuuuca

SEQ ID NO: 214578 - RNA, 20 nt, Artificial Sequence
  Synthetic
uuccgggugcugcauuuuca

SEQ ID NO: 214579 - RNA, 21 nt, Artificial Sequence
  Synthetic
auuccgggugcugcauuuuca

SEQ ID NO: 214580 - RNA, 22 nt, Artificial Sequence
  Synthetic
cauuccgggugcugcauuuuca

SEQ ID NO: 214581 - RNA, 23 nt, Artificial Sequence
  Synthetic
ucauuccgggugcugcauuuuca

SEQ ID NO: 214582 - RNA, 24 nt, Artificial Sequence
  Synthetic
gucauuccgggugcugcauuuuca

SEQ ID NO: 214583 - RNA, 18 nt, Artificial Sequence
  Synthetic
auacugaagucauuuuca

SEQ ID NO: 214584 - RNA, 19 nt, Artificial Sequence
  Synthetic
aauacugaagucauuuuca

SEQ ID NO: 214585 - RNA, 20 nt, Artificial Sequence
  Synthetic
aaauacugaagucauuuuca

SEQ ID NO: 214586 - RNA, 21 nt, Artificial Sequence
  Synthetic
gaaauacugaagucauuuuca

SEQ ID NO: 214587 - RNA, 22 nt, Artificial Sequence
  Synthetic
cgaaauacugaagucauuuuca

SEQ ID NO: 214588 - RNA, 23 nt, Artificial Sequence
  Synthetic
ucgaaauacugaagucauuuuca

SEQ ID NO: 214589 - RNA, 24 nt, Artificial Sequence
  Synthetic
aucgaaauacugaagucauuuuca

SEQ ID NO: 214590 - RNA, 18 nt, Artificial Sequence
  Synthetic
ggccucaucagauuuuca

SEQ ID NO: 214591 - RNA, 19 nt, Artificial Sequence
  Synthetic
cggccucaucagauuuuca

SEQ ID NO: 214592 - RNA, 20 nt, Artificial Sequence
  Synthetic
gcggccucaucagauuuuca

SEQ ID NO: 214593 - RNA, 21 nt, Artificial Sequence
  Synthetic
ugcggccucaucagauuuuca

SEQ ID NO: 214594 - RNA, 22 nt, Artificial Sequence
  Synthetic
uugcggccucaucagauuuuca

SEQ ID NO: 214595 - RNA, 23 nt, Artificial Sequence
  Synthetic
guugcggccucaucagauuuuca

SEQ ID NO: 214596 - RNA, 24 nt, Artificial Sequence
  Synthetic
cguugcggccucaucagauuuuca

SEQ ID NO: 214597 - RNA, 18 nt, Artificial Sequence
  Synthetic
aaucaauucagauuuuca

SEQ ID NO: 214598 - RNA, 19 nt, Artificial Sequence
  Synthetic
aaaucaauucagauuuuca

SEQ ID NO: 214599 - RNA, 20 nt, Artificial Sequence
  Synthetic
aaaaucaauucagauuuuca

SEQ ID NO: 214600 - RNA, 21 nt, Artificial Sequence
  Synthetic
gaaaaucaauucagauuuuca

SEQ ID NO: 214601 - RNA, 22 nt, Artificial Sequence
  Synthetic
ugaaaaucaauucagauuuuca

SEQ ID NO: 214602 - RNA, 23 nt, Artificial Sequence
  Synthetic
gugaaaaucaauucagauuuuca

SEQ ID NO: 214603 - RNA, 24 nt, Artificial Sequence
  Synthetic
agugaaaaucaauucagauuuuca

SEQ ID NO: 214604 - RNA, 18 nt, Artificial Sequence
  Synthetic
uguuaccuuggauuuuca

SEQ ID NO: 214605 - RNA, 19 nt, Artificial Sequence
  Synthetic
uuguuaccuuggauuuuca

SEQ ID NO: 214606 - RNA, 20 nt, Artificial Sequence
  Synthetic
uuuguuaccuuggauuuuca

SEQ ID NO: 214607 - RNA, 21 nt, Artificial Sequence
  Synthetic
auuuguuaccuuggauuuuca

SEQ ID NO: 214608 - RNA, 22 nt, Artificial Sequence
  Synthetic
uauuuguuaccuuggauuuuca

SEQ ID NO: 214609 - RNA, 23 nt, Artificial Sequence
  Synthetic
guauuuguuaccuuggauuuuca

SEQ ID NO: 214610 - RNA, 24 nt, Artificial Sequence
  Synthetic
aguauuuguuaccuuggauuuuca

SEQ ID NO: 214611 - RNA, 18 nt, Artificial Sequence
  Synthetic
uacgaaagaauauuuuca

SEQ ID NO: 214612 - RNA, 19 nt, Artificial Sequence
  Synthetic
guacgaaagaauauuuuca

SEQ ID NO: 214613 - RNA, 20 nt, Artificial Sequence
  Synthetic
uguacgaaagaauauuuuca

SEQ ID NO: 214614 - RNA, 21 nt, Artificial Sequence
  Synthetic
auguacgaaagaauauuuuca

SEQ ID NO: 214615 - RNA, 22 nt, Artificial Sequence
  Synthetic
uauguacgaaagaauauuuuca

SEQ ID NO: 214616 - RNA, 23 nt, Artificial Sequence
  Synthetic
auauguacgaaagaauauuuuca

SEQ ID NO: 214617 - RNA, 24 nt, Artificial Sequence
  Synthetic
aauauguacgaaagaauauuuuca

SEQ ID NO: 214618 - RNA, 18 nt, Artificial Sequence
  Synthetic
uuggacaccguauuuuca

SEQ ID NO: 214619 - RNA, 19 nt, Artificial Sequence
  Synthetic
uuuggacaccguauuuuca

SEQ ID NO: 214620 - RNA, 20 nt, Artificial Sequence
  Synthetic
auuuggacaccguauuuuca

SEQ ID NO: 214621 - RNA, 21 nt, Artificial Sequence
  Synthetic
aauuuggacaccguauuuuca

SEQ ID NO: 214622 - RNA, 22 nt, Artificial Sequence
  Synthetic
caauuuggacaccguauuuuca

SEQ ID NO: 214623 - RNA, 23 nt, Artificial Sequence
  Synthetic
ucaauuuggacaccguauuuuca

SEQ ID NO: 214624 - RNA, 24 nt, Artificial Sequence
  Synthetic
cucaauuuggacaccguauuuuca

SEQ ID NO: 214625 - RNA, 18 nt, Artificial Sequence
  Synthetic
caagacuccuuauuuuca

SEQ ID NO: 214626 - RNA, 19 nt, Artificial Sequence
  Synthetic
gcaagacuccuuauuuuca

SEQ ID NO: 214627 - RNA, 20 nt, Artificial Sequence
  Synthetic
ugcaagacuccuuauuuuca

SEQ ID NO: 214628 - RNA, 21 nt, Artificial Sequence
  Synthetic
augcaagacuccuuauuuuca

SEQ ID NO: 214629 - RNA, 22 nt, Artificial Sequence
  Synthetic
aaugcaagacuccuuauuuuca

SEQ ID NO: 214630 - RNA, 23 nt, Artificial Sequence
  Synthetic
aaaugcaagacuccuuauuuuca

SEQ ID NO: 214631 - RNA, 24 nt, Artificial Sequence
  Synthetic
caaaugcaagacuccuuauuuuca

SEQ ID NO: 214632 - RNA, 18 nt, Artificial Sequence
  Synthetic
uugcauauuuuauuuuca

SEQ ID NO: 214633 - RNA, 19 nt, Artificial Sequence
  Synthetic
auugcauauuuuauuuuca

SEQ ID NO: 214634 - RNA, 20 nt, Artificial Sequence
  Synthetic
aauugcauauuuuauuuuca

SEQ ID NO: 214635 - RNA, 21 nt, Artificial Sequence
  Synthetic
aaauugcauauuuuauuuuca

SEQ ID NO: 214636 - RNA, 22 nt, Artificial Sequence
  Synthetic
uaaauugcauauuuuauuuuca

SEQ ID NO: 214637 - RNA, 23 nt, Artificial Sequence
  Synthetic
cuaaauugcauauuuuauuuuca

SEQ ID NO: 214638 - RNA, 24 nt, Artificial Sequence
  Synthetic
ucuaaauugcauauuuuauuuuca

SEQ ID NO: 214639 - RNA, 18 nt, Artificial Sequence
  Synthetic
aacauuaccuacuuuuca

SEQ ID NO: 214640 - RNA, 19 nt, Artificial Sequence
  Synthetic
aaacauuaccuacuuuuca

SEQ ID NO: 214641 - RNA, 20 nt, Artificial Sequence
  Synthetic
caaacauuaccuacuuuuca

SEQ ID NO: 214642 - RNA, 21 nt, Artificial Sequence
  Synthetic
ccaaacauuaccuacuuuuca

SEQ ID NO: 214643 - RNA, 22 nt, Artificial Sequence
  Synthetic
cccaaacauuaccuacuuuuca

SEQ ID NO: 214644 - RNA, 23 nt, Artificial Sequence
  Synthetic
acccaaacauuaccuacuuuuca

SEQ ID NO: 214645 - RNA, 24 nt, Artificial Sequence
  Synthetic
uacccaaacauuaccuacuuuuca

SEQ ID NO: 214646 - RNA, 18 nt, Artificial Sequence
  Synthetic
cuccgcucauccuuuuca

SEQ ID NO: 214647 - RNA, 19 nt, Artificial Sequence
  Synthetic
ccuccgcucauccuuuuca

SEQ ID NO: 214648 - RNA, 20 nt, Artificial Sequence
  Synthetic
uccuccgcucauccuuuuca

SEQ ID NO: 214649 - RNA, 21 nt, Artificial Sequence
  Synthetic
cuccuccgcucauccuuuuca

SEQ ID NO: 214650 - RNA, 22 nt, Artificial Sequence
  Synthetic
ucuccuccgcucauccuuuuca

SEQ ID NO: 214651 - RNA, 23 nt, Artificial Sequence
  Synthetic
gucuccuccgcucauccuuuuca

SEQ ID NO: 214652 - RNA, 24 nt, Artificial Sequence
  Synthetic
agucuccuccgcucauccuuuuca

SEQ ID NO: 214653 - RNA, 18 nt, Artificial Sequence
  Synthetic
gagaaacccugcuuuuca

SEQ ID NO: 214654 - RNA, 19 nt, Artificial Sequence
  Synthetic
ugagaaacccugcuuuuca

SEQ ID NO: 214655 - RNA, 20 nt, Artificial Sequence
  Synthetic
uugagaaacccugcuuuuca

SEQ ID NO: 214656 - RNA, 21 nt, Artificial Sequence
  Synthetic
auugagaaacccugcuuuuca

SEQ ID NO: 214657 - RNA, 22 nt, Artificial Sequence
  Synthetic
gauugagaaacccugcuuuuca

SEQ ID NO: 214658 - RNA, 23 nt, Artificial Sequence
  Synthetic
agauugagaaacccugcuuuuca

SEQ ID NO: 214659 - RNA, 24 nt, Artificial Sequence
  Synthetic
gagauugagaaacccugcuuuuca

SEQ ID NO: 214660 - RNA, 18 nt, Artificial Sequence
  Synthetic
aacagacugugcuuuuca

SEQ ID NO: 214661 - RNA, 19 nt, Artificial Sequence
  Synthetic
gaacagacugugcuuuuca

SEQ ID NO: 214662 - RNA, 20 nt, Artificial Sequence
  Synthetic
ggaacagacugugcuuuuca

SEQ ID NO: 214663 - RNA, 21 nt, Artificial Sequence
  Synthetic
gggaacagacugugcuuuuca

SEQ ID NO: 214664 - RNA, 22 nt, Artificial Sequence
  Synthetic
agggaacagacugugcuuuuca

SEQ ID NO: 214665 - RNA, 23 nt, Artificial Sequence
  Synthetic
gagggaacagacugugcuuuuca

SEQ ID NO: 214666 - RNA, 24 nt, Artificial Sequence
  Synthetic
agagggaacagacugugcuuuuca

SEQ ID NO: 214667 - RNA, 18 nt, Artificial Sequence
  Synthetic
auuuuguuuaucuuuuca

SEQ ID NO: 214668 - RNA, 19 nt, Artificial Sequence
  Synthetic
aauuuuguuuaucuuuuca

SEQ ID NO: 214669 - RNA, 20 nt, Artificial Sequence
  Synthetic
caauuuuguuuaucuuuuca

SEQ ID NO: 214670 - RNA, 21 nt, Artificial Sequence
  Synthetic
ucaauuuuguuuaucuuuuca

SEQ ID NO: 214671 - RNA, 22 nt, Artificial Sequence
  Synthetic
aucaauuuuguuuaucuuuuca

SEQ ID NO: 214672 - RNA, 23 nt, Artificial Sequence
  Synthetic
uaucaauuuuguuuaucuuuuca

SEQ ID NO: 214673 - RNA, 24 nt, Artificial Sequence
  Synthetic
cuaucaauuuuguuuaucuuuuca

SEQ ID NO: 214674 - RNA, 18 nt, Artificial Sequence
  Synthetic
uaugauuuugucuuuuca

SEQ ID NO: 214675 - RNA, 19 nt, Artificial Sequence
  Synthetic
cuaugauuuugucuuuuca

SEQ ID NO: 214676 - RNA, 20 nt, Artificial Sequence
  Synthetic
ucuaugauuuugucuuuuca

SEQ ID NO: 214677 - RNA, 21 nt, Artificial Sequence
  Synthetic
cucuaugauuuugucuuuuca

SEQ ID NO: 214678 - RNA, 22 nt, Artificial Sequence
  Synthetic
ucucuaugauuuugucuuuuca

SEQ ID NO: 214679 - RNA, 23 nt, Artificial Sequence
  Synthetic
aucucuaugauuuugucuuuuca

SEQ ID NO: 214680 - RNA, 24 nt, Artificial Sequence
  Synthetic
caucucuaugauuuugucuuuuca

SEQ ID NO: 214681 - RNA, 18 nt, Artificial Sequence
  Synthetic
gaauucuaacaguuuuca

SEQ ID NO: 214682 - RNA, 19 nt, Artificial Sequence
  Synthetic
ugaauucuaacaguuuuca

SEQ ID NO: 214683 - RNA, 20 nt, Artificial Sequence
  Synthetic
augaauucuaacaguuuuca

SEQ ID NO: 214684 - RNA, 21 nt, Artificial Sequence
  Synthetic
uaugaauucuaacaguuuuca

SEQ ID NO: 214685 - RNA, 22 nt, Artificial Sequence
  Synthetic
guaugaauucuaacaguuuuca

SEQ ID NO: 214686 - RNA, 23 nt, Artificial Sequence
  Synthetic
uguaugaauucuaacaguuuuca

SEQ ID NO: 214687 - RNA, 24 nt, Artificial Sequence
  Synthetic
guguaugaauucuaacaguuuuca

SEQ ID NO: 214688 - RNA, 18 nt, Artificial Sequence
  Synthetic
gucuugugccaguuuuca

SEQ ID NO: 214689 - RNA, 19 nt, Artificial Sequence
  Synthetic
ugucuugugccaguuuuca

SEQ ID NO: 214690 - RNA, 20 nt, Artificial Sequence
  Synthetic
cugucuugugccaguuuuca

SEQ ID NO: 214691 - RNA, 21 nt, Artificial Sequence
  Synthetic
ccugucuugugccaguuuuca

SEQ ID NO: 214692 - RNA, 22 nt, Artificial Sequence
  Synthetic
cccugucuugugccaguuuuca

SEQ ID NO: 214693 - RNA, 23 nt, Artificial Sequence
  Synthetic
ucccugucuugugccaguuuuca

SEQ ID NO: 214694 - RNA, 24 nt, Artificial Sequence
  Synthetic
aucccugucuugugccaguuuuca

SEQ ID NO: 214695 - RNA, 20 nt, Artificial Sequence
  Synthetic
uugucuugugccaguuuuca

SEQ ID NO: 214696 - RNA, 21 nt, Artificial Sequence
  Synthetic
cuugucuugugccaguuuuca

SEQ ID NO: 214697 - RNA, 22 nt, Artificial Sequence
  Synthetic
ccuugucuugugccaguuuuca

SEQ ID NO: 214698 - RNA, 23 nt, Artificial Sequence
  Synthetic
uccuugucuugugccaguuuuca

SEQ ID NO: 214699 - RNA, 24 nt, Artificial Sequence
  Synthetic
auccuugucuugugccaguuuuca

SEQ ID NO: 214700 - RNA, 18 nt, Artificial Sequence
  Synthetic
uguuaaugggaguuuuca

SEQ ID NO: 214701 - RNA, 19 nt, Artificial Sequence
  Synthetic
auguuaaugggaguuuuca

SEQ ID NO: 214702 - RNA, 20 nt, Artificial Sequence
  Synthetic
aauguuaaugggaguuuuca

SEQ ID NO: 214703 - RNA, 21 nt, Artificial Sequence
  Synthetic
aaauguuaaugggaguuuuca

SEQ ID NO: 214704 - RNA, 22 nt, Artificial Sequence
  Synthetic
gaaauguuaaugggaguuuuca

SEQ ID NO: 214705 - RNA, 23 nt, Artificial Sequence
  Synthetic
agaaauguuaaugggaguuuuca

SEQ ID NO: 214706 - RNA, 24 nt, Artificial Sequence
  Synthetic
aagaaauguuaaugggaguuuuca

SEQ ID NO: 214707 - RNA, 18 nt, Artificial Sequence
  Synthetic
auguacguaauguuuuca

SEQ ID NO: 214708 - RNA, 19 nt, Artificial Sequence
  Synthetic
aauguacguaauguuuuca

SEQ ID NO: 214709 - RNA, 20 nt, Artificial Sequence
  Synthetic
aaauguacguaauguuuuca

SEQ ID NO: 214710 - RNA, 21 nt, Artificial Sequence
  Synthetic
aaaauguacguaauguuuuca

SEQ ID NO: 214711 - RNA, 22 nt, Artificial Sequence
  Synthetic
aaaaauguacguaauguuuuca

SEQ ID NO: 214712 - RNA, 23 nt, Artificial Sequence
  Synthetic
aaaaaauguacguaauguuuuca

SEQ ID NO: 214713 - RNA, 24 nt, Artificial Sequence
  Synthetic
aaaaaaauguacguaauguuuuca

SEQ ID NO: 214714 - RNA, 18 nt, Artificial Sequence
  Synthetic
auccaggcccuguuuuca

SEQ ID NO: 214715 - RNA, 19 nt, Artificial Sequence
  Synthetic
cauccaggcccuguuuuca

SEQ ID NO: 214716 - RNA, 20 nt, Artificial Sequence
  Synthetic
ucauccaggcccuguuuuca

SEQ ID NO: 214717 - RNA, 21 nt, Artificial Sequence
  Synthetic
cucauccaggcccuguuuuca

SEQ ID NO: 214718 - RNA, 22 nt, Artificial Sequence
  Synthetic
ccucauccaggcccuguuuuca

SEQ ID NO: 214719 - RNA, 23 nt, Artificial Sequence
  Synthetic
uccucauccaggcccuguuuuca

SEQ ID NO: 214720 - RNA, 24 nt, Artificial Sequence
  Synthetic
guccucauccaggcccuguuuuca

SEQ ID NO: 214721 - RNA, 18 nt, Artificial Sequence
  Synthetic
ugauuuuuauuguuuuca

SEQ ID NO: 214722 - RNA, 19 nt, Artificial Sequence
  Synthetic
gugauuuuuauuguuuuca

SEQ ID NO: 214723 - RNA, 20 nt, Artificial Sequence
  Synthetic
agugauuuuuauuguuuuca

SEQ ID NO: 214724 - RNA, 21 nt, Artificial Sequence
  Synthetic
gagugauuuuuauuguuuuca

SEQ ID NO: 214725 - RNA, 22 nt, Artificial Sequence
  Synthetic
ggagugauuuuuauuguuuuca

SEQ ID NO: 214726 - RNA, 23 nt, Artificial Sequence
  Synthetic
uggagugauuuuuauuguuuuca

SEQ ID NO: 214727 - RNA, 24 nt, Artificial Sequence
  Synthetic
auggagugauuuuuauuguuuuca

SEQ ID NO: 214728 - RNA, 18 nt, Artificial Sequence
  Synthetic
agaaaugauuuguuuuca

SEQ ID NO: 214729 - RNA, 19 nt, Artificial Sequence
  Synthetic
cagaaaugauuuguuuuca

SEQ ID NO: 214730 - RNA, 20 nt, Artificial Sequence
  Synthetic
gcagaaaugauuuguuuuca

SEQ ID NO: 214731 - RNA, 21 nt, Artificial Sequence
  Synthetic
ugcagaaaugauuuguuuuca

SEQ ID NO: 214732 - RNA, 22 nt, Artificial Sequence
  Synthetic
uugcagaaaugauuuguuuuca

SEQ ID NO: 214733 - RNA, 23 nt, Artificial Sequence
  Synthetic
cuugcagaaaugauuuguuuuca

SEQ ID NO: 214734 - RNA, 24 nt, Artificial Sequence
  Synthetic
acuugcagaaaugauuuguuuuca

SEQ ID NO: 214735 - RNA, 18 nt, Artificial Sequence
  Synthetic
gaaugauaaaauuuuuca

SEQ ID NO: 214736 - RNA, 19 nt, Artificial Sequence
  Synthetic
ugaaugauaaaauuuuuca

SEQ ID NO: 214737 - RNA, 20 nt, Artificial Sequence
  Synthetic
gugaaugauaaaauuuuuca

SEQ ID NO: 214738 - RNA, 21 nt, Artificial Sequence
  Synthetic
ugugaaugauaaaauuuuuca

SEQ ID NO: 214739 - RNA, 22 nt, Artificial Sequence
  Synthetic
cugugaaugauaaaauuuuuca

SEQ ID NO: 214740 - RNA, 23 nt, Artificial Sequence
  Synthetic
ccugugaaugauaaaauuuuuca

SEQ ID NO: 214741 - RNA, 24 nt, Artificial Sequence
  Synthetic
uccugugaaugauaaaauuuuuca

SEQ ID NO: 214742 - RNA, 18 nt, Artificial Sequence
  Synthetic
aucacccaaacuuuuuca

SEQ ID NO: 214743 - RNA, 19 nt, Artificial Sequence
  Synthetic
gaucacccaaacuuuuuca

SEQ ID NO: 214744 - RNA, 20 nt, Artificial Sequence
  Synthetic
ggaucacccaaacuuuuuca

SEQ ID NO: 214745 - RNA, 21 nt, Artificial Sequence
  Synthetic
aggaucacccaaacuuuuuca

SEQ ID NO: 214746 - RNA, 22 nt, Artificial Sequence
  Synthetic
aaggaucacccaaacuuuuuca

SEQ ID NO: 214747 - RNA, 23 nt, Artificial Sequence
  Synthetic
uaaggaucacccaaacuuuuuca

SEQ ID NO: 214748 - RNA, 24 nt, Artificial Sequence
  Synthetic
cuaaggaucacccaaacuuuuuca

SEQ ID NO: 214749 - RNA, 18 nt, Artificial Sequence
  Synthetic
guuuauuguacuuuuuca

SEQ ID NO: 214750 - RNA, 19 nt, Artificial Sequence
  Synthetic
gguuuauuguacuuuuuca

SEQ ID NO: 214751 - RNA, 20 nt, Artificial Sequence
  Synthetic
agguuuauuguacuuuuuca

SEQ ID NO: 214752 - RNA, 21 nt, Artificial Sequence
  Synthetic
uagguuuauuguacuuuuuca

SEQ ID NO: 214753 - RNA, 22 nt, Artificial Sequence
  Synthetic
auagguuuauuguacuuuuuca

SEQ ID NO: 214754 - RNA, 23 nt, Artificial Sequence
  Synthetic
aauagguuuauuguacuuuuuca

SEQ ID NO: 214755 - RNA, 24 nt, Artificial Sequence
  Synthetic
caauagguuuauuguacuuuuuca

SEQ ID NO: 214756 - RNA, 18 nt, Artificial Sequence
  Synthetic
aauuacccauuuuuuuca

SEQ ID NO: 214757 - RNA, 19 nt, Artificial Sequence
  Synthetic
gaauuacccauuuuuuuca

SEQ ID NO: 214758 - RNA, 20 nt, Artificial Sequence
  Synthetic
agaauuacccauuuuuuuca

SEQ ID NO: 214759 - RNA, 21 nt, Artificial Sequence
  Synthetic
uagaauuacccauuuuuuuca

SEQ ID NO: 214760 - RNA, 22 nt, Artificial Sequence
  Synthetic
uuagaauuacccauuuuuuuca

SEQ ID NO: 214761 - RNA, 23 nt, Artificial Sequence
  Synthetic
uuuagaauuacccauuuuuuuca

SEQ ID NO: 214762 - RNA, 24 nt, Artificial Sequence
  Synthetic
auuuagaauuacccauuuuuuuca

SEQ ID NO: 214763 - RNA, 18 nt, Artificial Sequence
  Synthetic
ucaaaaaaaaaaaaaaga

SEQ ID NO: 214764 - RNA, 19 nt, Artificial Sequence
  Synthetic
cucaaaaaaaaaaaaaaga

SEQ ID NO: 214765 - RNA, 20 nt, Artificial Sequence
  Synthetic
ucucaaaaaaaaaaaaaaga

SEQ ID NO: 214766 - RNA, 21 nt, Artificial Sequence
  Synthetic
gucucaaaaaaaaaaaaaaga

SEQ ID NO: 214767 - RNA, 22 nt, Artificial Sequence
  Synthetic
ugucucaaaaaaaaaaaaaaga

SEQ ID NO: 214768 - RNA, 23 nt, Artificial Sequence
  Synthetic
cugucucaaaaaaaaaaaaaaga

SEQ ID NO: 214769 - RNA, 24 nt, Artificial Sequence
  Synthetic
ucugucucaaaaaaaaaaaaaaga

SEQ ID NO: 214770 - RNA, 18 nt, Artificial Sequence
  Synthetic
caucaaaaaaaaaaaaga

SEQ ID NO: 214771 - RNA, 19 nt, Artificial Sequence
  Synthetic
ccaucaaaaaaaaaaaaga

SEQ ID NO: 214772 - RNA, 20 nt, Artificial Sequence
  Synthetic
uccaucaaaaaaaaaaaaga

SEQ ID NO: 214773 - RNA, 21 nt, Artificial Sequence
  Synthetic
cuccaucaaaaaaaaaaaaga

SEQ ID NO: 214774 - RNA, 22 nt, Artificial Sequence
  Synthetic
acuccaucaaaaaaaaaaaaga

SEQ ID NO: 214775 - RNA, 23 nt, Artificial Sequence
  Synthetic
aacuccaucaaaaaaaaaaaaga

SEQ ID NO: 214776 - RNA, 24 nt, Artificial Sequence
  Synthetic
aaacuccaucaaaaaaaaaaaaga

SEQ ID NO: 214777 - RNA, 18 nt, Artificial Sequence
  Synthetic
aggaaagggaaaaaaaga

SEQ ID NO: 214778 - RNA, 19 nt, Artificial Sequence
  Synthetic
gaggaaagggaaaaaaaga

SEQ ID NO: 214779 - RNA, 20 nt, Artificial Sequence
  Synthetic
ggaggaaagggaaaaaaaga

SEQ ID NO: 214780 - RNA, 21 nt, Artificial Sequence
  Synthetic
aggaggaaagggaaaaaaaga

SEQ ID NO: 214781 - RNA, 22 nt, Artificial Sequence
  Synthetic
gaggaggaaagggaaaaaaaga

SEQ ID NO: 214782 - RNA, 23 nt, Artificial Sequence
  Synthetic
ggaggaggaaagggaaaaaaaga

SEQ ID NO: 214783 - RNA, 24 nt, Artificial Sequence
  Synthetic
aggaggaggaaagggaaaaaaaga

SEQ ID NO: 214784 - RNA, 18 nt, Artificial Sequence
  Synthetic
agucucuugaaaaaaaga

SEQ ID NO: 214785 - RNA, 19 nt, Artificial Sequence
  Synthetic
aagucucuugaaaaaaaga

SEQ ID NO: 214786 - RNA, 20 nt, Artificial Sequence
  Synthetic
gaagucucuugaaaaaaaga

SEQ ID NO: 214787 - RNA, 21 nt, Artificial Sequence
  Synthetic
agaagucucuugaaaaaaaga

SEQ ID NO: 214788 - RNA, 22 nt, Artificial Sequence
  Synthetic
aagaagucucuugaaaaaaaga

SEQ ID NO: 214789 - RNA, 23 nt, Artificial Sequence
  Synthetic
aaagaagucucuugaaaaaaaga

SEQ ID NO: 214790 - RNA, 24 nt, Artificial Sequence
  Synthetic
gaaagaagucucuugaaaaaaaga

SEQ ID NO: 214791 - RNA, 18 nt, Artificial Sequence
  Synthetic
agaagguaagaaaaaaga

SEQ ID NO: 214792 - RNA, 19 nt, Artificial Sequence
  Synthetic
aagaagguaagaaaaaaga

SEQ ID NO: 214793 - RNA, 20 nt, Artificial Sequence
  Synthetic
caagaagguaagaaaaaaga

SEQ ID NO: 214794 - RNA, 21 nt, Artificial Sequence
  Synthetic
acaagaagguaagaaaaaaga

SEQ ID NO: 214795 - RNA, 22 nt, Artificial Sequence
  Synthetic
cacaagaagguaagaaaaaaga

SEQ ID NO: 214796 - RNA, 23 nt, Artificial Sequence
  Synthetic
ccacaagaagguaagaaaaaaga

SEQ ID NO: 214797 - RNA, 24 nt, Artificial Sequence
  Synthetic
cccacaagaagguaagaaaaaaga

SEQ ID NO: 214798 - RNA, 18 nt, Artificial Sequence
  Synthetic
cuauuuguagaaaaaaga

SEQ ID NO: 214799 - RNA, 19 nt, Artificial Sequence
  Synthetic
ucuauuuguagaaaaaaga

SEQ ID NO: 214800 - RNA, 20 nt, Artificial Sequence
  Synthetic
gucuauuuguagaaaaaaga

SEQ ID NO: 214801 - RNA, 21 nt, Artificial Sequence
  Synthetic
ugucuauuuguagaaaaaaga

SEQ ID NO: 214802 - RNA, 22 nt, Artificial Sequence
  Synthetic
augucuauuuguagaaaaaaga

SEQ ID NO: 214803 - RNA, 23 nt, Artificial Sequence
  Synthetic
aaugucuauuuguagaaaaaaga

SEQ ID NO: 214804 - RNA, 24 nt, Artificial Sequence
  Synthetic
caaugucuauuuguagaaaaaaga

SEQ ID NO: 214805 - RNA, 18 nt, Artificial Sequence
  Synthetic
aggcaaaaggaaaaaaga

SEQ ID NO: 214806 - RNA, 19 nt, Artificial Sequence
  Synthetic
uaggcaaaaggaaaaaaga

SEQ ID NO: 214807 - RNA, 20 nt, Artificial Sequence
  Synthetic
guaggcaaaaggaaaaaaga

SEQ ID NO: 214808 - RNA, 21 nt, Artificial Sequence
  Synthetic
cguaggcaaaaggaaaaaaga

SEQ ID NO: 214809 - RNA, 22 nt, Artificial Sequence
  Synthetic
acguaggcaaaaggaaaaaaga

SEQ ID NO: 214810 - RNA, 23 nt, Artificial Sequence
  Synthetic
cacguaggcaaaaggaaaaaaga

SEQ ID NO: 214811 - RNA, 24 nt, Artificial Sequence
  Synthetic
ccacguaggcaaaaggaaaaaaga

SEQ ID NO: 214812 - RNA, 18 nt, Artificial Sequence
  Synthetic
cccuccauggaaaaaaga

SEQ ID NO: 214813 - RNA, 19 nt, Artificial Sequence
  Synthetic
acccuccauggaaaaaaga

SEQ ID NO: 214814 - RNA, 20 nt, Artificial Sequence
  Synthetic
uacccuccauggaaaaaaga

SEQ ID NO: 214815 - RNA, 21 nt, Artificial Sequence
  Synthetic
guacccuccauggaaaaaaga

SEQ ID NO: 214816 - RNA, 22 nt, Artificial Sequence
  Synthetic
aguacccuccauggaaaaaaga

SEQ ID NO: 214817 - RNA, 23 nt, Artificial Sequence
  Synthetic
caguacccuccauggaaaaaaga

SEQ ID NO: 214818 - RNA, 24 nt, Artificial Sequence
  Synthetic
ucaguacccuccauggaaaaaaga

SEQ ID NO: 214819 - RNA, 18 nt, Artificial Sequence
  Synthetic
aagauuacugaaaaaaga

SEQ ID NO: 214820 - RNA, 19 nt, Artificial Sequence
  Synthetic
gaagauuacugaaaaaaga

SEQ ID NO: 214821 - RNA, 20 nt, Artificial Sequence
  Synthetic
agaagauuacugaaaaaaga

SEQ ID NO: 214822 - RNA, 21 nt, Artificial Sequence
  Synthetic
gagaagauuacugaaaaaaga

SEQ ID NO: 214823 - RNA, 22 nt, Artificial Sequence
  Synthetic
agagaagauuacugaaaaaaga

SEQ ID NO: 214824 - RNA, 23 nt, Artificial Sequence
  Synthetic
aagagaagauuacugaaaaaaga

SEQ ID NO: 214825 - RNA, 24 nt, Artificial Sequence
  Synthetic
gaagagaagauuacugaaaaaaga

SEQ ID NO: 214826 - RNA, 18 nt, Artificial Sequence
  Synthetic
aaauuaaaauaaaaaaga

SEQ ID NO: 214827 - RNA, 19 nt, Artificial Sequence
  Synthetic
aaaauuaaaauaaaaaaga

SEQ ID NO: 214828 - RNA, 20 nt, Artificial Sequence
  Synthetic
aaaaauuaaaauaaaaaaga

SEQ ID NO: 214829 - RNA, 21 nt, Artificial Sequence
  Synthetic
caaaaauuaaaauaaaaaaga

SEQ ID NO: 214830 - RNA, 22 nt, Artificial Sequence
  Synthetic
acaaaaauuaaaauaaaaaaga

SEQ ID NO: 214831 - RNA, 23 nt, Artificial Sequence
  Synthetic
cacaaaaauuaaaauaaaaaaga

SEQ ID NO: 214832 - RNA, 24 nt, Artificial Sequence
  Synthetic
ccacaaaaauuaaaauaaaaaaga

SEQ ID NO: 214833 - RNA, 18 nt, Artificial Sequence
  Synthetic
cuucgucauuaaaaaaga

SEQ ID NO: 214834 - RNA, 19 nt, Artificial Sequence
  Synthetic
ccuucgucauuaaaaaaga

SEQ ID NO: 214835 - RNA, 20 nt, Artificial Sequence
  Synthetic
accuucgucauuaaaaaaga

SEQ ID NO: 214836 - RNA, 21 nt, Artificial Sequence
  Synthetic
aaccuucgucauuaaaaaaga

SEQ ID NO: 214837 - RNA, 22 nt, Artificial Sequence
  Synthetic
uaaccuucgucauuaaaaaaga

SEQ ID NO: 214838 - RNA, 23 nt, Artificial Sequence
  Synthetic
auaaccuucgucauuaaaaaaga

SEQ ID NO: 214839 - RNA, 24 nt, Artificial Sequence
  Synthetic
gauaaccuucgucauuaaaaaaga

SEQ ID NO: 214840 - RNA, 18 nt, Artificial Sequence
  Synthetic
ccugauuacacaaaaaga

SEQ ID NO: 214841 - RNA, 19 nt, Artificial Sequence
  Synthetic
accugauuacacaaaaaga

SEQ ID NO: 214842 - RNA, 20 nt, Artificial Sequence
  Synthetic
uaccugauuacacaaaaaga

SEQ ID NO: 214843 - RNA, 21 nt, Artificial Sequence
  Synthetic
cuaccugauuacacaaaaaga

SEQ ID NO: 214844 - RNA, 22 nt, Artificial Sequence
  Synthetic
ucuaccugauuacacaaaaaga

SEQ ID NO: 214845 - RNA, 23 nt, Artificial Sequence
  Synthetic
aucuaccugauuacacaaaaaga

SEQ ID NO: 214846 - RNA, 24 nt, Artificial Sequence
  Synthetic
uaucuaccugauuacacaaaaaga

SEQ ID NO: 214847 - RNA, 18 nt, Artificial Sequence
  Synthetic
gacgaugauucaaaaaga

SEQ ID NO: 214848 - RNA, 19 nt, Artificial Sequence
  Synthetic
ggacgaugauucaaaaaga

SEQ ID NO: 214849 - RNA, 20 nt, Artificial Sequence
  Synthetic
uggacgaugauucaaaaaga

SEQ ID NO: 214850 - RNA, 21 nt, Artificial Sequence
  Synthetic
guggacgaugauucaaaaaga

SEQ ID NO: 214851 - RNA, 22 nt, Artificial Sequence
  Synthetic
aguggacgaugauucaaaaaga

SEQ ID NO: 214852 - RNA, 23 nt, Artificial Sequence
  Synthetic
caguggacgaugauucaaaaaga

SEQ ID NO: 214853 - RNA, 24 nt, Artificial Sequence
  Synthetic
gcaguggacgaugauucaaaaaga

SEQ ID NO: 214854 - RNA, 18 nt, Artificial Sequence
  Synthetic
acccgagguagaaaaaga

SEQ ID NO: 214855 - RNA, 19 nt, Artificial Sequence
  Synthetic
uacccgagguagaaaaaga

SEQ ID NO: 214856 - RNA, 20 nt, Artificial Sequence
  Synthetic
guacccgagguagaaaaaga

SEQ ID NO: 214857 - RNA, 21 nt, Artificial Sequence
  Synthetic
uguacccgagguagaaaaaga

SEQ ID NO: 214858 - RNA, 22 nt, Artificial Sequence
  Synthetic
guguacccgagguagaaaaaga

SEQ ID NO: 214859 - RNA, 23 nt, Artificial Sequence
  Synthetic
aguguacccgagguagaaaaaga

SEQ ID NO: 214860 - RNA, 24 nt, Artificial Sequence
  Synthetic
caguguacccgagguagaaaaaga

SEQ ID NO: 214861 - RNA, 18 nt, Artificial Sequence
  Synthetic
cuggaagguggaaaaaga

SEQ ID NO: 214862 - RNA, 19 nt, Artificial Sequence
  Synthetic
ccuggaagguggaaaaaga

SEQ ID NO: 214863 - RNA, 20 nt, Artificial Sequence
  Synthetic
cccuggaagguggaaaaaga

SEQ ID NO: 214864 - RNA, 21 nt, Artificial Sequence
  Synthetic
ccccuggaagguggaaaaaga

SEQ ID NO: 214865 - RNA, 22 nt, Artificial Sequence
  Synthetic
cccccuggaagguggaaaaaga

SEQ ID NO: 214866 - RNA, 23 nt, Artificial Sequence
  Synthetic
gcccccuggaagguggaaaaaga

SEQ ID NO: 214867 - RNA, 24 nt, Artificial Sequence
  Synthetic
agcccccuggaagguggaaaaaga

SEQ ID NO: 214868 - RNA, 18 nt, Artificial Sequence
  Synthetic
guuuaaaaaugaaaaaga

SEQ ID NO: 214869 - RNA, 19 nt, Artificial Sequence
  Synthetic
aguuuaaaaaugaaaaaga

SEQ ID NO: 214870 - RNA, 20 nt, Artificial Sequence
  Synthetic
aaguuuaaaaaugaaaaaga

SEQ ID NO: 214871 - RNA, 21 nt, Artificial Sequence
  Synthetic
gaaguuuaaaaaugaaaaaga

SEQ ID NO: 214872 - RNA, 22 nt, Artificial Sequence
  Synthetic
ugaaguuuaaaaaugaaaaaga

SEQ ID NO: 214873 - RNA, 23 nt, Artificial Sequence
  Synthetic
augaaguuuaaaaaugaaaaaga

SEQ ID NO: 214874 - RNA, 24 nt, Artificial Sequence
  Synthetic
gaugaaguuuaaaaaugaaaaaga

SEQ ID NO: 214875 - RNA, 18 nt, Artificial Sequence
  Synthetic
auguggccaugaaaaaga

SEQ ID NO: 214876 - RNA, 19 nt, Artificial Sequence
  Synthetic
uauguggccaugaaaaaga

SEQ ID NO: 214877 - RNA, 20 nt, Artificial Sequence
  Synthetic
cuauguggccaugaaaaaga

SEQ ID NO: 214878 - RNA, 21 nt, Artificial Sequence
  Synthetic
acuauguggccaugaaaaaga

SEQ ID NO: 214879 - RNA, 22 nt, Artificial Sequence
  Synthetic
uacuauguggccaugaaaaaga

SEQ ID NO: 214880 - RNA, 23 nt, Artificial Sequence
  Synthetic
auacuauguggccaugaaaaaga

SEQ ID NO: 214881 - RNA, 24 nt, Artificial Sequence
  Synthetic
aauacuauguggccaugaaaaaga

SEQ ID NO: 214882 - RNA, 18 nt, Artificial Sequence
  Synthetic
ucucaaaaaauaaaaaga

SEQ ID NO: 214883 - RNA, 19 nt, Artificial Sequence
  Synthetic
gucucaaaaaauaaaaaga

SEQ ID NO: 214884 - RNA, 20 nt, Artificial Sequence
  Synthetic
cgucucaaaaaauaaaaaga

SEQ ID NO: 214885 - RNA, 21 nt, Artificial Sequence
  Synthetic
ccgucucaaaaaauaaaaaga

SEQ ID NO: 214886 - RNA, 22 nt, Artificial Sequence
  Synthetic
uccgucucaaaaaauaaaaaga

SEQ ID NO: 214887 - RNA, 23 nt, Artificial Sequence
  Synthetic
cuccgucucaaaaaauaaaaaga

SEQ ID NO: 214888 - RNA, 24 nt, Artificial Sequence
  Synthetic
acuccgucucaaaaaauaaaaaga

SEQ ID NO: 214889 - RNA, 18 nt, Artificial Sequence
  Synthetic
uaaucaaaaauaaaaaga

SEQ ID NO: 214890 - RNA, 19 nt, Artificial Sequence
  Synthetic
auaaucaaaaauaaaaaga

SEQ ID NO: 214891 - RNA, 20 nt, Artificial Sequence
  Synthetic
uauaaucaaaaauaaaaaga

SEQ ID NO: 214892 - RNA, 21 nt, Artificial Sequence
  Synthetic
guauaaucaaaaauaaaaaga

SEQ ID NO: 214893 - RNA, 22 nt, Artificial Sequence
  Synthetic
gguauaaucaaaaauaaaaaga

SEQ ID NO: 214894 - RNA, 23 nt, Artificial Sequence
  Synthetic
agguauaaucaaaaauaaaaaga

SEQ ID NO: 214895 - RNA, 24 nt, Artificial Sequence
  Synthetic
cagguauaaucaaaaauaaaaaga

SEQ ID NO: 214896 - RNA, 18 nt, Artificial Sequence
  Synthetic
uuuucugaaauaaaaaga

SEQ ID NO: 214897 - RNA, 19 nt, Artificial Sequence
  Synthetic
cuuuucugaaauaaaaaga

SEQ ID NO: 214898 - RNA, 20 nt, Artificial Sequence
  Synthetic
acuuuucugaaauaaaaaga

SEQ ID NO: 214899 - RNA, 21 nt, Artificial Sequence
  Synthetic
uacuuuucugaaauaaaaaga

SEQ ID NO: 214900 - RNA, 22 nt, Artificial Sequence
  Synthetic
uuacuuuucugaaauaaaaaga

SEQ ID NO: 214901 - RNA, 23 nt, Artificial Sequence
  Synthetic
auuacuuuucugaaauaaaaaga

SEQ ID NO: 214902 - RNA, 24 nt, Artificial Sequence
  Synthetic
aauuacuuuucugaaauaaaaaga

SEQ ID NO: 214903 - RNA, 18 nt, Artificial Sequence
  Synthetic
uauaaagugauaaaaaga

SEQ ID NO: 214904 - RNA, 19 nt, Artificial Sequence
  Synthetic
auauaaagugauaaaaaga

SEQ ID NO: 214905 - RNA, 20 nt, Artificial Sequence
  Synthetic
aauauaaagugauaaaaaga

SEQ ID NO: 214906 - RNA, 21 nt, Artificial Sequence
  Synthetic
aaauauaaagugauaaaaaga

SEQ ID NO: 214907 - RNA, 22 nt, Artificial Sequence
  Synthetic
caaauauaaagugauaaaaaga

SEQ ID NO: 214908 - RNA, 23 nt, Artificial Sequence
  Synthetic
gcaaauauaaagugauaaaaaga

SEQ ID NO: 214909 - RNA, 24 nt, Artificial Sequence
  Synthetic
agcaaauauaaagugauaaaaaga

SEQ ID NO: 214910 - RNA, 18 nt, Artificial Sequence
  Synthetic
gaauugacuauaaaaaga

SEQ ID NO: 214911 - RNA, 19 nt, Artificial Sequence
  Synthetic
agaauugacuauaaaaaga

SEQ ID NO: 214912 - RNA, 20 nt, Artificial Sequence
  Synthetic
gagaauugacuauaaaaaga

SEQ ID NO: 214913 - RNA, 21 nt, Artificial Sequence
  Synthetic
ggagaauugacuauaaaaaga

SEQ ID NO: 214914 - RNA, 22 nt, Artificial Sequence
  Synthetic
uggagaauugacuauaaaaaga

SEQ ID NO: 214915 - RNA, 23 nt, Artificial Sequence
  Synthetic
auggagaauugacuauaaaaaga

SEQ ID NO: 214916 - RNA, 24 nt, Artificial Sequence
  Synthetic
uauggagaauugacuauaaaaaga

SEQ ID NO: 214917 - RNA, 18 nt, Artificial Sequence
  Synthetic
uauauaaaaguaaaaaga

SEQ ID NO: 214918 - RNA, 19 nt, Artificial Sequence
  Synthetic
uuauauaaaaguaaaaaga

SEQ ID NO: 214919 - RNA, 20 nt, Artificial Sequence
  Synthetic
uuuauauaaaaguaaaaaga

SEQ ID NO: 214920 - RNA, 21 nt, Artificial Sequence
  Synthetic
auuuauauaaaaguaaaaaga

SEQ ID NO: 214921 - RNA, 22 nt, Artificial Sequence
  Synthetic
gauuuauauaaaaguaaaaaga

SEQ ID NO: 214922 - RNA, 23 nt, Artificial Sequence
  Synthetic
ugauuuauauaaaaguaaaaaga

SEQ ID NO: 214923 - RNA, 24 nt, Artificial Sequence
  Synthetic
gugauuuauauaaaaguaaaaaga

SEQ ID NO: 214924 - RNA, 18 nt, Artificial Sequence
  Synthetic
gaccauggaguaaaaaga

SEQ ID NO: 214925 - RNA, 19 nt, Artificial Sequence
  Synthetic
ugaccauggaguaaaaaga

SEQ ID NO: 214926 - RNA, 20 nt, Artificial Sequence
  Synthetic
gugaccauggaguaaaaaga

SEQ ID NO: 214927 - RNA, 21 nt, Artificial Sequence
  Synthetic
agugaccauggaguaaaaaga

SEQ ID NO: 214928 - RNA, 22 nt, Artificial Sequence
  Synthetic
cagugaccauggaguaaaaaga

SEQ ID NO: 214929 - RNA, 23 nt, Artificial Sequence
  Synthetic
gcagugaccauggaguaaaaaga

SEQ ID NO: 214930 - RNA, 24 nt, Artificial Sequence
  Synthetic
agcagugaccauggaguaaaaaga

SEQ ID NO: 214931 - RNA, 18 nt, Artificial Sequence
  Synthetic
acacaaccauuaaaaaga

SEQ ID NO: 214932 - RNA, 19 nt, Artificial Sequence
  Synthetic
uacacaaccauuaaaaaga

SEQ ID NO: 214933 - RNA, 20 nt, Artificial Sequence
  Synthetic
cuacacaaccauuaaaaaga

SEQ ID NO: 214934 - RNA, 21 nt, Artificial Sequence
  Synthetic
acuacacaaccauuaaaaaga

SEQ ID NO: 214935 - RNA, 22 nt, Artificial Sequence
  Synthetic
uacuacacaaccauuaaaaaga

SEQ ID NO: 214936 - RNA, 23 nt, Artificial Sequence
  Synthetic
auacuacacaaccauuaaaaaga

SEQ ID NO: 214937 - RNA, 24 nt, Artificial Sequence
  Synthetic
aauacuacacaaccauuaaaaaga

SEQ ID NO: 214938 - RNA, 18 nt, Artificial Sequence
  Synthetic
auuagcguauuaaaaaga

SEQ ID NO: 214939 - RNA, 19 nt, Artificial Sequence
  Synthetic
cauuagcguauuaaaaaga

SEQ ID NO: 214940 - RNA, 20 nt, Artificial Sequence
  Synthetic
acauuagcguauuaaaaaga

SEQ ID NO: 214941 - RNA, 21 nt, Artificial Sequence
  Synthetic
gacauuagcguauuaaaaaga

SEQ ID NO: 214942 - RNA, 22 nt, Artificial Sequence
  Synthetic
ugacauuagcguauuaaaaaga

SEQ ID NO: 214943 - RNA, 23 nt, Artificial Sequence
  Synthetic
cugacauuagcguauuaaaaaga

SEQ ID NO: 214944 - RNA, 24 nt, Artificial Sequence
  Synthetic
ucugacauuagcguauuaaaaaga

SEQ ID NO: 214945 - RNA, 18 nt, Artificial Sequence
  Synthetic
ugacuauuauuaaaaaga

SEQ ID NO: 214946 - RNA, 19 nt, Artificial Sequence
  Synthetic
cugacuauuauuaaaaaga

SEQ ID NO: 214947 - RNA, 20 nt, Artificial Sequence
  Synthetic
acugacuauuauuaaaaaga

SEQ ID NO: 214948 - RNA, 21 nt, Artificial Sequence
  Synthetic
cacugacuauuauuaaaaaga

SEQ ID NO: 214949 - RNA, 22 nt, Artificial Sequence
  Synthetic
acacugacuauuauuaaaaaga

SEQ ID NO: 214950 - RNA, 23 nt, Artificial Sequence
  Synthetic
gacacugacuauuauuaaaaaga

SEQ ID NO: 214951 - RNA, 24 nt, Artificial Sequence
  Synthetic
agacacugacuauuauuaaaaaga

SEQ ID NO: 214952 - RNA, 18 nt, Artificial Sequence
  Synthetic
gguacaaauuuaaaaaga

SEQ ID NO: 214953 - RNA, 19 nt, Artificial Sequence
  Synthetic
ugguacaaauuuaaaaaga

SEQ ID NO: 214954 - RNA, 20 nt, Artificial Sequence
  Synthetic
augguacaaauuuaaaaaga

SEQ ID NO: 214955 - RNA, 21 nt, Artificial Sequence
  Synthetic
gaugguacaaauuuaaaaaga

SEQ ID NO: 214956 - RNA, 22 nt, Artificial Sequence
  Synthetic
ugaugguacaaauuuaaaaaga

SEQ ID NO: 214957 - RNA, 23 nt, Artificial Sequence
  Synthetic
uugaugguacaaauuuaaaaaga

SEQ ID NO: 214958 - RNA, 24 nt, Artificial Sequence
  Synthetic
auugaugguacaaauuuaaaaaga

SEQ ID NO: 214959 - RNA, 18 nt, Artificial Sequence
  Synthetic
agaaagcuacacaaaaga

SEQ ID NO: 214960 - RNA, 19 nt, Artificial Sequence
  Synthetic
aagaaagcuacacaaaaga

SEQ ID NO: 214961 - RNA, 20 nt, Artificial Sequence
  Synthetic
gaagaaagcuacacaaaaga

SEQ ID NO: 214962 - RNA, 21 nt, Artificial Sequence
  Synthetic
ggaagaaagcuacacaaaaga

SEQ ID NO: 214963 - RNA, 22 nt, Artificial Sequence
  Synthetic
gggaagaaagcuacacaaaaga

SEQ ID NO: 214964 - RNA, 23 nt, Artificial Sequence
  Synthetic
ugggaagaaagcuacacaaaaga

SEQ ID NO: 214965 - RNA, 24 nt, Artificial Sequence
  Synthetic
cugggaagaaagcuacacaaaaga

SEQ ID NO: 214966 - RNA, 18 nt, Artificial Sequence
  Synthetic
gucuggggugacaaaaga

SEQ ID NO: 214967 - RNA, 19 nt, Artificial Sequence
  Synthetic
ugucuggggugacaaaaga

SEQ ID NO: 214968 - RNA, 20 nt, Artificial Sequence
  Synthetic
gugucuggggugacaaaaga

SEQ ID NO: 214969 - RNA, 21 nt, Artificial Sequence
  Synthetic
ggugucuggggugacaaaaga

SEQ ID NO: 214970 - RNA, 22 nt, Artificial Sequence
  Synthetic
uggugucuggggugacaaaaga

SEQ ID NO: 214971 - RNA, 23 nt, Artificial Sequence
  Synthetic
guggugucuggggugacaaaaga

SEQ ID NO: 214972 - RNA, 24 nt, Artificial Sequence
  Synthetic
uguggugucuggggugacaaaaga

SEQ ID NO: 214973 - RNA, 18 nt, Artificial Sequence
  Synthetic
ugggcaauuuacaaaaga

SEQ ID NO: 214974 - RNA, 19 nt, Artificial Sequence
  Synthetic
cugggcaauuuacaaaaga

SEQ ID NO: 214975 - RNA, 20 nt, Artificial Sequence
  Synthetic
acugggcaauuuacaaaaga

SEQ ID NO: 214976 - RNA, 21 nt, Artificial Sequence
  Synthetic
gacugggcaauuuacaaaaga

SEQ ID NO: 214977 - RNA, 22 nt, Artificial Sequence
  Synthetic
agacugggcaauuuacaaaaga

SEQ ID NO: 214978 - RNA, 23 nt, Artificial Sequence
  Synthetic
gagacugggcaauuuacaaaaga

SEQ ID NO: 214979 - RNA, 24 nt, Artificial Sequence
  Synthetic
cgagacugggcaauuuacaaaaga

SEQ ID NO: 214980 - RNA, 18 nt, Artificial Sequence
  Synthetic
agguggaagaccaaaaga

SEQ ID NO: 214981 - RNA, 19 nt, Artificial Sequence
  Synthetic
aagguggaagaccaaaaga

SEQ ID NO: 214982 - RNA, 20 nt, Artificial Sequence
  Synthetic
gaagguggaagaccaaaaga

SEQ ID NO: 214983 - RNA, 21 nt, Artificial Sequence
  Synthetic
ggaagguggaagaccaaaaga

SEQ ID NO: 214984 - RNA, 22 nt, Artificial Sequence
  Synthetic
uggaagguggaagaccaaaaga

SEQ ID NO: 214985 - RNA, 23 nt, Artificial Sequence
  Synthetic
auggaagguggaagaccaaaaga

SEQ ID NO: 214986 - RNA, 24 nt, Artificial Sequence
  Synthetic
gauggaagguggaagaccaaaaga

SEQ ID NO: 214987 - RNA, 18 nt, Artificial Sequence
  Synthetic
acagaggcgaccaaaaga

SEQ ID NO: 214988 - RNA, 19 nt, Artificial Sequence
  Synthetic
uacagaggcgaccaaaaga

SEQ ID NO: 214989 - RNA, 20 nt, Artificial Sequence
  Synthetic
auacagaggcgaccaaaaga

SEQ ID NO: 214990 - RNA, 21 nt, Artificial Sequence
  Synthetic
aauacagaggcgaccaaaaga

SEQ ID NO: 214991 - RNA, 22 nt, Artificial Sequence
  Synthetic
gaauacagaggcgaccaaaaga

SEQ ID NO: 214992 - RNA, 23 nt, Artificial Sequence
  Synthetic
agaauacagaggcgaccaaaaga

SEQ ID NO: 214993 - RNA, 24 nt, Artificial Sequence
  Synthetic
gagaauacagaggcgaccaaaaga

SEQ ID NO: 214994 - RNA, 18 nt, Artificial Sequence
  Synthetic
uuuauuaucagcaaaaga

SEQ ID NO: 214995 - RNA, 19 nt, Artificial Sequence
  Synthetic
auuuauuaucagcaaaaga

SEQ ID NO: 214996 - RNA, 20 nt, Artificial Sequence
  Synthetic
uauuuauuaucagcaaaaga

SEQ ID NO: 214997 - RNA, 21 nt, Artificial Sequence
  Synthetic
auauuuauuaucagcaaaaga

SEQ ID NO: 214998 - RNA, 22 nt, Artificial Sequence
  Synthetic
cauauuuauuaucagcaaaaga

SEQ ID NO: 214999 - RNA, 23 nt, Artificial Sequence
  Synthetic
acauauuuauuaucagcaaaaga

SEQ ID NO: 215000 - RNA, 24 nt, Artificial Sequence
  Synthetic
cacauauuuauuaucagcaaaaga

SEQ ID NO: 215001 - RNA, 18 nt, Artificial Sequence
  Synthetic
aggagaaugagcaaaaga

SEQ ID NO: 215002 - RNA, 19 nt, Artificial Sequence
  Synthetic
gaggagaaugagcaaaaga

SEQ ID NO: 215003 - RNA, 20 nt, Artificial Sequence
  Synthetic
ggaggagaaugagcaaaaga

SEQ ID NO: 215004 - RNA, 21 nt, Artificial Sequence
  Synthetic
aggaggagaaugagcaaaaga

SEQ ID NO: 215005 - RNA, 22 nt, Artificial Sequence
  Synthetic
aaggaggagaaugagcaaaaga

SEQ ID NO: 215006 - RNA, 23 nt, Artificial Sequence
  Synthetic
gaaggaggagaaugagcaaaaga

SEQ ID NO: 215007 - RNA, 24 nt, Artificial Sequence
  Synthetic
ggaaggaggagaaugagcaaaaga

SEQ ID NO: 215008 - RNA, 18 nt, Artificial Sequence
  Synthetic
aaaagucuucucaaaaga

SEQ ID NO: 215009 - RNA, 19 nt, Artificial Sequence
  Synthetic
caaaagucuucucaaaaga

SEQ ID NO: 215010 - RNA, 20 nt, Artificial Sequence
  Synthetic
ucaaaagucuucucaaaaga

SEQ ID NO: 215011 - RNA, 21 nt, Artificial Sequence
  Synthetic
uucaaaagucuucucaaaaga

SEQ ID NO: 215012 - RNA, 22 nt, Artificial Sequence
  Synthetic
uuucaaaagucuucucaaaaga

SEQ ID NO: 215013 - RNA, 23 nt, Artificial Sequence
  Synthetic
auuucaaaagucuucucaaaaga

SEQ ID NO: 215014 - RNA, 24 nt, Artificial Sequence
  Synthetic
gauuucaaaagucuucucaaaaga

SEQ ID NO: 215015 - RNA, 18 nt, Artificial Sequence
  Synthetic
caaaaaaaaaagaaaaga

SEQ ID NO: 215016 - RNA, 19 nt, Artificial Sequence
  Synthetic
ucaaaaaaaaaagaaaaga

SEQ ID NO: 215017 - RNA, 20 nt, Artificial Sequence
  Synthetic
cucaaaaaaaaaagaaaaga

SEQ ID NO: 215018 - RNA, 21 nt, Artificial Sequence
  Synthetic
ucucaaaaaaaaaagaaaaga

SEQ ID NO: 215019 - RNA, 22 nt, Artificial Sequence
  Synthetic
gucucaaaaaaaaaagaaaaga

SEQ ID NO: 215020 - RNA, 23 nt, Artificial Sequence
  Synthetic
ugucucaaaaaaaaaagaaaaga

SEQ ID NO: 215021 - RNA, 24 nt, Artificial Sequence
  Synthetic
cugucucaaaaaaaaaagaaaaga

SEQ ID NO: 215022 - RNA, 18 nt, Artificial Sequence
  Synthetic
uccaauccaaagaaaaga

SEQ ID NO: 215023 - RNA, 19 nt, Artificial Sequence
  Synthetic
auccaauccaaagaaaaga

SEQ ID NO: 215024 - RNA, 20 nt, Artificial Sequence
  Synthetic
aauccaauccaaagaaaaga

SEQ ID NO: 215025 - RNA, 21 nt, Artificial Sequence
  Synthetic
uaauccaauccaaagaaaaga

SEQ ID NO: 215026 - RNA, 22 nt, Artificial Sequence
  Synthetic
auaauccaauccaaagaaaaga

SEQ ID NO: 215027 - RNA, 23 nt, Artificial Sequence
  Synthetic
gauaauccaauccaaagaaaaga

SEQ ID NO: 215028 - RNA, 24 nt, Artificial Sequence
  Synthetic
ggauaauccaauccaaagaaaaga

SEQ ID NO: 215029 - RNA, 18 nt, Artificial Sequence
  Synthetic
aaggaaagaaagaaaaga

SEQ ID NO: 215030 - RNA, 19 nt, Artificial Sequence
  Synthetic
aaaggaaagaaagaaaaga

SEQ ID NO: 215031 - RNA, 20 nt, Artificial Sequence
  Synthetic
aaaaggaaagaaagaaaaga

SEQ ID NO: 215032 - RNA, 21 nt, Artificial Sequence
  Synthetic
aaaaaggaaagaaagaaaaga

SEQ ID NO: 215033 - RNA, 22 nt, Artificial Sequence
  Synthetic
aaaaaaggaaagaaagaaaaga

SEQ ID NO: 215034 - RNA, 23 nt, Artificial Sequence
  Synthetic
aaaaaaaggaaagaaagaaaaga

SEQ ID NO: 215035 - RNA, 24 nt, Artificial Sequence
  Synthetic
uaaaaaaaggaaagaaagaaaaga

SEQ ID NO: 215036 - RNA, 18 nt, Artificial Sequence
  Synthetic
ucuaugugaaagaaaaga

SEQ ID NO: 215037 - RNA, 19 nt, Artificial Sequence
  Synthetic
aucuaugugaaagaaaaga

SEQ ID NO: 215038 - RNA, 20 nt, Artificial Sequence
  Synthetic
uaucuaugugaaagaaaaga

SEQ ID NO: 215039 - RNA, 21 nt, Artificial Sequence
  Synthetic
auaucuaugugaaagaaaaga

SEQ ID NO: 215040 - RNA, 22 nt, Artificial Sequence
  Synthetic
aauaucuaugugaaagaaaaga

SEQ ID NO: 215041 - RNA, 23 nt, Artificial Sequence
  Synthetic
aaauaucuaugugaaagaaaaga

SEQ ID NO: 215042 - RNA, 24 nt, Artificial Sequence
  Synthetic
gaaauaucuaugugaaagaaaaga

SEQ ID NO: 215043 - RNA, 18 nt, Artificial Sequence
  Synthetic
cuaauaaagaagaaaaga

SEQ ID NO: 215044 - RNA, 19 nt, Artificial Sequence
  Synthetic
acuaauaaagaagaaaaga

SEQ ID NO: 215045 - RNA, 20 nt, Artificial Sequence
  Synthetic
gacuaauaaagaagaaaaga

SEQ ID NO: 215046 - RNA, 21 nt, Artificial Sequence
  Synthetic
agacuaauaaagaagaaaaga

SEQ ID NO: 215047 - RNA, 22 nt, Artificial Sequence
  Synthetic
cagacuaauaaagaagaaaaga

SEQ ID NO: 215048 - RNA, 23 nt, Artificial Sequence
  Synthetic
ccagacuaauaaagaagaaaaga

SEQ ID NO: 215049 - RNA, 24 nt, Artificial Sequence
  Synthetic
gccagacuaauaaagaagaaaaga

SEQ ID NO: 215050 - RNA, 18 nt, Artificial Sequence
  Synthetic
gcuggagaacagaaaaga

SEQ ID NO: 215051 - RNA, 19 nt, Artificial Sequence
  Synthetic
agcuggagaacagaaaaga

SEQ ID NO: 215052 - RNA, 20 nt, Artificial Sequence
  Synthetic
gagcuggagaacagaaaaga

SEQ ID NO: 215053 - RNA, 21 nt, Artificial Sequence
  Synthetic
ugagcuggagaacagaaaaga

SEQ ID NO: 215054 - RNA, 22 nt, Artificial Sequence
  Synthetic
uugagcuggagaacagaaaaga

SEQ ID NO: 215055 - RNA, 23 nt, Artificial Sequence
  Synthetic
auugagcuggagaacagaaaaga

SEQ ID NO: 215056 - RNA, 24 nt, Artificial Sequence
  Synthetic
uauugagcuggagaacagaaaaga

SEQ ID NO: 215057 - RNA, 18 nt, Artificial Sequence
  Synthetic
gugagcacccagaaaaga

SEQ ID NO: 215058 - RNA, 19 nt, Artificial Sequence
  Synthetic
ugugagcacccagaaaaga

SEQ ID NO: 215059 - RNA, 20 nt, Artificial Sequence
  Synthetic
augugagcacccagaaaaga

SEQ ID NO: 215060 - RNA, 21 nt, Artificial Sequence
  Synthetic
aaugugagcacccagaaaaga

SEQ ID NO: 215061 - RNA, 22 nt, Artificial Sequence
  Synthetic
aaaugugagcacccagaaaaga

SEQ ID NO: 215062 - RNA, 23 nt, Artificial Sequence
  Synthetic
gaaaugugagcacccagaaaaga

SEQ ID NO: 215063 - RNA, 24 nt, Artificial Sequence
  Synthetic
ggaaaugugagcacccagaaaaga

SEQ ID NO: 215064 - RNA, 18 nt, Artificial Sequence
  Synthetic
aggcagggagagaaaaga

SEQ ID NO: 215065 - RNA, 19 nt, Artificial Sequence
  Synthetic
caggcagggagagaaaaga

SEQ ID NO: 215066 - RNA, 20 nt, Artificial Sequence
  Synthetic
ccaggcagggagagaaaaga

SEQ ID NO: 215067 - RNA, 21 nt, Artificial Sequence
  Synthetic
uccaggcagggagagaaaaga

SEQ ID NO: 215068 - RNA, 22 nt, Artificial Sequence
  Synthetic
uuccaggcagggagagaaaaga

SEQ ID NO: 215069 - RNA, 23 nt, Artificial Sequence
  Synthetic
auuccaggcagggagagaaaaga

SEQ ID NO: 215070 - RNA, 24 nt, Artificial Sequence
  Synthetic
uauuccaggcagggagagaaaaga

SEQ ID NO: 215071 - RNA, 18 nt, Artificial Sequence
  Synthetic
auucaaaaauagaaaaga

SEQ ID NO: 215072 - RNA, 19 nt, Artificial Sequence
  Synthetic
gauucaaaaauagaaaaga

SEQ ID NO: 215073 - RNA, 20 nt, Artificial Sequence
  Synthetic
ggauucaaaaauagaaaaga

SEQ ID NO: 215074 - RNA, 21 nt, Artificial Sequence
  Synthetic
gggauucaaaaauagaaaaga

SEQ ID NO: 215075 - RNA, 22 nt, Artificial Sequence
  Synthetic
ugggauucaaaaauagaaaaga

SEQ ID NO: 215076 - RNA, 23 nt, Artificial Sequence
  Synthetic
uugggauucaaaaauagaaaaga

SEQ ID NO: 215077 - RNA, 24 nt, Artificial Sequence
  Synthetic
uuugggauucaaaaauagaaaaga

SEQ ID NO: 215078 - RNA, 18 nt, Artificial Sequence
  Synthetic
aaagcuuaauagaaaaga

SEQ ID NO: 215079 - RNA, 19 nt, Artificial Sequence
  Synthetic
uaaagcuuaauagaaaaga

SEQ ID NO: 215080 - RNA, 20 nt, Artificial Sequence
  Synthetic
auaaagcuuaauagaaaaga

SEQ ID NO: 215081 - RNA, 21 nt, Artificial Sequence
  Synthetic
aauaaagcuuaauagaaaaga

SEQ ID NO: 215082 - RNA, 22 nt, Artificial Sequence
  Synthetic
aaauaaagcuuaauagaaaaga

SEQ ID NO: 215083 - RNA, 23 nt, Artificial Sequence
  Synthetic
caaauaaagcuuaauagaaaaga

SEQ ID NO: 215084 - RNA, 24 nt, Artificial Sequence
  Synthetic
gcaaauaaagcuuaauagaaaaga

SEQ ID NO: 215085 - RNA, 18 nt, Artificial Sequence
  Synthetic
ggugauaucuagaaaaga

SEQ ID NO: 215086 - RNA, 19 nt, Artificial Sequence
  Synthetic
gggugauaucuagaaaaga

SEQ ID NO: 215087 - RNA, 20 nt, Artificial Sequence
  Synthetic
agggugauaucuagaaaaga

SEQ ID NO: 215088 - RNA, 21 nt, Artificial Sequence
  Synthetic
aagggugauaucuagaaaaga

SEQ ID NO: 215089 - RNA, 22 nt, Artificial Sequence
  Synthetic
gaagggugauaucuagaaaaga

SEQ ID NO: 215090 - RNA, 23 nt, Artificial Sequence
  Synthetic
ggaagggugauaucuagaaaaga

SEQ ID NO: 215091 - RNA, 24 nt, Artificial Sequence
  Synthetic
aggaagggugauaucuagaaaaga

SEQ ID NO: 215092 - RNA, 18 nt, Artificial Sequence
  Synthetic
cacggagaaacgaaaaga

SEQ ID NO: 215093 - RNA, 19 nt, Artificial Sequence
  Synthetic
ccacggagaaacgaaaaga

SEQ ID NO: 215094 - RNA, 20 nt, Artificial Sequence
  Synthetic
gccacggagaaacgaaaaga

SEQ ID NO: 215095 - RNA, 21 nt, Artificial Sequence
  Synthetic
agccacggagaaacgaaaaga

SEQ ID NO: 215096 - RNA, 22 nt, Artificial Sequence
  Synthetic
aagccacggagaaacgaaaaga

SEQ ID NO: 215097 - RNA, 23 nt, Artificial Sequence
  Synthetic
gaagccacggagaaacgaaaaga

SEQ ID NO: 215098 - RNA, 24 nt, Artificial Sequence
  Synthetic
agaagccacggagaaacgaaaaga

SEQ ID NO: 215099 - RNA, 18 nt, Artificial Sequence
  Synthetic
augacaugguggaaaaga

SEQ ID NO: 215100 - RNA, 19 nt, Artificial Sequence
  Synthetic
uaugacaugguggaaaaga

SEQ ID NO: 215101 - RNA, 20 nt, Artificial Sequence
  Synthetic
cuaugacaugguggaaaaga

SEQ ID NO: 215102 - RNA, 21 nt, Artificial Sequence
  Synthetic
acuaugacaugguggaaaaga

SEQ ID NO: 215103 - RNA, 22 nt, Artificial Sequence
  Synthetic
uacuaugacaugguggaaaaga

SEQ ID NO: 215104 - RNA, 23 nt, Artificial Sequence
  Synthetic
guacuaugacaugguggaaaaga

SEQ ID NO: 215105 - RNA, 24 nt, Artificial Sequence
  Synthetic
aguacuaugacaugguggaaaaga

SEQ ID NO: 215106 - RNA, 18 nt, Artificial Sequence
  Synthetic
gagacauauuugaaaaga

SEQ ID NO: 215107 - RNA, 19 nt, Artificial Sequence
  Synthetic
ugagacauauuugaaaaga

SEQ ID NO: 215108 - RNA, 20 nt, Artificial Sequence
  Synthetic
uugagacauauuugaaaaga

SEQ ID NO: 215109 - RNA, 21 nt, Artificial Sequence
  Synthetic
uuugagacauauuugaaaaga

SEQ ID NO: 215110 - RNA, 22 nt, Artificial Sequence
  Synthetic
auuugagacauauuugaaaaga

SEQ ID NO: 215111 - RNA, 23 nt, Artificial Sequence
  Synthetic
aauuugagacauauuugaaaaga

SEQ ID NO: 215112 - RNA, 24 nt, Artificial Sequence
  Synthetic
uaauuugagacauauuugaaaaga

SEQ ID NO: 215113 - RNA, 18 nt, Artificial Sequence
  Synthetic
auuacacuaaauaaaaga

SEQ ID NO: 215114 - RNA, 19 nt, Artificial Sequence
  Synthetic
uauuacacuaaauaaaaga

SEQ ID NO: 215115 - RNA, 20 nt, Artificial Sequence
  Synthetic
auauuacacuaaauaaaaga

SEQ ID NO: 215116 - RNA, 21 nt, Artificial Sequence
  Synthetic
aauauuacacuaaauaaaaga

SEQ ID NO: 215117 - RNA, 22 nt, Artificial Sequence
  Synthetic
aaauauuacacuaaauaaaaga

SEQ ID NO: 215118 - RNA, 23 nt, Artificial Sequence
  Synthetic
aaaauauuacacuaaauaaaaga

SEQ ID NO: 215119 - RNA, 24 nt, Artificial Sequence
  Synthetic
aaaaauauuacacuaaauaaaaga

SEQ ID NO: 215120 - RNA, 18 nt, Artificial Sequence
  Synthetic
agcagggauaauaaaaga

SEQ ID NO: 215121 - RNA, 19 nt, Artificial Sequence
  Synthetic
aagcagggauaauaaaaga

SEQ ID NO: 215122 - RNA, 20 nt, Artificial Sequence
  Synthetic
aaagcagggauaauaaaaga

SEQ ID NO: 215123 - RNA, 21 nt, Artificial Sequence
  Synthetic
uaaagcagggauaauaaaaga

SEQ ID NO: 215124 - RNA, 22 nt, Artificial Sequence
  Synthetic
cuaaagcagggauaauaaaaga

SEQ ID NO: 215125 - RNA, 23 nt, Artificial Sequence
  Synthetic
gcuaaagcagggauaauaaaaga

SEQ ID NO: 215126 - RNA, 24 nt, Artificial Sequence
  Synthetic
agcuaaagcagggauaauaaaaga

SEQ ID NO: 215127 - RNA, 18 nt, Artificial Sequence
  Synthetic
gcacucccuaauaaaaga

SEQ ID NO: 215128 - RNA, 19 nt, Artificial Sequence
  Synthetic
ugcacucccuaauaaaaga

SEQ ID NO: 215129 - RNA, 20 nt, Artificial Sequence
  Synthetic
cugcacucccuaauaaaaga

SEQ ID NO: 215130 - RNA, 21 nt, Artificial Sequence
  Synthetic
ccugcacucccuaauaaaaga

SEQ ID NO: 215131 - RNA, 22 nt, Artificial Sequence
  Synthetic
gccugcacucccuaauaaaaga

SEQ ID NO: 215132 - RNA, 23 nt, Artificial Sequence
  Synthetic
ggccugcacucccuaauaaaaga

SEQ ID NO: 215133 - RNA, 24 nt, Artificial Sequence
  Synthetic
gggccugcacucccuaauaaaaga

SEQ ID NO: 215134 - RNA, 18 nt, Artificial Sequence
  Synthetic
uaagaaaaacauaaaaga

SEQ ID NO: 215135 - RNA, 19 nt, Artificial Sequence
  Synthetic
auaagaaaaacauaaaaga

SEQ ID NO: 215136 - RNA, 20 nt, Artificial Sequence
  Synthetic
uauaagaaaaacauaaaaga

SEQ ID NO: 215137 - RNA, 21 nt, Artificial Sequence
  Synthetic
cuauaagaaaaacauaaaaga

SEQ ID NO: 215138 - RNA, 22 nt, Artificial Sequence
  Synthetic
ucuauaagaaaaacauaaaaga

SEQ ID NO: 215139 - RNA, 23 nt, Artificial Sequence
  Synthetic
cucuauaagaaaaacauaaaaga

SEQ ID NO: 215140 - RNA, 24 nt, Artificial Sequence
  Synthetic
ccucuauaagaaaaacauaaaaga

SEQ ID NO: 215141 - RNA, 18 nt, Artificial Sequence
  Synthetic
auggacugugauaaaaga

SEQ ID NO: 215142 - RNA, 19 nt, Artificial Sequence
  Synthetic
gauggacugugauaaaaga

SEQ ID NO: 215143 - RNA, 20 nt, Artificial Sequence
  Synthetic
ugauggacugugauaaaaga

SEQ ID NO: 215144 - RNA, 21 nt, Artificial Sequence
  Synthetic
uugauggacugugauaaaaga

SEQ ID NO: 215145 - RNA, 22 nt, Artificial Sequence
  Synthetic
uuugauggacugugauaaaaga

SEQ ID NO: 215146 - RNA, 23 nt, Artificial Sequence
  Synthetic
uuuugauggacugugauaaaaga

SEQ ID NO: 215147 - RNA, 24 nt, Artificial Sequence
  Synthetic
auuuugauggacugugauaaaaga

SEQ ID NO: 215148 - RNA, 18 nt, Artificial Sequence
  Synthetic
gcuaauaauuauaaaaga

SEQ ID NO: 215149 - RNA, 19 nt, Artificial Sequence
  Synthetic
ugcuaauaauuauaaaaga

SEQ ID NO: 215150 - RNA, 20 nt, Artificial Sequence
  Synthetic
uugcuaauaauuauaaaaga

SEQ ID NO: 215151 - RNA, 21 nt, Artificial Sequence
  Synthetic
uuugcuaauaauuauaaaaga

SEQ ID NO: 215152 - RNA, 22 nt, Artificial Sequence
  Synthetic
auuugcuaauaauuauaaaaga

SEQ ID NO: 215153 - RNA, 23 nt, Artificial Sequence
  Synthetic
uauuugcuaauaauuauaaaaga

SEQ ID NO: 215154 - RNA, 24 nt, Artificial Sequence
  Synthetic
guauuugcuaauaauuauaaaaga

SEQ ID NO: 215155 - RNA, 18 nt, Artificial Sequence
  Synthetic
ugaaacuuuuauaaaaga

SEQ ID NO: 215156 - RNA, 19 nt, Artificial Sequence
  Synthetic
uugaaacuuuuauaaaaga

SEQ ID NO: 215157 - RNA, 20 nt, Artificial Sequence
  Synthetic
auugaaacuuuuauaaaaga

SEQ ID NO: 215158 - RNA, 21 nt, Artificial Sequence
  Synthetic
uauugaaacuuuuauaaaaga

SEQ ID NO: 215159 - RNA, 22 nt, Artificial Sequence
  Synthetic
uuauugaaacuuuuauaaaaga

SEQ ID NO: 215160 - RNA, 23 nt, Artificial Sequence
  Synthetic
cuuauugaaacuuuuauaaaaga

SEQ ID NO: 215161 - RNA, 24 nt, Artificial Sequence
  Synthetic
acuuauugaaacuuuuauaaaaga

SEQ ID NO: 215162 - RNA, 18 nt, Artificial Sequence
  Synthetic
uauaugugaacuaaaaga

SEQ ID NO: 215163 - RNA, 19 nt, Artificial Sequence
  Synthetic
cuauaugugaacuaaaaga

SEQ ID NO: 215164 - RNA, 20 nt, Artificial Sequence
  Synthetic
acuauaugugaacuaaaaga

SEQ ID NO: 215165 - RNA, 21 nt, Artificial Sequence
  Synthetic
gacuauaugugaacuaaaaga

SEQ ID NO: 215166 - RNA, 22 nt, Artificial Sequence
  Synthetic
ugacuauaugugaacuaaaaga

SEQ ID NO: 215167 - RNA, 23 nt, Artificial Sequence
  Synthetic
gugacuauaugugaacuaaaaga

SEQ ID NO: 215168 - RNA, 24 nt, Artificial Sequence
  Synthetic
ugugacuauaugugaacuaaaaga

SEQ ID NO: 215169 - RNA, 18 nt, Artificial Sequence
  Synthetic
uugugccuuuguaaaaga

SEQ ID NO: 215170 - RNA, 19 nt, Artificial Sequence
  Synthetic
uuugugccuuuguaaaaga

SEQ ID NO: 215171 - RNA, 20 nt, Artificial Sequence
  Synthetic
uuuugugccuuuguaaaaga

SEQ ID NO: 215172 - RNA, 21 nt, Artificial Sequence
  Synthetic
cuuuugugccuuuguaaaaga

SEQ ID NO: 215173 - RNA, 22 nt, Artificial Sequence
  Synthetic
acuuuugugccuuuguaaaaga

SEQ ID NO: 215174 - RNA, 23 nt, Artificial Sequence
  Synthetic
uacuuuugugccuuuguaaaaga

SEQ ID NO: 215175 - RNA, 24 nt, Artificial Sequence
  Synthetic
uuacuuuugugccuuuguaaaaga

SEQ ID NO: 215176 - RNA, 18 nt, Artificial Sequence
  Synthetic
acauacauuauuaaaaga

SEQ ID NO: 215177 - RNA, 19 nt, Artificial Sequence
  Synthetic
uacauacauuauuaaaaga

SEQ ID NO: 215178 - RNA, 20 nt, Artificial Sequence
  Synthetic
auacauacauuauuaaaaga

SEQ ID NO: 215179 - RNA, 21 nt, Artificial Sequence
  Synthetic
aauacauacauuauuaaaaga

SEQ ID NO: 215180 - RNA, 22 nt, Artificial Sequence
  Synthetic
caauacauacauuauuaaaaga

SEQ ID NO: 215181 - RNA, 23 nt, Artificial Sequence
  Synthetic
ucaauacauacauuauuaaaaga

SEQ ID NO: 215182 - RNA, 24 nt, Artificial Sequence
  Synthetic
aucaauacauacauuauuaaaaga

SEQ ID NO: 215183 - RNA, 18 nt, Artificial Sequence
  Synthetic
cuuugaaaucuuaaaaga

SEQ ID NO: 215184 - RNA, 19 nt, Artificial Sequence
  Synthetic
acuuugaaaucuuaaaaga

SEQ ID NO: 215185 - RNA, 20 nt, Artificial Sequence
  Synthetic
aacuuugaaaucuuaaaaga

SEQ ID NO: 215186 - RNA, 21 nt, Artificial Sequence
  Synthetic
gaacuuugaaaucuuaaaaga

SEQ ID NO: 215187 - RNA, 22 nt, Artificial Sequence
  Synthetic
ugaacuuugaaaucuuaaaaga

SEQ ID NO: 215188 - RNA, 23 nt, Artificial Sequence
  Synthetic
augaacuuugaaaucuuaaaaga

SEQ ID NO: 215189 - RNA, 24 nt, Artificial Sequence
  Synthetic
aaugaacuuugaaaucuuaaaaga

SEQ ID NO: 215190 - RNA, 18 nt, Artificial Sequence
  Synthetic
cuucauauucaacaaaga

SEQ ID NO: 215191 - RNA, 19 nt, Artificial Sequence
  Synthetic
acuucauauucaacaaaga

SEQ ID NO: 215192 - RNA, 20 nt, Artificial Sequence
  Synthetic
aacuucauauucaacaaaga

SEQ ID NO: 215193 - RNA, 21 nt, Artificial Sequence
  Synthetic
aaacuucauauucaacaaaga

SEQ ID NO: 215194 - RNA, 22 nt, Artificial Sequence
  Synthetic
gaaacuucauauucaacaaaga

SEQ ID NO: 215195 - RNA, 23 nt, Artificial Sequence
  Synthetic
ggaaacuucauauucaacaaaga

SEQ ID NO: 215196 - RNA, 24 nt, Artificial Sequence
  Synthetic
aggaaacuucauauucaacaaaga

SEQ ID NO: 215197 - RNA, 18 nt, Artificial Sequence
  Synthetic
ggaaggagagaacaaaga

SEQ ID NO: 215198 - RNA, 19 nt, Artificial Sequence
  Synthetic
aggaaggagagaacaaaga

SEQ ID NO: 215199 - RNA, 20 nt, Artificial Sequence
  Synthetic
aaggaaggagagaacaaaga

SEQ ID NO: 215200 - RNA, 21 nt, Artificial Sequence
  Synthetic
aaaggaaggagagaacaaaga

SEQ ID NO: 215201 - RNA, 22 nt, Artificial Sequence
  Synthetic
gaaaggaaggagagaacaaaga

SEQ ID NO: 215202 - RNA, 23 nt, Artificial Sequence
  Synthetic
ggaaaggaaggagagaacaaaga

SEQ ID NO: 215203 - RNA, 24 nt, Artificial Sequence
  Synthetic
aggaaaggaaggagagaacaaaga

SEQ ID NO: 215204 - RNA, 18 nt, Artificial Sequence
  Synthetic
aguuggaacacacaaaga

SEQ ID NO: 215205 - RNA, 19 nt, Artificial Sequence
  Synthetic
aaguuggaacacacaaaga

SEQ ID NO: 215206 - RNA, 20 nt, Artificial Sequence
  Synthetic
gaaguuggaacacacaaaga

SEQ ID NO: 215207 - RNA, 21 nt, Artificial Sequence
  Synthetic
agaaguuggaacacacaaaga

SEQ ID NO: 215208 - RNA, 22 nt, Artificial Sequence
  Synthetic
aagaaguuggaacacacaaaga

SEQ ID NO: 215209 - RNA, 23 nt, Artificial Sequence
  Synthetic
caagaaguuggaacacacaaaga

SEQ ID NO: 215210 - RNA, 24 nt, Artificial Sequence
  Synthetic
gcaagaaguuggaacacacaaaga

SEQ ID NO: 215211 - RNA, 18 nt, Artificial Sequence
  Synthetic
aacauauggacacaaaga

SEQ ID NO: 215212 - RNA, 19 nt, Artificial Sequence
  Synthetic
gaacauauggacacaaaga

SEQ ID NO: 215213 - RNA, 20 nt, Artificial Sequence
  Synthetic
agaacauauggacacaaaga

SEQ ID NO: 215214 - RNA, 21 nt, Artificial Sequence
  Synthetic
gagaacauauggacacaaaga

SEQ ID NO: 215215 - RNA, 22 nt, Artificial Sequence
  Synthetic
ugagaacauauggacacaaaga

SEQ ID NO: 215216 - RNA, 23 nt, Artificial Sequence
  Synthetic
augagaacauauggacacaaaga

SEQ ID NO: 215217 - RNA, 24 nt, Artificial Sequence
  Synthetic
gaugagaacauauggacacaaaga

SEQ ID NO: 215218 - RNA, 18 nt, Artificial Sequence
  Synthetic
uguaaccaaccacaaaga

SEQ ID NO: 215219 - RNA, 19 nt, Artificial Sequence
  Synthetic
auguaaccaaccacaaaga

SEQ ID NO: 215220 - RNA, 20 nt, Artificial Sequence
  Synthetic
aauguaaccaaccacaaaga

SEQ ID NO: 215221 - RNA, 21 nt, Artificial Sequence
  Synthetic
aaauguaaccaaccacaaaga

SEQ ID NO: 215222 - RNA, 22 nt, Artificial Sequence
  Synthetic
aaaauguaaccaaccacaaaga

SEQ ID NO: 215223 - RNA, 23 nt, Artificial Sequence
  Synthetic
uaaaauguaaccaaccacaaaga

SEQ ID NO: 215224 - RNA, 24 nt, Artificial Sequence
  Synthetic
cuaaaauguaaccaaccacaaaga

SEQ ID NO: 215225 - RNA, 18 nt, Artificial Sequence
  Synthetic
gagagaggaagacaaaga

SEQ ID NO: 215226 - RNA, 19 nt, Artificial Sequence
  Synthetic
agagagaggaagacaaaga

SEQ ID NO: 215227 - RNA, 20 nt, Artificial Sequence
  Synthetic
gagagagaggaagacaaaga

SEQ ID NO: 215228 - RNA, 21 nt, Artificial Sequence
  Synthetic
agagagagaggaagacaaaga

SEQ ID NO: 215229 - RNA, 22 nt, Artificial Sequence
  Synthetic
aagagagagaggaagacaaaga

SEQ ID NO: 215230 - RNA, 23 nt, Artificial Sequence
  Synthetic
aaagagagagaggaagacaaaga

SEQ ID NO: 215231 - RNA, 24 nt, Artificial Sequence
  Synthetic
gaaagagagagaggaagacaaaga

SEQ ID NO: 215232 - RNA, 18 nt, Artificial Sequence
  Synthetic
caucaaaaaauacaaaga

SEQ ID NO: 215233 - RNA, 19 nt, Artificial Sequence
  Synthetic
gcaucaaaaaauacaaaga

SEQ ID NO: 215234 - RNA, 20 nt, Artificial Sequence
  Synthetic
agcaucaaaaaauacaaaga

SEQ ID NO: 215235 - RNA, 21 nt, Artificial Sequence
  Synthetic
cagcaucaaaaaauacaaaga

SEQ ID NO: 215236 - RNA, 22 nt, Artificial Sequence
  Synthetic
ucagcaucaaaaaauacaaaga

SEQ ID NO: 215237 - RNA, 23 nt, Artificial Sequence
  Synthetic
cucagcaucaaaaaauacaaaga

SEQ ID NO: 215238 - RNA, 24 nt, Artificial Sequence
  Synthetic
ucucagcaucaaaaaauacaaaga

SEQ ID NO: 215239 - RNA, 18 nt, Artificial Sequence
  Synthetic
uaacaauuacuacaaaga

SEQ ID NO: 215240 - RNA, 19 nt, Artificial Sequence
  Synthetic
auaacaauuacuacaaaga

SEQ ID NO: 215241 - RNA, 20 nt, Artificial Sequence
  Synthetic
cauaacaauuacuacaaaga

SEQ ID NO: 215242 - RNA, 21 nt, Artificial Sequence
  Synthetic
gcauaacaauuacuacaaaga

SEQ ID NO: 215243 - RNA, 22 nt, Artificial Sequence
  Synthetic
ugcauaacaauuacuacaaaga

SEQ ID NO: 215244 - RNA, 23 nt, Artificial Sequence
  Synthetic
cugcauaacaauuacuacaaaga

SEQ ID NO: 215245 - RNA, 24 nt, Artificial Sequence
  Synthetic
gcugcauaacaauuacuacaaaga

SEQ ID NO: 215246 - RNA, 18 nt, Artificial Sequence
  Synthetic
uuaaacuuccuacaaaga

SEQ ID NO: 215247 - RNA, 19 nt, Artificial Sequence
  Synthetic
cuuaaacuuccuacaaaga

SEQ ID NO: 215248 - RNA, 20 nt, Artificial Sequence
  Synthetic
acuuaaacuuccuacaaaga

SEQ ID NO: 215249 - RNA, 21 nt, Artificial Sequence
  Synthetic
aacuuaaacuuccuacaaaga

SEQ ID NO: 215250 - RNA, 22 nt, Artificial Sequence
  Synthetic
gaacuuaaacuuccuacaaaga

SEQ ID NO: 215251 - RNA, 23 nt, Artificial Sequence
  Synthetic
ggaacuuaaacuuccuacaaaga

SEQ ID NO: 215252 - RNA, 24 nt, Artificial Sequence
  Synthetic
uggaacuuaaacuuccuacaaaga

SEQ ID NO: 215253 - RNA, 18 nt, Artificial Sequence
  Synthetic
cauauucaacaccaaaga

SEQ ID NO: 215254 - RNA, 19 nt, Artificial Sequence
  Synthetic
acauauucaacaccaaaga

SEQ ID NO: 215255 - RNA, 20 nt, Artificial Sequence
  Synthetic
cacauauucaacaccaaaga

SEQ ID NO: 215256 - RNA, 21 nt, Artificial Sequence
  Synthetic
acacauauucaacaccaaaga

SEQ ID NO: 215257 - RNA, 22 nt, Artificial Sequence
  Synthetic
cacacauauucaacaccaaaga

SEQ ID NO: 215258 - RNA, 23 nt, Artificial Sequence
  Synthetic
acacacauauucaacaccaaaga

SEQ ID NO: 215259 - RNA, 24 nt, Artificial Sequence
  Synthetic
uacacacauauucaacaccaaaga

SEQ ID NO: 215260 - RNA, 18 nt, Artificial Sequence
  Synthetic
gacgguggucaccaaaga

SEQ ID NO: 215261 - RNA, 19 nt, Artificial Sequence
  Synthetic
ggacgguggucaccaaaga

SEQ ID NO: 215262 - RNA, 20 nt, Artificial Sequence
  Synthetic
uggacgguggucaccaaaga

SEQ ID NO: 215263 - RNA, 21 nt, Artificial Sequence
  Synthetic
auggacgguggucaccaaaga

SEQ ID NO: 215264 - RNA, 22 nt, Artificial Sequence
  Synthetic
aauggacgguggucaccaaaga

SEQ ID NO: 215265 - RNA, 23 nt, Artificial Sequence
  Synthetic
aaauggacgguggucaccaaaga

SEQ ID NO: 215266 - RNA, 24 nt, Artificial Sequence
  Synthetic
uaaauggacgguggucaccaaaga

SEQ ID NO: 215267 - RNA, 18 nt, Artificial Sequence
  Synthetic
gguaccauucaccaaaga

SEQ ID NO: 215268 - RNA, 19 nt, Artificial Sequence
  Synthetic
ggguaccauucaccaaaga

SEQ ID NO: 215269 - RNA, 20 nt, Artificial Sequence
  Synthetic
aggguaccauucaccaaaga

SEQ ID NO: 215270 - RNA, 21 nt, Artificial Sequence
  Synthetic
caggguaccauucaccaaaga

SEQ ID NO: 215271 - RNA, 22 nt, Artificial Sequence
  Synthetic
gcaggguaccauucaccaaaga

SEQ ID NO: 215272 - RNA, 23 nt, Artificial Sequence
  Synthetic
agcaggguaccauucaccaaaga

SEQ ID NO: 215273 - RNA, 24 nt, Artificial Sequence
  Synthetic
aagcaggguaccauucaccaaaga

SEQ ID NO: 215274 - RNA, 18 nt, Artificial Sequence
  Synthetic
uauauucuugcccaaaga

SEQ ID NO: 215275 - RNA, 19 nt, Artificial Sequence
  Synthetic
uuauauucuugcccaaaga

SEQ ID NO: 215276 - RNA, 20 nt, Artificial Sequence
  Synthetic
guuauauucuugcccaaaga

SEQ ID NO: 215277 - RNA, 21 nt, Artificial Sequence
  Synthetic
uguuauauucuugcccaaaga

SEQ ID NO: 215278 - RNA, 22 nt, Artificial Sequence
  Synthetic
auguuauauucuugcccaaaga

SEQ ID NO: 215279 - RNA, 23 nt, Artificial Sequence
  Synthetic
aauguuauauucuugcccaaaga

SEQ ID NO: 215280 - RNA, 24 nt, Artificial Sequence
  Synthetic
aaauguuauauucuugcccaaaga

SEQ ID NO: 215281 - RNA, 18 nt, Artificial Sequence
  Synthetic
ggccuuguaauccaaaga

SEQ ID NO: 215282 - RNA, 19 nt, Artificial Sequence
  Synthetic
gggccuuguaauccaaaga

SEQ ID NO: 215283 - RNA, 20 nt, Artificial Sequence
  Synthetic
agggccuuguaauccaaaga

SEQ ID NO: 215284 - RNA, 21 nt, Artificial Sequence
  Synthetic
gagggccuuguaauccaaaga

SEQ ID NO: 215285 - RNA, 22 nt, Artificial Sequence
  Synthetic
cgagggccuuguaauccaaaga

SEQ ID NO: 215286 - RNA, 23 nt, Artificial Sequence
  Synthetic
ucgagggccuuguaauccaaaga

SEQ ID NO: 215287 - RNA, 24 nt, Artificial Sequence
  Synthetic
uucgagggccuuguaauccaaaga

SEQ ID NO: 215288 - RNA, 18 nt, Artificial Sequence
  Synthetic
uauaaagcuguccaaaga

SEQ ID NO: 215289 - RNA, 19 nt, Artificial Sequence
  Synthetic
uuauaaagcuguccaaaga

SEQ ID NO: 215290 - RNA, 20 nt, Artificial Sequence
  Synthetic
guuauaaagcuguccaaaga

SEQ ID NO: 215291 - RNA, 21 nt, Artificial Sequence
  Synthetic
uguuauaaagcuguccaaaga

SEQ ID NO: 215292 - RNA, 22 nt, Artificial Sequence
  Synthetic
uuguuauaaagcuguccaaaga

SEQ ID NO: 215293 - RNA, 23 nt, Artificial Sequence
  Synthetic
auuguuauaaagcuguccaaaga

SEQ ID NO: 215294 - RNA, 24 nt, Artificial Sequence
  Synthetic
uauuguuauaaagcuguccaaaga

SEQ ID NO: 215295 - RNA, 18 nt, Artificial Sequence
  Synthetic
gcaggagggaagcaaaga

SEQ ID NO: 215296 - RNA, 19 nt, Artificial Sequence
  Synthetic
agcaggagggaagcaaaga

SEQ ID NO: 215297 - RNA, 20 nt, Artificial Sequence
  Synthetic
uagcaggagggaagcaaaga

SEQ ID NO: 215298 - RNA, 21 nt, Artificial Sequence
  Synthetic
auagcaggagggaagcaaaga

SEQ ID NO: 215299 - RNA, 22 nt, Artificial Sequence
  Synthetic
gauagcaggagggaagcaaaga

SEQ ID NO: 215300 - RNA, 23 nt, Artificial Sequence
  Synthetic
ugauagcaggagggaagcaaaga

SEQ ID NO: 215301 - RNA, 24 nt, Artificial Sequence
  Synthetic
augauagcaggagggaagcaaaga

SEQ ID NO: 215302 - RNA, 18 nt, Artificial Sequence
  Synthetic
augaccuuugagcaaaga

SEQ ID NO: 215303 - RNA, 19 nt, Artificial Sequence
  Synthetic
aaugaccuuugagcaaaga

SEQ ID NO: 215304 - RNA, 20 nt, Artificial Sequence
  Synthetic
aaaugaccuuugagcaaaga

SEQ ID NO: 215305 - RNA, 21 nt, Artificial Sequence
  Synthetic
gaaaugaccuuugagcaaaga

SEQ ID NO: 215306 - RNA, 22 nt, Artificial Sequence
  Synthetic
agaaaugaccuuugagcaaaga

SEQ ID NO: 215307 - RNA, 23 nt, Artificial Sequence
  Synthetic
uagaaaugaccuuugagcaaaga

SEQ ID NO: 215308 - RNA, 24 nt, Artificial Sequence
  Synthetic
guagaaaugaccuuugagcaaaga

SEQ ID NO: 215309 - RNA, 18 nt, Artificial Sequence
  Synthetic
aguucauuuaggcaaaga

SEQ ID NO: 215310 - RNA, 19 nt, Artificial Sequence
  Synthetic
uaguucauuuaggcaaaga

SEQ ID NO: 215311 - RNA, 20 nt, Artificial Sequence
  Synthetic
auaguucauuuaggcaaaga

SEQ ID NO: 215312 - RNA, 21 nt, Artificial Sequence
  Synthetic
aauaguucauuuaggcaaaga

SEQ ID NO: 215313 - RNA, 22 nt, Artificial Sequence
  Synthetic
aaauaguucauuuaggcaaaga

SEQ ID NO: 215314 - RNA, 23 nt, Artificial Sequence
  Synthetic
gaaauaguucauuuaggcaaaga

SEQ ID NO: 215315 - RNA, 24 nt, Artificial Sequence
  Synthetic
ugaaauaguucauuuaggcaaaga

SEQ ID NO: 215316 - RNA, 18 nt, Artificial Sequence
  Synthetic
gagcaaagaucucaaaga

SEQ ID NO: 215317 - RNA, 19 nt, Artificial Sequence
  Synthetic
ugagcaaagaucucaaaga

SEQ ID NO: 215318 - RNA, 20 nt, Artificial Sequence
  Synthetic
uugagcaaagaucucaaaga

SEQ ID NO: 215319 - RNA, 21 nt, Artificial Sequence
  Synthetic
uuugagcaaagaucucaaaga

SEQ ID NO: 215320 - RNA, 22 nt, Artificial Sequence
  Synthetic
auuugagcaaagaucucaaaga

SEQ ID NO: 215321 - RNA, 23 nt, Artificial Sequence
  Synthetic
cauuugagcaaagaucucaaaga

SEQ ID NO: 215322 - RNA, 24 nt, Artificial Sequence
  Synthetic
acauuugagcaaagaucucaaaga

SEQ ID NO: 215323 - RNA, 18 nt, Artificial Sequence
  Synthetic
uugaacaugucucaaaga

SEQ ID NO: 215324 - RNA, 19 nt, Artificial Sequence
  Synthetic
uuugaacaugucucaaaga

SEQ ID NO: 215325 - RNA, 20 nt, Artificial Sequence
  Synthetic
auuugaacaugucucaaaga

SEQ ID NO: 215326 - RNA, 21 nt, Artificial Sequence
  Synthetic
uauuugaacaugucucaaaga

SEQ ID NO: 215327 - RNA, 22 nt, Artificial Sequence
  Synthetic
auauuugaacaugucucaaaga

SEQ ID NO: 215328 - RNA, 23 nt, Artificial Sequence
  Synthetic
gauauuugaacaugucucaaaga

SEQ ID NO: 215329 - RNA, 24 nt, Artificial Sequence
  Synthetic
agauauuugaacaugucucaaaga

SEQ ID NO: 215330 - RNA, 18 nt, Artificial Sequence
  Synthetic
augggcagcagucaaaga

SEQ ID NO: 215331 - RNA, 19 nt, Artificial Sequence
  Synthetic
gaugggcagcagucaaaga

SEQ ID NO: 215332 - RNA, 20 nt, Artificial Sequence
  Synthetic
ggaugggcagcagucaaaga

SEQ ID NO: 215333 - RNA, 21 nt, Artificial Sequence
  Synthetic
uggaugggcagcagucaaaga

SEQ ID NO: 215334 - RNA, 22 nt, Artificial Sequence
  Synthetic
guggaugggcagcagucaaaga

SEQ ID NO: 215335 - RNA, 23 nt, Artificial Sequence
  Synthetic
cguggaugggcagcagucaaaga

SEQ ID NO: 215336 - RNA, 24 nt, Artificial Sequence
  Synthetic
acguggaugggcagcagucaaaga

SEQ ID NO: 215337 - RNA, 18 nt, Artificial Sequence
  Synthetic
caauagcauuuucaaaga

SEQ ID NO: 215338 - RNA, 19 nt, Artificial Sequence
  Synthetic
gcaauagcauuuucaaaga

SEQ ID NO: 215339 - RNA, 20 nt, Artificial Sequence
  Synthetic
ggcaauagcauuuucaaaga

SEQ ID NO: 215340 - RNA, 21 nt, Artificial Sequence
  Synthetic
uggcaauagcauuuucaaaga

SEQ ID NO: 215341 - RNA, 22 nt, Artificial Sequence
  Synthetic
auggcaauagcauuuucaaaga

SEQ ID NO: 215342 - RNA, 23 nt, Artificial Sequence
  Synthetic
aauggcaauagcauuuucaaaga

SEQ ID NO: 215343 - RNA, 24 nt, Artificial Sequence
  Synthetic
caauggcaauagcauuuucaaaga

SEQ ID NO: 215344 - RNA, 18 nt, Artificial Sequence
  Synthetic
aaaaaaaaaaaagaaaga

SEQ ID NO: 215345 - RNA, 19 nt, Artificial Sequence
  Synthetic
aaaaaaaaaaaaagaaaga

SEQ ID NO: 215346 - RNA, 20 nt, Artificial Sequence
  Synthetic
aaaaaaaaaaaaaagaaaga

SEQ ID NO: 215347 - RNA, 21 nt, Artificial Sequence
  Synthetic
caaaaaaaaaaaaaagaaaga

SEQ ID NO: 215348 - RNA, 22 nt, Artificial Sequence
  Synthetic
ucaaaaaaaaaaaaaagaaaga

SEQ ID NO: 215349 - RNA, 23 nt, Artificial Sequence
  Synthetic
cucaaaaaaaaaaaaaagaaaga

SEQ ID NO: 215350 - RNA, 24 nt, Artificial Sequence
  Synthetic
ucucaaaaaaaaaaaaaagaaaga

SEQ ID NO: 215351 - RNA, 18 nt, Artificial Sequence
  Synthetic
aaaaaauaaaaagaaaga

SEQ ID NO: 215352 - RNA, 19 nt, Artificial Sequence
  Synthetic
caaaaaauaaaaagaaaga

SEQ ID NO: 215353 - RNA, 20 nt, Artificial Sequence
  Synthetic
ucaaaaaauaaaaagaaaga

SEQ ID NO: 215354 - RNA, 21 nt, Artificial Sequence
  Synthetic
cucaaaaaauaaaaagaaaga

SEQ ID NO: 215355 - RNA, 22 nt, Artificial Sequence
  Synthetic
ucucaaaaaauaaaaagaaaga

SEQ ID NO: 215356 - RNA, 23 nt, Artificial Sequence
  Synthetic
gucucaaaaaauaaaaagaaaga

SEQ ID NO: 215357 - RNA, 24 nt, Artificial Sequence
  Synthetic
cgucucaaaaaauaaaaagaaaga

SEQ ID NO: 215358 - RNA, 18 nt, Artificial Sequence
  Synthetic
ggaagaaagaaagaaaga

SEQ ID NO: 215359 - RNA, 19 nt, Artificial Sequence
  Synthetic
aggaagaaagaaagaaaga

SEQ ID NO: 215360 - RNA, 20 nt, Artificial Sequence
  Synthetic
aaggaagaaagaaagaaaga

SEQ ID NO: 215361 - RNA, 21 nt, Artificial Sequence
  Synthetic
aaaggaagaaagaaagaaaga

SEQ ID NO: 215362 - RNA, 22 nt, Artificial Sequence
  Synthetic
gaaaggaagaaagaaagaaaga

SEQ ID NO: 215363 - RNA, 23 nt, Artificial Sequence
  Synthetic
agaaaggaagaaagaaagaaaga

SEQ ID NO: 215364 - RNA, 24 nt, Artificial Sequence
  Synthetic
aagaaaggaagaaagaaagaaaga

SEQ ID NO: 215365 - RNA, 18 nt, Artificial Sequence
  Synthetic
gaaaggaagaaagaaaga

SEQ ID NO: 215366 - RNA, 19 nt, Artificial Sequence
  Synthetic
agaaaggaagaaagaaaga

SEQ ID NO: 215367 - RNA, 20 nt, Artificial Sequence
  Synthetic
aagaaaggaagaaagaaaga

SEQ ID NO: 215368 - RNA, 21 nt, Artificial Sequence
  Synthetic
aaagaaaggaagaaagaaaga

SEQ ID NO: 215369 - RNA, 22 nt, Artificial Sequence
  Synthetic
aaaagaaaggaagaaagaaaga

SEQ ID NO: 215370 - RNA, 23 nt, Artificial Sequence
  Synthetic
aaaaagaaaggaagaaagaaaga

SEQ ID NO: 215371 - RNA, 24 nt, Artificial Sequence
  Synthetic
aaaaaagaaaggaagaaagaaaga

SEQ ID NO: 215372 - RNA, 18 nt, Artificial Sequence
  Synthetic
guagcauauaaagaaaga

SEQ ID NO: 215373 - RNA, 19 nt, Artificial Sequence
  Synthetic
cguagcauauaaagaaaga

SEQ ID NO: 215374 - RNA, 20 nt, Artificial Sequence
  Synthetic
ccguagcauauaaagaaaga

SEQ ID NO: 215375 - RNA, 21 nt, Artificial Sequence
  Synthetic
accguagcauauaaagaaaga

SEQ ID NO: 215376 - RNA, 22 nt, Artificial Sequence
  Synthetic
uaccguagcauauaaagaaaga

SEQ ID NO: 215377 - RNA, 23 nt, Artificial Sequence
  Synthetic
auaccguagcauauaaagaaaga

SEQ ID NO: 215378 - RNA, 24 nt, Artificial Sequence
  Synthetic
gauaccguagcauauaaagaaaga

SEQ ID NO: 215379 - RNA, 18 nt, Artificial Sequence
  Synthetic
uuuuccauuaaagaaaga

SEQ ID NO: 215380 - RNA, 19 nt, Artificial Sequence
  Synthetic
uuuuuccauuaaagaaaga

SEQ ID NO: 215381 - RNA, 20 nt, Artificial Sequence
  Synthetic
auuuuuccauuaaagaaaga

SEQ ID NO: 215382 - RNA, 21 nt, Artificial Sequence
  Synthetic
uauuuuuccauuaaagaaaga

SEQ ID NO: 215383 - RNA, 22 nt, Artificial Sequence
  Synthetic
cuauuuuuccauuaaagaaaga

SEQ ID NO: 215384 - RNA, 23 nt, Artificial Sequence
  Synthetic
acuauuuuuccauuaaagaaaga

SEQ ID NO: 215385 - RNA, 24 nt, Artificial Sequence
  Synthetic
aacuauuuuuccauuaaagaaaga

SEQ ID NO: 215386 - RNA, 18 nt, Artificial Sequence
  Synthetic
guuacuuaagaagaaaga

SEQ ID NO: 215387 - RNA, 19 nt, Artificial Sequence
  Synthetic
gguuacuuaagaagaaaga

SEQ ID NO: 215388 - RNA, 20 nt, Artificial Sequence
  Synthetic
ugguuacuuaagaagaaaga

SEQ ID NO: 215389 - RNA, 21 nt, Artificial Sequence
  Synthetic
gugguuacuuaagaagaaaga

SEQ ID NO: 215390 - RNA, 22 nt, Artificial Sequence
  Synthetic
agugguuacuuaagaagaaaga

SEQ ID NO: 215391 - RNA, 23 nt, Artificial Sequence
  Synthetic
uagugguuacuuaagaagaaaga

SEQ ID NO: 215392 - RNA, 24 nt, Artificial Sequence
  Synthetic
auagugguuacuuaagaagaaaga

SEQ ID NO: 215393 - RNA, 18 nt, Artificial Sequence
  Synthetic
ucauaaaacgaagaaaga

SEQ ID NO: 215394 - RNA, 19 nt, Artificial Sequence
  Synthetic
uucauaaaacgaagaaaga

SEQ ID NO: 215395 - RNA, 20 nt, Artificial Sequence
  Synthetic
auucauaaaacgaagaaaga

SEQ ID NO: 215396 - RNA, 21 nt, Artificial Sequence
  Synthetic
aauucauaaaacgaagaaaga

SEQ ID NO: 215397 - RNA, 22 nt, Artificial Sequence
  Synthetic
aaauucauaaaacgaagaaaga

SEQ ID NO: 215398 - RNA, 23 nt, Artificial Sequence
  Synthetic
aaaauucauaaaacgaagaaaga

SEQ ID NO: 215399 - RNA, 24 nt, Artificial Sequence
  Synthetic
uaaaauucauaaaacgaagaaaga

SEQ ID NO: 215400 - RNA, 18 nt, Artificial Sequence
  Synthetic
aaaagaaaggaagaaaga

SEQ ID NO: 215401 - RNA, 19 nt, Artificial Sequence
  Synthetic
aaaaagaaaggaagaaaga

SEQ ID NO: 215402 - RNA, 20 nt, Artificial Sequence
  Synthetic
aaaaaagaaaggaagaaaga

SEQ ID NO: 215403 - RNA, 21 nt, Artificial Sequence
  Synthetic
aaaaaaagaaaggaagaaaga

SEQ ID NO: 215404 - RNA, 22 nt, Artificial Sequence
  Synthetic
gaaaaaaagaaaggaagaaaga

SEQ ID NO: 215405 - RNA, 23 nt, Artificial Sequence
  Synthetic
ugaaaaaaagaaaggaagaaaga

SEQ ID NO: 215406 - RNA, 24 nt, Artificial Sequence
  Synthetic
uugaaaaaaagaaaggaagaaaga

SEQ ID NO: 215407 - RNA, 18 nt, Artificial Sequence
  Synthetic
acuauaaggacagaaaga

SEQ ID NO: 215408 - RNA, 19 nt, Artificial Sequence
  Synthetic
aacuauaaggacagaaaga

SEQ ID NO: 215409 - RNA, 20 nt, Artificial Sequence
  Synthetic
gaacuauaaggacagaaaga

SEQ ID NO: 215410 - RNA, 21 nt, Artificial Sequence
  Synthetic
agaacuauaaggacagaaaga

SEQ ID NO: 215411 - RNA, 22 nt, Artificial Sequence
  Synthetic
gagaacuauaaggacagaaaga

SEQ ID NO: 215412 - RNA, 23 nt, Artificial Sequence
  Synthetic
ugagaacuauaaggacagaaaga

SEQ ID NO: 215413 - RNA, 24 nt, Artificial Sequence
  Synthetic
augagaacuauaaggacagaaaga

SEQ ID NO: 215414 - RNA, 18 nt, Artificial Sequence
  Synthetic
acaacagauucagaaaga

SEQ ID NO: 215415 - RNA, 19 nt, Artificial Sequence
  Synthetic
cacaacagauucagaaaga

SEQ ID NO: 215416 - RNA, 20 nt, Artificial Sequence
  Synthetic
acacaacagauucagaaaga

SEQ ID NO: 215417 - RNA, 21 nt, Artificial Sequence
  Synthetic
uacacaacagauucagaaaga

SEQ ID NO: 215418 - RNA, 22 nt, Artificial Sequence
  Synthetic
auacacaacagauucagaaaga

SEQ ID NO: 215419 - RNA, 23 nt, Artificial Sequence
  Synthetic
uauacacaacagauucagaaaga

SEQ ID NO: 215420 - RNA, 24 nt, Artificial Sequence
  Synthetic
guauacacaacagauucagaaaga

SEQ ID NO: 215421 - RNA, 18 nt, Artificial Sequence
  Synthetic
gagagaaacagagaaaga

SEQ ID NO: 215422 - RNA, 19 nt, Artificial Sequence
  Synthetic
agagagaaacagagaaaga

SEQ ID NO: 215423 - RNA, 20 nt, Artificial Sequence
  Synthetic
gagagagaaacagagaaaga

SEQ ID NO: 215424 - RNA, 21 nt, Artificial Sequence
  Synthetic
agagagagaaacagagaaaga

SEQ ID NO: 215425 - RNA, 22 nt, Artificial Sequence
  Synthetic
gagagagagaaacagagaaaga

SEQ ID NO: 215426 - RNA, 23 nt, Artificial Sequence
  Synthetic
agagagagagaaacagagaaaga

SEQ ID NO: 215427 - RNA, 24 nt, Artificial Sequence
  Synthetic
gagagagagagaaacagagaaaga

SEQ ID NO: 215428 - RNA, 18 nt, Artificial Sequence
  Synthetic
gaaagagacagagaaaga

SEQ ID NO: 215429 - RNA, 19 nt, Artificial Sequence
  Synthetic
ggaaagagacagagaaaga

SEQ ID NO: 215430 - RNA, 20 nt, Artificial Sequence
  Synthetic
gggaaagagacagagaaaga

SEQ ID NO: 215431 - RNA, 21 nt, Artificial Sequence
  Synthetic
ggggaaagagacagagaaaga

SEQ ID NO: 215432 - RNA, 22 nt, Artificial Sequence
  Synthetic
gggggaaagagacagagaaaga

SEQ ID NO: 215433 - RNA, 23 nt, Artificial Sequence
  Synthetic
ggggggaaagagacagagaaaga

SEQ ID NO: 215434 - RNA, 24 nt, Artificial Sequence
  Synthetic
aggggggaaagagacagagaaaga

SEQ ID NO: 215435 - RNA, 18 nt, Artificial Sequence
  Synthetic
aucaacuugagagaaaga

SEQ ID NO: 215436 - RNA, 19 nt, Artificial Sequence
  Synthetic
aaucaacuugagagaaaga

SEQ ID NO: 215437 - RNA, 20 nt, Artificial Sequence
  Synthetic
caaucaacuugagagaaaga

SEQ ID NO: 215438 - RNA, 21 nt, Artificial Sequence
  Synthetic
acaaucaacuugagagaaaga

SEQ ID NO: 215439 - RNA, 22 nt, Artificial Sequence
  Synthetic
uacaaucaacuugagagaaaga

SEQ ID NO: 215440 - RNA, 23 nt, Artificial Sequence
  Synthetic
auacaaucaacuugagagaaaga

SEQ ID NO: 215441 - RNA, 24 nt, Artificial Sequence
  Synthetic
uauacaaucaacuugagagaaaga

SEQ ID NO: 215442 - RNA, 18 nt, Artificial Sequence
  Synthetic
agcaugaauagagaaaga

SEQ ID NO: 215443 - RNA, 19 nt, Artificial Sequence
  Synthetic
aagcaugaauagagaaaga

SEQ ID NO: 215444 - RNA, 20 nt, Artificial Sequence
  Synthetic
aaagcaugaauagagaaaga

SEQ ID NO: 215445 - RNA, 21 nt, Artificial Sequence
  Synthetic
caaagcaugaauagagaaaga

SEQ ID NO: 215446 - RNA, 22 nt, Artificial Sequence
  Synthetic
acaaagcaugaauagagaaaga

SEQ ID NO: 215447 - RNA, 23 nt, Artificial Sequence
  Synthetic
aacaaagcaugaauagagaaaga

SEQ ID NO: 215448 - RNA, 24 nt, Artificial Sequence
  Synthetic
aaacaaagcaugaauagagaaaga

SEQ ID NO: 215449 - RNA, 18 nt, Artificial Sequence
  Synthetic
ccagguccaggagaaaga

SEQ ID NO: 215450 - RNA, 19 nt, Artificial Sequence
  Synthetic
cccagguccaggagaaaga

SEQ ID NO: 215451 - RNA, 20 nt, Artificial Sequence
  Synthetic
acccagguccaggagaaaga

SEQ ID NO: 215452 - RNA, 21 nt, Artificial Sequence
  Synthetic
aacccagguccaggagaaaga

SEQ ID NO: 215453 - RNA, 22 nt, Artificial Sequence
  Synthetic
aaacccagguccaggagaaaga

SEQ ID NO: 215454 - RNA, 23 nt, Artificial Sequence
  Synthetic
aaaacccagguccaggagaaaga

SEQ ID NO: 215455 - RNA, 24 nt, Artificial Sequence
  Synthetic
aaaaacccagguccaggagaaaga

SEQ ID NO: 215456 - RNA, 18 nt, Artificial Sequence
  Synthetic
aagugaggaggagaaaga

SEQ ID NO: 215457 - RNA, 19 nt, Artificial Sequence
  Synthetic
uaagugaggaggagaaaga

SEQ ID NO: 215458 - RNA, 20 nt, Artificial Sequence
  Synthetic
uuaagugaggaggagaaaga

SEQ ID NO: 215459 - RNA, 21 nt, Artificial Sequence
  Synthetic
cuuaagugaggaggagaaaga

SEQ ID NO: 215460 - RNA, 22 nt, Artificial Sequence
  Synthetic
gcuuaagugaggaggagaaaga

SEQ ID NO: 215461 - RNA, 23 nt, Artificial Sequence
  Synthetic
ggcuuaagugaggaggagaaaga

SEQ ID NO: 215462 - RNA, 24 nt, Artificial Sequence
  Synthetic
uggcuuaagugaggaggagaaaga

SEQ ID NO: 215463 - RNA, 18 nt, Artificial Sequence
  Synthetic
gaacaaaagggagaaaga

SEQ ID NO: 215464 - RNA, 19 nt, Artificial Sequence
  Synthetic
ggaacaaaagggagaaaga

SEQ ID NO: 215465 - RNA, 20 nt, Artificial Sequence
  Synthetic
aggaacaaaagggagaaaga

SEQ ID NO: 215466 - RNA, 21 nt, Artificial Sequence
  Synthetic
gaggaacaaaagggagaaaga

SEQ ID NO: 215467 - RNA, 22 nt, Artificial Sequence
  Synthetic
ugaggaacaaaagggagaaaga

SEQ ID NO: 215468 - RNA, 23 nt, Artificial Sequence
  Synthetic
augaggaacaaaagggagaaaga

SEQ ID NO: 215469 - RNA, 24 nt, Artificial Sequence
  Synthetic
gaugaggaacaaaagggagaaaga

SEQ ID NO: 215470 - RNA, 18 nt, Artificial Sequence
  Synthetic
acugcacagauagaaaga

SEQ ID NO: 215471 - RNA, 19 nt, Artificial Sequence
  Synthetic
aacugcacagauagaaaga

SEQ ID NO: 215472 - RNA, 20 nt, Artificial Sequence
  Synthetic
caacugcacagauagaaaga

SEQ ID NO: 215473 - RNA, 21 nt, Artificial Sequence
  Synthetic
acaacugcacagauagaaaga

SEQ ID NO: 215474 - RNA, 22 nt, Artificial Sequence
  Synthetic
cacaacugcacagauagaaaga

SEQ ID NO: 215475 - RNA, 23 nt, Artificial Sequence
  Synthetic
ccacaacugcacagauagaaaga

SEQ ID NO: 215476 - RNA, 24 nt, Artificial Sequence
  Synthetic
cccacaacugcacagauagaaaga

SEQ ID NO: 215477 - RNA, 18 nt, Artificial Sequence
  Synthetic
aacaugauuauagaaaga

SEQ ID NO: 215478 - RNA, 19 nt, Artificial Sequence
  Synthetic
gaacaugauuauagaaaga

SEQ ID NO: 215479 - RNA, 20 nt, Artificial Sequence
  Synthetic
ugaacaugauuauagaaaga

SEQ ID NO: 215480 - RNA, 21 nt, Artificial Sequence
  Synthetic
augaacaugauuauagaaaga

SEQ ID NO: 215481 - RNA, 22 nt, Artificial Sequence
  Synthetic
uaugaacaugauuauagaaaga

SEQ ID NO: 215482 - RNA, 23 nt, Artificial Sequence
  Synthetic
guaugaacaugauuauagaaaga

SEQ ID NO: 215483 - RNA, 24 nt, Artificial Sequence
  Synthetic
gguaugaacaugauuauagaaaga

SEQ ID NO: 215484 - RNA, 18 nt, Artificial Sequence
  Synthetic
ugauagguucuagaaaga

SEQ ID NO: 215485 - RNA, 19 nt, Artificial Sequence
  Synthetic
gugauagguucuagaaaga

SEQ ID NO: 215486 - RNA, 20 nt, Artificial Sequence
  Synthetic
agugauagguucuagaaaga

SEQ ID NO: 215487 - RNA, 21 nt, Artificial Sequence
  Synthetic
cagugauagguucuagaaaga

SEQ ID NO: 215488 - RNA, 22 nt, Artificial Sequence
  Synthetic
acagugauagguucuagaaaga

SEQ ID NO: 215489 - RNA, 23 nt, Artificial Sequence
  Synthetic
gacagugauagguucuagaaaga

SEQ ID NO: 215490 - RNA, 24 nt, Artificial Sequence
  Synthetic
agacagugauagguucuagaaaga

SEQ ID NO: 215491 - RNA, 18 nt, Artificial Sequence
  Synthetic
uccggccugggcgaaaga

SEQ ID NO: 215492 - RNA, 19 nt, Artificial Sequence
  Synthetic
guccggccugggcgaaaga

SEQ ID NO: 215493 - RNA, 20 nt, Artificial Sequence
  Synthetic
aguccggccugggcgaaaga

SEQ ID NO: 215494 - RNA, 21 nt, Artificial Sequence
  Synthetic
caguccggccugggcgaaaga

SEQ ID NO: 215495 - RNA, 22 nt, Artificial Sequence
  Synthetic
gcaguccggccugggcgaaaga

SEQ ID NO: 215496 - RNA, 23 nt, Artificial Sequence
  Synthetic
ugcaguccggccugggcgaaaga

SEQ ID NO: 215497 - RNA, 24 nt, Artificial Sequence
  Synthetic
cugcaguccggccugggcgaaaga

SEQ ID NO: 215498 - RNA, 18 nt, Artificial Sequence
  Synthetic
aaaaaaaaaaaggaaaga

SEQ ID NO: 215499 - RNA, 19 nt, Artificial Sequence
  Synthetic
aaaaaaaaaaaaggaaaga

SEQ ID NO: 215500 - RNA, 20 nt, Artificial Sequence
  Synthetic
aaaaaaaaaaaaaggaaaga

SEQ ID NO: 215501 - RNA, 21 nt, Artificial Sequence
  Synthetic
aaaaaaaaaaaaaaggaaaga

SEQ ID NO: 215502 - RNA, 22 nt, Artificial Sequence
  Synthetic
aaaaaaaaaaaaaaaggaaaga

SEQ ID NO: 215503 - RNA, 23 nt, Artificial Sequence
  Synthetic
aaaaaaaaaaaaaaaaggaaaga

SEQ ID NO: 215504 - RNA, 24 nt, Artificial Sequence
  Synthetic
aaaaaaaaaaaaaaaaaggaaaga

SEQ ID NO: 215505 - RNA, 18 nt, Artificial Sequence
  Synthetic
guauaaaaaaaggaaaga

SEQ ID NO: 215506 - RNA, 19 nt, Artificial Sequence
  Synthetic
uguauaaaaaaaggaaaga

SEQ ID NO: 215507 - RNA, 20 nt, Artificial Sequence
  Synthetic
cuguauaaaaaaaggaaaga

SEQ ID NO: 215508 - RNA, 21 nt, Artificial Sequence
  Synthetic
ccuguauaaaaaaaggaaaga

SEQ ID NO: 215509 - RNA, 22 nt, Artificial Sequence
  Synthetic
uccuguauaaaaaaaggaaaga

SEQ ID NO: 215510 - RNA, 23 nt, Artificial Sequence
  Synthetic
cuccuguauaaaaaaaggaaaga

SEQ ID NO: 215511 - RNA, 24 nt, Artificial Sequence
  Synthetic
ucuccuguauaaaaaaaggaaaga

SEQ ID NO: 215512 - RNA, 18 nt, Artificial Sequence
  Synthetic
ccagaagaaaaggaaaga

SEQ ID NO: 215513 - RNA, 19 nt, Artificial Sequence
  Synthetic
accagaagaaaaggaaaga

SEQ ID NO: 215514 - RNA, 20 nt, Artificial Sequence
  Synthetic
gaccagaagaaaaggaaaga

SEQ ID NO: 215515 - RNA, 21 nt, Artificial Sequence
  Synthetic
ugaccagaagaaaaggaaaga

SEQ ID NO: 215516 - RNA, 22 nt, Artificial Sequence
  Synthetic
augaccagaagaaaaggaaaga

SEQ ID NO: 215517 - RNA, 23 nt, Artificial Sequence
  Synthetic
caugaccagaagaaaaggaaaga

SEQ ID NO: 215518 - RNA, 24 nt, Artificial Sequence
  Synthetic
ucaugaccagaagaaaaggaaaga

SEQ ID NO: 215519 - RNA, 18 nt, Artificial Sequence
  Synthetic
uucacugucgaggaaaga

SEQ ID NO: 215520 - RNA, 19 nt, Artificial Sequence
  Synthetic
auucacugucgaggaaaga

SEQ ID NO: 215521 - RNA, 20 nt, Artificial Sequence
  Synthetic
gauucacugucgaggaaaga

SEQ ID NO: 215522 - RNA, 21 nt, Artificial Sequence
  Synthetic
agauucacugucgaggaaaga

SEQ ID NO: 215523 - RNA, 22 nt, Artificial Sequence
  Synthetic
aagauucacugucgaggaaaga

SEQ ID NO: 215524 - RNA, 23 nt, Artificial Sequence
  Synthetic
gaagauucacugucgaggaaaga

SEQ ID NO: 215525 - RNA, 24 nt, Artificial Sequence
  Synthetic
agaagauucacugucgaggaaaga

SEQ ID NO: 215526 - RNA, 18 nt, Artificial Sequence
  Synthetic
caaagaagggaggaaaga

SEQ ID NO: 215527 - RNA, 19 nt, Artificial Sequence
  Synthetic
acaaagaagggaggaaaga

SEQ ID NO: 215528 - RNA, 20 nt, Artificial Sequence
  Synthetic
aacaaagaagggaggaaaga

SEQ ID NO: 215529 - RNA, 21 nt, Artificial Sequence
  Synthetic
gaacaaagaagggaggaaaga

SEQ ID NO: 215530 - RNA, 22 nt, Artificial Sequence
  Synthetic
agaacaaagaagggaggaaaga

SEQ ID NO: 215531 - RNA, 23 nt, Artificial Sequence
  Synthetic
gagaacaaagaagggaggaaaga

SEQ ID NO: 215532 - RNA, 24 nt, Artificial Sequence
  Synthetic
agagaacaaagaagggaggaaaga

SEQ ID NO: 215533 - RNA, 18 nt, Artificial Sequence
  Synthetic
gggacaacaggggaaaga

SEQ ID NO: 215534 - RNA, 19 nt, Artificial Sequence
  Synthetic
cgggacaacaggggaaaga

SEQ ID NO: 215535 - RNA, 20 nt, Artificial Sequence
  Synthetic
ccgggacaacaggggaaaga

SEQ ID NO: 215536 - RNA, 21 nt, Artificial Sequence
  Synthetic
uccgggacaacaggggaaaga

SEQ ID NO: 215537 - RNA, 22 nt, Artificial Sequence
  Synthetic
guccgggacaacaggggaaaga

SEQ ID NO: 215538 - RNA, 23 nt, Artificial Sequence
  Synthetic
aguccgggacaacaggggaaaga

SEQ ID NO: 215539 - RNA, 24 nt, Artificial Sequence
  Synthetic
gaguccgggacaacaggggaaaga

SEQ ID NO: 215540 - RNA, 18 nt, Artificial Sequence
  Synthetic
uccaguaggggggaaaga

SEQ ID NO: 215541 - RNA, 19 nt, Artificial Sequence
  Synthetic
auccaguaggggggaaaga

SEQ ID NO: 215542 - RNA, 20 nt, Artificial Sequence
  Synthetic
uauccaguaggggggaaaga

SEQ ID NO: 215543 - RNA, 21 nt, Artificial Sequence
  Synthetic
uuauccaguaggggggaaaga

SEQ ID NO: 215544 - RNA, 22 nt, Artificial Sequence
  Synthetic
auuauccaguaggggggaaaga

SEQ ID NO: 215545 - RNA, 23 nt, Artificial Sequence
  Synthetic
aauuauccaguaggggggaaaga

SEQ ID NO: 215546 - RNA, 24 nt, Artificial Sequence
  Synthetic
gaauuauccaguaggggggaaaga

SEQ ID NO: 215547 - RNA, 18 nt, Artificial Sequence
  Synthetic
aacucauuuggggaaaga

SEQ ID NO: 215548 - RNA, 19 nt, Artificial Sequence
  Synthetic
aaacucauuuggggaaaga

SEQ ID NO: 215549 - RNA, 20 nt, Artificial Sequence
  Synthetic
uaaacucauuuggggaaaga

SEQ ID NO: 215550 - RNA, 21 nt, Artificial Sequence
  Synthetic
guaaacucauuuggggaaaga

SEQ ID NO: 215551 - RNA, 22 nt, Artificial Sequence
  Synthetic
aguaaacucauuuggggaaaga

SEQ ID NO: 215552 - RNA, 23 nt, Artificial Sequence
  Synthetic
aaguaaacucauuuggggaaaga

SEQ ID NO: 215553 - RNA, 24 nt, Artificial Sequence
  Synthetic
uaaguaaacucauuuggggaaaga

SEQ ID NO: 215554 - RNA, 18 nt, Artificial Sequence
  Synthetic
cugaguaaaugggaaaga

SEQ ID NO: 215555 - RNA, 19 nt, Artificial Sequence
  Synthetic
ucugaguaaaugggaaaga

SEQ ID NO: 215556 - RNA, 20 nt, Artificial Sequence
  Synthetic
gucugaguaaaugggaaaga

SEQ ID NO: 215557 - RNA, 21 nt, Artificial Sequence
  Synthetic
ugucugaguaaaugggaaaga

SEQ ID NO: 215558 - RNA, 22 nt, Artificial Sequence
  Synthetic
uugucugaguaaaugggaaaga

SEQ ID NO: 215559 - RNA, 23 nt, Artificial Sequence
  Synthetic
guugucugaguaaaugggaaaga

SEQ ID NO: 215560 - RNA, 24 nt, Artificial Sequence
  Synthetic
uguugucugaguaaaugggaaaga

SEQ ID NO: 215561 - RNA, 18 nt, Artificial Sequence
  Synthetic
gguauggggugggaaaga

SEQ ID NO: 215562 - RNA, 19 nt, Artificial Sequence
  Synthetic
ggguauggggugggaaaga

SEQ ID NO: 215563 - RNA, 20 nt, Artificial Sequence
  Synthetic
gggguauggggugggaaaga

SEQ ID NO: 215564 - RNA, 21 nt, Artificial Sequence
  Synthetic
ugggguauggggugggaaaga

SEQ ID NO: 215565 - RNA, 22 nt, Artificial Sequence
  Synthetic
augggguauggggugggaaaga

SEQ ID NO: 215566 - RNA, 23 nt, Artificial Sequence
  Synthetic
aaugggguauggggugggaaaga

SEQ ID NO: 215567 - RNA, 24 nt, Artificial Sequence
  Synthetic
gaaugggguauggggugggaaaga

SEQ ID NO: 215568 - RNA, 18 nt, Artificial Sequence
  Synthetic
uggaggagccuggaaaga

SEQ ID NO: 215569 - RNA, 19 nt, Artificial Sequence
  Synthetic
guggaggagccuggaaaga

SEQ ID NO: 215570 - RNA, 20 nt, Artificial Sequence
  Synthetic
uguggaggagccuggaaaga

SEQ ID NO: 215571 - RNA, 21 nt, Artificial Sequence
  Synthetic
guguggaggagccuggaaaga

SEQ ID NO: 215572 - RNA, 22 nt, Artificial Sequence
  Synthetic
gguguggaggagccuggaaaga

SEQ ID NO: 215573 - RNA, 23 nt, Artificial Sequence
  Synthetic
ggguguggaggagccuggaaaga

SEQ ID NO: 215574 - RNA, 24 nt, Artificial Sequence
  Synthetic
uggguguggaggagccuggaaaga

SEQ ID NO: 215575 - RNA, 18 nt, Artificial Sequence
  Synthetic
cucagagauuaugaaaga

SEQ ID NO: 215576 - RNA, 19 nt, Artificial Sequence
  Synthetic
acucagagauuaugaaaga

SEQ ID NO: 215577 - RNA, 20 nt, Artificial Sequence
  Synthetic
aacucagagauuaugaaaga

SEQ ID NO: 215578 - RNA, 21 nt, Artificial Sequence
  Synthetic
aaacucagagauuaugaaaga

SEQ ID NO: 215579 - RNA, 22 nt, Artificial Sequence
  Synthetic
uaaacucagagauuaugaaaga

SEQ ID NO: 215580 - RNA, 23 nt, Artificial Sequence
  Synthetic
auaaacucagagauuaugaaaga

SEQ ID NO: 215581 - RNA, 24 nt, Artificial Sequence
  Synthetic
gauaaacucagagauuaugaaaga

SEQ ID NO: 215582 - RNA, 18 nt, Artificial Sequence
  Synthetic
uaaaggagccuugaaaga

SEQ ID NO: 215583 - RNA, 19 nt, Artificial Sequence
  Synthetic
cuaaaggagccuugaaaga

SEQ ID NO: 215584 - RNA, 20 nt, Artificial Sequence
  Synthetic
ucuaaaggagccuugaaaga

SEQ ID NO: 215585 - RNA, 21 nt, Artificial Sequence
  Synthetic
gucuaaaggagccuugaaaga

SEQ ID NO: 215586 - RNA, 22 nt, Artificial Sequence
  Synthetic
ugucuaaaggagccuugaaaga

SEQ ID NO: 215587 - RNA, 23 nt, Artificial Sequence
  Synthetic
augucuaaaggagccuugaaaga

SEQ ID NO: 215588 - RNA, 24 nt, Artificial Sequence
  Synthetic
aaugucuaaaggagccuugaaaga

SEQ ID NO: 215589 - RNA, 18 nt, Artificial Sequence
  Synthetic
uauuugauauaauaaaga

SEQ ID NO: 215590 - RNA, 19 nt, Artificial Sequence
  Synthetic
auauuugauauaauaaaga

SEQ ID NO: 215591 - RNA, 20 nt, Artificial Sequence
  Synthetic
gauauuugauauaauaaaga

SEQ ID NO: 215592 - RNA, 21 nt, Artificial Sequence
  Synthetic
ugauauuugauauaauaaaga

SEQ ID NO: 215593 - RNA, 22 nt, Artificial Sequence
  Synthetic
augauauuugauauaauaaaga

SEQ ID NO: 215594 - RNA, 23 nt, Artificial Sequence
  Synthetic
aaugauauuugauauaauaaaga

SEQ ID NO: 215595 - RNA, 24 nt, Artificial Sequence
  Synthetic
aaaugauauuugauauaauaaaga

SEQ ID NO: 215596 - RNA, 18 nt, Artificial Sequence
  Synthetic
aacugcagugcauaaaga

SEQ ID NO: 215597 - RNA, 19 nt, Artificial Sequence
  Synthetic
uaacugcagugcauaaaga

SEQ ID NO: 215598 - RNA, 20 nt, Artificial Sequence
  Synthetic
uuaacugcagugcauaaaga

SEQ ID NO: 215599 - RNA, 21 nt, Artificial Sequence
  Synthetic
auuaacugcagugcauaaaga

SEQ ID NO: 215600 - RNA, 22 nt, Artificial Sequence
  Synthetic
cauuaacugcagugcauaaaga

SEQ ID NO: 215601 - RNA, 23 nt, Artificial Sequence
  Synthetic
ucauuaacugcagugcauaaaga

SEQ ID NO: 215602 - RNA, 24 nt, Artificial Sequence
  Synthetic
uucauuaacugcagugcauaaaga

SEQ ID NO: 215603 - RNA, 18 nt, Artificial Sequence
  Synthetic
accuggagaugauaaaga

SEQ ID NO: 215604 - RNA, 19 nt, Artificial Sequence
  Synthetic
aaccuggagaugauaaaga

SEQ ID NO: 215605 - RNA, 20 nt, Artificial Sequence
  Synthetic
aaaccuggagaugauaaaga

SEQ ID NO: 215606 - RNA, 21 nt, Artificial Sequence
  Synthetic
caaaccuggagaugauaaaga

SEQ ID NO: 215607 - RNA, 22 nt, Artificial Sequence
  Synthetic
gcaaaccuggagaugauaaaga

SEQ ID NO: 215608 - RNA, 23 nt, Artificial Sequence
  Synthetic
ggcaaaccuggagaugauaaaga

SEQ ID NO: 215609 - RNA, 24 nt, Artificial Sequence
  Synthetic
gggcaaaccuggagaugauaaaga

SEQ ID NO: 215610 - RNA, 18 nt, Artificial Sequence
  Synthetic
uaucccuuaugauaaaga

SEQ ID NO: 215611 - RNA, 19 nt, Artificial Sequence
  Synthetic
cuaucccuuaugauaaaga

SEQ ID NO: 215612 - RNA, 20 nt, Artificial Sequence
  Synthetic
ucuaucccuuaugauaaaga

SEQ ID NO: 215613 - RNA, 21 nt, Artificial Sequence
  Synthetic
gucuaucccuuaugauaaaga

SEQ ID NO: 215614 - RNA, 22 nt, Artificial Sequence
  Synthetic
agucuaucccuuaugauaaaga

SEQ ID NO: 215615 - RNA, 23 nt, Artificial Sequence
  Synthetic
aagucuaucccuuaugauaaaga

SEQ ID NO: 215616 - RNA, 24 nt, Artificial Sequence
  Synthetic
gaagucuaucccuuaugauaaaga

SEQ ID NO: 215617 - RNA, 18 nt, Artificial Sequence
  Synthetic
uaccguagcauauaaaga

SEQ ID NO: 215618 - RNA, 19 nt, Artificial Sequence
  Synthetic
auaccguagcauauaaaga

SEQ ID NO: 215619 - RNA, 20 nt, Artificial Sequence
  Synthetic
gauaccguagcauauaaaga

SEQ ID NO: 215620 - RNA, 21 nt, Artificial Sequence
  Synthetic
ugauaccguagcauauaaaga

SEQ ID NO: 215621 - RNA, 22 nt, Artificial Sequence
  Synthetic
augauaccguagcauauaaaga

SEQ ID NO: 215622 - RNA, 23 nt, Artificial Sequence
  Synthetic
uaugauaccguagcauauaaaga

SEQ ID NO: 215623 - RNA, 24 nt, Artificial Sequence
  Synthetic
auaugauaccguagcauauaaaga

SEQ ID NO: 215624 - RNA, 18 nt, Artificial Sequence
  Synthetic
cuauauaaacuauaaaga

SEQ ID NO: 215625 - RNA, 19 nt, Artificial Sequence
  Synthetic
ucuauauaaacuauaaaga

SEQ ID NO: 215626 - RNA, 20 nt, Artificial Sequence
  Synthetic
aucuauauaaacuauaaaga

SEQ ID NO: 215627 - RNA, 21 nt, Artificial Sequence
  Synthetic
aaucuauauaaacuauaaaga

SEQ ID NO: 215628 - RNA, 22 nt, Artificial Sequence
  Synthetic
gaaucuauauaaacuauaaaga

SEQ ID NO: 215629 - RNA, 23 nt, Artificial Sequence
  Synthetic
ugaaucuauauaaacuauaaaga

SEQ ID NO: 215630 - RNA, 24 nt, Artificial Sequence
  Synthetic
uugaaucuauauaaacuauaaaga

SEQ ID NO: 215631 - RNA, 18 nt, Artificial Sequence
  Synthetic
guuauuguacuauaaaga

SEQ ID NO: 215632 - RNA, 19 nt, Artificial Sequence
  Synthetic
uguuauuguacuauaaaga

SEQ ID NO: 215633 - RNA, 20 nt, Artificial Sequence
  Synthetic
guguuauuguacuauaaaga

SEQ ID NO: 215634 - RNA, 21 nt, Artificial Sequence
  Synthetic
aguguuauuguacuauaaaga

SEQ ID NO: 215635 - RNA, 22 nt, Artificial Sequence
  Synthetic
aaguguuauuguacuauaaaga

SEQ ID NO: 215636 - RNA, 23 nt, Artificial Sequence
  Synthetic
uaaguguuauuguacuauaaaga

SEQ ID NO: 215637 - RNA, 24 nt, Artificial Sequence
  Synthetic
guaaguguuauuguacuauaaaga

SEQ ID NO: 215638 - RNA, 18 nt, Artificial Sequence
  Synthetic
cugggcaauuuauaaaga

SEQ ID NO: 215639 - RNA, 19 nt, Artificial Sequence
  Synthetic
acugggcaauuuauaaaga

SEQ ID NO: 215640 - RNA, 20 nt, Artificial Sequence
  Synthetic
gacugggcaauuuauaaaga

SEQ ID NO: 215641 - RNA, 21 nt, Artificial Sequence
  Synthetic
agacugggcaauuuauaaaga

SEQ ID NO: 215642 - RNA, 22 nt, Artificial Sequence
  Synthetic
gagacugggcaauuuauaaaga

SEQ ID NO: 215643 - RNA, 23 nt, Artificial Sequence
  Synthetic
agagacugggcaauuuauaaaga

SEQ ID NO: 215644 - RNA, 24 nt, Artificial Sequence
  Synthetic
cagagacugggcaauuuauaaaga

SEQ ID NO: 215645 - RNA, 18 nt, Artificial Sequence
  Synthetic
agcaaaaccuccuaaaga

SEQ ID NO: 215646 - RNA, 19 nt, Artificial Sequence
  Synthetic
cagcaaaaccuccuaaaga

SEQ ID NO: 215647 - RNA, 20 nt, Artificial Sequence
  Synthetic
ccagcaaaaccuccuaaaga

SEQ ID NO: 215648 - RNA, 21 nt, Artificial Sequence
  Synthetic
gccagcaaaaccuccuaaaga

SEQ ID NO: 215649 - RNA, 22 nt, Artificial Sequence
  Synthetic
ggccagcaaaaccuccuaaaga

SEQ ID NO: 215650 - RNA, 23 nt, Artificial Sequence
  Synthetic
aggccagcaaaaccuccuaaaga

SEQ ID NO: 215651 - RNA, 24 nt, Artificial Sequence
  Synthetic
uaggccagcaaaaccuccuaaaga

SEQ ID NO: 215652 - RNA, 18 nt, Artificial Sequence
  Synthetic
uguggaauuugcuaaaga

SEQ ID NO: 215653 - RNA, 19 nt, Artificial Sequence
  Synthetic
auguggaauuugcuaaaga

SEQ ID NO: 215654 - RNA, 20 nt, Artificial Sequence
  Synthetic
gauguggaauuugcuaaaga

SEQ ID NO: 215655 - RNA, 21 nt, Artificial Sequence
  Synthetic
cgauguggaauuugcuaaaga

SEQ ID NO: 215656 - RNA, 22 nt, Artificial Sequence
  Synthetic
acgauguggaauuugcuaaaga

SEQ ID NO: 215657 - RNA, 23 nt, Artificial Sequence
  Synthetic
uacgauguggaauuugcuaaaga

SEQ ID NO: 215658 - RNA, 24 nt, Artificial Sequence
  Synthetic
auacgauguggaauuugcuaaaga

SEQ ID NO: 215659 - RNA, 18 nt, Artificial Sequence
  Synthetic
uuguuucaauucuaaaga

SEQ ID NO: 215660 - RNA, 19 nt, Artificial Sequence
  Synthetic
uuuguuucaauucuaaaga

SEQ ID NO: 215661 - RNA, 20 nt, Artificial Sequence
  Synthetic
auuuguuucaauucuaaaga

SEQ ID NO: 215662 - RNA, 21 nt, Artificial Sequence
  Synthetic
aauuuguuucaauucuaaaga

SEQ ID NO: 215663 - RNA, 22 nt, Artificial Sequence
  Synthetic
aaauuuguuucaauucuaaaga

SEQ ID NO: 215664 - RNA, 23 nt, Artificial Sequence
  Synthetic
aaaauuuguuucaauucuaaaga

SEQ ID NO: 215665 - RNA, 24 nt, Artificial Sequence
  Synthetic
gaaaauuuguuucaauucuaaaga

SEQ ID NO: 215666 - RNA, 18 nt, Artificial Sequence
  Synthetic
ggggccugaaaguaaaga

SEQ ID NO: 215667 - RNA, 19 nt, Artificial Sequence
  Synthetic
uggggccugaaaguaaaga

SEQ ID NO: 215668 - RNA, 20 nt, Artificial Sequence
  Synthetic
auggggccugaaaguaaaga

SEQ ID NO: 215669 - RNA, 21 nt, Artificial Sequence
  Synthetic
aauggggccugaaaguaaaga

SEQ ID NO: 215670 - RNA, 22 nt, Artificial Sequence
  Synthetic
aaauggggccugaaaguaaaga

SEQ ID NO: 215671 - RNA, 23 nt, Artificial Sequence
  Synthetic
gaaauggggccugaaaguaaaga

SEQ ID NO: 215672 - RNA, 24 nt, Artificial Sequence
  Synthetic
agaaauggggccugaaaguaaaga

SEQ ID NO: 215673 - RNA, 18 nt, Artificial Sequence
  Synthetic
uaaaacauccaguaaaga

SEQ ID NO: 215674 - RNA, 19 nt, Artificial Sequence
  Synthetic
auaaaacauccaguaaaga

SEQ ID NO: 215675 - RNA, 20 nt, Artificial Sequence
  Synthetic
uauaaaacauccaguaaaga

SEQ ID NO: 215676 - RNA, 21 nt, Artificial Sequence
  Synthetic
auauaaaacauccaguaaaga

SEQ ID NO: 215677 - RNA, 22 nt, Artificial Sequence
  Synthetic
cauauaaaacauccaguaaaga

SEQ ID NO: 215678 - RNA, 23 nt, Artificial Sequence
  Synthetic
ucauauaaaacauccaguaaaga

SEQ ID NO: 215679 - RNA, 24 nt, Artificial Sequence
  Synthetic
uucauauaaaacauccaguaaaga

SEQ ID NO: 215680 - RNA, 18 nt, Artificial Sequence
  Synthetic
auagaggaggaguaaaga

SEQ ID NO: 215681 - RNA, 19 nt, Artificial Sequence
  Synthetic
uauagaggaggaguaaaga

SEQ ID NO: 215682 - RNA, 20 nt, Artificial Sequence
  Synthetic
cuauagaggaggaguaaaga

SEQ ID NO: 215683 - RNA, 21 nt, Artificial Sequence
  Synthetic
ccuauagaggaggaguaaaga

SEQ ID NO: 215684 - RNA, 22 nt, Artificial Sequence
  Synthetic
uccuauagaggaggaguaaaga

SEQ ID NO: 215685 - RNA, 23 nt, Artificial Sequence
  Synthetic
uuccuauagaggaggaguaaaga

SEQ ID NO: 215686 - RNA, 24 nt, Artificial Sequence
  Synthetic
auuccuauagaggaggaguaaaga

SEQ ID NO: 215687 - RNA, 18 nt, Artificial Sequence
  Synthetic
cugaacaggugguaaaga

SEQ ID NO: 215688 - RNA, 19 nt, Artificial Sequence
  Synthetic
ucugaacaggugguaaaga

SEQ ID NO: 215689 - RNA, 20 nt, Artificial Sequence
  Synthetic
aucugaacaggugguaaaga

SEQ ID NO: 215690 - RNA, 21 nt, Artificial Sequence
  Synthetic
gaucugaacaggugguaaaga

SEQ ID NO: 215691 - RNA, 22 nt, Artificial Sequence
  Synthetic
ugaucugaacaggugguaaaga

SEQ ID NO: 215692 - RNA, 23 nt, Artificial Sequence
  Synthetic
cugaucugaacaggugguaaaga

SEQ ID NO: 215693 - RNA, 24 nt, Artificial Sequence
  Synthetic
gcugaucugaacaggugguaaaga

SEQ ID NO: 215694 - RNA, 18 nt, Artificial Sequence
  Synthetic
acugauccuguguaaaga

SEQ ID NO: 215695 - RNA, 19 nt, Artificial Sequence
  Synthetic
gacugauccuguguaaaga

SEQ ID NO: 215696 - RNA, 20 nt, Artificial Sequence
  Synthetic
ugacugauccuguguaaaga

SEQ ID NO: 215697 - RNA, 21 nt, Artificial Sequence
  Synthetic
uugacugauccuguguaaaga

SEQ ID NO: 215698 - RNA, 22 nt, Artificial Sequence
  Synthetic
uuugacugauccuguguaaaga

SEQ ID NO: 215699 - RNA, 23 nt, Artificial Sequence
  Synthetic
guuugacugauccuguguaaaga

SEQ ID NO: 215700 - RNA, 24 nt, Artificial Sequence
  Synthetic
uguuugacugauccuguguaaaga

SEQ ID NO: 215701 - RNA, 18 nt, Artificial Sequence
  Synthetic
auuuggucuguguaaaga

SEQ ID NO: 215702 - RNA, 19 nt, Artificial Sequence
  Synthetic
uauuuggucuguguaaaga

SEQ ID NO: 215703 - RNA, 20 nt, Artificial Sequence
  Synthetic
cuauuuggucuguguaaaga

SEQ ID NO: 215704 - RNA, 21 nt, Artificial Sequence
  Synthetic
ccuauuuggucuguguaaaga

SEQ ID NO: 215705 - RNA, 22 nt, Artificial Sequence
  Synthetic
gccuauuuggucuguguaaaga

SEQ ID NO: 215706 - RNA, 23 nt, Artificial Sequence
  Synthetic
agccuauuuggucuguguaaaga

SEQ ID NO: 215707 - RNA, 24 nt, Artificial Sequence
  Synthetic
gagccuauuuggucuguguaaaga

SEQ ID NO: 215708 - RNA, 18 nt, Artificial Sequence
  Synthetic
caagcaauauuguaaaga

SEQ ID NO: 215709 - RNA, 19 nt, Artificial Sequence
  Synthetic
gcaagcaauauuguaaaga

SEQ ID NO: 215710 - RNA, 20 nt, Artificial Sequence
  Synthetic
ugcaagcaauauuguaaaga

SEQ ID NO: 215711 - RNA, 21 nt, Artificial Sequence
  Synthetic
cugcaagcaauauuguaaaga

SEQ ID NO: 215712 - RNA, 22 nt, Artificial Sequence
  Synthetic
acugcaagcaauauuguaaaga

SEQ ID NO: 215713 - RNA, 23 nt, Artificial Sequence
  Synthetic
uacugcaagcaauauuguaaaga

SEQ ID NO: 215714 - RNA, 24 nt, Artificial Sequence
  Synthetic
guacugcaagcaauauuguaaaga

SEQ ID NO: 215715 - RNA, 18 nt, Artificial Sequence
  Synthetic
aaauuuauuuuguaaaga

SEQ ID NO: 215716 - RNA, 19 nt, Artificial Sequence
  Synthetic
uaaauuuauuuuguaaaga

SEQ ID NO: 215717 - RNA, 20 nt, Artificial Sequence
  Synthetic
auaaauuuauuuuguaaaga

SEQ ID NO: 215718 - RNA, 21 nt, Artificial Sequence
  Synthetic
gauaaauuuauuuuguaaaga

SEQ ID NO: 215719 - RNA, 22 nt, Artificial Sequence
  Synthetic
ggauaaauuuauuuuguaaaga

SEQ ID NO: 215720 - RNA, 23 nt, Artificial Sequence
  Synthetic
aggauaaauuuauuuuguaaaga

SEQ ID NO: 215721 - RNA, 24 nt, Artificial Sequence
  Synthetic
aaggauaaauuuauuuuguaaaga

SEQ ID NO: 215722 - RNA, 18 nt, Artificial Sequence
  Synthetic
uuuuaggaaaauuaaaga

SEQ ID NO: 215723 - RNA, 19 nt, Artificial Sequence
  Synthetic
guuuuaggaaaauuaaaga

SEQ ID NO: 215724 - RNA, 20 nt, Artificial Sequence
  Synthetic
gguuuuaggaaaauuaaaga

SEQ ID NO: 215725 - RNA, 21 nt, Artificial Sequence
  Synthetic
agguuuuaggaaaauuaaaga

SEQ ID NO: 215726 - RNA, 22 nt, Artificial Sequence
  Synthetic
uagguuuuaggaaaauuaaaga

SEQ ID NO: 215727 - RNA, 23 nt, Artificial Sequence
  Synthetic
cuagguuuuaggaaaauuaaaga

SEQ ID NO: 215728 - RNA, 24 nt, Artificial Sequence
  Synthetic
acuagguuuuaggaaaauuaaaga

SEQ ID NO: 215729 - RNA, 18 nt, Artificial Sequence
  Synthetic
aagucagcaaauuaaaga

SEQ ID NO: 215730 - RNA, 19 nt, Artificial Sequence
  Synthetic
aaagucagcaaauuaaaga

SEQ ID NO: 215731 - RNA, 20 nt, Artificial Sequence
  Synthetic
uaaagucagcaaauuaaaga

SEQ ID NO: 215732 - RNA, 21 nt, Artificial Sequence
  Synthetic
auaaagucagcaaauuaaaga

SEQ ID NO: 215733 - RNA, 22 nt, Artificial Sequence
  Synthetic
aauaaagucagcaaauuaaaga

SEQ ID NO: 215734 - RNA, 23 nt, Artificial Sequence
  Synthetic
uaauaaagucagcaaauuaaaga

SEQ ID NO: 215735 - RNA, 24 nt, Artificial Sequence
  Synthetic
uuaauaaagucagcaaauuaaaga

SEQ ID NO: 215736 - RNA, 18 nt, Artificial Sequence
  Synthetic
aagugacagaauuaaaga

SEQ ID NO: 215737 - RNA, 19 nt, Artificial Sequence
  Synthetic
gaagugacagaauuaaaga

SEQ ID NO: 215738 - RNA, 20 nt, Artificial Sequence
  Synthetic
ugaagugacagaauuaaaga

SEQ ID NO: 215739 - RNA, 21 nt, Artificial Sequence
  Synthetic
uugaagugacagaauuaaaga

SEQ ID NO: 215740 - RNA, 22 nt, Artificial Sequence
  Synthetic
cuugaagugacagaauuaaaga

SEQ ID NO: 215741 - RNA, 23 nt, Artificial Sequence
  Synthetic
ucuugaagugacagaauuaaaga

SEQ ID NO: 215742 - RNA, 24 nt, Artificial Sequence
  Synthetic
gucuugaagugacagaauuaaaga

SEQ ID NO: 215743 - RNA, 18 nt, Artificial Sequence
  Synthetic
aaagaguguuauuaaaga

SEQ ID NO: 215744 - RNA, 19 nt, Artificial Sequence
  Synthetic
aaaagaguguuauuaaaga

SEQ ID NO: 215745 - RNA, 20 nt, Artificial Sequence
  Synthetic
aaaaagaguguuauuaaaga

SEQ ID NO: 215746 - RNA, 21 nt, Artificial Sequence
  Synthetic
uaaaaagaguguuauuaaaga

SEQ ID NO: 215747 - RNA, 22 nt, Artificial Sequence
  Synthetic
auaaaaagaguguuauuaaaga

SEQ ID NO: 215748 - RNA, 23 nt, Artificial Sequence
  Synthetic
aauaaaaagaguguuauuaaaga

SEQ ID NO: 215749 - RNA, 24 nt, Artificial Sequence
  Synthetic
uaauaaaaagaguguuauuaaaga

SEQ ID NO: 215750 - RNA, 18 nt, Artificial Sequence
  Synthetic
auuaguuacacuuaaaga

SEQ ID NO: 215751 - RNA, 19 nt, Artificial Sequence
  Synthetic
uauuaguuacacuuaaaga

SEQ ID NO: 215752 - RNA, 20 nt, Artificial Sequence
  Synthetic
guauuaguuacacuuaaaga

SEQ ID NO: 215753 - RNA, 21 nt, Artificial Sequence
  Synthetic
uguauuaguuacacuuaaaga

SEQ ID NO: 215754 - RNA, 22 nt, Artificial Sequence
  Synthetic
uuguauuaguuacacuuaaaga

SEQ ID NO: 215755 - RNA, 23 nt, Artificial Sequence
  Synthetic
guuguauuaguuacacuuaaaga

SEQ ID NO: 215756 - RNA, 24 nt, Artificial Sequence
  Synthetic
aguuguauuaguuacacuuaaaga

SEQ ID NO: 215757 - RNA, 18 nt, Artificial Sequence
  Synthetic
ugagugaugccuuaaaga

SEQ ID NO: 215758 - RNA, 19 nt, Artificial Sequence
  Synthetic
uugagugaugccuuaaaga

SEQ ID NO: 215759 - RNA, 20 nt, Artificial Sequence
  Synthetic
guugagugaugccuuaaaga

SEQ ID NO: 215760 - RNA, 21 nt, Artificial Sequence
  Synthetic
aguugagugaugccuuaaaga

SEQ ID NO: 215761 - RNA, 22 nt, Artificial Sequence
  Synthetic
uaguugagugaugccuuaaaga

SEQ ID NO: 215762 - RNA, 23 nt, Artificial Sequence
  Synthetic
uuaguugagugaugccuuaaaga

SEQ ID NO: 215763 - RNA, 24 nt, Artificial Sequence
  Synthetic
auuaguugagugaugccuuaaaga

SEQ ID NO: 215764 - RNA, 18 nt, Artificial Sequence
  Synthetic
augaacuuugcuuaaaga

SEQ ID NO: 215765 - RNA, 19 nt, Artificial Sequence
  Synthetic
aaugaacuuugcuuaaaga

SEQ ID NO: 215766 - RNA, 20 nt, Artificial Sequence
  Synthetic
gaaugaacuuugcuuaaaga

SEQ ID NO: 215767 - RNA, 21 nt, Artificial Sequence
  Synthetic
ugaaugaacuuugcuuaaaga

SEQ ID NO: 215768 - RNA, 22 nt, Artificial Sequence
  Synthetic
cugaaugaacuuugcuuaaaga

SEQ ID NO: 215769 - RNA, 23 nt, Artificial Sequence
  Synthetic
acugaaugaacuuugcuuaaaga

SEQ ID NO: 215770 - RNA, 24 nt, Artificial Sequence
  Synthetic
gacugaaugaacuuugcuuaaaga

SEQ ID NO: 215771 - RNA, 18 nt, Artificial Sequence
  Synthetic
gucagaaugaguuaaaga

SEQ ID NO: 215772 - RNA, 19 nt, Artificial Sequence
  Synthetic
ugucagaaugaguuaaaga

SEQ ID NO: 215773 - RNA, 20 nt, Artificial Sequence
  Synthetic
uugucagaaugaguuaaaga

SEQ ID NO: 215774 - RNA, 21 nt, Artificial Sequence
  Synthetic
uuugucagaaugaguuaaaga

SEQ ID NO: 215775 - RNA, 22 nt, Artificial Sequence
  Synthetic
uuuugucagaaugaguuaaaga

SEQ ID NO: 215776 - RNA, 23 nt, Artificial Sequence
  Synthetic
cuuuugucagaaugaguuaaaga

SEQ ID NO: 215777 - RNA, 24 nt, Artificial Sequence
  Synthetic
acuuuugucagaaugaguuaaaga

SEQ ID NO: 215778 - RNA, 18 nt, Artificial Sequence
  Synthetic
uagagagcauaaacaaga

SEQ ID NO: 215779 - RNA, 19 nt, Artificial Sequence
  Synthetic
uuagagagcauaaacaaga

SEQ ID NO: 215780 - RNA, 20 nt, Artificial Sequence
  Synthetic
guuagagagcauaaacaaga

SEQ ID NO: 215781 - RNA, 21 nt, Artificial Sequence
  Synthetic
gguuagagagcauaaacaaga

SEQ ID NO: 215782 - RNA, 22 nt, Artificial Sequence
  Synthetic
ugguuagagagcauaaacaaga

SEQ ID NO: 215783 - RNA, 23 nt, Artificial Sequence
  Synthetic
augguuagagagcauaaacaaga

SEQ ID NO: 215784 - RNA, 24 nt, Artificial Sequence
  Synthetic
caugguuagagagcauaaacaaga

SEQ ID NO: 215785 - RNA, 18 nt, Artificial Sequence
  Synthetic
ccagcuggggcaacaaga

SEQ ID NO: 215786 - RNA, 19 nt, Artificial Sequence
  Synthetic
uccagcuggggcaacaaga

SEQ ID NO: 215787 - RNA, 20 nt, Artificial Sequence
  Synthetic
cuccagcuggggcaacaaga

SEQ ID NO: 215788 - RNA, 21 nt, Artificial Sequence
  Synthetic
acuccagcuggggcaacaaga

SEQ ID NO: 215789 - RNA, 22 nt, Artificial Sequence
  Synthetic
cacuccagcuggggcaacaaga

SEQ ID NO: 215790 - RNA, 23 nt, Artificial Sequence
  Synthetic
gcacuccagcuggggcaacaaga

SEQ ID NO: 215791 - RNA, 24 nt, Artificial Sequence
  Synthetic
ugcacuccagcuggggcaacaaga

SEQ ID NO: 215792 - RNA, 18 nt, Artificial Sequence
  Synthetic
cuaaccugggcaacaaga

SEQ ID NO: 215793 - RNA, 19 nt, Artificial Sequence
  Synthetic
ucuaaccugggcaacaaga

SEQ ID NO: 215794 - RNA, 20 nt, Artificial Sequence
  Synthetic
cucuaaccugggcaacaaga

SEQ ID NO: 215795 - RNA, 21 nt, Artificial Sequence
  Synthetic
acucuaaccugggcaacaaga

SEQ ID NO: 215796 - RNA, 22 nt, Artificial Sequence
  Synthetic
cacucuaaccugggcaacaaga

SEQ ID NO: 215797 - RNA, 23 nt, Artificial Sequence
  Synthetic
gcacucuaaccugggcaacaaga

SEQ ID NO: 215798 - RNA, 24 nt, Artificial Sequence
  Synthetic
ugcacucuaaccugggcaacaaga

SEQ ID NO: 215799 - RNA, 21 nt, Artificial Sequence
  Synthetic
acuccagccugggcaacaaga

SEQ ID NO: 215800 - RNA, 22 nt, Artificial Sequence
  Synthetic
cacuccagccugggcaacaaga

SEQ ID NO: 215801 - RNA, 23 nt, Artificial Sequence
  Synthetic
gcacuccagccugggcaacaaga

SEQ ID NO: 215802 - RNA, 24 nt, Artificial Sequence
  Synthetic
ugcacuccagccugggcaacaaga

SEQ ID NO: 215803 - RNA, 22 nt, Artificial Sequence
  Synthetic
uacuccagccugggcaacaaga

SEQ ID NO: 215804 - RNA, 23 nt, Artificial Sequence
  Synthetic
guacuccagccugggcaacaaga

SEQ ID NO: 215805 - RNA, 24 nt, Artificial Sequence
  Synthetic
uguacuccagccugggcaacaaga

SEQ ID NO: 215806 - RNA, 21 nt, Artificial Sequence
  Synthetic
gcuccagccugggcaacaaga

SEQ ID NO: 215807 - RNA, 22 nt, Artificial Sequence
  Synthetic
cgcuccagccugggcaacaaga

SEQ ID NO: 215808 - RNA, 23 nt, Artificial Sequence
  Synthetic
gcgcuccagccugggcaacaaga

SEQ ID NO: 215809 - RNA, 24 nt, Artificial Sequence
  Synthetic
ugcgcuccagccugggcaacaaga

SEQ ID NO: 215810 - RNA, 18 nt, Artificial Sequence
  Synthetic
agggagaggugaacaaga

SEQ ID NO: 215811 - RNA, 19 nt, Artificial Sequence
  Synthetic
gagggagaggugaacaaga

SEQ ID NO: 215812 - RNA, 20 nt, Artificial Sequence
  Synthetic
agagggagaggugaacaaga

SEQ ID NO: 215813 - RNA, 21 nt, Artificial Sequence
  Synthetic
uagagggagaggugaacaaga

SEQ ID NO: 215814 - RNA, 22 nt, Artificial Sequence
  Synthetic
cuagagggagaggugaacaaga

SEQ ID NO: 215815 - RNA, 23 nt, Artificial Sequence
  Synthetic
gcuagagggagaggugaacaaga

SEQ ID NO: 215816 - RNA, 24 nt, Artificial Sequence
  Synthetic
agcuagagggagaggugaacaaga

SEQ ID NO: 215817 - RNA, 18 nt, Artificial Sequence
  Synthetic
aaagagaaacuaacaaga

SEQ ID NO: 215818 - RNA, 19 nt, Artificial Sequence
  Synthetic
aaaagagaaacuaacaaga

SEQ ID NO: 215819 - RNA, 20 nt, Artificial Sequence
  Synthetic
gaaaagagaaacuaacaaga

SEQ ID NO: 215820 - RNA, 21 nt, Artificial Sequence
  Synthetic
agaaaagagaaacuaacaaga

SEQ ID NO: 215821 - RNA, 22 nt, Artificial Sequence
  Synthetic
aagaaaagagaaacuaacaaga

SEQ ID NO: 215822 - RNA, 23 nt, Artificial Sequence
  Synthetic
gaagaaaagagaaacuaacaaga

SEQ ID NO: 215823 - RNA, 24 nt, Artificial Sequence
  Synthetic
agaagaaaagagaaacuaacaaga

SEQ ID NO: 215824 - RNA, 18 nt, Artificial Sequence
  Synthetic
cuaacaaauuuaacaaga

SEQ ID NO: 215825 - RNA, 19 nt, Artificial Sequence
  Synthetic
ccuaacaaauuuaacaaga

SEQ ID NO: 215826 - RNA, 20 nt, Artificial Sequence
  Synthetic
uccuaacaaauuuaacaaga

SEQ ID NO: 215827 - RNA, 21 nt, Artificial Sequence
  Synthetic
guccuaacaaauuuaacaaga

SEQ ID NO: 215828 - RNA, 22 nt, Artificial Sequence
  Synthetic
aguccuaacaaauuuaacaaga

SEQ ID NO: 215829 - RNA, 23 nt, Artificial Sequence
  Synthetic
gaguccuaacaaauuuaacaaga

SEQ ID NO: 215830 - RNA, 24 nt, Artificial Sequence
  Synthetic
ugaguccuaacaaauuuaacaaga

SEQ ID NO: 215831 - RNA, 18 nt, Artificial Sequence
  Synthetic
aggcugacagacacaaga

SEQ ID NO: 215832 - RNA, 19 nt, Artificial Sequence
  Synthetic
aaggcugacagacacaaga

SEQ ID NO: 215833 - RNA, 20 nt, Artificial Sequence
  Synthetic
uaaggcugacagacacaaga

SEQ ID NO: 215834 - RNA, 21 nt, Artificial Sequence
  Synthetic
auaaggcugacagacacaaga

SEQ ID NO: 215835 - RNA, 22 nt, Artificial Sequence
  Synthetic
aauaaggcugacagacacaaga

SEQ ID NO: 215836 - RNA, 23 nt, Artificial Sequence
  Synthetic
aaauaaggcugacagacacaaga

SEQ ID NO: 215837 - RNA, 24 nt, Artificial Sequence
  Synthetic
gaaauaaggcugacagacacaaga

SEQ ID NO: 215838 - RNA, 18 nt, Artificial Sequence
  Synthetic
cugcaaagagccacaaga

SEQ ID NO: 215839 - RNA, 19 nt, Artificial Sequence
  Synthetic
ccugcaaagagccacaaga

SEQ ID NO: 215840 - RNA, 20 nt, Artificial Sequence
  Synthetic
uccugcaaagagccacaaga

SEQ ID NO: 215841 - RNA, 21 nt, Artificial Sequence
  Synthetic
cuccugcaaagagccacaaga

SEQ ID NO: 215842 - RNA, 22 nt, Artificial Sequence
  Synthetic
ccuccugcaaagagccacaaga

SEQ ID NO: 215843 - RNA, 23 nt, Artificial Sequence
  Synthetic
gccuccugcaaagagccacaaga

SEQ ID NO: 215844 - RNA, 24 nt, Artificial Sequence
  Synthetic
ggccuccugcaaagagccacaaga

SEQ ID NO: 215845 - RNA, 18 nt, Artificial Sequence
  Synthetic
aaucaugacagcacaaga

SEQ ID NO: 215846 - RNA, 19 nt, Artificial Sequence
  Synthetic
aaaucaugacagcacaaga

SEQ ID NO: 215847 - RNA, 20 nt, Artificial Sequence
  Synthetic
aaaaucaugacagcacaaga

SEQ ID NO: 215848 - RNA, 21 nt, Artificial Sequence
  Synthetic
gaaaaucaugacagcacaaga

SEQ ID NO: 215849 - RNA, 22 nt, Artificial Sequence
  Synthetic
ggaaaaucaugacagcacaaga

SEQ ID NO: 215850 - RNA, 23 nt, Artificial Sequence
  Synthetic
uggaaaaucaugacagcacaaga

SEQ ID NO: 215851 - RNA, 24 nt, Artificial Sequence
  Synthetic
uuggaaaaucaugacagcacaaga

SEQ ID NO: 215852 - RNA, 18 nt, Artificial Sequence
  Synthetic
auugugaauagcacaaga

SEQ ID NO: 215853 - RNA, 19 nt, Artificial Sequence
  Synthetic
uauugugaauagcacaaga

SEQ ID NO: 215854 - RNA, 20 nt, Artificial Sequence
  Synthetic
cuauugugaauagcacaaga

SEQ ID NO: 215855 - RNA, 21 nt, Artificial Sequence
  Synthetic
gcuauugugaauagcacaaga

SEQ ID NO: 215856 - RNA, 22 nt, Artificial Sequence
  Synthetic
ugcuauugugaauagcacaaga

SEQ ID NO: 215857 - RNA, 23 nt, Artificial Sequence
  Synthetic
uugcuauugugaauagcacaaga

SEQ ID NO: 215858 - RNA, 24 nt, Artificial Sequence
  Synthetic
uuugcuauugugaauagcacaaga

SEQ ID NO: 215859 - RNA, 18 nt, Artificial Sequence
  Synthetic
auuauacuuagcacaaga

SEQ ID NO: 215860 - RNA, 19 nt, Artificial Sequence
  Synthetic
aauuauacuuagcacaaga

SEQ ID NO: 215861 - RNA, 20 nt, Artificial Sequence
  Synthetic
aaauuauacuuagcacaaga

SEQ ID NO: 215862 - RNA, 21 nt, Artificial Sequence
  Synthetic
caaauuauacuuagcacaaga

SEQ ID NO: 215863 - RNA, 22 nt, Artificial Sequence
  Synthetic
acaaauuauacuuagcacaaga

SEQ ID NO: 215864 - RNA, 23 nt, Artificial Sequence
  Synthetic
uacaaauuauacuuagcacaaga

SEQ ID NO: 215865 - RNA, 24 nt, Artificial Sequence
  Synthetic
cuacaaauuauacuuagcacaaga

SEQ ID NO: 215866 - RNA, 18 nt, Artificial Sequence
  Synthetic
uugaaaacuggcacaaga

SEQ ID NO: 215867 - RNA, 19 nt, Artificial Sequence
  Synthetic
uuugaaaacuggcacaaga

SEQ ID NO: 215868 - RNA, 20 nt, Artificial Sequence
  Synthetic
cuuugaaaacuggcacaaga

SEQ ID NO: 215869 - RNA, 18 nt, Artificial Sequence
  Synthetic
gaguuuauuggcacaaga

SEQ ID NO: 215870 - RNA, 19 nt, Artificial Sequence
  Synthetic
ugaguuuauuggcacaaga

SEQ ID NO: 215871 - RNA, 20 nt, Artificial Sequence
  Synthetic
augaguuuauuggcacaaga

SEQ ID NO: 215872 - RNA, 21 nt, Artificial Sequence
  Synthetic
gaugaguuuauuggcacaaga

SEQ ID NO: 215873 - RNA, 22 nt, Artificial Sequence
  Synthetic
ugaugaguuuauuggcacaaga

SEQ ID NO: 215874 - RNA, 23 nt, Artificial Sequence
  Synthetic
augaugaguuuauuggcacaaga

SEQ ID NO: 215875 - RNA, 24 nt, Artificial Sequence
  Synthetic
aaugaugaguuuauuggcacaaga

SEQ ID NO: 215876 - RNA, 18 nt, Artificial Sequence
  Synthetic
aaagaaaaaaagacaaga

SEQ ID NO: 215877 - RNA, 19 nt, Artificial Sequence
  Synthetic
gaaagaaaaaaagacaaga

SEQ ID NO: 215878 - RNA, 20 nt, Artificial Sequence
  Synthetic
ggaaagaaaaaaagacaaga

SEQ ID NO: 215879 - RNA, 21 nt, Artificial Sequence
  Synthetic
aggaaagaaaaaaagacaaga

SEQ ID NO: 215880 - RNA, 22 nt, Artificial Sequence
  Synthetic
aaggaaagaaaaaaagacaaga

SEQ ID NO: 215881 - RNA, 23 nt, Artificial Sequence
  Synthetic
caaggaaagaaaaaaagacaaga

SEQ ID NO: 215882 - RNA, 24 nt, Artificial Sequence
  Synthetic
gcaaggaaagaaaaaaagacaaga

SEQ ID NO: 215883 - RNA, 18 nt, Artificial Sequence
  Synthetic
gugugggaauagacaaga

SEQ ID NO: 215884 - RNA, 19 nt, Artificial Sequence
  Synthetic
ggugugggaauagacaaga

SEQ ID NO: 215885 - RNA, 20 nt, Artificial Sequence
  Synthetic
uggugugggaauagacaaga

SEQ ID NO: 215886 - RNA, 21 nt, Artificial Sequence
  Synthetic
guggugugggaauagacaaga

SEQ ID NO: 215887 - RNA, 22 nt, Artificial Sequence
  Synthetic
aguggugugggaauagacaaga

SEQ ID NO: 215888 - RNA, 23 nt, Artificial Sequence
  Synthetic
caguggugugggaauagacaaga

SEQ ID NO: 215889 - RNA, 24 nt, Artificial Sequence
  Synthetic
gcaguggugugggaauagacaaga

SEQ ID NO: 215890 - RNA, 18 nt, Artificial Sequence
  Synthetic
gagaucugaaugacaaga

SEQ ID NO: 215891 - RNA, 19 nt, Artificial Sequence
  Synthetic
agagaucugaaugacaaga

SEQ ID NO: 215892 - RNA, 20 nt, Artificial Sequence
  Synthetic
cagagaucugaaugacaaga

SEQ ID NO: 215893 - RNA, 21 nt, Artificial Sequence
  Synthetic
acagagaucugaaugacaaga

SEQ ID NO: 215894 - RNA, 22 nt, Artificial Sequence
  Synthetic
aacagagaucugaaugacaaga

SEQ ID NO: 215895 - RNA, 23 nt, Artificial Sequence
  Synthetic
aaacagagaucugaaugacaaga

SEQ ID NO: 215896 - RNA, 24 nt, Artificial Sequence
  Synthetic
uaaacagagaucugaaugacaaga

SEQ ID NO: 215897 - RNA, 18 nt, Artificial Sequence
  Synthetic
caggagaaagauacaaga

SEQ ID NO: 215898 - RNA, 19 nt, Artificial Sequence
  Synthetic
gcaggagaaagauacaaga

SEQ ID NO: 215899 - RNA, 20 nt, Artificial Sequence
  Synthetic
agcaggagaaagauacaaga

SEQ ID NO: 215900 - RNA, 21 nt, Artificial Sequence
  Synthetic
aagcaggagaaagauacaaga

SEQ ID NO: 215901 - RNA, 22 nt, Artificial Sequence
  Synthetic
uaagcaggagaaagauacaaga

SEQ ID NO: 215902 - RNA, 23 nt, Artificial Sequence
  Synthetic
uuaagcaggagaaagauacaaga

SEQ ID NO: 215903 - RNA, 24 nt, Artificial Sequence
  Synthetic
uuuaagcaggagaaagauacaaga

SEQ ID NO: 215904 - RNA, 18 nt, Artificial Sequence
  Synthetic
aagaaauugaguacaaga

SEQ ID NO: 215905 - RNA, 19 nt, Artificial Sequence
  Synthetic
aaagaaauugaguacaaga

SEQ ID NO: 215906 - RNA, 20 nt, Artificial Sequence
  Synthetic
uaaagaaauugaguacaaga

SEQ ID NO: 215907 - RNA, 21 nt, Artificial Sequence
  Synthetic
uuaaagaaauugaguacaaga

SEQ ID NO: 215908 - RNA, 22 nt, Artificial Sequence
  Synthetic
uuuaaagaaauugaguacaaga

SEQ ID NO: 215909 - RNA, 23 nt, Artificial Sequence
  Synthetic
auuuaaagaaauugaguacaaga

SEQ ID NO: 215910 - RNA, 24 nt, Artificial Sequence
  Synthetic
aauuuaaagaaauugaguacaaga

SEQ ID NO: 215911 - RNA, 18 nt, Artificial Sequence
  Synthetic
auuuuauaaauuacaaga

SEQ ID NO: 215912 - RNA, 19 nt, Artificial Sequence
  Synthetic
cauuuuauaaauuacaaga

SEQ ID NO: 215913 - RNA, 20 nt, Artificial Sequence
  Synthetic
acauuuuauaaauuacaaga

SEQ ID NO: 215914 - RNA, 21 nt, Artificial Sequence
  Synthetic
aacauuuuauaaauuacaaga

SEQ ID NO: 215915 - RNA, 22 nt, Artificial Sequence
  Synthetic
uaacauuuuauaaauuacaaga

SEQ ID NO: 215916 - RNA, 23 nt, Artificial Sequence
  Synthetic
cuaacauuuuauaaauuacaaga

SEQ ID NO: 215917 - RNA, 24 nt, Artificial Sequence
  Synthetic
acuaacauuuuauaaauuacaaga

SEQ ID NO: 215918 - RNA, 18 nt, Artificial Sequence
  Synthetic
aaaaacagcaaaccaaga

SEQ ID NO: 215919 - RNA, 19 nt, Artificial Sequence
  Synthetic
gaaaaacagcaaaccaaga

SEQ ID NO: 215920 - RNA, 20 nt, Artificial Sequence
  Synthetic
ggaaaaacagcaaaccaaga

SEQ ID NO: 215921 - RNA, 21 nt, Artificial Sequence
  Synthetic
aggaaaaacagcaaaccaaga

SEQ ID NO: 215922 - RNA, 22 nt, Artificial Sequence
  Synthetic
uaggaaaaacagcaaaccaaga

SEQ ID NO: 215923 - RNA, 23 nt, Artificial Sequence
  Synthetic
guaggaaaaacagcaaaccaaga

SEQ ID NO: 215924 - RNA, 24 nt, Artificial Sequence
  Synthetic
gguaggaaaaacagcaaaccaaga

SEQ ID NO: 215925 - RNA, 18 nt, Artificial Sequence
  Synthetic
aaauaagccagaccaaga

SEQ ID NO: 215926 - RNA, 19 nt, Artificial Sequence
  Synthetic
gaaauaagccagaccaaga

SEQ ID NO: 215927 - RNA, 20 nt, Artificial Sequence
  Synthetic
ugaaauaagccagaccaaga

SEQ ID NO: 215928 - RNA, 21 nt, Artificial Sequence
  Synthetic
augaaauaagccagaccaaga

SEQ ID NO: 215929 - RNA, 22 nt, Artificial Sequence
  Synthetic
aaugaaauaagccagaccaaga

SEQ ID NO: 215930 - RNA, 23 nt, Artificial Sequence
  Synthetic
aaaugaaauaagccagaccaaga

SEQ ID NO: 215931 - RNA, 24 nt, Artificial Sequence
  Synthetic
uaaaugaaauaagccagaccaaga

SEQ ID NO: 215932 - RNA, 18 nt, Artificial Sequence
  Synthetic
uguguacacugaccaaga

SEQ ID NO: 215933 - RNA, 19 nt, Artificial Sequence
  Synthetic
cuguguacacugaccaaga

SEQ ID NO: 215934 - RNA, 20 nt, Artificial Sequence
  Synthetic
acuguguacacugaccaaga

SEQ ID NO: 215935 - RNA, 21 nt, Artificial Sequence
  Synthetic
cacuguguacacugaccaaga

SEQ ID NO: 215936 - RNA, 22 nt, Artificial Sequence
  Synthetic
acacuguguacacugaccaaga

SEQ ID NO: 215937 - RNA, 23 nt, Artificial Sequence
  Synthetic
uacacuguguacacugaccaaga

SEQ ID NO: 215938 - RNA, 24 nt, Artificial Sequence
  Synthetic
guacacuguguacacugaccaaga

SEQ ID NO: 215939 - RNA, 18 nt, Artificial Sequence
  Synthetic
gcuucuuguaacccaaga

SEQ ID NO: 215940 - RNA, 19 nt, Artificial Sequence
  Synthetic
agcuucuuguaacccaaga

SEQ ID NO: 215941 - RNA, 20 nt, Artificial Sequence
  Synthetic
cagcuucuuguaacccaaga

SEQ ID NO: 215942 - RNA, 21 nt, Artificial Sequence
  Synthetic
ccagcuucuuguaacccaaga

SEQ ID NO: 215943 - RNA, 22 nt, Artificial Sequence
  Synthetic
gccagcuucuuguaacccaaga

SEQ ID NO: 215944 - RNA, 23 nt, Artificial Sequence
  Synthetic
agccagcuucuuguaacccaaga

SEQ ID NO: 215945 - RNA, 24 nt, Artificial Sequence
  Synthetic
gagccagcuucuuguaacccaaga

SEQ ID NO: 215946 - RNA, 18 nt, Artificial Sequence
  Synthetic
aucugaugacugccaaga

SEQ ID NO: 215947 - RNA, 19 nt, Artificial Sequence
  Synthetic
aaucugaugacugccaaga

SEQ ID NO: 215948 - RNA, 20 nt, Artificial Sequence
  Synthetic
aaaucugaugacugccaaga

SEQ ID NO: 215949 - RNA, 21 nt, Artificial Sequence
  Synthetic
caaaucugaugacugccaaga

SEQ ID NO: 215950 - RNA, 22 nt, Artificial Sequence
  Synthetic
acaaaucugaugacugccaaga

SEQ ID NO: 215951 - RNA, 23 nt, Artificial Sequence
  Synthetic
cacaaaucugaugacugccaaga

SEQ ID NO: 215952 - RNA, 24 nt, Artificial Sequence
  Synthetic
acacaaaucugaugacugccaaga

SEQ ID NO: 215953 - RNA, 18 nt, Artificial Sequence
  Synthetic
aaggagauacugccaaga

SEQ ID NO: 215954 - RNA, 19 nt, Artificial Sequence
  Synthetic
aaaggagauacugccaaga

SEQ ID NO: 215955 - RNA, 20 nt, Artificial Sequence
  Synthetic
caaaggagauacugccaaga

SEQ ID NO: 215956 - RNA, 21 nt, Artificial Sequence
  Synthetic
acaaaggagauacugccaaga

SEQ ID NO: 215957 - RNA, 22 nt, Artificial Sequence
  Synthetic
gacaaaggagauacugccaaga

SEQ ID NO: 215958 - RNA, 23 nt, Artificial Sequence
  Synthetic
agacaaaggagauacugccaaga

SEQ ID NO: 215959 - RNA, 24 nt, Artificial Sequence
  Synthetic
gagacaaaggagauacugccaaga

SEQ ID NO: 215960 - RNA, 18 nt, Artificial Sequence
  Synthetic
aguauguagacuccaaga

SEQ ID NO: 215961 - RNA, 19 nt, Artificial Sequence
  Synthetic
aaguauguagacuccaaga

SEQ ID NO: 215962 - RNA, 20 nt, Artificial Sequence
  Synthetic
uaaguauguagacuccaaga

SEQ ID NO: 215963 - RNA, 21 nt, Artificial Sequence
  Synthetic
guaaguauguagacuccaaga

SEQ ID NO: 215964 - RNA, 22 nt, Artificial Sequence
  Synthetic
aguaaguauguagacuccaaga

SEQ ID NO: 215965 - RNA, 23 nt, Artificial Sequence
  Synthetic
gaguaaguauguagacuccaaga

SEQ ID NO: 215966 - RNA, 24 nt, Artificial Sequence
  Synthetic
agaguaaguauguagacuccaaga

SEQ ID NO: 215967 - RNA, 18 nt, Artificial Sequence
  Synthetic
cuaaauuuucuuccaaga

SEQ ID NO: 215968 - RNA, 19 nt, Artificial Sequence
  Synthetic
ccuaaauuuucuuccaaga

SEQ ID NO: 215969 - RNA, 20 nt, Artificial Sequence
  Synthetic
gccuaaauuuucuuccaaga

SEQ ID NO: 215970 - RNA, 21 nt, Artificial Sequence
  Synthetic
ggccuaaauuuucuuccaaga

SEQ ID NO: 215971 - RNA, 22 nt, Artificial Sequence
  Synthetic
aggccuaaauuuucuuccaaga

SEQ ID NO: 215972 - RNA, 23 nt, Artificial Sequence
  Synthetic
aaggccuaaauuuucuuccaaga

SEQ ID NO: 215973 - RNA, 24 nt, Artificial Sequence
  Synthetic
aaaggccuaaauuuucuuccaaga

SEQ ID NO: 215974 - RNA, 18 nt, Artificial Sequence
  Synthetic
acuuucuuauuuccaaga

SEQ ID NO: 215975 - RNA, 19 nt, Artificial Sequence
  Synthetic
aacuuucuuauuuccaaga

SEQ ID NO: 215976 - RNA, 20 nt, Artificial Sequence
  Synthetic
uaacuuucuuauuuccaaga

SEQ ID NO: 215977 - RNA, 21 nt, Artificial Sequence
  Synthetic
cuaacuuucuuauuuccaaga

SEQ ID NO: 215978 - RNA, 22 nt, Artificial Sequence
  Synthetic
ucuaacuuucuuauuuccaaga

SEQ ID NO: 215979 - RNA, 23 nt, Artificial Sequence
  Synthetic
aucuaacuuucuuauuuccaaga

SEQ ID NO: 215980 - RNA, 24 nt, Artificial Sequence
  Synthetic
caucuaacuuucuuauuuccaaga

SEQ ID NO: 215981 - RNA, 18 nt, Artificial Sequence
  Synthetic
cagggcaguuuuccaaga

SEQ ID NO: 215982 - RNA, 19 nt, Artificial Sequence
  Synthetic
ucagggcaguuuuccaaga

SEQ ID NO: 215983 - RNA, 20 nt, Artificial Sequence
  Synthetic
cucagggcaguuuuccaaga

SEQ ID NO: 215984 - RNA, 21 nt, Artificial Sequence
  Synthetic
ucucagggcaguuuuccaaga

SEQ ID NO: 215985 - RNA, 22 nt, Artificial Sequence
  Synthetic
uucucagggcaguuuuccaaga

SEQ ID NO: 215986 - RNA, 23 nt, Artificial Sequence
  Synthetic
auucucagggcaguuuuccaaga

SEQ ID NO: 215987 - RNA, 24 nt, Artificial Sequence
  Synthetic
uauucucagggcaguuuuccaaga

SEQ ID NO: 215988 - RNA, 18 nt, Artificial Sequence
  Synthetic
guauuauaagcagcaaga

SEQ ID NO: 215989 - RNA, 19 nt, Artificial Sequence
  Synthetic
uguauuauaagcagcaaga

SEQ ID NO: 215990 - RNA, 20 nt, Artificial Sequence
  Synthetic
uuguauuauaagcagcaaga

SEQ ID NO: 215991 - RNA, 21 nt, Artificial Sequence
  Synthetic
auuguauuauaagcagcaaga

SEQ ID NO: 215992 - RNA, 22 nt, Artificial Sequence
  Synthetic
aauuguauuauaagcagcaaga

SEQ ID NO: 215993 - RNA, 23 nt, Artificial Sequence
  Synthetic
caauuguauuauaagcagcaaga

SEQ ID NO: 215994 - RNA, 24 nt, Artificial Sequence
  Synthetic
acaauuguauuauaagcagcaaga

SEQ ID NO: 215995 - RNA, 18 nt, Artificial Sequence
  Synthetic
ccagccugggcagcaaga

SEQ ID NO: 215996 - RNA, 19 nt, Artificial Sequence
  Synthetic
uccagccugggcagcaaga

SEQ ID NO: 215997 - RNA, 20 nt, Artificial Sequence
  Synthetic
cuccagccugggcagcaaga

SEQ ID NO: 215998 - RNA, 21 nt, Artificial Sequence
  Synthetic
acuccagccugggcagcaaga

SEQ ID NO: 215999 - RNA, 22 nt, Artificial Sequence
  Synthetic
uacuccagccugggcagcaaga

SEQ ID NO: 216000 - RNA, 23 nt, Artificial Sequence
  Synthetic
guacuccagccugggcagcaaga

SEQ ID NO: 216001 - RNA, 24 nt, Artificial Sequence
  Synthetic
uguacuccagccugggcagcaaga

SEQ ID NO: 216002 - RNA, 18 nt, Artificial Sequence
  Synthetic
auuaugucaucagcaaga

SEQ ID NO: 216003 - RNA, 19 nt, Artificial Sequence
  Synthetic
gauuaugucaucagcaaga

SEQ ID NO: 216004 - RNA, 20 nt, Artificial Sequence
  Synthetic
agauuaugucaucagcaaga

SEQ ID NO: 216005 - RNA, 21 nt, Artificial Sequence
  Synthetic
aagauuaugucaucagcaaga

SEQ ID NO: 216006 - RNA, 22 nt, Artificial Sequence
  Synthetic
uaagauuaugucaucagcaaga

SEQ ID NO: 216007 - RNA, 23 nt, Artificial Sequence
  Synthetic
auaagauuaugucaucagcaaga

SEQ ID NO: 216008 - RNA, 24 nt, Artificial Sequence
  Synthetic
uauaagauuaugucaucagcaaga

SEQ ID NO: 216009 - RNA, 18 nt, Artificial Sequence
  Synthetic
aagagagcaagagcaaga

SEQ ID NO: 216010 - RNA, 19 nt, Artificial Sequence
  Synthetic
aaagagagcaagagcaaga

SEQ ID NO: 216011 - RNA, 20 nt, Artificial Sequence
  Synthetic
gaaagagagcaagagcaaga

SEQ ID NO: 216012 - RNA, 21 nt, Artificial Sequence
  Synthetic
agaaagagagcaagagcaaga

SEQ ID NO: 216013 - RNA, 22 nt, Artificial Sequence
  Synthetic
aagaaagagagcaagagcaaga

SEQ ID NO: 216014 - RNA, 23 nt, Artificial Sequence
  Synthetic
aaagaaagagagcaagagcaaga

SEQ ID NO: 216015 - RNA, 24 nt, Artificial Sequence
  Synthetic
aaaagaaagagagcaagagcaaga

SEQ ID NO: 216016 - RNA, 18 nt, Artificial Sequence
  Synthetic
uagagaagacuagcaaga

SEQ ID NO: 216017 - RNA, 19 nt, Artificial Sequence
  Synthetic
guagagaagacuagcaaga

SEQ ID NO: 216018 - RNA, 20 nt, Artificial Sequence
  Synthetic
gguagagaagacuagcaaga

SEQ ID NO: 216019 - RNA, 21 nt, Artificial Sequence
  Synthetic
ugguagagaagacuagcaaga

SEQ ID NO: 216020 - RNA, 22 nt, Artificial Sequence
  Synthetic
augguagagaagacuagcaaga

SEQ ID NO: 216021 - RNA, 23 nt, Artificial Sequence
  Synthetic
aaugguagagaagacuagcaaga

SEQ ID NO: 216022 - RNA, 24 nt, Artificial Sequence
  Synthetic
gaaugguagagaagacuagcaaga

SEQ ID NO: 216023 - RNA, 18 nt, Artificial Sequence
  Synthetic
gguuguuuuaaggcaaga

SEQ ID NO: 216024 - RNA, 19 nt, Artificial Sequence
  Synthetic
ugguuguuuuaaggcaaga

SEQ ID NO: 216025 - RNA, 20 nt, Artificial Sequence
  Synthetic
uugguuguuuuaaggcaaga

SEQ ID NO: 216026 - RNA, 21 nt, Artificial Sequence
  Synthetic
cuugguuguuuuaaggcaaga

SEQ ID NO: 216027 - RNA, 22 nt, Artificial Sequence
  Synthetic
acuugguuguuuuaaggcaaga

SEQ ID NO: 216028 - RNA, 23 nt, Artificial Sequence
  Synthetic
gacuugguuguuuuaaggcaaga

SEQ ID NO: 216029 - RNA, 24 nt, Artificial Sequence
  Synthetic
cgacuugguuguuuuaaggcaaga

SEQ ID NO: 216030 - RNA, 18 nt, Artificial Sequence
  Synthetic
ugucacaugauggcaaga

SEQ ID NO: 216031 - RNA, 19 nt, Artificial Sequence
  Synthetic
uugucacaugauggcaaga

SEQ ID NO: 216032 - RNA, 20 nt, Artificial Sequence
  Synthetic
uuugucacaugauggcaaga

SEQ ID NO: 216033 - RNA, 21 nt, Artificial Sequence
  Synthetic
cuuugucacaugauggcaaga

SEQ ID NO: 216034 - RNA, 22 nt, Artificial Sequence
  Synthetic
ccuuugucacaugauggcaaga

SEQ ID NO: 216035 - RNA, 23 nt, Artificial Sequence
  Synthetic
uccuuugucacaugauggcaaga

SEQ ID NO: 216036 - RNA, 24 nt, Artificial Sequence
  Synthetic
auccuuugucacaugauggcaaga

SEQ ID NO: 216037 - RNA, 18 nt, Artificial Sequence
  Synthetic
cuuuauagcaaugcaaga

SEQ ID NO: 216038 - RNA, 19 nt, Artificial Sequence
  Synthetic
ucuuuauagcaaugcaaga

SEQ ID NO: 216039 - RNA, 20 nt, Artificial Sequence
  Synthetic
uucuuuauagcaaugcaaga

SEQ ID NO: 216040 - RNA, 18 nt, Artificial Sequence
  Synthetic
caucuuuuuccugcaaga

SEQ ID NO: 216041 - RNA, 19 nt, Artificial Sequence
  Synthetic
ucaucuuuuuccugcaaga

SEQ ID NO: 216042 - RNA, 20 nt, Artificial Sequence
  Synthetic
uucaucuuuuuccugcaaga

SEQ ID NO: 216043 - RNA, 21 nt, Artificial Sequence
  Synthetic
uuucaucuuuuuccugcaaga

SEQ ID NO: 216044 - RNA, 22 nt, Artificial Sequence
  Synthetic
guuucaucuuuuuccugcaaga

SEQ ID NO: 216045 - RNA, 23 nt, Artificial Sequence
  Synthetic
aguuucaucuuuuuccugcaaga

SEQ ID NO: 216046 - RNA, 24 nt, Artificial Sequence
  Synthetic
uaguuucaucuuuuuccugcaaga

SEQ ID NO: 216047 - RNA, 18 nt, Artificial Sequence
  Synthetic
augcuuugggcugcaaga

SEQ ID NO: 216048 - RNA, 19 nt, Artificial Sequence
  Synthetic
gaugcuuugggcugcaaga

SEQ ID NO: 216049 - RNA, 20 nt, Artificial Sequence
  Synthetic
agaugcuuugggcugcaaga

SEQ ID NO: 216050 - RNA, 21 nt, Artificial Sequence
  Synthetic
aagaugcuuugggcugcaaga

SEQ ID NO: 216051 - RNA, 22 nt, Artificial Sequence
  Synthetic
uaagaugcuuugggcugcaaga

SEQ ID NO: 216052 - RNA, 23 nt, Artificial Sequence
  Synthetic
uuaagaugcuuugggcugcaaga

SEQ ID NO: 216053 - RNA, 24 nt, Artificial Sequence
  Synthetic
guuaagaugcuuugggcugcaaga

SEQ ID NO: 216054 - RNA, 18 nt, Artificial Sequence
  Synthetic
cauccacauguugcaaga

SEQ ID NO: 216055 - RNA, 19 nt, Artificial Sequence
  Synthetic
ucauccacauguugcaaga

SEQ ID NO: 216056 - RNA, 20 nt, Artificial Sequence
  Synthetic
uucauccacauguugcaaga

SEQ ID NO: 216057 - RNA, 21 nt, Artificial Sequence
  Synthetic
uuucauccacauguugcaaga

SEQ ID NO: 216058 - RNA, 22 nt, Artificial Sequence
  Synthetic
auuucauccacauguugcaaga

SEQ ID NO: 216059 - RNA, 23 nt, Artificial Sequence
  Synthetic
aauuucauccacauguugcaaga

SEQ ID NO: 216060 - RNA, 24 nt, Artificial Sequence
  Synthetic
gaauuucauccacauguugcaaga

SEQ ID NO: 216061 - RNA, 18 nt, Artificial Sequence
  Synthetic
caaagucuuucaucaaga

SEQ ID NO: 216062 - RNA, 19 nt, Artificial Sequence
  Synthetic
ccaaagucuuucaucaaga

SEQ ID NO: 216063 - RNA, 20 nt, Artificial Sequence
  Synthetic
cccaaagucuuucaucaaga

SEQ ID NO: 216064 - RNA, 21 nt, Artificial Sequence
  Synthetic
ucccaaagucuuucaucaaga

SEQ ID NO: 216065 - RNA, 22 nt, Artificial Sequence
  Synthetic
uucccaaagucuuucaucaaga

SEQ ID NO: 216066 - RNA, 23 nt, Artificial Sequence
  Synthetic
cuucccaaagucuuucaucaaga

SEQ ID NO: 216067 - RNA, 24 nt, Artificial Sequence
  Synthetic
ucuucccaaagucuuucaucaaga

SEQ ID NO: 216068 - RNA, 18 nt, Artificial Sequence
  Synthetic
uaguaccagaccucaaga

SEQ ID NO: 216069 - RNA, 19 nt, Artificial Sequence
  Synthetic
uuaguaccagaccucaaga

SEQ ID NO: 216070 - RNA, 20 nt, Artificial Sequence
  Synthetic
uuuaguaccagaccucaaga

SEQ ID NO: 216071 - RNA, 21 nt, Artificial Sequence
  Synthetic
auuuaguaccagaccucaaga

SEQ ID NO: 216072 - RNA, 22 nt, Artificial Sequence
  Synthetic
aauuuaguaccagaccucaaga

SEQ ID NO: 216073 - RNA, 23 nt, Artificial Sequence
  Synthetic
uaauuuaguaccagaccucaaga

SEQ ID NO: 216074 - RNA, 24 nt, Artificial Sequence
  Synthetic
guaauuuaguaccagaccucaaga

SEQ ID NO: 216075 - RNA, 18 nt, Artificial Sequence
  Synthetic
ugaacagaaaucucaaga

SEQ ID NO: 216076 - RNA, 19 nt, Artificial Sequence
  Synthetic
uugaacagaaaucucaaga

SEQ ID NO: 216077 - RNA, 20 nt, Artificial Sequence
  Synthetic
uuugaacagaaaucucaaga

SEQ ID NO: 216078 - RNA, 21 nt, Artificial Sequence
  Synthetic
auuugaacagaaaucucaaga

SEQ ID NO: 216079 - RNA, 22 nt, Artificial Sequence
  Synthetic
uauuugaacagaaaucucaaga

SEQ ID NO: 216080 - RNA, 23 nt, Artificial Sequence
  Synthetic
auauuugaacagaaaucucaaga

SEQ ID NO: 216081 - RNA, 24 nt, Artificial Sequence
  Synthetic
gauauuugaacagaaaucucaaga

SEQ ID NO: 216082 - RNA, 18 nt, Artificial Sequence
  Synthetic
cacuucucagagucaaga

SEQ ID NO: 216083 - RNA, 19 nt, Artificial Sequence
  Synthetic
acacuucucagagucaaga

SEQ ID NO: 216084 - RNA, 20 nt, Artificial Sequence
  Synthetic
uacacuucucagagucaaga

SEQ ID NO: 216085 - RNA, 21 nt, Artificial Sequence
  Synthetic
uuacacuucucagagucaaga

SEQ ID NO: 216086 - RNA, 22 nt, Artificial Sequence
  Synthetic
uuuacacuucucagagucaaga

SEQ ID NO: 216087 - RNA, 23 nt, Artificial Sequence
  Synthetic
auuuacacuucucagagucaaga

SEQ ID NO: 216088 - RNA, 24 nt, Artificial Sequence
  Synthetic
aauuuacacuucucagagucaaga

SEQ ID NO: 216089 - RNA, 18 nt, Artificial Sequence
  Synthetic
ccacaccauuagucaaga

SEQ ID NO: 216090 - RNA, 19 nt, Artificial Sequence
  Synthetic
accacaccauuagucaaga

SEQ ID NO: 216091 - RNA, 20 nt, Artificial Sequence
  Synthetic
gaccacaccauuagucaaga

SEQ ID NO: 216092 - RNA, 21 nt, Artificial Sequence
  Synthetic
agaccacaccauuagucaaga

SEQ ID NO: 216093 - RNA, 22 nt, Artificial Sequence
  Synthetic
cagaccacaccauuagucaaga

SEQ ID NO: 216094 - RNA, 23 nt, Artificial Sequence
  Synthetic
gcagaccacaccauuagucaaga

SEQ ID NO: 216095 - RNA, 24 nt, Artificial Sequence
  Synthetic
ugcagaccacaccauuagucaaga

SEQ ID NO: 216096 - RNA, 18 nt, Artificial Sequence
  Synthetic
ggaauucguuagucaaga

SEQ ID NO: 216097 - RNA, 19 nt, Artificial Sequence
  Synthetic
aggaauucguuagucaaga

SEQ ID NO: 216098 - RNA, 20 nt, Artificial Sequence
  Synthetic
aaggaauucguuagucaaga

SEQ ID NO: 216099 - RNA, 21 nt, Artificial Sequence
  Synthetic
caaggaauucguuagucaaga

SEQ ID NO: 216100 - RNA, 22 nt, Artificial Sequence
  Synthetic
ucaaggaauucguuagucaaga

SEQ ID NO: 216101 - RNA, 23 nt, Artificial Sequence
  Synthetic
cucaaggaauucguuagucaaga

SEQ ID NO: 216102 - RNA, 24 nt, Artificial Sequence
  Synthetic
acucaaggaauucguuagucaaga

SEQ ID NO: 216103 - RNA, 18 nt, Artificial Sequence
  Synthetic
cucuuuaaaaauucaaga

SEQ ID NO: 216104 - RNA, 19 nt, Artificial Sequence
  Synthetic
ucucuuuaaaaauucaaga

SEQ ID NO: 216105 - RNA, 20 nt, Artificial Sequence
  Synthetic
aucucuuuaaaaauucaaga

SEQ ID NO: 216106 - RNA, 21 nt, Artificial Sequence
  Synthetic
aaucucuuuaaaaauucaaga

SEQ ID NO: 216107 - RNA, 22 nt, Artificial Sequence
  Synthetic
caaucucuuuaaaaauucaaga

SEQ ID NO: 216108 - RNA, 23 nt, Artificial Sequence
  Synthetic
ucaaucucuuuaaaaauucaaga

SEQ ID NO: 216109 - RNA, 24 nt, Artificial Sequence
  Synthetic
aucaaucucuuuaaaaauucaaga

SEQ ID NO: 216110 - RNA, 18 nt, Artificial Sequence
  Synthetic
accaauacauauucaaga

SEQ ID NO: 216111 - RNA, 19 nt, Artificial Sequence
  Synthetic
gaccaauacauauucaaga

SEQ ID NO: 216112 - RNA, 20 nt, Artificial Sequence
  Synthetic
ggaccaauacauauucaaga

SEQ ID NO: 216113 - RNA, 21 nt, Artificial Sequence
  Synthetic
uggaccaauacauauucaaga

SEQ ID NO: 216114 - RNA, 22 nt, Artificial Sequence
  Synthetic
cuggaccaauacauauucaaga

SEQ ID NO: 216115 - RNA, 23 nt, Artificial Sequence
  Synthetic
acuggaccaauacauauucaaga

SEQ ID NO: 216116 - RNA, 24 nt, Artificial Sequence
  Synthetic
cacuggaccaauacauauucaaga

SEQ ID NO: 216117 - RNA, 18 nt, Artificial Sequence
  Synthetic
ucagcauccacuucaaga

SEQ ID NO: 216118 - RNA, 19 nt, Artificial Sequence
  Synthetic
aucagcauccacuucaaga

SEQ ID NO: 216119 - RNA, 20 nt, Artificial Sequence
  Synthetic
aaucagcauccacuucaaga

SEQ ID NO: 216120 - RNA, 21 nt, Artificial Sequence
  Synthetic
uaaucagcauccacuucaaga

SEQ ID NO: 216121 - RNA, 22 nt, Artificial Sequence
  Synthetic
guaaucagcauccacuucaaga

SEQ ID NO: 216122 - RNA, 23 nt, Artificial Sequence
  Synthetic
uguaaucagcauccacuucaaga

SEQ ID NO: 216123 - RNA, 24 nt, Artificial Sequence
  Synthetic
auguaaucagcauccacuucaaga

SEQ ID NO: 216124 - RNA, 18 nt, Artificial Sequence
  Synthetic
gucucgcugacuucaaga

SEQ ID NO: 216125 - RNA, 19 nt, Artificial Sequence
  Synthetic
ggucucgcugacuucaaga

SEQ ID NO: 216126 - RNA, 20 nt, Artificial Sequence
  Synthetic
uggucucgcugacuucaaga

SEQ ID NO: 216127 - RNA, 21 nt, Artificial Sequence
  Synthetic
guggucucgcugacuucaaga

SEQ ID NO: 216128 - RNA, 22 nt, Artificial Sequence
  Synthetic
cguggucucgcugacuucaaga

SEQ ID NO: 216129 - RNA, 23 nt, Artificial Sequence
  Synthetic
ucguggucucgcugacuucaaga

SEQ ID NO: 216130 - RNA, 24 nt, Artificial Sequence
  Synthetic
uucguggucucgcugacuucaaga

SEQ ID NO: 216131 - RNA, 18 nt, Artificial Sequence
  Synthetic
auuuaacacucuucaaga

SEQ ID NO: 216132 - RNA, 19 nt, Artificial Sequence
  Synthetic
uauuuaacacucuucaaga

SEQ ID NO: 216133 - RNA, 20 nt, Artificial Sequence
  Synthetic
cuauuuaacacucuucaaga

SEQ ID NO: 216134 - RNA, 21 nt, Artificial Sequence
  Synthetic
gcuauuuaacacucuucaaga

SEQ ID NO: 216135 - RNA, 22 nt, Artificial Sequence
  Synthetic
ugcuauuuaacacucuucaaga

SEQ ID NO: 216136 - RNA, 23 nt, Artificial Sequence
  Synthetic
augcuauuuaacacucuucaaga

SEQ ID NO: 216137 - RNA, 24 nt, Artificial Sequence
  Synthetic
uaugcuauuuaacacucuucaaga

SEQ ID NO: 216138 - RNA, 18 nt, Artificial Sequence
  Synthetic
guauucaagucuucaaga

SEQ ID NO: 216139 - RNA, 19 nt, Artificial Sequence
  Synthetic
gguauucaagucuucaaga

SEQ ID NO: 216140 - RNA, 20 nt, Artificial Sequence
  Synthetic
ugguauucaagucuucaaga

SEQ ID NO: 216141 - RNA, 21 nt, Artificial Sequence
  Synthetic
uugguauucaagucuucaaga

SEQ ID NO: 216142 - RNA, 22 nt, Artificial Sequence
  Synthetic
auugguauucaagucuucaaga

SEQ ID NO: 216143 - RNA, 23 nt, Artificial Sequence
  Synthetic
aauugguauucaagucuucaaga

SEQ ID NO: 216144 - RNA, 24 nt, Artificial Sequence
  Synthetic
uaauugguauucaagucuucaaga

SEQ ID NO: 216145 - RNA, 18 nt, Artificial Sequence
  Synthetic
uuaauaauuaaaagaaga

SEQ ID NO: 216146 - RNA, 19 nt, Artificial Sequence
  Synthetic
uuuaauaauuaaaagaaga

SEQ ID NO: 216147 - RNA, 20 nt, Artificial Sequence
  Synthetic
uuuuaauaauuaaaagaaga

SEQ ID NO: 216148 - RNA, 21 nt, Artificial Sequence
  Synthetic
uuuuuaauaauuaaaagaaga

SEQ ID NO: 216149 - RNA, 22 nt, Artificial Sequence
  Synthetic
auuuuuaauaauuaaaagaaga

SEQ ID NO: 216150 - RNA, 23 nt, Artificial Sequence
  Synthetic
gauuuuuaauaauuaaaagaaga

SEQ ID NO: 216151 - RNA, 24 nt, Artificial Sequence
  Synthetic
agauuuuuaauaauuaaaagaaga

SEQ ID NO: 216152 - RNA, 18 nt, Artificial Sequence
  Synthetic
aggaggugacaaagaaga

SEQ ID NO: 216153 - RNA, 19 nt, Artificial Sequence
  Synthetic
aaggaggugacaaagaaga

SEQ ID NO: 216154 - RNA, 20 nt, Artificial Sequence
  Synthetic
caaggaggugacaaagaaga

SEQ ID NO: 216155 - RNA, 21 nt, Artificial Sequence
  Synthetic
ucaaggaggugacaaagaaga

SEQ ID NO: 216156 - RNA, 22 nt, Artificial Sequence
  Synthetic
uucaaggaggugacaaagaaga

SEQ ID NO: 216157 - RNA, 23 nt, Artificial Sequence
  Synthetic
guucaaggaggugacaaagaaga

SEQ ID NO: 216158 - RNA, 24 nt, Artificial Sequence
  Synthetic
aguucaaggaggugacaaagaaga

SEQ ID NO: 216159 - RNA, 18 nt, Artificial Sequence
  Synthetic
uauaaggaagaaagaaga

SEQ ID NO: 216160 - RNA, 19 nt, Artificial Sequence
  Synthetic
guauaaggaagaaagaaga

SEQ ID NO: 216161 - RNA, 20 nt, Artificial Sequence
  Synthetic
aguauaaggaagaaagaaga

SEQ ID NO: 216162 - RNA, 21 nt, Artificial Sequence
  Synthetic
aaguauaaggaagaaagaaga

SEQ ID NO: 216163 - RNA, 22 nt, Artificial Sequence
  Synthetic
aaaguauaaggaagaaagaaga

SEQ ID NO: 216164 - RNA, 23 nt, Artificial Sequence
  Synthetic
uaaaguauaaggaagaaagaaga

SEQ ID NO: 216165 - RNA, 24 nt, Artificial Sequence
  Synthetic
uuaaaguauaaggaagaaagaaga

SEQ ID NO: 216166 - RNA, 18 nt, Artificial Sequence
  Synthetic
auaagaagaagaagaaga

SEQ ID NO: 216167 - RNA, 19 nt, Artificial Sequence
  Synthetic
cauaagaagaagaagaaga

SEQ ID NO: 216168 - RNA, 20 nt, Artificial Sequence
  Synthetic
ccauaagaagaagaagaaga

SEQ ID NO: 216169 - RNA, 21 nt, Artificial Sequence
  Synthetic
accauaagaagaagaagaaga

SEQ ID NO: 216170 - RNA, 22 nt, Artificial Sequence
  Synthetic
uaccauaagaagaagaagaaga

SEQ ID NO: 216171 - RNA, 23 nt, Artificial Sequence
  Synthetic
cuaccauaagaagaagaagaaga

SEQ ID NO: 216172 - RNA, 24 nt, Artificial Sequence
  Synthetic
ccuaccauaagaagaagaagaaga

SEQ ID NO: 216173 - RNA, 18 nt, Artificial Sequence
  Synthetic
uaaaauagaagaagaaga

SEQ ID NO: 216174 - RNA, 19 nt, Artificial Sequence
  Synthetic
auaaaauagaagaagaaga

SEQ ID NO: 216175 - RNA, 20 nt, Artificial Sequence
  Synthetic
aauaaaauagaagaagaaga

SEQ ID NO: 216176 - RNA, 21 nt, Artificial Sequence
  Synthetic
caauaaaauagaagaagaaga

SEQ ID NO: 216177 - RNA, 22 nt, Artificial Sequence
  Synthetic
ucaauaaaauagaagaagaaga

SEQ ID NO: 216178 - RNA, 23 nt, Artificial Sequence
  Synthetic
gucaauaaaauagaagaagaaga

SEQ ID NO: 216179 - RNA, 24 nt, Artificial Sequence
  Synthetic
agucaauaaaauagaagaagaaga

SEQ ID NO: 216180 - RNA, 18 nt, Artificial Sequence
  Synthetic
agaaagugaagaagaaga

SEQ ID NO: 216181 - RNA, 19 nt, Artificial Sequence
  Synthetic
gagaaagugaagaagaaga

SEQ ID NO: 216182 - RNA, 20 nt, Artificial Sequence
  Synthetic
ggagaaagugaagaagaaga

SEQ ID NO: 216183 - RNA, 21 nt, Artificial Sequence
  Synthetic
aggagaaagugaagaagaaga

SEQ ID NO: 216184 - RNA, 22 nt, Artificial Sequence
  Synthetic
aaggagaaagugaagaagaaga

SEQ ID NO: 216185 - RNA, 23 nt, Artificial Sequence
  Synthetic
gaaggagaaagugaagaagaaga

SEQ ID NO: 216186 - RNA, 24 nt, Artificial Sequence
  Synthetic
agaaggagaaagugaagaagaaga

SEQ ID NO: 216187 - RNA, 18 nt, Artificial Sequence
  Synthetic
gggaauugcagaagaaga

SEQ ID NO: 216188 - RNA, 19 nt, Artificial Sequence
  Synthetic
cgggaauugcagaagaaga

SEQ ID NO: 216189 - RNA, 20 nt, Artificial Sequence
  Synthetic
ucgggaauugcagaagaaga

SEQ ID NO: 216190 - RNA, 21 nt, Artificial Sequence
  Synthetic
aucgggaauugcagaagaaga

SEQ ID NO: 216191 - RNA, 22 nt, Artificial Sequence
  Synthetic
gaucgggaauugcagaagaaga

SEQ ID NO: 216192 - RNA, 23 nt, Artificial Sequence
  Synthetic
ugaucgggaauugcagaagaaga

SEQ ID NO: 216193 - RNA, 24 nt, Artificial Sequence
  Synthetic
uugaucgggaauugcagaagaaga

SEQ ID NO: 216194 - RNA, 18 nt, Artificial Sequence
  Synthetic
cucugagauagaagaaga

SEQ ID NO: 216195 - RNA, 19 nt, Artificial Sequence
  Synthetic
acucugagauagaagaaga

SEQ ID NO: 216196 - RNA, 20 nt, Artificial Sequence
  Synthetic
gacucugagauagaagaaga

SEQ ID NO: 216197 - RNA, 21 nt, Artificial Sequence
  Synthetic
ggacucugagauagaagaaga

SEQ ID NO: 216198 - RNA, 22 nt, Artificial Sequence
  Synthetic
uggacucugagauagaagaaga

SEQ ID NO: 216199 - RNA, 23 nt, Artificial Sequence
  Synthetic
guggacucugagauagaagaaga

SEQ ID NO: 216200 - RNA, 24 nt, Artificial Sequence
  Synthetic
uguggacucugagauagaagaaga

SEQ ID NO: 216201 - RNA, 18 nt, Artificial Sequence
  Synthetic
gaucacgaggucagaaga

SEQ ID NO: 216202 - RNA, 19 nt, Artificial Sequence
  Synthetic
ggaucacgaggucagaaga

SEQ ID NO: 216203 - RNA, 20 nt, Artificial Sequence
  Synthetic
cggaucacgaggucagaaga

SEQ ID NO: 216204 - RNA, 21 nt, Artificial Sequence
  Synthetic
gcggaucacgaggucagaaga

SEQ ID NO: 216205 - RNA, 22 nt, Artificial Sequence
  Synthetic
ggcggaucacgaggucagaaga

SEQ ID NO: 216206 - RNA, 23 nt, Artificial Sequence
  Synthetic
gggcggaucacgaggucagaaga

SEQ ID NO: 216207 - RNA, 24 nt, Artificial Sequence
  Synthetic
cgggcggaucacgaggucagaaga

SEQ ID NO: 216208 - RNA, 18 nt, Artificial Sequence
  Synthetic
gaaaaaagaaagagaaga

SEQ ID NO: 216209 - RNA, 19 nt, Artificial Sequence
  Synthetic
agaaaaaagaaagagaaga

SEQ ID NO: 216210 - RNA, 20 nt, Artificial Sequence
  Synthetic
aagaaaaaagaaagagaaga

SEQ ID NO: 216211 - RNA, 21 nt, Artificial Sequence
  Synthetic
uaagaaaaaagaaagagaaga

SEQ ID NO: 216212 - RNA, 22 nt, Artificial Sequence
  Synthetic
guaagaaaaaagaaagagaaga

SEQ ID NO: 216213 - RNA, 23 nt, Artificial Sequence
  Synthetic
gguaagaaaaaagaaagagaaga

SEQ ID NO: 216214 - RNA, 24 nt, Artificial Sequence
  Synthetic
agguaagaaaaaagaaagagaaga

SEQ ID NO: 216215 - RNA, 18 nt, Artificial Sequence
  Synthetic
gggagagacaagagaaga

SEQ ID NO: 216216 - RNA, 19 nt, Artificial Sequence
  Synthetic
ggggagagacaagagaaga

SEQ ID NO: 216217 - RNA, 20 nt, Artificial Sequence
  Synthetic
uggggagagacaagagaaga

SEQ ID NO: 216218 - RNA, 21 nt, Artificial Sequence
  Synthetic
uuggggagagacaagagaaga

SEQ ID NO: 216219 - RNA, 22 nt, Artificial Sequence
  Synthetic
uuuggggagagacaagagaaga

SEQ ID NO: 216220 - RNA, 23 nt, Artificial Sequence
  Synthetic
uuuuggggagagacaagagaaga

SEQ ID NO: 216221 - RNA, 24 nt, Artificial Sequence
  Synthetic
cuuuuggggagagacaagagaaga

SEQ ID NO: 216222 - RNA, 18 nt, Artificial Sequence
  Synthetic
aggcagagcuagagaaga

SEQ ID NO: 216223 - RNA, 19 nt, Artificial Sequence
  Synthetic
aaggcagagcuagagaaga

SEQ ID NO: 216224 - RNA, 20 nt, Artificial Sequence
  Synthetic
uaaggcagagcuagagaaga

SEQ ID NO: 216225 - RNA, 21 nt, Artificial Sequence
  Synthetic
cuaaggcagagcuagagaaga

SEQ ID NO: 216226 - RNA, 22 nt, Artificial Sequence
  Synthetic
gcuaaggcagagcuagagaaga

SEQ ID NO: 216227 - RNA, 23 nt, Artificial Sequence
  Synthetic
agcuaaggcagagcuagagaaga

SEQ ID NO: 216228 - RNA, 24 nt, Artificial Sequence
  Synthetic
uagcuaaggcagagcuagagaaga

SEQ ID NO: 216229 - RNA, 18 nt, Artificial Sequence
  Synthetic
caaaaguuguagagaaga

SEQ ID NO: 216230 - RNA, 19 nt, Artificial Sequence
  Synthetic
gcaaaaguuguagagaaga

SEQ ID NO: 216231 - RNA, 20 nt, Artificial Sequence
  Synthetic
agcaaaaguuguagagaaga

SEQ ID NO: 216232 - RNA, 21 nt, Artificial Sequence
  Synthetic
cagcaaaaguuguagagaaga

SEQ ID NO: 216233 - RNA, 22 nt, Artificial Sequence
  Synthetic
ucagcaaaaguuguagagaaga

SEQ ID NO: 216234 - RNA, 23 nt, Artificial Sequence
  Synthetic
uucagcaaaaguuguagagaaga

SEQ ID NO: 216235 - RNA, 24 nt, Artificial Sequence
  Synthetic
cuucagcaaaaguuguagagaaga

SEQ ID NO: 216236 - RNA, 18 nt, Artificial Sequence
  Synthetic
aaacaauacaggagaaga

SEQ ID NO: 216237 - RNA, 19 nt, Artificial Sequence
  Synthetic
gaaacaauacaggagaaga

SEQ ID NO: 216238 - RNA, 20 nt, Artificial Sequence
  Synthetic
ggaaacaauacaggagaaga

SEQ ID NO: 216239 - RNA, 21 nt, Artificial Sequence
  Synthetic
gggaaacaauacaggagaaga

SEQ ID NO: 216240 - RNA, 22 nt, Artificial Sequence
  Synthetic
agggaaacaauacaggagaaga

SEQ ID NO: 216241 - RNA, 23 nt, Artificial Sequence
  Synthetic
uagggaaacaauacaggagaaga

SEQ ID NO: 216242 - RNA, 24 nt, Artificial Sequence
  Synthetic
uuagggaaacaauacaggagaaga

SEQ ID NO: 216243 - RNA, 18 nt, Artificial Sequence
  Synthetic
uugaguuagaugagaaga

SEQ ID NO: 216244 - RNA, 19 nt, Artificial Sequence
  Synthetic
cuugaguuagaugagaaga

SEQ ID NO: 216245 - RNA, 20 nt, Artificial Sequence
  Synthetic
ccuugaguuagaugagaaga

SEQ ID NO: 216246 - RNA, 21 nt, Artificial Sequence
  Synthetic
uccuugaguuagaugagaaga

SEQ ID NO: 216247 - RNA, 22 nt, Artificial Sequence
  Synthetic
auccuugaguuagaugagaaga

SEQ ID NO: 216248 - RNA, 23 nt, Artificial Sequence
  Synthetic
gauccuugaguuagaugagaaga

SEQ ID NO: 216249 - RNA, 24 nt, Artificial Sequence
  Synthetic
ggauccuugaguuagaugagaaga

SEQ ID NO: 216250 - RNA, 18 nt, Artificial Sequence
  Synthetic
cuucccuuacugagaaga

SEQ ID NO: 216251 - RNA, 19 nt, Artificial Sequence
  Synthetic
ccuucccuuacugagaaga

SEQ ID NO: 216252 - RNA, 20 nt, Artificial Sequence
  Synthetic
uccuucccuuacugagaaga

SEQ ID NO: 216253 - RNA, 21 nt, Artificial Sequence
  Synthetic
auccuucccuuacugagaaga

SEQ ID NO: 216254 - RNA, 22 nt, Artificial Sequence
  Synthetic
aauccuucccuuacugagaaga

SEQ ID NO: 216255 - RNA, 23 nt, Artificial Sequence
  Synthetic
aaauccuucccuuacugagaaga

SEQ ID NO: 216256 - RNA, 24 nt, Artificial Sequence
  Synthetic
aaaauccuucccuuacugagaaga

SEQ ID NO: 216257 - RNA, 18 nt, Artificial Sequence
  Synthetic
ucuauugacaauagaaga

SEQ ID NO: 216258 - RNA, 19 nt, Artificial Sequence
  Synthetic
uucuauugacaauagaaga

SEQ ID NO: 216259 - RNA, 20 nt, Artificial Sequence
  Synthetic
guucuauugacaauagaaga

SEQ ID NO: 216260 - RNA, 21 nt, Artificial Sequence
  Synthetic
gguucuauugacaauagaaga

SEQ ID NO: 216261 - RNA, 22 nt, Artificial Sequence
  Synthetic
ggguucuauugacaauagaaga

SEQ ID NO: 216262 - RNA, 23 nt, Artificial Sequence
  Synthetic
uggguucuauugacaauagaaga

SEQ ID NO: 216263 - RNA, 24 nt, Artificial Sequence
  Synthetic
cuggguucuauugacaauagaaga

SEQ ID NO: 216264 - RNA, 18 nt, Artificial Sequence
  Synthetic
auagagaagaauagaaga

SEQ ID NO: 216265 - RNA, 19 nt, Artificial Sequence
  Synthetic
uauagagaagaauagaaga

SEQ ID NO: 216266 - RNA, 20 nt, Artificial Sequence
  Synthetic
guauagagaagaauagaaga

SEQ ID NO: 216267 - RNA, 21 nt, Artificial Sequence
  Synthetic
uguauagagaagaauagaaga

SEQ ID NO: 216268 - RNA, 22 nt, Artificial Sequence
  Synthetic
uuguauagagaagaauagaaga

SEQ ID NO: 216269 - RNA, 23 nt, Artificial Sequence
  Synthetic
cuuguauagagaagaauagaaga

SEQ ID NO: 216270 - RNA, 24 nt, Artificial Sequence
  Synthetic
acuuguauagagaagaauagaaga

SEQ ID NO: 216271 - RNA, 18 nt, Artificial Sequence
  Synthetic
aucacuucucauagaaga

SEQ ID NO: 216272 - RNA, 19 nt, Artificial Sequence
  Synthetic
aaucacuucucauagaaga

SEQ ID NO: 216273 - RNA, 20 nt, Artificial Sequence
  Synthetic
gaaucacuucucauagaaga

SEQ ID NO: 216274 - RNA, 21 nt, Artificial Sequence
  Synthetic
ggaaucacuucucauagaaga

SEQ ID NO: 216275 - RNA, 22 nt, Artificial Sequence
  Synthetic
uggaaucacuucucauagaaga

SEQ ID NO: 216276 - RNA, 23 nt, Artificial Sequence
  Synthetic
auggaaucacuucucauagaaga

SEQ ID NO: 216277 - RNA, 24 nt, Artificial Sequence
  Synthetic
gauggaaucacuucucauagaaga

SEQ ID NO: 216278 - RNA, 18 nt, Artificial Sequence
  Synthetic
aaauuaaucaguagaaga

SEQ ID NO: 216279 - RNA, 19 nt, Artificial Sequence
  Synthetic
uaaauuaaucaguagaaga

SEQ ID NO: 216280 - RNA, 20 nt, Artificial Sequence
  Synthetic
guaaauuaaucaguagaaga

SEQ ID NO: 216281 - RNA, 21 nt, Artificial Sequence
  Synthetic
gguaaauuaaucaguagaaga

SEQ ID NO: 216282 - RNA, 22 nt, Artificial Sequence
  Synthetic
ggguaaauuaaucaguagaaga

SEQ ID NO: 216283 - RNA, 23 nt, Artificial Sequence
  Synthetic
gggguaaauuaaucaguagaaga

SEQ ID NO: 216284 - RNA, 24 nt, Artificial Sequence
  Synthetic
ggggguaaauuaaucaguagaaga

SEQ ID NO: 216285 - RNA, 18 nt, Artificial Sequence
  Synthetic
gauuauuuaguuagaaga

SEQ ID NO: 216286 - RNA, 19 nt, Artificial Sequence
  Synthetic
agauuauuuaguuagaaga

SEQ ID NO: 216287 - RNA, 20 nt, Artificial Sequence
  Synthetic
uagauuauuuaguuagaaga

SEQ ID NO: 216288 - RNA, 21 nt, Artificial Sequence
  Synthetic
uuagauuauuuaguuagaaga

SEQ ID NO: 216289 - RNA, 22 nt, Artificial Sequence
  Synthetic
auuagauuauuuaguuagaaga

SEQ ID NO: 216290 - RNA, 23 nt, Artificial Sequence
  Synthetic
cauuagauuauuuaguuagaaga

SEQ ID NO: 216291 - RNA, 24 nt, Artificial Sequence
  Synthetic
gcauuagauuauuuaguuagaaga

SEQ ID NO: 216292 - RNA, 18 nt, Artificial Sequence
  Synthetic
ccagaggaauuuagaaga

SEQ ID NO: 216293 - RNA, 19 nt, Artificial Sequence
  Synthetic
accagaggaauuuagaaga

SEQ ID NO: 216294 - RNA, 20 nt, Artificial Sequence
  Synthetic
caccagaggaauuuagaaga

SEQ ID NO: 216295 - RNA, 21 nt, Artificial Sequence
  Synthetic
acaccagaggaauuuagaaga

SEQ ID NO: 216296 - RNA, 22 nt, Artificial Sequence
  Synthetic
gacaccagaggaauuuagaaga

SEQ ID NO: 216297 - RNA, 23 nt, Artificial Sequence
  Synthetic
agacaccagaggaauuuagaaga

SEQ ID NO: 216298 - RNA, 24 nt, Artificial Sequence
  Synthetic
aagacaccagaggaauuuagaaga

SEQ ID NO: 216299 - RNA, 18 nt, Artificial Sequence
  Synthetic
agugcuaggaaacgaaga

SEQ ID NO: 216300 - RNA, 19 nt, Artificial Sequence
  Synthetic
aagugcuaggaaacgaaga

SEQ ID NO: 216301 - RNA, 20 nt, Artificial Sequence
  Synthetic
gaagugcuaggaaacgaaga

SEQ ID NO: 216302 - RNA, 21 nt, Artificial Sequence
  Synthetic
agaagugcuaggaaacgaaga

SEQ ID NO: 216303 - RNA, 22 nt, Artificial Sequence
  Synthetic
cagaagugcuaggaaacgaaga

SEQ ID NO: 216304 - RNA, 23 nt, Artificial Sequence
  Synthetic
ucagaagugcuaggaaacgaaga

SEQ ID NO: 216305 - RNA, 24 nt, Artificial Sequence
  Synthetic
uucagaagugcuaggaaacgaaga

SEQ ID NO: 216306 - RNA, 18 nt, Artificial Sequence
  Synthetic
gaauuucaacagcgaaga

SEQ ID NO: 216307 - RNA, 19 nt, Artificial Sequence
  Synthetic
agaauuucaacagcgaaga

SEQ ID NO: 216308 - RNA, 20 nt, Artificial Sequence
  Synthetic
uagaauuucaacagcgaaga

SEQ ID NO: 216309 - RNA, 21 nt, Artificial Sequence
  Synthetic
guagaauuucaacagcgaaga

SEQ ID NO: 216310 - RNA, 22 nt, Artificial Sequence
  Synthetic
uguagaauuucaacagcgaaga

SEQ ID NO: 216311 - RNA, 23 nt, Artificial Sequence
  Synthetic
guguagaauuucaacagcgaaga

SEQ ID NO: 216312 - RNA, 24 nt, Artificial Sequence
  Synthetic
uguguagaauuucaacagcgaaga

SEQ ID NO: 216313 - RNA, 18 nt, Artificial Sequence
  Synthetic
aaaguagucaaaggaaga

SEQ ID NO: 216314 - RNA, 19 nt, Artificial Sequence
  Synthetic
aaaaguagucaaaggaaga

SEQ ID NO: 216315 - RNA, 20 nt, Artificial Sequence
  Synthetic
caaaaguagucaaaggaaga

SEQ ID NO: 216316 - RNA, 21 nt, Artificial Sequence
  Synthetic
ucaaaaguagucaaaggaaga

SEQ ID NO: 216317 - RNA, 22 nt, Artificial Sequence
  Synthetic
aucaaaaguagucaaaggaaga

SEQ ID NO: 216318 - RNA, 23 nt, Artificial Sequence
  Synthetic
gaucaaaaguagucaaaggaaga

SEQ ID NO: 216319 - RNA, 24 nt, Artificial Sequence
  Synthetic
agaucaaaaguagucaaaggaaga

SEQ ID NO: 216320 - RNA, 18 nt, Artificial Sequence
  Synthetic
gaaaaaaagaaaggaaga

SEQ ID NO: 216321 - RNA, 19 nt, Artificial Sequence
  Synthetic
ugaaaaaaagaaaggaaga

SEQ ID NO: 216322 - RNA, 20 nt, Artificial Sequence
  Synthetic
uugaaaaaaagaaaggaaga

SEQ ID NO: 216323 - RNA, 21 nt, Artificial Sequence
  Synthetic
cuugaaaaaaagaaaggaaga

SEQ ID NO: 216324 - RNA, 22 nt, Artificial Sequence
  Synthetic
ucuugaaaaaaagaaaggaaga

SEQ ID NO: 216325 - RNA, 23 nt, Artificial Sequence
  Synthetic
cucuugaaaaaaagaaaggaaga

SEQ ID NO: 216326 - RNA, 24 nt, Artificial Sequence
  Synthetic
ucucuugaaaaaaagaaaggaaga

SEQ ID NO: 216327 - RNA, 18 nt, Artificial Sequence
  Synthetic
cugacucugcaaggaaga

SEQ ID NO: 216328 - RNA, 19 nt, Artificial Sequence
  Synthetic
ucugacucugcaaggaaga

SEQ ID NO: 216329 - RNA, 20 nt, Artificial Sequence
  Synthetic
uucugacucugcaaggaaga

SEQ ID NO: 216330 - RNA, 21 nt, Artificial Sequence
  Synthetic
auucugacucugcaaggaaga

SEQ ID NO: 216331 - RNA, 22 nt, Artificial Sequence
  Synthetic
aauucugacucugcaaggaaga

SEQ ID NO: 216332 - RNA, 23 nt, Artificial Sequence
  Synthetic
caauucugacucugcaaggaaga

SEQ ID NO: 216333 - RNA, 24 nt, Artificial Sequence
  Synthetic
gcaauucugacucugcaaggaaga

SEQ ID NO: 216334 - RNA, 18 nt, Artificial Sequence
  Synthetic
ggaaaaaaagaaggaaga

SEQ ID NO: 216335 - RNA, 19 nt, Artificial Sequence
  Synthetic
gggaaaaaaagaaggaaga

SEQ ID NO: 216336 - RNA, 20 nt, Artificial Sequence
  Synthetic
agggaaaaaaagaaggaaga

SEQ ID NO: 216337 - RNA, 21 nt, Artificial Sequence
  Synthetic
aagggaaaaaaagaaggaaga

SEQ ID NO: 216338 - RNA, 22 nt, Artificial Sequence
  Synthetic
aaagggaaaaaaagaaggaaga

SEQ ID NO: 216339 - RNA, 23 nt, Artificial Sequence
  Synthetic
gaaagggaaaaaaagaaggaaga

SEQ ID NO: 216340 - RNA, 24 nt, Artificial Sequence
  Synthetic
ggaaagggaaaaaaagaaggaaga

SEQ ID NO: 216341 - RNA, 18 nt, Artificial Sequence
  Synthetic
guuaaaguauaaggaaga

SEQ ID NO: 216342 - RNA, 19 nt, Artificial Sequence
  Synthetic
gguuaaaguauaaggaaga

SEQ ID NO: 216343 - RNA, 20 nt, Artificial Sequence
  Synthetic
ugguuaaaguauaaggaaga

SEQ ID NO: 216344 - RNA, 21 nt, Artificial Sequence
  Synthetic
uugguuaaaguauaaggaaga

SEQ ID NO: 216345 - RNA, 22 nt, Artificial Sequence
  Synthetic
cuugguuaaaguauaaggaaga

SEQ ID NO: 216346 - RNA, 23 nt, Artificial Sequence
  Synthetic
ucuugguuaaaguauaaggaaga

SEQ ID NO: 216347 - RNA, 24 nt, Artificial Sequence
  Synthetic
uucuugguuaaaguauaaggaaga

SEQ ID NO: 216348 - RNA, 18 nt, Artificial Sequence
  Synthetic
gggaggaaguaaggaaga

SEQ ID NO: 216349 - RNA, 19 nt, Artificial Sequence
  Synthetic
agggaggaaguaaggaaga

SEQ ID NO: 216350 - RNA, 20 nt, Artificial Sequence
  Synthetic
aagggaggaaguaaggaaga

SEQ ID NO: 216351 - RNA, 21 nt, Artificial Sequence
  Synthetic
gaagggaggaaguaaggaaga

SEQ ID NO: 216352 - RNA, 22 nt, Artificial Sequence
  Synthetic
ggaagggaggaaguaaggaaga

SEQ ID NO: 216353 - RNA, 23 nt, Artificial Sequence
  Synthetic
aggaagggaggaaguaaggaaga

SEQ ID NO: 216354 - RNA, 24 nt, Artificial Sequence
  Synthetic
aaggaagggaggaaguaaggaaga

SEQ ID NO: 216355 - RNA, 18 nt, Artificial Sequence
  Synthetic
gacagacauacaggaaga

SEQ ID NO: 216356 - RNA, 19 nt, Artificial Sequence
  Synthetic
agacagacauacaggaaga

SEQ ID NO: 216357 - RNA, 20 nt, Artificial Sequence
  Synthetic
gagacagacauacaggaaga

SEQ ID NO: 216358 - RNA, 21 nt, Artificial Sequence
  Synthetic
agagacagacauacaggaaga

SEQ ID NO: 216359 - RNA, 22 nt, Artificial Sequence
  Synthetic
gagagacagacauacaggaaga

SEQ ID NO: 216360 - RNA, 23 nt, Artificial Sequence
  Synthetic
agagagacagacauacaggaaga

SEQ ID NO: 216361 - RNA, 24 nt, Artificial Sequence
  Synthetic
gagagagacagacauacaggaaga

SEQ ID NO: 216362 - RNA, 18 nt, Artificial Sequence
  Synthetic
gauuaggggagaggaaga

SEQ ID NO: 216363 - RNA, 19 nt, Artificial Sequence
  Synthetic
ugauuaggggagaggaaga

SEQ ID NO: 216364 - RNA, 20 nt, Artificial Sequence
  Synthetic
gugauuaggggagaggaaga

SEQ ID NO: 216365 - RNA, 21 nt, Artificial Sequence
  Synthetic
agugauuaggggagaggaaga

SEQ ID NO: 216366 - RNA, 22 nt, Artificial Sequence
  Synthetic
cagugauuaggggagaggaaga

SEQ ID NO: 216367 - RNA, 23 nt, Artificial Sequence
  Synthetic
ucagugauuaggggagaggaaga

SEQ ID NO: 216368 - RNA, 24 nt, Artificial Sequence
  Synthetic
aucagugauuaggggagaggaaga

SEQ ID NO: 216369 - RNA, 18 nt, Artificial Sequence
  Synthetic
gguauucaaauaggaaga

SEQ ID NO: 216370 - RNA, 19 nt, Artificial Sequence
  Synthetic
ggguauucaaauaggaaga

SEQ ID NO: 216371 - RNA, 20 nt, Artificial Sequence
  Synthetic
aggguauucaaauaggaaga

SEQ ID NO: 216372 - RNA, 21 nt, Artificial Sequence
  Synthetic
aaggguauucaaauaggaaga

SEQ ID NO: 216373 - RNA, 22 nt, Artificial Sequence
  Synthetic
aaaggguauucaaauaggaaga

SEQ ID NO: 216374 - RNA, 23 nt, Artificial Sequence
  Synthetic
uaaaggguauucaaauaggaaga

SEQ ID NO: 216375 - RNA, 24 nt, Artificial Sequence
  Synthetic
auaaaggguauucaaauaggaaga

SEQ ID NO: 216376 - RNA, 18 nt, Artificial Sequence
  Synthetic
gguuguggguuaggaaga

SEQ ID NO: 216377 - RNA, 19 nt, Artificial Sequence
  Synthetic
ugguuguggguuaggaaga

SEQ ID NO: 216378 - RNA, 20 nt, Artificial Sequence
  Synthetic
uugguuguggguuaggaaga

SEQ ID NO: 216379 - RNA, 21 nt, Artificial Sequence
  Synthetic
guugguuguggguuaggaaga

SEQ ID NO: 216380 - RNA, 22 nt, Artificial Sequence
  Synthetic
aguugguuguggguuaggaaga

SEQ ID NO: 216381 - RNA, 23 nt, Artificial Sequence
  Synthetic
aaguugguuguggguuaggaaga

SEQ ID NO: 216382 - RNA, 24 nt, Artificial Sequence
  Synthetic
aaaguugguuguggguuaggaaga

SEQ ID NO: 216383 - RNA, 18 nt, Artificial Sequence
  Synthetic
auguuuugggagggaaga

SEQ ID NO: 216384 - RNA, 19 nt, Artificial Sequence
  Synthetic
uauguuuugggagggaaga

SEQ ID NO: 216385 - RNA, 20 nt, Artificial Sequence
  Synthetic
guauguuuugggagggaaga

SEQ ID NO: 216386 - RNA, 21 nt, Artificial Sequence
  Synthetic
aguauguuuugggagggaaga

SEQ ID NO: 216387 - RNA, 22 nt, Artificial Sequence
  Synthetic
aaguauguuuugggagggaaga

SEQ ID NO: 216388 - RNA, 23 nt, Artificial Sequence
  Synthetic
aaaguauguuuugggagggaaga

SEQ ID NO: 216389 - RNA, 24 nt, Artificial Sequence
  Synthetic
gaaaguauguuuugggagggaaga

SEQ ID NO: 216390 - RNA, 18 nt, Artificial Sequence
  Synthetic
aaagcaaucuagggaaga

SEQ ID NO: 216391 - RNA, 19 nt, Artificial Sequence
  Synthetic
uaaagcaaucuagggaaga

SEQ ID NO: 216392 - RNA, 20 nt, Artificial Sequence
  Synthetic
cuaaagcaaucuagggaaga

SEQ ID NO: 216393 - RNA, 21 nt, Artificial Sequence
  Synthetic
acuaaagcaaucuagggaaga

SEQ ID NO: 216394 - RNA, 22 nt, Artificial Sequence
  Synthetic
aacuaaagcaaucuagggaaga

SEQ ID NO: 216395 - RNA, 23 nt, Artificial Sequence
  Synthetic
uaacuaaagcaaucuagggaaga

SEQ ID NO: 216396 - RNA, 24 nt, Artificial Sequence
  Synthetic
uuaacuaaagcaaucuagggaaga

SEQ ID NO: 216397 - RNA, 18 nt, Artificial Sequence
  Synthetic
uaguucaaaaugggaaga

SEQ ID NO: 216398 - RNA, 19 nt, Artificial Sequence
  Synthetic
uuaguucaaaaugggaaga

SEQ ID NO: 216399 - RNA, 20 nt, Artificial Sequence
  Synthetic
auuaguucaaaaugggaaga

SEQ ID NO: 216400 - RNA, 21 nt, Artificial Sequence
  Synthetic
gauuaguucaaaaugggaaga

SEQ ID NO: 216401 - RNA, 22 nt, Artificial Sequence
  Synthetic
ugauuaguucaaaaugggaaga

SEQ ID NO: 216402 - RNA, 23 nt, Artificial Sequence
  Synthetic
uugauuaguucaaaaugggaaga

SEQ ID NO: 216403 - RNA, 24 nt, Artificial Sequence
  Synthetic
cuugauuaguucaaaaugggaaga

SEQ ID NO: 216404 - RNA, 18 nt, Artificial Sequence
  Synthetic
uuggcugcgaugggaaga

SEQ ID NO: 216405 - RNA, 19 nt, Artificial Sequence
  Synthetic
uuuggcugcgaugggaaga

SEQ ID NO: 216406 - RNA, 20 nt, Artificial Sequence
  Synthetic
uuuuggcugcgaugggaaga

SEQ ID NO: 216407 - RNA, 21 nt, Artificial Sequence
  Synthetic
cuuuuggcugcgaugggaaga

SEQ ID NO: 216408 - RNA, 22 nt, Artificial Sequence
  Synthetic
acuuuuggcugcgaugggaaga

SEQ ID NO: 216409 - RNA, 23 nt, Artificial Sequence
  Synthetic
gacuuuuggcugcgaugggaaga

SEQ ID NO: 216410 - RNA, 24 nt, Artificial Sequence
  Synthetic
agacuuuuggcugcgaugggaaga

SEQ ID NO: 216411 - RNA, 18 nt, Artificial Sequence
  Synthetic
guacuuuaaaauggaaga

SEQ ID NO: 216412 - RNA, 19 nt, Artificial Sequence
  Synthetic
uguacuuuaaaauggaaga

SEQ ID NO: 216413 - RNA, 20 nt, Artificial Sequence
  Synthetic
cuguacuuuaaaauggaaga

SEQ ID NO: 216414 - RNA, 21 nt, Artificial Sequence
  Synthetic
ucuguacuuuaaaauggaaga

SEQ ID NO: 216415 - RNA, 22 nt, Artificial Sequence
  Synthetic
gucuguacuuuaaaauggaaga

SEQ ID NO: 216416 - RNA, 23 nt, Artificial Sequence
  Synthetic
ugucuguacuuuaaaauggaaga

SEQ ID NO: 216417 - RNA, 24 nt, Artificial Sequence
  Synthetic
augucuguacuuuaaaauggaaga

SEQ ID NO: 216418 - RNA, 18 nt, Artificial Sequence
  Synthetic
augcaucuacauggaaga

SEQ ID NO: 216419 - RNA, 19 nt, Artificial Sequence
  Synthetic
uaugcaucuacauggaaga

SEQ ID NO: 216420 - RNA, 20 nt, Artificial Sequence
  Synthetic
uuaugcaucuacauggaaga

SEQ ID NO: 216421 - RNA, 21 nt, Artificial Sequence
  Synthetic
uuuaugcaucuacauggaaga

SEQ ID NO: 216422 - RNA, 22 nt, Artificial Sequence
  Synthetic
cuuuaugcaucuacauggaaga

SEQ ID NO: 216423 - RNA, 23 nt, Artificial Sequence
  Synthetic
gcuuuaugcaucuacauggaaga

SEQ ID NO: 216424 - RNA, 24 nt, Artificial Sequence
  Synthetic
ggcuuuaugcaucuacauggaaga

SEQ ID NO: 216425 - RNA, 18 nt, Artificial Sequence
  Synthetic
ugucucaaagauggaaga

SEQ ID NO: 216426 - RNA, 19 nt, Artificial Sequence
  Synthetic
augucucaaagauggaaga

SEQ ID NO: 216427 - RNA, 20 nt, Artificial Sequence
  Synthetic
caugucucaaagauggaaga

SEQ ID NO: 216428 - RNA, 21 nt, Artificial Sequence
  Synthetic
acaugucucaaagauggaaga

SEQ ID NO: 216429 - RNA, 22 nt, Artificial Sequence
  Synthetic
aacaugucucaaagauggaaga

SEQ ID NO: 216430 - RNA, 23 nt, Artificial Sequence
  Synthetic
gaacaugucucaaagauggaaga

SEQ ID NO: 216431 - RNA, 24 nt, Artificial Sequence
  Synthetic
ugaacaugucucaaagauggaaga

SEQ ID NO: 216432 - RNA, 18 nt, Artificial Sequence
  Synthetic
ggauuaguugauggaaga

SEQ ID NO: 216433 - RNA, 19 nt, Artificial Sequence
  Synthetic
aggauuaguugauggaaga

SEQ ID NO: 216434 - RNA, 20 nt, Artificial Sequence
  Synthetic
caggauuaguugauggaaga

SEQ ID NO: 216435 - RNA, 21 nt, Artificial Sequence
  Synthetic
acaggauuaguugauggaaga

SEQ ID NO: 216436 - RNA, 22 nt, Artificial Sequence
  Synthetic
aacaggauuaguugauggaaga

SEQ ID NO: 216437 - RNA, 23 nt, Artificial Sequence
  Synthetic
caacaggauuaguugauggaaga

SEQ ID NO: 216438 - RNA, 24 nt, Artificial Sequence
  Synthetic
acaacaggauuaguugauggaaga

SEQ ID NO: 216439 - RNA, 18 nt, Artificial Sequence
  Synthetic
uuacuucccacuggaaga

SEQ ID NO: 216440 - RNA, 19 nt, Artificial Sequence
  Synthetic
uuuacuucccacuggaaga

SEQ ID NO: 216441 - RNA, 20 nt, Artificial Sequence
  Synthetic
guuuacuucccacuggaaga

SEQ ID NO: 216442 - RNA, 21 nt, Artificial Sequence
  Synthetic
uguuuacuucccacuggaaga

SEQ ID NO: 216443 - RNA, 22 nt, Artificial Sequence
  Synthetic
uuguuuacuucccacuggaaga

SEQ ID NO: 216444 - RNA, 23 nt, Artificial Sequence
  Synthetic
auuguuuacuucccacuggaaga

SEQ ID NO: 216445 - RNA, 24 nt, Artificial Sequence
  Synthetic
uauuguuuacuucccacuggaaga

SEQ ID NO: 216446 - RNA, 18 nt, Artificial Sequence
  Synthetic
guuuuacugacuggaaga

SEQ ID NO: 216447 - RNA, 19 nt, Artificial Sequence
  Synthetic
uguuuuacugacuggaaga

SEQ ID NO: 216448 - RNA, 20 nt, Artificial Sequence
  Synthetic
cuguuuuacugacuggaaga

SEQ ID NO: 216449 - RNA, 21 nt, Artificial Sequence
  Synthetic
acuguuuuacugacuggaaga

SEQ ID NO: 216450 - RNA, 22 nt, Artificial Sequence
  Synthetic
cacuguuuuacugacuggaaga

SEQ ID NO: 216451 - RNA, 23 nt, Artificial Sequence
  Synthetic
ccacuguuuuacugacuggaaga

SEQ ID NO: 216452 - RNA, 24 nt, Artificial Sequence
  Synthetic
gccacuguuuuacugacuggaaga

SEQ ID NO: 216453 - RNA, 18 nt, Artificial Sequence
  Synthetic
uaauauagcgcuggaaga

SEQ ID NO: 216454 - RNA, 19 nt, Artificial Sequence
  Synthetic
auaauauagcgcuggaaga

SEQ ID NO: 216455 - RNA, 20 nt, Artificial Sequence
  Synthetic
aauaauauagcgcuggaaga

SEQ ID NO: 216456 - RNA, 21 nt, Artificial Sequence
  Synthetic
aaauaauauagcgcuggaaga

SEQ ID NO: 216457 - RNA, 22 nt, Artificial Sequence
  Synthetic
gaaauaauauagcgcuggaaga

SEQ ID NO: 216458 - RNA, 23 nt, Artificial Sequence
  Synthetic
ugaaauaauauagcgcuggaaga

SEQ ID NO: 216459 - RNA, 24 nt, Artificial Sequence
  Synthetic
uugaaauaauauagcgcuggaaga

SEQ ID NO: 216460 - RNA, 18 nt, Artificial Sequence
  Synthetic
cugcuguaacuuggaaga

SEQ ID NO: 216461 - RNA, 19 nt, Artificial Sequence
  Synthetic
acugcuguaacuuggaaga

SEQ ID NO: 216462 - RNA, 20 nt, Artificial Sequence
  Synthetic
aacugcuguaacuuggaaga

SEQ ID NO: 216463 - RNA, 21 nt, Artificial Sequence
  Synthetic
gaacugcuguaacuuggaaga

SEQ ID NO: 216464 - RNA, 22 nt, Artificial Sequence
  Synthetic
agaacugcuguaacuuggaaga

SEQ ID NO: 216465 - RNA, 23 nt, Artificial Sequence
  Synthetic
gagaacugcuguaacuuggaaga

SEQ ID NO: 216466 - RNA, 24 nt, Artificial Sequence
  Synthetic
ggagaacugcuguaacuuggaaga

SEQ ID NO: 216467 - RNA, 18 nt, Artificial Sequence
  Synthetic
ucagucccaaaaugaaga

SEQ ID NO: 216468 - RNA, 19 nt, Artificial Sequence
  Synthetic
aucagucccaaaaugaaga

SEQ ID NO: 216469 - RNA, 20 nt, Artificial Sequence
  Synthetic
aaucagucccaaaaugaaga

SEQ ID NO: 216470 - RNA, 21 nt, Artificial Sequence
  Synthetic
gaaucagucccaaaaugaaga

SEQ ID NO: 216471 - RNA, 22 nt, Artificial Sequence
  Synthetic
ggaaucagucccaaaaugaaga

SEQ ID NO: 216472 - RNA, 23 nt, Artificial Sequence
  Synthetic
uggaaucagucccaaaaugaaga

SEQ ID NO: 216473 - RNA, 24 nt, Artificial Sequence
  Synthetic
guggaaucagucccaaaaugaaga

SEQ ID NO: 216474 - RNA, 18 nt, Artificial Sequence
  Synthetic
aggauccugaaaugaaga

SEQ ID NO: 216475 - RNA, 19 nt, Artificial Sequence
  Synthetic
caggauccugaaaugaaga

SEQ ID NO: 216476 - RNA, 20 nt, Artificial Sequence
  Synthetic
acaggauccugaaaugaaga

SEQ ID NO: 216477 - RNA, 21 nt, Artificial Sequence
  Synthetic
uacaggauccugaaaugaaga

SEQ ID NO: 216478 - RNA, 22 nt, Artificial Sequence
  Synthetic
guacaggauccugaaaugaaga

SEQ ID NO: 216479 - RNA, 23 nt, Artificial Sequence
  Synthetic
uguacaggauccugaaaugaaga

SEQ ID NO: 216480 - RNA, 24 nt, Artificial Sequence
  Synthetic
guguacaggauccugaaaugaaga

SEQ ID NO: 216481 - RNA, 18 nt, Artificial Sequence
  Synthetic
aaugcuagugaaugaaga

SEQ ID NO: 216482 - RNA, 19 nt, Artificial Sequence
  Synthetic
aaaugcuagugaaugaaga

SEQ ID NO: 216483 - RNA, 20 nt, Artificial Sequence
  Synthetic
caaaugcuagugaaugaaga

SEQ ID NO: 216484 - RNA, 21 nt, Artificial Sequence
  Synthetic
acaaaugcuagugaaugaaga

SEQ ID NO: 216485 - RNA, 22 nt, Artificial Sequence
  Synthetic
uacaaaugcuagugaaugaaga

SEQ ID NO: 216486 - RNA, 23 nt, Artificial Sequence
  Synthetic
auacaaaugcuagugaaugaaga

SEQ ID NO: 216487 - RNA, 24 nt, Artificial Sequence
  Synthetic
cauacaaaugcuagugaaugaaga

SEQ ID NO: 216488 - RNA, 18 nt, Artificial Sequence
  Synthetic
aaaugaaaguaaugaaga

SEQ ID NO: 216489 - RNA, 19 nt, Artificial Sequence
  Synthetic
caaaugaaaguaaugaaga

SEQ ID NO: 216490 - RNA, 20 nt, Artificial Sequence
  Synthetic
ucaaaugaaaguaaugaaga

SEQ ID NO: 216491 - RNA, 21 nt, Artificial Sequence
  Synthetic
cucaaaugaaaguaaugaaga

SEQ ID NO: 216492 - RNA, 22 nt, Artificial Sequence
  Synthetic
ucucaaaugaaaguaaugaaga

SEQ ID NO: 216493 - RNA, 23 nt, Artificial Sequence
  Synthetic
aucucaaaugaaaguaaugaaga

SEQ ID NO: 216494 - RNA, 24 nt, Artificial Sequence
  Synthetic
caucucaaaugaaaguaaugaaga

SEQ ID NO: 216495 - RNA, 18 nt, Artificial Sequence
  Synthetic
ucaacaaguuaaugaaga

SEQ ID NO: 216496 - RNA, 19 nt, Artificial Sequence
  Synthetic
uucaacaaguuaaugaaga

SEQ ID NO: 216497 - RNA, 20 nt, Artificial Sequence
  Synthetic
auucaacaaguuaaugaaga

SEQ ID NO: 216498 - RNA, 21 nt, Artificial Sequence
  Synthetic
aauucaacaaguuaaugaaga

SEQ ID NO: 216499 - RNA, 22 nt, Artificial Sequence
  Synthetic
caauucaacaaguuaaugaaga

SEQ ID NO: 216500 - RNA, 23 nt, Artificial Sequence
  Synthetic
acaauucaacaaguuaaugaaga

SEQ ID NO: 216501 - RNA, 24 nt, Artificial Sequence
  Synthetic
aacaauucaacaaguuaaugaaga

SEQ ID NO: 216502 - RNA, 18 nt, Artificial Sequence
  Synthetic
gaaaauagacacugaaga

SEQ ID NO: 216503 - RNA, 19 nt, Artificial Sequence
  Synthetic
agaaaauagacacugaaga

SEQ ID NO: 216504 - RNA, 20 nt, Artificial Sequence
  Synthetic
gagaaaauagacacugaaga

SEQ ID NO: 216505 - RNA, 21 nt, Artificial Sequence
  Synthetic
agagaaaauagacacugaaga

SEQ ID NO: 216506 - RNA, 22 nt, Artificial Sequence
  Synthetic
cagagaaaauagacacugaaga

SEQ ID NO: 216507 - RNA, 23 nt, Artificial Sequence
  Synthetic
acagagaaaauagacacugaaga

SEQ ID NO: 216508 - RNA, 24 nt, Artificial Sequence
  Synthetic
gacagagaaaauagacacugaaga

SEQ ID NO: 216509 - RNA, 18 nt, Artificial Sequence
  Synthetic
auauuucauuacugaaga

SEQ ID NO: 216510 - RNA, 19 nt, Artificial Sequence
  Synthetic
uauauuucauuacugaaga

SEQ ID NO: 216511 - RNA, 20 nt, Artificial Sequence
  Synthetic
uuauauuucauuacugaaga

SEQ ID NO: 216512 - RNA, 21 nt, Artificial Sequence
  Synthetic
uuuauauuucauuacugaaga

SEQ ID NO: 216513 - RNA, 22 nt, Artificial Sequence
  Synthetic
auuuauauuucauuacugaaga

SEQ ID NO: 216514 - RNA, 23 nt, Artificial Sequence
  Synthetic
cauuuauauuucauuacugaaga

SEQ ID NO: 216515 - RNA, 24 nt, Artificial Sequence
  Synthetic
acauuuauauuucauuacugaaga

SEQ ID NO: 216516 - RNA, 18 nt, Artificial Sequence
  Synthetic
gugagauauuccugaaga

SEQ ID NO: 216517 - RNA, 19 nt, Artificial Sequence
  Synthetic
agugagauauuccugaaga

SEQ ID NO: 216518 - RNA, 20 nt, Artificial Sequence
  Synthetic
uagugagauauuccugaaga

SEQ ID NO: 216519 - RNA, 21 nt, Artificial Sequence
  Synthetic
cuagugagauauuccugaaga

SEQ ID NO: 216520 - RNA, 22 nt, Artificial Sequence
  Synthetic
gcuagugagauauuccugaaga

SEQ ID NO: 216521 - RNA, 23 nt, Artificial Sequence
  Synthetic
ugcuagugagauauuccugaaga

SEQ ID NO: 216522 - RNA, 24 nt, Artificial Sequence
  Synthetic
augcuagugagauauuccugaaga

SEQ ID NO: 216523 - RNA, 18 nt, Artificial Sequence
  Synthetic
cauuccauuuccugaaga

SEQ ID NO: 216524 - RNA, 19 nt, Artificial Sequence
  Synthetic
ucauuccauuuccugaaga

SEQ ID NO: 216525 - RNA, 20 nt, Artificial Sequence
  Synthetic
uucauuccauuuccugaaga

SEQ ID NO: 216526 - RNA, 21 nt, Artificial Sequence
  Synthetic
cuucauuccauuuccugaaga

SEQ ID NO: 216527 - RNA, 22 nt, Artificial Sequence
  Synthetic
acuucauuccauuuccugaaga

SEQ ID NO: 216528 - RNA, 23 nt, Artificial Sequence
  Synthetic
cacuucauuccauuuccugaaga

SEQ ID NO: 216529 - RNA, 24 nt, Artificial Sequence
  Synthetic
ucacuucauuccauuuccugaaga

SEQ ID NO: 216530 - RNA, 18 nt, Artificial Sequence
  Synthetic
uaagcuacaagcugaaga

SEQ ID NO: 216531 - RNA, 19 nt, Artificial Sequence
  Synthetic
uuaagcuacaagcugaaga

SEQ ID NO: 216532 - RNA, 20 nt, Artificial Sequence
  Synthetic
uuuaagcuacaagcugaaga

SEQ ID NO: 216533 - RNA, 21 nt, Artificial Sequence
  Synthetic
uuuuaagcuacaagcugaaga

SEQ ID NO: 216534 - RNA, 22 nt, Artificial Sequence
  Synthetic
cuuuuaagcuacaagcugaaga

SEQ ID NO: 216535 - RNA, 23 nt, Artificial Sequence
  Synthetic
gcuuuuaagcuacaagcugaaga

SEQ ID NO: 216536 - RNA, 24 nt, Artificial Sequence
  Synthetic
ggcuuuuaagcuacaagcugaaga

SEQ ID NO: 216537 - RNA, 18 nt, Artificial Sequence
  Synthetic
aaaccucugcucugaaga

SEQ ID NO: 216538 - RNA, 19 nt, Artificial Sequence
  Synthetic
aaaaccucugcucugaaga

SEQ ID NO: 216539 - RNA, 20 nt, Artificial Sequence
  Synthetic
aaaaaccucugcucugaaga

SEQ ID NO: 216540 - RNA, 21 nt, Artificial Sequence
  Synthetic
uaaaaaccucugcucugaaga

SEQ ID NO: 216541 - RNA, 22 nt, Artificial Sequence
  Synthetic
uuaaaaaccucugcucugaaga

SEQ ID NO: 216542 - RNA, 23 nt, Artificial Sequence
  Synthetic
cuuaaaaaccucugcucugaaga

SEQ ID NO: 216543 - RNA, 24 nt, Artificial Sequence
  Synthetic
acuuaaaaaccucugcucugaaga

SEQ ID NO: 216544 - RNA, 18 nt, Artificial Sequence
  Synthetic
acggauuaauucugaaga

SEQ ID NO: 216545 - RNA, 19 nt, Artificial Sequence
  Synthetic
cacggauuaauucugaaga

SEQ ID NO: 216546 - RNA, 20 nt, Artificial Sequence
  Synthetic
gcacggauuaauucugaaga

SEQ ID NO: 216547 - RNA, 21 nt, Artificial Sequence
  Synthetic
cgcacggauuaauucugaaga

SEQ ID NO: 216548 - RNA, 22 nt, Artificial Sequence
  Synthetic
gcgcacggauuaauucugaaga

SEQ ID NO: 216549 - RNA, 23 nt, Artificial Sequence
  Synthetic
ggcgcacggauuaauucugaaga

SEQ ID NO: 216550 - RNA, 24 nt, Artificial Sequence
  Synthetic
uggcgcacggauuaauucugaaga

SEQ ID NO: 216551 - RNA, 18 nt, Artificial Sequence
  Synthetic
uacucuaccaagugaaga

SEQ ID NO: 216552 - RNA, 19 nt, Artificial Sequence
  Synthetic
auacucuaccaagugaaga

SEQ ID NO: 216553 - RNA, 20 nt, Artificial Sequence
  Synthetic
uauacucuaccaagugaaga

SEQ ID NO: 216554 - RNA, 21 nt, Artificial Sequence
  Synthetic
auauacucuaccaagugaaga

SEQ ID NO: 216555 - RNA, 22 nt, Artificial Sequence
  Synthetic
aauauacucuaccaagugaaga

SEQ ID NO: 216556 - RNA, 23 nt, Artificial Sequence
  Synthetic
aaauauacucuaccaagugaaga

SEQ ID NO: 216557 - RNA, 24 nt, Artificial Sequence
  Synthetic
aaaauauacucuaccaagugaaga

SEQ ID NO: 216558 - RNA, 18 nt, Artificial Sequence
  Synthetic
ugaaggcugaggugaaga

SEQ ID NO: 216559 - RNA, 19 nt, Artificial Sequence
  Synthetic
gugaaggcugaggugaaga

SEQ ID NO: 216560 - RNA, 20 nt, Artificial Sequence
  Synthetic
ugugaaggcugaggugaaga

SEQ ID NO: 216561 - RNA, 21 nt, Artificial Sequence
  Synthetic
uugugaaggcugaggugaaga

SEQ ID NO: 216562 - RNA, 22 nt, Artificial Sequence
  Synthetic
uuugugaaggcugaggugaaga

SEQ ID NO: 216563 - RNA, 23 nt, Artificial Sequence
  Synthetic
uuuugugaaggcugaggugaaga

SEQ ID NO: 216564 - RNA, 24 nt, Artificial Sequence
  Synthetic
uuuuugugaaggcugaggugaaga

SEQ ID NO: 216565 - RNA, 18 nt, Artificial Sequence
  Synthetic
uagcaagaguggugaaga

SEQ ID NO: 216566 - RNA, 19 nt, Artificial Sequence
  Synthetic
uuagcaagaguggugaaga

SEQ ID NO: 216567 - RNA, 20 nt, Artificial Sequence
  Synthetic
uuuagcaagaguggugaaga

SEQ ID NO: 216568 - RNA, 21 nt, Artificial Sequence
  Synthetic
uuuuagcaagaguggugaaga

SEQ ID NO: 216569 - RNA, 22 nt, Artificial Sequence
  Synthetic
auuuuagcaagaguggugaaga

SEQ ID NO: 216570 - RNA, 23 nt, Artificial Sequence
  Synthetic
uauuuuagcaagaguggugaaga

SEQ ID NO: 216571 - RNA, 24 nt, Artificial Sequence
  Synthetic
guauuuuagcaagaguggugaaga

SEQ ID NO: 216572 - RNA, 18 nt, Artificial Sequence
  Synthetic
cuagaaggaaauugaaga

SEQ ID NO: 216573 - RNA, 19 nt, Artificial Sequence
  Synthetic
ccuagaaggaaauugaaga

SEQ ID NO: 216574 - RNA, 20 nt, Artificial Sequence
  Synthetic
cccuagaaggaaauugaaga

SEQ ID NO: 216575 - RNA, 21 nt, Artificial Sequence
  Synthetic
gcccuagaaggaaauugaaga

SEQ ID NO: 216576 - RNA, 22 nt, Artificial Sequence
  Synthetic
agcccuagaaggaaauugaaga

SEQ ID NO: 216577 - RNA, 23 nt, Artificial Sequence
  Synthetic
gagcccuagaaggaaauugaaga

SEQ ID NO: 216578 - RNA, 24 nt, Artificial Sequence
  Synthetic
agagcccuagaaggaaauugaaga

SEQ ID NO: 216579 - RNA, 18 nt, Artificial Sequence
  Synthetic
gcugagaagaauugaaga

SEQ ID NO: 216580 - RNA, 19 nt, Artificial Sequence
  Synthetic
ugcugagaagaauugaaga

SEQ ID NO: 216581 - RNA, 20 nt, Artificial Sequence
  Synthetic
uugcugagaagaauugaaga

SEQ ID NO: 216582 - RNA, 21 nt, Artificial Sequence
  Synthetic
uuugcugagaagaauugaaga

SEQ ID NO: 216583 - RNA, 22 nt, Artificial Sequence
  Synthetic
guuugcugagaagaauugaaga

SEQ ID NO: 216584 - RNA, 23 nt, Artificial Sequence
  Synthetic
aguuugcugagaagaauugaaga

SEQ ID NO: 216585 - RNA, 24 nt, Artificial Sequence
  Synthetic
aaguuugcugagaagaauugaaga

SEQ ID NO: 216586 - RNA, 18 nt, Artificial Sequence
  Synthetic
gggaacacagauugaaga

SEQ ID NO: 216587 - RNA, 19 nt, Artificial Sequence
  Synthetic
agggaacacagauugaaga

SEQ ID NO: 216588 - RNA, 20 nt, Artificial Sequence
  Synthetic
cagggaacacagauugaaga

SEQ ID NO: 216589 - RNA, 21 nt, Artificial Sequence
  Synthetic
ucagggaacacagauugaaga

SEQ ID NO: 216590 - RNA, 22 nt, Artificial Sequence
  Synthetic
cucagggaacacagauugaaga

SEQ ID NO: 216591 - RNA, 23 nt, Artificial Sequence
  Synthetic
ucucagggaacacagauugaaga

SEQ ID NO: 216592 - RNA, 24 nt, Artificial Sequence
  Synthetic
aucucagggaacacagauugaaga

SEQ ID NO: 216593 - RNA, 18 nt, Artificial Sequence
  Synthetic
auucauauaacuugaaga

SEQ ID NO: 216594 - RNA, 19 nt, Artificial Sequence
  Synthetic
cauucauauaacuugaaga

SEQ ID NO: 216595 - RNA, 20 nt, Artificial Sequence
  Synthetic
ucauucauauaacuugaaga

SEQ ID NO: 216596 - RNA, 21 nt, Artificial Sequence
  Synthetic
gucauucauauaacuugaaga

SEQ ID NO: 216597 - RNA, 22 nt, Artificial Sequence
  Synthetic
ggucauucauauaacuugaaga

SEQ ID NO: 216598 - RNA, 23 nt, Artificial Sequence
  Synthetic
aggucauucauauaacuugaaga

SEQ ID NO: 216599 - RNA, 24 nt, Artificial Sequence
  Synthetic
gaggucauucauauaacuugaaga

SEQ ID NO: 216600 - RNA, 18 nt, Artificial Sequence
  Synthetic
ccccuuucuacuugaaga

SEQ ID NO: 216601 - RNA, 19 nt, Artificial Sequence
  Synthetic
accccuuucuacuugaaga

SEQ ID NO: 216602 - RNA, 20 nt, Artificial Sequence
  Synthetic
gaccccuuucuacuugaaga

SEQ ID NO: 216603 - RNA, 21 nt, Artificial Sequence
  Synthetic
ugaccccuuucuacuugaaga

SEQ ID NO: 216604 - RNA, 22 nt, Artificial Sequence
  Synthetic
augaccccuuucuacuugaaga

SEQ ID NO: 216605 - RNA, 23 nt, Artificial Sequence
  Synthetic
caugaccccuuucuacuugaaga

SEQ ID NO: 216606 - RNA, 24 nt, Artificial Sequence
  Synthetic
acaugaccccuuucuacuugaaga

SEQ ID NO: 216607 - RNA, 18 nt, Artificial Sequence
  Synthetic
auuaggaagauuugaaga

SEQ ID NO: 216608 - RNA, 19 nt, Artificial Sequence
  Synthetic
uauuaggaagauuugaaga

SEQ ID NO: 216609 - RNA, 20 nt, Artificial Sequence
  Synthetic
uuauuaggaagauuugaaga

SEQ ID NO: 216610 - RNA, 21 nt, Artificial Sequence
  Synthetic
guuauuaggaagauuugaaga

SEQ ID NO: 216611 - RNA, 22 nt, Artificial Sequence
  Synthetic
uguuauuaggaagauuugaaga

SEQ ID NO: 216612 - RNA, 23 nt, Artificial Sequence
  Synthetic
uuguuauuaggaagauuugaaga

SEQ ID NO: 216613 - RNA, 24 nt, Artificial Sequence
  Synthetic
uuuguuauuaggaagauuugaaga

SEQ ID NO: 216614 - RNA, 18 nt, Artificial Sequence
  Synthetic
uuauagauuauuugaaga

SEQ ID NO: 216615 - RNA, 19 nt, Artificial Sequence
  Synthetic
uuuauagauuauuugaaga

SEQ ID NO: 216616 - RNA, 20 nt, Artificial Sequence
  Synthetic
auuuauagauuauuugaaga

SEQ ID NO: 216617 - RNA, 21 nt, Artificial Sequence
  Synthetic
aauuuauagauuauuugaaga

SEQ ID NO: 216618 - RNA, 22 nt, Artificial Sequence
  Synthetic
gaauuuauagauuauuugaaga

SEQ ID NO: 216619 - RNA, 23 nt, Artificial Sequence
  Synthetic
ugaauuuauagauuauuugaaga

SEQ ID NO: 216620 - RNA, 24 nt, Artificial Sequence
  Synthetic
uugaauuuauagauuauuugaaga

SEQ ID NO: 216621 - RNA, 18 nt, Artificial Sequence
  Synthetic
auauuaucacuuugaaga

SEQ ID NO: 216622 - RNA, 19 nt, Artificial Sequence
  Synthetic
aauauuaucacuuugaaga

SEQ ID NO: 216623 - RNA, 20 nt, Artificial Sequence
  Synthetic
gaauauuaucacuuugaaga

SEQ ID NO: 216624 - RNA, 21 nt, Artificial Sequence
  Synthetic
ugaauauuaucacuuugaaga

SEQ ID NO: 216625 - RNA, 22 nt, Artificial Sequence
  Synthetic
gugaauauuaucacuuugaaga

SEQ ID NO: 216626 - RNA, 23 nt, Artificial Sequence
  Synthetic
agugaauauuaucacuuugaaga

SEQ ID NO: 216627 - RNA, 24 nt, Artificial Sequence
  Synthetic
aagugaauauuaucacuuugaaga

SEQ ID NO: 216628 - RNA, 18 nt, Artificial Sequence
  Synthetic
cccugcuggcuuugaaga

SEQ ID NO: 216629 - RNA, 19 nt, Artificial Sequence
  Synthetic
ccccugcuggcuuugaaga

SEQ ID NO: 216630 - RNA, 20 nt, Artificial Sequence
  Synthetic
gccccugcuggcuuugaaga

SEQ ID NO: 216631 - RNA, 21 nt, Artificial Sequence
  Synthetic
agccccugcuggcuuugaaga

SEQ ID NO: 216632 - RNA, 22 nt, Artificial Sequence
  Synthetic
uagccccugcuggcuuugaaga

SEQ ID NO: 216633 - RNA, 23 nt, Artificial Sequence
  Synthetic
auagccccugcuggcuuugaaga

SEQ ID NO: 216634 - RNA, 24 nt, Artificial Sequence
  Synthetic
gauagccccugcuggcuuugaaga

SEQ ID NO: 216635 - RNA, 18 nt, Artificial Sequence
  Synthetic
uguuguuuauuuugaaga

SEQ ID NO: 216636 - RNA, 19 nt, Artificial Sequence
  Synthetic
auguuguuuauuuugaaga

SEQ ID NO: 216637 - RNA, 20 nt, Artificial Sequence
  Synthetic
gauguuguuuauuuugaaga

SEQ ID NO: 216638 - RNA, 21 nt, Artificial Sequence
  Synthetic
ggauguuguuuauuuugaaga

SEQ ID NO: 216639 - RNA, 22 nt, Artificial Sequence
  Synthetic
aggauguuguuuauuuugaaga

SEQ ID NO: 216640 - RNA, 23 nt, Artificial Sequence
  Synthetic
aaggauguuguuuauuuugaaga

SEQ ID NO: 216641 - RNA, 24 nt, Artificial Sequence
  Synthetic
aaaggauguuguuuauuuugaaga

SEQ ID NO: 216642 - RNA, 18 nt, Artificial Sequence
  Synthetic
augcuuguaaaaauaaga

SEQ ID NO: 216643 - RNA, 19 nt, Artificial Sequence
  Synthetic
uaugcuuguaaaaauaaga

SEQ ID NO: 216644 - RNA, 20 nt, Artificial Sequence
  Synthetic
guaugcuuguaaaaauaaga

SEQ ID NO: 216645 - RNA, 21 nt, Artificial Sequence
  Synthetic
aguaugcuuguaaaaauaaga

SEQ ID NO: 216646 - RNA, 22 nt, Artificial Sequence
  Synthetic
gaguaugcuuguaaaaauaaga

SEQ ID NO: 216647 - RNA, 23 nt, Artificial Sequence
  Synthetic
ggaguaugcuuguaaaaauaaga

SEQ ID NO: 216648 - RNA, 24 nt, Artificial Sequence
  Synthetic
uggaguaugcuuguaaaaauaaga

SEQ ID NO: 216649 - RNA, 18 nt, Artificial Sequence
  Synthetic
ugaucugugaaaauaaga

SEQ ID NO: 216650 - RNA, 19 nt, Artificial Sequence
  Synthetic
augaucugugaaaauaaga

SEQ ID NO: 216651 - RNA, 20 nt, Artificial Sequence
  Synthetic
caugaucugugaaaauaaga

SEQ ID NO: 216652 - RNA, 21 nt, Artificial Sequence
  Synthetic
acaugaucugugaaaauaaga

SEQ ID NO: 216653 - RNA, 22 nt, Artificial Sequence
  Synthetic
aacaugaucugugaaaauaaga

SEQ ID NO: 216654 - RNA, 23 nt, Artificial Sequence
  Synthetic
uaacaugaucugugaaaauaaga

SEQ ID NO: 216655 - RNA, 24 nt, Artificial Sequence
  Synthetic
cuaacaugaucugugaaaauaaga

SEQ ID NO: 216656 - RNA, 18 nt, Artificial Sequence
  Synthetic
accuaucuggaaauaaga

SEQ ID NO: 216657 - RNA, 19 nt, Artificial Sequence
  Synthetic
uaccuaucuggaaauaaga

SEQ ID NO: 216658 - RNA, 20 nt, Artificial Sequence
  Synthetic
uuaccuaucuggaaauaaga

SEQ ID NO: 216659 - RNA, 21 nt, Artificial Sequence
  Synthetic
uuuaccuaucuggaaauaaga

SEQ ID NO: 216660 - RNA, 22 nt, Artificial Sequence
  Synthetic
auuuaccuaucuggaaauaaga

SEQ ID NO: 216661 - RNA, 23 nt, Artificial Sequence
  Synthetic
cauuuaccuaucuggaaauaaga

SEQ ID NO: 216662 - RNA, 24 nt, Artificial Sequence
  Synthetic
ucauuuaccuaucuggaaauaaga

SEQ ID NO: 216663 - RNA, 18 nt, Artificial Sequence
  Synthetic
aggcauguggaaauaaga

SEQ ID NO: 216664 - RNA, 19 nt, Artificial Sequence
  Synthetic
uaggcauguggaaauaaga

SEQ ID NO: 216665 - RNA, 20 nt, Artificial Sequence
  Synthetic
guaggcauguggaaauaaga

SEQ ID NO: 216666 - RNA, 21 nt, Artificial Sequence
  Synthetic
gguaggcauguggaaauaaga

SEQ ID NO: 216667 - RNA, 22 nt, Artificial Sequence
  Synthetic
ugguaggcauguggaaauaaga

SEQ ID NO: 216668 - RNA, 23 nt, Artificial Sequence
  Synthetic
uugguaggcauguggaaauaaga

SEQ ID NO: 216669 - RNA, 24 nt, Artificial Sequence
  Synthetic
guugguaggcauguggaaauaaga

SEQ ID NO: 216670 - RNA, 18 nt, Artificial Sequence
  Synthetic
caaaugcacagaauaaga

SEQ ID NO: 216671 - RNA, 19 nt, Artificial Sequence
  Synthetic
ucaaaugcacagaauaaga

SEQ ID NO: 216672 - RNA, 20 nt, Artificial Sequence
  Synthetic
cucaaaugcacagaauaaga

SEQ ID NO: 216673 - RNA, 21 nt, Artificial Sequence
  Synthetic
ucucaaaugcacagaauaaga

SEQ ID NO: 216674 - RNA, 22 nt, Artificial Sequence
  Synthetic
gucucaaaugcacagaauaaga

SEQ ID NO: 216675 - RNA, 23 nt, Artificial Sequence
  Synthetic
agucucaaaugcacagaauaaga

SEQ ID NO: 216676 - RNA, 24 nt, Artificial Sequence
  Synthetic
aagucucaaaugcacagaauaaga

SEQ ID NO: 216677 - RNA, 18 nt, Artificial Sequence
  Synthetic
gccacauauagaauaaga

SEQ ID NO: 216678 - RNA, 19 nt, Artificial Sequence
  Synthetic
ggccacauauagaauaaga

SEQ ID NO: 216679 - RNA, 20 nt, Artificial Sequence
  Synthetic
uggccacauauagaauaaga

SEQ ID NO: 216680 - RNA, 21 nt, Artificial Sequence
  Synthetic
guggccacauauagaauaaga

SEQ ID NO: 216681 - RNA, 22 nt, Artificial Sequence
  Synthetic
cguggccacauauagaauaaga

SEQ ID NO: 216682 - RNA, 23 nt, Artificial Sequence
  Synthetic
gcguggccacauauagaauaaga

SEQ ID NO: 216683 - RNA, 24 nt, Artificial Sequence
  Synthetic
ugcguggccacauauagaauaaga

SEQ ID NO: 216684 - RNA, 18 nt, Artificial Sequence
  Synthetic
aaauaauugugaauaaga

SEQ ID NO: 216685 - RNA, 19 nt, Artificial Sequence
  Synthetic
gaaauaauugugaauaaga

SEQ ID NO: 216686 - RNA, 20 nt, Artificial Sequence
  Synthetic
agaaauaauugugaauaaga

SEQ ID NO: 216687 - RNA, 21 nt, Artificial Sequence
  Synthetic
uagaaauaauugugaauaaga

SEQ ID NO: 216688 - RNA, 22 nt, Artificial Sequence
  Synthetic
guagaaauaauugugaauaaga

SEQ ID NO: 216689 - RNA, 23 nt, Artificial Sequence
  Synthetic
aguagaaauaauugugaauaaga

SEQ ID NO: 216690 - RNA, 24 nt, Artificial Sequence
  Synthetic
uaguagaaauaauugugaauaaga

SEQ ID NO: 216691 - RNA, 18 nt, Artificial Sequence
  Synthetic
gugcucuuguacauaaga

SEQ ID NO: 216692 - RNA, 19 nt, Artificial Sequence
  Synthetic
ugugcucuuguacauaaga

SEQ ID NO: 216693 - RNA, 20 nt, Artificial Sequence
  Synthetic
cugugcucuuguacauaaga

SEQ ID NO: 216694 - RNA, 21 nt, Artificial Sequence
  Synthetic
acugugcucuuguacauaaga

SEQ ID NO: 216695 - RNA, 22 nt, Artificial Sequence
  Synthetic
cacugugcucuuguacauaaga

SEQ ID NO: 216696 - RNA, 23 nt, Artificial Sequence
  Synthetic
ucacugugcucuuguacauaaga

SEQ ID NO: 216697 - RNA, 24 nt, Artificial Sequence
  Synthetic
aucacugugcucuuguacauaaga

SEQ ID NO: 216698 - RNA, 18 nt, Artificial Sequence
  Synthetic
aaugaaaguaccauaaga

SEQ ID NO: 216699 - RNA, 19 nt, Artificial Sequence
  Synthetic
uaaugaaaguaccauaaga

SEQ ID NO: 216700 - RNA, 20 nt, Artificial Sequence
  Synthetic
uuaaugaaaguaccauaaga

SEQ ID NO: 216701 - RNA, 21 nt, Artificial Sequence
  Synthetic
cuuaaugaaaguaccauaaga

SEQ ID NO: 216702 - RNA, 22 nt, Artificial Sequence
  Synthetic
ccuuaaugaaaguaccauaaga

SEQ ID NO: 216703 - RNA, 23 nt, Artificial Sequence
  Synthetic
gccuuaaugaaaguaccauaaga

SEQ ID NO: 216704 - RNA, 24 nt, Artificial Sequence
  Synthetic
ugccuuaaugaaaguaccauaaga

SEQ ID NO: 216705 - RNA, 18 nt, Artificial Sequence
  Synthetic
aaaacgcugggcauaaga

SEQ ID NO: 216706 - RNA, 19 nt, Artificial Sequence
  Synthetic
aaaaacgcugggcauaaga

SEQ ID NO: 216707 - RNA, 20 nt, Artificial Sequence
  Synthetic
aaaaaacgcugggcauaaga

SEQ ID NO: 216708 - RNA, 21 nt, Artificial Sequence
  Synthetic
uaaaaaacgcugggcauaaga

SEQ ID NO: 216709 - RNA, 22 nt, Artificial Sequence
  Synthetic
uuaaaaaacgcugggcauaaga

SEQ ID NO: 216710 - RNA, 23 nt, Artificial Sequence
  Synthetic
uuuaaaaaacgcugggcauaaga

SEQ ID NO: 216711 - RNA, 24 nt, Artificial Sequence
  Synthetic
auuuaaaaaacgcugggcauaaga

SEQ ID NO: 216712 - RNA, 18 nt, Artificial Sequence
  Synthetic
gucacuguauucauaaga

SEQ ID NO: 216713 - RNA, 19 nt, Artificial Sequence
  Synthetic
agucacuguauucauaaga

SEQ ID NO: 216714 - RNA, 20 nt, Artificial Sequence
  Synthetic
uagucacuguauucauaaga

SEQ ID NO: 216715 - RNA, 21 nt, Artificial Sequence
  Synthetic
cuagucacuguauucauaaga

SEQ ID NO: 216716 - RNA, 22 nt, Artificial Sequence
  Synthetic
acuagucacuguauucauaaga

SEQ ID NO: 216717 - RNA, 23 nt, Artificial Sequence
  Synthetic
gacuagucacuguauucauaaga

SEQ ID NO: 216718 - RNA, 24 nt, Artificial Sequence
  Synthetic
agacuagucacuguauucauaaga

SEQ ID NO: 216719 - RNA, 18 nt, Artificial Sequence
  Synthetic
ucuuccuccuucauaaga

SEQ ID NO: 216720 - RNA, 19 nt, Artificial Sequence
  Synthetic
uucuuccuccuucauaaga

SEQ ID NO: 216721 - RNA, 20 nt, Artificial Sequence
  Synthetic
cuucuuccuccuucauaaga

SEQ ID NO: 216722 - RNA, 21 nt, Artificial Sequence
  Synthetic
ucuucuuccuccuucauaaga

SEQ ID NO: 216723 - RNA, 22 nt, Artificial Sequence
  Synthetic
cucuucuuccuccuucauaaga

SEQ ID NO: 216724 - RNA, 23 nt, Artificial Sequence
  Synthetic
acucuucuuccuccuucauaaga

SEQ ID NO: 216725 - RNA, 24 nt, Artificial Sequence
  Synthetic
cacucuucuuccuccuucauaaga

SEQ ID NO: 216726 - RNA, 18 nt, Artificial Sequence
  Synthetic
acauucuaaaagauaaga

SEQ ID NO: 216727 - RNA, 19 nt, Artificial Sequence
  Synthetic
aacauucuaaaagauaaga

SEQ ID NO: 216728 - RNA, 20 nt, Artificial Sequence
  Synthetic
uaacauucuaaaagauaaga

SEQ ID NO: 216729 - RNA, 21 nt, Artificial Sequence
  Synthetic
uuaacauucuaaaagauaaga

SEQ ID NO: 216730 - RNA, 22 nt, Artificial Sequence
  Synthetic
cuuaacauucuaaaagauaaga

SEQ ID NO: 216731 - RNA, 23 nt, Artificial Sequence
  Synthetic
gcuuaacauucuaaaagauaaga

SEQ ID NO: 216732 - RNA, 24 nt, Artificial Sequence
  Synthetic
ugcuuaacauucuaaaagauaaga

SEQ ID NO: 216733 - RNA, 18 nt, Artificial Sequence
  Synthetic
uuccaagaucagauaaga

SEQ ID NO: 216734 - RNA, 19 nt, Artificial Sequence
  Synthetic
cuuccaagaucagauaaga

SEQ ID NO: 216735 - RNA, 20 nt, Artificial Sequence
  Synthetic
gcuuccaagaucagauaaga

SEQ ID NO: 216736 - RNA, 21 nt, Artificial Sequence
  Synthetic
agcuuccaagaucagauaaga

SEQ ID NO: 216737 - RNA, 22 nt, Artificial Sequence
  Synthetic
uagcuuccaagaucagauaaga

SEQ ID NO: 216738 - RNA, 23 nt, Artificial Sequence
  Synthetic
uuagcuuccaagaucagauaaga

SEQ ID NO: 216739 - RNA, 24 nt, Artificial Sequence
  Synthetic
cuuagcuuccaagaucagauaaga

SEQ ID NO: 216740 - RNA, 18 nt, Artificial Sequence
  Synthetic
gaugagacucagauaaga

SEQ ID NO: 216741 - RNA, 19 nt, Artificial Sequence
  Synthetic
agaugagacucagauaaga

SEQ ID NO: 216742 - RNA, 20 nt, Artificial Sequence
  Synthetic
uagaugagacucagauaaga

SEQ ID NO: 216743 - RNA, 21 nt, Artificial Sequence
  Synthetic
guagaugagacucagauaaga

SEQ ID NO: 216744 - RNA, 22 nt, Artificial Sequence
  Synthetic
aguagaugagacucagauaaga

SEQ ID NO: 216745 - RNA, 23 nt, Artificial Sequence
  Synthetic
gaguagaugagacucagauaaga

SEQ ID NO: 216746 - RNA, 24 nt, Artificial Sequence
  Synthetic
agaguagaugagacucagauaaga

SEQ ID NO: 216747 - RNA, 18 nt, Artificial Sequence
  Synthetic
uguaaagaguggauaaga

SEQ ID NO: 216748 - RNA, 19 nt, Artificial Sequence
  Synthetic
guguaaagaguggauaaga

SEQ ID NO: 216749 - RNA, 20 nt, Artificial Sequence
  Synthetic
aguguaaagaguggauaaga

SEQ ID NO: 216750 - RNA, 21 nt, Artificial Sequence
  Synthetic
aaguguaaagaguggauaaga

SEQ ID NO: 216751 - RNA, 22 nt, Artificial Sequence
  Synthetic
gaaguguaaagaguggauaaga

SEQ ID NO: 216752 - RNA, 23 nt, Artificial Sequence
  Synthetic
ugaaguguaaagaguggauaaga

SEQ ID NO: 216753 - RNA, 24 nt, Artificial Sequence
  Synthetic
cugaaguguaaagaguggauaaga

SEQ ID NO: 216754 - RNA, 18 nt, Artificial Sequence
  Synthetic
gagacaagcaugauaaga

SEQ ID NO: 216755 - RNA, 19 nt, Artificial Sequence
  Synthetic
agagacaagcaugauaaga

SEQ ID NO: 216756 - RNA, 20 nt, Artificial Sequence
  Synthetic
uagagacaagcaugauaaga

SEQ ID NO: 216757 - RNA, 21 nt, Artificial Sequence
  Synthetic
auagagacaagcaugauaaga

SEQ ID NO: 216758 - RNA, 22 nt, Artificial Sequence
  Synthetic
uauagagacaagcaugauaaga

SEQ ID NO: 216759 - RNA, 23 nt, Artificial Sequence
  Synthetic
auauagagacaagcaugauaaga

SEQ ID NO: 216760 - RNA, 24 nt, Artificial Sequence
  Synthetic
aauauagagacaagcaugauaaga

SEQ ID NO: 216761 - RNA, 18 nt, Artificial Sequence
  Synthetic
aguagaaacauuauaaga

SEQ ID NO: 216762 - RNA, 19 nt, Artificial Sequence
  Synthetic
aaguagaaacauuauaaga

SEQ ID NO: 216763 - RNA, 20 nt, Artificial Sequence
  Synthetic
uaaguagaaacauuauaaga

SEQ ID NO: 216764 - RNA, 21 nt, Artificial Sequence
  Synthetic
cuaaguagaaacauuauaaga

SEQ ID NO: 216765 - RNA, 22 nt, Artificial Sequence
  Synthetic
acuaaguagaaacauuauaaga

SEQ ID NO: 216766 - RNA, 23 nt, Artificial Sequence
  Synthetic
cacuaaguagaaacauuauaaga

SEQ ID NO: 216767 - RNA, 24 nt, Artificial Sequence
  Synthetic
ucacuaaguagaaacauuauaaga

SEQ ID NO: 216768 - RNA, 18 nt, Artificial Sequence
  Synthetic
ucucccucccuuauaaga

SEQ ID NO: 216769 - RNA, 19 nt, Artificial Sequence
  Synthetic
uucucccucccuuauaaga

SEQ ID NO: 216770 - RNA, 20 nt, Artificial Sequence
  Synthetic
cuucucccucccuuauaaga

SEQ ID NO: 216771 - RNA, 21 nt, Artificial Sequence
  Synthetic
ucuucucccucccuuauaaga

SEQ ID NO: 216772 - RNA, 22 nt, Artificial Sequence
  Synthetic
cucuucucccucccuuauaaga

SEQ ID NO: 216773 - RNA, 23 nt, Artificial Sequence
  Synthetic
acucuucucccucccuuauaaga

SEQ ID NO: 216774 - RNA, 24 nt, Artificial Sequence
  Synthetic
cacucuucucccucccuuauaaga

SEQ ID NO: 216775 - RNA, 18 nt, Artificial Sequence
  Synthetic
gauaaggcaaaacuaaga

SEQ ID NO: 216776 - RNA, 19 nt, Artificial Sequence
  Synthetic
agauaaggcaaaacuaaga

SEQ ID NO: 216777 - RNA, 20 nt, Artificial Sequence
  Synthetic
uagauaaggcaaaacuaaga

SEQ ID NO: 216778 - RNA, 21 nt, Artificial Sequence
  Synthetic
uuagauaaggcaaaacuaaga

SEQ ID NO: 216779 - RNA, 22 nt, Artificial Sequence
  Synthetic
guuagauaaggcaaaacuaaga

SEQ ID NO: 216780 - RNA, 23 nt, Artificial Sequence
  Synthetic
uguuagauaaggcaaaacuaaga

SEQ ID NO: 216781 - RNA, 24 nt, Artificial Sequence
  Synthetic
cuguuagauaaggcaaaacuaaga

SEQ ID NO: 216782 - RNA, 18 nt, Artificial Sequence
  Synthetic
ccuggaaauagacuaaga

SEQ ID NO: 216783 - RNA, 19 nt, Artificial Sequence
  Synthetic
cccuggaaauagacuaaga

SEQ ID NO: 216784 - RNA, 20 nt, Artificial Sequence
  Synthetic
ucccuggaaauagacuaaga

SEQ ID NO: 216785 - RNA, 21 nt, Artificial Sequence
  Synthetic
cucccuggaaauagacuaaga

SEQ ID NO: 216786 - RNA, 22 nt, Artificial Sequence
  Synthetic
gcucccuggaaauagacuaaga

SEQ ID NO: 216787 - RNA, 23 nt, Artificial Sequence
  Synthetic
ggcucccuggaaauagacuaaga

SEQ ID NO: 216788 - RNA, 24 nt, Artificial Sequence
  Synthetic
gggcucccuggaaauagacuaaga

SEQ ID NO: 216789 - RNA, 18 nt, Artificial Sequence
  Synthetic
gaagcuaucuuacuaaga

SEQ ID NO: 216790 - RNA, 19 nt, Artificial Sequence
  Synthetic
ugaagcuaucuuacuaaga

SEQ ID NO: 216791 - RNA, 20 nt, Artificial Sequence
  Synthetic
augaagcuaucuuacuaaga

SEQ ID NO: 216792 - RNA, 21 nt, Artificial Sequence
  Synthetic
aaugaagcuaucuuacuaaga

SEQ ID NO: 216793 - RNA, 22 nt, Artificial Sequence
  Synthetic
gaaugaagcuaucuuacuaaga

SEQ ID NO: 216794 - RNA, 23 nt, Artificial Sequence
  Synthetic
ggaaugaagcuaucuuacuaaga

SEQ ID NO: 216795 - RNA, 24 nt, Artificial Sequence
  Synthetic
uggaaugaagcuaucuuacuaaga

SEQ ID NO: 216796 - RNA, 18 nt, Artificial Sequence
  Synthetic
uuccauucccaccuaaga

SEQ ID NO: 216797 - RNA, 19 nt, Artificial Sequence
  Synthetic
guuccauucccaccuaaga

SEQ ID NO: 216798 - RNA, 20 nt, Artificial Sequence
  Synthetic
uguuccauucccaccuaaga

SEQ ID NO: 216799 - RNA, 21 nt, Artificial Sequence
  Synthetic
uuguuccauucccaccuaaga

SEQ ID NO: 216800 - RNA, 22 nt, Artificial Sequence
  Synthetic
auuguuccauucccaccuaaga

SEQ ID NO: 216801 - RNA, 23 nt, Artificial Sequence
  Synthetic
cauuguuccauucccaccuaaga

SEQ ID NO: 216802 - RNA, 24 nt, Artificial Sequence
  Synthetic
ucauuguuccauucccaccuaaga

SEQ ID NO: 216803 - RNA, 18 nt, Artificial Sequence
  Synthetic
uauuuaauaucccuaaga

SEQ ID NO: 216804 - RNA, 19 nt, Artificial Sequence
  Synthetic
auauuuaauaucccuaaga

SEQ ID NO: 216805 - RNA, 20 nt, Artificial Sequence
  Synthetic
aauauuuaauaucccuaaga

SEQ ID NO: 216806 - RNA, 21 nt, Artificial Sequence
  Synthetic
gaauauuuaauaucccuaaga

SEQ ID NO: 216807 - RNA, 22 nt, Artificial Sequence
  Synthetic
ggaauauuuaauaucccuaaga

SEQ ID NO: 216808 - RNA, 23 nt, Artificial Sequence
  Synthetic
aggaauauuuaauaucccuaaga

SEQ ID NO: 216809 - RNA, 24 nt, Artificial Sequence
  Synthetic
gaggaauauuuaauaucccuaaga

SEQ ID NO: 216810 - RNA, 18 nt, Artificial Sequence
  Synthetic
cuacgugguagccuaaga

SEQ ID NO: 216811 - RNA, 19 nt, Artificial Sequence
  Synthetic
gcuacgugguagccuaaga

SEQ ID NO: 216812 - RNA, 20 nt, Artificial Sequence
  Synthetic
ugcuacgugguagccuaaga

SEQ ID NO: 216813 - RNA, 21 nt, Artificial Sequence
  Synthetic
augcuacgugguagccuaaga

SEQ ID NO: 216814 - RNA, 22 nt, Artificial Sequence
  Synthetic
aaugcuacgugguagccuaaga

SEQ ID NO: 216815 - RNA, 23 nt, Artificial Sequence
  Synthetic
aaaugcuacgugguagccuaaga

SEQ ID NO: 216816 - RNA, 24 nt, Artificial Sequence
  Synthetic
gaaaugcuacgugguagccuaaga

SEQ ID NO: 216817 - RNA, 18 nt, Artificial Sequence
  Synthetic
uuuuaauggggccuaaga

SEQ ID NO: 216818 - RNA, 19 nt, Artificial Sequence
  Synthetic
auuuuaauggggccuaaga

SEQ ID NO: 216819 - RNA, 20 nt, Artificial Sequence
  Synthetic
cauuuuaauggggccuaaga

SEQ ID NO: 216820 - RNA, 21 nt, Artificial Sequence
  Synthetic
ucauuuuaauggggccuaaga

SEQ ID NO: 216821 - RNA, 22 nt, Artificial Sequence
  Synthetic
cucauuuuaauggggccuaaga

SEQ ID NO: 216822 - RNA, 23 nt, Artificial Sequence
  Synthetic
ucucauuuuaauggggccuaaga

SEQ ID NO: 216823 - RNA, 24 nt, Artificial Sequence
  Synthetic
cucucauuuuaauggggccuaaga

SEQ ID NO: 216824 - RNA, 18 nt, Artificial Sequence
  Synthetic
acaagaguccuccuaaga

SEQ ID NO: 216825 - RNA, 19 nt, Artificial Sequence
  Synthetic
cacaagaguccuccuaaga

SEQ ID NO: 216826 - RNA, 20 nt, Artificial Sequence
  Synthetic
ucacaagaguccuccuaaga

SEQ ID NO: 216827 - RNA, 21 nt, Artificial Sequence
  Synthetic
aucacaagaguccuccuaaga

SEQ ID NO: 216828 - RNA, 22 nt, Artificial Sequence
  Synthetic
aaucacaagaguccuccuaaga

SEQ ID NO: 216829 - RNA, 23 nt, Artificial Sequence
  Synthetic
uaaucacaagaguccuccuaaga

SEQ ID NO: 216830 - RNA, 24 nt, Artificial Sequence
  Synthetic
guaaucacaagaguccuccuaaga

SEQ ID NO: 216831 - RNA, 18 nt, Artificial Sequence
  Synthetic
ggauuuuuuuagcuaaga

SEQ ID NO: 216832 - RNA, 19 nt, Artificial Sequence
  Synthetic
uggauuuuuuuagcuaaga

SEQ ID NO: 216833 - RNA, 20 nt, Artificial Sequence
  Synthetic
uuggauuuuuuuagcuaaga

SEQ ID NO: 216834 - RNA, 21 nt, Artificial Sequence
  Synthetic
uuuggauuuuuuuagcuaaga

SEQ ID NO: 216835 - RNA, 22 nt, Artificial Sequence
  Synthetic
auuuggauuuuuuuagcuaaga

SEQ ID NO: 216836 - RNA, 23 nt, Artificial Sequence
  Synthetic
aauuuggauuuuuuuagcuaaga

SEQ ID NO: 216837 - RNA, 24 nt, Artificial Sequence
  Synthetic
gaauuuggauuuuuuuagcuaaga

SEQ ID NO: 216838 - RNA, 18 nt, Artificial Sequence
  Synthetic
ugguuaugucaucuaaga

SEQ ID NO: 216839 - RNA, 19 nt, Artificial Sequence
  Synthetic
uugguuaugucaucuaaga

SEQ ID NO: 216840 - RNA, 20 nt, Artificial Sequence
  Synthetic
auugguuaugucaucuaaga

SEQ ID NO: 216841 - RNA, 21 nt, Artificial Sequence
  Synthetic
aauugguuaugucaucuaaga

SEQ ID NO: 216842 - RNA, 22 nt, Artificial Sequence
  Synthetic
aaauugguuaugucaucuaaga

SEQ ID NO: 216843 - RNA, 23 nt, Artificial Sequence
  Synthetic
caaauugguuaugucaucuaaga

SEQ ID NO: 216844 - RNA, 24 nt, Artificial Sequence
  Synthetic
ucaaauugguuaugucaucuaaga

SEQ ID NO: 216845 - RNA, 18 nt, Artificial Sequence
  Synthetic
uauuuuugauaucuaaga

SEQ ID NO: 216846 - RNA, 19 nt, Artificial Sequence
  Synthetic
auauuuuugauaucuaaga

SEQ ID NO: 216847 - RNA, 20 nt, Artificial Sequence
  Synthetic
aauauuuuugauaucuaaga

SEQ ID NO: 216848 - RNA, 21 nt, Artificial Sequence
  Synthetic
aaauauuuuugauaucuaaga

SEQ ID NO: 216849 - RNA, 22 nt, Artificial Sequence
  Synthetic
gaaauauuuuugauaucuaaga

SEQ ID NO: 216850 - RNA, 23 nt, Artificial Sequence
  Synthetic
ugaaauauuuuugauaucuaaga

SEQ ID NO: 216851 - RNA, 24 nt, Artificial Sequence
  Synthetic
uugaaauauuuuugauaucuaaga

SEQ ID NO: 216852 - RNA, 18 nt, Artificial Sequence
  Synthetic
aagacauagacucuaaga

SEQ ID NO: 216853 - RNA, 19 nt, Artificial Sequence
  Synthetic
uaagacauagacucuaaga

SEQ ID NO: 216854 - RNA, 20 nt, Artificial Sequence
  Synthetic
cuaagacauagacucuaaga

SEQ ID NO: 216855 - RNA, 21 nt, Artificial Sequence
  Synthetic
ucuaagacauagacucuaaga

SEQ ID NO: 216856 - RNA, 22 nt, Artificial Sequence
  Synthetic
uucuaagacauagacucuaaga

SEQ ID NO: 216857 - RNA, 23 nt, Artificial Sequence
  Synthetic
uuucuaagacauagacucuaaga

SEQ ID NO: 216858 - RNA, 24 nt, Artificial Sequence
  Synthetic
uuuucuaagacauagacucuaaga

SEQ ID NO: 216859 - RNA, 18 nt, Artificial Sequence
  Synthetic
agagauacaggucuaaga

SEQ ID NO: 216860 - RNA, 19 nt, Artificial Sequence
  Synthetic
uagagauacaggucuaaga

SEQ ID NO: 216861 - RNA, 20 nt, Artificial Sequence
  Synthetic
uuagagauacaggucuaaga

SEQ ID NO: 216862 - RNA, 21 nt, Artificial Sequence
  Synthetic
uuuagagauacaggucuaaga

SEQ ID NO: 216863 - RNA, 22 nt, Artificial Sequence
  Synthetic
uuuuagagauacaggucuaaga

SEQ ID NO: 216864 - RNA, 23 nt, Artificial Sequence
  Synthetic
cuuuuagagauacaggucuaaga

SEQ ID NO: 216865 - RNA, 24 nt, Artificial Sequence
  Synthetic
ucuuuuagagauacaggucuaaga

SEQ ID NO: 216866 - RNA, 18 nt, Artificial Sequence
  Synthetic
ccuaguagaugucuaaga

SEQ ID NO: 216867 - RNA, 19 nt, Artificial Sequence
  Synthetic
cccuaguagaugucuaaga

SEQ ID NO: 216868 - RNA, 20 nt, Artificial Sequence
  Synthetic
ucccuaguagaugucuaaga

SEQ ID NO: 216869 - RNA, 21 nt, Artificial Sequence
  Synthetic
uucccuaguagaugucuaaga

SEQ ID NO: 216870 - RNA, 22 nt, Artificial Sequence
  Synthetic
auucccuaguagaugucuaaga

SEQ ID NO: 216871 - RNA, 23 nt, Artificial Sequence
  Synthetic
aauucccuaguagaugucuaaga

SEQ ID NO: 216872 - RNA, 24 nt, Artificial Sequence
  Synthetic
uaauucccuaguagaugucuaaga

SEQ ID NO: 216873 - RNA, 18 nt, Artificial Sequence
  Synthetic
aggcuuguccuucuaaga

SEQ ID NO: 216874 - RNA, 19 nt, Artificial Sequence
  Synthetic
gaggcuuguccuucuaaga

SEQ ID NO: 216875 - RNA, 20 nt, Artificial Sequence
  Synthetic
ggaggcuuguccuucuaaga

SEQ ID NO: 216876 - RNA, 21 nt, Artificial Sequence
  Synthetic
gggaggcuuguccuucuaaga

SEQ ID NO: 216877 - RNA, 22 nt, Artificial Sequence
  Synthetic
agggaggcuuguccuucuaaga

SEQ ID NO: 216878 - RNA, 23 nt, Artificial Sequence
  Synthetic
uagggaggcuuguccuucuaaga

SEQ ID NO: 216879 - RNA, 24 nt, Artificial Sequence
  Synthetic
cuagggaggcuuguccuucuaaga

SEQ ID NO: 216880 - RNA, 18 nt, Artificial Sequence
  Synthetic
caugaauggguucuaaga

SEQ ID NO: 216881 - RNA, 19 nt, Artificial Sequence
  Synthetic
ucaugaauggguucuaaga

SEQ ID NO: 216882 - RNA, 20 nt, Artificial Sequence
  Synthetic
cucaugaauggguucuaaga

SEQ ID NO: 216883 - RNA, 21 nt, Artificial Sequence
  Synthetic
gcucaugaauggguucuaaga

SEQ ID NO: 216884 - RNA, 22 nt, Artificial Sequence
  Synthetic
agcucaugaauggguucuaaga

SEQ ID NO: 216885 - RNA, 23 nt, Artificial Sequence
  Synthetic
aagcucaugaauggguucuaaga

SEQ ID NO: 216886 - RNA, 24 nt, Artificial Sequence
  Synthetic
aaagcucaugaauggguucuaaga

SEQ ID NO: 216887 - RNA, 18 nt, Artificial Sequence
  Synthetic
guacugugugaaguaaga

SEQ ID NO: 216888 - RNA, 19 nt, Artificial Sequence
  Synthetic
uguacugugugaaguaaga

SEQ ID NO: 216889 - RNA, 20 nt, Artificial Sequence
  Synthetic
auguacugugugaaguaaga

SEQ ID NO: 216890 - RNA, 21 nt, Artificial Sequence
  Synthetic
uauguacugugugaaguaaga

SEQ ID NO: 216891 - RNA, 22 nt, Artificial Sequence
  Synthetic
auauguacugugugaaguaaga

SEQ ID NO: 216892 - RNA, 23 nt, Artificial Sequence
  Synthetic
cauauguacugugugaaguaaga

SEQ ID NO: 216893 - RNA, 24 nt, Artificial Sequence
  Synthetic
ccauauguacugugugaaguaaga

SEQ ID NO: 216894 - RNA, 18 nt, Artificial Sequence
  Synthetic
ucuuuaucuggaguaaga

SEQ ID NO: 216895 - RNA, 19 nt, Artificial Sequence
  Synthetic
gucuuuaucuggaguaaga

SEQ ID NO: 216896 - RNA, 20 nt, Artificial Sequence
  Synthetic
ggucuuuaucuggaguaaga

SEQ ID NO: 216897 - RNA, 21 nt, Artificial Sequence
  Synthetic
gggucuuuaucuggaguaaga

SEQ ID NO: 216898 - RNA, 22 nt, Artificial Sequence
  Synthetic
agggucuuuaucuggaguaaga

SEQ ID NO: 216899 - RNA, 23 nt, Artificial Sequence
  Synthetic
aagggucuuuaucuggaguaaga

SEQ ID NO: 216900 - RNA, 24 nt, Artificial Sequence
  Synthetic
aaagggucuuuaucuggaguaaga

SEQ ID NO: 216901 - RNA, 18 nt, Artificial Sequence
  Synthetic
caagagcagauaguaaga

SEQ ID NO: 216902 - RNA, 19 nt, Artificial Sequence
  Synthetic
ucaagagcagauaguaaga

SEQ ID NO: 216903 - RNA, 20 nt, Artificial Sequence
  Synthetic
cucaagagcagauaguaaga

SEQ ID NO: 216904 - RNA, 21 nt, Artificial Sequence
  Synthetic
gcucaagagcagauaguaaga

SEQ ID NO: 216905 - RNA, 22 nt, Artificial Sequence
  Synthetic
ggcucaagagcagauaguaaga

SEQ ID NO: 216906 - RNA, 23 nt, Artificial Sequence
  Synthetic
gggcucaagagcagauaguaaga

SEQ ID NO: 216907 - RNA, 24 nt, Artificial Sequence
  Synthetic
ggggcucaagagcagauaguaaga

SEQ ID NO: 216908 - RNA, 18 nt, Artificial Sequence
  Synthetic
aguagaauaguaguaaga

SEQ ID NO: 216909 - RNA, 19 nt, Artificial Sequence
  Synthetic
aaguagaauaguaguaaga

SEQ ID NO: 216910 - RNA, 20 nt, Artificial Sequence
  Synthetic
aaaguagaauaguaguaaga

SEQ ID NO: 216911 - RNA, 21 nt, Artificial Sequence
  Synthetic
gaaaguagaauaguaguaaga

SEQ ID NO: 216912 - RNA, 22 nt, Artificial Sequence
  Synthetic
agaaaguagaauaguaguaaga

SEQ ID NO: 216913 - RNA, 23 nt, Artificial Sequence
  Synthetic
gagaaaguagaauaguaguaaga

SEQ ID NO: 216914 - RNA, 24 nt, Artificial Sequence
  Synthetic
agagaaaguagaauaguaguaaga

SEQ ID NO: 216915 - RNA, 18 nt, Artificial Sequence
  Synthetic
auaaauggaaugguaaga

SEQ ID NO: 216916 - RNA, 19 nt, Artificial Sequence
  Synthetic
cauaaauggaaugguaaga

SEQ ID NO: 216917 - RNA, 20 nt, Artificial Sequence
  Synthetic
ccauaaauggaaugguaaga

SEQ ID NO: 216918 - RNA, 21 nt, Artificial Sequence
  Synthetic
cccauaaauggaaugguaaga

SEQ ID NO: 216919 - RNA, 22 nt, Artificial Sequence
  Synthetic
gcccauaaauggaaugguaaga

SEQ ID NO: 216920 - RNA, 23 nt, Artificial Sequence
  Synthetic
agcccauaaauggaaugguaaga

SEQ ID NO: 216921 - RNA, 24 nt, Artificial Sequence
  Synthetic
cagcccauaaauggaaugguaaga

SEQ ID NO: 216922 - RNA, 18 nt, Artificial Sequence
  Synthetic
ucauccucaaauguaaga

SEQ ID NO: 216923 - RNA, 19 nt, Artificial Sequence
  Synthetic
uucauccucaaauguaaga

SEQ ID NO: 216924 - RNA, 20 nt, Artificial Sequence
  Synthetic
guucauccucaaauguaaga

SEQ ID NO: 216925 - RNA, 21 nt, Artificial Sequence
  Synthetic
aguucauccucaaauguaaga

SEQ ID NO: 216926 - RNA, 22 nt, Artificial Sequence
  Synthetic
aaguucauccucaaauguaaga

SEQ ID NO: 216927 - RNA, 23 nt, Artificial Sequence
  Synthetic
gaaguucauccucaaauguaaga

SEQ ID NO: 216928 - RNA, 24 nt, Artificial Sequence
  Synthetic
agaaguucauccucaaauguaaga

SEQ ID NO: 216929 - RNA, 18 nt, Artificial Sequence
  Synthetic
acaugaagccauguaaga

SEQ ID NO: 216930 - RNA, 19 nt, Artificial Sequence
  Synthetic
uacaugaagccauguaaga

SEQ ID NO: 216931 - RNA, 20 nt, Artificial Sequence
  Synthetic
uuacaugaagccauguaaga

SEQ ID NO: 216932 - RNA, 21 nt, Artificial Sequence
  Synthetic
auuacaugaagccauguaaga

SEQ ID NO: 216933 - RNA, 22 nt, Artificial Sequence
  Synthetic
cauuacaugaagccauguaaga

SEQ ID NO: 216934 - RNA, 23 nt, Artificial Sequence
  Synthetic
ucauuacaugaagccauguaaga

SEQ ID NO: 216935 - RNA, 24 nt, Artificial Sequence
  Synthetic
uucauuacaugaagccauguaaga

SEQ ID NO: 216936 - RNA, 18 nt, Artificial Sequence
  Synthetic
auaaauaaauauguaaga

SEQ ID NO: 216937 - RNA, 19 nt, Artificial Sequence
  Synthetic
uauaaauaaauauguaaga

SEQ ID NO: 216938 - RNA, 20 nt, Artificial Sequence
  Synthetic
auauaaauaaauauguaaga

SEQ ID NO: 216939 - RNA, 21 nt, Artificial Sequence
  Synthetic
aauauaaauaaauauguaaga

SEQ ID NO: 216940 - RNA, 22 nt, Artificial Sequence
  Synthetic
uaauauaaauaaauauguaaga

SEQ ID NO: 216941 - RNA, 23 nt, Artificial Sequence
  Synthetic
auaauauaaauaaauauguaaga

SEQ ID NO: 216942 - RNA, 24 nt, Artificial Sequence
  Synthetic
aauaauauaaauaaauauguaaga

SEQ ID NO: 216943 - RNA, 18 nt, Artificial Sequence
  Synthetic
uuuguauaagguguaaga

SEQ ID NO: 216944 - RNA, 19 nt, Artificial Sequence
  Synthetic
uuuuguauaagguguaaga

SEQ ID NO: 216945 - RNA, 20 nt, Artificial Sequence
  Synthetic
uuuuuguauaagguguaaga

SEQ ID NO: 216946 - RNA, 21 nt, Artificial Sequence
  Synthetic
auuuuuguauaagguguaaga

SEQ ID NO: 216947 - RNA, 22 nt, Artificial Sequence
  Synthetic
aauuuuuguauaagguguaaga

SEQ ID NO: 216948 - RNA, 23 nt, Artificial Sequence
  Synthetic
uaauuuuuguauaagguguaaga

SEQ ID NO: 216949 - RNA, 24 nt, Artificial Sequence
  Synthetic
uuaauuuuuguauaagguguaaga

SEQ ID NO: 216950 - RNA, 18 nt, Artificial Sequence
  Synthetic
ccaauuagacuuguaaga

SEQ ID NO: 216951 - RNA, 19 nt, Artificial Sequence
  Synthetic
cccaauuagacuuguaaga

SEQ ID NO: 216952 - RNA, 20 nt, Artificial Sequence
  Synthetic
ccccaauuagacuuguaaga

SEQ ID NO: 216953 - RNA, 21 nt, Artificial Sequence
  Synthetic
uccccaauuagacuuguaaga

SEQ ID NO: 216954 - RNA, 22 nt, Artificial Sequence
  Synthetic
uuccccaauuagacuuguaaga

SEQ ID NO: 216955 - RNA, 23 nt, Artificial Sequence
  Synthetic
uuuccccaauuagacuuguaaga

SEQ ID NO: 216956 - RNA, 24 nt, Artificial Sequence
  Synthetic
cuuuccccaauuagacuuguaaga

SEQ ID NO: 216957 - RNA, 18 nt, Artificial Sequence
  Synthetic
ccuuacucaguuguaaga

SEQ ID NO: 216958 - RNA, 19 nt, Artificial Sequence
  Synthetic
uccuuacucaguuguaaga

SEQ ID NO: 216959 - RNA, 20 nt, Artificial Sequence
  Synthetic
uuccuuacucaguuguaaga

SEQ ID NO: 216960 - RNA, 21 nt, Artificial Sequence
  Synthetic
cuuccuuacucaguuguaaga

SEQ ID NO: 216961 - RNA, 22 nt, Artificial Sequence
  Synthetic
ccuuccuuacucaguuguaaga

SEQ ID NO: 216962 - RNA, 23 nt, Artificial Sequence
  Synthetic
accuuccuuacucaguuguaaga

SEQ ID NO: 216963 - RNA, 24 nt, Artificial Sequence
  Synthetic
gaccuuccuuacucaguuguaaga

SEQ ID NO: 216964 - RNA, 18 nt, Artificial Sequence
  Synthetic
uacugcaauuuuguaaga

SEQ ID NO: 216965 - RNA, 19 nt, Artificial Sequence
  Synthetic
cuacugcaauuuuguaaga

SEQ ID NO: 216966 - RNA, 20 nt, Artificial Sequence
  Synthetic
gcuacugcaauuuuguaaga

SEQ ID NO: 216967 - RNA, 21 nt, Artificial Sequence
  Synthetic
ugcuacugcaauuuuguaaga

SEQ ID NO: 216968 - RNA, 22 nt, Artificial Sequence
  Synthetic
uugcuacugcaauuuuguaaga

SEQ ID NO: 216969 - RNA, 23 nt, Artificial Sequence
  Synthetic
auugcuacugcaauuuuguaaga

SEQ ID NO: 216970 - RNA, 24 nt, Artificial Sequence
  Synthetic
aauugcuacugcaauuuuguaaga

SEQ ID NO: 216971 - RNA, 18 nt, Artificial Sequence
  Synthetic
agggcagccauauuaaga

SEQ ID NO: 216972 - RNA, 19 nt, Artificial Sequence
  Synthetic
cagggcagccauauuaaga

SEQ ID NO: 216973 - RNA, 20 nt, Artificial Sequence
  Synthetic
gcagggcagccauauuaaga

SEQ ID NO: 216974 - RNA, 21 nt, Artificial Sequence
  Synthetic
ugcagggcagccauauuaaga

SEQ ID NO: 216975 - RNA, 22 nt, Artificial Sequence
  Synthetic
cugcagggcagccauauuaaga

SEQ ID NO: 216976 - RNA, 23 nt, Artificial Sequence
  Synthetic
acugcagggcagccauauuaaga

SEQ ID NO: 216977 - RNA, 24 nt, Artificial Sequence
  Synthetic
cacugcagggcagccauauuaaga

SEQ ID NO: 216978 - RNA, 18 nt, Artificial Sequence
  Synthetic
gguugaagacuauuaaga

SEQ ID NO: 216979 - RNA, 19 nt, Artificial Sequence
  Synthetic
agguugaagacuauuaaga

SEQ ID NO: 216980 - RNA, 20 nt, Artificial Sequence
  Synthetic
cagguugaagacuauuaaga

SEQ ID NO: 216981 - RNA, 21 nt, Artificial Sequence
  Synthetic
ucagguugaagacuauuaaga

SEQ ID NO: 216982 - RNA, 22 nt, Artificial Sequence
  Synthetic
gucagguugaagacuauuaaga

SEQ ID NO: 216983 - RNA, 23 nt, Artificial Sequence
  Synthetic
agucagguugaagacuauuaaga

SEQ ID NO: 216984 - RNA, 24 nt, Artificial Sequence
  Synthetic
gagucagguugaagacuauuaaga

SEQ ID NO: 216985 - RNA, 18 nt, Artificial Sequence
  Synthetic
cuaaaauuucccuuaaga

SEQ ID NO: 216986 - RNA, 19 nt, Artificial Sequence
  Synthetic
ucuaaaauuucccuuaaga

SEQ ID NO: 216987 - RNA, 20 nt, Artificial Sequence
  Synthetic
aucuaaaauuucccuuaaga

SEQ ID NO: 216988 - RNA, 21 nt, Artificial Sequence
  Synthetic
uaucuaaaauuucccuuaaga

SEQ ID NO: 216989 - RNA, 22 nt, Artificial Sequence
  Synthetic
uuaucuaaaauuucccuuaaga

SEQ ID NO: 216990 - RNA, 23 nt, Artificial Sequence
  Synthetic
auuaucuaaaauuucccuuaaga

SEQ ID NO: 216991 - RNA, 24 nt, Artificial Sequence
  Synthetic
uauuaucuaaaauuucccuuaaga

SEQ ID NO: 216992 - RNA, 18 nt, Artificial Sequence
  Synthetic
uaaaagguaaucuuaaga

SEQ ID NO: 216993 - RNA, 19 nt, Artificial Sequence
  Synthetic
uuaaaagguaaucuuaaga

SEQ ID NO: 216994 - RNA, 20 nt, Artificial Sequence
  Synthetic
uuuaaaagguaaucuuaaga

SEQ ID NO: 216995 - RNA, 21 nt, Artificial Sequence
  Synthetic
uuuuaaaagguaaucuuaaga

SEQ ID NO: 216996 - RNA, 22 nt, Artificial Sequence
  Synthetic
guuuuaaaagguaaucuuaaga

SEQ ID NO: 216997 - RNA, 23 nt, Artificial Sequence
  Synthetic
aguuuuaaaagguaaucuuaaga

SEQ ID NO: 216998 - RNA, 24 nt, Artificial Sequence
  Synthetic
caguuuuaaaagguaaucuuaaga

SEQ ID NO: 216999 - RNA, 18 nt, Artificial Sequence
  Synthetic
uaugcuagugaguuaaga

SEQ ID NO: 217000 - RNA, 19 nt, Artificial Sequence
  Synthetic
guaugcuagugaguuaaga

SEQ ID NO: 217001 - RNA, 20 nt, Artificial Sequence
  Synthetic
aguaugcuagugaguuaaga

SEQ ID NO: 217002 - RNA, 21 nt, Artificial Sequence
  Synthetic
caguaugcuagugaguuaaga

SEQ ID NO: 217003 - RNA, 22 nt, Artificial Sequence
  Synthetic
acaguaugcuagugaguuaaga

SEQ ID NO: 217004 - RNA, 23 nt, Artificial Sequence
  Synthetic
uacaguaugcuagugaguuaaga

SEQ ID NO: 217005 - RNA, 24 nt, Artificial Sequence
  Synthetic
uuacaguaugcuagugaguuaaga

SEQ ID NO: 217006 - RNA, 18 nt, Artificial Sequence
  Synthetic
cagcugauaugguuaaga

SEQ ID NO: 217007 - RNA, 19 nt, Artificial Sequence
  Synthetic
gcagcugauaugguuaaga

SEQ ID NO: 217008 - RNA, 20 nt, Artificial Sequence
  Synthetic
ugcagcugauaugguuaaga

SEQ ID NO: 217009 - RNA, 21 nt, Artificial Sequence
  Synthetic
gugcagcugauaugguuaaga

SEQ ID NO: 217010 - RNA, 22 nt, Artificial Sequence
  Synthetic
agugcagcugauaugguuaaga

SEQ ID NO: 217011 - RNA, 23 nt, Artificial Sequence
  Synthetic
uagugcagcugauaugguuaaga

SEQ ID NO: 217012 - RNA, 24 nt, Artificial Sequence
  Synthetic
uuagugcagcugauaugguuaaga

SEQ ID NO: 217013 - RNA, 18 nt, Artificial Sequence
  Synthetic
auuuucagucauuuaaga

SEQ ID NO: 217014 - RNA, 19 nt, Artificial Sequence
  Synthetic
uauuuucagucauuuaaga

SEQ ID NO: 217015 - RNA, 20 nt, Artificial Sequence
  Synthetic
uuauuuucagucauuuaaga

SEQ ID NO: 217016 - RNA, 21 nt, Artificial Sequence
  Synthetic
auuauuuucagucauuuaaga

SEQ ID NO: 217017 - RNA, 22 nt, Artificial Sequence
  Synthetic
uauuauuuucagucauuuaaga

SEQ ID NO: 217018 - RNA, 23 nt, Artificial Sequence
  Synthetic
auauuauuuucagucauuuaaga

SEQ ID NO: 217019 - RNA, 24 nt, Artificial Sequence
  Synthetic
uauauuauuuucagucauuuaaga

SEQ ID NO: 217020 - RNA, 18 nt, Artificial Sequence
  Synthetic
ugcuuuucuccuuuaaga

SEQ ID NO: 217021 - RNA, 19 nt, Artificial Sequence
  Synthetic
uugcuuuucuccuuuaaga

SEQ ID NO: 217022 - RNA, 20 nt, Artificial Sequence
  Synthetic
uuugcuuuucuccuuuaaga

SEQ ID NO: 217023 - RNA, 21 nt, Artificial Sequence
  Synthetic
uuuugcuuuucuccuuuaaga

SEQ ID NO: 217024 - RNA, 22 nt, Artificial Sequence
  Synthetic
uuuuugcuuuucuccuuuaaga

SEQ ID NO: 217025 - RNA, 23 nt, Artificial Sequence
  Synthetic
cuuuuugcuuuucuccuuuaaga

SEQ ID NO: 217026 - RNA, 24 nt, Artificial Sequence
  Synthetic
gcuuuuugcuuuucuccuuuaaga

SEQ ID NO: 217027 - RNA, 18 nt, Artificial Sequence
  Synthetic
uggggaaugucuuuaaga

SEQ ID NO: 217028 - RNA, 19 nt, Artificial Sequence
  Synthetic
guggggaaugucuuuaaga

SEQ ID NO: 217029 - RNA, 20 nt, Artificial Sequence
  Synthetic
uguggggaaugucuuuaaga

SEQ ID NO: 217030 - RNA, 21 nt, Artificial Sequence
  Synthetic
guguggggaaugucuuuaaga

SEQ ID NO: 217031 - RNA, 22 nt, Artificial Sequence
  Synthetic
uguguggggaaugucuuuaaga

SEQ ID NO: 217032 - RNA, 23 nt, Artificial Sequence
  Synthetic
cuguguggggaaugucuuuaaga

SEQ ID NO: 217033 - RNA, 24 nt, Artificial Sequence
  Synthetic
ucuguguggggaaugucuuuaaga

SEQ ID NO: 217034 - RNA, 18 nt, Artificial Sequence
  Synthetic
caauaagauauuuuaaga

SEQ ID NO: 217035 - RNA, 19 nt, Artificial Sequence
  Synthetic
acaauaagauauuuuaaga

SEQ ID NO: 217036 - RNA, 20 nt, Artificial Sequence
  Synthetic
uacaauaagauauuuuaaga

SEQ ID NO: 217037 - RNA, 21 nt, Artificial Sequence
  Synthetic
auacaauaagauauuuuaaga

SEQ ID NO: 217038 - RNA, 22 nt, Artificial Sequence
  Synthetic
aauacaauaagauauuuuaaga

SEQ ID NO: 217039 - RNA, 23 nt, Artificial Sequence
  Synthetic
caauacaauaagauauuuuaaga

SEQ ID NO: 217040 - RNA, 24 nt, Artificial Sequence
  Synthetic
acaauacaauaagauauuuuaaga

SEQ ID NO: 217041 - RNA, 18 nt, Artificial Sequence
  Synthetic
uuuguuacuguuuuaaga

SEQ ID NO: 217042 - RNA, 19 nt, Artificial Sequence
  Synthetic
uuuuguuacuguuuuaaga

SEQ ID NO: 217043 - RNA, 20 nt, Artificial Sequence
  Synthetic
cuuuuguuacuguuuuaaga

SEQ ID NO: 217044 - RNA, 21 nt, Artificial Sequence
  Synthetic
ccuuuuguuacuguuuuaaga

SEQ ID NO: 217045 - RNA, 22 nt, Artificial Sequence
  Synthetic
accuuuuguuacuguuuuaaga

SEQ ID NO: 217046 - RNA, 23 nt, Artificial Sequence
  Synthetic
caccuuuuguuacuguuuuaaga

SEQ ID NO: 217047 - RNA, 24 nt, Artificial Sequence
  Synthetic
acaccuuuuguuacuguuuuaaga

SEQ ID NO: 217048 - RNA, 18 nt, Artificial Sequence
  Synthetic
caauccauauuuuuaaga

SEQ ID NO: 217049 - RNA, 19 nt, Artificial Sequence
  Synthetic
ucaauccauauuuuuaaga

SEQ ID NO: 217050 - RNA, 20 nt, Artificial Sequence
  Synthetic
aucaauccauauuuuuaaga

SEQ ID NO: 217051 - RNA, 21 nt, Artificial Sequence
  Synthetic
uaucaauccauauuuuuaaga

SEQ ID NO: 217052 - RNA, 22 nt, Artificial Sequence
  Synthetic
guaucaauccauauuuuuaaga

SEQ ID NO: 217053 - RNA, 23 nt, Artificial Sequence
  Synthetic
aguaucaauccauauuuuuaaga

SEQ ID NO: 217054 - RNA, 24 nt, Artificial Sequence
  Synthetic
gaguaucaauccauauuuuuaaga

SEQ ID NO: 217055 - RNA, 18 nt, Artificial Sequence
  Synthetic
cagccaucuuuuuuaaga

SEQ ID NO: 217056 - RNA, 19 nt, Artificial Sequence
  Synthetic
acagccaucuuuuuuaaga

SEQ ID NO: 217057 - RNA, 20 nt, Artificial Sequence
  Synthetic
aacagccaucuuuuuuaaga

SEQ ID NO: 217058 - RNA, 21 nt, Artificial Sequence
  Synthetic
uaacagccaucuuuuuuaaga

SEQ ID NO: 217059 - RNA, 22 nt, Artificial Sequence
  Synthetic
uuaacagccaucuuuuuuaaga

SEQ ID NO: 217060 - RNA, 23 nt, Artificial Sequence
  Synthetic
auuaacagccaucuuuuuuaaga

SEQ ID NO: 217061 - RNA, 24 nt, Artificial Sequence
  Synthetic
aauuaacagccaucuuuuuuaaga

SEQ ID NO: 217062 - RNA, 18 nt, Artificial Sequence
  Synthetic
caugugcaacaaaacaga

SEQ ID NO: 217063 - RNA, 19 nt, Artificial Sequence
  Synthetic
ucaugugcaacaaaacaga

SEQ ID NO: 217064 - RNA, 20 nt, Artificial Sequence
  Synthetic
gucaugugcaacaaaacaga

SEQ ID NO: 217065 - RNA, 21 nt, Artificial Sequence
  Synthetic
agucaugugcaacaaaacaga

SEQ ID NO: 217066 - RNA, 22 nt, Artificial Sequence
  Synthetic
aagucaugugcaacaaaacaga

SEQ ID NO: 217067 - RNA, 23 nt, Artificial Sequence
  Synthetic
gaagucaugugcaacaaaacaga

SEQ ID NO: 217068 - RNA, 24 nt, Artificial Sequence
  Synthetic
agaagucaugugcaacaaaacaga

SEQ ID NO: 217069 - RNA, 18 nt, Artificial Sequence
  Synthetic
uuguuagauacaaacaga

SEQ ID NO: 217070 - RNA, 19 nt, Artificial Sequence
  Synthetic
uuuguuagauacaaacaga

SEQ ID NO: 217071 - RNA, 20 nt, Artificial Sequence
  Synthetic
cuuuguuagauacaaacaga

SEQ ID NO: 217072 - RNA, 21 nt, Artificial Sequence
  Synthetic
ucuuuguuagauacaaacaga

SEQ ID NO: 217073 - RNA, 22 nt, Artificial Sequence
  Synthetic
uucuuuguuagauacaaacaga

SEQ ID NO: 217074 - RNA, 23 nt, Artificial Sequence
  Synthetic
uuucuuuguuagauacaaacaga

SEQ ID NO: 217075 - RNA, 24 nt, Artificial Sequence
  Synthetic
auuucuuuguuagauacaaacaga

SEQ ID NO: 217076 - RNA, 18 nt, Artificial Sequence
  Synthetic
uuacaaaaaucaaacaga

SEQ ID NO: 217077 - RNA, 19 nt, Artificial Sequence
  Synthetic
uuuacaaaaaucaaacaga

SEQ ID NO: 217078 - RNA, 20 nt, Artificial Sequence
  Synthetic
cuuuacaaaaaucaaacaga

SEQ ID NO: 217079 - RNA, 21 nt, Artificial Sequence
  Synthetic
ucuuuacaaaaaucaaacaga

SEQ ID NO: 217080 - RNA, 22 nt, Artificial Sequence
  Synthetic
uucuuuacaaaaaucaaacaga

SEQ ID NO: 217081 - RNA, 23 nt, Artificial Sequence
  Synthetic
guucuuuacaaaaaucaaacaga

SEQ ID NO: 217082 - RNA, 24 nt, Artificial Sequence
  Synthetic
aguucuuuacaaaaaucaaacaga

SEQ ID NO: 217083 - RNA, 18 nt, Artificial Sequence
  Synthetic
uugcagaguagaaacaga

SEQ ID NO: 217084 - RNA, 19 nt, Artificial Sequence
  Synthetic
uuugcagaguagaaacaga

SEQ ID NO: 217085 - RNA, 20 nt, Artificial Sequence
  Synthetic
auuugcagaguagaaacaga

SEQ ID NO: 217086 - RNA, 21 nt, Artificial Sequence
  Synthetic
gauuugcagaguagaaacaga

SEQ ID NO: 217087 - RNA, 22 nt, Artificial Sequence
  Synthetic
ugauuugcagaguagaaacaga

SEQ ID NO: 217088 - RNA, 23 nt, Artificial Sequence
  Synthetic
augauuugcagaguagaaacaga

SEQ ID NO: 217089 - RNA, 24 nt, Artificial Sequence
  Synthetic
aaugauuugcagaguagaaacaga

SEQ ID NO: 217090 - RNA, 18 nt, Artificial Sequence
  Synthetic
agacauucucuaaacaga

SEQ ID NO: 217091 - RNA, 19 nt, Artificial Sequence
  Synthetic
aagacauucucuaaacaga

SEQ ID NO: 217092 - RNA, 20 nt, Artificial Sequence
  Synthetic
aaagacauucucuaaacaga

SEQ ID NO: 217093 - RNA, 21 nt, Artificial Sequence
  Synthetic
aaaagacauucucuaaacaga

SEQ ID NO: 217094 - RNA, 22 nt, Artificial Sequence
  Synthetic
aaaaagacauucucuaaacaga

SEQ ID NO: 217095 - RNA, 23 nt, Artificial Sequence
  Synthetic
caaaaagacauucucuaaacaga

SEQ ID NO: 217096 - RNA, 24 nt, Artificial Sequence
  Synthetic
acaaaaagacauucucuaaacaga

SEQ ID NO: 217097 - RNA, 18 nt, Artificial Sequence
  Synthetic
ucaaaaauucuaaacaga

SEQ ID NO: 217098 - RNA, 19 nt, Artificial Sequence
  Synthetic
uucaaaaauucuaaacaga

SEQ ID NO: 217099 - RNA, 20 nt, Artificial Sequence
  Synthetic
uuucaaaaauucuaaacaga

SEQ ID NO: 217100 - RNA, 21 nt, Artificial Sequence
  Synthetic
auuucaaaaauucuaaacaga

SEQ ID NO: 217101 - RNA, 22 nt, Artificial Sequence
  Synthetic
cauuucaaaaauucuaaacaga

SEQ ID NO: 217102 - RNA, 23 nt, Artificial Sequence
  Synthetic
ucauuucaaaaauucuaaacaga

SEQ ID NO: 217103 - RNA, 24 nt, Artificial Sequence
  Synthetic
aucauuucaaaaauucuaaacaga

SEQ ID NO: 217104 - RNA, 18 nt, Artificial Sequence
  Synthetic
uuuugcuguaacaacaga

SEQ ID NO: 217105 - RNA, 19 nt, Artificial Sequence
  Synthetic
uuuuugcuguaacaacaga

SEQ ID NO: 217106 - RNA, 20 nt, Artificial Sequence
  Synthetic
cuuuuugcuguaacaacaga

SEQ ID NO: 217107 - RNA, 21 nt, Artificial Sequence
  Synthetic
acuuuuugcuguaacaacaga

SEQ ID NO: 217108 - RNA, 22 nt, Artificial Sequence
  Synthetic
aacuuuuugcuguaacaacaga

SEQ ID NO: 217109 - RNA, 23 nt, Artificial Sequence
  Synthetic
uaacuuuuugcuguaacaacaga

SEQ ID NO: 217110 - RNA, 24 nt, Artificial Sequence
  Synthetic
uuaacuuuuugcuguaacaacaga

SEQ ID NO: 217111 - RNA, 18 nt, Artificial Sequence
  Synthetic
cuucagccugacaacaga

SEQ ID NO: 217112 - RNA, 19 nt, Artificial Sequence
  Synthetic
acuucagccugacaacaga

SEQ ID NO: 217113 - RNA, 20 nt, Artificial Sequence
  Synthetic
cacuucagccugacaacaga

SEQ ID NO: 217114 - RNA, 21 nt, Artificial Sequence
  Synthetic
gcacuucagccugacaacaga

SEQ ID NO: 217115 - RNA, 22 nt, Artificial Sequence
  Synthetic
ugcacuucagccugacaacaga

SEQ ID NO: 217116 - RNA, 23 nt, Artificial Sequence
  Synthetic
cugcacuucagccugacaacaga

SEQ ID NO: 217117 - RNA, 24 nt, Artificial Sequence
  Synthetic
acugcacuucagccugacaacaga

SEQ ID NO: 217118 - RNA, 18 nt, Artificial Sequence
  Synthetic
agcaaccugggcaacaga

SEQ ID NO: 217119 - RNA, 19 nt, Artificial Sequence
  Synthetic
gagcaaccugggcaacaga

SEQ ID NO: 217120 - RNA, 20 nt, Artificial Sequence
  Synthetic
agagcaaccugggcaacaga

SEQ ID NO: 217121 - RNA, 21 nt, Artificial Sequence
  Synthetic
aagagcaaccugggcaacaga

SEQ ID NO: 217122 - RNA, 22 nt, Artificial Sequence
  Synthetic
caagagcaaccugggcaacaga

SEQ ID NO: 217123 - RNA, 23 nt, Artificial Sequence
  Synthetic
ucaagagcaaccugggcaacaga

SEQ ID NO: 217124 - RNA, 24 nt, Artificial Sequence
  Synthetic
uucaagagcaaccugggcaacaga

SEQ ID NO: 217125 - RNA, 18 nt, Artificial Sequence
  Synthetic
uacagccugggcaacaga

SEQ ID NO: 217126 - RNA, 19 nt, Artificial Sequence
  Synthetic
cuacagccugggcaacaga

SEQ ID NO: 217127 - RNA, 20 nt, Artificial Sequence
  Synthetic
acuacagccugggcaacaga

SEQ ID NO: 217128 - RNA, 21 nt, Artificial Sequence
  Synthetic
cacuacagccugggcaacaga

SEQ ID NO: 217129 - RNA, 22 nt, Artificial Sequence
  Synthetic
gcacuacagccugggcaacaga

SEQ ID NO: 217130 - RNA, 23 nt, Artificial Sequence
  Synthetic
ugcacuacagccugggcaacaga

SEQ ID NO: 217131 - RNA, 24 nt, Artificial Sequence
  Synthetic
cugcacuacagccugggcaacaga

SEQ ID NO: 217132 - RNA, 18 nt, Artificial Sequence
  Synthetic
aaauuggaauucaacaga

SEQ ID NO: 217133 - RNA, 19 nt, Artificial Sequence
  Synthetic
uaaauuggaauucaacaga

SEQ ID NO: 217134 - RNA, 20 nt, Artificial Sequence
  Synthetic
uuaaauuggaauucaacaga

SEQ ID NO: 217135 - RNA, 21 nt, Artificial Sequence
  Synthetic
auuaaauuggaauucaacaga

SEQ ID NO: 217136 - RNA, 22 nt, Artificial Sequence
  Synthetic
aauuaaauuggaauucaacaga

SEQ ID NO: 217137 - RNA, 23 nt, Artificial Sequence
  Synthetic
gaauuaaauuggaauucaacaga

SEQ ID NO: 217138 - RNA, 24 nt, Artificial Sequence
  Synthetic
agaauuaaauuggaauucaacaga

SEQ ID NO: 217139 - RNA, 18 nt, Artificial Sequence
  Synthetic
aauaagauuuucaacaga

SEQ ID NO: 217140 - RNA, 19 nt, Artificial Sequence
  Synthetic
gaauaagauuuucaacaga

SEQ ID NO: 217141 - RNA, 20 nt, Artificial Sequence
  Synthetic
ggaauaagauuuucaacaga

SEQ ID NO: 217142 - RNA, 21 nt, Artificial Sequence
  Synthetic
gggaauaagauuuucaacaga

SEQ ID NO: 217143 - RNA, 22 nt, Artificial Sequence
  Synthetic
ugggaauaagauuuucaacaga

SEQ ID NO: 217144 - RNA, 23 nt, Artificial Sequence
  Synthetic
uugggaauaagauuuucaacaga

SEQ ID NO: 217145 - RNA, 24 nt, Artificial Sequence
  Synthetic
uuugggaauaagauuuucaacaga

SEQ ID NO: 217146 - RNA, 18 nt, Artificial Sequence
  Synthetic
cauugaggagagaacaga

SEQ ID NO: 217147 - RNA, 19 nt, Artificial Sequence
  Synthetic
gcauugaggagagaacaga

SEQ ID NO: 217148 - RNA, 20 nt, Artificial Sequence
  Synthetic
ugcauugaggagagaacaga

SEQ ID NO: 217149 - RNA, 21 nt, Artificial Sequence
  Synthetic
augcauugaggagagaacaga

SEQ ID NO: 217150 - RNA, 22 nt, Artificial Sequence
  Synthetic
uaugcauugaggagagaacaga

SEQ ID NO: 217151 - RNA, 23 nt, Artificial Sequence
  Synthetic
auaugcauugaggagagaacaga

SEQ ID NO: 217152 - RNA, 24 nt, Artificial Sequence
  Synthetic
aauaugcauugaggagagaacaga

SEQ ID NO: 217153 - RNA, 18 nt, Artificial Sequence
  Synthetic
uauauauauaugaacaga

SEQ ID NO: 217154 - RNA, 19 nt, Artificial Sequence
  Synthetic
auauauauauaugaacaga

SEQ ID NO: 217155 - RNA, 20 nt, Artificial Sequence
  Synthetic
uauauauauauaugaacaga

SEQ ID NO: 217156 - RNA, 21 nt, Artificial Sequence
  Synthetic
auauauauauauaugaacaga

SEQ ID NO: 217157 - RNA, 22 nt, Artificial Sequence
  Synthetic
uauauauauauauaugaacaga

SEQ ID NO: 217158 - RNA, 23 nt, Artificial Sequence
  Synthetic
auauauauauauauaugaacaga

SEQ ID NO: 217159 - RNA, 24 nt, Artificial Sequence
  Synthetic
uauauauauauauauaugaacaga

SEQ ID NO: 217160 - RNA, 18 nt, Artificial Sequence
  Synthetic
agcaaguuagugaacaga

SEQ ID NO: 217161 - RNA, 19 nt, Artificial Sequence
  Synthetic
aagcaaguuagugaacaga

SEQ ID NO: 217162 - RNA, 20 nt, Artificial Sequence
  Synthetic
uaagcaaguuagugaacaga

SEQ ID NO: 217163 - RNA, 21 nt, Artificial Sequence
  Synthetic
auaagcaaguuagugaacaga

SEQ ID NO: 217164 - RNA, 22 nt, Artificial Sequence
  Synthetic
cauaagcaaguuagugaacaga

SEQ ID NO: 217165 - RNA, 23 nt, Artificial Sequence
  Synthetic
gcauaagcaaguuagugaacaga

SEQ ID NO: 217166 - RNA, 24 nt, Artificial Sequence
  Synthetic
ggcauaagcaaguuagugaacaga

SEQ ID NO: 217167 - RNA, 18 nt, Artificial Sequence
  Synthetic
cugagucaccauaacaga

SEQ ID NO: 217168 - RNA, 19 nt, Artificial Sequence
  Synthetic
acugagucaccauaacaga

SEQ ID NO: 217169 - RNA, 20 nt, Artificial Sequence
  Synthetic
gacugagucaccauaacaga

SEQ ID NO: 217170 - RNA, 21 nt, Artificial Sequence
  Synthetic
agacugagucaccauaacaga

SEQ ID NO: 217171 - RNA, 22 nt, Artificial Sequence
  Synthetic
cagacugagucaccauaacaga

SEQ ID NO: 217172 - RNA, 23 nt, Artificial Sequence
  Synthetic
ccagacugagucaccauaacaga

SEQ ID NO: 217173 - RNA, 24 nt, Artificial Sequence
  Synthetic
cccagacugagucaccauaacaga

SEQ ID NO: 217174 - RNA, 18 nt, Artificial Sequence
  Synthetic
cuguugcaugauaacaga

SEQ ID NO: 217175 - RNA, 19 nt, Artificial Sequence
  Synthetic
acuguugcaugauaacaga

SEQ ID NO: 217176 - RNA, 20 nt, Artificial Sequence
  Synthetic
cacuguugcaugauaacaga

SEQ ID NO: 217177 - RNA, 21 nt, Artificial Sequence
  Synthetic
acacuguugcaugauaacaga

SEQ ID NO: 217178 - RNA, 22 nt, Artificial Sequence
  Synthetic
cacacuguugcaugauaacaga

SEQ ID NO: 217179 - RNA, 23 nt, Artificial Sequence
  Synthetic
acacacuguugcaugauaacaga

SEQ ID NO: 217180 - RNA, 24 nt, Artificial Sequence
  Synthetic
cacacacuguugcaugauaacaga

SEQ ID NO: 217181 - RNA, 18 nt, Artificial Sequence
  Synthetic
cuugcagaaccuaacaga

SEQ ID NO: 217182 - RNA, 19 nt, Artificial Sequence
  Synthetic
ucuugcagaaccuaacaga

SEQ ID NO: 217183 - RNA, 20 nt, Artificial Sequence
  Synthetic
cucuugcagaaccuaacaga

SEQ ID NO: 217184 - RNA, 21 nt, Artificial Sequence
  Synthetic
gcucuugcagaaccuaacaga

SEQ ID NO: 217185 - RNA, 22 nt, Artificial Sequence
  Synthetic
agcucuugcagaaccuaacaga

SEQ ID NO: 217186 - RNA, 23 nt, Artificial Sequence
  Synthetic
uagcucuugcagaaccuaacaga

SEQ ID NO: 217187 - RNA, 24 nt, Artificial Sequence
  Synthetic
cuagcucuugcagaaccuaacaga

SEQ ID NO: 217188 - RNA, 18 nt, Artificial Sequence
  Synthetic
gaaaaaugaguuaacaga

SEQ ID NO: 217189 - RNA, 19 nt, Artificial Sequence
  Synthetic
agaaaaaugaguuaacaga

SEQ ID NO: 217190 - RNA, 20 nt, Artificial Sequence
  Synthetic
gagaaaaaugaguuaacaga

SEQ ID NO: 217191 - RNA, 21 nt, Artificial Sequence
  Synthetic
ggagaaaaaugaguuaacaga

SEQ ID NO: 217192 - RNA, 22 nt, Artificial Sequence
  Synthetic
gggagaaaaaugaguuaacaga

SEQ ID NO: 217193 - RNA, 23 nt, Artificial Sequence
  Synthetic
agggagaaaaaugaguuaacaga

SEQ ID NO: 217194 - RNA, 24 nt, Artificial Sequence
  Synthetic
aagggagaaaaaugaguuaacaga

SEQ ID NO: 217195 - RNA, 18 nt, Artificial Sequence
  Synthetic
gaucucagggaacacaga

SEQ ID NO: 217196 - RNA, 19 nt, Artificial Sequence
  Synthetic
ggaucucagggaacacaga

SEQ ID NO: 217197 - RNA, 20 nt, Artificial Sequence
  Synthetic
aggaucucagggaacacaga

SEQ ID NO: 217198 - RNA, 21 nt, Artificial Sequence
  Synthetic
aaggaucucagggaacacaga

SEQ ID NO: 217199 - RNA, 22 nt, Artificial Sequence
  Synthetic
aaaggaucucagggaacacaga

SEQ ID NO: 217200 - RNA, 23 nt, Artificial Sequence
  Synthetic
aaaaggaucucagggaacacaga

SEQ ID NO: 217201 - RNA, 24 nt, Artificial Sequence
  Synthetic
gaaaaggaucucagggaacacaga

SEQ ID NO: 217202 - RNA, 18 nt, Artificial Sequence
  Synthetic
cacacacacacacacaga

SEQ ID NO: 217203 - RNA, 19 nt, Artificial Sequence
  Synthetic
acacacacacacacacaga

SEQ ID NO: 217204 - RNA, 20 nt, Artificial Sequence
  Synthetic
cacacacacacacacacaga

SEQ ID NO: 217205 - RNA, 21 nt, Artificial Sequence
  Synthetic
acacacacacacacacacaga

SEQ ID NO: 217206 - RNA, 22 nt, Artificial Sequence
  Synthetic
cacacacacacacacacacaga

SEQ ID NO: 217207 - RNA, 23 nt, Artificial Sequence
  Synthetic
acacacacacacacacacacaga

SEQ ID NO: 217208 - RNA, 24 nt, Artificial Sequence
  Synthetic
cacacacacacacacacacacaga

SEQ ID NO: 217209 - RNA, 18 nt, Artificial Sequence
  Synthetic
guagcugucagacacaga

SEQ ID NO: 217210 - RNA, 19 nt, Artificial Sequence
  Synthetic
uguagcugucagacacaga

SEQ ID NO: 217211 - RNA, 20 nt, Artificial Sequence
  Synthetic
auguagcugucagacacaga

SEQ ID NO: 217212 - RNA, 21 nt, Artificial Sequence
  Synthetic
gauguagcugucagacacaga

SEQ ID NO: 217213 - RNA, 22 nt, Artificial Sequence
  Synthetic
cgauguagcugucagacacaga

SEQ ID NO: 217214 - RNA, 23 nt, Artificial Sequence
  Synthetic
gcgauguagcugucagacacaga

SEQ ID NO: 217215 - RNA, 24 nt, Artificial Sequence
  Synthetic
agcgauguagcugucagacacaga

SEQ ID NO: 217216 - RNA, 18 nt, Artificial Sequence
  Synthetic
gagaugacuagacacaga

SEQ ID NO: 217217 - RNA, 19 nt, Artificial Sequence
  Synthetic
agagaugacuagacacaga

SEQ ID NO: 217218 - RNA, 20 nt, Artificial Sequence
  Synthetic
cagagaugacuagacacaga

SEQ ID NO: 217219 - RNA, 21 nt, Artificial Sequence
  Synthetic
acagagaugacuagacacaga

SEQ ID NO: 217220 - RNA, 22 nt, Artificial Sequence
  Synthetic
uacagagaugacuagacacaga

SEQ ID NO: 217221 - RNA, 23 nt, Artificial Sequence
  Synthetic
uuacagagaugacuagacacaga

SEQ ID NO: 217222 - RNA, 24 nt, Artificial Sequence
  Synthetic
auuacagagaugacuagacacaga

SEQ ID NO: 217223 - RNA, 18 nt, Artificial Sequence
  Synthetic
uggacagauggacacaga

SEQ ID NO: 217224 - RNA, 19 nt, Artificial Sequence
  Synthetic
guggacagauggacacaga

SEQ ID NO: 217225 - RNA, 20 nt, Artificial Sequence
  Synthetic
uguggacagauggacacaga

SEQ ID NO: 217226 - RNA, 21 nt, Artificial Sequence
  Synthetic
uuguggacagauggacacaga

SEQ ID NO: 217227 - RNA, 22 nt, Artificial Sequence
  Synthetic
auuguggacagauggacacaga

SEQ ID NO: 217228 - RNA, 23 nt, Artificial Sequence
  Synthetic
gauuguggacagauggacacaga

SEQ ID NO: 217229 - RNA, 24 nt, Artificial Sequence
  Synthetic
ggauuguggacagauggacacaga

SEQ ID NO: 217230 - RNA, 18 nt, Artificial Sequence
  Synthetic
aaaagaggcauacacaga

SEQ ID NO: 217231 - RNA, 19 nt, Artificial Sequence
  Synthetic
gaaaagaggcauacacaga

SEQ ID NO: 217232 - RNA, 20 nt, Artificial Sequence
  Synthetic
ggaaaagaggcauacacaga

SEQ ID NO: 217233 - RNA, 21 nt, Artificial Sequence
  Synthetic
aggaaaagaggcauacacaga

SEQ ID NO: 217234 - RNA, 22 nt, Artificial Sequence
  Synthetic
gaggaaaagaggcauacacaga

SEQ ID NO: 217235 - RNA, 23 nt, Artificial Sequence
  Synthetic
agaggaaaagaggcauacacaga

SEQ ID NO: 217236 - RNA, 24 nt, Artificial Sequence
  Synthetic
aagaggaaaagaggcauacacaga

SEQ ID NO: 217237 - RNA, 18 nt, Artificial Sequence
  Synthetic
agcuguucuugccacaga

SEQ ID NO: 217238 - RNA, 19 nt, Artificial Sequence
  Synthetic
uagcuguucuugccacaga

SEQ ID NO: 217239 - RNA, 20 nt, Artificial Sequence
  Synthetic
auagcuguucuugccacaga

SEQ ID NO: 217240 - RNA, 21 nt, Artificial Sequence
  Synthetic
uauagcuguucuugccacaga

SEQ ID NO: 217241 - RNA, 22 nt, Artificial Sequence
  Synthetic
uuauagcuguucuugccacaga

SEQ ID NO: 217242 - RNA, 23 nt, Artificial Sequence
  Synthetic
auuauagcuguucuugccacaga

SEQ ID NO: 217243 - RNA, 24 nt, Artificial Sequence
  Synthetic
gauuauagcuguucuugccacaga

SEQ ID NO: 217244 - RNA, 18 nt, Artificial Sequence
  Synthetic
auuuccuucuuccacaga

SEQ ID NO: 217245 - RNA, 19 nt, Artificial Sequence
  Synthetic
uauuuccuucuuccacaga

SEQ ID NO: 217246 - RNA, 20 nt, Artificial Sequence
  Synthetic
cuauuuccuucuuccacaga

SEQ ID NO: 217247 - RNA, 21 nt, Artificial Sequence
  Synthetic
acuauuuccuucuuccacaga

SEQ ID NO: 217248 - RNA, 22 nt, Artificial Sequence
  Synthetic
aacuauuuccuucuuccacaga

SEQ ID NO: 217249 - RNA, 23 nt, Artificial Sequence
  Synthetic
aaacuauuuccuucuuccacaga

SEQ ID NO: 217250 - RNA, 24 nt, Artificial Sequence
  Synthetic
gaaacuauuuccuucuuccacaga

SEQ ID NO: 217251 - RNA, 18 nt, Artificial Sequence
  Synthetic
uucccacaacugcacaga

SEQ ID NO: 217252 - RNA, 19 nt, Artificial Sequence
  Synthetic
uuucccacaacugcacaga

SEQ ID NO: 217253 - RNA, 20 nt, Artificial Sequence
  Synthetic
auuucccacaacugcacaga

SEQ ID NO: 217254 - RNA, 21 nt, Artificial Sequence
  Synthetic
cauuucccacaacugcacaga

SEQ ID NO: 217255 - RNA, 22 nt, Artificial Sequence
  Synthetic
acauuucccacaacugcacaga

SEQ ID NO: 217256 - RNA, 23 nt, Artificial Sequence
  Synthetic
cacauuucccacaacugcacaga

SEQ ID NO: 217257 - RNA, 24 nt, Artificial Sequence
  Synthetic
ucacauuucccacaacugcacaga

SEQ ID NO: 217258 - RNA, 18 nt, Artificial Sequence
  Synthetic
ugucugagcuugcacaga

SEQ ID NO: 217259 - RNA, 19 nt, Artificial Sequence
  Synthetic
augucugagcuugcacaga

SEQ ID NO: 217260 - RNA, 20 nt, Artificial Sequence
  Synthetic
aaugucugagcuugcacaga

SEQ ID NO: 217261 - RNA, 21 nt, Artificial Sequence
  Synthetic
gaaugucugagcuugcacaga

SEQ ID NO: 217262 - RNA, 22 nt, Artificial Sequence
  Synthetic
ggaaugucugagcuugcacaga

SEQ ID NO: 217263 - RNA, 23 nt, Artificial Sequence
  Synthetic
uggaaugucugagcuugcacaga

SEQ ID NO: 217264 - RNA, 24 nt, Artificial Sequence
  Synthetic
cuggaaugucugagcuugcacaga

SEQ ID NO: 217265 - RNA, 18 nt, Artificial Sequence
  Synthetic
agauacugccaagacaga

SEQ ID NO: 217266 - RNA, 19 nt, Artificial Sequence
  Synthetic
gagauacugccaagacaga

SEQ ID NO: 217267 - RNA, 20 nt, Artificial Sequence
  Synthetic
ggagauacugccaagacaga

SEQ ID NO: 217268 - RNA, 21 nt, Artificial Sequence
  Synthetic
aggagauacugccaagacaga

SEQ ID NO: 217269 - RNA, 22 nt, Artificial Sequence
  Synthetic
aaggagauacugccaagacaga

SEQ ID NO: 217270 - RNA, 23 nt, Artificial Sequence
  Synthetic
aaaggagauacugccaagacaga

SEQ ID NO: 217271 - RNA, 24 nt, Artificial Sequence
  Synthetic
caaaggagauacugccaagacaga

SEQ ID NO: 217272 - RNA, 18 nt, Artificial Sequence
  Synthetic
gaagacuagcaagacaga

SEQ ID NO: 217273 - RNA, 19 nt, Artificial Sequence
  Synthetic
agaagacuagcaagacaga

SEQ ID NO: 217274 - RNA, 20 nt, Artificial Sequence
  Synthetic
gagaagacuagcaagacaga

SEQ ID NO: 217275 - RNA, 21 nt, Artificial Sequence
  Synthetic
agagaagacuagcaagacaga

SEQ ID NO: 217276 - RNA, 22 nt, Artificial Sequence
  Synthetic
uagagaagacuagcaagacaga

SEQ ID NO: 217277 - RNA, 23 nt, Artificial Sequence
  Synthetic
guagagaagacuagcaagacaga

SEQ ID NO: 217278 - RNA, 24 nt, Artificial Sequence
  Synthetic
gguagagaagacuagcaagacaga

SEQ ID NO: 217279 - RNA, 18 nt, Artificial Sequence
  Synthetic
gcccucaucgaagacaga

SEQ ID NO: 217280 - RNA, 19 nt, Artificial Sequence
  Synthetic
ggcccucaucgaagacaga

SEQ ID NO: 217281 - RNA, 20 nt, Artificial Sequence
  Synthetic
aggcccucaucgaagacaga

SEQ ID NO: 217282 - RNA, 21 nt, Artificial Sequence
  Synthetic
caggcccucaucgaagacaga

SEQ ID NO: 217283 - RNA, 22 nt, Artificial Sequence
  Synthetic
ucaggcccucaucgaagacaga

SEQ ID NO: 217284 - RNA, 23 nt, Artificial Sequence
  Synthetic
cucaggcccucaucgaagacaga

SEQ ID NO: 217285 - RNA, 24 nt, Artificial Sequence
  Synthetic
gcucaggcccucaucgaagacaga

SEQ ID NO: 217286 - RNA, 18 nt, Artificial Sequence
  Synthetic
aucuacauggaagacaga

SEQ ID NO: 217287 - RNA, 19 nt, Artificial Sequence
  Synthetic
caucuacauggaagacaga

SEQ ID NO: 217288 - RNA, 20 nt, Artificial Sequence
  Synthetic
gcaucuacauggaagacaga

SEQ ID NO: 217289 - RNA, 21 nt, Artificial Sequence
  Synthetic
ugcaucuacauggaagacaga

SEQ ID NO: 217290 - RNA, 22 nt, Artificial Sequence
  Synthetic
augcaucuacauggaagacaga

SEQ ID NO: 217291 - RNA, 23 nt, Artificial Sequence
  Synthetic
uaugcaucuacauggaagacaga

SEQ ID NO: 217292 - RNA, 24 nt, Artificial Sequence
  Synthetic
uuaugcaucuacauggaagacaga

SEQ ID NO: 217293 - RNA, 18 nt, Artificial Sequence
  Synthetic
cacacacacacagacaga

SEQ ID NO: 217294 - RNA, 19 nt, Artificial Sequence
  Synthetic
acacacacacacagacaga

SEQ ID NO: 217295 - RNA, 20 nt, Artificial Sequence
  Synthetic
cacacacacacacagacaga

SEQ ID NO: 217296 - RNA, 21 nt, Artificial Sequence
  Synthetic
acacacacacacacagacaga

SEQ ID NO: 217297 - RNA, 22 nt, Artificial Sequence
  Synthetic
cacacacacacacacagacaga

SEQ ID NO: 217298 - RNA, 23 nt, Artificial Sequence
  Synthetic
acacacacacacacacagacaga

SEQ ID NO: 217299 - RNA, 24 nt, Artificial Sequence
  Synthetic
cacacacacacacacacagacaga

SEQ ID NO: 217300 - RNA, 18 nt, Artificial Sequence
  Synthetic
ugaguucuaagagacaga

SEQ ID NO: 217301 - RNA, 19 nt, Artificial Sequence
  Synthetic
cugaguucuaagagacaga

SEQ ID NO: 217302 - RNA, 20 nt, Artificial Sequence
  Synthetic
ucugaguucuaagagacaga

SEQ ID NO: 217303 - RNA, 21 nt, Artificial Sequence
  Synthetic
cucugaguucuaagagacaga

SEQ ID NO: 217304 - RNA, 22 nt, Artificial Sequence
  Synthetic
ccucugaguucuaagagacaga

SEQ ID NO: 217305 - RNA, 23 nt, Artificial Sequence
  Synthetic
gccucugaguucuaagagacaga

SEQ ID NO: 217306 - RNA, 24 nt, Artificial Sequence
  Synthetic
ugccucugaguucuaagagacaga

SEQ ID NO: 217307 - RNA, 18 nt, Artificial Sequence
  Synthetic
aggagcaagagagacaga

SEQ ID NO: 217308 - RNA, 19 nt, Artificial Sequence
  Synthetic
caggagcaagagagacaga

SEQ ID NO: 217309 - RNA, 20 nt, Artificial Sequence
  Synthetic
gcaggagcaagagagacaga

SEQ ID NO: 217310 - RNA, 21 nt, Artificial Sequence
  Synthetic
agcaggagcaagagagacaga

SEQ ID NO: 217311 - RNA, 22 nt, Artificial Sequence
  Synthetic
gagcaggagcaagagagacaga

SEQ ID NO: 217312 - RNA, 23 nt, Artificial Sequence
  Synthetic
agagcaggagcaagagagacaga

SEQ ID NO: 217313 - RNA, 24 nt, Artificial Sequence
  Synthetic
uagagcaggagcaagagagacaga

SEQ ID NO: 217314 - RNA, 18 nt, Artificial Sequence
  Synthetic
gagagagagagagacaga

SEQ ID NO: 217315 - RNA, 19 nt, Artificial Sequence
  Synthetic
agagagagagagagacaga

SEQ ID NO: 217316 - RNA, 20 nt, Artificial Sequence
  Synthetic
gagagagagagagagacaga

SEQ ID NO: 217317 - RNA, 21 nt, Artificial Sequence
  Synthetic
agagagagagagagagacaga

SEQ ID NO: 217318 - RNA, 22 nt, Artificial Sequence
  Synthetic
gagagagagagagagagacaga

SEQ ID NO: 217319 - RNA, 23 nt, Artificial Sequence
  Synthetic
agagagagagagagagagacaga

SEQ ID NO: 217320 - RNA, 24 nt, Artificial Sequence
  Synthetic
gagagagagagagagagagacaga

SEQ ID NO: 217321 - RNA, 18 nt, Artificial Sequence
  Synthetic
gggagagagagagacaga

SEQ ID NO: 217322 - RNA, 19 nt, Artificial Sequence
  Synthetic
agggagagagagagacaga

SEQ ID NO: 217323 - RNA, 20 nt, Artificial Sequence
  Synthetic
gagggagagagagagacaga

SEQ ID NO: 217324 - RNA, 21 nt, Artificial Sequence
  Synthetic
agagggagagagagagacaga

SEQ ID NO: 217325 - RNA, 22 nt, Artificial Sequence
  Synthetic
gagagggagagagagagacaga

SEQ ID NO: 217326 - RNA, 23 nt, Artificial Sequence
  Synthetic
ggagagggagagagagagacaga

SEQ ID NO: 217327 - RNA, 24 nt, Artificial Sequence
  Synthetic
aggagagggagagagagagacaga

SEQ ID NO: 217328 - RNA, 18 nt, Artificial Sequence
  Synthetic
ugauuuuagagagacaga

SEQ ID NO: 217329 - RNA, 19 nt, Artificial Sequence
  Synthetic
uugauuuuagagagacaga

SEQ ID NO: 217330 - RNA, 20 nt, Artificial Sequence
  Synthetic
guugauuuuagagagacaga

SEQ ID NO: 217331 - RNA, 21 nt, Artificial Sequence
  Synthetic
aguugauuuuagagagacaga

SEQ ID NO: 217332 - RNA, 22 nt, Artificial Sequence
  Synthetic
uaguugauuuuagagagacaga

SEQ ID NO: 217333 - RNA, 23 nt, Artificial Sequence
  Synthetic
uuaguugauuuuagagagacaga

SEQ ID NO: 217334 - RNA, 24 nt, Artificial Sequence
  Synthetic
auuaguugauuuuagagagacaga

SEQ ID NO: 217335 - RNA, 18 nt, Artificial Sequence
  Synthetic
uagcuagcuagagacaga

SEQ ID NO: 217336 - RNA, 19 nt, Artificial Sequence
  Synthetic
cuagcuagcuagagacaga

SEQ ID NO: 217337 - RNA, 20 nt, Artificial Sequence
  Synthetic
gcuagcuagcuagagacaga

SEQ ID NO: 217338 - RNA, 21 nt, Artificial Sequence
  Synthetic
agcuagcuagcuagagacaga

SEQ ID NO: 217339 - RNA, 22 nt, Artificial Sequence
  Synthetic
uagcuagcuagcuagagacaga

SEQ ID NO: 217340 - RNA, 23 nt, Artificial Sequence
  Synthetic
uuagcuagcuagcuagagacaga

SEQ ID NO: 217341 - RNA, 24 nt, Artificial Sequence
  Synthetic
auuagcuagcuagcuagagacaga

SEQ ID NO: 217342 - RNA, 18 nt, Artificial Sequence
  Synthetic
ugcaauagaggagacaga

SEQ ID NO: 217343 - RNA, 19 nt, Artificial Sequence
  Synthetic
uugcaauagaggagacaga

SEQ ID NO: 217344 - RNA, 20 nt, Artificial Sequence
  Synthetic
uuugcaauagaggagacaga

SEQ ID NO: 217345 - RNA, 21 nt, Artificial Sequence
  Synthetic
uuuugcaauagaggagacaga

SEQ ID NO: 217346 - RNA, 22 nt, Artificial Sequence
  Synthetic
cuuuugcaauagaggagacaga

SEQ ID NO: 217347 - RNA, 23 nt, Artificial Sequence
  Synthetic
acuuuugcaauagaggagacaga

SEQ ID NO: 217348 - RNA, 24 nt, Artificial Sequence
  Synthetic
aacuuuugcaauagaggagacaga

SEQ ID NO: 217349 - RNA, 18 nt, Artificial Sequence
  Synthetic
uggaggaagggagacaga

SEQ ID NO: 217350 - RNA, 19 nt, Artificial Sequence
  Synthetic
auggaggaagggagacaga

SEQ ID NO: 217351 - RNA, 20 nt, Artificial Sequence
  Synthetic
gauggaggaagggagacaga

SEQ ID NO: 217352 - RNA, 21 nt, Artificial Sequence
  Synthetic
ggauggaggaagggagacaga

SEQ ID NO: 217353 - RNA, 22 nt, Artificial Sequence
  Synthetic
gggauggaggaagggagacaga

SEQ ID NO: 217354 - RNA, 23 nt, Artificial Sequence
  Synthetic
agggauggaggaagggagacaga

SEQ ID NO: 217355 - RNA, 24 nt, Artificial Sequence
  Synthetic
gagggauggaggaagggagacaga

SEQ ID NO: 217356 - RNA, 18 nt, Artificial Sequence
  Synthetic
uaaaagagaauagacaga

SEQ ID NO: 217357 - RNA, 19 nt, Artificial Sequence
  Synthetic
uuaaaagagaauagacaga

SEQ ID NO: 217358 - RNA, 20 nt, Artificial Sequence
  Synthetic
uuuaaaagagaauagacaga

SEQ ID NO: 217359 - RNA, 21 nt, Artificial Sequence
  Synthetic
auuuaaaagagaauagacaga

SEQ ID NO: 217360 - RNA, 22 nt, Artificial Sequence
  Synthetic
aauuuaaaagagaauagacaga

SEQ ID NO: 217361 - RNA, 23 nt, Artificial Sequence
  Synthetic
gaauuuaaaagagaauagacaga

SEQ ID NO: 217362 - RNA, 24 nt, Artificial Sequence
  Synthetic
ugaauuuaaaagagaauagacaga

SEQ ID NO: 217363 - RNA, 18 nt, Artificial Sequence
  Synthetic
gaagauacaguagacaga

SEQ ID NO: 217364 - RNA, 19 nt, Artificial Sequence
  Synthetic
agaagauacaguagacaga

SEQ ID NO: 217365 - RNA, 20 nt, Artificial Sequence
  Synthetic
aagaagauacaguagacaga

SEQ ID NO: 217366 - RNA, 21 nt, Artificial Sequence
  Synthetic
gaagaagauacaguagacaga

SEQ ID NO: 217367 - RNA, 22 nt, Artificial Sequence
  Synthetic
agaagaagauacaguagacaga

SEQ ID NO: 217368 - RNA, 23 nt, Artificial Sequence
  Synthetic
cagaagaagauacaguagacaga

SEQ ID NO: 217369 - RNA, 24 nt, Artificial Sequence
  Synthetic
gcagaagaagauacaguagacaga

SEQ ID NO: 217370 - RNA, 18 nt, Artificial Sequence
  Synthetic
cuccagccgggcgacaga

SEQ ID NO: 217371 - RNA, 19 nt, Artificial Sequence
  Synthetic
acuccagccgggcgacaga

SEQ ID NO: 217372 - RNA, 20 nt, Artificial Sequence
  Synthetic
cacuccagccgggcgacaga

SEQ ID NO: 217373 - RNA, 21 nt, Artificial Sequence
  Synthetic
gcacuccagccgggcgacaga

SEQ ID NO: 217374 - RNA, 22 nt, Artificial Sequence
  Synthetic
ugcacuccagccgggcgacaga

SEQ ID NO: 217375 - RNA, 23 nt, Artificial Sequence
  Synthetic
cugcacuccagccgggcgacaga

SEQ ID NO: 217376 - RNA, 24 nt, Artificial Sequence
  Synthetic
acugcacuccagccgggcgacaga

SEQ ID NO: 217377 - RNA, 18 nt, Artificial Sequence
  Synthetic
uccaaccugggcgacaga

SEQ ID NO: 217378 - RNA, 19 nt, Artificial Sequence
  Synthetic
cuccaaccugggcgacaga

SEQ ID NO: 217379 - RNA, 20 nt, Artificial Sequence
  Synthetic
acuccaaccugggcgacaga

SEQ ID NO: 217380 - RNA, 21 nt, Artificial Sequence
  Synthetic
cacuccaaccugggcgacaga

SEQ ID NO: 217381 - RNA, 22 nt, Artificial Sequence
  Synthetic
gcacuccaaccugggcgacaga

SEQ ID NO: 217382 - RNA, 23 nt, Artificial Sequence
  Synthetic
ugcacuccaaccugggcgacaga

SEQ ID NO: 217383 - RNA, 24 nt, Artificial Sequence
  Synthetic
cugcacuccaaccugggcgacaga

SEQ ID NO: 217384 - RNA, 18 nt, Artificial Sequence
  Synthetic
cuccagccuggcgacaga

SEQ ID NO: 217385 - RNA, 19 nt, Artificial Sequence
  Synthetic
acuccagccuggcgacaga

SEQ ID NO: 217386 - RNA, 20 nt, Artificial Sequence
  Synthetic
cacuccagccuggcgacaga

SEQ ID NO: 217387 - RNA, 18 nt, Artificial Sequence
  Synthetic
aagaguaucaaggacaga

SEQ ID NO: 217388 - RNA, 19 nt, Artificial Sequence
  Synthetic
caagaguaucaaggacaga

SEQ ID NO: 217389 - RNA, 20 nt, Artificial Sequence
  Synthetic
acaagaguaucaaggacaga

SEQ ID NO: 217390 - RNA, 21 nt, Artificial Sequence
  Synthetic
aacaagaguaucaaggacaga

SEQ ID NO: 217391 - RNA, 22 nt, Artificial Sequence
  Synthetic
aaacaagaguaucaaggacaga

SEQ ID NO: 217392 - RNA, 23 nt, Artificial Sequence
  Synthetic
aaaacaagaguaucaaggacaga

SEQ ID NO: 217393 - RNA, 24 nt, Artificial Sequence
  Synthetic
aaaaacaagaguaucaaggacaga

SEQ ID NO: 217394 - RNA, 18 nt, Artificial Sequence
  Synthetic
gagaacaggaaggacaga

SEQ ID NO: 217395 - RNA, 19 nt, Artificial Sequence
  Synthetic
ggagaacaggaaggacaga

SEQ ID NO: 217396 - RNA, 20 nt, Artificial Sequence
  Synthetic
gggagaacaggaaggacaga

SEQ ID NO: 217397 - RNA, 21 nt, Artificial Sequence
  Synthetic
agggagaacaggaaggacaga

SEQ ID NO: 217398 - RNA, 22 nt, Artificial Sequence
  Synthetic
gagggagaacaggaaggacaga

SEQ ID NO: 217399 - RNA, 23 nt, Artificial Sequence
  Synthetic
agagggagaacaggaaggacaga

SEQ ID NO: 217400 - RNA, 24 nt, Artificial Sequence
  Synthetic
gagagggagaacaggaaggacaga

SEQ ID NO: 217401 - RNA, 18 nt, Artificial Sequence
  Synthetic
gagaacuauaaggacaga

SEQ ID NO: 217402 - RNA, 19 nt, Artificial Sequence
  Synthetic
ugagaacuauaaggacaga

SEQ ID NO: 217403 - RNA, 20 nt, Artificial Sequence
  Synthetic
augagaacuauaaggacaga

SEQ ID NO: 217404 - RNA, 21 nt, Artificial Sequence
  Synthetic
aaugagaacuauaaggacaga

SEQ ID NO: 217405 - RNA, 22 nt, Artificial Sequence
  Synthetic
aaaugagaacuauaaggacaga

SEQ ID NO: 217406 - RNA, 23 nt, Artificial Sequence
  Synthetic
gaaaugagaacuauaaggacaga

SEQ ID NO: 217407 - RNA, 24 nt, Artificial Sequence
  Synthetic
agaaaugagaacuauaaggacaga

SEQ ID NO: 217408 - RNA, 18 nt, Artificial Sequence
  Synthetic
acaugcaguagggacaga

SEQ ID NO: 217409 - RNA, 19 nt, Artificial Sequence
  Synthetic
uacaugcaguagggacaga

SEQ ID NO: 217410 - RNA, 20 nt, Artificial Sequence
  Synthetic
uuacaugcaguagggacaga

SEQ ID NO: 217411 - RNA, 21 nt, Artificial Sequence
  Synthetic
uuuacaugcaguagggacaga

SEQ ID NO: 217412 - RNA, 22 nt, Artificial Sequence
  Synthetic
uuuuacaugcaguagggacaga

SEQ ID NO: 217413 - RNA, 23 nt, Artificial Sequence
  Synthetic
uuuuuacaugcaguagggacaga

SEQ ID NO: 217414 - RNA, 24 nt, Artificial Sequence
  Synthetic
auuuuuacaugcaguagggacaga

SEQ ID NO: 217415 - RNA, 18 nt, Artificial Sequence
  Synthetic
uccagccuaggggacaga

SEQ ID NO: 217416 - RNA, 19 nt, Artificial Sequence
  Synthetic
cuccagccuaggggacaga

SEQ ID NO: 217417 - RNA, 20 nt, Artificial Sequence
  Synthetic
acuccagccuaggggacaga

SEQ ID NO: 217418 - RNA, 21 nt, Artificial Sequence
  Synthetic
cacuccagccuaggggacaga

SEQ ID NO: 217419 - RNA, 22 nt, Artificial Sequence
  Synthetic
ucacuccagccuaggggacaga

SEQ ID NO: 217420 - RNA, 23 nt, Artificial Sequence
  Synthetic
uucacuccagccuaggggacaga

SEQ ID NO: 217421 - RNA, 24 nt, Artificial Sequence
  Synthetic
cuucacuccagccuaggggacaga

SEQ ID NO: 217422 - RNA, 18 nt, Artificial Sequence
  Synthetic
gaagcaggauuggacaga

SEQ ID NO: 217423 - RNA, 19 nt, Artificial Sequence
  Synthetic
agaagcaggauuggacaga

SEQ ID NO: 217424 - RNA, 20 nt, Artificial Sequence
  Synthetic
uagaagcaggauuggacaga

SEQ ID NO: 217425 - RNA, 21 nt, Artificial Sequence
  Synthetic
uuagaagcaggauuggacaga

SEQ ID NO: 217426 - RNA, 22 nt, Artificial Sequence
  Synthetic
cuuagaagcaggauuggacaga

SEQ ID NO: 217427 - RNA, 23 nt, Artificial Sequence
  Synthetic
gcuuagaagcaggauuggacaga

SEQ ID NO: 217428 - RNA, 24 nt, Artificial Sequence
  Synthetic
ggcuuagaagcaggauuggacaga

SEQ ID NO: 217429 - RNA, 18 nt, Artificial Sequence
  Synthetic
uccagcccacaugacaga

SEQ ID NO: 217430 - RNA, 19 nt, Artificial Sequence
  Synthetic
cuccagcccacaugacaga

SEQ ID NO: 217431 - RNA, 20 nt, Artificial Sequence
  Synthetic
acuccagcccacaugacaga

SEQ ID NO: 217432 - RNA, 21 nt, Artificial Sequence
  Synthetic
cacuccagcccacaugacaga

SEQ ID NO: 217433 - RNA, 22 nt, Artificial Sequence
  Synthetic
gcacuccagcccacaugacaga

SEQ ID NO: 217434 - RNA, 23 nt, Artificial Sequence
  Synthetic
ugcacuccagcccacaugacaga

SEQ ID NO: 217435 - RNA, 24 nt, Artificial Sequence
  Synthetic
cugcacuccagcccacaugacaga

SEQ ID NO: 217436 - RNA, 18 nt, Artificial Sequence
  Synthetic
uccagccuggaugacaga

SEQ ID NO: 217437 - RNA, 19 nt, Artificial Sequence
  Synthetic
cuccagccuggaugacaga

SEQ ID NO: 217438 - RNA, 20 nt, Artificial Sequence
  Synthetic
acuccagccuggaugacaga

SEQ ID NO: 217439 - RNA, 21 nt, Artificial Sequence
  Synthetic
cacuccagccuggaugacaga

SEQ ID NO: 217440 - RNA, 22 nt, Artificial Sequence
  Synthetic
gcacuccagccuggaugacaga

SEQ ID NO: 217441 - RNA, 23 nt, Artificial Sequence
  Synthetic
ugcacuccagccuggaugacaga

SEQ ID NO: 217442 - RNA, 24 nt, Artificial Sequence
  Synthetic
cugcacuccagccuggaugacaga

SEQ ID NO: 217443 - RNA, 18 nt, Artificial Sequence
  Synthetic
uucagccuggaugacaga

SEQ ID NO: 217444 - RNA, 19 nt, Artificial Sequence
  Synthetic
cuucagccuggaugacaga

SEQ ID NO: 217445 - RNA, 20 nt, Artificial Sequence
  Synthetic
acuucagccuggaugacaga

SEQ ID NO: 217446 - RNA, 21 nt, Artificial Sequence
  Synthetic
cacuucagccuggaugacaga

SEQ ID NO: 217447 - RNA, 22 nt, Artificial Sequence
  Synthetic
gcacuucagccuggaugacaga

SEQ ID NO: 217448 - RNA, 23 nt, Artificial Sequence
  Synthetic
ugcacuucagccuggaugacaga

SEQ ID NO: 217449 - RNA, 24 nt, Artificial Sequence
  Synthetic
cugcacuucagccuggaugacaga

SEQ ID NO: 217450 - RNA, 18 nt, Artificial Sequence
  Synthetic
uauaaauuugaugacaga

SEQ ID NO: 217451 - RNA, 19 nt, Artificial Sequence
  Synthetic
auauaaauuugaugacaga

SEQ ID NO: 217452 - RNA, 20 nt, Artificial Sequence
  Synthetic
aauauaaauuugaugacaga

SEQ ID NO: 217453 - RNA, 21 nt, Artificial Sequence
  Synthetic
aaauauaaauuugaugacaga

SEQ ID NO: 217454 - RNA, 22 nt, Artificial Sequence
  Synthetic
aaaauauaaauuugaugacaga

SEQ ID NO: 217455 - RNA, 23 nt, Artificial Sequence
  Synthetic
caaaauauaaauuugaugacaga

SEQ ID NO: 217456 - RNA, 24 nt, Artificial Sequence
  Synthetic
ucaaaauauaaauuugaugacaga

SEQ ID NO: 217457 - RNA, 18 nt, Artificial Sequence
  Synthetic
uaugacauguaugacaga

SEQ ID NO: 217458 - RNA, 19 nt, Artificial Sequence
  Synthetic
auaugacauguaugacaga

SEQ ID NO: 217459 - RNA, 20 nt, Artificial Sequence
  Synthetic
uauaugacauguaugacaga

SEQ ID NO: 217460 - RNA, 21 nt, Artificial Sequence
  Synthetic
auauaugacauguaugacaga

SEQ ID NO: 217461 - RNA, 22 nt, Artificial Sequence
  Synthetic
aauauaugacauguaugacaga

SEQ ID NO: 217462 - RNA, 23 nt, Artificial Sequence
  Synthetic
uaauauaugacauguaugacaga

SEQ ID NO: 217463 - RNA, 24 nt, Artificial Sequence
  Synthetic
auaauauaugacauguaugacaga

SEQ ID NO: 217464 - RNA, 18 nt, Artificial Sequence
  Synthetic
uggaagaucucugacaga

SEQ ID NO: 217465 - RNA, 19 nt, Artificial Sequence
  Synthetic
auggaagaucucugacaga

SEQ ID NO: 217466 - RNA, 20 nt, Artificial Sequence
  Synthetic
cauggaagaucucugacaga

SEQ ID NO: 217467 - RNA, 21 nt, Artificial Sequence
  Synthetic
acauggaagaucucugacaga

SEQ ID NO: 217468 - RNA, 22 nt, Artificial Sequence
  Synthetic
aacauggaagaucucugacaga

SEQ ID NO: 217469 - RNA, 23 nt, Artificial Sequence
  Synthetic
gaacauggaagaucucugacaga

SEQ ID NO: 217470 - RNA, 24 nt, Artificial Sequence
  Synthetic
agaacauggaagaucucugacaga

SEQ ID NO: 217471 - RNA, 18 nt, Artificial Sequence
  Synthetic
uccagacugagugacaga

SEQ ID NO: 217472 - RNA, 19 nt, Artificial Sequence
  Synthetic
cuccagacugagugacaga

SEQ ID NO: 217473 - RNA, 20 nt, Artificial Sequence
  Synthetic
acuccagacugagugacaga

SEQ ID NO: 217474 - RNA, 21 nt, Artificial Sequence
  Synthetic
cacuccagacugagugacaga

SEQ ID NO: 217475 - RNA, 22 nt, Artificial Sequence
  Synthetic
gcacuccagacugagugacaga

SEQ ID NO: 217476 - RNA, 23 nt, Artificial Sequence
  Synthetic
ugcacuccagacugagugacaga

SEQ ID NO: 217477 - RNA, 24 nt, Artificial Sequence
  Synthetic
uugcacuccagacugagugacaga

SEQ ID NO: 217478 - RNA, 18 nt, Artificial Sequence
  Synthetic
uccagccugagugacaga

SEQ ID NO: 217479 - RNA, 19 nt, Artificial Sequence
  Synthetic
cuccagccugagugacaga

SEQ ID NO: 217480 - RNA, 20 nt, Artificial Sequence
  Synthetic
acuccagccugagugacaga

SEQ ID NO: 217481 - RNA, 21 nt, Artificial Sequence
  Synthetic
cacuccagccugagugacaga

SEQ ID NO: 217482 - RNA, 22 nt, Artificial Sequence
  Synthetic
gcacuccagccugagugacaga

SEQ ID NO: 217483 - RNA, 23 nt, Artificial Sequence
  Synthetic
ugcacuccagccugagugacaga

SEQ ID NO: 217484 - RNA, 24 nt, Artificial Sequence
  Synthetic
cugcacuccagccugagugacaga

SEQ ID NO: 217485 - RNA, 18 nt, Artificial Sequence
  Synthetic
uccagucuaggugacaga

SEQ ID NO: 217486 - RNA, 19 nt, Artificial Sequence
  Synthetic
cuccagucuaggugacaga

SEQ ID NO: 217487 - RNA, 20 nt, Artificial Sequence
  Synthetic
acuccagucuaggugacaga

SEQ ID NO: 217488 - RNA, 21 nt, Artificial Sequence
  Synthetic
uacuccagucuaggugacaga

SEQ ID NO: 217489 - RNA, 22 nt, Artificial Sequence
  Synthetic
guacuccagucuaggugacaga

SEQ ID NO: 217490 - RNA, 23 nt, Artificial Sequence
  Synthetic
uguacuccagucuaggugacaga

SEQ ID NO: 217491 - RNA, 24 nt, Artificial Sequence
  Synthetic
cuguacuccagucuaggugacaga

SEQ ID NO: 217492 - RNA, 18 nt, Artificial Sequence
  Synthetic
uccagacugggugacaga

SEQ ID NO: 217493 - RNA, 19 nt, Artificial Sequence
  Synthetic
cuccagacugggugacaga

SEQ ID NO: 217494 - RNA, 20 nt, Artificial Sequence
  Synthetic
acuccagacugggugacaga

SEQ ID NO: 217495 - RNA, 21 nt, Artificial Sequence
  Synthetic
cacuccagacugggugacaga

SEQ ID NO: 217496 - RNA, 22 nt, Artificial Sequence
  Synthetic
gcacuccagacugggugacaga

SEQ ID NO: 217497 - RNA, 23 nt, Artificial Sequence
  Synthetic
ugcacuccagacugggugacaga

SEQ ID NO: 217498 - RNA, 24 nt, Artificial Sequence
  Synthetic
cugcacuccagacugggugacaga

SEQ ID NO: 217499 - RNA, 18 nt, Artificial Sequence
  Synthetic
cccagccugggugacaga

SEQ ID NO: 217500 - RNA, 19 nt, Artificial Sequence
  Synthetic
ccccagccugggugacaga

SEQ ID NO: 217501 - RNA, 20 nt, Artificial Sequence
  Synthetic
accccagccugggugacaga

SEQ ID NO: 217502 - RNA, 21 nt, Artificial Sequence
  Synthetic
caccccagccugggugacaga

SEQ ID NO: 217503 - RNA, 22 nt, Artificial Sequence
  Synthetic
gcaccccagccugggugacaga

SEQ ID NO: 217504 - RNA, 23 nt, Artificial Sequence
  Synthetic
ugcaccccagccugggugacaga

SEQ ID NO: 217505 - RNA, 24 nt, Artificial Sequence
  Synthetic
cugcaccccagccugggugacaga

SEQ ID NO: 217506 - RNA, 18 nt, Artificial Sequence
  Synthetic
uccagccugggugacaga

SEQ ID NO: 217507 - RNA, 19 nt, Artificial Sequence
  Synthetic
cuccagccugggugacaga

SEQ ID NO: 217508 - RNA, 21 nt, Artificial Sequence
  Synthetic
cacuccagccugggugacaga

SEQ ID NO: 217509 - RNA, 22 nt, Artificial Sequence
  Synthetic
ccacuccagccugggugacaga

SEQ ID NO: 217510 - RNA, 23 nt, Artificial Sequence
  Synthetic
uccacuccagccugggugacaga

SEQ ID NO: 217511 - RNA, 24 nt, Artificial Sequence
  Synthetic
cuccacuccagccugggugacaga

SEQ ID NO: 217512 - RNA, 22 nt, Artificial Sequence
  Synthetic
gcacuccagccugggugacaga

SEQ ID NO: 217513 - RNA, 23 nt, Artificial Sequence
  Synthetic
ugcacuccagccugggugacaga

SEQ ID NO: 217514 - RNA, 24 nt, Artificial Sequence
  Synthetic
uugcacuccagccugggugacaga

SEQ ID NO: 217515 - RNA, 20 nt, Artificial Sequence
  Synthetic
gcuccagccugggugacaga

SEQ ID NO: 217516 - RNA, 21 nt, Artificial Sequence
  Synthetic
ugcuccagccugggugacaga

SEQ ID NO: 217517 - RNA, 22 nt, Artificial Sequence
  Synthetic
gugcuccagccugggugacaga

SEQ ID NO: 217518 - RNA, 23 nt, Artificial Sequence
  Synthetic
ugugcuccagccugggugacaga

SEQ ID NO: 217519 - RNA, 24 nt, Artificial Sequence
  Synthetic
cugugcuccagccugggugacaga

SEQ ID NO: 217520 - RNA, 19 nt, Artificial Sequence
  Synthetic
uuccagccugggugacaga

SEQ ID NO: 217521 - RNA, 20 nt, Artificial Sequence
  Synthetic
auuccagccugggugacaga

SEQ ID NO: 217522 - RNA, 21 nt, Artificial Sequence
  Synthetic
cauuccagccugggugacaga

SEQ ID NO: 217523 - RNA, 22 nt, Artificial Sequence
  Synthetic
gcauuccagccugggugacaga

SEQ ID NO: 217524 - RNA, 23 nt, Artificial Sequence
  Synthetic
ugcauuccagccugggugacaga

SEQ ID NO: 217525 - RNA, 24 nt, Artificial Sequence
  Synthetic
cugcauuccagccugggugacaga

SEQ ID NO: 217526 - RNA, 18 nt, Artificial Sequence
  Synthetic
ucccgccugggugacaga

SEQ ID NO: 217527 - RNA, 19 nt, Artificial Sequence
  Synthetic
cucccgccugggugacaga

SEQ ID NO: 217528 - RNA, 20 nt, Artificial Sequence
  Synthetic
ucucccgccugggugacaga

SEQ ID NO: 217529 - RNA, 21 nt, Artificial Sequence
  Synthetic
cucucccgccugggugacaga

SEQ ID NO: 217530 - RNA, 22 nt, Artificial Sequence
  Synthetic
gcucucccgccugggugacaga

SEQ ID NO: 217531 - RNA, 23 nt, Artificial Sequence
  Synthetic
ugcucucccgccugggugacaga

SEQ ID NO: 217532 - RNA, 24 nt, Artificial Sequence
  Synthetic
cugcucucccgccugggugacaga

SEQ ID NO: 217533 - RNA, 18 nt, Artificial Sequence
  Synthetic
uuccagccuggugacaga

SEQ ID NO: 217534 - RNA, 19 nt, Artificial Sequence
  Synthetic
auuccagccuggugacaga

SEQ ID NO: 217535 - RNA, 20 nt, Artificial Sequence
  Synthetic
uauuccagccuggugacaga

SEQ ID NO: 217536 - RNA, 21 nt, Artificial Sequence
  Synthetic
guauuccagccuggugacaga

SEQ ID NO: 217537 - RNA, 22 nt, Artificial Sequence
  Synthetic
uguauuccagccuggugacaga

SEQ ID NO: 217538 - RNA, 23 nt, Artificial Sequence
  Synthetic
cuguauuccagccuggugacaga

SEQ ID NO: 217539 - RNA, 24 nt, Artificial Sequence
  Synthetic
acuguauuccagccuggugacaga

SEQ ID NO: 217540 - RNA, 18 nt, Artificial Sequence
  Synthetic
aauugaaucugugacaga

SEQ ID NO: 217541 - RNA, 19 nt, Artificial Sequence
  Synthetic
uaauugaaucugugacaga

SEQ ID NO: 217542 - RNA, 20 nt, Artificial Sequence
  Synthetic
auaauugaaucugugacaga

SEQ ID NO: 217543 - RNA, 21 nt, Artificial Sequence
  Synthetic
uauaauugaaucugugacaga

SEQ ID NO: 217544 - RNA, 22 nt, Artificial Sequence
  Synthetic
auauaauugaaucugugacaga

SEQ ID NO: 217545 - RNA, 23 nt, Artificial Sequence
  Synthetic
aauauaauugaaucugugacaga

SEQ ID NO: 217546 - RNA, 24 nt, Artificial Sequence
  Synthetic
aaauauaauugaaucugugacaga

SEQ ID NO: 217547 - RNA, 18 nt, Artificial Sequence
  Synthetic
ugcaguuuuauugacaga

SEQ ID NO: 217548 - RNA, 19 nt, Artificial Sequence
  Synthetic
gugcaguuuuauugacaga

SEQ ID NO: 217549 - RNA, 20 nt, Artificial Sequence
  Synthetic
agugcaguuuuauugacaga

SEQ ID NO: 217550 - RNA, 21 nt, Artificial Sequence
  Synthetic
aagugcaguuuuauugacaga

SEQ ID NO: 217551 - RNA, 22 nt, Artificial Sequence
  Synthetic
uaagugcaguuuuauugacaga

SEQ ID NO: 217552 - RNA, 23 nt, Artificial Sequence
  Synthetic
guaagugcaguuuuauugacaga

SEQ ID NO: 217553 - RNA, 24 nt, Artificial Sequence
  Synthetic
uguaagugcaguuuuauugacaga

SEQ ID NO: 217554 - RNA, 18 nt, Artificial Sequence
  Synthetic
uccagccugguugacaga

SEQ ID NO: 217555 - RNA, 19 nt, Artificial Sequence
  Synthetic
cuccagccugguugacaga

SEQ ID NO: 217556 - RNA, 20 nt, Artificial Sequence
  Synthetic
acuccagccugguugacaga

SEQ ID NO: 217557 - RNA, 21 nt, Artificial Sequence
  Synthetic
cacuccagccugguugacaga

SEQ ID NO: 217558 - RNA, 22 nt, Artificial Sequence
  Synthetic
gcacuccagccugguugacaga

SEQ ID NO: 217559 - RNA, 23 nt, Artificial Sequence
  Synthetic
ugcacuccagccugguugacaga

SEQ ID NO: 217560 - RNA, 24 nt, Artificial Sequence
  Synthetic
cugcacuccagccugguugacaga

SEQ ID NO: 217561 - RNA, 18 nt, Artificial Sequence
  Synthetic
ccaauuuuucaauacaga

SEQ ID NO: 217562 - RNA, 19 nt, Artificial Sequence
  Synthetic
uccaauuuuucaauacaga

SEQ ID NO: 217563 - RNA, 20 nt, Artificial Sequence
  Synthetic
cuccaauuuuucaauacaga

SEQ ID NO: 217564 - RNA, 21 nt, Artificial Sequence
  Synthetic
ccuccaauuuuucaauacaga

SEQ ID NO: 217565 - RNA, 22 nt, Artificial Sequence
  Synthetic
cccuccaauuuuucaauacaga

SEQ ID NO: 217566 - RNA, 23 nt, Artificial Sequence
  Synthetic
ccccuccaauuuuucaauacaga

SEQ ID NO: 217567 - RNA, 24 nt, Artificial Sequence
  Synthetic
gccccuccaauuuuucaauacaga

SEQ ID NO: 217568 - RNA, 18 nt, Artificial Sequence
  Synthetic
aaaagacucuaauacaga

SEQ ID NO: 217569 - RNA, 19 nt, Artificial Sequence
  Synthetic
aaaaagacucuaauacaga

SEQ ID NO: 217570 - RNA, 20 nt, Artificial Sequence
  Synthetic
gaaaaagacucuaauacaga

SEQ ID NO: 217571 - RNA, 21 nt, Artificial Sequence
  Synthetic
ggaaaaagacucuaauacaga

SEQ ID NO: 217572 - RNA, 22 nt, Artificial Sequence
  Synthetic
aggaaaaagacucuaauacaga

SEQ ID NO: 217573 - RNA, 23 nt, Artificial Sequence
  Synthetic
aaggaaaaagacucuaauacaga

SEQ ID NO: 217574 - RNA, 24 nt, Artificial Sequence
  Synthetic
aaaggaaaaagacucuaauacaga

SEQ ID NO: 217575 - RNA, 18 nt, Artificial Sequence
  Synthetic
uauauacacacauacaga

SEQ ID NO: 217576 - RNA, 19 nt, Artificial Sequence
  Synthetic
auauauacacacauacaga

SEQ ID NO: 217577 - RNA, 20 nt, Artificial Sequence
  Synthetic
uauauauacacacauacaga

SEQ ID NO: 217578 - RNA, 21 nt, Artificial Sequence
  Synthetic
auauauauacacacauacaga

SEQ ID NO: 217579 - RNA, 22 nt, Artificial Sequence
  Synthetic
uauauauauacacacauacaga

SEQ ID NO: 217580 - RNA, 23 nt, Artificial Sequence
  Synthetic
uuauauauauacacacauacaga

SEQ ID NO: 217581 - RNA, 24 nt, Artificial Sequence
  Synthetic
auuauauauauacacacauacaga

SEQ ID NO: 217582 - RNA, 18 nt, Artificial Sequence
  Synthetic
uguauuuauauauacaga

SEQ ID NO: 217583 - RNA, 19 nt, Artificial Sequence
  Synthetic
cuguauuuauauauacaga

SEQ ID NO: 217584 - RNA, 20 nt, Artificial Sequence
  Synthetic
ucuguauuuauauauacaga

SEQ ID NO: 217585 - RNA, 21 nt, Artificial Sequence
  Synthetic
uucuguauuuauauauacaga

SEQ ID NO: 217586 - RNA, 22 nt, Artificial Sequence
  Synthetic
uuucuguauuuauauauacaga

SEQ ID NO: 217587 - RNA, 23 nt, Artificial Sequence
  Synthetic
auuucuguauuuauauauacaga

SEQ ID NO: 217588 - RNA, 24 nt, Artificial Sequence
  Synthetic
gauuucuguauuuauauauacaga

SEQ ID NO: 217589 - RNA, 18 nt, Artificial Sequence
  Synthetic
gagauguguguauacaga

SEQ ID NO: 217590 - RNA, 19 nt, Artificial Sequence
  Synthetic
ggagauguguguauacaga

SEQ ID NO: 217591 - RNA, 20 nt, Artificial Sequence
  Synthetic
uggagauguguguauacaga

SEQ ID NO: 217592 - RNA, 21 nt, Artificial Sequence
  Synthetic
uuggagauguguguauacaga

SEQ ID NO: 217593 - RNA, 22 nt, Artificial Sequence
  Synthetic
cuuggagauguguguauacaga

SEQ ID NO: 217594 - RNA, 23 nt, Artificial Sequence
  Synthetic
acuuggagauguguguauacaga

SEQ ID NO: 217595 - RNA, 24 nt, Artificial Sequence
  Synthetic
aacuuggagauguguguauacaga

SEQ ID NO: 217596 - RNA, 18 nt, Artificial Sequence
  Synthetic
uucccugagaacuacaga

SEQ ID NO: 217597 - RNA, 19 nt, Artificial Sequence
  Synthetic
uuucccugagaacuacaga

SEQ ID NO: 217598 - RNA, 20 nt, Artificial Sequence
  Synthetic
auuucccugagaacuacaga

SEQ ID NO: 217599 - RNA, 21 nt, Artificial Sequence
  Synthetic
aauuucccugagaacuacaga

SEQ ID NO: 217600 - RNA, 22 nt, Artificial Sequence
  Synthetic
aaauuucccugagaacuacaga

SEQ ID NO: 217601 - RNA, 23 nt, Artificial Sequence
  Synthetic
caaauuucccugagaacuacaga

SEQ ID NO: 217602 - RNA, 24 nt, Artificial Sequence
  Synthetic
ucaaauuucccugagaacuacaga

SEQ ID NO: 217603 - RNA, 18 nt, Artificial Sequence
  Synthetic
caugaguagaacuacaga

SEQ ID NO: 217604 - RNA, 19 nt, Artificial Sequence
  Synthetic
acaugaguagaacuacaga

SEQ ID NO: 217605 - RNA, 20 nt, Artificial Sequence
  Synthetic
aacaugaguagaacuacaga

SEQ ID NO: 217606 - RNA, 21 nt, Artificial Sequence
  Synthetic
gaacaugaguagaacuacaga

SEQ ID NO: 217607 - RNA, 22 nt, Artificial Sequence
  Synthetic
agaacaugaguagaacuacaga

SEQ ID NO: 217608 - RNA, 23 nt, Artificial Sequence
  Synthetic
cagaacaugaguagaacuacaga

SEQ ID NO: 217609 - RNA, 24 nt, Artificial Sequence
  Synthetic
acagaacaugaguagaacuacaga

SEQ ID NO: 217610 - RNA, 18 nt, Artificial Sequence
  Synthetic
gaacaagcaaccuacaga

SEQ ID NO: 217611 - RNA, 19 nt, Artificial Sequence
  Synthetic
ugaacaagcaaccuacaga

SEQ ID NO: 217612 - RNA, 20 nt, Artificial Sequence
  Synthetic
gugaacaagcaaccuacaga

SEQ ID NO: 217613 - RNA, 21 nt, Artificial Sequence
  Synthetic
agugaacaagcaaccuacaga

SEQ ID NO: 217614 - RNA, 22 nt, Artificial Sequence
  Synthetic
gagugaacaagcaaccuacaga

SEQ ID NO: 217615 - RNA, 23 nt, Artificial Sequence
  Synthetic
agagugaacaagcaaccuacaga

SEQ ID NO: 217616 - RNA, 24 nt, Artificial Sequence
  Synthetic
cagagugaacaagcaaccuacaga

SEQ ID NO: 217617 - RNA, 18 nt, Artificial Sequence
  Synthetic
agauggauuugguacaga

SEQ ID NO: 217618 - RNA, 19 nt, Artificial Sequence
  Synthetic
gagauggauuugguacaga

SEQ ID NO: 217619 - RNA, 20 nt, Artificial Sequence
  Synthetic
ugagauggauuugguacaga

SEQ ID NO: 217620 - RNA, 21 nt, Artificial Sequence
  Synthetic
gugagauggauuugguacaga

SEQ ID NO: 217621 - RNA, 22 nt, Artificial Sequence
  Synthetic
ggugagauggauuugguacaga

SEQ ID NO: 217622 - RNA, 23 nt, Artificial Sequence
  Synthetic
uggugagauggauuugguacaga

SEQ ID NO: 217623 - RNA, 24 nt, Artificial Sequence
  Synthetic
auggugagauggauuugguacaga

SEQ ID NO: 217624 - RNA, 18 nt, Artificial Sequence
  Synthetic
gagagaaaccuguacaga

SEQ ID NO: 217625 - RNA, 19 nt, Artificial Sequence
  Synthetic
agagagaaaccuguacaga

SEQ ID NO: 217626 - RNA, 20 nt, Artificial Sequence
  Synthetic
uagagagaaaccuguacaga

SEQ ID NO: 217627 - RNA, 21 nt, Artificial Sequence
  Synthetic
guagagagaaaccuguacaga

SEQ ID NO: 217628 - RNA, 22 nt, Artificial Sequence
  Synthetic
uguagagagaaaccuguacaga

SEQ ID NO: 217629 - RNA, 23 nt, Artificial Sequence
  Synthetic
uuguagagagaaaccuguacaga

SEQ ID NO: 217630 - RNA, 24 nt, Artificial Sequence
  Synthetic
guuguagagagaaaccuguacaga

SEQ ID NO: 217631 - RNA, 18 nt, Artificial Sequence
  Synthetic
agguaauggaauuacaga

SEQ ID NO: 217632 - RNA, 19 nt, Artificial Sequence
  Synthetic
cagguaauggaauuacaga

SEQ ID NO: 217633 - RNA, 20 nt, Artificial Sequence
  Synthetic
gcagguaauggaauuacaga

SEQ ID NO: 217634 - RNA, 21 nt, Artificial Sequence
  Synthetic
agcagguaauggaauuacaga

SEQ ID NO: 217635 - RNA, 22 nt, Artificial Sequence
  Synthetic
cagcagguaauggaauuacaga

SEQ ID NO: 217636 - RNA, 23 nt, Artificial Sequence
  Synthetic
acagcagguaauggaauuacaga

SEQ ID NO: 217637 - RNA, 24 nt, Artificial Sequence
  Synthetic
cacagcagguaauggaauuacaga

SEQ ID NO: 217638 - RNA, 18 nt, Artificial Sequence
  Synthetic
agguagaaagauuacaga

SEQ ID NO: 217639 - RNA, 19 nt, Artificial Sequence
  Synthetic
uagguagaaagauuacaga

SEQ ID NO: 217640 - RNA, 20 nt, Artificial Sequence
  Synthetic
cuagguagaaagauuacaga

SEQ ID NO: 217641 - RNA, 21 nt, Artificial Sequence
  Synthetic
ucuagguagaaagauuacaga

SEQ ID NO: 217642 - RNA, 22 nt, Artificial Sequence
  Synthetic
cucuagguagaaagauuacaga

SEQ ID NO: 217643 - RNA, 23 nt, Artificial Sequence
  Synthetic
ccucuagguagaaagauuacaga

SEQ ID NO: 217644 - RNA, 24 nt, Artificial Sequence
  Synthetic
accucuagguagaaagauuacaga

SEQ ID NO: 217645 - RNA, 18 nt, Artificial Sequence
  Synthetic
caacacugugauuacaga

SEQ ID NO: 217646 - RNA, 19 nt, Artificial Sequence
  Synthetic
gcaacacugugauuacaga

SEQ ID NO: 217647 - RNA, 20 nt, Artificial Sequence
  Synthetic
agcaacacugugauuacaga

SEQ ID NO: 217648 - RNA, 21 nt, Artificial Sequence
  Synthetic
uagcaacacugugauuacaga

SEQ ID NO: 217649 - RNA, 22 nt, Artificial Sequence
  Synthetic
auagcaacacugugauuacaga

SEQ ID NO: 217650 - RNA, 23 nt, Artificial Sequence
  Synthetic
uauagcaacacugugauuacaga

SEQ ID NO: 217651 - RNA, 24 nt, Artificial Sequence
  Synthetic
uuauagcaacacugugauuacaga

SEQ ID NO: 217652 - RNA, 18 nt, Artificial Sequence
  Synthetic
caauaauugacuuacaga

SEQ ID NO: 217653 - RNA, 19 nt, Artificial Sequence
  Synthetic
ucaauaauugacuuacaga

SEQ ID NO: 217654 - RNA, 20 nt, Artificial Sequence
  Synthetic
aucaauaauugacuuacaga

SEQ ID NO: 217655 - RNA, 21 nt, Artificial Sequence
  Synthetic
aaucaauaauugacuuacaga

SEQ ID NO: 217656 - RNA, 22 nt, Artificial Sequence
  Synthetic
caaucaauaauugacuuacaga

SEQ ID NO: 217657 - RNA, 23 nt, Artificial Sequence
  Synthetic
ccaaucaauaauugacuuacaga

SEQ ID NO: 217658 - RNA, 24 nt, Artificial Sequence
  Synthetic
uccaaucaauaauugacuuacaga

SEQ ID NO: 217659 - RNA, 18 nt, Artificial Sequence
  Synthetic
agaauucuagcuuacaga

SEQ ID NO: 217660 - RNA, 19 nt, Artificial Sequence
  Synthetic
aagaauucuagcuuacaga

SEQ ID NO: 217661 - RNA, 20 nt, Artificial Sequence
  Synthetic
aaagaauucuagcuuacaga

SEQ ID NO: 217662 - RNA, 21 nt, Artificial Sequence
  Synthetic
uaaagaauucuagcuuacaga

SEQ ID NO: 217663 - RNA, 22 nt, Artificial Sequence
  Synthetic
auaaagaauucuagcuuacaga

SEQ ID NO: 217664 - RNA, 23 nt, Artificial Sequence
  Synthetic
uauaaagaauucuagcuuacaga

SEQ ID NO: 217665 - RNA, 24 nt, Artificial Sequence
  Synthetic
cuauaaagaauucuagcuuacaga

SEQ ID NO: 217666 - RNA, 18 nt, Artificial Sequence
  Synthetic
guguuuucuuuuuacaga

SEQ ID NO: 217667 - RNA, 19 nt, Artificial Sequence
  Synthetic
uguguuuucuuuuuacaga

SEQ ID NO: 217668 - RNA, 20 nt, Artificial Sequence
  Synthetic
cuguguuuucuuuuuacaga

SEQ ID NO: 217669 - RNA, 21 nt, Artificial Sequence
  Synthetic
ucuguguuuucuuuuuacaga

SEQ ID NO: 217670 - RNA, 22 nt, Artificial Sequence
  Synthetic
uucuguguuuucuuuuuacaga

SEQ ID NO: 217671 - RNA, 23 nt, Artificial Sequence
  Synthetic
uuucuguguuuucuuuuuacaga

SEQ ID NO: 217672 - RNA, 24 nt, Artificial Sequence
  Synthetic
uuuucuguguuuucuuuuuacaga

SEQ ID NO: 217673 - RNA, 18 nt, Artificial Sequence
  Synthetic
aacauguacaaaaccaga

SEQ ID NO: 217674 - RNA, 19 nt, Artificial Sequence
  Synthetic
caacauguacaaaaccaga

SEQ ID NO: 217675 - RNA, 20 nt, Artificial Sequence
  Synthetic
ccaacauguacaaaaccaga

SEQ ID NO: 217676 - RNA, 21 nt, Artificial Sequence
  Synthetic
gccaacauguacaaaaccaga

SEQ ID NO: 217677 - RNA, 22 nt, Artificial Sequence
  Synthetic
ugccaacauguacaaaaccaga

SEQ ID NO: 217678 - RNA, 23 nt, Artificial Sequence
  Synthetic
uugccaacauguacaaaaccaga

SEQ ID NO: 217679 - RNA, 24 nt, Artificial Sequence
  Synthetic
auugccaacauguacaaaaccaga

SEQ ID NO: 217680 - RNA, 18 nt, Artificial Sequence
  Synthetic
gucagggaaccaaccaga

SEQ ID NO: 217681 - RNA, 19 nt, Artificial Sequence
  Synthetic
agucagggaaccaaccaga

SEQ ID NO: 217682 - RNA, 20 nt, Artificial Sequence
  Synthetic
cagucagggaaccaaccaga

SEQ ID NO: 217683 - RNA, 21 nt, Artificial Sequence
  Synthetic
gcagucagggaaccaaccaga

SEQ ID NO: 217684 - RNA, 22 nt, Artificial Sequence
  Synthetic
agcagucagggaaccaaccaga

SEQ ID NO: 217685 - RNA, 23 nt, Artificial Sequence
  Synthetic
gagcagucagggaaccaaccaga

SEQ ID NO: 217686 - RNA, 24 nt, Artificial Sequence
  Synthetic
agagcagucagggaaccaaccaga

SEQ ID NO: 217687 - RNA, 18 nt, Artificial Sequence
  Synthetic
aaauuuaucccaaccaga

SEQ ID NO: 217688 - RNA, 19 nt, Artificial Sequence
  Synthetic
gaaauuuaucccaaccaga

SEQ ID NO: 217689 - RNA, 20 nt, Artificial Sequence
  Synthetic
agaaauuuaucccaaccaga

SEQ ID NO: 217690 - RNA, 21 nt, Artificial Sequence
  Synthetic
gagaaauuuaucccaaccaga

SEQ ID NO: 217691 - RNA, 22 nt, Artificial Sequence
  Synthetic
ugagaaauuuaucccaaccaga

SEQ ID NO: 217692 - RNA, 23 nt, Artificial Sequence
  Synthetic
uugagaaauuuaucccaaccaga

SEQ ID NO: 217693 - RNA, 24 nt, Artificial Sequence
  Synthetic
auugagaaauuuaucccaaccaga

SEQ ID NO: 217694 - RNA, 18 nt, Artificial Sequence
  Synthetic
aauagcaugagaaccaga

SEQ ID NO: 217695 - RNA, 19 nt, Artificial Sequence
  Synthetic
aaauagcaugagaaccaga

SEQ ID NO: 217696 - RNA, 20 nt, Artificial Sequence
  Synthetic
gaaauagcaugagaaccaga

SEQ ID NO: 217697 - RNA, 21 nt, Artificial Sequence
  Synthetic
agaaauagcaugagaaccaga

SEQ ID NO: 217698 - RNA, 22 nt, Artificial Sequence
  Synthetic
uagaaauagcaugagaaccaga

SEQ ID NO: 217699 - RNA, 23 nt, Artificial Sequence
  Synthetic
guagaaauagcaugagaaccaga

SEQ ID NO: 217700 - RNA, 24 nt, Artificial Sequence
  Synthetic
gguagaaauagcaugagaaccaga

SEQ ID NO: 217701 - RNA, 18 nt, Artificial Sequence
  Synthetic
ucaacauagugaaccaga

SEQ ID NO: 217702 - RNA, 19 nt, Artificial Sequence
  Synthetic
aucaacauagugaaccaga

SEQ ID NO: 217703 - RNA, 20 nt, Artificial Sequence
  Synthetic
uaucaacauagugaaccaga

SEQ ID NO: 217704 - RNA, 21 nt, Artificial Sequence
  Synthetic
uuaucaacauagugaaccaga

SEQ ID NO: 217705 - RNA, 22 nt, Artificial Sequence
  Synthetic
uuuaucaacauagugaaccaga

SEQ ID NO: 217706 - RNA, 23 nt, Artificial Sequence
  Synthetic
uuuuaucaacauagugaaccaga

SEQ ID NO: 217707 - RNA, 24 nt, Artificial Sequence
  Synthetic
guuuuaucaacauagugaaccaga

SEQ ID NO: 217708 - RNA, 18 nt, Artificial Sequence
  Synthetic
caaauucucuuaaccaga

SEQ ID NO: 217709 - RNA, 19 nt, Artificial Sequence
  Synthetic
ccaaauucucuuaaccaga

SEQ ID NO: 217710 - RNA, 20 nt, Artificial Sequence
  Synthetic
gccaaauucucuuaaccaga

SEQ ID NO: 217711 - RNA, 21 nt, Artificial Sequence
  Synthetic
cgccaaauucucuuaaccaga

SEQ ID NO: 217712 - RNA, 22 nt, Artificial Sequence
  Synthetic
acgccaaauucucuuaaccaga

SEQ ID NO: 217713 - RNA, 23 nt, Artificial Sequence
  Synthetic
aacgccaaauucucuuaaccaga

SEQ ID NO: 217714 - RNA, 24 nt, Artificial Sequence
  Synthetic
aaacgccaaauucucuuaaccaga

SEQ ID NO: 217715 - RNA, 18 nt, Artificial Sequence
  Synthetic
uugagacauaacaccaga

SEQ ID NO: 217716 - RNA, 19 nt, Artificial Sequence
  Synthetic
guugagacauaacaccaga

SEQ ID NO: 217717 - RNA, 20 nt, Artificial Sequence
  Synthetic
aguugagacauaacaccaga

SEQ ID NO: 217718 - RNA, 21 nt, Artificial Sequence
  Synthetic
gaguugagacauaacaccaga

SEQ ID NO: 217719 - RNA, 22 nt, Artificial Sequence
  Synthetic
ugaguugagacauaacaccaga

SEQ ID NO: 217720 - RNA, 23 nt, Artificial Sequence
  Synthetic
gugaguugagacauaacaccaga

SEQ ID NO: 217721 - RNA, 24 nt, Artificial Sequence
  Synthetic
ugugaguugagacauaacaccaga

SEQ ID NO: 217722 - RNA, 18 nt, Artificial Sequence
  Synthetic
ugagugauacucaccaga

SEQ ID NO: 217723 - RNA, 19 nt, Artificial Sequence
  Synthetic
augagugauacucaccaga

SEQ ID NO: 217724 - RNA, 20 nt, Artificial Sequence
  Synthetic
uaugagugauacucaccaga

SEQ ID NO: 217725 - RNA, 21 nt, Artificial Sequence
  Synthetic
uuaugagugauacucaccaga

SEQ ID NO: 217726 - RNA, 22 nt, Artificial Sequence
  Synthetic
guuaugagugauacucaccaga

SEQ ID NO: 217727 - RNA, 23 nt, Artificial Sequence
  Synthetic
aguuaugagugauacucaccaga

SEQ ID NO: 217728 - RNA, 24 nt, Artificial Sequence
  Synthetic
gaguuaugagugauacucaccaga

SEQ ID NO: 217729 - RNA, 18 nt, Artificial Sequence
  Synthetic
cgggaguucgagaccaga

SEQ ID NO: 217730 - RNA, 19 nt, Artificial Sequence
  Synthetic
ucgggaguucgagaccaga

SEQ ID NO: 217731 - RNA, 20 nt, Artificial Sequence
  Synthetic
gucgggaguucgagaccaga

SEQ ID NO: 217732 - RNA, 21 nt, Artificial Sequence
  Synthetic
ggucgggaguucgagaccaga

SEQ ID NO: 217733 - RNA, 22 nt, Artificial Sequence
  Synthetic
aggucgggaguucgagaccaga

SEQ ID NO: 217734 - RNA, 23 nt, Artificial Sequence
  Synthetic
gaggucgggaguucgagaccaga

SEQ ID NO: 217735 - RNA, 24 nt, Artificial Sequence
  Synthetic
ugaggucgggaguucgagaccaga

SEQ ID NO: 217736 - RNA, 18 nt, Artificial Sequence
  Synthetic
gagagcagaacuaccaga

SEQ ID NO: 217737 - RNA, 19 nt, Artificial Sequence
  Synthetic
ugagagcagaacuaccaga

SEQ ID NO: 217738 - RNA, 20 nt, Artificial Sequence
  Synthetic
gugagagcagaacuaccaga

SEQ ID NO: 217739 - RNA, 21 nt, Artificial Sequence
  Synthetic
agugagagcagaacuaccaga

SEQ ID NO: 217740 - RNA, 22 nt, Artificial Sequence
  Synthetic
cagugagagcagaacuaccaga

SEQ ID NO: 217741 - RNA, 23 nt, Artificial Sequence
  Synthetic
acagugagagcagaacuaccaga

SEQ ID NO: 217742 - RNA, 24 nt, Artificial Sequence
  Synthetic
aacagugagagcagaacuaccaga

SEQ ID NO: 217743 - RNA, 18 nt, Artificial Sequence
  Synthetic
uuucccugggcuaccaga

SEQ ID NO: 217744 - RNA, 19 nt, Artificial Sequence
  Synthetic
guuucccugggcuaccaga

SEQ ID NO: 217745 - RNA, 20 nt, Artificial Sequence
  Synthetic
uguuucccugggcuaccaga

SEQ ID NO: 217746 - RNA, 21 nt, Artificial Sequence
  Synthetic
cuguuucccugggcuaccaga

SEQ ID NO: 217747 - RNA, 22 nt, Artificial Sequence
  Synthetic
acuguuucccugggcuaccaga

SEQ ID NO: 217748 - RNA, 23 nt, Artificial Sequence
  Synthetic
aacuguuucccugggcuaccaga

SEQ ID NO: 217749 - RNA, 24 nt, Artificial Sequence
  Synthetic
gaacuguuucccugggcuaccaga

SEQ ID NO: 217750 - RNA, 18 nt, Artificial Sequence
  Synthetic
gggucuuaguaacccaga

SEQ ID NO: 217751 - RNA, 19 nt, Artificial Sequence
  Synthetic
ggggucuuaguaacccaga

SEQ ID NO: 217752 - RNA, 20 nt, Artificial Sequence
  Synthetic
aggggucuuaguaacccaga

SEQ ID NO: 217753 - RNA, 21 nt, Artificial Sequence
  Synthetic
uaggggucuuaguaacccaga

SEQ ID NO: 217754 - RNA, 22 nt, Artificial Sequence
  Synthetic
auaggggucuuaguaacccaga

SEQ ID NO: 217755 - RNA, 23 nt, Artificial Sequence
  Synthetic
uauaggggucuuaguaacccaga

SEQ ID NO: 217756 - RNA, 24 nt, Artificial Sequence
  Synthetic
uuauaggggucuuaguaacccaga

SEQ ID NO: 217757 - RNA, 18 nt, Artificial Sequence
  Synthetic
guuccugcugcacccaga

SEQ ID NO: 217758 - RNA, 19 nt, Artificial Sequence
  Synthetic
aguuccugcugcacccaga

SEQ ID NO: 217759 - RNA, 20 nt, Artificial Sequence
  Synthetic
aaguuccugcugcacccaga

SEQ ID NO: 217760 - RNA, 21 nt, Artificial Sequence
  Synthetic
caaguuccugcugcacccaga

SEQ ID NO: 217761 - RNA, 22 nt, Artificial Sequence
  Synthetic
ucaaguuccugcugcacccaga

SEQ ID NO: 217762 - RNA, 23 nt, Artificial Sequence
  Synthetic
aucaaguuccugcugcacccaga

SEQ ID NO: 217763 - RNA, 24 nt, Artificial Sequence
  Synthetic
aaucaaguuccugcugcacccaga

SEQ ID NO: 217764 - RNA, 18 nt, Artificial Sequence
  Synthetic
aagagaaagagacccaga

SEQ ID NO: 217765 - RNA, 19 nt, Artificial Sequence
  Synthetic
aaagagaaagagacccaga

SEQ ID NO: 217766 - RNA, 20 nt, Artificial Sequence
  Synthetic
gaaagagaaagagacccaga

SEQ ID NO: 217767 - RNA, 21 nt, Artificial Sequence
  Synthetic
ugaaagagaaagagacccaga

SEQ ID NO: 217768 - RNA, 22 nt, Artificial Sequence
  Synthetic
cugaaagagaaagagacccaga

SEQ ID NO: 217769 - RNA, 23 nt, Artificial Sequence
  Synthetic
acugaaagagaaagagacccaga

SEQ ID NO: 217770 - RNA, 24 nt, Artificial Sequence
  Synthetic
uacugaaagagaaagagacccaga

SEQ ID NO: 217771 - RNA, 18 nt, Artificial Sequence
  Synthetic
uaagucuguauacccaga

SEQ ID NO: 217772 - RNA, 19 nt, Artificial Sequence
  Synthetic
auaagucuguauacccaga

SEQ ID NO: 217773 - RNA, 20 nt, Artificial Sequence
  Synthetic
cauaagucuguauacccaga

SEQ ID NO: 217774 - RNA, 21 nt, Artificial Sequence
  Synthetic
gcauaagucuguauacccaga

SEQ ID NO: 217775 - RNA, 22 nt, Artificial Sequence
  Synthetic
ugcauaagucuguauacccaga

SEQ ID NO: 217776 - RNA, 23 nt, Artificial Sequence
  Synthetic
gugcauaagucuguauacccaga

SEQ ID NO: 217777 - RNA, 24 nt, Artificial Sequence
  Synthetic
ugugcauaagucuguauacccaga

SEQ ID NO: 217778 - RNA, 18 nt, Artificial Sequence
  Synthetic
guuuauuagguacccaga

SEQ ID NO: 217779 - RNA, 19 nt, Artificial Sequence
  Synthetic
aguuuauuagguacccaga

SEQ ID NO: 217780 - RNA, 20 nt, Artificial Sequence
  Synthetic
gaguuuauuagguacccaga

SEQ ID NO: 217781 - RNA, 21 nt, Artificial Sequence
  Synthetic
agaguuuauuagguacccaga

SEQ ID NO: 217782 - RNA, 22 nt, Artificial Sequence
  Synthetic
aagaguuuauuagguacccaga

SEQ ID NO: 217783 - RNA, 23 nt, Artificial Sequence
  Synthetic
uaagaguuuauuagguacccaga

SEQ ID NO: 217784 - RNA, 24 nt, Artificial Sequence
  Synthetic
uuaagaguuuauuagguacccaga

SEQ ID NO: 217785 - RNA, 18 nt, Artificial Sequence
  Synthetic
cucccaucaccccccaga

SEQ ID NO: 217786 - RNA, 19 nt, Artificial Sequence
  Synthetic
ucucccaucaccccccaga

SEQ ID NO: 217787 - RNA, 20 nt, Artificial Sequence
  Synthetic
gucucccaucaccccccaga

SEQ ID NO: 217788 - RNA, 21 nt, Artificial Sequence
  Synthetic
ugucucccaucaccccccaga

SEQ ID NO: 217789 - RNA, 22 nt, Artificial Sequence
  Synthetic
cugucucccaucaccccccaga

SEQ ID NO: 217790 - RNA, 23 nt, Artificial Sequence
  Synthetic
acugucucccaucaccccccaga

SEQ ID NO: 217791 - RNA, 24 nt, Artificial Sequence
  Synthetic
cacugucucccaucaccccccaga

SEQ ID NO: 217792 - RNA, 18 nt, Artificial Sequence
  Synthetic
cauacaaauguccccaga

SEQ ID NO: 217793 - RNA, 19 nt, Artificial Sequence
  Synthetic
ccauacaaauguccccaga

SEQ ID NO: 217794 - RNA, 20 nt, Artificial Sequence
  Synthetic
cccauacaaauguccccaga

SEQ ID NO: 217795 - RNA, 21 nt, Artificial Sequence
  Synthetic
ccccauacaaauguccccaga

SEQ ID NO: 217796 - RNA, 22 nt, Artificial Sequence
  Synthetic
accccauacaaauguccccaga

SEQ ID NO: 217797 - RNA, 23 nt, Artificial Sequence
  Synthetic
aaccccauacaaauguccccaga

SEQ ID NO: 217798 - RNA, 24 nt, Artificial Sequence
  Synthetic
caaccccauacaaauguccccaga

SEQ ID NO: 217799 - RNA, 18 nt, Artificial Sequence
  Synthetic
aucaccauaaagcccaga

SEQ ID NO: 217800 - RNA, 19 nt, Artificial Sequence
  Synthetic
aaucaccauaaagcccaga

SEQ ID NO: 217801 - RNA, 20 nt, Artificial Sequence
  Synthetic
aaaucaccauaaagcccaga

SEQ ID NO: 217802 - RNA, 21 nt, Artificial Sequence
  Synthetic
aaaaucaccauaaagcccaga

SEQ ID NO: 217803 - RNA, 22 nt, Artificial Sequence
  Synthetic
aaaaaucaccauaaagcccaga

SEQ ID NO: 217804 - RNA, 23 nt, Artificial Sequence
  Synthetic
uaaaaaucaccauaaagcccaga

SEQ ID NO: 217805 - RNA, 24 nt, Artificial Sequence
  Synthetic
auaaaaaucaccauaaagcccaga

SEQ ID NO: 217806 - RNA, 18 nt, Artificial Sequence
  Synthetic
aacagagaugagcccaga

SEQ ID NO: 217807 - RNA, 19 nt, Artificial Sequence
  Synthetic
aaacagagaugagcccaga

SEQ ID NO: 217808 - RNA, 20 nt, Artificial Sequence
  Synthetic
caaacagagaugagcccaga

SEQ ID NO: 217809 - RNA, 21 nt, Artificial Sequence
  Synthetic
acaaacagagaugagcccaga

SEQ ID NO: 217810 - RNA, 22 nt, Artificial Sequence
  Synthetic
uacaaacagagaugagcccaga

SEQ ID NO: 217811 - RNA, 23 nt, Artificial Sequence
  Synthetic
auacaaacagagaugagcccaga

SEQ ID NO: 217812 - RNA, 24 nt, Artificial Sequence
  Synthetic
aauacaaacagagaugagcccaga

SEQ ID NO: 217813 - RNA, 18 nt, Artificial Sequence
  Synthetic
aaauagccuuggcccaga

SEQ ID NO: 217814 - RNA, 19 nt, Artificial Sequence
  Synthetic
aaaauagccuuggcccaga

SEQ ID NO: 217815 - RNA, 20 nt, Artificial Sequence
  Synthetic
aaaaauagccuuggcccaga

SEQ ID NO: 217816 - RNA, 21 nt, Artificial Sequence
  Synthetic
aaaaaauagccuuggcccaga

SEQ ID NO: 217817 - RNA, 22 nt, Artificial Sequence
  Synthetic
aaaaaaauagccuuggcccaga

SEQ ID NO: 217818 - RNA, 23 nt, Artificial Sequence
  Synthetic
caaaaaaauagccuuggcccaga

SEQ ID NO: 217819 - RNA, 24 nt, Artificial Sequence
  Synthetic
acaaaaaaauagccuuggcccaga

SEQ ID NO: 217820 - RNA, 18 nt, Artificial Sequence
  Synthetic
auauacuuuuuucccaga

SEQ ID NO: 217821 - RNA, 19 nt, Artificial Sequence
  Synthetic
cauauacuuuuuucccaga

SEQ ID NO: 217822 - RNA, 20 nt, Artificial Sequence
  Synthetic
ucauauacuuuuuucccaga

SEQ ID NO: 217823 - RNA, 21 nt, Artificial Sequence
  Synthetic
gucauauacuuuuuucccaga

SEQ ID NO: 217824 - RNA, 22 nt, Artificial Sequence
  Synthetic
agucauauacuuuuuucccaga

SEQ ID NO: 217825 - RNA, 23 nt, Artificial Sequence
  Synthetic
aagucauauacuuuuuucccaga

SEQ ID NO: 217826 - RNA, 24 nt, Artificial Sequence
  Synthetic
uaagucauauacuuuuuucccaga

SEQ ID NO: 217827 - RNA, 18 nt, Artificial Sequence
  Synthetic
auguuaagggcagccaga

SEQ ID NO: 217828 - RNA, 19 nt, Artificial Sequence
  Synthetic
aauguuaagggcagccaga

SEQ ID NO: 217829 - RNA, 20 nt, Artificial Sequence
  Synthetic
aaauguuaagggcagccaga

SEQ ID NO: 217830 - RNA, 18 nt, Artificial Sequence
  Synthetic
auguuaggggcagccaga

SEQ ID NO: 217831 - RNA, 19 nt, Artificial Sequence
  Synthetic
aauguuaggggcagccaga

SEQ ID NO: 217832 - RNA, 20 nt, Artificial Sequence
  Synthetic
uaauguuaggggcagccaga

SEQ ID NO: 217833 - RNA, 21 nt, Artificial Sequence
  Synthetic
guaauguuaggggcagccaga

SEQ ID NO: 217834 - RNA, 22 nt, Artificial Sequence
  Synthetic
cguaauguuaggggcagccaga

SEQ ID NO: 217835 - RNA, 23 nt, Artificial Sequence
  Synthetic
ucguaauguuaggggcagccaga

SEQ ID NO: 217836 - RNA, 24 nt, Artificial Sequence
  Synthetic
cucguaauguuaggggcagccaga

SEQ ID NO: 217837 - RNA, 18 nt, Artificial Sequence
  Synthetic
gucgaaggugcagccaga

SEQ ID NO: 217838 - RNA, 19 nt, Artificial Sequence
  Synthetic
agucgaaggugcagccaga

SEQ ID NO: 217839 - RNA, 20 nt, Artificial Sequence
  Synthetic
gagucgaaggugcagccaga

SEQ ID NO: 217840 - RNA, 21 nt, Artificial Sequence
  Synthetic
ugagucgaaggugcagccaga

SEQ ID NO: 217841 - RNA, 22 nt, Artificial Sequence
  Synthetic
gugagucgaaggugcagccaga

SEQ ID NO: 217842 - RNA, 23 nt, Artificial Sequence
  Synthetic
ugugagucgaaggugcagccaga

SEQ ID NO: 217843 - RNA, 24 nt, Artificial Sequence
  Synthetic
gugugagucgaaggugcagccaga

SEQ ID NO: 217844 - RNA, 18 nt, Artificial Sequence
  Synthetic
aaaggaacagacgccaga

SEQ ID NO: 217845 - RNA, 19 nt, Artificial Sequence
  Synthetic
gaaaggaacagacgccaga

SEQ ID NO: 217846 - RNA, 20 nt, Artificial Sequence
  Synthetic
agaaaggaacagacgccaga

SEQ ID NO: 217847 - RNA, 21 nt, Artificial Sequence
  Synthetic
cagaaaggaacagacgccaga

SEQ ID NO: 217848 - RNA, 22 nt, Artificial Sequence
  Synthetic
gcagaaaggaacagacgccaga

SEQ ID NO: 217849 - RNA, 23 nt, Artificial Sequence
  Synthetic
agcagaaaggaacagacgccaga

SEQ ID NO: 217850 - RNA, 24 nt, Artificial Sequence
  Synthetic
gagcagaaaggaacagacgccaga

SEQ ID NO: 217851 - RNA, 18 nt, Artificial Sequence
  Synthetic
uacagggaaaaggccaga

SEQ ID NO: 217852 - RNA, 19 nt, Artificial Sequence
  Synthetic
uuacagggaaaaggccaga

SEQ ID NO: 217853 - RNA, 20 nt, Artificial Sequence
  Synthetic
cuuacagggaaaaggccaga

SEQ ID NO: 217854 - RNA, 21 nt, Artificial Sequence
  Synthetic
acuuacagggaaaaggccaga

SEQ ID NO: 217855 - RNA, 22 nt, Artificial Sequence
  Synthetic
uacuuacagggaaaaggccaga

SEQ ID NO: 217856 - RNA, 23 nt, Artificial Sequence
  Synthetic
auacuuacagggaaaaggccaga

SEQ ID NO: 217857 - RNA, 24 nt, Artificial Sequence
  Synthetic
uauacuuacagggaaaaggccaga

SEQ ID NO: 217858 - RNA, 18 nt, Artificial Sequence
  Synthetic
guaaauggacaugccaga

SEQ ID NO: 217859 - RNA, 19 nt, Artificial Sequence
  Synthetic
aguaaauggacaugccaga

SEQ ID NO: 217860 - RNA, 20 nt, Artificial Sequence
  Synthetic
gaguaaauggacaugccaga

SEQ ID NO: 217861 - RNA, 21 nt, Artificial Sequence
  Synthetic
agaguaaauggacaugccaga

SEQ ID NO: 217862 - RNA, 22 nt, Artificial Sequence
  Synthetic
aagaguaaauggacaugccaga

SEQ ID NO: 217863 - RNA, 23 nt, Artificial Sequence
  Synthetic
gaagaguaaauggacaugccaga

SEQ ID NO: 217864 - RNA, 24 nt, Artificial Sequence
  Synthetic
ugaagaguaaauggacaugccaga

SEQ ID NO: 217865 - RNA, 18 nt, Artificial Sequence
  Synthetic
acuuacaaccaugccaga

SEQ ID NO: 217866 - RNA, 19 nt, Artificial Sequence
  Synthetic
aacuuacaaccaugccaga

SEQ ID NO: 217867 - RNA, 20 nt, Artificial Sequence
  Synthetic
aaacuuacaaccaugccaga

SEQ ID NO: 217868 - RNA, 21 nt, Artificial Sequence
  Synthetic
aaaacuuacaaccaugccaga

SEQ ID NO: 217869 - RNA, 22 nt, Artificial Sequence
  Synthetic
gaaaacuuacaaccaugccaga

SEQ ID NO: 217870 - RNA, 23 nt, Artificial Sequence
  Synthetic
ggaaaacuuacaaccaugccaga

SEQ ID NO: 217871 - RNA, 24 nt, Artificial Sequence
  Synthetic
gggaaaacuuacaaccaugccaga

SEQ ID NO: 217872 - RNA, 18 nt, Artificial Sequence
  Synthetic
gaauccuuuguugccaga

SEQ ID NO: 217873 - RNA, 19 nt, Artificial Sequence
  Synthetic
ggaauccuuuguugccaga

SEQ ID NO: 217874 - RNA, 20 nt, Artificial Sequence
  Synthetic
gggaauccuuuguugccaga

SEQ ID NO: 217875 - RNA, 21 nt, Artificial Sequence
  Synthetic
ugggaauccuuuguugccaga

SEQ ID NO: 217876 - RNA, 22 nt, Artificial Sequence
  Synthetic
augggaauccuuuguugccaga

SEQ ID NO: 217877 - RNA, 23 nt, Artificial Sequence
  Synthetic
aaugggaauccuuuguugccaga

SEQ ID NO: 217878 - RNA, 24 nt, Artificial Sequence
  Synthetic
uaaugggaauccuuuguugccaga

SEQ ID NO: 217879 - RNA, 18 nt, Artificial Sequence
  Synthetic
cauugugucugauccaga

SEQ ID NO: 217880 - RNA, 19 nt, Artificial Sequence
  Synthetic
acauugugucugauccaga

SEQ ID NO: 217881 - RNA, 20 nt, Artificial Sequence
  Synthetic
cacauugugucugauccaga

SEQ ID NO: 217882 - RNA, 21 nt, Artificial Sequence
  Synthetic
ucacauugugucugauccaga

SEQ ID NO: 217883 - RNA, 22 nt, Artificial Sequence
  Synthetic
cucacauugugucugauccaga

SEQ ID NO: 217884 - RNA, 23 nt, Artificial Sequence
  Synthetic
ccucacauugugucugauccaga

SEQ ID NO: 217885 - RNA, 24 nt, Artificial Sequence
  Synthetic
accucacauugugucugauccaga

SEQ ID NO: 217886 - RNA, 18 nt, Artificial Sequence
  Synthetic
aaaaaugaggacuccaga

SEQ ID NO: 217887 - RNA, 19 nt, Artificial Sequence
  Synthetic
aaaaaaugaggacuccaga

SEQ ID NO: 217888 - RNA, 20 nt, Artificial Sequence
  Synthetic
uaaaaaaugaggacuccaga

SEQ ID NO: 217889 - RNA, 21 nt, Artificial Sequence
  Synthetic
guaaaaaaugaggacuccaga

SEQ ID NO: 217890 - RNA, 22 nt, Artificial Sequence
  Synthetic
aguaaaaaaugaggacuccaga

SEQ ID NO: 217891 - RNA, 23 nt, Artificial Sequence
  Synthetic
aaguaaaaaaugaggacuccaga

SEQ ID NO: 217892 - RNA, 24 nt, Artificial Sequence
  Synthetic
gaaguaaaaaaugaggacuccaga

SEQ ID NO: 217893 - RNA, 18 nt, Artificial Sequence
  Synthetic
ggaucccaggccuccaga

SEQ ID NO: 217894 - RNA, 19 nt, Artificial Sequence
  Synthetic
gggaucccaggccuccaga

SEQ ID NO: 217895 - RNA, 20 nt, Artificial Sequence
  Synthetic
ugggaucccaggccuccaga

SEQ ID NO: 217896 - RNA, 21 nt, Artificial Sequence
  Synthetic
uugggaucccaggccuccaga

SEQ ID NO: 217897 - RNA, 22 nt, Artificial Sequence
  Synthetic
uuugggaucccaggccuccaga

SEQ ID NO: 217898 - RNA, 23 nt, Artificial Sequence
  Synthetic
cuuugggaucccaggccuccaga

SEQ ID NO: 217899 - RNA, 24 nt, Artificial Sequence
  Synthetic
gcuuugggaucccaggccuccaga

SEQ ID NO: 217900 - RNA, 18 nt, Artificial Sequence
  Synthetic
gcuucagccuucuccaga

SEQ ID NO: 217901 - RNA, 19 nt, Artificial Sequence
  Synthetic
ugcuucagccuucuccaga

SEQ ID NO: 217902 - RNA, 20 nt, Artificial Sequence
  Synthetic
augcuucagccuucuccaga

SEQ ID NO: 217903 - RNA, 21 nt, Artificial Sequence
  Synthetic
caugcuucagccuucuccaga

SEQ ID NO: 217904 - RNA, 22 nt, Artificial Sequence
  Synthetic
ucaugcuucagccuucuccaga

SEQ ID NO: 217905 - RNA, 23 nt, Artificial Sequence
  Synthetic
gucaugcuucagccuucuccaga

SEQ ID NO: 217906 - RNA, 24 nt, Artificial Sequence
  Synthetic
ugucaugcuucagccuucuccaga

SEQ ID NO: 217907 - RNA, 18 nt, Artificial Sequence
  Synthetic
guuuccgucauguccaga

SEQ ID NO: 217908 - RNA, 19 nt, Artificial Sequence
  Synthetic
uguuuccgucauguccaga

SEQ ID NO: 217909 - RNA, 20 nt, Artificial Sequence
  Synthetic
cuguuuccgucauguccaga

SEQ ID NO: 217910 - RNA, 21 nt, Artificial Sequence
  Synthetic
acuguuuccgucauguccaga

SEQ ID NO: 217911 - RNA, 22 nt, Artificial Sequence
  Synthetic
cacuguuuccgucauguccaga

SEQ ID NO: 217912 - RNA, 23 nt, Artificial Sequence
  Synthetic
ucacuguuuccgucauguccaga

SEQ ID NO: 217913 - RNA, 24 nt, Artificial Sequence
  Synthetic
uucacuguuuccgucauguccaga

SEQ ID NO: 217914 - RNA, 18 nt, Artificial Sequence
  Synthetic
uagcauauacauuccaga

SEQ ID NO: 217915 - RNA, 19 nt, Artificial Sequence
  Synthetic
cuagcauauacauuccaga

SEQ ID NO: 217916 - RNA, 20 nt, Artificial Sequence
  Synthetic
acuagcauauacauuccaga

SEQ ID NO: 217917 - RNA, 21 nt, Artificial Sequence
  Synthetic
cacuagcauauacauuccaga

SEQ ID NO: 217918 - RNA, 22 nt, Artificial Sequence
  Synthetic
ucacuagcauauacauuccaga

SEQ ID NO: 217919 - RNA, 23 nt, Artificial Sequence
  Synthetic
aucacuagcauauacauuccaga

SEQ ID NO: 217920 - RNA, 24 nt, Artificial Sequence
  Synthetic
aaucacuagcauauacauuccaga

SEQ ID NO: 217921 - RNA, 18 nt, Artificial Sequence
  Synthetic
aaauacacccauuccaga

SEQ ID NO: 217922 - RNA, 19 nt, Artificial Sequence
  Synthetic
uaaauacacccauuccaga

SEQ ID NO: 217923 - RNA, 20 nt, Artificial Sequence
  Synthetic
uuaaauacacccauuccaga

SEQ ID NO: 217924 - RNA, 21 nt, Artificial Sequence
  Synthetic
guuaaauacacccauuccaga

SEQ ID NO: 217925 - RNA, 22 nt, Artificial Sequence
  Synthetic
gguuaaauacacccauuccaga

SEQ ID NO: 217926 - RNA, 23 nt, Artificial Sequence
  Synthetic
ugguuaaauacacccauuccaga

SEQ ID NO: 217927 - RNA, 24 nt, Artificial Sequence
  Synthetic
uugguuaaauacacccauuccaga

SEQ ID NO: 217928 - RNA, 18 nt, Artificial Sequence
  Synthetic
aagaguaugaguuccaga

SEQ ID NO: 217929 - RNA, 19 nt, Artificial Sequence
  Synthetic
aaagaguaugaguuccaga

SEQ ID NO: 217930 - RNA, 20 nt, Artificial Sequence
  Synthetic
caaagaguaugaguuccaga

SEQ ID NO: 217931 - RNA, 21 nt, Artificial Sequence
  Synthetic
gcaaagaguaugaguuccaga

SEQ ID NO: 217932 - RNA, 22 nt, Artificial Sequence
  Synthetic
ggcaaagaguaugaguuccaga

SEQ ID NO: 217933 - RNA, 23 nt, Artificial Sequence
  Synthetic
uggcaaagaguaugaguuccaga

SEQ ID NO: 217934 - RNA, 24 nt, Artificial Sequence
  Synthetic
guggcaaagaguaugaguuccaga

SEQ ID NO: 217935 - RNA, 18 nt, Artificial Sequence
  Synthetic
uuuuauuaaauuuccaga

SEQ ID NO: 217936 - RNA, 19 nt, Artificial Sequence
  Synthetic
auuuuauuaaauuuccaga

SEQ ID NO: 217937 - RNA, 20 nt, Artificial Sequence
  Synthetic
uauuuuauuaaauuuccaga

SEQ ID NO: 217938 - RNA, 21 nt, Artificial Sequence
  Synthetic
uuauuuuauuaaauuuccaga

SEQ ID NO: 217939 - RNA, 22 nt, Artificial Sequence
  Synthetic
auuauuuuauuaaauuuccaga

SEQ ID NO: 217940 - RNA, 23 nt, Artificial Sequence
  Synthetic
cauuauuuuauuaaauuuccaga

SEQ ID NO: 217941 - RNA, 24 nt, Artificial Sequence
  Synthetic
ucauuauuuuauuaaauuuccaga

SEQ ID NO: 217942 - RNA, 18 nt, Artificial Sequence
  Synthetic
uguuggaaccuuuccaga

SEQ ID NO: 217943 - RNA, 19 nt, Artificial Sequence
  Synthetic
auguuggaaccuuuccaga

SEQ ID NO: 217944 - RNA, 20 nt, Artificial Sequence
  Synthetic
uauguuggaaccuuuccaga

SEQ ID NO: 217945 - RNA, 21 nt, Artificial Sequence
  Synthetic
uuauguuggaaccuuuccaga

SEQ ID NO: 217946 - RNA, 22 nt, Artificial Sequence
  Synthetic
uuuauguuggaaccuuuccaga

SEQ ID NO: 217947 - RNA, 23 nt, Artificial Sequence
  Synthetic
cuuuauguuggaaccuuuccaga

SEQ ID NO: 217948 - RNA, 24 nt, Artificial Sequence
  Synthetic
gcuuuauguuggaaccuuuccaga

SEQ ID NO: 217949 - RNA, 18 nt, Artificial Sequence
  Synthetic
caguaagaccuuuccaga

SEQ ID NO: 217950 - RNA, 19 nt, Artificial Sequence
  Synthetic
ccaguaagaccuuuccaga

SEQ ID NO: 217951 - RNA, 20 nt, Artificial Sequence
  Synthetic
uccaguaagaccuuuccaga

SEQ ID NO: 217952 - RNA, 21 nt, Artificial Sequence
  Synthetic
cuccaguaagaccuuuccaga

SEQ ID NO: 217953 - RNA, 22 nt, Artificial Sequence
  Synthetic
ccuccaguaagaccuuuccaga

SEQ ID NO: 217954 - RNA, 23 nt, Artificial Sequence
  Synthetic
uccuccaguaagaccuuuccaga

SEQ ID NO: 217955 - RNA, 24 nt, Artificial Sequence
  Synthetic
auccuccaguaagaccuuuccaga

SEQ ID NO: 217956 - RNA, 18 nt, Artificial Sequence
  Synthetic
cuuuugacccuuuccaga

SEQ ID NO: 217957 - RNA, 19 nt, Artificial Sequence
  Synthetic
acuuuugacccuuuccaga

SEQ ID NO: 217958 - RNA, 20 nt, Artificial Sequence
  Synthetic
uacuuuugacccuuuccaga

SEQ ID NO: 217959 - RNA, 21 nt, Artificial Sequence
  Synthetic
uuacuuuugacccuuuccaga

SEQ ID NO: 217960 - RNA, 22 nt, Artificial Sequence
  Synthetic
guuacuuuugacccuuuccaga

SEQ ID NO: 217961 - RNA, 23 nt, Artificial Sequence
  Synthetic
aguuacuuuugacccuuuccaga

SEQ ID NO: 217962 - RNA, 24 nt, Artificial Sequence
  Synthetic
aaguuacuuuugacccuuuccaga

SEQ ID NO: 217963 - RNA, 18 nt, Artificial Sequence
  Synthetic
caaugcugaguuuccaga

SEQ ID NO: 217964 - RNA, 19 nt, Artificial Sequence
  Synthetic
ccaaugcugaguuuccaga

SEQ ID NO: 217965 - RNA, 20 nt, Artificial Sequence
  Synthetic
uccaaugcugaguuuccaga

SEQ ID NO: 217966 - RNA, 21 nt, Artificial Sequence
  Synthetic
guccaaugcugaguuuccaga

SEQ ID NO: 217967 - RNA, 22 nt, Artificial Sequence
  Synthetic
aguccaaugcugaguuuccaga

SEQ ID NO: 217968 - RNA, 23 nt, Artificial Sequence
  Synthetic
caguccaaugcugaguuuccaga

SEQ ID NO: 217969 - RNA, 24 nt, Artificial Sequence
  Synthetic
gcaguccaaugcugaguuuccaga

SEQ ID NO: 217970 - RNA, 18 nt, Artificial Sequence
  Synthetic
aagacuuugaaaagcaga

SEQ ID NO: 217971 - RNA, 19 nt, Artificial Sequence
  Synthetic
uaagacuuugaaaagcaga

SEQ ID NO: 217972 - RNA, 20 nt, Artificial Sequence
  Synthetic
auaagacuuugaaaagcaga

SEQ ID NO: 217973 - RNA, 21 nt, Artificial Sequence
  Synthetic
aauaagacuuugaaaagcaga

SEQ ID NO: 217974 - RNA, 22 nt, Artificial Sequence
  Synthetic
gaauaagacuuugaaaagcaga

SEQ ID NO: 217975 - RNA, 23 nt, Artificial Sequence
  Synthetic
ugaauaagacuuugaaaagcaga

SEQ ID NO: 217976 - RNA, 24 nt, Artificial Sequence
  Synthetic
augaauaagacuuugaaaagcaga

SEQ ID NO: 217977 - RNA, 18 nt, Artificial Sequence
  Synthetic
agcaagaaagaaagcaga

SEQ ID NO: 217978 - RNA, 19 nt, Artificial Sequence
  Synthetic
gagcaagaaagaaagcaga

SEQ ID NO: 217979 - RNA, 20 nt, Artificial Sequence
  Synthetic
agagcaagaaagaaagcaga

SEQ ID NO: 217980 - RNA, 21 nt, Artificial Sequence
  Synthetic
aagagcaagaaagaaagcaga

SEQ ID NO: 217981 - RNA, 22 nt, Artificial Sequence
  Synthetic
caagagcaagaaagaaagcaga

SEQ ID NO: 217982 - RNA, 23 nt, Artificial Sequence
  Synthetic
gcaagagcaagaaagaaagcaga

SEQ ID NO: 217983 - RNA, 24 nt, Artificial Sequence
  Synthetic
agcaagagcaagaaagaaagcaga

SEQ ID NO: 217984 - RNA, 18 nt, Artificial Sequence
  Synthetic
ucacauggcgaaagcaga

SEQ ID NO: 217985 - RNA, 19 nt, Artificial Sequence
  Synthetic
uucacauggcgaaagcaga

SEQ ID NO: 217986 - RNA, 20 nt, Artificial Sequence
  Synthetic
uuucacauggcgaaagcaga

SEQ ID NO: 217987 - RNA, 21 nt, Artificial Sequence
  Synthetic
auuucacauggcgaaagcaga

SEQ ID NO: 217988 - RNA, 22 nt, Artificial Sequence
  Synthetic
cauuucacauggcgaaagcaga

SEQ ID NO: 217989 - RNA, 23 nt, Artificial Sequence
  Synthetic
gcauuucacauggcgaaagcaga

SEQ ID NO: 217990 - RNA, 24 nt, Artificial Sequence
  Synthetic
ggcauuucacauggcgaaagcaga

SEQ ID NO: 217991 - RNA, 18 nt, Artificial Sequence
  Synthetic
agauauuuggaaagcaga

SEQ ID NO: 217992 - RNA, 19 nt, Artificial Sequence
  Synthetic
uagauauuuggaaagcaga

SEQ ID NO: 217993 - RNA, 20 nt, Artificial Sequence
  Synthetic
uuagauauuuggaaagcaga

SEQ ID NO: 217994 - RNA, 21 nt, Artificial Sequence
  Synthetic
auuagauauuuggaaagcaga

SEQ ID NO: 217995 - RNA, 22 nt, Artificial Sequence
  Synthetic
gauuagauauuuggaaagcaga

SEQ ID NO: 217996 - RNA, 23 nt, Artificial Sequence
  Synthetic
agauuagauauuuggaaagcaga

SEQ ID NO: 217997 - RNA, 24 nt, Artificial Sequence
  Synthetic
cagauuagauauuuggaaagcaga

SEQ ID NO: 217998 - RNA, 18 nt, Artificial Sequence
  Synthetic
uauaaaacuccaagcaga

SEQ ID NO: 217999 - RNA, 19 nt, Artificial Sequence
  Synthetic
auauaaaacuccaagcaga

SEQ ID NO: 218000 - RNA, 20 nt, Artificial Sequence
  Synthetic
uauauaaaacuccaagcaga

SEQ ID NO: 218001 - RNA, 21 nt, Artificial Sequence
  Synthetic
auauauaaaacuccaagcaga

SEQ ID NO: 218002 - RNA, 22 nt, Artificial Sequence
  Synthetic
gauauauaaaacuccaagcaga

SEQ ID NO: 218003 - RNA, 23 nt, Artificial Sequence
  Synthetic
ggauauauaaaacuccaagcaga

SEQ ID NO: 218004 - RNA, 24 nt, Artificial Sequence
  Synthetic
uggauauauaaaacuccaagcaga

SEQ ID NO: 218005 - RNA, 18 nt, Artificial Sequence
  Synthetic
uauuaaguaagaagcaga

SEQ ID NO: 218006 - RNA, 19 nt, Artificial Sequence
  Synthetic
uuauuaaguaagaagcaga

SEQ ID NO: 218007 - RNA, 20 nt, Artificial Sequence
  Synthetic
cuuauuaaguaagaagcaga

SEQ ID NO: 218008 - RNA, 21 nt, Artificial Sequence
  Synthetic
gcuuauuaaguaagaagcaga

SEQ ID NO: 218009 - RNA, 22 nt, Artificial Sequence
  Synthetic
agcuuauuaaguaagaagcaga

SEQ ID NO: 218010 - RNA, 23 nt, Artificial Sequence
  Synthetic
aagcuuauuaaguaagaagcaga

SEQ ID NO: 218011 - RNA, 24 nt, Artificial Sequence
  Synthetic
aaagcuuauuaaguaagaagcaga

SEQ ID NO: 218012 - RNA, 18 nt, Artificial Sequence
  Synthetic
gaguuauuaauaagcaga

SEQ ID NO: 218013 - RNA, 19 nt, Artificial Sequence
  Synthetic
ugaguuauuaauaagcaga

SEQ ID NO: 218014 - RNA, 20 nt, Artificial Sequence
  Synthetic
cugaguuauuaauaagcaga

SEQ ID NO: 218015 - RNA, 21 nt, Artificial Sequence
  Synthetic
acugaguuauuaauaagcaga

SEQ ID NO: 218016 - RNA, 22 nt, Artificial Sequence
  Synthetic
cacugaguuauuaauaagcaga

SEQ ID NO: 218017 - RNA, 23 nt, Artificial Sequence
  Synthetic
acacugaguuauuaauaagcaga

SEQ ID NO: 218018 - RNA, 24 nt, Artificial Sequence
  Synthetic
gacacugaguuauuaauaagcaga

SEQ ID NO: 218019 - RNA, 18 nt, Artificial Sequence
  Synthetic
auagcuuacugcagcaga

SEQ ID NO: 218020 - RNA, 19 nt, Artificial Sequence
  Synthetic
uauagcuuacugcagcaga

SEQ ID NO: 218021 - RNA, 20 nt, Artificial Sequence
  Synthetic
auauagcuuacugcagcaga

SEQ ID NO: 218022 - RNA, 21 nt, Artificial Sequence
  Synthetic
gauauagcuuacugcagcaga

SEQ ID NO: 218023 - RNA, 22 nt, Artificial Sequence
  Synthetic
ggauauagcuuacugcagcaga

SEQ ID NO: 218024 - RNA, 23 nt, Artificial Sequence
  Synthetic
gggauauagcuuacugcagcaga

SEQ ID NO: 218025 - RNA, 24 nt, Artificial Sequence
  Synthetic
ggggauauagcuuacugcagcaga

SEQ ID NO: 218026 - RNA, 18 nt, Artificial Sequence
  Synthetic
cccaugggaaagagcaga

SEQ ID NO: 218027 - RNA, 19 nt, Artificial Sequence
  Synthetic
ccccaugggaaagagcaga

SEQ ID NO: 218028 - RNA, 20 nt, Artificial Sequence
  Synthetic
accccaugggaaagagcaga

SEQ ID NO: 218029 - RNA, 21 nt, Artificial Sequence
  Synthetic
caccccaugggaaagagcaga

SEQ ID NO: 218030 - RNA, 22 nt, Artificial Sequence
  Synthetic
ucaccccaugggaaagagcaga

SEQ ID NO: 218031 - RNA, 23 nt, Artificial Sequence
  Synthetic
gucaccccaugggaaagagcaga

SEQ ID NO: 218032 - RNA, 24 nt, Artificial Sequence
  Synthetic
ggucaccccaugggaaagagcaga

SEQ ID NO: 218033 - RNA, 18 nt, Artificial Sequence
  Synthetic
aauaccuuccagagcaga

SEQ ID NO: 218034 - RNA, 19 nt, Artificial Sequence
  Synthetic
aaauaccuuccagagcaga

SEQ ID NO: 218035 - RNA, 20 nt, Artificial Sequence
  Synthetic
aaaauaccuuccagagcaga

SEQ ID NO: 218036 - RNA, 21 nt, Artificial Sequence
  Synthetic
caaaauaccuuccagagcaga

SEQ ID NO: 218037 - RNA, 22 nt, Artificial Sequence
  Synthetic
acaaaauaccuuccagagcaga

SEQ ID NO: 218038 - RNA, 23 nt, Artificial Sequence
  Synthetic
cacaaaauaccuuccagagcaga

SEQ ID NO: 218039 - RNA, 24 nt, Artificial Sequence
  Synthetic
ccacaaaauaccuuccagagcaga

SEQ ID NO: 218040 - RNA, 18 nt, Artificial Sequence
  Synthetic
uauuagauaaggagcaga

SEQ ID NO: 218041 - RNA, 19 nt, Artificial Sequence
  Synthetic
cuauuagauaaggagcaga

SEQ ID NO: 218042 - RNA, 20 nt, Artificial Sequence
  Synthetic
acuauuagauaaggagcaga

SEQ ID NO: 218043 - RNA, 21 nt, Artificial Sequence
  Synthetic
aacuauuagauaaggagcaga

SEQ ID NO: 218044 - RNA, 22 nt, Artificial Sequence
  Synthetic
gaacuauuagauaaggagcaga

SEQ ID NO: 218045 - RNA, 23 nt, Artificial Sequence
  Synthetic
agaacuauuagauaaggagcaga

SEQ ID NO: 218046 - RNA, 24 nt, Artificial Sequence
  Synthetic
aagaacuauuagauaaggagcaga

SEQ ID NO: 218047 - RNA, 18 nt, Artificial Sequence
  Synthetic
accauuaucaggagcaga

SEQ ID NO: 218048 - RNA, 19 nt, Artificial Sequence
  Synthetic
aaccauuaucaggagcaga

SEQ ID NO: 218049 - RNA, 20 nt, Artificial Sequence
  Synthetic
caaccauuaucaggagcaga

SEQ ID NO: 218050 - RNA, 21 nt, Artificial Sequence
  Synthetic
gcaaccauuaucaggagcaga

SEQ ID NO: 218051 - RNA, 22 nt, Artificial Sequence
  Synthetic
agcaaccauuaucaggagcaga

SEQ ID NO: 218052 - RNA, 23 nt, Artificial Sequence
  Synthetic
uagcaaccauuaucaggagcaga

SEQ ID NO: 218053 - RNA, 24 nt, Artificial Sequence
  Synthetic
auagcaaccauuaucaggagcaga

SEQ ID NO: 218054 - RNA, 18 nt, Artificial Sequence
  Synthetic
uuugggaagaggagcaga

SEQ ID NO: 218055 - RNA, 19 nt, Artificial Sequence
  Synthetic
auuugggaagaggagcaga

SEQ ID NO: 218056 - RNA, 20 nt, Artificial Sequence
  Synthetic
cauuugggaagaggagcaga

SEQ ID NO: 218057 - RNA, 21 nt, Artificial Sequence
  Synthetic
gcauuugggaagaggagcaga

SEQ ID NO: 218058 - RNA, 22 nt, Artificial Sequence
  Synthetic
cgcauuugggaagaggagcaga

SEQ ID NO: 218059 - RNA, 23 nt, Artificial Sequence
  Synthetic
acgcauuugggaagaggagcaga

SEQ ID NO: 218060 - RNA, 24 nt, Artificial Sequence
  Synthetic
gacgcauuugggaagaggagcaga

SEQ ID NO: 218061 - RNA, 18 nt, Artificial Sequence
  Synthetic
aggggaugaaugagcaga

SEQ ID NO: 218062 - RNA, 19 nt, Artificial Sequence
  Synthetic
uaggggaugaaugagcaga

SEQ ID NO: 218063 - RNA, 20 nt, Artificial Sequence
  Synthetic
uuaggggaugaaugagcaga

SEQ ID NO: 218064 - RNA, 21 nt, Artificial Sequence
  Synthetic
auuaggggaugaaugagcaga

SEQ ID NO: 218065 - RNA, 22 nt, Artificial Sequence
  Synthetic
aauuaggggaugaaugagcaga

SEQ ID NO: 218066 - RNA, 23 nt, Artificial Sequence
  Synthetic
gaauuaggggaugaaugagcaga

SEQ ID NO: 218067 - RNA, 24 nt, Artificial Sequence
  Synthetic
agaauuaggggaugaaugagcaga

SEQ ID NO: 218068 - RNA, 18 nt, Artificial Sequence
  Synthetic
aaacaugggcugagcaga

SEQ ID NO: 218069 - RNA, 19 nt, Artificial Sequence
  Synthetic
gaaacaugggcugagcaga

SEQ ID NO: 218070 - RNA, 20 nt, Artificial Sequence
  Synthetic
agaaacaugggcugagcaga

SEQ ID NO: 218071 - RNA, 21 nt, Artificial Sequence
  Synthetic
aagaaacaugggcugagcaga

SEQ ID NO: 218072 - RNA, 22 nt, Artificial Sequence
  Synthetic
aaagaaacaugggcugagcaga

SEQ ID NO: 218073 - RNA, 23 nt, Artificial Sequence
  Synthetic
caaagaaacaugggcugagcaga

SEQ ID NO: 218074 - RNA, 24 nt, Artificial Sequence
  Synthetic
acaaagaaacaugggcugagcaga

SEQ ID NO: 218075 - RNA, 18 nt, Artificial Sequence
  Synthetic
gccauggaaaauagcaga

SEQ ID NO: 218076 - RNA, 19 nt, Artificial Sequence
  Synthetic
agccauggaaaauagcaga

SEQ ID NO: 218077 - RNA, 20 nt, Artificial Sequence
  Synthetic
uagccauggaaaauagcaga

SEQ ID NO: 218078 - RNA, 21 nt, Artificial Sequence
  Synthetic
auagccauggaaaauagcaga

SEQ ID NO: 218079 - RNA, 22 nt, Artificial Sequence
  Synthetic
aauagccauggaaaauagcaga

SEQ ID NO: 218080 - RNA, 23 nt, Artificial Sequence
  Synthetic
caauagccauggaaaauagcaga

SEQ ID NO: 218081 - RNA, 24 nt, Artificial Sequence
  Synthetic
gcaauagccauggaaaauagcaga

SEQ ID NO: 218082 - RNA, 18 nt, Artificial Sequence
  Synthetic
gaucauuaauauagcaga

SEQ ID NO: 218083 - RNA, 19 nt, Artificial Sequence
  Synthetic
agaucauuaauauagcaga

SEQ ID NO: 218084 - RNA, 20 nt, Artificial Sequence
  Synthetic
cagaucauuaauauagcaga

SEQ ID NO: 218085 - RNA, 21 nt, Artificial Sequence
  Synthetic
acagaucauuaauauagcaga

SEQ ID NO: 218086 - RNA, 22 nt, Artificial Sequence
  Synthetic
gacagaucauuaauauagcaga

SEQ ID NO: 218087 - RNA, 23 nt, Artificial Sequence
  Synthetic
agacagaucauuaauauagcaga

SEQ ID NO: 218088 - RNA, 24 nt, Artificial Sequence
  Synthetic
aagacagaucauuaauauagcaga

SEQ ID NO: 218089 - RNA, 18 nt, Artificial Sequence
  Synthetic
caacagaagacuagcaga

SEQ ID NO: 218090 - RNA, 19 nt, Artificial Sequence
  Synthetic
ccaacagaagacuagcaga

SEQ ID NO: 218091 - RNA, 20 nt, Artificial Sequence
  Synthetic
cccaacagaagacuagcaga

SEQ ID NO: 218092 - RNA, 21 nt, Artificial Sequence
  Synthetic
ucccaacagaagacuagcaga

SEQ ID NO: 218093 - RNA, 22 nt, Artificial Sequence
  Synthetic
cucccaacagaagacuagcaga

SEQ ID NO: 218094 - RNA, 23 nt, Artificial Sequence
  Synthetic
ccucccaacagaagacuagcaga

SEQ ID NO: 218095 - RNA, 24 nt, Artificial Sequence
  Synthetic
uccucccaacagaagacuagcaga

SEQ ID NO: 218096 - RNA, 18 nt, Artificial Sequence
  Synthetic
ucugguagggguagcaga

SEQ ID NO: 218097 - RNA, 19 nt, Artificial Sequence
  Synthetic
aucugguagggguagcaga

SEQ ID NO: 218098 - RNA, 20 nt, Artificial Sequence
  Synthetic
caucugguagggguagcaga

SEQ ID NO: 218099 - RNA, 21 nt, Artificial Sequence
  Synthetic
acaucugguagggguagcaga

SEQ ID NO: 218100 - RNA, 22 nt, Artificial Sequence
  Synthetic
aacaucugguagggguagcaga

SEQ ID NO: 218101 - RNA, 23 nt, Artificial Sequence
  Synthetic
uaacaucugguagggguagcaga

SEQ ID NO: 218102 - RNA, 24 nt, Artificial Sequence
  Synthetic
guaacaucugguagggguagcaga

SEQ ID NO: 218103 - RNA, 18 nt, Artificial Sequence
  Synthetic
aacuucugaaaaggcaga

SEQ ID NO: 218104 - RNA, 19 nt, Artificial Sequence
  Synthetic
aaacuucugaaaaggcaga

SEQ ID NO: 218105 - RNA, 20 nt, Artificial Sequence
  Synthetic
gaaacuucugaaaaggcaga

SEQ ID NO: 218106 - RNA, 21 nt, Artificial Sequence
  Synthetic
ugaaacuucugaaaaggcaga

SEQ ID NO: 218107 - RNA, 22 nt, Artificial Sequence
  Synthetic
uugaaacuucugaaaaggcaga

SEQ ID NO: 218108 - RNA, 23 nt, Artificial Sequence
  Synthetic
uuugaaacuucugaaaaggcaga

SEQ ID NO: 218109 - RNA, 24 nt, Artificial Sequence
  Synthetic
cuuugaaacuucugaaaaggcaga

SEQ ID NO: 218110 - RNA, 18 nt, Artificial Sequence
  Synthetic
ggaaucccagaaggcaga

SEQ ID NO: 218111 - RNA, 19 nt, Artificial Sequence
  Synthetic
aggaaucccagaaggcaga

SEQ ID NO: 218112 - RNA, 20 nt, Artificial Sequence
  Synthetic
aaggaaucccagaaggcaga

SEQ ID NO: 218113 - RNA, 21 nt, Artificial Sequence
  Synthetic
gaaggaaucccagaaggcaga

SEQ ID NO: 218114 - RNA, 22 nt, Artificial Sequence
  Synthetic
agaaggaaucccagaaggcaga

SEQ ID NO: 218115 - RNA, 23 nt, Artificial Sequence
  Synthetic
cagaaggaaucccagaaggcaga

SEQ ID NO: 218116 - RNA, 24 nt, Artificial Sequence
  Synthetic
ucagaaggaaucccagaaggcaga

SEQ ID NO: 218117 - RNA, 18 nt, Artificial Sequence
  Synthetic
gucguggcagaaggcaga

SEQ ID NO: 218118 - RNA, 19 nt, Artificial Sequence
  Synthetic
agucguggcagaaggcaga

SEQ ID NO: 218119 - RNA, 20 nt, Artificial Sequence
  Synthetic
cagucguggcagaaggcaga

SEQ ID NO: 218120 - RNA, 21 nt, Artificial Sequence
  Synthetic
ccagucguggcagaaggcaga

SEQ ID NO: 218121 - RNA, 22 nt, Artificial Sequence
  Synthetic
uccagucguggcagaaggcaga

SEQ ID NO: 218122 - RNA, 23 nt, Artificial Sequence
  Synthetic
uuccagucguggcagaaggcaga

SEQ ID NO: 218123 - RNA, 24 nt, Artificial Sequence
  Synthetic
cuuccagucguggcagaaggcaga

SEQ ID NO: 218124 - RNA, 18 nt, Artificial Sequence
  Synthetic
uuuccucuaccaggcaga

SEQ ID NO: 218125 - RNA, 19 nt, Artificial Sequence
  Synthetic
guuuccucuaccaggcaga

SEQ ID NO: 218126 - RNA, 20 nt, Artificial Sequence
  Synthetic
uguuuccucuaccaggcaga

SEQ ID NO: 218127 - RNA, 21 nt, Artificial Sequence
  Synthetic
uuguuuccucuaccaggcaga

SEQ ID NO: 218128 - RNA, 22 nt, Artificial Sequence
  Synthetic
uuuguuuccucuaccaggcaga

SEQ ID NO: 218129 - RNA, 23 nt, Artificial Sequence
  Synthetic
uuuuguuuccucuaccaggcaga

SEQ ID NO: 218130 - RNA, 24 nt, Artificial Sequence
  Synthetic
auuuuguuuccucuaccaggcaga

SEQ ID NO: 218131 - RNA, 18 nt, Artificial Sequence
  Synthetic
cagugaaccccaggcaga

SEQ ID NO: 218132 - RNA, 19 nt, Artificial Sequence
  Synthetic
gcagugaaccccaggcaga

SEQ ID NO: 218133 - RNA, 20 nt, Artificial Sequence
  Synthetic
ugcagugaaccccaggcaga

SEQ ID NO: 218134 - RNA, 21 nt, Artificial Sequence
  Synthetic
gugcagugaaccccaggcaga

SEQ ID NO: 218135 - RNA, 22 nt, Artificial Sequence
  Synthetic
cgugcagugaaccccaggcaga

SEQ ID NO: 218136 - RNA, 23 nt, Artificial Sequence
  Synthetic
gcgugcagugaaccccaggcaga

SEQ ID NO: 218137 - RNA, 24 nt, Artificial Sequence
  Synthetic
ugcgugcagugaaccccaggcaga

SEQ ID NO: 218138 - RNA, 18 nt, Artificial Sequence
  Synthetic
aaggacaucccaggcaga

SEQ ID NO: 218139 - RNA, 19 nt, Artificial Sequence
  Synthetic
gaaggacaucccaggcaga

SEQ ID NO: 218140 - RNA, 20 nt, Artificial Sequence
  Synthetic
ggaaggacaucccaggcaga

SEQ ID NO: 218141 - RNA, 21 nt, Artificial Sequence
  Synthetic
uggaaggacaucccaggcaga

SEQ ID NO: 218142 - RNA, 22 nt, Artificial Sequence
  Synthetic
auggaaggacaucccaggcaga

SEQ ID NO: 218143 - RNA, 23 nt, Artificial Sequence
  Synthetic
uauggaaggacaucccaggcaga

SEQ ID NO: 218144 - RNA, 24 nt, Artificial Sequence
  Synthetic
guauggaaggacaucccaggcaga

SEQ ID NO: 218145 - RNA, 18 nt, Artificial Sequence
  Synthetic
aagggcaauccaggcaga

SEQ ID NO: 218146 - RNA, 19 nt, Artificial Sequence
  Synthetic
gaagggcaauccaggcaga

SEQ ID NO: 218147 - RNA, 20 nt, Artificial Sequence
  Synthetic
agaagggcaauccaggcaga

SEQ ID NO: 218148 - RNA, 21 nt, Artificial Sequence
  Synthetic
gagaagggcaauccaggcaga

SEQ ID NO: 218149 - RNA, 22 nt, Artificial Sequence
  Synthetic
cgagaagggcaauccaggcaga

SEQ ID NO: 218150 - RNA, 23 nt, Artificial Sequence
  Synthetic
acgagaagggcaauccaggcaga

SEQ ID NO: 218151 - RNA, 24 nt, Artificial Sequence
  Synthetic
aacgagaagggcaauccaggcaga

SEQ ID NO: 218152 - RNA, 18 nt, Artificial Sequence
  Synthetic
aaggaggagagaggcaga

SEQ ID NO: 218153 - RNA, 19 nt, Artificial Sequence
  Synthetic
caaggaggagagaggcaga

SEQ ID NO: 218154 - RNA, 20 nt, Artificial Sequence
  Synthetic
acaaggaggagagaggcaga

SEQ ID NO: 218155 - RNA, 21 nt, Artificial Sequence
  Synthetic
gacaaggaggagagaggcaga

SEQ ID NO: 218156 - RNA, 22 nt, Artificial Sequence
  Synthetic
ggacaaggaggagagaggcaga

SEQ ID NO: 218157 - RNA, 23 nt, Artificial Sequence
  Synthetic
uggacaaggaggagagaggcaga

SEQ ID NO: 218158 - RNA, 24 nt, Artificial Sequence
  Synthetic
uuggacaaggaggagagaggcaga

SEQ ID NO: 218159 - RNA, 18 nt, Artificial Sequence
  Synthetic
ugaugcauucuaggcaga

SEQ ID NO: 218160 - RNA, 19 nt, Artificial Sequence
  Synthetic
augaugcauucuaggcaga

SEQ ID NO: 218161 - RNA, 20 nt, Artificial Sequence
  Synthetic
gaugaugcauucuaggcaga

SEQ ID NO: 218162 - RNA, 21 nt, Artificial Sequence
  Synthetic
agaugaugcauucuaggcaga

SEQ ID NO: 218163 - RNA, 22 nt, Artificial Sequence
  Synthetic
cagaugaugcauucuaggcaga

SEQ ID NO: 218164 - RNA, 23 nt, Artificial Sequence
  Synthetic
ccagaugaugcauucuaggcaga

SEQ ID NO: 218165 - RNA, 24 nt, Artificial Sequence
  Synthetic
accagaugaugcauucuaggcaga

SEQ ID NO: 218166 - RNA, 18 nt, Artificial Sequence
  Synthetic
auucauuguguaggcaga

SEQ ID NO: 218167 - RNA, 19 nt, Artificial Sequence
  Synthetic
cauucauuguguaggcaga

SEQ ID NO: 218168 - RNA, 20 nt, Artificial Sequence
  Synthetic
ccauucauuguguaggcaga

SEQ ID NO: 218169 - RNA, 21 nt, Artificial Sequence
  Synthetic
uccauucauuguguaggcaga

SEQ ID NO: 218170 - RNA, 22 nt, Artificial Sequence
  Synthetic
cuccauucauuguguaggcaga

SEQ ID NO: 218171 - RNA, 23 nt, Artificial Sequence
  Synthetic
ccuccauucauuguguaggcaga

SEQ ID NO: 218172 - RNA, 24 nt, Artificial Sequence
  Synthetic
gccuccauucauuguguaggcaga

SEQ ID NO: 218173 - RNA, 18 nt, Artificial Sequence
  Synthetic
gagagcauuguaggcaga

SEQ ID NO: 218174 - RNA, 19 nt, Artificial Sequence
  Synthetic
agagagcauuguaggcaga

SEQ ID NO: 218175 - RNA, 20 nt, Artificial Sequence
  Synthetic
cagagagcauuguaggcaga

SEQ ID NO: 218176 - RNA, 21 nt, Artificial Sequence
  Synthetic
gcagagagcauuguaggcaga

SEQ ID NO: 218177 - RNA, 22 nt, Artificial Sequence
  Synthetic
ggcagagagcauuguaggcaga

SEQ ID NO: 218178 - RNA, 23 nt, Artificial Sequence
  Synthetic
aggcagagagcauuguaggcaga

SEQ ID NO: 218179 - RNA, 24 nt, Artificial Sequence
  Synthetic
aaggcagagagcauuguaggcaga

SEQ ID NO: 218180 - RNA, 18 nt, Artificial Sequence
  Synthetic
ucuuugcuuuuaggcaga

SEQ ID NO: 218181 - RNA, 19 nt, Artificial Sequence
  Synthetic
aucuuugcuuuuaggcaga

SEQ ID NO: 218182 - RNA, 20 nt, Artificial Sequence
  Synthetic
aaucuuugcuuuuaggcaga

SEQ ID NO: 218183 - RNA, 21 nt, Artificial Sequence
  Synthetic
aaaucuuugcuuuuaggcaga

SEQ ID NO: 218184 - RNA, 22 nt, Artificial Sequence
  Synthetic
gaaaucuuugcuuuuaggcaga

SEQ ID NO: 218185 - RNA, 23 nt, Artificial Sequence
  Synthetic
agaaaucuuugcuuuuaggcaga

SEQ ID NO: 218186 - RNA, 24 nt, Artificial Sequence
  Synthetic
cagaaaucuuugcuuuuaggcaga

SEQ ID NO: 218187 - RNA, 18 nt, Artificial Sequence
  Synthetic
cuuuguaaaaagggcaga

SEQ ID NO: 218188 - RNA, 19 nt, Artificial Sequence
  Synthetic
ucuuuguaaaaagggcaga

SEQ ID NO: 218189 - RNA, 20 nt, Artificial Sequence
  Synthetic
aucuuuguaaaaagggcaga

SEQ ID NO: 218190 - RNA, 21 nt, Artificial Sequence
  Synthetic
caucuuuguaaaaagggcaga

SEQ ID NO: 218191 - RNA, 22 nt, Artificial Sequence
  Synthetic
gcaucuuuguaaaaagggcaga

SEQ ID NO: 218192 - RNA, 23 nt, Artificial Sequence
  Synthetic
agcaucuuuguaaaaagggcaga

SEQ ID NO: 218193 - RNA, 24 nt, Artificial Sequence
  Synthetic
uagcaucuuuguaaaaagggcaga

SEQ ID NO: 218194 - RNA, 18 nt, Artificial Sequence
  Synthetic
uggcuuggcgagggcaga

SEQ ID NO: 218195 - RNA, 19 nt, Artificial Sequence
  Synthetic
uuggcuuggcgagggcaga

SEQ ID NO: 218196 - RNA, 20 nt, Artificial Sequence
  Synthetic
cuuggcuuggcgagggcaga

SEQ ID NO: 218197 - RNA, 21 nt, Artificial Sequence
  Synthetic
ccuuggcuuggcgagggcaga

SEQ ID NO: 218198 - RNA, 22 nt, Artificial Sequence
  Synthetic
uccuuggcuuggcgagggcaga

SEQ ID NO: 218199 - RNA, 23 nt, Artificial Sequence
  Synthetic
uuccuuggcuuggcgagggcaga

SEQ ID NO: 218200 - RNA, 24 nt, Artificial Sequence
  Synthetic
uuuccuuggcuuggcgagggcaga

SEQ ID NO: 218201 - RNA, 18 nt, Artificial Sequence
  Synthetic
agacucagaaggggcaga

SEQ ID NO: 218202 - RNA, 19 nt, Artificial Sequence
  Synthetic
aagacucagaaggggcaga

SEQ ID NO: 218203 - RNA, 20 nt, Artificial Sequence
  Synthetic
gaagacucagaaggggcaga

SEQ ID NO: 218204 - RNA, 21 nt, Artificial Sequence
  Synthetic
ugaagacucagaaggggcaga

SEQ ID NO: 218205 - RNA, 22 nt, Artificial Sequence
  Synthetic
uugaagacucagaaggggcaga

SEQ ID NO: 218206 - RNA, 23 nt, Artificial Sequence
  Synthetic
uuugaagacucagaaggggcaga

SEQ ID NO: 218207 - RNA, 24 nt, Artificial Sequence
  Synthetic
cuuugaagacucagaaggggcaga

SEQ ID NO: 218208 - RNA, 18 nt, Artificial Sequence
  Synthetic
ucaacguguaggggcaga

SEQ ID NO: 218209 - RNA, 19 nt, Artificial Sequence
  Synthetic
gucaacguguaggggcaga

SEQ ID NO: 218210 - RNA, 20 nt, Artificial Sequence
  Synthetic
ggucaacguguaggggcaga

SEQ ID NO: 218211 - RNA, 21 nt, Artificial Sequence
  Synthetic
gggucaacguguaggggcaga

SEQ ID NO: 218212 - RNA, 22 nt, Artificial Sequence
  Synthetic
ggggucaacguguaggggcaga

SEQ ID NO: 218213 - RNA, 23 nt, Artificial Sequence
  Synthetic
uggggucaacguguaggggcaga

SEQ ID NO: 218214 - RNA, 24 nt, Artificial Sequence
  Synthetic
uuggggucaacguguaggggcaga

SEQ ID NO: 218215 - RNA, 18 nt, Artificial Sequence
  Synthetic
gggggauuggggggcaga

SEQ ID NO: 218216 - RNA, 19 nt, Artificial Sequence
  Synthetic
ugggggauuggggggcaga

SEQ ID NO: 218217 - RNA, 20 nt, Artificial Sequence
  Synthetic
uugggggauuggggggcaga

SEQ ID NO: 218218 - RNA, 21 nt, Artificial Sequence
  Synthetic
guugggggauuggggggcaga

SEQ ID NO: 218219 - RNA, 22 nt, Artificial Sequence
  Synthetic
aguugggggauuggggggcaga

SEQ ID NO: 218220 - RNA, 23 nt, Artificial Sequence
  Synthetic
caguugggggauuggggggcaga

SEQ ID NO: 218221 - RNA, 24 nt, Artificial Sequence
  Synthetic
ccaguugggggauuggggggcaga

SEQ ID NO: 218222 - RNA, 18 nt, Artificial Sequence
  Synthetic
guccuuuuacugggcaga

SEQ ID NO: 218223 - RNA, 19 nt, Artificial Sequence
  Synthetic
gguccuuuuacugggcaga

SEQ ID NO: 218224 - RNA, 20 nt, Artificial Sequence
  Synthetic
ugguccuuuuacugggcaga

SEQ ID NO: 218225 - RNA, 21 nt, Artificial Sequence
  Synthetic
gugguccuuuuacugggcaga

SEQ ID NO: 218226 - RNA, 22 nt, Artificial Sequence
  Synthetic
agugguccuuuuacugggcaga

SEQ ID NO: 218227 - RNA, 23 nt, Artificial Sequence
  Synthetic
cagugguccuuuuacugggcaga

SEQ ID NO: 218228 - RNA, 24 nt, Artificial Sequence
  Synthetic
acagugguccuuuuacugggcaga

SEQ ID NO: 218229 - RNA, 18 nt, Artificial Sequence
  Synthetic
ggagcaggauugggcaga

SEQ ID NO: 218230 - RNA, 19 nt, Artificial Sequence
  Synthetic
gggagcaggauugggcaga

SEQ ID NO: 218231 - RNA, 20 nt, Artificial Sequence
  Synthetic
agggagcaggauugggcaga

SEQ ID NO: 218232 - RNA, 21 nt, Artificial Sequence
  Synthetic
aagggagcaggauugggcaga

SEQ ID NO: 218233 - RNA, 22 nt, Artificial Sequence
  Synthetic
aaagggagcaggauugggcaga

SEQ ID NO: 218234 - RNA, 23 nt, Artificial Sequence
  Synthetic
gaaagggagcaggauugggcaga

SEQ ID NO: 218235 - RNA, 24 nt, Artificial Sequence
  Synthetic
ggaaagggagcaggauugggcaga

SEQ ID NO: 218236 - RNA, 18 nt, Artificial Sequence
  Synthetic
gaggcaguauugggcaga

SEQ ID NO: 218237 - RNA, 19 nt, Artificial Sequence
  Synthetic
ggaggcaguauugggcaga

SEQ ID NO: 218238 - RNA, 20 nt, Artificial Sequence
  Synthetic
aggaggcaguauugggcaga

SEQ ID NO: 218239 - RNA, 21 nt, Artificial Sequence
  Synthetic
aaggaggcaguauugggcaga

SEQ ID NO: 218240 - RNA, 22 nt, Artificial Sequence
  Synthetic
gaaggaggcaguauugggcaga

SEQ ID NO: 218241 - RNA, 23 nt, Artificial Sequence
  Synthetic
ugaaggaggcaguauugggcaga

SEQ ID NO: 218242 - RNA, 24 nt, Artificial Sequence
  Synthetic
gugaaggaggcaguauugggcaga

SEQ ID NO: 218243 - RNA, 18 nt, Artificial Sequence
  Synthetic
gaaggcuugcauggcaga

SEQ ID NO: 218244 - RNA, 19 nt, Artificial Sequence
  Synthetic
ugaaggcuugcauggcaga

SEQ ID NO: 218245 - RNA, 20 nt, Artificial Sequence
  Synthetic
cugaaggcuugcauggcaga

SEQ ID NO: 218246 - RNA, 21 nt, Artificial Sequence
  Synthetic
ucugaaggcuugcauggcaga

SEQ ID NO: 218247 - RNA, 22 nt, Artificial Sequence
  Synthetic
gucugaaggcuugcauggcaga

SEQ ID NO: 218248 - RNA, 23 nt, Artificial Sequence
  Synthetic
ggucugaaggcuugcauggcaga

SEQ ID NO: 218249 - RNA, 24 nt, Artificial Sequence
  Synthetic
gggucugaaggcuugcauggcaga

SEQ ID NO: 218250 - RNA, 18 nt, Artificial Sequence
  Synthetic
acuuacaaucauggcaga

SEQ ID NO: 218251 - RNA, 19 nt, Artificial Sequence
  Synthetic
aacuuacaaucauggcaga

SEQ ID NO: 218252 - RNA, 20 nt, Artificial Sequence
  Synthetic
aaacuuacaaucauggcaga

SEQ ID NO: 218253 - RNA, 21 nt, Artificial Sequence
  Synthetic
gaaacuuacaaucauggcaga

SEQ ID NO: 218254 - RNA, 22 nt, Artificial Sequence
  Synthetic
ggaaacuuacaaucauggcaga

SEQ ID NO: 218255 - RNA, 23 nt, Artificial Sequence
  Synthetic
aggaaacuuacaaucauggcaga

SEQ ID NO: 218256 - RNA, 24 nt, Artificial Sequence
  Synthetic
caggaaacuuacaaucauggcaga

SEQ ID NO: 218257 - RNA, 18 nt, Artificial Sequence
  Synthetic
accaaauaagguggcaga

SEQ ID NO: 218258 - RNA, 19 nt, Artificial Sequence
  Synthetic
aaccaaauaagguggcaga

SEQ ID NO: 218259 - RNA, 20 nt, Artificial Sequence
  Synthetic
aaaccaaauaagguggcaga

SEQ ID NO: 218260 - RNA, 21 nt, Artificial Sequence
  Synthetic
gaaaccaaauaagguggcaga

SEQ ID NO: 218261 - RNA, 22 nt, Artificial Sequence
  Synthetic
agaaaccaaauaagguggcaga

SEQ ID NO: 218262 - RNA, 23 nt, Artificial Sequence
  Synthetic
cagaaaccaaauaagguggcaga

SEQ ID NO: 218263 - RNA, 24 nt, Artificial Sequence
  Synthetic
acagaaaccaaauaagguggcaga

SEQ ID NO: 218264 - RNA, 18 nt, Artificial Sequence
  Synthetic
ucuagccuggguggcaga

SEQ ID NO: 218265 - RNA, 19 nt, Artificial Sequence
  Synthetic
cucuagccuggguggcaga

SEQ ID NO: 218266 - RNA, 20 nt, Artificial Sequence
  Synthetic
acucuagccuggguggcaga

SEQ ID NO: 218267 - RNA, 21 nt, Artificial Sequence
  Synthetic
cacucuagccuggguggcaga

SEQ ID NO: 218268 - RNA, 22 nt, Artificial Sequence
  Synthetic
gcacucuagccuggguggcaga

SEQ ID NO: 218269 - RNA, 23 nt, Artificial Sequence
  Synthetic
ugcacucuagccuggguggcaga

SEQ ID NO: 218270 - RNA, 24 nt, Artificial Sequence
  Synthetic
cugcacucuagccuggguggcaga

SEQ ID NO: 218271 - RNA, 18 nt, Artificial Sequence
  Synthetic
ucuucauaugguggcaga

SEQ ID NO: 218272 - RNA, 19 nt, Artificial Sequence
  Synthetic
uucuucauaugguggcaga

SEQ ID NO: 218273 - RNA, 20 nt, Artificial Sequence
  Synthetic
cuucuucauaugguggcaga

SEQ ID NO: 218274 - RNA, 21 nt, Artificial Sequence
  Synthetic
ccuucuucauaugguggcaga

SEQ ID NO: 218275 - RNA, 22 nt, Artificial Sequence
  Synthetic
uccuucuucauaugguggcaga

SEQ ID NO: 218276 - RNA, 23 nt, Artificial Sequence
  Synthetic
auccuucuucauaugguggcaga

SEQ ID NO: 218277 - RNA, 24 nt, Artificial Sequence
  Synthetic
cauccuucuucauaugguggcaga

SEQ ID NO: 218278 - RNA, 18 nt, Artificial Sequence
  Synthetic
gaaggcaacuguggcaga

SEQ ID NO: 218279 - RNA, 19 nt, Artificial Sequence
  Synthetic
agaaggcaacuguggcaga

SEQ ID NO: 218280 - RNA, 20 nt, Artificial Sequence
  Synthetic
aagaaggcaacuguggcaga

SEQ ID NO: 218281 - RNA, 21 nt, Artificial Sequence
  Synthetic
aaagaaggcaacuguggcaga

SEQ ID NO: 218282 - RNA, 22 nt, Artificial Sequence
  Synthetic
aaaagaaggcaacuguggcaga

SEQ ID NO: 218283 - RNA, 23 nt, Artificial Sequence
  Synthetic
gaaaagaaggcaacuguggcaga

SEQ ID NO: 218284 - RNA, 24 nt, Artificial Sequence
  Synthetic
ggaaaagaaggcaacuguggcaga

SEQ ID NO: 218285 - RNA, 18 nt, Artificial Sequence
  Synthetic
auggcuuugauuggcaga

SEQ ID NO: 218286 - RNA, 19 nt, Artificial Sequence
  Synthetic
gauggcuuugauuggcaga

SEQ ID NO: 218287 - RNA, 20 nt, Artificial Sequence
  Synthetic
ggauggcuuugauuggcaga

SEQ ID NO: 218288 - RNA, 21 nt, Artificial Sequence
  Synthetic
gggauggcuuugauuggcaga

SEQ ID NO: 218289 - RNA, 22 nt, Artificial Sequence
  Synthetic
ggggauggcuuugauuggcaga

SEQ ID NO: 218290 - RNA, 23 nt, Artificial Sequence
  Synthetic
aggggauggcuuugauuggcaga

SEQ ID NO: 218291 - RNA, 24 nt, Artificial Sequence
  Synthetic
caggggauggcuuugauuggcaga

SEQ ID NO: 218292 - RNA, 18 nt, Artificial Sequence
  Synthetic
ggcccagguauuggcaga

SEQ ID NO: 218293 - RNA, 19 nt, Artificial Sequence
  Synthetic
uggcccagguauuggcaga

SEQ ID NO: 218294 - RNA, 20 nt, Artificial Sequence
  Synthetic
uuggcccagguauuggcaga

SEQ ID NO: 218295 - RNA, 21 nt, Artificial Sequence
  Synthetic
auuggcccagguauuggcaga

SEQ ID NO: 218296 - RNA, 22 nt, Artificial Sequence
  Synthetic
aauuggcccagguauuggcaga

SEQ ID NO: 218297 - RNA, 23 nt, Artificial Sequence
  Synthetic
gaauuggcccagguauuggcaga

SEQ ID NO: 218298 - RNA, 24 nt, Artificial Sequence
  Synthetic
ugaauuggcccagguauuggcaga

SEQ ID NO: 218299 - RNA, 18 nt, Artificial Sequence
  Synthetic
uguuuuuaaaaaugcaga

SEQ ID NO: 218300 - RNA, 19 nt, Artificial Sequence
  Synthetic
auguuuuuaaaaaugcaga

SEQ ID NO: 218301 - RNA, 20 nt, Artificial Sequence
  Synthetic
gauguuuuuaaaaaugcaga

SEQ ID NO: 218302 - RNA, 21 nt, Artificial Sequence
  Synthetic
ugauguuuuuaaaaaugcaga

SEQ ID NO: 218303 - RNA, 22 nt, Artificial Sequence
  Synthetic
gugauguuuuuaaaaaugcaga

SEQ ID NO: 218304 - RNA, 23 nt, Artificial Sequence
  Synthetic
agugauguuuuuaaaaaugcaga

SEQ ID NO: 218305 - RNA, 24 nt, Artificial Sequence
  Synthetic
aagugauguuuuuaaaaaugcaga

SEQ ID NO: 218306 - RNA, 18 nt, Artificial Sequence
  Synthetic
aucugagguaaaugcaga

SEQ ID NO: 218307 - RNA, 19 nt, Artificial Sequence
  Synthetic
aaucugagguaaaugcaga

SEQ ID NO: 218308 - RNA, 20 nt, Artificial Sequence
  Synthetic
aaaucugagguaaaugcaga

SEQ ID NO: 218309 - RNA, 21 nt, Artificial Sequence
  Synthetic
uaaaucugagguaaaugcaga

SEQ ID NO: 218310 - RNA, 22 nt, Artificial Sequence
  Synthetic
guaaaucugagguaaaugcaga

SEQ ID NO: 218311 - RNA, 23 nt, Artificial Sequence
  Synthetic
aguaaaucugagguaaaugcaga

SEQ ID NO: 218312 - RNA, 24 nt, Artificial Sequence
  Synthetic
uaguaaaucugagguaaaugcaga

SEQ ID NO: 218313 - RNA, 18 nt, Artificial Sequence
  Synthetic
uccaccaguuaaugcaga

SEQ ID NO: 218314 - RNA, 19 nt, Artificial Sequence
  Synthetic
cuccaccaguuaaugcaga

SEQ ID NO: 218315 - RNA, 20 nt, Artificial Sequence
  Synthetic
ccuccaccaguuaaugcaga

SEQ ID NO: 218316 - RNA, 21 nt, Artificial Sequence
  Synthetic
cccuccaccaguuaaugcaga

SEQ ID NO: 218317 - RNA, 22 nt, Artificial Sequence
  Synthetic
acccuccaccaguuaaugcaga

SEQ ID NO: 218318 - RNA, 23 nt, Artificial Sequence
  Synthetic
uacccuccaccaguuaaugcaga

SEQ ID NO: 218319 - RNA, 24 nt, Artificial Sequence
  Synthetic
cuacccuccaccaguuaaugcaga

SEQ ID NO: 218320 - RNA, 18 nt, Artificial Sequence
  Synthetic
uucaugcaugcaugcaga

SEQ ID NO: 218321 - RNA, 19 nt, Artificial Sequence
  Synthetic
cuucaugcaugcaugcaga

SEQ ID NO: 218322 - RNA, 20 nt, Artificial Sequence
  Synthetic
acuucaugcaugcaugcaga

SEQ ID NO: 218323 - RNA, 21 nt, Artificial Sequence
  Synthetic
gacuucaugcaugcaugcaga

SEQ ID NO: 218324 - RNA, 22 nt, Artificial Sequence
  Synthetic
ugacuucaugcaugcaugcaga

SEQ ID NO: 218325 - RNA, 23 nt, Artificial Sequence
  Synthetic
cugacuucaugcaugcaugcaga

SEQ ID NO: 218326 - RNA, 24 nt, Artificial Sequence
  Synthetic
ccugacuucaugcaugcaugcaga

SEQ ID NO: 218327 - RNA, 18 nt, Artificial Sequence
  Synthetic
ccccuaagaucaugcaga

SEQ ID NO: 218328 - RNA, 19 nt, Artificial Sequence
  Synthetic
cccccuaagaucaugcaga

SEQ ID NO: 218329 - RNA, 20 nt, Artificial Sequence
  Synthetic
ucccccuaagaucaugcaga

SEQ ID NO: 218330 - RNA, 21 nt, Artificial Sequence
  Synthetic
gucccccuaagaucaugcaga

SEQ ID NO: 218331 - RNA, 22 nt, Artificial Sequence
  Synthetic
ggucccccuaagaucaugcaga

SEQ ID NO: 218332 - RNA, 23 nt, Artificial Sequence
  Synthetic
aggucccccuaagaucaugcaga

SEQ ID NO: 218333 - RNA, 24 nt, Artificial Sequence
  Synthetic
uaggucccccuaagaucaugcaga

SEQ ID NO: 218334 - RNA, 18 nt, Artificial Sequence
  Synthetic
cacauugcaggaugcaga

SEQ ID NO: 218335 - RNA, 19 nt, Artificial Sequence
  Synthetic
ucacauugcaggaugcaga

SEQ ID NO: 218336 - RNA, 20 nt, Artificial Sequence
  Synthetic
gucacauugcaggaugcaga

SEQ ID NO: 218337 - RNA, 21 nt, Artificial Sequence
  Synthetic
cgucacauugcaggaugcaga

SEQ ID NO: 218338 - RNA, 22 nt, Artificial Sequence
  Synthetic
ccgucacauugcaggaugcaga

SEQ ID NO: 218339 - RNA, 23 nt, Artificial Sequence
  Synthetic
cccgucacauugcaggaugcaga

SEQ ID NO: 218340 - RNA, 24 nt, Artificial Sequence
  Synthetic
ucccgucacauugcaggaugcaga

SEQ ID NO: 218341 - RNA, 18 nt, Artificial Sequence
  Synthetic
acaugagauauaugcaga

SEQ ID NO: 218342 - RNA, 19 nt, Artificial Sequence
  Synthetic
uacaugagauauaugcaga

SEQ ID NO: 218343 - RNA, 20 nt, Artificial Sequence
  Synthetic
guacaugagauauaugcaga

SEQ ID NO: 218344 - RNA, 21 nt, Artificial Sequence
  Synthetic
uguacaugagauauaugcaga

SEQ ID NO: 218345 - RNA, 22 nt, Artificial Sequence
  Synthetic
uuguacaugagauauaugcaga

SEQ ID NO: 218346 - RNA, 23 nt, Artificial Sequence
  Synthetic
auuguacaugagauauaugcaga

SEQ ID NO: 218347 - RNA, 24 nt, Artificial Sequence
  Synthetic
aauuguacaugagauauaugcaga

SEQ ID NO: 218348 - RNA, 18 nt, Artificial Sequence
  Synthetic
gacaaaaauaucugcaga

SEQ ID NO: 218349 - RNA, 19 nt, Artificial Sequence
  Synthetic
agacaaaaauaucugcaga

SEQ ID NO: 218350 - RNA, 20 nt, Artificial Sequence
  Synthetic
gagacaaaaauaucugcaga

SEQ ID NO: 218351 - RNA, 21 nt, Artificial Sequence
  Synthetic
agagacaaaaauaucugcaga

SEQ ID NO: 218352 - RNA, 22 nt, Artificial Sequence
  Synthetic
aagagacaaaaauaucugcaga

SEQ ID NO: 218353 - RNA, 23 nt, Artificial Sequence
  Synthetic
uaagagacaaaaauaucugcaga

SEQ ID NO: 218354 - RNA, 24 nt, Artificial Sequence
  Synthetic
auaagagacaaaaauaucugcaga

SEQ ID NO: 218355 - RNA, 18 nt, Artificial Sequence
  Synthetic
aacagaaaucucugcaga

SEQ ID NO: 218356 - RNA, 19 nt, Artificial Sequence
  Synthetic
aaacagaaaucucugcaga

SEQ ID NO: 218357 - RNA, 20 nt, Artificial Sequence
  Synthetic
gaaacagaaaucucugcaga

SEQ ID NO: 218358 - RNA, 21 nt, Artificial Sequence
  Synthetic
ugaaacagaaaucucugcaga

SEQ ID NO: 218359 - RNA, 22 nt, Artificial Sequence
  Synthetic
augaaacagaaaucucugcaga

SEQ ID NO: 218360 - RNA, 23 nt, Artificial Sequence
  Synthetic
aaugaaacagaaaucucugcaga

SEQ ID NO: 218361 - RNA, 24 nt, Artificial Sequence
  Synthetic
aaaugaaacagaaaucucugcaga

SEQ ID NO: 218362 - RNA, 18 nt, Artificial Sequence
  Synthetic
aggcaggaauucugcaga

SEQ ID NO: 218363 - RNA, 19 nt, Artificial Sequence
  Synthetic
gaggcaggaauucugcaga

SEQ ID NO: 218364 - RNA, 20 nt, Artificial Sequence
  Synthetic
agaggcaggaauucugcaga

SEQ ID NO: 218365 - RNA, 21 nt, Artificial Sequence
  Synthetic
aagaggcaggaauucugcaga

SEQ ID NO: 218366 - RNA, 22 nt, Artificial Sequence
  Synthetic
caagaggcaggaauucugcaga

SEQ ID NO: 218367 - RNA, 23 nt, Artificial Sequence
  Synthetic
ucaagaggcaggaauucugcaga

SEQ ID NO: 218368 - RNA, 24 nt, Artificial Sequence
  Synthetic
uucaagaggcaggaauucugcaga

SEQ ID NO: 218369 - RNA, 18 nt, Artificial Sequence
  Synthetic
cugcugggacagugcaga

SEQ ID NO: 218370 - RNA, 19 nt, Artificial Sequence
  Synthetic
ucugcugggacagugcaga

SEQ ID NO: 218371 - RNA, 20 nt, Artificial Sequence
  Synthetic
cucugcugggacagugcaga

SEQ ID NO: 218372 - RNA, 21 nt, Artificial Sequence
  Synthetic
ucucugcugggacagugcaga

SEQ ID NO: 218373 - RNA, 22 nt, Artificial Sequence
  Synthetic
cucucugcugggacagugcaga

SEQ ID NO: 218374 - RNA, 23 nt, Artificial Sequence
  Synthetic
ccucucugcugggacagugcaga

SEQ ID NO: 218375 - RNA, 24 nt, Artificial Sequence
  Synthetic
accucucugcugggacagugcaga

SEQ ID NO: 218376 - RNA, 18 nt, Artificial Sequence
  Synthetic
cugggacacacgugcaga

SEQ ID NO: 218377 - RNA, 19 nt, Artificial Sequence
  Synthetic
ucugggacacacgugcaga

SEQ ID NO: 218378 - RNA, 20 nt, Artificial Sequence
  Synthetic
uucugggacacacgugcaga

SEQ ID NO: 218379 - RNA, 21 nt, Artificial Sequence
  Synthetic
guucugggacacacgugcaga

SEQ ID NO: 218380 - RNA, 22 nt, Artificial Sequence
  Synthetic
aguucugggacacacgugcaga

SEQ ID NO: 218381 - RNA, 23 nt, Artificial Sequence
  Synthetic
aaguucugggacacacgugcaga

SEQ ID NO: 218382 - RNA, 24 nt, Artificial Sequence
  Synthetic
uaaguucugggacacacgugcaga

SEQ ID NO: 218383 - RNA, 18 nt, Artificial Sequence
  Synthetic
uugcuaauugauugcaga

SEQ ID NO: 218384 - RNA, 19 nt, Artificial Sequence
  Synthetic
guugcuaauugauugcaga

SEQ ID NO: 218385 - RNA, 20 nt, Artificial Sequence
  Synthetic
gguugcuaauugauugcaga

SEQ ID NO: 218386 - RNA, 21 nt, Artificial Sequence
  Synthetic
ugguugcuaauugauugcaga

SEQ ID NO: 218387 - RNA, 22 nt, Artificial Sequence
  Synthetic
augguugcuaauugauugcaga

SEQ ID NO: 218388 - RNA, 23 nt, Artificial Sequence
  Synthetic
gaugguugcuaauugauugcaga

SEQ ID NO: 218389 - RNA, 24 nt, Artificial Sequence
  Synthetic
agaugguugcuaauugauugcaga

SEQ ID NO: 218390 - RNA, 18 nt, Artificial Sequence
  Synthetic
aacagggaaauuugcaga

SEQ ID NO: 218391 - RNA, 19 nt, Artificial Sequence
  Synthetic
caacagggaaauuugcaga

SEQ ID NO: 218392 - RNA, 20 nt, Artificial Sequence
  Synthetic
gcaacagggaaauuugcaga

SEQ ID NO: 218393 - RNA, 21 nt, Artificial Sequence
  Synthetic
ggcaacagggaaauuugcaga

SEQ ID NO: 218394 - RNA, 22 nt, Artificial Sequence
  Synthetic
uggcaacagggaaauuugcaga

SEQ ID NO: 218395 - RNA, 23 nt, Artificial Sequence
  Synthetic
cuggcaacagggaaauuugcaga

SEQ ID NO: 218396 - RNA, 24 nt, Artificial Sequence
  Synthetic
ucuggcaacagggaaauuugcaga

SEQ ID NO: 218397 - RNA, 18 nt, Artificial Sequence
  Synthetic
agaaaagcuguuugcaga

SEQ ID NO: 218398 - RNA, 19 nt, Artificial Sequence
  Synthetic
gagaaaagcuguuugcaga

SEQ ID NO: 218399 - RNA, 20 nt, Artificial Sequence
  Synthetic
agagaaaagcuguuugcaga

SEQ ID NO: 218400 - RNA, 21 nt, Artificial Sequence
  Synthetic
uagagaaaagcuguuugcaga

SEQ ID NO: 218401 - RNA, 22 nt, Artificial Sequence
  Synthetic
guagagaaaagcuguuugcaga

SEQ ID NO: 218402 - RNA, 23 nt, Artificial Sequence
  Synthetic
gguagagaaaagcuguuugcaga

SEQ ID NO: 218403 - RNA, 24 nt, Artificial Sequence
  Synthetic
ggguagagaaaagcuguuugcaga

SEQ ID NO: 218404 - RNA, 18 nt, Artificial Sequence
  Synthetic
agugugaaaaaaaucaga

SEQ ID NO: 218405 - RNA, 19 nt, Artificial Sequence
  Synthetic
uagugugaaaaaaaucaga

SEQ ID NO: 218406 - RNA, 20 nt, Artificial Sequence
  Synthetic
uuagugugaaaaaaaucaga

SEQ ID NO: 218407 - RNA, 21 nt, Artificial Sequence
  Synthetic
auuagugugaaaaaaaucaga

SEQ ID NO: 218408 - RNA, 22 nt, Artificial Sequence
  Synthetic
aauuagugugaaaaaaaucaga

SEQ ID NO: 218409 - RNA, 23 nt, Artificial Sequence
  Synthetic
caauuagugugaaaaaaaucaga

SEQ ID NO: 218410 - RNA, 24 nt, Artificial Sequence
  Synthetic
acaauuagugugaaaaaaaucaga

SEQ ID NO: 218411 - RNA, 18 nt, Artificial Sequence
  Synthetic
uacagaaacgaaaucaga

SEQ ID NO: 218412 - RNA, 19 nt, Artificial Sequence
  Synthetic
uuacagaaacgaaaucaga

SEQ ID NO: 218413 - RNA, 20 nt, Artificial Sequence
  Synthetic
guuacagaaacgaaaucaga

SEQ ID NO: 218414 - RNA, 21 nt, Artificial Sequence
  Synthetic
uguuacagaaacgaaaucaga

SEQ ID NO: 218415 - RNA, 22 nt, Artificial Sequence
  Synthetic
cuguuacagaaacgaaaucaga

SEQ ID NO: 218416 - RNA, 23 nt, Artificial Sequence
  Synthetic
acuguuacagaaacgaaaucaga

SEQ ID NO: 218417 - RNA, 24 nt, Artificial Sequence
  Synthetic
aacuguuacagaaacgaaaucaga

SEQ ID NO: 218418 - RNA, 18 nt, Artificial Sequence
  Synthetic
auaaaaguugaaaucaga

SEQ ID NO: 218419 - RNA, 19 nt, Artificial Sequence
  Synthetic
aauaaaaguugaaaucaga

SEQ ID NO: 218420 - RNA, 20 nt, Artificial Sequence
  Synthetic
aaauaaaaguugaaaucaga

SEQ ID NO: 218421 - RNA, 21 nt, Artificial Sequence
  Synthetic
aaaauaaaaguugaaaucaga

SEQ ID NO: 218422 - RNA, 22 nt, Artificial Sequence
  Synthetic
aaaaauaaaaguugaaaucaga

SEQ ID NO: 218423 - RNA, 23 nt, Artificial Sequence
  Synthetic
caaaaauaaaaguugaaaucaga

SEQ ID NO: 218424 - RNA, 24 nt, Artificial Sequence
  Synthetic
ucaaaaauaaaaguugaaaucaga

SEQ ID NO: 218425 - RNA, 18 nt, Artificial Sequence
  Synthetic
agguaaucguaaaucaga

SEQ ID NO: 218426 - RNA, 19 nt, Artificial Sequence
  Synthetic
cagguaaucguaaaucaga

SEQ ID NO: 218427 - RNA, 20 nt, Artificial Sequence
  Synthetic
ucagguaaucguaaaucaga

SEQ ID NO: 218428 - RNA, 21 nt, Artificial Sequence
  Synthetic
uucagguaaucguaaaucaga

SEQ ID NO: 218429 - RNA, 22 nt, Artificial Sequence
  Synthetic
uuucagguaaucguaaaucaga

SEQ ID NO: 218430 - RNA, 23 nt, Artificial Sequence
  Synthetic
auuucagguaaucguaaaucaga

SEQ ID NO: 218431 - RNA, 24 nt, Artificial Sequence
  Synthetic
aauuucagguaaucguaaaucaga

SEQ ID NO: 218432 - RNA, 18 nt, Artificial Sequence
  Synthetic
agggaauuuuaaaucaga

SEQ ID NO: 218433 - RNA, 19 nt, Artificial Sequence
  Synthetic
aagggaauuuuaaaucaga

SEQ ID NO: 218434 - RNA, 20 nt, Artificial Sequence
  Synthetic
caagggaauuuuaaaucaga

SEQ ID NO: 218435 - RNA, 21 nt, Artificial Sequence
  Synthetic
ucaagggaauuuuaaaucaga

SEQ ID NO: 218436 - RNA, 22 nt, Artificial Sequence
  Synthetic
uucaagggaauuuuaaaucaga

SEQ ID NO: 218437 - RNA, 23 nt, Artificial Sequence
  Synthetic
auucaagggaauuuuaaaucaga

SEQ ID NO: 218438 - RNA, 24 nt, Artificial Sequence
  Synthetic
uauucaagggaauuuuaaaucaga

SEQ ID NO: 218439 - RNA, 18 nt, Artificial Sequence
  Synthetic
acuguacuuacaaucaga

SEQ ID NO: 218440 - RNA, 19 nt, Artificial Sequence
  Synthetic
gacuguacuuacaaucaga

SEQ ID NO: 218441 - RNA, 20 nt, Artificial Sequence
  Synthetic
ugacuguacuuacaaucaga

SEQ ID NO: 218442 - RNA, 21 nt, Artificial Sequence
  Synthetic
uugacuguacuuacaaucaga

SEQ ID NO: 218443 - RNA, 22 nt, Artificial Sequence
  Synthetic
guugacuguacuuacaaucaga

SEQ ID NO: 218444 - RNA, 23 nt, Artificial Sequence
  Synthetic
uguugacuguacuuacaaucaga

SEQ ID NO: 218445 - RNA, 24 nt, Artificial Sequence
  Synthetic
uuguugacuguacuuacaaucaga

SEQ ID NO: 218446 - RNA, 18 nt, Artificial Sequence
  Synthetic
uuauucugaagaaucaga

SEQ ID NO: 218447 - RNA, 19 nt, Artificial Sequence
  Synthetic
auuauucugaagaaucaga

SEQ ID NO: 218448 - RNA, 20 nt, Artificial Sequence
  Synthetic
aauuauucugaagaaucaga

SEQ ID NO: 218449 - RNA, 21 nt, Artificial Sequence
  Synthetic
aaauuauucugaagaaucaga

SEQ ID NO: 218450 - RNA, 22 nt, Artificial Sequence
  Synthetic
uaaauuauucugaagaaucaga

SEQ ID NO: 218451 - RNA, 23 nt, Artificial Sequence
  Synthetic
auaaauuauucugaagaaucaga

SEQ ID NO: 218452 - RNA, 24 nt, Artificial Sequence
  Synthetic
cauaaauuauucugaagaaucaga

SEQ ID NO: 218453 - RNA, 18 nt, Artificial Sequence
  Synthetic
gagaaacugagaaucaga

SEQ ID NO: 218454 - RNA, 19 nt, Artificial Sequence
  Synthetic
ugagaaacugagaaucaga

SEQ ID NO: 218455 - RNA, 20 nt, Artificial Sequence
  Synthetic
augagaaacugagaaucaga

SEQ ID NO: 218456 - RNA, 21 nt, Artificial Sequence
  Synthetic
gaugagaaacugagaaucaga

SEQ ID NO: 218457 - RNA, 22 nt, Artificial Sequence
  Synthetic
agaugagaaacugagaaucaga

SEQ ID NO: 218458 - RNA, 23 nt, Artificial Sequence
  Synthetic
cagaugagaaacugagaaucaga

SEQ ID NO: 218459 - RNA, 24 nt, Artificial Sequence
  Synthetic
gcagaugagaaacugagaaucaga

SEQ ID NO: 218460 - RNA, 18 nt, Artificial Sequence
  Synthetic
cuacagcuggacaucaga

SEQ ID NO: 218461 - RNA, 19 nt, Artificial Sequence
  Synthetic
acuacagcuggacaucaga

SEQ ID NO: 218462 - RNA, 20 nt, Artificial Sequence
  Synthetic
gacuacagcuggacaucaga

SEQ ID NO: 218463 - RNA, 21 nt, Artificial Sequence
  Synthetic
ggacuacagcuggacaucaga

SEQ ID NO: 218464 - RNA, 22 nt, Artificial Sequence
  Synthetic
aggacuacagcuggacaucaga

SEQ ID NO: 218465 - RNA, 23 nt, Artificial Sequence
  Synthetic
caggacuacagcuggacaucaga

SEQ ID NO: 218466 - RNA, 24 nt, Artificial Sequence
  Synthetic
acaggacuacagcuggacaucaga

SEQ ID NO: 218467 - RNA, 18 nt, Artificial Sequence
  Synthetic
aaagaaacuaccaucaga

SEQ ID NO: 218468 - RNA, 19 nt, Artificial Sequence
  Synthetic
aaaagaaacuaccaucaga

SEQ ID NO: 218469 - RNA, 20 nt, Artificial Sequence
  Synthetic
caaaagaaacuaccaucaga

SEQ ID NO: 218470 - RNA, 21 nt, Artificial Sequence
  Synthetic
gcaaaagaaacuaccaucaga

SEQ ID NO: 218471 - RNA, 22 nt, Artificial Sequence
  Synthetic
agcaaaagaaacuaccaucaga

SEQ ID NO: 218472 - RNA, 23 nt, Artificial Sequence
  Synthetic
cagcaaaagaaacuaccaucaga

SEQ ID NO: 218473 - RNA, 24 nt, Artificial Sequence
  Synthetic
acagcaaaagaaacuaccaucaga

SEQ ID NO: 218474 - RNA, 18 nt, Artificial Sequence
  Synthetic
aaagaaacuaucaucaga

SEQ ID NO: 218475 - RNA, 19 nt, Artificial Sequence
  Synthetic
aaaagaaacuaucaucaga

SEQ ID NO: 218476 - RNA, 20 nt, Artificial Sequence
  Synthetic
caaaagaaacuaucaucaga

SEQ ID NO: 218477 - RNA, 21 nt, Artificial Sequence
  Synthetic
gcaaaagaaacuaucaucaga

SEQ ID NO: 218478 - RNA, 22 nt, Artificial Sequence
  Synthetic
agcaaaagaaacuaucaucaga

SEQ ID NO: 218479 - RNA, 23 nt, Artificial Sequence
  Synthetic
cagcaaaagaaacuaucaucaga

SEQ ID NO: 218480 - RNA, 24 nt, Artificial Sequence
  Synthetic
acagcaaaagaaacuaucaucaga

SEQ ID NO: 218481 - RNA, 18 nt, Artificial Sequence
  Synthetic
cuucucacacucaucaga

SEQ ID NO: 218482 - RNA, 19 nt, Artificial Sequence
  Synthetic
acuucucacacucaucaga

SEQ ID NO: 218483 - RNA, 20 nt, Artificial Sequence
  Synthetic
cacuucucacacucaucaga

SEQ ID NO: 218484 - RNA, 21 nt, Artificial Sequence
  Synthetic
gcacuucucacacucaucaga

SEQ ID NO: 218485 - RNA, 22 nt, Artificial Sequence
  Synthetic
agcacuucucacacucaucaga

SEQ ID NO: 218486 - RNA, 23 nt, Artificial Sequence
  Synthetic
cagcacuucucacacucaucaga

SEQ ID NO: 218487 - RNA, 24 nt, Artificial Sequence
  Synthetic
ccagcacuucucacacucaucaga

SEQ ID NO: 218488 - RNA, 18 nt, Artificial Sequence
  Synthetic
gaauucaucaagaucaga

SEQ ID NO: 218489 - RNA, 19 nt, Artificial Sequence
  Synthetic
agaauucaucaagaucaga

SEQ ID NO: 218490 - RNA, 20 nt, Artificial Sequence
  Synthetic
aagaauucaucaagaucaga

SEQ ID NO: 218491 - RNA, 21 nt, Artificial Sequence
  Synthetic
aaagaauucaucaagaucaga

SEQ ID NO: 218492 - RNA, 22 nt, Artificial Sequence
  Synthetic
gaaagaauucaucaagaucaga

SEQ ID NO: 218493 - RNA, 23 nt, Artificial Sequence
  Synthetic
agaaagaauucaucaagaucaga

SEQ ID NO: 218494 - RNA, 24 nt, Artificial Sequence
  Synthetic
aagaaagaauucaucaagaucaga

SEQ ID NO: 218495 - RNA, 18 nt, Artificial Sequence
  Synthetic
uugugauuggagaucaga

SEQ ID NO: 218496 - RNA, 19 nt, Artificial Sequence
  Synthetic
guugugauuggagaucaga

SEQ ID NO: 218497 - RNA, 20 nt, Artificial Sequence
  Synthetic
aguugugauuggagaucaga

SEQ ID NO: 218498 - RNA, 21 nt, Artificial Sequence
  Synthetic
uaguugugauuggagaucaga

SEQ ID NO: 218499 - RNA, 22 nt, Artificial Sequence
  Synthetic
uuaguugugauuggagaucaga

SEQ ID NO: 218500 - RNA, 23 nt, Artificial Sequence
  Synthetic
uuuaguugugauuggagaucaga

SEQ ID NO: 218501 - RNA, 24 nt, Artificial Sequence
  Synthetic
guuuaguugugauuggagaucaga

SEQ ID NO: 218502 - RNA, 18 nt, Artificial Sequence
  Synthetic
acuguggcugggaucaga

SEQ ID NO: 218503 - RNA, 19 nt, Artificial Sequence
  Synthetic
gacuguggcugggaucaga

SEQ ID NO: 218504 - RNA, 20 nt, Artificial Sequence
  Synthetic
ugacuguggcugggaucaga

SEQ ID NO: 218505 - RNA, 21 nt, Artificial Sequence
  Synthetic
augacuguggcugggaucaga

SEQ ID NO: 218506 - RNA, 22 nt, Artificial Sequence
  Synthetic
gaugacuguggcugggaucaga

SEQ ID NO: 218507 - RNA, 23 nt, Artificial Sequence
  Synthetic
agaugacuguggcugggaucaga

SEQ ID NO: 218508 - RNA, 24 nt, Artificial Sequence
  Synthetic
gagaugacuguggcugggaucaga

SEQ ID NO: 218509 - RNA, 18 nt, Artificial Sequence
  Synthetic
gcagacugcuugaucaga

SEQ ID NO: 218510 - RNA, 19 nt, Artificial Sequence
  Synthetic
agcagacugcuugaucaga

SEQ ID NO: 218511 - RNA, 20 nt, Artificial Sequence
  Synthetic
aagcagacugcuugaucaga

SEQ ID NO: 218512 - RNA, 21 nt, Artificial Sequence
  Synthetic
uaagcagacugcuugaucaga

SEQ ID NO: 218513 - RNA, 22 nt, Artificial Sequence
  Synthetic
cuaagcagacugcuugaucaga

SEQ ID NO: 218514 - RNA, 23 nt, Artificial Sequence
  Synthetic
acuaagcagacugcuugaucaga

SEQ ID NO: 218515 - RNA, 24 nt, Artificial Sequence
  Synthetic
cacuaagcagacugcuugaucaga

SEQ ID NO: 218516 - RNA, 18 nt, Artificial Sequence
  Synthetic
gguaggagguugaucaga

SEQ ID NO: 218517 - RNA, 19 nt, Artificial Sequence
  Synthetic
ugguaggagguugaucaga

SEQ ID NO: 218518 - RNA, 20 nt, Artificial Sequence
  Synthetic
augguaggagguugaucaga

SEQ ID NO: 218519 - RNA, 21 nt, Artificial Sequence
  Synthetic
caugguaggagguugaucaga

SEQ ID NO: 218520 - RNA, 22 nt, Artificial Sequence
  Synthetic
acaugguaggagguugaucaga

SEQ ID NO: 218521 - RNA, 23 nt, Artificial Sequence
  Synthetic
aacaugguaggagguugaucaga

SEQ ID NO: 218522 - RNA, 24 nt, Artificial Sequence
  Synthetic
uaacaugguaggagguugaucaga

SEQ ID NO: 218523 - RNA, 18 nt, Artificial Sequence
  Synthetic
auaaccuuucauaucaga

SEQ ID NO: 218524 - RNA, 19 nt, Artificial Sequence
  Synthetic
aauaaccuuucauaucaga

SEQ ID NO: 218525 - RNA, 20 nt, Artificial Sequence
  Synthetic
aaauaaccuuucauaucaga

SEQ ID NO: 218526 - RNA, 21 nt, Artificial Sequence
  Synthetic
aaaauaaccuuucauaucaga

SEQ ID NO: 218527 - RNA, 22 nt, Artificial Sequence
  Synthetic
caaaauaaccuuucauaucaga

SEQ ID NO: 218528 - RNA, 23 nt, Artificial Sequence
  Synthetic
gcaaaauaaccuuucauaucaga

SEQ ID NO: 218529 - RNA, 24 nt, Artificial Sequence
  Synthetic
ggcaaaauaaccuuucauaucaga

SEQ ID NO: 218530 - RNA, 18 nt, Artificial Sequence
  Synthetic
uacaaugaauauaucaga

SEQ ID NO: 218531 - RNA, 19 nt, Artificial Sequence
  Synthetic
guacaaugaauauaucaga

SEQ ID NO: 218532 - RNA, 20 nt, Artificial Sequence
  Synthetic
aguacaaugaauauaucaga

SEQ ID NO: 218533 - RNA, 21 nt, Artificial Sequence
  Synthetic
uaguacaaugaauauaucaga

SEQ ID NO: 218534 - RNA, 22 nt, Artificial Sequence
  Synthetic
uuaguacaaugaauauaucaga

SEQ ID NO: 218535 - RNA, 23 nt, Artificial Sequence
  Synthetic
uuuaguacaaugaauauaucaga

SEQ ID NO: 218536 - RNA, 24 nt, Artificial Sequence
  Synthetic
uuuuaguacaaugaauauaucaga

SEQ ID NO: 218537 - RNA, 18 nt, Artificial Sequence
  Synthetic
cacaagaaaaguaucaga

SEQ ID NO: 218538 - RNA, 19 nt, Artificial Sequence
  Synthetic
ucacaagaaaaguaucaga

SEQ ID NO: 218539 - RNA, 20 nt, Artificial Sequence
  Synthetic
gucacaagaaaaguaucaga

SEQ ID NO: 218540 - RNA, 21 nt, Artificial Sequence
  Synthetic
ugucacaagaaaaguaucaga

SEQ ID NO: 218541 - RNA, 22 nt, Artificial Sequence
  Synthetic
augucacaagaaaaguaucaga

SEQ ID NO: 218542 - RNA, 23 nt, Artificial Sequence
  Synthetic
aaugucacaagaaaaguaucaga

SEQ ID NO: 218543 - RNA, 24 nt, Artificial Sequence
  Synthetic
aaaugucacaagaaaaguaucaga

SEQ ID NO: 218544 - RNA, 18 nt, Artificial Sequence
  Synthetic
ccauggaaucuuaucaga

SEQ ID NO: 218545 - RNA, 19 nt, Artificial Sequence
  Synthetic
gccauggaaucuuaucaga

SEQ ID NO: 218546 - RNA, 20 nt, Artificial Sequence
  Synthetic
agccauggaaucuuaucaga

SEQ ID NO: 218547 - RNA, 21 nt, Artificial Sequence
  Synthetic
aagccauggaaucuuaucaga

SEQ ID NO: 218548 - RNA, 22 nt, Artificial Sequence
  Synthetic
aaagccauggaaucuuaucaga

SEQ ID NO: 218549 - RNA, 23 nt, Artificial Sequence
  Synthetic
caaagccauggaaucuuaucaga

SEQ ID NO: 218550 - RNA, 24 nt, Artificial Sequence
  Synthetic
acaaagccauggaaucuuaucaga

SEQ ID NO: 218551 - RNA, 18 nt, Artificial Sequence
  Synthetic
aaaucuccuuaacucaga

SEQ ID NO: 218552 - RNA, 19 nt, Artificial Sequence
  Synthetic
uaaaucuccuuaacucaga

SEQ ID NO: 218553 - RNA, 20 nt, Artificial Sequence
  Synthetic
uuaaaucuccuuaacucaga

SEQ ID NO: 218554 - RNA, 21 nt, Artificial Sequence
  Synthetic
uuuaaaucuccuuaacucaga

SEQ ID NO: 218555 - RNA, 22 nt, Artificial Sequence
  Synthetic
uuuuaaaucuccuuaacucaga

SEQ ID NO: 218556 - RNA, 23 nt, Artificial Sequence
  Synthetic
cuuuuaaaucuccuuaacucaga

SEQ ID NO: 218557 - RNA, 24 nt, Artificial Sequence
  Synthetic
ucuuuuaaaucuccuuaacucaga

SEQ ID NO: 218558 - RNA, 18 nt, Artificial Sequence
  Synthetic
ggacuuugaagacucaga

SEQ ID NO: 218559 - RNA, 19 nt, Artificial Sequence
  Synthetic
uggacuuugaagacucaga

SEQ ID NO: 218560 - RNA, 20 nt, Artificial Sequence
  Synthetic
auggacuuugaagacucaga

SEQ ID NO: 218561 - RNA, 21 nt, Artificial Sequence
  Synthetic
aauggacuuugaagacucaga

SEQ ID NO: 218562 - RNA, 22 nt, Artificial Sequence
  Synthetic
gaauggacuuugaagacucaga

SEQ ID NO: 218563 - RNA, 23 nt, Artificial Sequence
  Synthetic
agaauggacuuugaagacucaga

SEQ ID NO: 218564 - RNA, 24 nt, Artificial Sequence
  Synthetic
uagaauggacuuugaagacucaga

SEQ ID NO: 218565 - RNA, 18 nt, Artificial Sequence
  Synthetic
caugccuuuggacucaga

SEQ ID NO: 218566 - RNA, 19 nt, Artificial Sequence
  Synthetic
ucaugccuuuggacucaga

SEQ ID NO: 218567 - RNA, 20 nt, Artificial Sequence
  Synthetic
cucaugccuuuggacucaga

SEQ ID NO: 218568 - RNA, 21 nt, Artificial Sequence
  Synthetic
ucucaugccuuuggacucaga

SEQ ID NO: 218569 - RNA, 22 nt, Artificial Sequence
  Synthetic
uucucaugccuuuggacucaga

SEQ ID NO: 218570 - RNA, 23 nt, Artificial Sequence
  Synthetic
guucucaugccuuuggacucaga

SEQ ID NO: 218571 - RNA, 24 nt, Artificial Sequence
  Synthetic
gguucucaugccuuuggacucaga

SEQ ID NO: 218572 - RNA, 18 nt, Artificial Sequence
  Synthetic
auuauacccauacucaga

SEQ ID NO: 218573 - RNA, 19 nt, Artificial Sequence
  Synthetic
uauuauacccauacucaga

SEQ ID NO: 218574 - RNA, 20 nt, Artificial Sequence
  Synthetic
uuauuauacccauacucaga

SEQ ID NO: 218575 - RNA, 21 nt, Artificial Sequence
  Synthetic
auuauuauacccauacucaga

SEQ ID NO: 218576 - RNA, 22 nt, Artificial Sequence
  Synthetic
uauuauuauacccauacucaga

SEQ ID NO: 218577 - RNA, 23 nt, Artificial Sequence
  Synthetic
guauuauuauacccauacucaga

SEQ ID NO: 218578 - RNA, 24 nt, Artificial Sequence
  Synthetic
uguauuauuauacccauacucaga

SEQ ID NO: 218579 - RNA, 18 nt, Artificial Sequence
  Synthetic
augauuggcuaccucaga

SEQ ID NO: 218580 - RNA, 19 nt, Artificial Sequence
  Synthetic
aaugauuggcuaccucaga

SEQ ID NO: 218581 - RNA, 20 nt, Artificial Sequence
  Synthetic
uaaugauuggcuaccucaga

SEQ ID NO: 218582 - RNA, 21 nt, Artificial Sequence
  Synthetic
uuaaugauuggcuaccucaga

SEQ ID NO: 218583 - RNA, 22 nt, Artificial Sequence
  Synthetic
auuaaugauuggcuaccucaga

SEQ ID NO: 218584 - RNA, 23 nt, Artificial Sequence
  Synthetic
aauuaaugauuggcuaccucaga

SEQ ID NO: 218585 - RNA, 24 nt, Artificial Sequence
  Synthetic
aaauuaaugauuggcuaccucaga

SEQ ID NO: 218586 - RNA, 18 nt, Artificial Sequence
  Synthetic
uugacaguugagcucaga

SEQ ID NO: 218587 - RNA, 19 nt, Artificial Sequence
  Synthetic
uuugacaguugagcucaga

SEQ ID NO: 218588 - RNA, 20 nt, Artificial Sequence
  Synthetic
cuuugacaguugagcucaga

SEQ ID NO: 218589 - RNA, 21 nt, Artificial Sequence
  Synthetic
ccuuugacaguugagcucaga

SEQ ID NO: 218590 - RNA, 22 nt, Artificial Sequence
  Synthetic
cccuuugacaguugagcucaga

SEQ ID NO: 218591 - RNA, 23 nt, Artificial Sequence
  Synthetic
ucccuuugacaguugagcucaga

SEQ ID NO: 218592 - RNA, 24 nt, Artificial Sequence
  Synthetic
gucccuuugacaguugagcucaga

SEQ ID NO: 218593 - RNA, 18 nt, Artificial Sequence
  Synthetic
ggcugugagcugcucaga

SEQ ID NO: 218594 - RNA, 19 nt, Artificial Sequence
  Synthetic
uggcugugagcugcucaga

SEQ ID NO: 218595 - RNA, 20 nt, Artificial Sequence
  Synthetic
cuggcugugagcugcucaga

SEQ ID NO: 218596 - RNA, 21 nt, Artificial Sequence
  Synthetic
gcuggcugugagcugcucaga

SEQ ID NO: 218597 - RNA, 22 nt, Artificial Sequence
  Synthetic
ggcuggcugugagcugcucaga

SEQ ID NO: 218598 - RNA, 23 nt, Artificial Sequence
  Synthetic
uggcuggcugugagcugcucaga

SEQ ID NO: 218599 - RNA, 24 nt, Artificial Sequence
  Synthetic
cuggcuggcugugagcugcucaga

SEQ ID NO: 218600 - RNA, 18 nt, Artificial Sequence
  Synthetic
aucagcucugugcucaga

SEQ ID NO: 218601 - RNA, 19 nt, Artificial Sequence
  Synthetic
aaucagcucugugcucaga

SEQ ID NO: 218602 - RNA, 20 nt, Artificial Sequence
  Synthetic
caaucagcucugugcucaga

SEQ ID NO: 218603 - RNA, 21 nt, Artificial Sequence
  Synthetic
ucaaucagcucugugcucaga

SEQ ID NO: 218604 - RNA, 22 nt, Artificial Sequence
  Synthetic
gucaaucagcucugugcucaga

SEQ ID NO: 218605 - RNA, 23 nt, Artificial Sequence
  Synthetic
agucaaucagcucugugcucaga

SEQ ID NO: 218606 - RNA, 24 nt, Artificial Sequence
  Synthetic
cagucaaucagcucugugcucaga

SEQ ID NO: 218607 - RNA, 18 nt, Artificial Sequence
  Synthetic
gcaucaucuuugcucaga

SEQ ID NO: 218608 - RNA, 19 nt, Artificial Sequence
  Synthetic
agcaucaucuuugcucaga

SEQ ID NO: 218609 - RNA, 20 nt, Artificial Sequence
  Synthetic
aagcaucaucuuugcucaga

SEQ ID NO: 218610 - RNA, 21 nt, Artificial Sequence
  Synthetic
aaagcaucaucuuugcucaga

SEQ ID NO: 218611 - RNA, 22 nt, Artificial Sequence
  Synthetic
uaaagcaucaucuuugcucaga

SEQ ID NO: 218612 - RNA, 23 nt, Artificial Sequence
  Synthetic
uuaaagcaucaucuuugcucaga

SEQ ID NO: 218613 - RNA, 24 nt, Artificial Sequence
  Synthetic
guuaaagcaucaucuuugcucaga

SEQ ID NO: 218614 - RNA, 18 nt, Artificial Sequence
  Synthetic
ccauuaucuaaucucaga

SEQ ID NO: 218615 - RNA, 19 nt, Artificial Sequence
  Synthetic
cccauuaucuaaucucaga

SEQ ID NO: 218616 - RNA, 20 nt, Artificial Sequence
  Synthetic
gcccauuaucuaaucucaga

SEQ ID NO: 218617 - RNA, 21 nt, Artificial Sequence
  Synthetic
agcccauuaucuaaucucaga

SEQ ID NO: 218618 - RNA, 22 nt, Artificial Sequence
  Synthetic
cagcccauuaucuaaucucaga

SEQ ID NO: 218619 - RNA, 23 nt, Artificial Sequence
  Synthetic
acagcccauuaucuaaucucaga

SEQ ID NO: 218620 - RNA, 24 nt, Artificial Sequence
  Synthetic
uacagcccauuaucuaaucucaga

SEQ ID NO: 218621 - RNA, 18 nt, Artificial Sequence
  Synthetic
ugguggagucaucucaga

SEQ ID NO: 218622 - RNA, 19 nt, Artificial Sequence
  Synthetic
gugguggagucaucucaga

SEQ ID NO: 218623 - RNA, 20 nt, Artificial Sequence
  Synthetic
ggugguggagucaucucaga

SEQ ID NO: 218624 - RNA, 21 nt, Artificial Sequence
  Synthetic
gggugguggagucaucucaga

SEQ ID NO: 218625 - RNA, 22 nt, Artificial Sequence
  Synthetic
agggugguggagucaucucaga

SEQ ID NO: 218626 - RNA, 23 nt, Artificial Sequence
  Synthetic
gagggugguggagucaucucaga

SEQ ID NO: 218627 - RNA, 24 nt, Artificial Sequence
  Synthetic
ggagggugguggagucaucucaga

SEQ ID NO: 218628 - RNA, 18 nt, Artificial Sequence
  Synthetic
uuacaaauagaucucaga

SEQ ID NO: 218629 - RNA, 19 nt, Artificial Sequence
  Synthetic
auuacaaauagaucucaga

SEQ ID NO: 218630 - RNA, 20 nt, Artificial Sequence
  Synthetic
gauuacaaauagaucucaga

SEQ ID NO: 218631 - RNA, 21 nt, Artificial Sequence
  Synthetic
ugauuacaaauagaucucaga

SEQ ID NO: 218632 - RNA, 22 nt, Artificial Sequence
  Synthetic
uugauuacaaauagaucucaga

SEQ ID NO: 218633 - RNA, 23 nt, Artificial Sequence
  Synthetic
uuugauuacaaauagaucucaga

SEQ ID NO: 218634 - RNA, 24 nt, Artificial Sequence
  Synthetic
auuugauuacaaauagaucucaga

SEQ ID NO: 218635 - RNA, 18 nt, Artificial Sequence
  Synthetic
cugaguccagcucucaga

SEQ ID NO: 218636 - RNA, 19 nt, Artificial Sequence
  Synthetic
gcugaguccagcucucaga

SEQ ID NO: 218637 - RNA, 20 nt, Artificial Sequence
  Synthetic
agcugaguccagcucucaga

SEQ ID NO: 218638 - RNA, 21 nt, Artificial Sequence
  Synthetic
uagcugaguccagcucucaga

SEQ ID NO: 218639 - RNA, 22 nt, Artificial Sequence
  Synthetic
uuagcugaguccagcucucaga

SEQ ID NO: 218640 - RNA, 23 nt, Artificial Sequence
  Synthetic
uuuagcugaguccagcucucaga

SEQ ID NO: 218641 - RNA, 24 nt, Artificial Sequence
  Synthetic
cuuuagcugaguccagcucucaga

SEQ ID NO: 218642 - RNA, 18 nt, Artificial Sequence
  Synthetic
gaaucaugaucucucaga

SEQ ID NO: 218643 - RNA, 19 nt, Artificial Sequence
  Synthetic
agaaucaugaucucucaga

SEQ ID NO: 218644 - RNA, 20 nt, Artificial Sequence
  Synthetic
cagaaucaugaucucucaga

SEQ ID NO: 218645 - RNA, 21 nt, Artificial Sequence
  Synthetic
acagaaucaugaucucucaga

SEQ ID NO: 218646 - RNA, 22 nt, Artificial Sequence
  Synthetic
uacagaaucaugaucucucaga

SEQ ID NO: 218647 - RNA, 23 nt, Artificial Sequence
  Synthetic
auacagaaucaugaucucucaga

SEQ ID NO: 218648 - RNA, 24 nt, Artificial Sequence
  Synthetic
cauacagaaucaugaucucucaga

SEQ ID NO: 218649 - RNA, 18 nt, Artificial Sequence
  Synthetic
ggcugagguggucucaga

SEQ ID NO: 218650 - RNA, 19 nt, Artificial Sequence
  Synthetic
aggcugagguggucucaga

SEQ ID NO: 218651 - RNA, 20 nt, Artificial Sequence
  Synthetic
caggcugagguggucucaga

SEQ ID NO: 218652 - RNA, 21 nt, Artificial Sequence
  Synthetic
ccaggcugagguggucucaga

SEQ ID NO: 218653 - RNA, 22 nt, Artificial Sequence
  Synthetic
uccaggcugagguggucucaga

SEQ ID NO: 218654 - RNA, 23 nt, Artificial Sequence
  Synthetic
guccaggcugagguggucucaga

SEQ ID NO: 218655 - RNA, 24 nt, Artificial Sequence
  Synthetic
aguccaggcugagguggucucaga

SEQ ID NO: 218656 - RNA, 18 nt, Artificial Sequence
  Synthetic
caaauauugauucucaga

SEQ ID NO: 218657 - RNA, 19 nt, Artificial Sequence
  Synthetic
ucaaauauugauucucaga

SEQ ID NO: 218658 - RNA, 20 nt, Artificial Sequence
  Synthetic
gucaaauauugauucucaga

SEQ ID NO: 218659 - RNA, 21 nt, Artificial Sequence
  Synthetic
agucaaauauugauucucaga

SEQ ID NO: 218660 - RNA, 22 nt, Artificial Sequence
  Synthetic
gagucaaauauugauucucaga

SEQ ID NO: 218661 - RNA, 23 nt, Artificial Sequence
  Synthetic
ggagucaaauauugauucucaga

SEQ ID NO: 218662 - RNA, 24 nt, Artificial Sequence
  Synthetic
gggagucaaauauugauucucaga

SEQ ID NO: 218663 - RNA, 18 nt, Artificial Sequence
  Synthetic
uuaggaacaaccgucaga

SEQ ID NO: 218664 - RNA, 19 nt, Artificial Sequence
  Synthetic
cuuaggaacaaccgucaga

SEQ ID NO: 218665 - RNA, 20 nt, Artificial Sequence
  Synthetic
gcuuaggaacaaccgucaga

SEQ ID NO: 218666 - RNA, 21 nt, Artificial Sequence
  Synthetic
agcuuaggaacaaccgucaga

SEQ ID NO: 218667 - RNA, 22 nt, Artificial Sequence
  Synthetic
aagcuuaggaacaaccgucaga

SEQ ID NO: 218668 - RNA, 23 nt, Artificial Sequence
  Synthetic
aaagcuuaggaacaaccgucaga

SEQ ID NO: 218669 - RNA, 24 nt, Artificial Sequence
  Synthetic
uaaagcuuaggaacaaccgucaga

SEQ ID NO: 218670 - RNA, 18 nt, Artificial Sequence
  Synthetic
uggaguuuagaggucaga

SEQ ID NO: 218671 - RNA, 19 nt, Artificial Sequence
  Synthetic
uuggaguuuagaggucaga

SEQ ID NO: 218672 - RNA, 20 nt, Artificial Sequence
  Synthetic
uuuggaguuuagaggucaga

SEQ ID NO: 218673 - RNA, 21 nt, Artificial Sequence
  Synthetic
cuuuggaguuuagaggucaga

SEQ ID NO: 218674 - RNA, 22 nt, Artificial Sequence
  Synthetic
acuuuggaguuuagaggucaga

SEQ ID NO: 218675 - RNA, 23 nt, Artificial Sequence
  Synthetic
cacuuuggaguuuagaggucaga

SEQ ID NO: 218676 - RNA, 24 nt, Artificial Sequence
  Synthetic
gcacuuuggaguuuagaggucaga

SEQ ID NO: 218677 - RNA, 18 nt, Artificial Sequence
  Synthetic
ugcauguguauggucaga

SEQ ID NO: 218678 - RNA, 19 nt, Artificial Sequence
  Synthetic
uugcauguguauggucaga

SEQ ID NO: 218679 - RNA, 20 nt, Artificial Sequence
  Synthetic
uuugcauguguauggucaga

SEQ ID NO: 218680 - RNA, 21 nt, Artificial Sequence
  Synthetic
uuuugcauguguauggucaga

SEQ ID NO: 218681 - RNA, 22 nt, Artificial Sequence
  Synthetic
uuuuugcauguguauggucaga

SEQ ID NO: 218682 - RNA, 23 nt, Artificial Sequence
  Synthetic
uuuuuugcauguguauggucaga

SEQ ID NO: 218683 - RNA, 24 nt, Artificial Sequence
  Synthetic
uuuuuuugcauguguauggucaga

SEQ ID NO: 218684 - RNA, 18 nt, Artificial Sequence
  Synthetic
cuugaaagcguggucaga

SEQ ID NO: 218685 - RNA, 19 nt, Artificial Sequence
  Synthetic
ucuugaaagcguggucaga

SEQ ID NO: 218686 - RNA, 20 nt, Artificial Sequence
  Synthetic
aucuugaaagcguggucaga

SEQ ID NO: 218687 - RNA, 21 nt, Artificial Sequence
  Synthetic
uaucuugaaagcguggucaga

SEQ ID NO: 218688 - RNA, 22 nt, Artificial Sequence
  Synthetic
uuaucuugaaagcguggucaga

SEQ ID NO: 218689 - RNA, 23 nt, Artificial Sequence
  Synthetic
cuuaucuugaaagcguggucaga

SEQ ID NO: 218690 - RNA, 24 nt, Artificial Sequence
  Synthetic
gcuuaucuugaaagcguggucaga

SEQ ID NO: 218691 - RNA, 18 nt, Artificial Sequence
  Synthetic
caagauaaaaaugucaga

SEQ ID NO: 218692 - RNA, 19 nt, Artificial Sequence
  Synthetic
ccaagauaaaaaugucaga

SEQ ID NO: 218693 - RNA, 20 nt, Artificial Sequence
  Synthetic
gccaagauaaaaaugucaga

SEQ ID NO: 218694 - RNA, 21 nt, Artificial Sequence
  Synthetic
agccaagauaaaaaugucaga

SEQ ID NO: 218695 - RNA, 22 nt, Artificial Sequence
  Synthetic
gagccaagauaaaaaugucaga

SEQ ID NO: 218696 - RNA, 23 nt, Artificial Sequence
  Synthetic
agagccaagauaaaaaugucaga

SEQ ID NO: 218697 - RNA, 24 nt, Artificial Sequence
  Synthetic
aagagccaagauaaaaaugucaga

SEQ ID NO: 218698 - RNA, 18 nt, Artificial Sequence
  Synthetic
cugcaaacagcugucaga

SEQ ID NO: 218699 - RNA, 19 nt, Artificial Sequence
  Synthetic
ucugcaaacagcugucaga

SEQ ID NO: 218700 - RNA, 20 nt, Artificial Sequence
  Synthetic
gucugcaaacagcugucaga

SEQ ID NO: 218701 - RNA, 21 nt, Artificial Sequence
  Synthetic
ggucugcaaacagcugucaga

SEQ ID NO: 218702 - RNA, 22 nt, Artificial Sequence
  Synthetic
aggucugcaaacagcugucaga

SEQ ID NO: 218703 - RNA, 23 nt, Artificial Sequence
  Synthetic
gaggucugcaaacagcugucaga

SEQ ID NO: 218704 - RNA, 24 nt, Artificial Sequence
  Synthetic
ggaggucugcaaacagcugucaga

SEQ ID NO: 218705 - RNA, 18 nt, Artificial Sequence
  Synthetic
agaaagcauggugucaga

SEQ ID NO: 218706 - RNA, 19 nt, Artificial Sequence
  Synthetic
uagaaagcauggugucaga

SEQ ID NO: 218707 - RNA, 20 nt, Artificial Sequence
  Synthetic
guagaaagcauggugucaga

SEQ ID NO: 218708 - RNA, 21 nt, Artificial Sequence
  Synthetic
gguagaaagcauggugucaga

SEQ ID NO: 218709 - RNA, 22 nt, Artificial Sequence
  Synthetic
ugguagaaagcauggugucaga

SEQ ID NO: 218710 - RNA, 23 nt, Artificial Sequence
  Synthetic
gugguagaaagcauggugucaga

SEQ ID NO: 218711 - RNA, 24 nt, Artificial Sequence
  Synthetic
ugugguagaaagcauggugucaga

SEQ ID NO: 218712 - RNA, 18 nt, Artificial Sequence
  Synthetic
caggaacuacaauucaga

SEQ ID NO: 218713 - RNA, 19 nt, Artificial Sequence
  Synthetic
acaggaacuacaauucaga

SEQ ID NO: 218714 - RNA, 20 nt, Artificial Sequence
  Synthetic
uacaggaacuacaauucaga

SEQ ID NO: 218715 - RNA, 21 nt, Artificial Sequence
  Synthetic
uuacaggaacuacaauucaga

SEQ ID NO: 218716 - RNA, 22 nt, Artificial Sequence
  Synthetic
auuacaggaacuacaauucaga

SEQ ID NO: 218717 - RNA, 23 nt, Artificial Sequence
  Synthetic
gauuacaggaacuacaauucaga

SEQ ID NO: 218718 - RNA, 24 nt, Artificial Sequence
  Synthetic
ggauuacaggaacuacaauucaga

SEQ ID NO: 218719 - RNA, 18 nt, Artificial Sequence
  Synthetic
uugucaauggaauucaga

SEQ ID NO: 218720 - RNA, 19 nt, Artificial Sequence
  Synthetic
auugucaauggaauucaga

SEQ ID NO: 218721 - RNA, 20 nt, Artificial Sequence
  Synthetic
cauugucaauggaauucaga

SEQ ID NO: 218722 - RNA, 21 nt, Artificial Sequence
  Synthetic
ccauugucaauggaauucaga

SEQ ID NO: 218723 - RNA, 22 nt, Artificial Sequence
  Synthetic
accauugucaauggaauucaga

SEQ ID NO: 218724 - RNA, 23 nt, Artificial Sequence
  Synthetic
caccauugucaauggaauucaga

SEQ ID NO: 218725 - RNA, 24 nt, Artificial Sequence
  Synthetic
acaccauugucaauggaauucaga

SEQ ID NO: 218726 - RNA, 18 nt, Artificial Sequence
  Synthetic
agggaaggguaauucaga

SEQ ID NO: 218727 - RNA, 19 nt, Artificial Sequence
  Synthetic
cagggaaggguaauucaga

SEQ ID NO: 218728 - RNA, 20 nt, Artificial Sequence
  Synthetic
gcagggaaggguaauucaga

SEQ ID NO: 218729 - RNA, 21 nt, Artificial Sequence
  Synthetic
agcagggaaggguaauucaga

SEQ ID NO: 218730 - RNA, 22 nt, Artificial Sequence
  Synthetic
aagcagggaaggguaauucaga

SEQ ID NO: 218731 - RNA, 23 nt, Artificial Sequence
  Synthetic
aaagcagggaaggguaauucaga

SEQ ID NO: 218732 - RNA, 24 nt, Artificial Sequence
  Synthetic
gaaagcagggaaggguaauucaga

SEQ ID NO: 218733 - RNA, 18 nt, Artificial Sequence
  Synthetic
acuugcuuugcauucaga

SEQ ID NO: 218734 - RNA, 19 nt, Artificial Sequence
  Synthetic
uacuugcuuugcauucaga

SEQ ID NO: 218735 - RNA, 20 nt, Artificial Sequence
  Synthetic
cuacuugcuuugcauucaga

SEQ ID NO: 218736 - RNA, 21 nt, Artificial Sequence
  Synthetic
gcuacuugcuuugcauucaga

SEQ ID NO: 218737 - RNA, 22 nt, Artificial Sequence
  Synthetic
agcuacuugcuuugcauucaga

SEQ ID NO: 218738 - RNA, 23 nt, Artificial Sequence
  Synthetic
gagcuacuugcuuugcauucaga

SEQ ID NO: 218739 - RNA, 24 nt, Artificial Sequence
  Synthetic
cgagcuacuugcuuugcauucaga

SEQ ID NO: 218740 - RNA, 18 nt, Artificial Sequence
  Synthetic
auacacaacagauucaga

SEQ ID NO: 218741 - RNA, 19 nt, Artificial Sequence
  Synthetic
uauacacaacagauucaga

SEQ ID NO: 218742 - RNA, 20 nt, Artificial Sequence
  Synthetic
guauacacaacagauucaga

SEQ ID NO: 218743 - RNA, 21 nt, Artificial Sequence
  Synthetic
aguauacacaacagauucaga

SEQ ID NO: 218744 - RNA, 22 nt, Artificial Sequence
  Synthetic
caguauacacaacagauucaga

SEQ ID NO: 218745 - RNA, 23 nt, Artificial Sequence
  Synthetic
acaguauacacaacagauucaga

SEQ ID NO: 218746 - RNA, 24 nt, Artificial Sequence
  Synthetic
cacaguauacacaacagauucaga

SEQ ID NO: 218747 - RNA, 18 nt, Artificial Sequence
  Synthetic
acccaaacuguauucaga

SEQ ID NO: 218748 - RNA, 19 nt, Artificial Sequence
  Synthetic
uacccaaacuguauucaga

SEQ ID NO: 218749 - RNA, 20 nt, Artificial Sequence
  Synthetic
uuacccaaacuguauucaga

SEQ ID NO: 218750 - RNA, 21 nt, Artificial Sequence
  Synthetic
auuacccaaacuguauucaga

SEQ ID NO: 218751 - RNA, 22 nt, Artificial Sequence
  Synthetic
uauuacccaaacuguauucaga

SEQ ID NO: 218752 - RNA, 23 nt, Artificial Sequence
  Synthetic
cuauuacccaaacuguauucaga

SEQ ID NO: 218753 - RNA, 24 nt, Artificial Sequence
  Synthetic
gcuauuacccaaacuguauucaga

SEQ ID NO: 218754 - RNA, 18 nt, Artificial Sequence
  Synthetic
aaaauuauucacuucaga

SEQ ID NO: 218755 - RNA, 19 nt, Artificial Sequence
  Synthetic
aaaaauuauucacuucaga

SEQ ID NO: 218756 - RNA, 20 nt, Artificial Sequence
  Synthetic
aaaaaauuauucacuucaga

SEQ ID NO: 218757 - RNA, 21 nt, Artificial Sequence
  Synthetic
uaaaaaauuauucacuucaga

SEQ ID NO: 218758 - RNA, 22 nt, Artificial Sequence
  Synthetic
uuaaaaaauuauucacuucaga

SEQ ID NO: 218759 - RNA, 23 nt, Artificial Sequence
  Synthetic
auuaaaaaauuauucacuucaga

SEQ ID NO: 218760 - RNA, 24 nt, Artificial Sequence
  Synthetic
aauuaaaaaauuauucacuucaga

SEQ ID NO: 218761 - RNA, 18 nt, Artificial Sequence
  Synthetic
uauaacuuuaccuucaga

SEQ ID NO: 218762 - RNA, 19 nt, Artificial Sequence
  Synthetic
auauaacuuuaccuucaga

SEQ ID NO: 218763 - RNA, 20 nt, Artificial Sequence
  Synthetic
aauauaacuuuaccuucaga

SEQ ID NO: 218764 - RNA, 21 nt, Artificial Sequence
  Synthetic
gaauauaacuuuaccuucaga

SEQ ID NO: 218765 - RNA, 22 nt, Artificial Sequence
  Synthetic
ugaauauaacuuuaccuucaga

SEQ ID NO: 218766 - RNA, 23 nt, Artificial Sequence
  Synthetic
uugaauauaacuuuaccuucaga

SEQ ID NO: 218767 - RNA, 24 nt, Artificial Sequence
  Synthetic
auugaauauaacuuuaccuucaga

SEQ ID NO: 218768 - RNA, 18 nt, Artificial Sequence
  Synthetic
uuagaaauuagcuucaga

SEQ ID NO: 218769 - RNA, 19 nt, Artificial Sequence
  Synthetic
uuuagaaauuagcuucaga

SEQ ID NO: 218770 - RNA, 20 nt, Artificial Sequence
  Synthetic
auuuagaaauuagcuucaga

SEQ ID NO: 218771 - RNA, 21 nt, Artificial Sequence
  Synthetic
aauuuagaaauuagcuucaga

SEQ ID NO: 218772 - RNA, 22 nt, Artificial Sequence
  Synthetic
aaauuuagaaauuagcuucaga

SEQ ID NO: 218773 - RNA, 23 nt, Artificial Sequence
  Synthetic
gaaauuuagaaauuagcuucaga

SEQ ID NO: 218774 - RNA, 24 nt, Artificial Sequence
  Synthetic
ugaaauuuagaaauuagcuucaga

SEQ ID NO: 218775 - RNA, 18 nt, Artificial Sequence
  Synthetic
cauauaugugaguucaga

SEQ ID NO: 218776 - RNA, 19 nt, Artificial Sequence
  Synthetic
ucauauaugugaguucaga

SEQ ID NO: 218777 - RNA, 20 nt, Artificial Sequence
  Synthetic
aucauauaugugaguucaga

SEQ ID NO: 218778 - RNA, 21 nt, Artificial Sequence
  Synthetic
aaucauauaugugaguucaga

SEQ ID NO: 218779 - RNA, 22 nt, Artificial Sequence
  Synthetic
aaaucauauaugugaguucaga

SEQ ID NO: 218780 - RNA, 23 nt, Artificial Sequence
  Synthetic
gaaaucauauaugugaguucaga

SEQ ID NO: 218781 - RNA, 24 nt, Artificial Sequence
  Synthetic
agaaaucauauaugugaguucaga

SEQ ID NO: 218782 - RNA, 18 nt, Artificial Sequence
  Synthetic
uugugaucaggguucaga

SEQ ID NO: 218783 - RNA, 19 nt, Artificial Sequence
  Synthetic
auugugaucaggguucaga

SEQ ID NO: 218784 - RNA, 20 nt, Artificial Sequence
  Synthetic
aauugugaucaggguucaga

SEQ ID NO: 218785 - RNA, 21 nt, Artificial Sequence
  Synthetic
aaauugugaucaggguucaga

SEQ ID NO: 218786 - RNA, 22 nt, Artificial Sequence
  Synthetic
caaauugugaucaggguucaga

SEQ ID NO: 218787 - RNA, 23 nt, Artificial Sequence
  Synthetic
gcaaauugugaucaggguucaga

SEQ ID NO: 218788 - RNA, 24 nt, Artificial Sequence
  Synthetic
ugcaaauugugaucaggguucaga

SEQ ID NO: 218789 - RNA, 18 nt, Artificial Sequence
  Synthetic
uguggagaaugguucaga

SEQ ID NO: 218790 - RNA, 19 nt, Artificial Sequence
  Synthetic
guguggagaaugguucaga

SEQ ID NO: 218791 - RNA, 20 nt, Artificial Sequence
  Synthetic
aguguggagaaugguucaga

SEQ ID NO: 218792 - RNA, 21 nt, Artificial Sequence
  Synthetic
aaguguggagaaugguucaga

SEQ ID NO: 218793 - RNA, 22 nt, Artificial Sequence
  Synthetic
gaaguguggagaaugguucaga

SEQ ID NO: 218794 - RNA, 23 nt, Artificial Sequence
  Synthetic
ugaaguguggagaaugguucaga

SEQ ID NO: 218795 - RNA, 24 nt, Artificial Sequence
  Synthetic
cugaaguguggagaaugguucaga

SEQ ID NO: 218796 - RNA, 18 nt, Artificial Sequence
  Synthetic
ugucuuucuuuguucaga

SEQ ID NO: 218797 - RNA, 19 nt, Artificial Sequence
  Synthetic
uugucuuucuuuguucaga

SEQ ID NO: 218798 - RNA, 20 nt, Artificial Sequence
  Synthetic
cuugucuuucuuuguucaga

SEQ ID NO: 218799 - RNA, 21 nt, Artificial Sequence
  Synthetic
ucuugucuuucuuuguucaga

SEQ ID NO: 218800 - RNA, 22 nt, Artificial Sequence
  Synthetic
aucuugucuuucuuuguucaga

SEQ ID NO: 218801 - RNA, 23 nt, Artificial Sequence
  Synthetic
gaucuugucuuucuuuguucaga

SEQ ID NO: 218802 - RNA, 24 nt, Artificial Sequence
  Synthetic
ggaucuugucuuucuuuguucaga

SEQ ID NO: 218803 - RNA, 18 nt, Artificial Sequence
  Synthetic
aagucuugacauuucaga

SEQ ID NO: 218804 - RNA, 19 nt, Artificial Sequence
  Synthetic
gaagucuugacauuucaga

SEQ ID NO: 218805 - RNA, 20 nt, Artificial Sequence
  Synthetic
cgaagucuugacauuucaga

SEQ ID NO: 218806 - RNA, 21 nt, Artificial Sequence
  Synthetic
acgaagucuugacauuucaga

SEQ ID NO: 218807 - RNA, 22 nt, Artificial Sequence
  Synthetic
aacgaagucuugacauuucaga

SEQ ID NO: 218808 - RNA, 23 nt, Artificial Sequence
  Synthetic
uaacgaagucuugacauuucaga

SEQ ID NO: 218809 - RNA, 24 nt, Artificial Sequence
  Synthetic
auaacgaagucuugacauuucaga

SEQ ID NO: 218810 - RNA, 18 nt, Artificial Sequence
  Synthetic
guugcuugaaguuucaga

SEQ ID NO: 218811 - RNA, 19 nt, Artificial Sequence
  Synthetic
gguugcuugaaguuucaga

SEQ ID NO: 218812 - RNA, 20 nt, Artificial Sequence
  Synthetic
ugguugcuugaaguuucaga

SEQ ID NO: 218813 - RNA, 21 nt, Artificial Sequence
  Synthetic
uugguugcuugaaguuucaga

SEQ ID NO: 218814 - RNA, 22 nt, Artificial Sequence
  Synthetic
auugguugcuugaaguuucaga

SEQ ID NO: 218815 - RNA, 23 nt, Artificial Sequence
  Synthetic
uauugguugcuugaaguuucaga

SEQ ID NO: 218816 - RNA, 24 nt, Artificial Sequence
  Synthetic
auauugguugcuugaaguuucaga

SEQ ID NO: 218817 - RNA, 18 nt, Artificial Sequence
  Synthetic
uuccuucuacuuuucaga

SEQ ID NO: 218818 - RNA, 19 nt, Artificial Sequence
  Synthetic
uuuccuucuacuuuucaga

SEQ ID NO: 218819 - RNA, 20 nt, Artificial Sequence
  Synthetic
guuuccuucuacuuuucaga

SEQ ID NO: 218820 - RNA, 21 nt, Artificial Sequence
  Synthetic
gguuuccuucuacuuuucaga

SEQ ID NO: 218821 - RNA, 22 nt, Artificial Sequence
  Synthetic
ugguuuccuucuacuuuucaga

SEQ ID NO: 218822 - RNA, 23 nt, Artificial Sequence
  Synthetic
uugguuuccuucuacuuuucaga

SEQ ID NO: 218823 - RNA, 24 nt, Artificial Sequence
  Synthetic
cuugguuuccuucuacuuuucaga

SEQ ID NO: 218824 - RNA, 18 nt, Artificial Sequence
  Synthetic
aaauguguccuuuucaga

SEQ ID NO: 218825 - RNA, 19 nt, Artificial Sequence
  Synthetic
uaaauguguccuuuucaga

SEQ ID NO: 218826 - RNA, 20 nt, Artificial Sequence
  Synthetic
auaaauguguccuuuucaga

SEQ ID NO: 218827 - RNA, 21 nt, Artificial Sequence
  Synthetic
aauaaauguguccuuuucaga

SEQ ID NO: 218828 - RNA, 22 nt, Artificial Sequence
  Synthetic
aaauaaauguguccuuuucaga

SEQ ID NO: 218829 - RNA, 23 nt, Artificial Sequence
  Synthetic
uaaauaaauguguccuuuucaga

SEQ ID NO: 218830 - RNA, 24 nt, Artificial Sequence
  Synthetic
cuaaauaaauguguccuuuucaga

SEQ ID NO: 218831 - RNA, 18 nt, Artificial Sequence
  Synthetic
gaaguauuaguuuucaga

SEQ ID NO: 218832 - RNA, 19 nt, Artificial Sequence
  Synthetic
agaaguauuaguuuucaga

SEQ ID NO: 218833 - RNA, 20 nt, Artificial Sequence
  Synthetic
cagaaguauuaguuuucaga

SEQ ID NO: 218834 - RNA, 21 nt, Artificial Sequence
  Synthetic
acagaaguauuaguuuucaga

SEQ ID NO: 218835 - RNA, 22 nt, Artificial Sequence
  Synthetic
gacagaaguauuaguuuucaga

SEQ ID NO: 218836 - RNA, 23 nt, Artificial Sequence
  Synthetic
ugacagaaguauuaguuuucaga

SEQ ID NO: 218837 - RNA, 24 nt, Artificial Sequence
  Synthetic
uugacagaaguauuaguuuucaga

SEQ ID NO: 218838 - RNA, 18 nt, Artificial Sequence
  Synthetic
uaauuaaaauuuuucaga

SEQ ID NO: 218839 - RNA, 19 nt, Artificial Sequence
  Synthetic
auaauuaaaauuuuucaga

SEQ ID NO: 218840 - RNA, 20 nt, Artificial Sequence
  Synthetic
uauaauuaaaauuuuucaga

SEQ ID NO: 218841 - RNA, 21 nt, Artificial Sequence
  Synthetic
auauaauuaaaauuuuucaga

SEQ ID NO: 218842 - RNA, 22 nt, Artificial Sequence
  Synthetic
cauauaauuaaaauuuuucaga

SEQ ID NO: 218843 - RNA, 23 nt, Artificial Sequence
  Synthetic
acauauaauuaaaauuuuucaga

SEQ ID NO: 218844 - RNA, 24 nt, Artificial Sequence
  Synthetic
cacauauaauuaaaauuuuucaga

SEQ ID NO: 218845 - RNA, 18 nt, Artificial Sequence
  Synthetic
cagagugaaaaaaagaga

SEQ ID NO: 218846 - RNA, 19 nt, Artificial Sequence
  Synthetic
ucagagugaaaaaaagaga

SEQ ID NO: 218847 - RNA, 20 nt, Artificial Sequence
  Synthetic
cucagagugaaaaaaagaga

SEQ ID NO: 218848 - RNA, 21 nt, Artificial Sequence
  Synthetic
gcucagagugaaaaaaagaga

SEQ ID NO: 218849 - RNA, 22 nt, Artificial Sequence
  Synthetic
agcucagagugaaaaaaagaga

SEQ ID NO: 218850 - RNA, 23 nt, Artificial Sequence
  Synthetic
gagcucagagugaaaaaaagaga

SEQ ID NO: 218851 - RNA, 24 nt, Artificial Sequence
  Synthetic
ugagcucagagugaaaaaaagaga

SEQ ID NO: 218852 - RNA, 18 nt, Artificial Sequence
  Synthetic
aaggaaagaaaaaagaga

SEQ ID NO: 218853 - RNA, 19 nt, Artificial Sequence
  Synthetic
gaaggaaagaaaaaagaga

SEQ ID NO: 218854 - RNA, 20 nt, Artificial Sequence
  Synthetic
ggaaggaaagaaaaaagaga

SEQ ID NO: 218855 - RNA, 21 nt, Artificial Sequence
  Synthetic
aggaaggaaagaaaaaagaga

SEQ ID NO: 218856 - RNA, 22 nt, Artificial Sequence
  Synthetic
aaggaaggaaagaaaaaagaga

SEQ ID NO: 218857 - RNA, 23 nt, Artificial Sequence
  Synthetic
gaaggaaggaaagaaaaaagaga

SEQ ID NO: 218858 - RNA, 24 nt, Artificial Sequence
  Synthetic
ggaaggaaggaaagaaaaaagaga

SEQ ID NO: 218859 - RNA, 18 nt, Artificial Sequence
  Synthetic
uuaaaaaugaaaaagaga

SEQ ID NO: 218860 - RNA, 19 nt, Artificial Sequence
  Synthetic
uuuaaaaaugaaaaagaga

SEQ ID NO: 218861 - RNA, 20 nt, Artificial Sequence
  Synthetic
guuuaaaaaugaaaaagaga

SEQ ID NO: 218862 - RNA, 21 nt, Artificial Sequence
  Synthetic
aguuuaaaaaugaaaaagaga

SEQ ID NO: 218863 - RNA, 22 nt, Artificial Sequence
  Synthetic
aaguuuaaaaaugaaaaagaga

SEQ ID NO: 218864 - RNA, 23 nt, Artificial Sequence
  Synthetic
gaaguuuaaaaaugaaaaagaga

SEQ ID NO: 218865 - RNA, 24 nt, Artificial Sequence
  Synthetic
ugaaguuuaaaaaugaaaaagaga

SEQ ID NO: 218866 - RNA, 18 nt, Artificial Sequence
  Synthetic
auauuagcuaaaaagaga

SEQ ID NO: 218867 - RNA, 19 nt, Artificial Sequence
  Synthetic
aauauuagcuaaaaagaga

SEQ ID NO: 218868 - RNA, 20 nt, Artificial Sequence
  Synthetic
caauauuagcuaaaaagaga

SEQ ID NO: 218869 - RNA, 21 nt, Artificial Sequence
  Synthetic
acaauauuagcuaaaaagaga

SEQ ID NO: 218870 - RNA, 22 nt, Artificial Sequence
  Synthetic
cacaauauuagcuaaaaagaga

SEQ ID NO: 218871 - RNA, 23 nt, Artificial Sequence
  Synthetic
ccacaauauuagcuaaaaagaga

SEQ ID NO: 218872 - RNA, 24 nt, Artificial Sequence
  Synthetic
gccacaauauuagcuaaaaagaga

SEQ ID NO: 218873 - RNA, 18 nt, Artificial Sequence
  Synthetic
uacaaauuuaaaaagaga

SEQ ID NO: 218874 - RNA, 19 nt, Artificial Sequence
  Synthetic
guacaaauuuaaaaagaga

SEQ ID NO: 218875 - RNA, 20 nt, Artificial Sequence
  Synthetic
gguacaaauuuaaaaagaga

SEQ ID NO: 218876 - RNA, 21 nt, Artificial Sequence
  Synthetic
ugguacaaauuuaaaaagaga

SEQ ID NO: 218877 - RNA, 22 nt, Artificial Sequence
  Synthetic
augguacaaauuuaaaaagaga

SEQ ID NO: 218878 - RNA, 23 nt, Artificial Sequence
  Synthetic
gaugguacaaauuuaaaaagaga

SEQ ID NO: 218879 - RNA, 24 nt, Artificial Sequence
  Synthetic
ugaugguacaaauuuaaaaagaga

SEQ ID NO: 218880 - RNA, 18 nt, Artificial Sequence
  Synthetic
aauggaaaccaaaagaga

SEQ ID NO: 218881 - RNA, 19 nt, Artificial Sequence
  Synthetic
aaauggaaaccaaaagaga

SEQ ID NO: 218882 - RNA, 20 nt, Artificial Sequence
  Synthetic
caaauggaaaccaaaagaga

SEQ ID NO: 218883 - RNA, 21 nt, Artificial Sequence
  Synthetic
gcaaauggaaaccaaaagaga

SEQ ID NO: 218884 - RNA, 22 nt, Artificial Sequence
  Synthetic
ugcaaauggaaaccaaaagaga

SEQ ID NO: 218885 - RNA, 23 nt, Artificial Sequence
  Synthetic
augcaaauggaaaccaaaagaga

SEQ ID NO: 218886 - RNA, 24 nt, Artificial Sequence
  Synthetic
caugcaaauggaaaccaaaagaga

SEQ ID NO: 218887 - RNA, 18 nt, Artificial Sequence
  Synthetic
aaugaugaugaaaagaga

SEQ ID NO: 218888 - RNA, 19 nt, Artificial Sequence
  Synthetic
aaaugaugaugaaaagaga

SEQ ID NO: 218889 - RNA, 20 nt, Artificial Sequence
  Synthetic
uaaaugaugaugaaaagaga

SEQ ID NO: 218890 - RNA, 21 nt, Artificial Sequence
  Synthetic
auaaaugaugaugaaaagaga

SEQ ID NO: 218891 - RNA, 22 nt, Artificial Sequence
  Synthetic
uauaaaugaugaugaaaagaga

SEQ ID NO: 218892 - RNA, 23 nt, Artificial Sequence
  Synthetic
guauaaaugaugaugaaaagaga

SEQ ID NO: 218893 - RNA, 24 nt, Artificial Sequence
  Synthetic
aguauaaaugaugaugaaaagaga

SEQ ID NO: 218894 - RNA, 18 nt, Artificial Sequence
  Synthetic
guguauaaauaaaagaga

SEQ ID NO: 218895 - RNA, 19 nt, Artificial Sequence
  Synthetic
aguguauaaauaaaagaga

SEQ ID NO: 218896 - RNA, 20 nt, Artificial Sequence
  Synthetic
caguguauaaauaaaagaga

SEQ ID NO: 218897 - RNA, 21 nt, Artificial Sequence
  Synthetic
ucaguguauaaauaaaagaga

SEQ ID NO: 218898 - RNA, 22 nt, Artificial Sequence
  Synthetic
aucaguguauaaauaaaagaga

SEQ ID NO: 218899 - RNA, 23 nt, Artificial Sequence
  Synthetic
caucaguguauaaauaaaagaga

SEQ ID NO: 218900 - RNA, 24 nt, Artificial Sequence
  Synthetic
ccaucaguguauaaauaaaagaga

SEQ ID NO: 218901 - RNA, 18 nt, Artificial Sequence
  Synthetic
gugccuuuguaaaagaga

SEQ ID NO: 218902 - RNA, 19 nt, Artificial Sequence
  Synthetic
ugugccuuuguaaaagaga

SEQ ID NO: 218903 - RNA, 20 nt, Artificial Sequence
  Synthetic
uugugccuuuguaaaagaga

SEQ ID NO: 218904 - RNA, 21 nt, Artificial Sequence
  Synthetic
uuugugccuuuguaaaagaga

SEQ ID NO: 218905 - RNA, 22 nt, Artificial Sequence
  Synthetic
uuuugugccuuuguaaaagaga

SEQ ID NO: 218906 - RNA, 23 nt, Artificial Sequence
  Synthetic
cuuuugugccuuuguaaaagaga

SEQ ID NO: 218907 - RNA, 24 nt, Artificial Sequence
  Synthetic
acuuuugugccuuuguaaaagaga

SEQ ID NO: 218908 - RNA, 18 nt, Artificial Sequence
  Synthetic
uuggaacacacaaagaga

SEQ ID NO: 218909 - RNA, 19 nt, Artificial Sequence
  Synthetic
guuggaacacacaaagaga

SEQ ID NO: 218910 - RNA, 20 nt, Artificial Sequence
  Synthetic
aguuggaacacacaaagaga

SEQ ID NO: 218911 - RNA, 21 nt, Artificial Sequence
  Synthetic
aaguuggaacacacaaagaga

SEQ ID NO: 218912 - RNA, 22 nt, Artificial Sequence
  Synthetic
gaaguuggaacacacaaagaga

SEQ ID NO: 218913 - RNA, 23 nt, Artificial Sequence
  Synthetic
agaaguuggaacacacaaagaga

SEQ ID NO: 218914 - RNA, 24 nt, Artificial Sequence
  Synthetic
aagaaguuggaacacacaaagaga

SEQ ID NO: 218915 - RNA, 18 nt, Artificial Sequence
  Synthetic
ugcuguuucacaaagaga

SEQ ID NO: 218916 - RNA, 19 nt, Artificial Sequence
  Synthetic
cugcuguuucacaaagaga

SEQ ID NO: 218917 - RNA, 20 nt, Artificial Sequence
  Synthetic
acugcuguuucacaaagaga

SEQ ID NO: 218918 - RNA, 21 nt, Artificial Sequence
  Synthetic
cacugcuguuucacaaagaga

SEQ ID NO: 218919 - RNA, 22 nt, Artificial Sequence
  Synthetic
ucacugcuguuucacaaagaga

SEQ ID NO: 218920 - RNA, 23 nt, Artificial Sequence
  Synthetic
aucacugcuguuucacaaagaga

SEQ ID NO: 218921 - RNA, 24 nt, Artificial Sequence
  Synthetic
caucacugcuguuucacaaagaga

SEQ ID NO: 218922 - RNA, 18 nt, Artificial Sequence
  Synthetic
cauggauggacaaagaga

SEQ ID NO: 218923 - RNA, 19 nt, Artificial Sequence
  Synthetic
ucauggauggacaaagaga

SEQ ID NO: 218924 - RNA, 20 nt, Artificial Sequence
  Synthetic
gucauggauggacaaagaga

SEQ ID NO: 218925 - RNA, 21 nt, Artificial Sequence
  Synthetic
ugucauggauggacaaagaga

SEQ ID NO: 218926 - RNA, 22 nt, Artificial Sequence
  Synthetic
cugucauggauggacaaagaga

SEQ ID NO: 218927 - RNA, 23 nt, Artificial Sequence
  Synthetic
ucugucauggauggacaaagaga

SEQ ID NO: 218928 - RNA, 24 nt, Artificial Sequence
  Synthetic
gucugucauggauggacaaagaga

SEQ ID NO: 218929 - RNA, 18 nt, Artificial Sequence
  Synthetic
uauucaacaccaaagaga

SEQ ID NO: 218930 - RNA, 19 nt, Artificial Sequence
  Synthetic
auauucaacaccaaagaga

SEQ ID NO: 218931 - RNA, 20 nt, Artificial Sequence
  Synthetic
cauauucaacaccaaagaga

SEQ ID NO: 218932 - RNA, 21 nt, Artificial Sequence
  Synthetic
acauauucaacaccaaagaga

SEQ ID NO: 218933 - RNA, 22 nt, Artificial Sequence
  Synthetic
cacauauucaacaccaaagaga

SEQ ID NO: 218934 - RNA, 23 nt, Artificial Sequence
  Synthetic
acacauauucaacaccaaagaga

SEQ ID NO: 218935 - RNA, 24 nt, Artificial Sequence
  Synthetic
cacacauauucaacaccaaagaga

SEQ ID NO: 218936 - RNA, 18 nt, Artificial Sequence
  Synthetic
uacaguuacccaaagaga

SEQ ID NO: 218937 - RNA, 19 nt, Artificial Sequence
  Synthetic
cuacaguuacccaaagaga

SEQ ID NO: 218938 - RNA, 20 nt, Artificial Sequence
  Synthetic
gcuacaguuacccaaagaga

SEQ ID NO: 218939 - RNA, 21 nt, Artificial Sequence
  Synthetic
ggcuacaguuacccaaagaga

SEQ ID NO: 218940 - RNA, 22 nt, Artificial Sequence
  Synthetic
aggcuacaguuacccaaagaga

SEQ ID NO: 218941 - RNA, 23 nt, Artificial Sequence
  Synthetic
aaggcuacaguuacccaaagaga

SEQ ID NO: 218942 - RNA, 24 nt, Artificial Sequence
  Synthetic
uaaggcuacaguuacccaaagaga

SEQ ID NO: 218943 - RNA, 18 nt, Artificial Sequence
  Synthetic
gucucccagucaaagaga

SEQ ID NO: 218944 - RNA, 19 nt, Artificial Sequence
  Synthetic
ugucucccagucaaagaga

SEQ ID NO: 218945 - RNA, 20 nt, Artificial Sequence
  Synthetic
cugucucccagucaaagaga

SEQ ID NO: 218946 - RNA, 21 nt, Artificial Sequence
  Synthetic
ccugucucccagucaaagaga

SEQ ID NO: 218947 - RNA, 22 nt, Artificial Sequence
  Synthetic
gccugucucccagucaaagaga

SEQ ID NO: 218948 - RNA, 23 nt, Artificial Sequence
  Synthetic
ugccugucucccagucaaagaga

SEQ ID NO: 218949 - RNA, 24 nt, Artificial Sequence
  Synthetic
cugccugucucccagucaaagaga

SEQ ID NO: 218950 - RNA, 18 nt, Artificial Sequence
  Synthetic
aaaauaaaaagaaagaga

SEQ ID NO: 218951 - RNA, 19 nt, Artificial Sequence
  Synthetic
aaaaauaaaaagaaagaga

SEQ ID NO: 218952 - RNA, 20 nt, Artificial Sequence
  Synthetic
aaaaaauaaaaagaaagaga

SEQ ID NO: 218953 - RNA, 21 nt, Artificial Sequence
  Synthetic
caaaaaauaaaaagaaagaga

SEQ ID NO: 218954 - RNA, 22 nt, Artificial Sequence
  Synthetic
ucaaaaaauaaaaagaaagaga

SEQ ID NO: 218955 - RNA, 23 nt, Artificial Sequence
  Synthetic
cucaaaaaauaaaaagaaagaga

SEQ ID NO: 218956 - RNA, 24 nt, Artificial Sequence
  Synthetic
ucucaaaaaauaaaaagaaagaga

SEQ ID NO: 218957 - RNA, 18 nt, Artificial Sequence
  Synthetic
aaguaaggaagaaagaga

SEQ ID NO: 218958 - RNA, 19 nt, Artificial Sequence
  Synthetic
gaaguaaggaagaaagaga

SEQ ID NO: 218959 - RNA, 20 nt, Artificial Sequence
  Synthetic
ggaaguaaggaagaaagaga

SEQ ID NO: 218960 - RNA, 21 nt, Artificial Sequence
  Synthetic
aggaaguaaggaagaaagaga

SEQ ID NO: 218961 - RNA, 22 nt, Artificial Sequence
  Synthetic
gaggaaguaaggaagaaagaga

SEQ ID NO: 218962 - RNA, 23 nt, Artificial Sequence
  Synthetic
ggaggaaguaaggaagaaagaga

SEQ ID NO: 218963 - RNA, 24 nt, Artificial Sequence
  Synthetic
gggaggaaguaaggaagaaagaga

SEQ ID NO: 218964 - RNA, 18 nt, Artificial Sequence
  Synthetic
uauaaggacagaaagaga

SEQ ID NO: 218965 - RNA, 19 nt, Artificial Sequence
  Synthetic
cuauaaggacagaaagaga

SEQ ID NO: 218966 - RNA, 20 nt, Artificial Sequence
  Synthetic
acuauaaggacagaaagaga

SEQ ID NO: 218967 - RNA, 21 nt, Artificial Sequence
  Synthetic
aacuauaaggacagaaagaga

SEQ ID NO: 218968 - RNA, 22 nt, Artificial Sequence
  Synthetic
gaacuauaaggacagaaagaga

SEQ ID NO: 218969 - RNA, 23 nt, Artificial Sequence
  Synthetic
agaacuauaaggacagaaagaga

SEQ ID NO: 218970 - RNA, 24 nt, Artificial Sequence
  Synthetic
gagaacuauaaggacagaaagaga

SEQ ID NO: 218971 - RNA, 18 nt, Artificial Sequence
  Synthetic
gagaaacagagaaagaga

SEQ ID NO: 218972 - RNA, 19 nt, Artificial Sequence
  Synthetic
agagaaacagagaaagaga

SEQ ID NO: 218973 - RNA, 20 nt, Artificial Sequence
  Synthetic
gagagaaacagagaaagaga

SEQ ID NO: 218974 - RNA, 21 nt, Artificial Sequence
  Synthetic
agagagaaacagagaaagaga

SEQ ID NO: 218975 - RNA, 22 nt, Artificial Sequence
  Synthetic
gagagagaaacagagaaagaga

SEQ ID NO: 218976 - RNA, 23 nt, Artificial Sequence
  Synthetic
agagagagaaacagagaaagaga

SEQ ID NO: 218977 - RNA, 24 nt, Artificial Sequence
  Synthetic
gagagagagaaacagagaaagaga

SEQ ID NO: 218978 - RNA, 18 nt, Artificial Sequence
  Synthetic
aggagguagagaaagaga

SEQ ID NO: 218979 - RNA, 19 nt, Artificial Sequence
  Synthetic
caggagguagagaaagaga

SEQ ID NO: 218980 - RNA, 20 nt, Artificial Sequence
  Synthetic
acaggagguagagaaagaga

SEQ ID NO: 218981 - RNA, 21 nt, Artificial Sequence
  Synthetic
aacaggagguagagaaagaga

SEQ ID NO: 218982 - RNA, 22 nt, Artificial Sequence
  Synthetic
aaacaggagguagagaaagaga

SEQ ID NO: 218983 - RNA, 23 nt, Artificial Sequence
  Synthetic
uaaacaggagguagagaaagaga

SEQ ID NO: 218984 - RNA, 24 nt, Artificial Sequence
  Synthetic
uuaaacaggagguagagaaagaga

SEQ ID NO: 218985 - RNA, 18 nt, Artificial Sequence
  Synthetic
acagagaagggaaagaga

SEQ ID NO: 218986 - RNA, 19 nt, Artificial Sequence
  Synthetic
aacagagaagggaaagaga

SEQ ID NO: 218987 - RNA, 20 nt, Artificial Sequence
  Synthetic
aaacagagaagggaaagaga

SEQ ID NO: 218988 - RNA, 21 nt, Artificial Sequence
  Synthetic
uaaacagagaagggaaagaga

SEQ ID NO: 218989 - RNA, 22 nt, Artificial Sequence
  Synthetic
guaaacagagaagggaaagaga

SEQ ID NO: 218990 - RNA, 23 nt, Artificial Sequence
  Synthetic
aguaaacagagaagggaaagaga

SEQ ID NO: 218991 - RNA, 24 nt, Artificial Sequence
  Synthetic
uaguaaacagagaagggaaagaga

SEQ ID NO: 218992 - RNA, 18 nt, Artificial Sequence
  Synthetic
gacaacaggggaaagaga

SEQ ID NO: 218993 - RNA, 19 nt, Artificial Sequence
  Synthetic
ggacaacaggggaaagaga

SEQ ID NO: 218994 - RNA, 20 nt, Artificial Sequence
  Synthetic
gggacaacaggggaaagaga

SEQ ID NO: 218995 - RNA, 21 nt, Artificial Sequence
  Synthetic
cgggacaacaggggaaagaga

SEQ ID NO: 218996 - RNA, 22 nt, Artificial Sequence
  Synthetic
ccgggacaacaggggaaagaga

SEQ ID NO: 218997 - RNA, 23 nt, Artificial Sequence
  Synthetic
uccgggacaacaggggaaagaga

SEQ ID NO: 218998 - RNA, 24 nt, Artificial Sequence
  Synthetic
guccgggacaacaggggaaagaga

SEQ ID NO: 218999 - RNA, 18 nt, Artificial Sequence
  Synthetic
ggggaggggggaaagaga

SEQ ID NO: 219000 - RNA, 19 nt, Artificial Sequence
  Synthetic
gggggaggggggaaagaga

SEQ ID NO: 219001 - RNA, 20 nt, Artificial Sequence
  Synthetic
ugggggaggggggaaagaga

SEQ ID NO: 219002 - RNA, 21 nt, Artificial Sequence
  Synthetic
gugggggaggggggaaagaga

SEQ ID NO: 219003 - RNA, 22 nt, Artificial Sequence
  Synthetic
agugggggaggggggaaagaga

SEQ ID NO: 219004 - RNA, 23 nt, Artificial Sequence
  Synthetic
aagugggggaggggggaaagaga

SEQ ID NO: 219005 - RNA, 24 nt, Artificial Sequence
  Synthetic
aaagugggggaggggggaaagaga

SEQ ID NO: 219006 - RNA, 18 nt, Artificial Sequence
  Synthetic
cugcgguacugaaagaga

SEQ ID NO: 219007 - RNA, 19 nt, Artificial Sequence
  Synthetic
ucugcgguacugaaagaga

SEQ ID NO: 219008 - RNA, 20 nt, Artificial Sequence
  Synthetic
cucugcgguacugaaagaga

SEQ ID NO: 219009 - RNA, 21 nt, Artificial Sequence
  Synthetic
ucucugcgguacugaaagaga

SEQ ID NO: 219010 - RNA, 22 nt, Artificial Sequence
  Synthetic
uucucugcgguacugaaagaga

SEQ ID NO: 219011 - RNA, 23 nt, Artificial Sequence
  Synthetic
uuucucugcgguacugaaagaga

SEQ ID NO: 219012 - RNA, 24 nt, Artificial Sequence
  Synthetic
uuuucucugcgguacugaaagaga

SEQ ID NO: 219013 - RNA, 18 nt, Artificial Sequence
  Synthetic
uauuaaucuugaaagaga

SEQ ID NO: 219014 - RNA, 19 nt, Artificial Sequence
  Synthetic
auauuaaucuugaaagaga

SEQ ID NO: 219015 - RNA, 20 nt, Artificial Sequence
  Synthetic
cauauuaaucuugaaagaga

SEQ ID NO: 219016 - RNA, 21 nt, Artificial Sequence
  Synthetic
ucauauuaaucuugaaagaga

SEQ ID NO: 219017 - RNA, 22 nt, Artificial Sequence
  Synthetic
gucauauuaaucuugaaagaga

SEQ ID NO: 219018 - RNA, 23 nt, Artificial Sequence
  Synthetic
agucauauuaaucuugaaagaga

SEQ ID NO: 219019 - RNA, 24 nt, Artificial Sequence
  Synthetic
cagucauauuaaucuugaaagaga

SEQ ID NO: 219020 - RNA, 18 nt, Artificial Sequence
  Synthetic
agaguaucaauaaagaga

SEQ ID NO: 219021 - RNA, 19 nt, Artificial Sequence
  Synthetic
gagaguaucaauaaagaga

SEQ ID NO: 219022 - RNA, 20 nt, Artificial Sequence
  Synthetic
agagaguaucaauaaagaga

SEQ ID NO: 219023 - RNA, 21 nt, Artificial Sequence
  Synthetic
uagagaguaucaauaaagaga

SEQ ID NO: 219024 - RNA, 22 nt, Artificial Sequence
  Synthetic
auagagaguaucaauaaagaga

SEQ ID NO: 219025 - RNA, 23 nt, Artificial Sequence
  Synthetic
aauagagaguaucaauaaagaga

SEQ ID NO: 219026 - RNA, 24 nt, Artificial Sequence
  Synthetic
aaauagagaguaucaauaaagaga

SEQ ID NO: 219027 - RNA, 18 nt, Artificial Sequence
  Synthetic
ugauccuguguaaagaga

SEQ ID NO: 219028 - RNA, 19 nt, Artificial Sequence
  Synthetic
cugauccuguguaaagaga

SEQ ID NO: 219029 - RNA, 20 nt, Artificial Sequence
  Synthetic
acugauccuguguaaagaga

SEQ ID NO: 219030 - RNA, 21 nt, Artificial Sequence
  Synthetic
gacugauccuguguaaagaga

SEQ ID NO: 219031 - RNA, 22 nt, Artificial Sequence
  Synthetic
ugacugauccuguguaaagaga

SEQ ID NO: 219032 - RNA, 23 nt, Artificial Sequence
  Synthetic
uugacugauccuguguaaagaga

SEQ ID NO: 219033 - RNA, 24 nt, Artificial Sequence
  Synthetic
uuugacugauccuguguaaagaga

SEQ ID NO: 219034 - RNA, 18 nt, Artificial Sequence
  Synthetic
uguggcauauuaaagaga

SEQ ID NO: 219035 - RNA, 19 nt, Artificial Sequence
  Synthetic
cuguggcauauuaaagaga

SEQ ID NO: 219036 - RNA, 20 nt, Artificial Sequence
  Synthetic
ccuguggcauauuaaagaga

SEQ ID NO: 219037 - RNA, 21 nt, Artificial Sequence
  Synthetic
uccuguggcauauuaaagaga

SEQ ID NO: 219038 - RNA, 22 nt, Artificial Sequence
  Synthetic
uuccuguggcauauuaaagaga

SEQ ID NO: 219039 - RNA, 23 nt, Artificial Sequence
  Synthetic
cuuccuguggcauauuaaagaga

SEQ ID NO: 219040 - RNA, 24 nt, Artificial Sequence
  Synthetic
ccuuccuguggcauauuaaagaga

SEQ ID NO: 219041 - RNA, 18 nt, Artificial Sequence
  Synthetic
gagagcauaaacaagaga

SEQ ID NO: 219042 - RNA, 19 nt, Artificial Sequence
  Synthetic
agagagcauaaacaagaga

SEQ ID NO: 219043 - RNA, 20 nt, Artificial Sequence
  Synthetic
uagagagcauaaacaagaga

SEQ ID NO: 219044 - RNA, 21 nt, Artificial Sequence
  Synthetic
uuagagagcauaaacaagaga

SEQ ID NO: 219045 - RNA, 22 nt, Artificial Sequence
  Synthetic
guuagagagcauaaacaagaga

SEQ ID NO: 219046 - RNA, 23 nt, Artificial Sequence
  Synthetic
gguuagagagcauaaacaagaga

SEQ ID NO: 219047 - RNA, 24 nt, Artificial Sequence
  Synthetic
ugguuagagagcauaaacaagaga

SEQ ID NO: 219048 - RNA, 18 nt, Artificial Sequence
  Synthetic
ggagaggugaacaagaga

SEQ ID NO: 219049 - RNA, 19 nt, Artificial Sequence
  Synthetic
gggagaggugaacaagaga

SEQ ID NO: 219050 - RNA, 20 nt, Artificial Sequence
  Synthetic
agggagaggugaacaagaga

SEQ ID NO: 219051 - RNA, 21 nt, Artificial Sequence
  Synthetic
gagggagaggugaacaagaga

SEQ ID NO: 219052 - RNA, 22 nt, Artificial Sequence
  Synthetic
agagggagaggugaacaagaga

SEQ ID NO: 219053 - RNA, 23 nt, Artificial Sequence
  Synthetic
uagagggagaggugaacaagaga

SEQ ID NO: 219054 - RNA, 24 nt, Artificial Sequence
  Synthetic
cuagagggagaggugaacaagaga

SEQ ID NO: 219055 - RNA, 18 nt, Artificial Sequence
  Synthetic
cuuuagucauccaagaga

SEQ ID NO: 219056 - RNA, 19 nt, Artificial Sequence
  Synthetic
ccuuuagucauccaagaga

SEQ ID NO: 219057 - RNA, 20 nt, Artificial Sequence
  Synthetic
uccuuuagucauccaagaga

SEQ ID NO: 219058 - RNA, 21 nt, Artificial Sequence
  Synthetic
guccuuuagucauccaagaga

SEQ ID NO: 219059 - RNA, 22 nt, Artificial Sequence
  Synthetic
aguccuuuagucauccaagaga

SEQ ID NO: 219060 - RNA, 23 nt, Artificial Sequence
  Synthetic
aaguccuuuagucauccaagaga

SEQ ID NO: 219061 - RNA, 24 nt, Artificial Sequence
  Synthetic
aaaguccuuuagucauccaagaga

SEQ ID NO: 219062 - RNA, 18 nt, Artificial Sequence
  Synthetic
ccuaaaagcagcaagaga

SEQ ID NO: 219063 - RNA, 19 nt, Artificial Sequence
  Synthetic
uccuaaaagcagcaagaga

SEQ ID NO: 219064 - RNA, 20 nt, Artificial Sequence
  Synthetic
auccuaaaagcagcaagaga

SEQ ID NO: 219065 - RNA, 21 nt, Artificial Sequence
  Synthetic
aauccuaaaagcagcaagaga

SEQ ID NO: 219066 - RNA, 22 nt, Artificial Sequence
  Synthetic
gaauccuaaaagcagcaagaga

SEQ ID NO: 219067 - RNA, 23 nt, Artificial Sequence
  Synthetic
agaauccuaaaagcagcaagaga

SEQ ID NO: 219068 - RNA, 24 nt, Artificial Sequence
  Synthetic
aagaauccuaaaagcagcaagaga

SEQ ID NO: 219069 - RNA, 18 nt, Artificial Sequence
  Synthetic
ugugcaagaugcaagaga

SEQ ID NO: 219070 - RNA, 19 nt, Artificial Sequence
  Synthetic
augugcaagaugcaagaga

SEQ ID NO: 219071 - RNA, 20 nt, Artificial Sequence
  Synthetic
caugugcaagaugcaagaga

SEQ ID NO: 219072 - RNA, 21 nt, Artificial Sequence
  Synthetic
acaugugcaagaugcaagaga

SEQ ID NO: 219073 - RNA, 22 nt, Artificial Sequence
  Synthetic
gacaugugcaagaugcaagaga

SEQ ID NO: 219074 - RNA, 23 nt, Artificial Sequence
  Synthetic
ggacaugugcaagaugcaagaga

SEQ ID NO: 219075 - RNA, 24 nt, Artificial Sequence
  Synthetic
aggacaugugcaagaugcaagaga

SEQ ID NO: 219076 - RNA, 18 nt, Artificial Sequence
  Synthetic
guaaaguuaaucaagaga

SEQ ID NO: 219077 - RNA, 19 nt, Artificial Sequence
  Synthetic
aguaaaguuaaucaagaga

SEQ ID NO: 219078 - RNA, 20 nt, Artificial Sequence
  Synthetic
aaguaaaguuaaucaagaga

SEQ ID NO: 219079 - RNA, 21 nt, Artificial Sequence
  Synthetic
aaaguaaaguuaaucaagaga

SEQ ID NO: 219080 - RNA, 22 nt, Artificial Sequence
  Synthetic
aaaaguaaaguuaaucaagaga

SEQ ID NO: 219081 - RNA, 23 nt, Artificial Sequence
  Synthetic
caaaaguaaaguuaaucaagaga

SEQ ID NO: 219082 - RNA, 24 nt, Artificial Sequence
  Synthetic
ucaaaaguaaaguuaaucaagaga

SEQ ID NO: 219083 - RNA, 18 nt, Artificial Sequence
  Synthetic
guaccagaccucaagaga

SEQ ID NO: 219084 - RNA, 19 nt, Artificial Sequence
  Synthetic
aguaccagaccucaagaga

SEQ ID NO: 219085 - RNA, 20 nt, Artificial Sequence
  Synthetic
uaguaccagaccucaagaga

SEQ ID NO: 219086 - RNA, 21 nt, Artificial Sequence
  Synthetic
uuaguaccagaccucaagaga

SEQ ID NO: 219087 - RNA, 22 nt, Artificial Sequence
  Synthetic
uuuaguaccagaccucaagaga

SEQ ID NO: 219088 - RNA, 23 nt, Artificial Sequence
  Synthetic
auuuaguaccagaccucaagaga

SEQ ID NO: 219089 - RNA, 24 nt, Artificial Sequence
  Synthetic
aauuuaguaccagaccucaagaga

SEQ ID NO: 219090 - RNA, 18 nt, Artificial Sequence
  Synthetic
gaucacgaggucaagaga

SEQ ID NO: 219091 - RNA, 19 nt, Artificial Sequence
  Synthetic
ggaucacgaggucaagaga

SEQ ID NO: 219092 - RNA, 20 nt, Artificial Sequence
  Synthetic
cggaucacgaggucaagaga

SEQ ID NO: 219093 - RNA, 21 nt, Artificial Sequence
  Synthetic
gcggaucacgaggucaagaga

SEQ ID NO: 219094 - RNA, 22 nt, Artificial Sequence
  Synthetic
ggcggaucacgaggucaagaga

SEQ ID NO: 219095 - RNA, 23 nt, Artificial Sequence
  Synthetic
gggcggaucacgaggucaagaga

SEQ ID NO: 219096 - RNA, 24 nt, Artificial Sequence
  Synthetic
cgggcggaucacgaggucaagaga

SEQ ID NO: 219097 - RNA, 20 nt, Artificial Sequence
  Synthetic
uggaucacgaggucaagaga

SEQ ID NO: 219098 - RNA, 21 nt, Artificial Sequence
  Synthetic
guggaucacgaggucaagaga

SEQ ID NO: 219099 - RNA, 22 nt, Artificial Sequence
  Synthetic
gguggaucacgaggucaagaga

SEQ ID NO: 219100 - RNA, 23 nt, Artificial Sequence
  Synthetic
agguggaucacgaggucaagaga

SEQ ID NO: 219101 - RNA, 24 nt, Artificial Sequence
  Synthetic
cagguggaucacgaggucaagaga

SEQ ID NO: 219102 - RNA, 18 nt, Artificial Sequence
  Synthetic
gaucaugaggucaagaga

SEQ ID NO: 219103 - RNA, 19 nt, Artificial Sequence
  Synthetic
ggaucaugaggucaagaga

SEQ ID NO: 219104 - RNA, 20 nt, Artificial Sequence
  Synthetic
cggaucaugaggucaagaga

SEQ ID NO: 219105 - RNA, 21 nt, Artificial Sequence
  Synthetic
gcggaucaugaggucaagaga

SEQ ID NO: 219106 - RNA, 22 nt, Artificial Sequence
  Synthetic
ggcggaucaugaggucaagaga

SEQ ID NO: 219107 - RNA, 23 nt, Artificial Sequence
  Synthetic
gggcggaucaugaggucaagaga

SEQ ID NO: 219108 - RNA, 24 nt, Artificial Sequence
  Synthetic
cgggcggaucaugaggucaagaga

SEQ ID NO: 219109 - RNA, 18 nt, Artificial Sequence
  Synthetic
gaucacauggucaagaga

SEQ ID NO: 219110 - RNA, 19 nt, Artificial Sequence
  Synthetic
ggaucacauggucaagaga

SEQ ID NO: 219111 - RNA, 20 nt, Artificial Sequence
  Synthetic
cggaucacauggucaagaga

SEQ ID NO: 219112 - RNA, 21 nt, Artificial Sequence
  Synthetic
gcggaucacauggucaagaga

SEQ ID NO: 219113 - RNA, 22 nt, Artificial Sequence
  Synthetic
ggcggaucacauggucaagaga

SEQ ID NO: 219114 - RNA, 23 nt, Artificial Sequence
  Synthetic
gggcggaucacauggucaagaga

SEQ ID NO: 219115 - RNA, 24 nt, Artificial Sequence
  Synthetic
cgggcggaucacauggucaagaga

SEQ ID NO: 219116 - RNA, 18 nt, Artificial Sequence
  Synthetic
auaaggcagaagaagaga

SEQ ID NO: 219117 - RNA, 19 nt, Artificial Sequence
  Synthetic
cauaaggcagaagaagaga

SEQ ID NO: 219118 - RNA, 20 nt, Artificial Sequence
  Synthetic
gcauaaggcagaagaagaga

SEQ ID NO: 219119 - RNA, 21 nt, Artificial Sequence
  Synthetic
ggcauaaggcagaagaagaga

SEQ ID NO: 219120 - RNA, 22 nt, Artificial Sequence
  Synthetic
aggcauaaggcagaagaagaga

SEQ ID NO: 219121 - RNA, 23 nt, Artificial Sequence
  Synthetic
gaggcauaaggcagaagaagaga

SEQ ID NO: 219122 - RNA, 24 nt, Artificial Sequence
  Synthetic
ggaggcauaaggcagaagaagaga

SEQ ID NO: 219123 - RNA, 18 nt, Artificial Sequence
  Synthetic
agcuggaggaagaagaga

SEQ ID NO: 219124 - RNA, 19 nt, Artificial Sequence
  Synthetic
gagcuggaggaagaagaga

SEQ ID NO: 219125 - RNA, 20 nt, Artificial Sequence
  Synthetic
ggagcuggaggaagaagaga

SEQ ID NO: 219126 - RNA, 21 nt, Artificial Sequence
  Synthetic
aggagcuggaggaagaagaga

SEQ ID NO: 219127 - RNA, 22 nt, Artificial Sequence
  Synthetic
caggagcuggaggaagaagaga

SEQ ID NO: 219128 - RNA, 23 nt, Artificial Sequence
  Synthetic
ccaggagcuggaggaagaagaga

SEQ ID NO: 219129 - RNA, 24 nt, Artificial Sequence
  Synthetic
accaggagcuggaggaagaagaga

SEQ ID NO: 219130 - RNA, 18 nt, Artificial Sequence
  Synthetic
ccuacaagccagaagaga

SEQ ID NO: 219131 - RNA, 19 nt, Artificial Sequence
  Synthetic
cccuacaagccagaagaga

SEQ ID NO: 219132 - RNA, 20 nt, Artificial Sequence
  Synthetic
acccuacaagccagaagaga

SEQ ID NO: 219133 - RNA, 21 nt, Artificial Sequence
  Synthetic
aacccuacaagccagaagaga

SEQ ID NO: 219134 - RNA, 22 nt, Artificial Sequence
  Synthetic
aaacccuacaagccagaagaga

SEQ ID NO: 219135 - RNA, 23 nt, Artificial Sequence
  Synthetic
gaaacccuacaagccagaagaga

SEQ ID NO: 219136 - RNA, 24 nt, Artificial Sequence
  Synthetic
agaaacccuacaagccagaagaga

SEQ ID NO: 219137 - RNA, 18 nt, Artificial Sequence
  Synthetic
uuacaccaugagaagaga

SEQ ID NO: 219138 - RNA, 19 nt, Artificial Sequence
  Synthetic
cuuacaccaugagaagaga

SEQ ID NO: 219139 - RNA, 20 nt, Artificial Sequence
  Synthetic
acuuacaccaugagaagaga

SEQ ID NO: 219140 - RNA, 21 nt, Artificial Sequence
  Synthetic
uacuuacaccaugagaagaga

SEQ ID NO: 219141 - RNA, 22 nt, Artificial Sequence
  Synthetic
auacuuacaccaugagaagaga

SEQ ID NO: 219142 - RNA, 23 nt, Artificial Sequence
  Synthetic
gauacuuacaccaugagaagaga

SEQ ID NO: 219143 - RNA, 24 nt, Artificial Sequence
  Synthetic
agauacuuacaccaugagaagaga

SEQ ID NO: 219144 - RNA, 18 nt, Artificial Sequence
  Synthetic
uccaaaaaauagaagaga

SEQ ID NO: 219145 - RNA, 19 nt, Artificial Sequence
  Synthetic
uuccaaaaaauagaagaga

SEQ ID NO: 219146 - RNA, 20 nt, Artificial Sequence
  Synthetic
cuuccaaaaaauagaagaga

SEQ ID NO: 219147 - RNA, 21 nt, Artificial Sequence
  Synthetic
ucuuccaaaaaauagaagaga

SEQ ID NO: 219148 - RNA, 22 nt, Artificial Sequence
  Synthetic
cucuuccaaaaaauagaagaga

SEQ ID NO: 219149 - RNA, 23 nt, Artificial Sequence
  Synthetic
acucuuccaaaaaauagaagaga

SEQ ID NO: 219150 - RNA, 24 nt, Artificial Sequence
  Synthetic
aacucuuccaaaaaauagaagaga

SEQ ID NO: 219151 - RNA, 18 nt, Artificial Sequence
  Synthetic
ugacugaaauagaagaga

SEQ ID NO: 219152 - RNA, 19 nt, Artificial Sequence
  Synthetic
uugacugaaauagaagaga

SEQ ID NO: 219153 - RNA, 20 nt, Artificial Sequence
  Synthetic
guugacugaaauagaagaga

SEQ ID NO: 219154 - RNA, 21 nt, Artificial Sequence
  Synthetic
uguugacugaaauagaagaga

SEQ ID NO: 219155 - RNA, 22 nt, Artificial Sequence
  Synthetic
auguugacugaaauagaagaga

SEQ ID NO: 219156 - RNA, 23 nt, Artificial Sequence
  Synthetic
cauguugacugaaauagaagaga

SEQ ID NO: 219157 - RNA, 24 nt, Artificial Sequence
  Synthetic
acauguugacugaaauagaagaga

SEQ ID NO: 219158 - RNA, 18 nt, Artificial Sequence
  Synthetic
uucaacagauagaagaga

SEQ ID NO: 219159 - RNA, 19 nt, Artificial Sequence
  Synthetic
uuucaacagauagaagaga

SEQ ID NO: 219160 - RNA, 20 nt, Artificial Sequence
  Synthetic
uuuucaacagauagaagaga

SEQ ID NO: 219161 - RNA, 21 nt, Artificial Sequence
  Synthetic
auuuucaacagauagaagaga

SEQ ID NO: 219162 - RNA, 22 nt, Artificial Sequence
  Synthetic
gauuuucaacagauagaagaga

SEQ ID NO: 219163 - RNA, 23 nt, Artificial Sequence
  Synthetic
agauuuucaacagauagaagaga

SEQ ID NO: 219164 - RNA, 24 nt, Artificial Sequence
  Synthetic
aagauuuucaacagauagaagaga

SEQ ID NO: 219165 - RNA, 18 nt, Artificial Sequence
  Synthetic
gacucugcaaggaagaga

SEQ ID NO: 219166 - RNA, 19 nt, Artificial Sequence
  Synthetic
ugacucugcaaggaagaga

SEQ ID NO: 219167 - RNA, 20 nt, Artificial Sequence
  Synthetic
cugacucugcaaggaagaga

SEQ ID NO: 219168 - RNA, 21 nt, Artificial Sequence
  Synthetic
ucugacucugcaaggaagaga

SEQ ID NO: 219169 - RNA, 22 nt, Artificial Sequence
  Synthetic
uucugacucugcaaggaagaga

SEQ ID NO: 219170 - RNA, 23 nt, Artificial Sequence
  Synthetic
auucugacucugcaaggaagaga

SEQ ID NO: 219171 - RNA, 24 nt, Artificial Sequence
  Synthetic
aauucugacucugcaaggaagaga

SEQ ID NO: 219172 - RNA, 18 nt, Artificial Sequence
  Synthetic
cauagaagauggaagaga

SEQ ID NO: 219173 - RNA, 19 nt, Artificial Sequence
  Synthetic
ucauagaagauggaagaga

SEQ ID NO: 219174 - RNA, 20 nt, Artificial Sequence
  Synthetic
cucauagaagauggaagaga

SEQ ID NO: 219175 - RNA, 21 nt, Artificial Sequence
  Synthetic
ucucauagaagauggaagaga

SEQ ID NO: 219176 - RNA, 22 nt, Artificial Sequence
  Synthetic
uucucauagaagauggaagaga

SEQ ID NO: 219177 - RNA, 23 nt, Artificial Sequence
  Synthetic
cuucucauagaagauggaagaga

SEQ ID NO: 219178 - RNA, 24 nt, Artificial Sequence
  Synthetic
acuucucauagaagauggaagaga

SEQ ID NO: 219179 - RNA, 18 nt, Artificial Sequence
  Synthetic
agcauuucuuggaagaga

SEQ ID NO: 219180 - RNA, 19 nt, Artificial Sequence
  Synthetic
cagcauuucuuggaagaga

SEQ ID NO: 219181 - RNA, 20 nt, Artificial Sequence
  Synthetic
gcagcauuucuuggaagaga

SEQ ID NO: 219182 - RNA, 21 nt, Artificial Sequence
  Synthetic
ggcagcauuucuuggaagaga

SEQ ID NO: 219183 - RNA, 22 nt, Artificial Sequence
  Synthetic
gggcagcauuucuuggaagaga

SEQ ID NO: 219184 - RNA, 23 nt, Artificial Sequence
  Synthetic
agggcagcauuucuuggaagaga

SEQ ID NO: 219185 - RNA, 24 nt, Artificial Sequence
  Synthetic
cagggcagcauuucuuggaagaga

SEQ ID NO: 219186 - RNA, 18 nt, Artificial Sequence
  Synthetic
uuguggacuaugaagaga

SEQ ID NO: 219187 - RNA, 19 nt, Artificial Sequence
  Synthetic
guuguggacuaugaagaga

SEQ ID NO: 219188 - RNA, 20 nt, Artificial Sequence
  Synthetic
uguuguggacuaugaagaga

SEQ ID NO: 219189 - RNA, 21 nt, Artificial Sequence
  Synthetic
guguuguggacuaugaagaga

SEQ ID NO: 219190 - RNA, 22 nt, Artificial Sequence
  Synthetic
aguguuguggacuaugaagaga

SEQ ID NO: 219191 - RNA, 23 nt, Artificial Sequence
  Synthetic
aaguguuguggacuaugaagaga

SEQ ID NO: 219192 - RNA, 24 nt, Artificial Sequence
  Synthetic
gaaguguuguggacuaugaagaga

SEQ ID NO: 219193 - RNA, 18 nt, Artificial Sequence
  Synthetic
agcuacaagcugaagaga

SEQ ID NO: 219194 - RNA, 19 nt, Artificial Sequence
  Synthetic
aagcuacaagcugaagaga

SEQ ID NO: 219195 - RNA, 20 nt, Artificial Sequence
  Synthetic
uaagcuacaagcugaagaga

SEQ ID NO: 219196 - RNA, 21 nt, Artificial Sequence
  Synthetic
uuaagcuacaagcugaagaga

SEQ ID NO: 219197 - RNA, 22 nt, Artificial Sequence
  Synthetic
uuuaagcuacaagcugaagaga

SEQ ID NO: 219198 - RNA, 23 nt, Artificial Sequence
  Synthetic
uuuuaagcuacaagcugaagaga

SEQ ID NO: 219199 - RNA, 24 nt, Artificial Sequence
  Synthetic
cuuuuaagcuacaagcugaagaga

SEQ ID NO: 219200 - RNA, 18 nt, Artificial Sequence
  Synthetic
caccuaaaucugaagaga

SEQ ID NO: 219201 - RNA, 19 nt, Artificial Sequence
  Synthetic
acaccuaaaucugaagaga

SEQ ID NO: 219202 - RNA, 20 nt, Artificial Sequence
  Synthetic
gacaccuaaaucugaagaga

SEQ ID NO: 219203 - RNA, 21 nt, Artificial Sequence
  Synthetic
ggacaccuaaaucugaagaga

SEQ ID NO: 219204 - RNA, 22 nt, Artificial Sequence
  Synthetic
gggacaccuaaaucugaagaga

SEQ ID NO: 219205 - RNA, 23 nt, Artificial Sequence
  Synthetic
agggacaccuaaaucugaagaga

SEQ ID NO: 219206 - RNA, 24 nt, Artificial Sequence
  Synthetic
gagggacaccuaaaucugaagaga

SEQ ID NO: 219207 - RNA, 18 nt, Artificial Sequence
  Synthetic
gaacacagauugaagaga

SEQ ID NO: 219208 - RNA, 19 nt, Artificial Sequence
  Synthetic
ggaacacagauugaagaga

SEQ ID NO: 219209 - RNA, 20 nt, Artificial Sequence
  Synthetic
gggaacacagauugaagaga

SEQ ID NO: 219210 - RNA, 21 nt, Artificial Sequence
  Synthetic
agggaacacagauugaagaga

SEQ ID NO: 219211 - RNA, 22 nt, Artificial Sequence
  Synthetic
cagggaacacagauugaagaga

SEQ ID NO: 219212 - RNA, 23 nt, Artificial Sequence
  Synthetic
ucagggaacacagauugaagaga

SEQ ID NO: 219213 - RNA, 24 nt, Artificial Sequence
  Synthetic
cucagggaacacagauugaagaga

SEQ ID NO: 219214 - RNA, 18 nt, Artificial Sequence
  Synthetic
aauguuguauauaagaga

SEQ ID NO: 219215 - RNA, 19 nt, Artificial Sequence
  Synthetic
caauguuguauauaagaga

SEQ ID NO: 219216 - RNA, 20 nt, Artificial Sequence
  Synthetic
acaauguuguauauaagaga

SEQ ID NO: 219217 - RNA, 21 nt, Artificial Sequence
  Synthetic
uacaauguuguauauaagaga

SEQ ID NO: 219218 - RNA, 22 nt, Artificial Sequence
  Synthetic
auacaauguuguauauaagaga

SEQ ID NO: 219219 - RNA, 23 nt, Artificial Sequence
  Synthetic
cauacaauguuguauauaagaga

SEQ ID NO: 219220 - RNA, 24 nt, Artificial Sequence
  Synthetic
acauacaauguuguauauaagaga

SEQ ID NO: 219221 - RNA, 18 nt, Artificial Sequence
  Synthetic
aggaaugggccuaagaga

SEQ ID NO: 219222 - RNA, 19 nt, Artificial Sequence
  Synthetic
aaggaaugggccuaagaga

SEQ ID NO: 219223 - RNA, 20 nt, Artificial Sequence
  Synthetic
uaaggaaugggccuaagaga

SEQ ID NO: 219224 - RNA, 21 nt, Artificial Sequence
  Synthetic
uuaaggaaugggccuaagaga

SEQ ID NO: 219225 - RNA, 22 nt, Artificial Sequence
  Synthetic
uuuaaggaaugggccuaagaga

SEQ ID NO: 219226 - RNA, 23 nt, Artificial Sequence
  Synthetic
auuuaaggaaugggccuaagaga

SEQ ID NO: 219227 - RNA, 24 nt, Artificial Sequence
  Synthetic
cauuuaaggaaugggccuaagaga

SEQ ID NO: 219228 - RNA, 18 nt, Artificial Sequence
  Synthetic
acuuguggggcuaagaga

SEQ ID NO: 219229 - RNA, 19 nt, Artificial Sequence
  Synthetic
gacuuguggggcuaagaga

SEQ ID NO: 219230 - RNA, 20 nt, Artificial Sequence
  Synthetic
agacuuguggggcuaagaga

SEQ ID NO: 219231 - RNA, 21 nt, Artificial Sequence
  Synthetic
aagacuuguggggcuaagaga

SEQ ID NO: 219232 - RNA, 22 nt, Artificial Sequence
  Synthetic
gaagacuuguggggcuaagaga

SEQ ID NO: 219233 - RNA, 23 nt, Artificial Sequence
  Synthetic
ugaagacuuguggggcuaagaga

SEQ ID NO: 219234 - RNA, 24 nt, Artificial Sequence
  Synthetic
cugaagacuuguggggcuaagaga

SEQ ID NO: 219235 - RNA, 18 nt, Artificial Sequence
  Synthetic
ccucugaguucuaagaga

SEQ ID NO: 219236 - RNA, 19 nt, Artificial Sequence
  Synthetic
gccucugaguucuaagaga

SEQ ID NO: 219237 - RNA, 20 nt, Artificial Sequence
  Synthetic
ugccucugaguucuaagaga

SEQ ID NO: 219238 - RNA, 21 nt, Artificial Sequence
  Synthetic
uugccucugaguucuaagaga

SEQ ID NO: 219239 - RNA, 22 nt, Artificial Sequence
  Synthetic
guugccucugaguucuaagaga

SEQ ID NO: 219240 - RNA, 23 nt, Artificial Sequence
  Synthetic
uguugccucugaguucuaagaga

SEQ ID NO: 219241 - RNA, 24 nt, Artificial Sequence
  Synthetic
uuguugccucugaguucuaagaga

SEQ ID NO: 219242 - RNA, 18 nt, Artificial Sequence
  Synthetic
acugugugaaguaagaga

SEQ ID NO: 219243 - RNA, 19 nt, Artificial Sequence
  Synthetic
uacugugugaaguaagaga

SEQ ID NO: 219244 - RNA, 20 nt, Artificial Sequence
  Synthetic
guacugugugaaguaagaga

SEQ ID NO: 219245 - RNA, 21 nt, Artificial Sequence
  Synthetic
uguacugugugaaguaagaga

SEQ ID NO: 219246 - RNA, 22 nt, Artificial Sequence
  Synthetic
auguacugugugaaguaagaga

SEQ ID NO: 219247 - RNA, 23 nt, Artificial Sequence
  Synthetic
uauguacugugugaaguaagaga

SEQ ID NO: 219248 - RNA, 24 nt, Artificial Sequence
  Synthetic
auauguacugugugaaguaagaga

SEQ ID NO: 219249 - RNA, 18 nt, Artificial Sequence
  Synthetic
auaagauauuuuaagaga

SEQ ID NO: 219250 - RNA, 19 nt, Artificial Sequence
  Synthetic
aauaagauauuuuaagaga

SEQ ID NO: 219251 - RNA, 20 nt, Artificial Sequence
  Synthetic
caauaagauauuuuaagaga

SEQ ID NO: 219252 - RNA, 21 nt, Artificial Sequence
  Synthetic
acaauaagauauuuuaagaga

SEQ ID NO: 219253 - RNA, 22 nt, Artificial Sequence
  Synthetic
uacaauaagauauuuuaagaga

SEQ ID NO: 219254 - RNA, 23 nt, Artificial Sequence
  Synthetic
auacaauaagauauuuuaagaga

SEQ ID NO: 219255 - RNA, 24 nt, Artificial Sequence
  Synthetic
aauacaauaagauauuuuaagaga

SEQ ID NO: 219256 - RNA, 18 nt, Artificial Sequence
  Synthetic
gagagagagaaacagaga

SEQ ID NO: 219257 - RNA, 19 nt, Artificial Sequence
  Synthetic
agagagagagaaacagaga

SEQ ID NO: 219258 - RNA, 20 nt, Artificial Sequence
  Synthetic
gagagagagagaaacagaga

SEQ ID NO: 219259 - RNA, 21 nt, Artificial Sequence
  Synthetic
agagagagagagaaacagaga

SEQ ID NO: 219260 - RNA, 22 nt, Artificial Sequence
  Synthetic
gagagagagagagaaacagaga

SEQ ID NO: 219261 - RNA, 23 nt, Artificial Sequence
  Synthetic
agagagagagagagaaacagaga

SEQ ID NO: 219262 - RNA, 24 nt, Artificial Sequence
  Synthetic
gagagagagagagagaaacagaga

SEQ ID NO: 219263 - RNA, 18 nt, Artificial Sequence
  Synthetic
gcagaguagaaacagaga

SEQ ID NO: 219264 - RNA, 19 nt, Artificial Sequence
  Synthetic
ugcagaguagaaacagaga

SEQ ID NO: 219265 - RNA, 20 nt, Artificial Sequence
  Synthetic
uugcagaguagaaacagaga

SEQ ID NO: 219266 - RNA, 21 nt, Artificial Sequence
  Synthetic
uuugcagaguagaaacagaga

SEQ ID NO: 219267 - RNA, 22 nt, Artificial Sequence
  Synthetic
auuugcagaguagaaacagaga

SEQ ID NO: 219268 - RNA, 23 nt, Artificial Sequence
  Synthetic
gauuugcagaguagaaacagaga

SEQ ID NO: 219269 - RNA, 24 nt, Artificial Sequence
  Synthetic
ugauuugcagaguagaaacagaga

SEQ ID NO: 219270 - RNA, 18 nt, Artificial Sequence
  Synthetic
auuccuaguaaacagaga

SEQ ID NO: 219271 - RNA, 19 nt, Artificial Sequence
  Synthetic
uauuccuaguaaacagaga

SEQ ID NO: 219272 - RNA, 20 nt, Artificial Sequence
  Synthetic
auauuccuaguaaacagaga

SEQ ID NO: 219273 - RNA, 21 nt, Artificial Sequence
  Synthetic
cauauuccuaguaaacagaga

SEQ ID NO: 219274 - RNA, 22 nt, Artificial Sequence
  Synthetic
ccauauuccuaguaaacagaga

SEQ ID NO: 219275 - RNA, 23 nt, Artificial Sequence
  Synthetic
uccauauuccuaguaaacagaga

SEQ ID NO: 219276 - RNA, 24 nt, Artificial Sequence
  Synthetic
auccauauuccuaguaaacagaga

SEQ ID NO: 219277 - RNA, 18 nt, Artificial Sequence
  Synthetic
uauauauaugaacagaga

SEQ ID NO: 219278 - RNA, 19 nt, Artificial Sequence
  Synthetic
auauauauaugaacagaga

SEQ ID NO: 219279 - RNA, 20 nt, Artificial Sequence
  Synthetic
uauauauauaugaacagaga

SEQ ID NO: 219280 - RNA, 21 nt, Artificial Sequence
  Synthetic
auauauauauaugaacagaga

SEQ ID NO: 219281 - RNA, 22 nt, Artificial Sequence
  Synthetic
uauauauauauaugaacagaga

SEQ ID NO: 219282 - RNA, 23 nt, Artificial Sequence
  Synthetic
auauauauauauaugaacagaga

SEQ ID NO: 219283 - RNA, 24 nt, Artificial Sequence
  Synthetic
uauauauauauauaugaacagaga

SEQ ID NO: 219284 - RNA, 18 nt, Artificial Sequence
  Synthetic
agcugucagacacagaga

SEQ ID NO: 219285 - RNA, 19 nt, Artificial Sequence
  Synthetic
uagcugucagacacagaga

SEQ ID NO: 219286 - RNA, 20 nt, Artificial Sequence
  Synthetic
guagcugucagacacagaga

SEQ ID NO: 219287 - RNA, 21 nt, Artificial Sequence
  Synthetic
uguagcugucagacacagaga

SEQ ID NO: 219288 - RNA, 22 nt, Artificial Sequence
  Synthetic
auguagcugucagacacagaga

SEQ ID NO: 219289 - RNA, 23 nt, Artificial Sequence
  Synthetic
gauguagcugucagacacagaga

SEQ ID NO: 219290 - RNA, 24 nt, Artificial Sequence
  Synthetic
cgauguagcugucagacacagaga

SEQ ID NO: 219291 - RNA, 18 nt, Artificial Sequence
  Synthetic
auugaaugaccacagaga

SEQ ID NO: 219292 - RNA, 19 nt, Artificial Sequence
  Synthetic
aauugaaugaccacagaga

SEQ ID NO: 219293 - RNA, 20 nt, Artificial Sequence
  Synthetic
gaauugaaugaccacagaga

SEQ ID NO: 219294 - RNA, 21 nt, Artificial Sequence
  Synthetic
ugaauugaaugaccacagaga

SEQ ID NO: 219295 - RNA, 22 nt, Artificial Sequence
  Synthetic
cugaauugaaugaccacagaga

SEQ ID NO: 219296 - RNA, 23 nt, Artificial Sequence
  Synthetic
gcugaauugaaugaccacagaga

SEQ ID NO: 219297 - RNA, 24 nt, Artificial Sequence
  Synthetic
ggcugaauugaaugaccacagaga

SEQ ID NO: 219298 - RNA, 18 nt, Artificial Sequence
  Synthetic
aucccuauuucacagaga

SEQ ID NO: 219299 - RNA, 19 nt, Artificial Sequence
  Synthetic
uaucccuauuucacagaga

SEQ ID NO: 219300 - RNA, 20 nt, Artificial Sequence
  Synthetic
guaucccuauuucacagaga

SEQ ID NO: 219301 - RNA, 21 nt, Artificial Sequence
  Synthetic
aguaucccuauuucacagaga

SEQ ID NO: 219302 - RNA, 22 nt, Artificial Sequence
  Synthetic
uaguaucccuauuucacagaga

SEQ ID NO: 219303 - RNA, 23 nt, Artificial Sequence
  Synthetic
guaguaucccuauuucacagaga

SEQ ID NO: 219304 - RNA, 24 nt, Artificial Sequence
  Synthetic
aguaguaucccuauuucacagaga

SEQ ID NO: 219305 - RNA, 18 nt, Artificial Sequence
  Synthetic
auacugccaagacagaga

SEQ ID NO: 219306 - RNA, 19 nt, Artificial Sequence
  Synthetic
gauacugccaagacagaga

SEQ ID NO: 219307 - RNA, 20 nt, Artificial Sequence
  Synthetic
agauacugccaagacagaga

SEQ ID NO: 219308 - RNA, 21 nt, Artificial Sequence
  Synthetic
gagauacugccaagacagaga

SEQ ID NO: 219309 - RNA, 22 nt, Artificial Sequence
  Synthetic
ggagauacugccaagacagaga

SEQ ID NO: 219310 - RNA, 23 nt, Artificial Sequence
  Synthetic
aggagauacugccaagacagaga

SEQ ID NO: 219311 - RNA, 24 nt, Artificial Sequence
  Synthetic
aaggagauacugccaagacagaga

SEQ ID NO: 219312 - RNA, 18 nt, Artificial Sequence
  Synthetic
cacacacacagacagaga

SEQ ID NO: 219313 - RNA, 19 nt, Artificial Sequence
  Synthetic
acacacacacagacagaga

SEQ ID NO: 219314 - RNA, 20 nt, Artificial Sequence
  Synthetic
cacacacacacagacagaga

SEQ ID NO: 219315 - RNA, 21 nt, Artificial Sequence
  Synthetic
acacacacacacagacagaga

SEQ ID NO: 219316 - RNA, 22 nt, Artificial Sequence
  Synthetic
cacacacacacacagacagaga

SEQ ID NO: 219317 - RNA, 23 nt, Artificial Sequence
  Synthetic
acacacacacacacagacagaga

SEQ ID NO: 219318 - RNA, 24 nt, Artificial Sequence
  Synthetic
cacacacacacacacagacagaga

SEQ ID NO: 219319 - RNA, 18 nt, Artificial Sequence
  Synthetic
gagagagagagacagaga

SEQ ID NO: 219320 - RNA, 19 nt, Artificial Sequence
  Synthetic
ggagagagagagacagaga

SEQ ID NO: 219321 - RNA, 20 nt, Artificial Sequence
  Synthetic
gggagagagagagacagaga

SEQ ID NO: 219322 - RNA, 21 nt, Artificial Sequence
  Synthetic
agggagagagagagacagaga

SEQ ID NO: 219323 - RNA, 22 nt, Artificial Sequence
  Synthetic
gagggagagagagagacagaga

SEQ ID NO: 219324 - RNA, 23 nt, Artificial Sequence
  Synthetic
agagggagagagagagacagaga

SEQ ID NO: 219325 - RNA, 24 nt, Artificial Sequence
  Synthetic
gagagggagagagagagacagaga

SEQ ID NO: 219326 - RNA, 18 nt, Artificial Sequence
  Synthetic
auuuuagagagacagaga

SEQ ID NO: 219327 - RNA, 19 nt, Artificial Sequence
  Synthetic
gauuuuagagagacagaga

SEQ ID NO: 219328 - RNA, 20 nt, Artificial Sequence
  Synthetic
ugauuuuagagagacagaga

SEQ ID NO: 219329 - RNA, 21 nt, Artificial Sequence
  Synthetic
uugauuuuagagagacagaga

SEQ ID NO: 219330 - RNA, 22 nt, Artificial Sequence
  Synthetic
guugauuuuagagagacagaga

SEQ ID NO: 219331 - RNA, 23 nt, Artificial Sequence
  Synthetic
aguugauuuuagagagacagaga

SEQ ID NO: 219332 - RNA, 24 nt, Artificial Sequence
  Synthetic
uaguugauuuuagagagacagaga

SEQ ID NO: 219333 - RNA, 18 nt, Artificial Sequence
  Synthetic
gaggaagggagacagaga

SEQ ID NO: 219334 - RNA, 19 nt, Artificial Sequence
  Synthetic
ggaggaagggagacagaga

SEQ ID NO: 219335 - RNA, 20 nt, Artificial Sequence
  Synthetic
uggaggaagggagacagaga

SEQ ID NO: 219336 - RNA, 21 nt, Artificial Sequence
  Synthetic
auggaggaagggagacagaga

SEQ ID NO: 219337 - RNA, 22 nt, Artificial Sequence
  Synthetic
gauggaggaagggagacagaga

SEQ ID NO: 219338 - RNA, 23 nt, Artificial Sequence
  Synthetic
ggauggaggaagggagacagaga

SEQ ID NO: 219339 - RNA, 24 nt, Artificial Sequence
  Synthetic
gggauggaggaagggagacagaga

SEQ ID NO: 219340 - RNA, 18 nt, Artificial Sequence
  Synthetic
uauacacacauacagaga

SEQ ID NO: 219341 - RNA, 19 nt, Artificial Sequence
  Synthetic
auauacacacauacagaga

SEQ ID NO: 219342 - RNA, 20 nt, Artificial Sequence
  Synthetic
uauauacacacauacagaga

SEQ ID NO: 219343 - RNA, 21 nt, Artificial Sequence
  Synthetic
auauauacacacauacagaga

SEQ ID NO: 219344 - RNA, 22 nt, Artificial Sequence
  Synthetic
uauauauacacacauacagaga

SEQ ID NO: 219345 - RNA, 23 nt, Artificial Sequence
  Synthetic
auauauauacacacauacagaga

SEQ ID NO: 219346 - RNA, 24 nt, Artificial Sequence
  Synthetic
uauauauauacacacauacagaga

SEQ ID NO: 219347 - RNA, 18 nt, Artificial Sequence
  Synthetic
aaguaagcccuacagaga

SEQ ID NO: 219348 - RNA, 19 nt, Artificial Sequence
  Synthetic
gaaguaagcccuacagaga

SEQ ID NO: 219349 - RNA, 20 nt, Artificial Sequence
  Synthetic
ugaaguaagcccuacagaga

SEQ ID NO: 219350 - RNA, 21 nt, Artificial Sequence
  Synthetic
gugaaguaagcccuacagaga

SEQ ID NO: 219351 - RNA, 22 nt, Artificial Sequence
  Synthetic
ugugaaguaagcccuacagaga

SEQ ID NO: 219352 - RNA, 23 nt, Artificial Sequence
  Synthetic
uugugaaguaagcccuacagaga

SEQ ID NO: 219353 - RNA, 24 nt, Artificial Sequence
  Synthetic
auugugaaguaagcccuacagaga

SEQ ID NO: 219354 - RNA, 18 nt, Artificial Sequence
  Synthetic
caagacucaguacagaga

SEQ ID NO: 219355 - RNA, 19 nt, Artificial Sequence
  Synthetic
gcaagacucaguacagaga

SEQ ID NO: 219356 - RNA, 20 nt, Artificial Sequence
  Synthetic
agcaagacucaguacagaga

SEQ ID NO: 219357 - RNA, 21 nt, Artificial Sequence
  Synthetic
gagcaagacucaguacagaga

SEQ ID NO: 219358 - RNA, 22 nt, Artificial Sequence
  Synthetic
cgagcaagacucaguacagaga

SEQ ID NO: 219359 - RNA, 23 nt, Artificial Sequence
  Synthetic
acgagcaagacucaguacagaga

SEQ ID NO: 219360 - RNA, 24 nt, Artificial Sequence
  Synthetic
uacgagcaagacucaguacagaga

SEQ ID NO: 219361 - RNA, 18 nt, Artificial Sequence
  Synthetic
aauucuagcuuacagaga

SEQ ID NO: 219362 - RNA, 19 nt, Artificial Sequence
  Synthetic
gaauucuagcuuacagaga

SEQ ID NO: 219363 - RNA, 20 nt, Artificial Sequence
  Synthetic
agaauucuagcuuacagaga

SEQ ID NO: 219364 - RNA, 21 nt, Artificial Sequence
  Synthetic
aagaauucuagcuuacagaga

SEQ ID NO: 219365 - RNA, 22 nt, Artificial Sequence
  Synthetic
aaagaauucuagcuuacagaga

SEQ ID NO: 219366 - RNA, 23 nt, Artificial Sequence
  Synthetic
uaaagaauucuagcuuacagaga

SEQ ID NO: 219367 - RNA, 24 nt, Artificial Sequence
  Synthetic
auaaagaauucuagcuuacagaga

SEQ ID NO: 219368 - RNA, 18 nt, Artificial Sequence
  Synthetic
aggcagcaugaccagaga

SEQ ID NO: 219369 - RNA, 19 nt, Artificial Sequence
  Synthetic
uaggcagcaugaccagaga

SEQ ID NO: 219370 - RNA, 20 nt, Artificial Sequence
  Synthetic
cuaggcagcaugaccagaga

SEQ ID NO: 219371 - RNA, 21 nt, Artificial Sequence
  Synthetic
acuaggcagcaugaccagaga

SEQ ID NO: 219372 - RNA, 22 nt, Artificial Sequence
  Synthetic
aacuaggcagcaugaccagaga

SEQ ID NO: 219373 - RNA, 23 nt, Artificial Sequence
  Synthetic
gaacuaggcagcaugaccagaga

SEQ ID NO: 219374 - RNA, 24 nt, Artificial Sequence
  Synthetic
agaacuaggcagcaugaccagaga

SEQ ID NO: 219375 - RNA, 18 nt, Artificial Sequence
  Synthetic
auaaaggaaugccagaga

SEQ ID NO: 219376 - RNA, 19 nt, Artificial Sequence
  Synthetic
uauaaaggaaugccagaga

SEQ ID NO: 219377 - RNA, 20 nt, Artificial Sequence
  Synthetic
cuauaaaggaaugccagaga

SEQ ID NO: 219378 - RNA, 21 nt, Artificial Sequence
  Synthetic
gcuauaaaggaaugccagaga

SEQ ID NO: 219379 - RNA, 22 nt, Artificial Sequence
  Synthetic
ugcuauaaaggaaugccagaga

SEQ ID NO: 219380 - RNA, 23 nt, Artificial Sequence
  Synthetic
uugcuauaaaggaaugccagaga

SEQ ID NO: 219381 - RNA, 24 nt, Artificial Sequence
  Synthetic
guugcuauaaaggaaugccagaga

SEQ ID NO: 219382 - RNA, 18 nt, Artificial Sequence
  Synthetic
uugugucugauccagaga

SEQ ID NO: 219383 - RNA, 19 nt, Artificial Sequence
  Synthetic
auugugucugauccagaga

SEQ ID NO: 219384 - RNA, 20 nt, Artificial Sequence
  Synthetic
cauugugucugauccagaga

SEQ ID NO: 219385 - RNA, 21 nt, Artificial Sequence
  Synthetic
acauugugucugauccagaga

SEQ ID NO: 219386 - RNA, 22 nt, Artificial Sequence
  Synthetic
cacauugugucugauccagaga

SEQ ID NO: 219387 - RNA, 23 nt, Artificial Sequence
  Synthetic
ucacauugugucugauccagaga

SEQ ID NO: 219388 - RNA, 24 nt, Artificial Sequence
  Synthetic
cucacauugugucugauccagaga

SEQ ID NO: 219389 - RNA, 18 nt, Artificial Sequence
  Synthetic
aaagacaaauuccagaga

SEQ ID NO: 219390 - RNA, 19 nt, Artificial Sequence
  Synthetic
uaaagacaaauuccagaga

SEQ ID NO: 219391 - RNA, 20 nt, Artificial Sequence
  Synthetic
auaaagacaaauuccagaga

SEQ ID NO: 219392 - RNA, 21 nt, Artificial Sequence
  Synthetic
gauaaagacaaauuccagaga

SEQ ID NO: 219393 - RNA, 22 nt, Artificial Sequence
  Synthetic
agauaaagacaaauuccagaga

SEQ ID NO: 219394 - RNA, 23 nt, Artificial Sequence
  Synthetic
cagauaaagacaaauuccagaga

SEQ ID NO: 219395 - RNA, 24 nt, Artificial Sequence
  Synthetic
ucagauaaagacaaauuccagaga

SEQ ID NO: 219396 - RNA, 18 nt, Artificial Sequence
  Synthetic
aaggugagauuccagaga

SEQ ID NO: 219397 - RNA, 19 nt, Artificial Sequence
  Synthetic
gaaggugagauuccagaga

SEQ ID NO: 219398 - RNA, 20 nt, Artificial Sequence
  Synthetic
agaaggugagauuccagaga

SEQ ID NO: 219399 - RNA, 21 nt, Artificial Sequence
  Synthetic
uagaaggugagauuccagaga

SEQ ID NO: 219400 - RNA, 22 nt, Artificial Sequence
  Synthetic
guagaaggugagauuccagaga

SEQ ID NO: 219401 - RNA, 23 nt, Artificial Sequence
  Synthetic
uguagaaggugagauuccagaga

SEQ ID NO: 219402 - RNA, 24 nt, Artificial Sequence
  Synthetic
cuguagaaggugagauuccagaga

SEQ ID NO: 219403 - RNA, 18 nt, Artificial Sequence
  Synthetic
caagaaagaaagcagaga

SEQ ID NO: 219404 - RNA, 19 nt, Artificial Sequence
  Synthetic
gcaagaaagaaagcagaga

SEQ ID NO: 219405 - RNA, 20 nt, Artificial Sequence
  Synthetic
agcaagaaagaaagcagaga

SEQ ID NO: 219406 - RNA, 21 nt, Artificial Sequence
  Synthetic
gagcaagaaagaaagcagaga

SEQ ID NO: 219407 - RNA, 22 nt, Artificial Sequence
  Synthetic
agagcaagaaagaaagcagaga

SEQ ID NO: 219408 - RNA, 23 nt, Artificial Sequence
  Synthetic
aagagcaagaaagaaagcagaga

SEQ ID NO: 219409 - RNA, 24 nt, Artificial Sequence
  Synthetic
caagagcaagaaagaaagcagaga

SEQ ID NO: 219410 - RNA, 18 nt, Artificial Sequence
  Synthetic
acauggcgaaagcagaga

SEQ ID NO: 219411 - RNA, 19 nt, Artificial Sequence
  Synthetic
cacauggcgaaagcagaga

SEQ ID NO: 219412 - RNA, 20 nt, Artificial Sequence
  Synthetic
ucacauggcgaaagcagaga

SEQ ID NO: 219413 - RNA, 21 nt, Artificial Sequence
  Synthetic
uucacauggcgaaagcagaga

SEQ ID NO: 219414 - RNA, 22 nt, Artificial Sequence
  Synthetic
uuucacauggcgaaagcagaga

SEQ ID NO: 219415 - RNA, 23 nt, Artificial Sequence
  Synthetic
auuucacauggcgaaagcagaga

SEQ ID NO: 219416 - RNA, 24 nt, Artificial Sequence
  Synthetic
cauuucacauggcgaaagcagaga

SEQ ID NO: 219417 - RNA, 18 nt, Artificial Sequence
  Synthetic
agaaauguaaagcagaga

SEQ ID NO: 219418 - RNA, 19 nt, Artificial Sequence
  Synthetic
cagaaauguaaagcagaga

SEQ ID NO: 219419 - RNA, 20 nt, Artificial Sequence
  Synthetic
acagaaauguaaagcagaga

SEQ ID NO: 219420 - RNA, 21 nt, Artificial Sequence
  Synthetic
uacagaaauguaaagcagaga

SEQ ID NO: 219421 - RNA, 22 nt, Artificial Sequence
  Synthetic
uuacagaaauguaaagcagaga

SEQ ID NO: 219422 - RNA, 23 nt, Artificial Sequence
  Synthetic
uuuacagaaauguaaagcagaga

SEQ ID NO: 219423 - RNA, 24 nt, Artificial Sequence
  Synthetic
auuuacagaaauguaaagcagaga

SEQ ID NO: 219424 - RNA, 18 nt, Artificial Sequence
  Synthetic
aaugaaaccgggcagaga

SEQ ID NO: 219425 - RNA, 19 nt, Artificial Sequence
  Synthetic
caaugaaaccgggcagaga

SEQ ID NO: 219426 - RNA, 20 nt, Artificial Sequence
  Synthetic
gcaaugaaaccgggcagaga

SEQ ID NO: 219427 - RNA, 21 nt, Artificial Sequence
  Synthetic
ggcaaugaaaccgggcagaga

SEQ ID NO: 219428 - RNA, 22 nt, Artificial Sequence
  Synthetic
aggcaaugaaaccgggcagaga

SEQ ID NO: 219429 - RNA, 23 nt, Artificial Sequence
  Synthetic
aaggcaaugaaaccgggcagaga

SEQ ID NO: 219430 - RNA, 24 nt, Artificial Sequence
  Synthetic
aaaggcaaugaaaccgggcagaga

SEQ ID NO: 219431 - RNA, 18 nt, Artificial Sequence
  Synthetic
uaaagccauuggcagaga

SEQ ID NO: 219432 - RNA, 19 nt, Artificial Sequence
  Synthetic
guaaagccauuggcagaga

SEQ ID NO: 219433 - RNA, 20 nt, Artificial Sequence
  Synthetic
uguaaagccauuggcagaga

SEQ ID NO: 219434 - RNA, 21 nt, Artificial Sequence
  Synthetic
guguaaagccauuggcagaga

SEQ ID NO: 219435 - RNA, 22 nt, Artificial Sequence
  Synthetic
aguguaaagccauuggcagaga

SEQ ID NO: 219436 - RNA, 23 nt, Artificial Sequence
  Synthetic
gaguguaaagccauuggcagaga

SEQ ID NO: 219437 - RNA, 24 nt, Artificial Sequence
  Synthetic
cgaguguaaagccauuggcagaga

SEQ ID NO: 219438 - RNA, 18 nt, Artificial Sequence
  Synthetic
uuuaggaauaugcagaga

SEQ ID NO: 219439 - RNA, 19 nt, Artificial Sequence
  Synthetic
auuuaggaauaugcagaga

SEQ ID NO: 219440 - RNA, 20 nt, Artificial Sequence
  Synthetic
aauuuaggaauaugcagaga

SEQ ID NO: 219441 - RNA, 21 nt, Artificial Sequence
  Synthetic
aaauuuaggaauaugcagaga

SEQ ID NO: 219442 - RNA, 22 nt, Artificial Sequence
  Synthetic
aaaauuuaggaauaugcagaga

SEQ ID NO: 219443 - RNA, 23 nt, Artificial Sequence
  Synthetic
aaaaauuuaggaauaugcagaga

SEQ ID NO: 219444 - RNA, 24 nt, Artificial Sequence
  Synthetic
aaaaaauuuaggaauaugcagaga

SEQ ID NO: 219445 - RNA, 18 nt, Artificial Sequence
  Synthetic
aaauugguacugcagaga

SEQ ID NO: 219446 - RNA, 19 nt, Artificial Sequence
  Synthetic
uaaauugguacugcagaga

SEQ ID NO: 219447 - RNA, 20 nt, Artificial Sequence
  Synthetic
guaaauugguacugcagaga

SEQ ID NO: 219448 - RNA, 21 nt, Artificial Sequence
  Synthetic
aguaaauugguacugcagaga

SEQ ID NO: 219449 - RNA, 22 nt, Artificial Sequence
  Synthetic
caguaaauugguacugcagaga

SEQ ID NO: 219450 - RNA, 23 nt, Artificial Sequence
  Synthetic
acaguaaauugguacugcagaga

SEQ ID NO: 219451 - RNA, 24 nt, Artificial Sequence
  Synthetic
uacaguaaauugguacugcagaga

SEQ ID NO: 219452 - RNA, 18 nt, Artificial Sequence
  Synthetic
aagcacuugcugcagaga

SEQ ID NO: 219453 - RNA, 19 nt, Artificial Sequence
  Synthetic
gaagcacuugcugcagaga

SEQ ID NO: 219454 - RNA, 20 nt, Artificial Sequence
  Synthetic
agaagcacuugcugcagaga

SEQ ID NO: 219455 - RNA, 21 nt, Artificial Sequence
  Synthetic
gagaagcacuugcugcagaga

SEQ ID NO: 219456 - RNA, 22 nt, Artificial Sequence
  Synthetic
ggagaagcacuugcugcagaga

SEQ ID NO: 219457 - RNA, 23 nt, Artificial Sequence
  Synthetic
uggagaagcacuugcugcagaga

SEQ ID NO: 219458 - RNA, 24 nt, Artificial Sequence
  Synthetic
cuggagaagcacuugcugcagaga

SEQ ID NO: 219459 - RNA, 18 nt, Artificial Sequence
  Synthetic
ggaaaagaguugcagaga

SEQ ID NO: 219460 - RNA, 19 nt, Artificial Sequence
  Synthetic
aggaaaagaguugcagaga

SEQ ID NO: 219461 - RNA, 20 nt, Artificial Sequence
  Synthetic
gaggaaaagaguugcagaga

SEQ ID NO: 219462 - RNA, 21 nt, Artificial Sequence
  Synthetic
agaggaaaagaguugcagaga

SEQ ID NO: 219463 - RNA, 22 nt, Artificial Sequence
  Synthetic
gagaggaaaagaguugcagaga

SEQ ID NO: 219464 - RNA, 23 nt, Artificial Sequence
  Synthetic
ggagaggaaaagaguugcagaga

SEQ ID NO: 219465 - RNA, 24 nt, Artificial Sequence
  Synthetic
gggagaggaaaagaguugcagaga

SEQ ID NO: 219466 - RNA, 18 nt, Artificial Sequence
  Synthetic
gaaacugagaaucagaga

SEQ ID NO: 219467 - RNA, 19 nt, Artificial Sequence
  Synthetic
agaaacugagaaucagaga

SEQ ID NO: 219468 - RNA, 20 nt, Artificial Sequence
  Synthetic
gagaaacugagaaucagaga

SEQ ID NO: 219469 - RNA, 21 nt, Artificial Sequence
  Synthetic
ugagaaacugagaaucagaga

SEQ ID NO: 219470 - RNA, 22 nt, Artificial Sequence
  Synthetic
augagaaacugagaaucagaga

SEQ ID NO: 219471 - RNA, 23 nt, Artificial Sequence
  Synthetic
gaugagaaacugagaaucagaga

SEQ ID NO: 219472 - RNA, 24 nt, Artificial Sequence
  Synthetic
agaugagaaacugagaaucagaga

SEQ ID NO: 219473 - RNA, 18 nt, Artificial Sequence
  Synthetic
aagaaaggauaucagaga

SEQ ID NO: 219474 - RNA, 19 nt, Artificial Sequence
  Synthetic
aaagaaaggauaucagaga

SEQ ID NO: 219475 - RNA, 20 nt, Artificial Sequence
  Synthetic
aaaagaaaggauaucagaga

SEQ ID NO: 219476 - RNA, 21 nt, Artificial Sequence
  Synthetic
caaaagaaaggauaucagaga

SEQ ID NO: 219477 - RNA, 22 nt, Artificial Sequence
  Synthetic
gcaaaagaaaggauaucagaga

SEQ ID NO: 219478 - RNA, 23 nt, Artificial Sequence
  Synthetic
agcaaaagaaaggauaucagaga

SEQ ID NO: 219479 - RNA, 24 nt, Artificial Sequence
  Synthetic
aagcaaaagaaaggauaucagaga

SEQ ID NO: 219480 - RNA, 18 nt, Artificial Sequence
  Synthetic
acugucuagagucagaga

SEQ ID NO: 219481 - RNA, 19 nt, Artificial Sequence
  Synthetic
cacugucuagagucagaga

SEQ ID NO: 219482 - RNA, 20 nt, Artificial Sequence
  Synthetic
acacugucuagagucagaga

SEQ ID NO: 219483 - RNA, 21 nt, Artificial Sequence
  Synthetic
gacacugucuagagucagaga

SEQ ID NO: 219484 - RNA, 22 nt, Artificial Sequence
  Synthetic
ggacacugucuagagucagaga

SEQ ID NO: 219485 - RNA, 23 nt, Artificial Sequence
  Synthetic
aggacacugucuagagucagaga

SEQ ID NO: 219486 - RNA, 24 nt, Artificial Sequence
  Synthetic
aaggacacugucuagagucagaga

SEQ ID NO: 219487 - RNA, 18 nt, Artificial Sequence
  Synthetic
gaaauuaacauucagaga

SEQ ID NO: 219488 - RNA, 19 nt, Artificial Sequence
  Synthetic
ugaaauuaacauucagaga

SEQ ID NO: 219489 - RNA, 20 nt, Artificial Sequence
  Synthetic
uugaaauuaacauucagaga

SEQ ID NO: 219490 - RNA, 21 nt, Artificial Sequence
  Synthetic
uuugaaauuaacauucagaga

SEQ ID NO: 219491 - RNA, 22 nt, Artificial Sequence
  Synthetic
auuugaaauuaacauucagaga

SEQ ID NO: 219492 - RNA, 23 nt, Artificial Sequence
  Synthetic
cauuugaaauuaacauucagaga

SEQ ID NO: 219493 - RNA, 24 nt, Artificial Sequence
  Synthetic
acauuugaaauuaacauucagaga

SEQ ID NO: 219494 - RNA, 18 nt, Artificial Sequence
  Synthetic
cagcacggucuucagaga

SEQ ID NO: 219495 - RNA, 19 nt, Artificial Sequence
  Synthetic
gcagcacggucuucagaga

SEQ ID NO: 219496 - RNA, 20 nt, Artificial Sequence
  Synthetic
ggcagcacggucuucagaga

SEQ ID NO: 219497 - RNA, 21 nt, Artificial Sequence
  Synthetic
gggcagcacggucuucagaga

SEQ ID NO: 219498 - RNA, 22 nt, Artificial Sequence
  Synthetic
ugggcagcacggucuucagaga

SEQ ID NO: 219499 - RNA, 23 nt, Artificial Sequence
  Synthetic
uugggcagcacggucuucagaga

SEQ ID NO: 219500 - RNA, 24 nt, Artificial Sequence
  Synthetic
uuugggcagcacggucuucagaga

SEQ ID NO: 219501 - RNA, 18 nt, Artificial Sequence
  Synthetic
caaauuuaaaaagagaga

SEQ ID NO: 219502 - RNA, 19 nt, Artificial Sequence
  Synthetic
acaaauuuaaaaagagaga

SEQ ID NO: 219503 - RNA, 20 nt, Artificial Sequence
  Synthetic
uacaaauuuaaaaagagaga

SEQ ID NO: 219504 - RNA, 21 nt, Artificial Sequence
  Synthetic
guacaaauuuaaaaagagaga

SEQ ID NO: 219505 - RNA, 22 nt, Artificial Sequence
  Synthetic
gguacaaauuuaaaaagagaga

SEQ ID NO: 219506 - RNA, 23 nt, Artificial Sequence
  Synthetic
ugguacaaauuuaaaaagagaga

SEQ ID NO: 219507 - RNA, 24 nt, Artificial Sequence
  Synthetic
augguacaaauuuaaaaagagaga

SEQ ID NO: 219508 - RNA, 18 nt, Artificial Sequence
  Synthetic
agcagaguaaaagagaga

SEQ ID NO: 219509 - RNA, 19 nt, Artificial Sequence
  Synthetic
aagcagaguaaaagagaga

SEQ ID NO: 219510 - RNA, 20 nt, Artificial Sequence
  Synthetic
caagcagaguaaaagagaga

SEQ ID NO: 219511 - RNA, 21 nt, Artificial Sequence
  Synthetic
acaagcagaguaaaagagaga

SEQ ID NO: 219512 - RNA, 22 nt, Artificial Sequence
  Synthetic
uacaagcagaguaaaagagaga

SEQ ID NO: 219513 - RNA, 23 nt, Artificial Sequence
  Synthetic
auacaagcagaguaaaagagaga

SEQ ID NO: 219514 - RNA, 24 nt, Artificial Sequence
  Synthetic
gauacaagcagaguaaaagagaga

SEQ ID NO: 219515 - RNA, 18 nt, Artificial Sequence
  Synthetic
gccuuuguaaaagagaga

SEQ ID NO: 219516 - RNA, 19 nt, Artificial Sequence
  Synthetic
ugccuuuguaaaagagaga

SEQ ID NO: 219517 - RNA, 20 nt, Artificial Sequence
  Synthetic
gugccuuuguaaaagagaga

SEQ ID NO: 219518 - RNA, 21 nt, Artificial Sequence
  Synthetic
ugugccuuuguaaaagagaga

SEQ ID NO: 219519 - RNA, 22 nt, Artificial Sequence
  Synthetic
uugugccuuuguaaaagagaga

SEQ ID NO: 219520 - RNA, 23 nt, Artificial Sequence
  Synthetic
uuugugccuuuguaaaagagaga

SEQ ID NO: 219521 - RNA, 24 nt, Artificial Sequence
  Synthetic
uuuugugccuuuguaaaagagaga

SEQ ID NO: 219522 - RNA, 18 nt, Artificial Sequence
  Synthetic
uaacauagcaaagagaga

SEQ ID NO: 219523 - RNA, 19 nt, Artificial Sequence
  Synthetic
cuaacauagcaaagagaga

SEQ ID NO: 219524 - RNA, 20 nt, Artificial Sequence
  Synthetic
ccuaacauagcaaagagaga

SEQ ID NO: 219525 - RNA, 21 nt, Artificial Sequence
  Synthetic
uccuaacauagcaaagagaga

SEQ ID NO: 219526 - RNA, 22 nt, Artificial Sequence
  Synthetic
guccuaacauagcaaagagaga

SEQ ID NO: 219527 - RNA, 23 nt, Artificial Sequence
  Synthetic
uguccuaacauagcaaagagaga

SEQ ID NO: 219528 - RNA, 24 nt, Artificial Sequence
  Synthetic
guguccuaacauagcaaagagaga

SEQ ID NO: 219529 - RNA, 18 nt, Artificial Sequence
  Synthetic
aauaaaaagaaagagaga

SEQ ID NO: 219530 - RNA, 19 nt, Artificial Sequence
  Synthetic
aaauaaaaagaaagagaga

SEQ ID NO: 219531 - RNA, 20 nt, Artificial Sequence
  Synthetic
aaaauaaaaagaaagagaga

SEQ ID NO: 219532 - RNA, 21 nt, Artificial Sequence
  Synthetic
aaaaauaaaaagaaagagaga

SEQ ID NO: 219533 - RNA, 22 nt, Artificial Sequence
  Synthetic
aaaaaauaaaaagaaagagaga

SEQ ID NO: 219534 - RNA, 23 nt, Artificial Sequence
  Synthetic
caaaaaauaaaaagaaagagaga

SEQ ID NO: 219535 - RNA, 24 nt, Artificial Sequence
  Synthetic
ucaaaaaauaaaaagaaagagaga

SEQ ID NO: 219536 - RNA, 18 nt, Artificial Sequence
  Synthetic
uaaggacagaaagagaga

SEQ ID NO: 219537 - RNA, 19 nt, Artificial Sequence
  Synthetic
auaaggacagaaagagaga

SEQ ID NO: 219538 - RNA, 20 nt, Artificial Sequence
  Synthetic
uauaaggacagaaagagaga

SEQ ID NO: 219539 - RNA, 21 nt, Artificial Sequence
  Synthetic
cuauaaggacagaaagagaga

SEQ ID NO: 219540 - RNA, 22 nt, Artificial Sequence
  Synthetic
acuauaaggacagaaagagaga

SEQ ID NO: 219541 - RNA, 23 nt, Artificial Sequence
  Synthetic
aacuauaaggacagaaagagaga

SEQ ID NO: 219542 - RNA, 24 nt, Artificial Sequence
  Synthetic
gaacuauaaggacagaaagagaga

SEQ ID NO: 219543 - RNA, 18 nt, Artificial Sequence
  Synthetic
gaaacagagaaagagaga

SEQ ID NO: 219544 - RNA, 19 nt, Artificial Sequence
  Synthetic
agaaacagagaaagagaga

SEQ ID NO: 219545 - RNA, 20 nt, Artificial Sequence
  Synthetic
gagaaacagagaaagagaga

SEQ ID NO: 219546 - RNA, 21 nt, Artificial Sequence
  Synthetic
agagaaacagagaaagagaga

SEQ ID NO: 219547 - RNA, 22 nt, Artificial Sequence
  Synthetic
gagagaaacagagaaagagaga

SEQ ID NO: 219548 - RNA, 23 nt, Artificial Sequence
  Synthetic
agagagaaacagagaaagagaga

SEQ ID NO: 219549 - RNA, 24 nt, Artificial Sequence
  Synthetic
gagagagaaacagagaaagagaga

SEQ ID NO: 219550 - RNA, 18 nt, Artificial Sequence
  Synthetic
cauggguagaaagagaga

SEQ ID NO: 219551 - RNA, 19 nt, Artificial Sequence
  Synthetic
acauggguagaaagagaga

SEQ ID NO: 219552 - RNA, 20 nt, Artificial Sequence
  Synthetic
uacauggguagaaagagaga

SEQ ID NO: 219553 - RNA, 21 nt, Artificial Sequence
  Synthetic
uuacauggguagaaagagaga

SEQ ID NO: 219554 - RNA, 22 nt, Artificial Sequence
  Synthetic
auuacauggguagaaagagaga

SEQ ID NO: 219555 - RNA, 23 nt, Artificial Sequence
  Synthetic
aauuacauggguagaaagagaga

SEQ ID NO: 219556 - RNA, 24 nt, Artificial Sequence
  Synthetic
aaauuacauggguagaaagagaga

SEQ ID NO: 219557 - RNA, 18 nt, Artificial Sequence
  Synthetic
caacaggggaaagagaga

SEQ ID NO: 219558 - RNA, 19 nt, Artificial Sequence
  Synthetic
acaacaggggaaagagaga

SEQ ID NO: 219559 - RNA, 20 nt, Artificial Sequence
  Synthetic
gacaacaggggaaagagaga

SEQ ID NO: 219560 - RNA, 21 nt, Artificial Sequence
  Synthetic
ggacaacaggggaaagagaga

SEQ ID NO: 219561 - RNA, 22 nt, Artificial Sequence
  Synthetic
gggacaacaggggaaagagaga

SEQ ID NO: 219562 - RNA, 23 nt, Artificial Sequence
  Synthetic
cgggacaacaggggaaagagaga

SEQ ID NO: 219563 - RNA, 24 nt, Artificial Sequence
  Synthetic
ccgggacaacaggggaaagagaga

SEQ ID NO: 219564 - RNA, 18 nt, Artificial Sequence
  Synthetic
gagcauaaacaagagaga

SEQ ID NO: 219565 - RNA, 19 nt, Artificial Sequence
  Synthetic
agagcauaaacaagagaga

SEQ ID NO: 219566 - RNA, 20 nt, Artificial Sequence
  Synthetic
gagagcauaaacaagagaga

SEQ ID NO: 219567 - RNA, 21 nt, Artificial Sequence
  Synthetic
agagagcauaaacaagagaga

SEQ ID NO: 219568 - RNA, 22 nt, Artificial Sequence
  Synthetic
uagagagcauaaacaagagaga

SEQ ID NO: 219569 - RNA, 23 nt, Artificial Sequence
  Synthetic
uuagagagcauaaacaagagaga

SEQ ID NO: 219570 - RNA, 24 nt, Artificial Sequence
  Synthetic
guuagagagcauaaacaagagaga

SEQ ID NO: 219571 - RNA, 18 nt, Artificial Sequence
  Synthetic
gggaauagacaagagaga

SEQ ID NO: 219572 - RNA, 19 nt, Artificial Sequence
  Synthetic
ugggaauagacaagagaga

SEQ ID NO: 219573 - RNA, 20 nt, Artificial Sequence
  Synthetic
gugggaauagacaagagaga

SEQ ID NO: 219574 - RNA, 21 nt, Artificial Sequence
  Synthetic
ugugggaauagacaagagaga

SEQ ID NO: 219575 - RNA, 22 nt, Artificial Sequence
  Synthetic
gugugggaauagacaagagaga

SEQ ID NO: 219576 - RNA, 23 nt, Artificial Sequence
  Synthetic
ggugugggaauagacaagagaga

SEQ ID NO: 219577 - RNA, 24 nt, Artificial Sequence
  Synthetic
uggugugggaauagacaagagaga

SEQ ID NO: 219578 - RNA, 18 nt, Artificial Sequence
  Synthetic
cucugcaaggaagagaga

SEQ ID NO: 219579 - RNA, 19 nt, Artificial Sequence
  Synthetic
acucugcaaggaagagaga

SEQ ID NO: 219580 - RNA, 20 nt, Artificial Sequence
  Synthetic
gacucugcaaggaagagaga

SEQ ID NO: 219581 - RNA, 21 nt, Artificial Sequence
  Synthetic
ugacucugcaaggaagagaga

SEQ ID NO: 219582 - RNA, 22 nt, Artificial Sequence
  Synthetic
cugacucugcaaggaagagaga

SEQ ID NO: 219583 - RNA, 23 nt, Artificial Sequence
  Synthetic
ucugacucugcaaggaagagaga

SEQ ID NO: 219584 - RNA, 24 nt, Artificial Sequence
  Synthetic
uucugacucugcaaggaagagaga

SEQ ID NO: 219585 - RNA, 18 nt, Artificial Sequence
  Synthetic
cugcgaugggaagagaga

SEQ ID NO: 219586 - RNA, 19 nt, Artificial Sequence
  Synthetic
gcugcgaugggaagagaga

SEQ ID NO: 219587 - RNA, 20 nt, Artificial Sequence
  Synthetic
ggcugcgaugggaagagaga

SEQ ID NO: 219588 - RNA, 21 nt, Artificial Sequence
  Synthetic
uggcugcgaugggaagagaga

SEQ ID NO: 219589 - RNA, 22 nt, Artificial Sequence
  Synthetic
uuggcugcgaugggaagagaga

SEQ ID NO: 219590 - RNA, 23 nt, Artificial Sequence
  Synthetic
uuuggcugcgaugggaagagaga

SEQ ID NO: 219591 - RNA, 24 nt, Artificial Sequence
  Synthetic
uuuuggcugcgaugggaagagaga

SEQ ID NO: 219592 - RNA, 18 nt, Artificial Sequence
  Synthetic
gaguccuccuaagagaga

SEQ ID NO: 219593 - RNA, 19 nt, Artificial Sequence
  Synthetic
agaguccuccuaagagaga

SEQ ID NO: 219594 - RNA, 20 nt, Artificial Sequence
  Synthetic
aagaguccuccuaagagaga

SEQ ID NO: 219595 - RNA, 21 nt, Artificial Sequence
  Synthetic
caagaguccuccuaagagaga

SEQ ID NO: 219596 - RNA, 22 nt, Artificial Sequence
  Synthetic
acaagaguccuccuaagagaga

SEQ ID NO: 219597 - RNA, 23 nt, Artificial Sequence
  Synthetic
cacaagaguccuccuaagagaga

SEQ ID NO: 219598 - RNA, 24 nt, Artificial Sequence
  Synthetic
ucacaagaguccuccuaagagaga

SEQ ID NO: 219599 - RNA, 18 nt, Artificial Sequence
  Synthetic
agaguagaaacagagaga

SEQ ID NO: 219600 - RNA, 19 nt, Artificial Sequence
  Synthetic
cagaguagaaacagagaga

SEQ ID NO: 219601 - RNA, 20 nt, Artificial Sequence
  Synthetic
gcagaguagaaacagagaga

SEQ ID NO: 219602 - RNA, 21 nt, Artificial Sequence
  Synthetic
ugcagaguagaaacagagaga

SEQ ID NO: 219603 - RNA, 22 nt, Artificial Sequence
  Synthetic
uugcagaguagaaacagagaga

SEQ ID NO: 219604 - RNA, 23 nt, Artificial Sequence
  Synthetic
uuugcagaguagaaacagagaga

SEQ ID NO: 219605 - RNA, 24 nt, Artificial Sequence
  Synthetic
auuugcagaguagaaacagagaga

SEQ ID NO: 219606 - RNA, 18 nt, Artificial Sequence
  Synthetic
uauauaugaacagagaga

SEQ ID NO: 219607 - RNA, 19 nt, Artificial Sequence
  Synthetic
auauauaugaacagagaga

SEQ ID NO: 219608 - RNA, 20 nt, Artificial Sequence
  Synthetic
uauauauaugaacagagaga

SEQ ID NO: 219609 - RNA, 21 nt, Artificial Sequence
  Synthetic
auauauauaugaacagagaga

SEQ ID NO: 219610 - RNA, 22 nt, Artificial Sequence
  Synthetic
uauauauauaugaacagagaga

SEQ ID NO: 219611 - RNA, 23 nt, Artificial Sequence
  Synthetic
auauauauauaugaacagagaga

SEQ ID NO: 219612 - RNA, 24 nt, Artificial Sequence
  Synthetic
uauauauauauaugaacagagaga

SEQ ID NO: 219613 - RNA, 18 nt, Artificial Sequence
  Synthetic
cacacacagacagagaga

SEQ ID NO: 219614 - RNA, 19 nt, Artificial Sequence
  Synthetic
acacacacagacagagaga

SEQ ID NO: 219615 - RNA, 20 nt, Artificial Sequence
  Synthetic
cacacacacagacagagaga

SEQ ID NO: 219616 - RNA, 21 nt, Artificial Sequence
  Synthetic
acacacacacagacagagaga

SEQ ID NO: 219617 - RNA, 22 nt, Artificial Sequence
  Synthetic
cacacacacacagacagagaga

SEQ ID NO: 219618 - RNA, 23 nt, Artificial Sequence
  Synthetic
acacacacacacagacagagaga

SEQ ID NO: 219619 - RNA, 24 nt, Artificial Sequence
  Synthetic
cacacacacacacagacagagaga

SEQ ID NO: 219620 - RNA, 18 nt, Artificial Sequence
  Synthetic
gagagagagacagagaga

SEQ ID NO: 219621 - RNA, 19 nt, Artificial Sequence
  Synthetic
agagagagagacagagaga

SEQ ID NO: 219622 - RNA, 20 nt, Artificial Sequence
  Synthetic
gagagagagagacagagaga

SEQ ID NO: 219623 - RNA, 21 nt, Artificial Sequence
  Synthetic
ggagagagagagacagagaga

SEQ ID NO: 219624 - RNA, 22 nt, Artificial Sequence
  Synthetic
gggagagagagagacagagaga

SEQ ID NO: 219625 - RNA, 23 nt, Artificial Sequence
  Synthetic
agggagagagagagacagagaga

SEQ ID NO: 219626 - RNA, 24 nt, Artificial Sequence
  Synthetic
gagggagagagagagacagagaga

SEQ ID NO: 219627 - RNA, 18 nt, Artificial Sequence
  Synthetic
ggaagggagacagagaga

SEQ ID NO: 219628 - RNA, 19 nt, Artificial Sequence
  Synthetic
aggaagggagacagagaga

SEQ ID NO: 219629 - RNA, 20 nt, Artificial Sequence
  Synthetic
gaggaagggagacagagaga

SEQ ID NO: 219630 - RNA, 21 nt, Artificial Sequence
  Synthetic
ggaggaagggagacagagaga

SEQ ID NO: 219631 - RNA, 22 nt, Artificial Sequence
  Synthetic
uggaggaagggagacagagaga

SEQ ID NO: 219632 - RNA, 23 nt, Artificial Sequence
  Synthetic
auggaggaagggagacagagaga

SEQ ID NO: 219633 - RNA, 24 nt, Artificial Sequence
  Synthetic
gauggaggaagggagacagagaga

SEQ ID NO: 219634 - RNA, 18 nt, Artificial Sequence
  Synthetic
uacacacauacagagaga

SEQ ID NO: 219635 - RNA, 19 nt, Artificial Sequence
  Synthetic
auacacacauacagagaga

SEQ ID NO: 219636 - RNA, 20 nt, Artificial Sequence
  Synthetic
uauacacacauacagagaga

SEQ ID NO: 219637 - RNA, 21 nt, Artificial Sequence
  Synthetic
auauacacacauacagagaga

SEQ ID NO: 219638 - RNA, 22 nt, Artificial Sequence
  Synthetic
uauauacacacauacagagaga

SEQ ID NO: 219639 - RNA, 23 nt, Artificial Sequence
  Synthetic
auauauacacacauacagagaga

SEQ ID NO: 219640 - RNA, 24 nt, Artificial Sequence
  Synthetic
uauauauacacacauacagagaga

SEQ ID NO: 219641 - RNA, 18 nt, Artificial Sequence
  Synthetic
gugaaauguccagagaga

SEQ ID NO: 219642 - RNA, 19 nt, Artificial Sequence
  Synthetic
ugugaaauguccagagaga

SEQ ID NO: 219643 - RNA, 20 nt, Artificial Sequence
  Synthetic
augugaaauguccagagaga

SEQ ID NO: 219644 - RNA, 21 nt, Artificial Sequence
  Synthetic
aaugugaaauguccagagaga

SEQ ID NO: 219645 - RNA, 22 nt, Artificial Sequence
  Synthetic
aaaugugaaauguccagagaga

SEQ ID NO: 219646 - RNA, 23 nt, Artificial Sequence
  Synthetic
caaaugugaaauguccagagaga

SEQ ID NO: 219647 - RNA, 24 nt, Artificial Sequence
  Synthetic
ucaaaugugaaauguccagagaga

SEQ ID NO: 219648 - RNA, 18 nt, Artificial Sequence
  Synthetic
ccuuccagagcagagaga

SEQ ID NO: 219649 - RNA, 19 nt, Artificial Sequence
  Synthetic
accuuccagagcagagaga

SEQ ID NO: 219650 - RNA, 20 nt, Artificial Sequence
  Synthetic
uaccuuccagagcagagaga

SEQ ID NO: 219651 - RNA, 21 nt, Artificial Sequence
  Synthetic
auaccuuccagagcagagaga

SEQ ID NO: 219652 - RNA, 22 nt, Artificial Sequence
  Synthetic
aauaccuuccagagcagagaga

SEQ ID NO: 219653 - RNA, 23 nt, Artificial Sequence
  Synthetic
aaauaccuuccagagcagagaga

SEQ ID NO: 219654 - RNA, 24 nt, Artificial Sequence
  Synthetic
aaaauaccuuccagagcagagaga

SEQ ID NO: 219655 - RNA, 18 nt, Artificial Sequence
  Synthetic
aauuuaaaaagagagaga

SEQ ID NO: 219656 - RNA, 19 nt, Artificial Sequence
  Synthetic
aaauuuaaaaagagagaga

SEQ ID NO: 219657 - RNA, 20 nt, Artificial Sequence
  Synthetic
caaauuuaaaaagagagaga

SEQ ID NO: 219658 - RNA, 21 nt, Artificial Sequence
  Synthetic
acaaauuuaaaaagagagaga

SEQ ID NO: 219659 - RNA, 22 nt, Artificial Sequence
  Synthetic
uacaaauuuaaaaagagagaga

SEQ ID NO: 219660 - RNA, 23 nt, Artificial Sequence
  Synthetic
guacaaauuuaaaaagagagaga

SEQ ID NO: 219661 - RNA, 24 nt, Artificial Sequence
  Synthetic
gguacaaauuuaaaaagagagaga

SEQ ID NO: 219662 - RNA, 18 nt, Artificial Sequence
  Synthetic
cuuuguaaaagagagaga

SEQ ID NO: 219663 - RNA, 19 nt, Artificial Sequence
  Synthetic
ccuuuguaaaagagagaga

SEQ ID NO: 219664 - RNA, 20 nt, Artificial Sequence
  Synthetic
gccuuuguaaaagagagaga

SEQ ID NO: 219665 - RNA, 21 nt, Artificial Sequence
  Synthetic
ugccuuuguaaaagagagaga

SEQ ID NO: 219666 - RNA, 22 nt, Artificial Sequence
  Synthetic
gugccuuuguaaaagagagaga

SEQ ID NO: 219667 - RNA, 23 nt, Artificial Sequence
  Synthetic
ugugccuuuguaaaagagagaga

SEQ ID NO: 219668 - RNA, 24 nt, Artificial Sequence
  Synthetic
uugugccuuuguaaaagagagaga

SEQ ID NO: 219669 - RNA, 18 nt, Artificial Sequence
  Synthetic
caacaccaaagagagaga

SEQ ID NO: 219670 - RNA, 19 nt, Artificial Sequence
  Synthetic
ucaacaccaaagagagaga

SEQ ID NO: 219671 - RNA, 20 nt, Artificial Sequence
  Synthetic
uucaacaccaaagagagaga

SEQ ID NO: 219672 - RNA, 21 nt, Artificial Sequence
  Synthetic
auucaacaccaaagagagaga

SEQ ID NO: 219673 - RNA, 22 nt, Artificial Sequence
  Synthetic
uauucaacaccaaagagagaga

SEQ ID NO: 219674 - RNA, 23 nt, Artificial Sequence
  Synthetic
auauucaacaccaaagagagaga

SEQ ID NO: 219675 - RNA, 24 nt, Artificial Sequence
  Synthetic
cauauucaacaccaaagagagaga

SEQ ID NO: 219676 - RNA, 18 nt, Artificial Sequence
  Synthetic
uaaaaagaaagagagaga

SEQ ID NO: 219677 - RNA, 19 nt, Artificial Sequence
  Synthetic
auaaaaagaaagagagaga

SEQ ID NO: 219678 - RNA, 20 nt, Artificial Sequence
  Synthetic
aauaaaaagaaagagagaga

SEQ ID NO: 219679 - RNA, 21 nt, Artificial Sequence
  Synthetic
aaauaaaaagaaagagagaga

SEQ ID NO: 219680 - RNA, 22 nt, Artificial Sequence
  Synthetic
aaaauaaaaagaaagagagaga

SEQ ID NO: 219681 - RNA, 23 nt, Artificial Sequence
  Synthetic
aaaaauaaaaagaaagagagaga

SEQ ID NO: 219682 - RNA, 24 nt, Artificial Sequence
  Synthetic
aaaaaauaaaaagaaagagagaga

SEQ ID NO: 219683 - RNA, 18 nt, Artificial Sequence
  Synthetic
aggacagaaagagagaga

SEQ ID NO: 219684 - RNA, 19 nt, Artificial Sequence
  Synthetic
aaggacagaaagagagaga

SEQ ID NO: 219685 - RNA, 20 nt, Artificial Sequence
  Synthetic
uaaggacagaaagagagaga

SEQ ID NO: 219686 - RNA, 21 nt, Artificial Sequence
  Synthetic
auaaggacagaaagagagaga

SEQ ID NO: 219687 - RNA, 22 nt, Artificial Sequence
  Synthetic
uauaaggacagaaagagagaga

SEQ ID NO: 219688 - RNA, 23 nt, Artificial Sequence
  Synthetic
cuauaaggacagaaagagagaga

SEQ ID NO: 219689 - RNA, 24 nt, Artificial Sequence
  Synthetic
acuauaaggacagaaagagagaga

SEQ ID NO: 219690 - RNA, 18 nt, Artificial Sequence
  Synthetic
acaggggaaagagagaga

SEQ ID NO: 219691 - RNA, 19 nt, Artificial Sequence
  Synthetic
aacaggggaaagagagaga

SEQ ID NO: 219692 - RNA, 20 nt, Artificial Sequence
  Synthetic
caacaggggaaagagagaga

SEQ ID NO: 219693 - RNA, 21 nt, Artificial Sequence
  Synthetic
acaacaggggaaagagagaga

SEQ ID NO: 219694 - RNA, 22 nt, Artificial Sequence
  Synthetic
gacaacaggggaaagagagaga

SEQ ID NO: 219695 - RNA, 23 nt, Artificial Sequence
  Synthetic
ggacaacaggggaaagagagaga

SEQ ID NO: 219696 - RNA, 24 nt, Artificial Sequence
  Synthetic
gggacaacaggggaaagagagaga

SEQ ID NO: 219697 - RNA, 18 nt, Artificial Sequence
  Synthetic
gcauaaacaagagagaga

SEQ ID NO: 219698 - RNA, 19 nt, Artificial Sequence
  Synthetic
agcauaaacaagagagaga

SEQ ID NO: 219699 - RNA, 20 nt, Artificial Sequence
  Synthetic
gagcauaaacaagagagaga

SEQ ID NO: 219700 - RNA, 21 nt, Artificial Sequence
  Synthetic
agagcauaaacaagagagaga

SEQ ID NO: 219701 - RNA, 22 nt, Artificial Sequence
  Synthetic
gagagcauaaacaagagagaga

SEQ ID NO: 219702 - RNA, 23 nt, Artificial Sequence
  Synthetic
agagagcauaaacaagagagaga

SEQ ID NO: 219703 - RNA, 24 nt, Artificial Sequence
  Synthetic
uagagagcauaaacaagagagaga

SEQ ID NO: 219704 - RNA, 18 nt, Artificial Sequence
  Synthetic
gauauuuuaagagagaga

SEQ ID NO: 219705 - RNA, 19 nt, Artificial Sequence
  Synthetic
agauauuuuaagagagaga

SEQ ID NO: 219706 - RNA, 20 nt, Artificial Sequence
  Synthetic
aagauauuuuaagagagaga

SEQ ID NO: 219707 - RNA, 21 nt, Artificial Sequence
  Synthetic
uaagauauuuuaagagagaga

SEQ ID NO: 219708 - RNA, 22 nt, Artificial Sequence
  Synthetic
auaagauauuuuaagagagaga

SEQ ID NO: 219709 - RNA, 23 nt, Artificial Sequence
  Synthetic
aauaagauauuuuaagagagaga

SEQ ID NO: 219710 - RNA, 24 nt, Artificial Sequence
  Synthetic
caauaagauauuuuaagagagaga

SEQ ID NO: 219711 - RNA, 18 nt, Artificial Sequence
  Synthetic
uauaugaacagagagaga

SEQ ID NO: 219712 - RNA, 19 nt, Artificial Sequence
  Synthetic
auauaugaacagagagaga

SEQ ID NO: 219713 - RNA, 20 nt, Artificial Sequence
  Synthetic
uauauaugaacagagagaga

SEQ ID NO: 219714 - RNA, 21 nt, Artificial Sequence
  Synthetic
auauauaugaacagagagaga

SEQ ID NO: 219715 - RNA, 22 nt, Artificial Sequence
  Synthetic
uauauauaugaacagagagaga

SEQ ID NO: 219716 - RNA, 23 nt, Artificial Sequence
  Synthetic
auauauauaugaacagagagaga

SEQ ID NO: 219717 - RNA, 24 nt, Artificial Sequence
  Synthetic
uauauauauaugaacagagagaga

SEQ ID NO: 219718 - RNA, 18 nt, Artificial Sequence
  Synthetic
ugccaagacagagagaga

SEQ ID NO: 219719 - RNA, 19 nt, Artificial Sequence
  Synthetic
cugccaagacagagagaga

SEQ ID NO: 219720 - RNA, 20 nt, Artificial Sequence
  Synthetic
acugccaagacagagagaga

SEQ ID NO: 219721 - RNA, 21 nt, Artificial Sequence
  Synthetic
uacugccaagacagagagaga

SEQ ID NO: 219722 - RNA, 22 nt, Artificial Sequence
  Synthetic
auacugccaagacagagagaga

SEQ ID NO: 219723 - RNA, 23 nt, Artificial Sequence
  Synthetic
gauacugccaagacagagagaga

SEQ ID NO: 219724 - RNA, 24 nt, Artificial Sequence
  Synthetic
agauacugccaagacagagagaga

SEQ ID NO: 219725 - RNA, 18 nt, Artificial Sequence
  Synthetic
cacacagacagagagaga

SEQ ID NO: 219726 - RNA, 19 nt, Artificial Sequence
  Synthetic
acacacagacagagagaga

SEQ ID NO: 219727 - RNA, 20 nt, Artificial Sequence
  Synthetic
cacacacagacagagagaga

SEQ ID NO: 219728 - RNA, 21 nt, Artificial Sequence
  Synthetic
acacacacagacagagagaga

SEQ ID NO: 219729 - RNA, 22 nt, Artificial Sequence
  Synthetic
cacacacacagacagagagaga

SEQ ID NO: 219730 - RNA, 23 nt, Artificial Sequence
  Synthetic
acacacacacagacagagagaga

SEQ ID NO: 219731 - RNA, 24 nt, Artificial Sequence
  Synthetic
cacacacacacagacagagagaga

SEQ ID NO: 219732 - RNA, 18 nt, Artificial Sequence
  Synthetic
cacacauacagagagaga

SEQ ID NO: 219733 - RNA, 19 nt, Artificial Sequence
  Synthetic
acacacauacagagagaga

SEQ ID NO: 219734 - RNA, 20 nt, Artificial Sequence
  Synthetic
uacacacauacagagagaga

SEQ ID NO: 219735 - RNA, 21 nt, Artificial Sequence
  Synthetic
auacacacauacagagagaga

SEQ ID NO: 219736 - RNA, 22 nt, Artificial Sequence
  Synthetic
uauacacacauacagagagaga

SEQ ID NO: 219737 - RNA, 23 nt, Artificial Sequence
  Synthetic
auauacacacauacagagagaga

SEQ ID NO: 219738 - RNA, 24 nt, Artificial Sequence
  Synthetic
uauauacacacauacagagagaga

SEQ ID NO: 219739 - RNA, 18 nt, Artificial Sequence
  Synthetic
uuuaaaaagagagagaga

SEQ ID NO: 219740 - RNA, 19 nt, Artificial Sequence
  Synthetic
auuuaaaaagagagagaga

SEQ ID NO: 219741 - RNA, 20 nt, Artificial Sequence
  Synthetic
aauuuaaaaagagagagaga

SEQ ID NO: 219742 - RNA, 21 nt, Artificial Sequence
  Synthetic
aaauuuaaaaagagagagaga

SEQ ID NO: 219743 - RNA, 22 nt, Artificial Sequence
  Synthetic
caaauuuaaaaagagagagaga

SEQ ID NO: 219744 - RNA, 23 nt, Artificial Sequence
  Synthetic
acaaauuuaaaaagagagagaga

SEQ ID NO: 219745 - RNA, 24 nt, Artificial Sequence
  Synthetic
uacaaauuuaaaaagagagagaga

SEQ ID NO: 219746 - RNA, 18 nt, Artificial Sequence
  Synthetic
aaaagaaagagagagaga

SEQ ID NO: 219747 - RNA, 19 nt, Artificial Sequence
  Synthetic
aaaaagaaagagagagaga

SEQ ID NO: 219748 - RNA, 20 nt, Artificial Sequence
  Synthetic
uaaaaagaaagagagagaga

SEQ ID NO: 219749 - RNA, 21 nt, Artificial Sequence
  Synthetic
auaaaaagaaagagagagaga

SEQ ID NO: 219750 - RNA, 22 nt, Artificial Sequence
  Synthetic
aauaaaaagaaagagagagaga

SEQ ID NO: 219751 - RNA, 23 nt, Artificial Sequence
  Synthetic
aaauaaaaagaaagagagagaga

SEQ ID NO: 219752 - RNA, 24 nt, Artificial Sequence
  Synthetic
aaaauaaaaagaaagagagagaga

SEQ ID NO: 219753 - RNA, 18 nt, Artificial Sequence
  Synthetic
gacagaaagagagagaga

SEQ ID NO: 219754 - RNA, 19 nt, Artificial Sequence
  Synthetic
ggacagaaagagagagaga

SEQ ID NO: 219755 - RNA, 20 nt, Artificial Sequence
  Synthetic
aggacagaaagagagagaga

SEQ ID NO: 219756 - RNA, 21 nt, Artificial Sequence
  Synthetic
aaggacagaaagagagagaga

SEQ ID NO: 219757 - RNA, 22 nt, Artificial Sequence
  Synthetic
uaaggacagaaagagagagaga

SEQ ID NO: 219758 - RNA, 23 nt, Artificial Sequence
  Synthetic
auaaggacagaaagagagagaga

SEQ ID NO: 219759 - RNA, 24 nt, Artificial Sequence
  Synthetic
uauaaggacagaaagagagagaga

SEQ ID NO: 219760 - RNA, 18 nt, Artificial Sequence
  Synthetic
uaugaacagagagagaga

SEQ ID NO: 219761 - RNA, 19 nt, Artificial Sequence
  Synthetic
auaugaacagagagagaga

SEQ ID NO: 219762 - RNA, 20 nt, Artificial Sequence
  Synthetic
uauaugaacagagagagaga

SEQ ID NO: 219763 - RNA, 21 nt, Artificial Sequence
  Synthetic
auauaugaacagagagagaga

SEQ ID NO: 219764 - RNA, 22 nt, Artificial Sequence
  Synthetic
uauauaugaacagagagagaga

SEQ ID NO: 219765 - RNA, 23 nt, Artificial Sequence
  Synthetic
auauauaugaacagagagagaga

SEQ ID NO: 219766 - RNA, 24 nt, Artificial Sequence
  Synthetic
uauauauaugaacagagagagaga

SEQ ID NO: 219767 - RNA, 18 nt, Artificial Sequence
  Synthetic
cacagacagagagagaga

SEQ ID NO: 219768 - RNA, 19 nt, Artificial Sequence
  Synthetic
acacagacagagagagaga

SEQ ID NO: 219769 - RNA, 20 nt, Artificial Sequence
  Synthetic
cacacagacagagagagaga

SEQ ID NO: 219770 - RNA, 21 nt, Artificial Sequence
  Synthetic
acacacagacagagagagaga

SEQ ID NO: 219771 - RNA, 22 nt, Artificial Sequence
  Synthetic
cacacacagacagagagagaga

SEQ ID NO: 219772 - RNA, 23 nt, Artificial Sequence
  Synthetic
acacacacagacagagagagaga

SEQ ID NO: 219773 - RNA, 24 nt, Artificial Sequence
  Synthetic
cacacacacagacagagagagaga

SEQ ID NO: 219774 - RNA, 18 nt, Artificial Sequence
  Synthetic
cacauacagagagagaga

SEQ ID NO: 219775 - RNA, 19 nt, Artificial Sequence
  Synthetic
acacauacagagagagaga

SEQ ID NO: 219776 - RNA, 20 nt, Artificial Sequence
  Synthetic
cacacauacagagagagaga

SEQ ID NO: 219777 - RNA, 21 nt, Artificial Sequence
  Synthetic
acacacauacagagagagaga

SEQ ID NO: 219778 - RNA, 22 nt, Artificial Sequence
  Synthetic
uacacacauacagagagagaga

SEQ ID NO: 219779 - RNA, 23 nt, Artificial Sequence
  Synthetic
auacacacauacagagagagaga

SEQ ID NO: 219780 - RNA, 24 nt, Artificial Sequence
  Synthetic
uauacacacauacagagagagaga

SEQ ID NO: 219781 - RNA, 18 nt, Artificial Sequence
  Synthetic
uaaaaagagagagagaga

SEQ ID NO: 219782 - RNA, 19 nt, Artificial Sequence
  Synthetic
uuaaaaagagagagagaga

SEQ ID NO: 219783 - RNA, 20 nt, Artificial Sequence
  Synthetic
uuuaaaaagagagagagaga

SEQ ID NO: 219784 - RNA, 21 nt, Artificial Sequence
  Synthetic
auuuaaaaagagagagagaga

SEQ ID NO: 219785 - RNA, 22 nt, Artificial Sequence
  Synthetic
aauuuaaaaagagagagagaga

SEQ ID NO: 219786 - RNA, 23 nt, Artificial Sequence
  Synthetic
aaauuuaaaaagagagagagaga

SEQ ID NO: 219787 - RNA, 24 nt, Artificial Sequence
  Synthetic
caaauuuaaaaagagagagagaga

SEQ ID NO: 219788 - RNA, 18 nt, Artificial Sequence
  Synthetic
aagaaagagagagagaga

SEQ ID NO: 219789 - RNA, 19 nt, Artificial Sequence
  Synthetic
aaagaaagagagagagaga

SEQ ID NO: 219790 - RNA, 20 nt, Artificial Sequence
  Synthetic
aaaagaaagagagagagaga

SEQ ID NO: 219791 - RNA, 21 nt, Artificial Sequence
  Synthetic
aaaaagaaagagagagagaga

SEQ ID NO: 219792 - RNA, 22 nt, Artificial Sequence
  Synthetic
uaaaaagaaagagagagagaga

SEQ ID NO: 219793 - RNA, 23 nt, Artificial Sequence
  Synthetic
auaaaaagaaagagagagagaga

SEQ ID NO: 219794 - RNA, 24 nt, Artificial Sequence
  Synthetic
aauaaaaagaaagagagagagaga

SEQ ID NO: 219795 - RNA, 18 nt, Artificial Sequence
  Synthetic
ugaacagagagagagaga

SEQ ID NO: 219796 - RNA, 19 nt, Artificial Sequence
  Synthetic
augaacagagagagagaga

SEQ ID NO: 219797 - RNA, 20 nt, Artificial Sequence
  Synthetic
uaugaacagagagagagaga

SEQ ID NO: 219798 - RNA, 21 nt, Artificial Sequence
  Synthetic
auaugaacagagagagagaga

SEQ ID NO: 219799 - RNA, 22 nt, Artificial Sequence
  Synthetic
uauaugaacagagagagagaga

SEQ ID NO: 219800 - RNA, 23 nt, Artificial Sequence
  Synthetic
auauaugaacagagagagagaga

SEQ ID NO: 219801 - RNA, 24 nt, Artificial Sequence
  Synthetic
uauauaugaacagagagagagaga

SEQ ID NO: 219802 - RNA, 18 nt, Artificial Sequence
  Synthetic
cagacagagagagagaga

SEQ ID NO: 219803 - RNA, 19 nt, Artificial Sequence
  Synthetic
acagacagagagagagaga

SEQ ID NO: 219804 - RNA, 20 nt, Artificial Sequence
  Synthetic
cacagacagagagagagaga

SEQ ID NO: 219805 - RNA, 21 nt, Artificial Sequence
  Synthetic
acacagacagagagagagaga

SEQ ID NO: 219806 - RNA, 22 nt, Artificial Sequence
  Synthetic
cacacagacagagagagagaga

SEQ ID NO: 219807 - RNA, 23 nt, Artificial Sequence
  Synthetic
acacacagacagagagagagaga

SEQ ID NO: 219808 - RNA, 24 nt, Artificial Sequence
  Synthetic
cacacacagacagagagagagaga

SEQ ID NO: 219809 - RNA, 18 nt, Artificial Sequence
  Synthetic
cauacagagagagagaga

SEQ ID NO: 219810 - RNA, 19 nt, Artificial Sequence
  Synthetic
acauacagagagagagaga

SEQ ID NO: 219811 - RNA, 20 nt, Artificial Sequence
  Synthetic
cacauacagagagagagaga

SEQ ID NO: 219812 - RNA, 21 nt, Artificial Sequence
  Synthetic
acacauacagagagagagaga

SEQ ID NO: 219813 - RNA, 22 nt, Artificial Sequence
  Synthetic
cacacauacagagagagagaga

SEQ ID NO: 219814 - RNA, 23 nt, Artificial Sequence
  Synthetic
acacacauacagagagagagaga

SEQ ID NO: 219815 - RNA, 24 nt, Artificial Sequence
  Synthetic
uacacacauacagagagagagaga

SEQ ID NO: 219816 - RNA, 18 nt, Artificial Sequence
  Synthetic
gaaagagagagagagaga

SEQ ID NO: 219817 - RNA, 19 nt, Artificial Sequence
  Synthetic
agaaagagagagagagaga

SEQ ID NO: 219818 - RNA, 20 nt, Artificial Sequence
  Synthetic
aagaaagagagagagagaga

SEQ ID NO: 219819 - RNA, 21 nt, Artificial Sequence
  Synthetic
aaagaaagagagagagagaga

SEQ ID NO: 219820 - RNA, 22 nt, Artificial Sequence
  Synthetic
aaaagaaagagagagagagaga

SEQ ID NO: 219821 - RNA, 23 nt, Artificial Sequence
  Synthetic
aaaaagaaagagagagagagaga

SEQ ID NO: 219822 - RNA, 24 nt, Artificial Sequence
  Synthetic
uaaaaagaaagagagagagagaga

SEQ ID NO: 219823 - RNA, 20 nt, Artificial Sequence
  Synthetic
cagaaagagagagagagaga

SEQ ID NO: 219824 - RNA, 21 nt, Artificial Sequence
  Synthetic
acagaaagagagagagagaga

SEQ ID NO: 219825 - RNA, 22 nt, Artificial Sequence
  Synthetic
gacagaaagagagagagagaga

SEQ ID NO: 219826 - RNA, 23 nt, Artificial Sequence
  Synthetic
ggacagaaagagagagagagaga

SEQ ID NO: 219827 - RNA, 24 nt, Artificial Sequence
  Synthetic
aggacagaaagagagagagagaga

SEQ ID NO: 219828 - RNA, 18 nt, Artificial Sequence
  Synthetic
aacagagagagagagaga

SEQ ID NO: 219829 - RNA, 19 nt, Artificial Sequence
  Synthetic
gaacagagagagagagaga

SEQ ID NO: 219830 - RNA, 20 nt, Artificial Sequence
  Synthetic
ugaacagagagagagagaga

SEQ ID NO: 219831 - RNA, 21 nt, Artificial Sequence
  Synthetic
augaacagagagagagagaga

SEQ ID NO: 219832 - RNA, 22 nt, Artificial Sequence
  Synthetic
uaugaacagagagagagagaga

SEQ ID NO: 219833 - RNA, 23 nt, Artificial Sequence
  Synthetic
auaugaacagagagagagagaga

SEQ ID NO: 219834 - RNA, 24 nt, Artificial Sequence
  Synthetic
uauaugaacagagagagagagaga

SEQ ID NO: 219835 - RNA, 18 nt, Artificial Sequence
  Synthetic
gacagagagagagagaga

SEQ ID NO: 219836 - RNA, 19 nt, Artificial Sequence
  Synthetic
agacagagagagagagaga

SEQ ID NO: 219837 - RNA, 20 nt, Artificial Sequence
  Synthetic
cagacagagagagagagaga

SEQ ID NO: 219838 - RNA, 21 nt, Artificial Sequence
  Synthetic
acagacagagagagagagaga

SEQ ID NO: 219839 - RNA, 22 nt, Artificial Sequence
  Synthetic
cacagacagagagagagagaga

SEQ ID NO: 219840 - RNA, 23 nt, Artificial Sequence
  Synthetic
acacagacagagagagagagaga

SEQ ID NO: 219841 - RNA, 24 nt, Artificial Sequence
  Synthetic
cacacagacagagagagagagaga

SEQ ID NO: 219842 - RNA, 18 nt, Artificial Sequence
  Synthetic
uacagagagagagagaga

SEQ ID NO: 219843 - RNA, 19 nt, Artificial Sequence
  Synthetic
auacagagagagagagaga

SEQ ID NO: 219844 - RNA, 20 nt, Artificial Sequence
  Synthetic
cauacagagagagagagaga

SEQ ID NO: 219845 - RNA, 21 nt, Artificial Sequence
  Synthetic
acauacagagagagagagaga

SEQ ID NO: 219846 - RNA, 22 nt, Artificial Sequence
  Synthetic
cacauacagagagagagagaga

SEQ ID NO: 219847 - RNA, 23 nt, Artificial Sequence
  Synthetic
acacauacagagagagagagaga

SEQ ID NO: 219848 - RNA, 24 nt, Artificial Sequence
  Synthetic
cacacauacagagagagagagaga

SEQ ID NO: 219849 - RNA, 20 nt, Artificial Sequence
  Synthetic
gaaagagagagagagagaga

SEQ ID NO: 219850 - RNA, 21 nt, Artificial Sequence
  Synthetic
agaaagagagagagagagaga

SEQ ID NO: 219851 - RNA, 22 nt, Artificial Sequence
  Synthetic
aagaaagagagagagagagaga

SEQ ID NO: 219852 - RNA, 23 nt, Artificial Sequence
  Synthetic
aaagaaagagagagagagagaga

SEQ ID NO: 219853 - RNA, 24 nt, Artificial Sequence
  Synthetic
aaaagaaagagagagagagagaga

SEQ ID NO: 219854 - RNA, 18 nt, Artificial Sequence
  Synthetic
cagagagagagagagaga

SEQ ID NO: 219855 - RNA, 19 nt, Artificial Sequence
  Synthetic
acagagagagagagagaga

SEQ ID NO: 219856 - RNA, 20 nt, Artificial Sequence
  Synthetic
aacagagagagagagagaga

SEQ ID NO: 219857 - RNA, 21 nt, Artificial Sequence
  Synthetic
gaacagagagagagagagaga

SEQ ID NO: 219858 - RNA, 22 nt, Artificial Sequence
  Synthetic
ugaacagagagagagagagaga

SEQ ID NO: 219859 - RNA, 23 nt, Artificial Sequence
  Synthetic
augaacagagagagagagagaga

SEQ ID NO: 219860 - RNA, 24 nt, Artificial Sequence
  Synthetic
uaugaacagagagagagagagaga

SEQ ID NO: 219861 - RNA, 20 nt, Artificial Sequence
  Synthetic
gacagagagagagagagaga

SEQ ID NO: 219862 - RNA, 21 nt, Artificial Sequence
  Synthetic
agacagagagagagagagaga

SEQ ID NO: 219863 - RNA, 22 nt, Artificial Sequence
  Synthetic
cagacagagagagagagagaga

SEQ ID NO: 219864 - RNA, 23 nt, Artificial Sequence
  Synthetic
acagacagagagagagagagaga

SEQ ID NO: 219865 - RNA, 24 nt, Artificial Sequence
  Synthetic
cacagacagagagagagagagaga

SEQ ID NO: 219866 - RNA, 20 nt, Artificial Sequence
  Synthetic
uacagagagagagagagaga

SEQ ID NO: 219867 - RNA, 21 nt, Artificial Sequence
  Synthetic
auacagagagagagagagaga

SEQ ID NO: 219868 - RNA, 22 nt, Artificial Sequence
  Synthetic
cauacagagagagagagagaga

SEQ ID NO: 219869 - RNA, 23 nt, Artificial Sequence
  Synthetic
acauacagagagagagagagaga

SEQ ID NO: 219870 - RNA, 24 nt, Artificial Sequence
  Synthetic
cacauacagagagagagagagaga

SEQ ID NO: 219871 - RNA, 18 nt, Artificial Sequence
  Synthetic
gagagagagagagagaga

SEQ ID NO: 219872 - RNA, 19 nt, Artificial Sequence
  Synthetic
agagagagagagagagaga

SEQ ID NO: 219873 - RNA, 20 nt, Artificial Sequence
  Synthetic
aagagagagagagagagaga

SEQ ID NO: 219874 - RNA, 21 nt, Artificial Sequence
  Synthetic
aaagagagagagagagagaga

SEQ ID NO: 219875 - RNA, 22 nt, Artificial Sequence
  Synthetic
gaaagagagagagagagagaga

SEQ ID NO: 219876 - RNA, 23 nt, Artificial Sequence
  Synthetic
agaaagagagagagagagagaga

SEQ ID NO: 219877 - RNA, 24 nt, Artificial Sequence
  Synthetic
aagaaagagagagagagagagaga

SEQ ID NO: 219878 - RNA, 20 nt, Artificial Sequence
  Synthetic
cagagagagagagagagaga

SEQ ID NO: 219879 - RNA, 22 nt, Artificial Sequence
  Synthetic
gacagagagagagagagagaga

SEQ ID NO: 219880 - RNA, 23 nt, Artificial Sequence
  Synthetic
agacagagagagagagagagaga

SEQ ID NO: 219881 - RNA, 24 nt, Artificial Sequence
  Synthetic
cagacagagagagagagagagaga

SEQ ID NO: 219882 - RNA, 22 nt, Artificial Sequence
  Synthetic
uacagagagagagagagagaga

SEQ ID NO: 219883 - RNA, 23 nt, Artificial Sequence
  Synthetic
auacagagagagagagagagaga

SEQ ID NO: 219884 - RNA, 24 nt, Artificial Sequence
  Synthetic
cauacagagagagagagagagaga

SEQ ID NO: 219885 - RNA, 21 nt, Artificial Sequence
  Synthetic
agagagagagagagagagaga

SEQ ID NO: 219886 - RNA, 22 nt, Artificial Sequence
  Synthetic
aagagagagagagagagagaga

SEQ ID NO: 219887 - RNA, 23 nt, Artificial Sequence
  Synthetic
aaagagagagagagagagagaga

SEQ ID NO: 219888 - RNA, 24 nt, Artificial Sequence
  Synthetic
gaaagagagagagagagagagaga

SEQ ID NO: 219889 - RNA, 22 nt, Artificial Sequence
  Synthetic
cagagagagagagagagagaga

SEQ ID NO: 219890 - RNA, 23 nt, Artificial Sequence
  Synthetic
acagagagagagagagagagaga

SEQ ID NO: 219891 - RNA, 24 nt, Artificial Sequence
  Synthetic
gacagagagagagagagagagaga

SEQ ID NO: 219892 - RNA, 24 nt, Artificial Sequence
  Synthetic
uacagagagagagagagagagaga

SEQ ID NO: 219893 - RNA, 22 nt, Artificial Sequence
  Synthetic
gagagagagagagagagagaga

SEQ ID NO: 219894 - RNA, 23 nt, Artificial Sequence
  Synthetic
agagagagagagagagagagaga

SEQ ID NO: 219895 - RNA, 24 nt, Artificial Sequence
  Synthetic
cagagagagagagagagagagaga

SEQ ID NO: 219896 - RNA, 24 nt, Artificial Sequence
  Synthetic
uagagagagagagagagagagaga

SEQ ID NO: 219897 - RNA, 23 nt, Artificial Sequence
  Synthetic
ugagagagagagagagagagaga

SEQ ID NO: 219898 - RNA, 24 nt, Artificial Sequence
  Synthetic
gugagagagagagagagagagaga

SEQ ID NO: 219899 - RNA, 22 nt, Artificial Sequence
  Synthetic
uagagagagagagagagagaga

SEQ ID NO: 219900 - RNA, 23 nt, Artificial Sequence
  Synthetic
auagagagagagagagagagaga

SEQ ID NO: 219901 - RNA, 24 nt, Artificial Sequence
  Synthetic
uauagagagagagagagagagaga

SEQ ID NO: 219902 - RNA, 21 nt, Artificial Sequence
  Synthetic
cgagagagagagagagagaga

SEQ ID NO: 219903 - RNA, 22 nt, Artificial Sequence
  Synthetic
ucgagagagagagagagagaga

SEQ ID NO: 219904 - RNA, 23 nt, Artificial Sequence
  Synthetic
uucgagagagagagagagagaga

SEQ ID NO: 219905 - RNA, 24 nt, Artificial Sequence
  Synthetic
uuucgagagagagagagagagaga

SEQ ID NO: 219906 - RNA, 24 nt, Artificial Sequence
  Synthetic
cagggagagagagagagagagaga

SEQ ID NO: 219907 - RNA, 24 nt, Artificial Sequence
  Synthetic
augugagagagagagagagagaga

SEQ ID NO: 219908 - RNA, 20 nt, Artificial Sequence
  Synthetic
uagagagagagagagagaga

SEQ ID NO: 219909 - RNA, 21 nt, Artificial Sequence
  Synthetic
auagagagagagagagagaga

SEQ ID NO: 219910 - RNA, 22 nt, Artificial Sequence
  Synthetic
uauagagagagagagagagaga

SEQ ID NO: 219911 - RNA, 23 nt, Artificial Sequence
  Synthetic
auauagagagagagagagagaga

SEQ ID NO: 219912 - RNA, 24 nt, Artificial Sequence
  Synthetic
uauauagagagagagagagagaga

SEQ ID NO: 219913 - RNA, 19 nt, Artificial Sequence
  Synthetic
ggagagagagagagagaga

SEQ ID NO: 219914 - RNA, 20 nt, Artificial Sequence
  Synthetic
gggagagagagagagagaga

SEQ ID NO: 219915 - RNA, 21 nt, Artificial Sequence
  Synthetic
agggagagagagagagagaga

SEQ ID NO: 219916 - RNA, 22 nt, Artificial Sequence
  Synthetic
cagggagagagagagagagaga

SEQ ID NO: 219917 - RNA, 23 nt, Artificial Sequence
  Synthetic
gcagggagagagagagagagaga

SEQ ID NO: 219918 - RNA, 24 nt, Artificial Sequence
  Synthetic
ggcagggagagagagagagagaga

SEQ ID NO: 219919 - RNA, 22 nt, Artificial Sequence
  Synthetic
gagggagagagagagagagaga

SEQ ID NO: 219920 - RNA, 23 nt, Artificial Sequence
  Synthetic
agagggagagagagagagagaga

SEQ ID NO: 219921 - RNA, 24 nt, Artificial Sequence
  Synthetic
gagagggagagagagagagagaga

SEQ ID NO: 219922 - RNA, 19 nt, Artificial Sequence
  Synthetic
ugagagagagagagagaga

SEQ ID NO: 219923 - RNA, 20 nt, Artificial Sequence
  Synthetic
cugagagagagagagagaga

SEQ ID NO: 219924 - RNA, 21 nt, Artificial Sequence
  Synthetic
ucugagagagagagagagaga

SEQ ID NO: 219925 - RNA, 22 nt, Artificial Sequence
  Synthetic
uucugagagagagagagagaga

SEQ ID NO: 219926 - RNA, 23 nt, Artificial Sequence
  Synthetic
auucugagagagagagagagaga

SEQ ID NO: 219927 - RNA, 24 nt, Artificial Sequence
  Synthetic
gauucugagagagagagagagaga

SEQ ID NO: 219928 - RNA, 20 nt, Artificial Sequence
  Synthetic
gugagagagagagagagaga

SEQ ID NO: 219929 - RNA, 21 nt, Artificial Sequence
  Synthetic
ugugagagagagagagagaga

SEQ ID NO: 219930 - RNA, 22 nt, Artificial Sequence
  Synthetic
augugagagagagagagagaga

SEQ ID NO: 219931 - RNA, 23 nt, Artificial Sequence
  Synthetic
uaugugagagagagagagagaga

SEQ ID NO: 219932 - RNA, 24 nt, Artificial Sequence
  Synthetic
guaugugagagagagagagagaga

SEQ ID NO: 219933 - RNA, 22 nt, Artificial Sequence
  Synthetic
gugugagagagagagagagaga

SEQ ID NO: 219934 - RNA, 23 nt, Artificial Sequence
  Synthetic
ugugugagagagagagagagaga

SEQ ID NO: 219935 - RNA, 24 nt, Artificial Sequence
  Synthetic
gugugugagagagagagagagaga

SEQ ID NO: 219936 - RNA, 18 nt, Artificial Sequence
  Synthetic
uagagagagagagagaga

SEQ ID NO: 219937 - RNA, 19 nt, Artificial Sequence
  Synthetic
auagagagagagagagaga

SEQ ID NO: 219938 - RNA, 20 nt, Artificial Sequence
  Synthetic
uauagagagagagagagaga

SEQ ID NO: 219939 - RNA, 21 nt, Artificial Sequence
  Synthetic
auauagagagagagagagaga

SEQ ID NO: 219940 - RNA, 22 nt, Artificial Sequence
  Synthetic
uauauagagagagagagagaga

SEQ ID NO: 219941 - RNA, 23 nt, Artificial Sequence
  Synthetic
auauauagagagagagagagaga

SEQ ID NO: 219942 - RNA, 24 nt, Artificial Sequence
  Synthetic
uauauauagagagagagagagaga

SEQ ID NO: 219943 - RNA, 18 nt, Artificial Sequence
  Synthetic
gggagagagagagagaga

SEQ ID NO: 219944 - RNA, 19 nt, Artificial Sequence
  Synthetic
agggagagagagagagaga

SEQ ID NO: 219945 - RNA, 20 nt, Artificial Sequence
  Synthetic
cagggagagagagagagaga

SEQ ID NO: 219946 - RNA, 21 nt, Artificial Sequence
  Synthetic
gcagggagagagagagagaga

SEQ ID NO: 219947 - RNA, 22 nt, Artificial Sequence
  Synthetic
ggcagggagagagagagagaga

SEQ ID NO: 219948 - RNA, 23 nt, Artificial Sequence
  Synthetic
aggcagggagagagagagagaga

SEQ ID NO: 219949 - RNA, 24 nt, Artificial Sequence
  Synthetic
gaggcagggagagagagagagaga

SEQ ID NO: 219950 - RNA, 20 nt, Artificial Sequence
  Synthetic
gagggagagagagagagaga

SEQ ID NO: 219951 - RNA, 21 nt, Artificial Sequence
  Synthetic
agagggagagagagagagaga

SEQ ID NO: 219952 - RNA, 22 nt, Artificial Sequence
  Synthetic
gagagggagagagagagagaga

SEQ ID NO: 219953 - RNA, 23 nt, Artificial Sequence
  Synthetic
ggagagggagagagagagagaga

SEQ ID NO: 219954 - RNA, 24 nt, Artificial Sequence
  Synthetic
aggagagggagagagagagagaga

SEQ ID NO: 219955 - RNA, 19 nt, Artificial Sequence
  Synthetic
ugugagagagagagagaga

SEQ ID NO: 219956 - RNA, 20 nt, Artificial Sequence
  Synthetic
augugagagagagagagaga

SEQ ID NO: 219957 - RNA, 21 nt, Artificial Sequence
  Synthetic
uaugugagagagagagagaga

SEQ ID NO: 219958 - RNA, 22 nt, Artificial Sequence
  Synthetic
guaugugagagagagagagaga

SEQ ID NO: 219959 - RNA, 23 nt, Artificial Sequence
  Synthetic
uguaugugagagagagagagaga

SEQ ID NO: 219960 - RNA, 24 nt, Artificial Sequence
  Synthetic
guguaugugagagagagagagaga

SEQ ID NO: 219961 - RNA, 20 nt, Artificial Sequence
  Synthetic
gugugagagagagagagaga

SEQ ID NO: 219962 - RNA, 21 nt, Artificial Sequence
  Synthetic
ugugugagagagagagagaga

SEQ ID NO: 219963 - RNA, 22 nt, Artificial Sequence
  Synthetic
gugugugagagagagagagaga

SEQ ID NO: 219964 - RNA, 23 nt, Artificial Sequence
  Synthetic
ugugugugagagagagagagaga

SEQ ID NO: 219965 - RNA, 24 nt, Artificial Sequence
  Synthetic
gugugugugagagagagagagaga

SEQ ID NO: 219966 - RNA, 18 nt, Artificial Sequence
  Synthetic
uauagagagagagagaga

SEQ ID NO: 219967 - RNA, 19 nt, Artificial Sequence
  Synthetic
auauagagagagagagaga

SEQ ID NO: 219968 - RNA, 20 nt, Artificial Sequence
  Synthetic
uauauagagagagagagaga

SEQ ID NO: 219969 - RNA, 21 nt, Artificial Sequence
  Synthetic
auauauagagagagagagaga

SEQ ID NO: 219970 - RNA, 22 nt, Artificial Sequence
  Synthetic
uauauauagagagagagagaga

SEQ ID NO: 219971 - RNA, 23 nt, Artificial Sequence
  Synthetic
auauauauagagagagagagaga

SEQ ID NO: 219972 - RNA, 24 nt, Artificial Sequence
  Synthetic
uauauauauagagagagagagaga

SEQ ID NO: 219973 - RNA, 18 nt, Artificial Sequence
  Synthetic
uuucgagagagagagaga

SEQ ID NO: 219974 - RNA, 19 nt, Artificial Sequence
  Synthetic
guuucgagagagagagaga

SEQ ID NO: 219975 - RNA, 20 nt, Artificial Sequence
  Synthetic
gguuucgagagagagagaga

SEQ ID NO: 219976 - RNA, 21 nt, Artificial Sequence
  Synthetic
ugguuucgagagagagagaga

SEQ ID NO: 219977 - RNA, 22 nt, Artificial Sequence
  Synthetic
cugguuucgagagagagagaga

SEQ ID NO: 219978 - RNA, 23 nt, Artificial Sequence
  Synthetic
ucugguuucgagagagagagaga

SEQ ID NO: 219979 - RNA, 24 nt, Artificial Sequence
  Synthetic
cucugguuucgagagagagagaga

SEQ ID NO: 219980 - RNA, 18 nt, Artificial Sequence
  Synthetic
cagggagagagagagaga

SEQ ID NO: 219981 - RNA, 19 nt, Artificial Sequence
  Synthetic
gcagggagagagagagaga

SEQ ID NO: 219982 - RNA, 20 nt, Artificial Sequence
  Synthetic
ggcagggagagagagagaga

SEQ ID NO: 219983 - RNA, 21 nt, Artificial Sequence
  Synthetic
aggcagggagagagagagaga

SEQ ID NO: 219984 - RNA, 22 nt, Artificial Sequence
  Synthetic
gaggcagggagagagagagaga

SEQ ID NO: 219985 - RNA, 23 nt, Artificial Sequence
  Synthetic
ggaggcagggagagagagagaga

SEQ ID NO: 219986 - RNA, 24 nt, Artificial Sequence
  Synthetic
gggaggcagggagagagagagaga

SEQ ID NO: 219987 - RNA, 19 nt, Artificial Sequence
  Synthetic
agagggagagagagagaga

SEQ ID NO: 219988 - RNA, 20 nt, Artificial Sequence
  Synthetic
gagagggagagagagagaga

SEQ ID NO: 219989 - RNA, 21 nt, Artificial Sequence
  Synthetic
ggagagggagagagagagaga

SEQ ID NO: 219990 - RNA, 22 nt, Artificial Sequence
  Synthetic
aggagagggagagagagagaga

SEQ ID NO: 219991 - RNA, 23 nt, Artificial Sequence
  Synthetic
gaggagagggagagagagagaga

SEQ ID NO: 219992 - RNA, 24 nt, Artificial Sequence
  Synthetic
ggaggagagggagagagagagaga

SEQ ID NO: 219993 - RNA, 18 nt, Artificial Sequence
  Synthetic
augugagagagagagaga

SEQ ID NO: 219994 - RNA, 19 nt, Artificial Sequence
  Synthetic
uaugugagagagagagaga

SEQ ID NO: 219995 - RNA, 20 nt, Artificial Sequence
  Synthetic
guaugugagagagagagaga

SEQ ID NO: 219996 - RNA, 21 nt, Artificial Sequence
  Synthetic
uguaugugagagagagagaga

SEQ ID NO: 219997 - RNA, 22 nt, Artificial Sequence
  Synthetic
guguaugugagagagagagaga

SEQ ID NO: 219998 - RNA, 23 nt, Artificial Sequence
  Synthetic
uguguaugugagagagagagaga

SEQ ID NO: 219999 - RNA, 24 nt, Artificial Sequence
  Synthetic
guguguaugugagagagagagaga

SEQ ID NO: 220000 - RNA, 18 nt, Artificial Sequence
  Synthetic
gugugagagagagagaga

SEQ ID NO: 220001 - RNA, 19 nt, Artificial Sequence
  Synthetic
ugugugagagagagagaga

SEQ ID NO: 220002 - RNA, 20 nt, Artificial Sequence
  Synthetic
gugugugagagagagagaga

SEQ ID NO: 220003 - RNA, 18 nt, Artificial Sequence
  Synthetic
gauugagagagagagaga

SEQ ID NO: 220004 - RNA, 19 nt, Artificial Sequence
  Synthetic
agauugagagagagagaga

SEQ ID NO: 220005 - RNA, 20 nt, Artificial Sequence
  Synthetic
gagauugagagagagagaga

SEQ ID NO: 220006 - RNA, 21 nt, Artificial Sequence
  Synthetic
agagauugagagagagagaga

SEQ ID NO: 220007 - RNA, 22 nt, Artificial Sequence
  Synthetic
gagagauugagagagagagaga

SEQ ID NO: 220008 - RNA, 23 nt, Artificial Sequence
  Synthetic
agagagauugagagagagagaga

SEQ ID NO: 220009 - RNA, 24 nt, Artificial Sequence
  Synthetic
gagagagauugagagagagagaga

SEQ ID NO: 220010 - RNA, 18 nt, Artificial Sequence
  Synthetic
uauauagagagagagaga

SEQ ID NO: 220011 - RNA, 19 nt, Artificial Sequence
  Synthetic
auauauagagagagagaga

SEQ ID NO: 220012 - RNA, 20 nt, Artificial Sequence
  Synthetic
uauauauagagagagagaga

SEQ ID NO: 220013 - RNA, 21 nt, Artificial Sequence
  Synthetic
auauauauagagagagagaga

SEQ ID NO: 220014 - RNA, 22 nt, Artificial Sequence
  Synthetic
uauauauauagagagagagaga

SEQ ID NO: 220015 - RNA, 23 nt, Artificial Sequence
  Synthetic
auauauauauagagagagagaga

SEQ ID NO: 220016 - RNA, 24 nt, Artificial Sequence
  Synthetic
uauauauauauagagagagagaga

SEQ ID NO: 220017 - RNA, 18 nt, Artificial Sequence
  Synthetic
gguuucgagagagagaga

SEQ ID NO: 220018 - RNA, 19 nt, Artificial Sequence
  Synthetic
ugguuucgagagagagaga

SEQ ID NO: 220019 - RNA, 20 nt, Artificial Sequence
  Synthetic
cugguuucgagagagagaga

SEQ ID NO: 220020 - RNA, 21 nt, Artificial Sequence
  Synthetic
ucugguuucgagagagagaga

SEQ ID NO: 220021 - RNA, 22 nt, Artificial Sequence
  Synthetic
cucugguuucgagagagagaga

SEQ ID NO: 220022 - RNA, 23 nt, Artificial Sequence
  Synthetic
ucucugguuucgagagagagaga

SEQ ID NO: 220023 - RNA, 24 nt, Artificial Sequence
  Synthetic
cucucugguuucgagagagagaga

SEQ ID NO: 220024 - RNA, 18 nt, Artificial Sequence
  Synthetic
ggcagggagagagagaga

SEQ ID NO: 220025 - RNA, 19 nt, Artificial Sequence
  Synthetic
aggcagggagagagagaga

SEQ ID NO: 220026 - RNA, 20 nt, Artificial Sequence
  Synthetic
gaggcagggagagagagaga

SEQ ID NO: 220027 - RNA, 21 nt, Artificial Sequence
  Synthetic
ggaggcagggagagagagaga

SEQ ID NO: 220028 - RNA, 22 nt, Artificial Sequence
  Synthetic
gggaggcagggagagagagaga

SEQ ID NO: 220029 - RNA, 23 nt, Artificial Sequence
  Synthetic
agggaggcagggagagagagaga

SEQ ID NO: 220030 - RNA, 24 nt, Artificial Sequence
  Synthetic
uagggaggcagggagagagagaga

SEQ ID NO: 220031 - RNA, 21 nt, Artificial Sequence
  Synthetic
aaggagagggagagagagaga

SEQ ID NO: 220032 - RNA, 22 nt, Artificial Sequence
  Synthetic
gaaggagagggagagagagaga

SEQ ID NO: 220033 - RNA, 23 nt, Artificial Sequence
  Synthetic
ggaaggagagggagagagagaga

SEQ ID NO: 220034 - RNA, 24 nt, Artificial Sequence
  Synthetic
gggaaggagagggagagagagaga

SEQ ID NO: 220035 - RNA, 21 nt, Artificial Sequence
  Synthetic
gaggagagggagagagagaga

SEQ ID NO: 220036 - RNA, 22 nt, Artificial Sequence
  Synthetic
ggaggagagggagagagagaga

SEQ ID NO: 220037 - RNA, 23 nt, Artificial Sequence
  Synthetic
aggaggagagggagagagagaga

SEQ ID NO: 220038 - RNA, 24 nt, Artificial Sequence
  Synthetic
caggaggagagggagagagagaga

SEQ ID NO: 220039 - RNA, 23 nt, Artificial Sequence
  Synthetic
gggaggagagggagagagagaga

SEQ ID NO: 220040 - RNA, 24 nt, Artificial Sequence
  Synthetic
cgggaggagagggagagagagaga

SEQ ID NO: 220041 - RNA, 18 nt, Artificial Sequence
  Synthetic
gauucugagagagagaga

SEQ ID NO: 220042 - RNA, 19 nt, Artificial Sequence
  Synthetic
agauucugagagagagaga

SEQ ID NO: 220043 - RNA, 20 nt, Artificial Sequence
  Synthetic
gagauucugagagagagaga

SEQ ID NO: 220044 - RNA, 21 nt, Artificial Sequence
  Synthetic
ugagauucugagagagagaga

SEQ ID NO: 220045 - RNA, 22 nt, Artificial Sequence
  Synthetic
augagauucugagagagagaga

SEQ ID NO: 220046 - RNA, 23 nt, Artificial Sequence
  Synthetic
caugagauucugagagagagaga

SEQ ID NO: 220047 - RNA, 24 nt, Artificial Sequence
  Synthetic
ucaugagauucugagagagagaga

SEQ ID NO: 220048 - RNA, 18 nt, Artificial Sequence
  Synthetic
guaugugagagagagaga

SEQ ID NO: 220049 - RNA, 19 nt, Artificial Sequence
  Synthetic
uguaugugagagagagaga

SEQ ID NO: 220050 - RNA, 20 nt, Artificial Sequence
  Synthetic
guguaugugagagagagaga

SEQ ID NO: 220051 - RNA, 21 nt, Artificial Sequence
  Synthetic
uguguaugugagagagagaga

SEQ ID NO: 220052 - RNA, 22 nt, Artificial Sequence
  Synthetic
guguguaugugagagagagaga

SEQ ID NO: 220053 - RNA, 23 nt, Artificial Sequence
  Synthetic
uguguguaugugagagagagaga

SEQ ID NO: 220054 - RNA, 24 nt, Artificial Sequence
  Synthetic
guguguguaugugagagagagaga

SEQ ID NO: 220055 - RNA, 18 nt, Artificial Sequence
  Synthetic
gugugugagagagagaga

SEQ ID NO: 220056 - RNA, 19 nt, Artificial Sequence
  Synthetic
ugugugugagagagagaga

SEQ ID NO: 220057 - RNA, 20 nt, Artificial Sequence
  Synthetic
gugugugugagagagagaga

SEQ ID NO: 220058 - RNA, 18 nt, Artificial Sequence
  Synthetic
uauauauagagagagaga

SEQ ID NO: 220059 - RNA, 19 nt, Artificial Sequence
  Synthetic
auauauauagagagagaga

SEQ ID NO: 220060 - RNA, 20 nt, Artificial Sequence
  Synthetic
uauauauauagagagagaga

SEQ ID NO: 220061 - RNA, 21 nt, Artificial Sequence
  Synthetic
auauauauauagagagagaga

SEQ ID NO: 220062 - RNA, 22 nt, Artificial Sequence
  Synthetic
uauauauauauagagagagaga

SEQ ID NO: 220063 - RNA, 23 nt, Artificial Sequence
  Synthetic
auauauauauauagagagagaga

SEQ ID NO: 220064 - RNA, 24 nt, Artificial Sequence
  Synthetic
uauauauauauauagagagagaga

SEQ ID NO: 220065 - RNA, 18 nt, Artificial Sequence
  Synthetic
cugguuucgagagagaga

SEQ ID NO: 220066 - RNA, 19 nt, Artificial Sequence
  Synthetic
ucugguuucgagagagaga

SEQ ID NO: 220067 - RNA, 20 nt, Artificial Sequence
  Synthetic
cucugguuucgagagagaga

SEQ ID NO: 220068 - RNA, 21 nt, Artificial Sequence
  Synthetic
ucucugguuucgagagagaga

SEQ ID NO: 220069 - RNA, 22 nt, Artificial Sequence
  Synthetic
cucucugguuucgagagagaga

SEQ ID NO: 220070 - RNA, 23 nt, Artificial Sequence
  Synthetic
ccucucugguuucgagagagaga

SEQ ID NO: 220071 - RNA, 24 nt, Artificial Sequence
  Synthetic
cccucucugguuucgagagagaga

SEQ ID NO: 220072 - RNA, 18 nt, Artificial Sequence
  Synthetic
gaggcagggagagagaga

SEQ ID NO: 220073 - RNA, 19 nt, Artificial Sequence
  Synthetic
ggaggcagggagagagaga

SEQ ID NO: 220074 - RNA, 20 nt, Artificial Sequence
  Synthetic
gggaggcagggagagagaga

SEQ ID NO: 220075 - RNA, 21 nt, Artificial Sequence
  Synthetic
agggaggcagggagagagaga

SEQ ID NO: 220076 - RNA, 22 nt, Artificial Sequence
  Synthetic
uagggaggcagggagagagaga

SEQ ID NO: 220077 - RNA, 23 nt, Artificial Sequence
  Synthetic
uuagggaggcagggagagagaga

SEQ ID NO: 220078 - RNA, 24 nt, Artificial Sequence
  Synthetic
auuagggaggcagggagagagaga

SEQ ID NO: 220079 - RNA, 18 nt, Artificial Sequence
  Synthetic
aggagagggagagagaga

SEQ ID NO: 220080 - RNA, 19 nt, Artificial Sequence
  Synthetic
gaggagagggagagagaga

SEQ ID NO: 220081 - RNA, 20 nt, Artificial Sequence
  Synthetic
ggaggagagggagagagaga

SEQ ID NO: 220082 - RNA, 21 nt, Artificial Sequence
  Synthetic
aggaggagagggagagagaga

SEQ ID NO: 220083 - RNA, 22 nt, Artificial Sequence
  Synthetic
caggaggagagggagagagaga

SEQ ID NO: 220084 - RNA, 23 nt, Artificial Sequence
  Synthetic
gcaggaggagagggagagagaga

SEQ ID NO: 220085 - RNA, 24 nt, Artificial Sequence
  Synthetic
agcaggaggagagggagagagaga

SEQ ID NO: 220086 - RNA, 21 nt, Artificial Sequence
  Synthetic
gggaggagagggagagagaga

SEQ ID NO: 220087 - RNA, 22 nt, Artificial Sequence
  Synthetic
cgggaggagagggagagagaga

SEQ ID NO: 220088 - RNA, 23 nt, Artificial Sequence
  Synthetic
acgggaggagagggagagagaga

SEQ ID NO: 220089 - RNA, 24 nt, Artificial Sequence
  Synthetic
gacgggaggagagggagagagaga

SEQ ID NO: 220090 - RNA, 18 nt, Artificial Sequence
  Synthetic
aacaaguggagagagaga

SEQ ID NO: 220091 - RNA, 19 nt, Artificial Sequence
  Synthetic
aaacaaguggagagagaga

SEQ ID NO: 220092 - RNA, 20 nt, Artificial Sequence
  Synthetic
aaaacaaguggagagagaga

SEQ ID NO: 220093 - RNA, 21 nt, Artificial Sequence
  Synthetic
gaaaacaaguggagagagaga

SEQ ID NO: 220094 - RNA, 22 nt, Artificial Sequence
  Synthetic
ggaaaacaaguggagagagaga

SEQ ID NO: 220095 - RNA, 23 nt, Artificial Sequence
  Synthetic
aggaaaacaaguggagagagaga

SEQ ID NO: 220096 - RNA, 24 nt, Artificial Sequence
  Synthetic
gaggaaaacaaguggagagagaga

SEQ ID NO: 220097 - RNA, 18 nt, Artificial Sequence
  Synthetic
gagauucugagagagaga

SEQ ID NO: 220098 - RNA, 19 nt, Artificial Sequence
  Synthetic
ugagauucugagagagaga

SEQ ID NO: 220099 - RNA, 20 nt, Artificial Sequence
  Synthetic
augagauucugagagagaga

SEQ ID NO: 220100 - RNA, 21 nt, Artificial Sequence
  Synthetic
caugagauucugagagagaga

SEQ ID NO: 220101 - RNA, 22 nt, Artificial Sequence
  Synthetic
ucaugagauucugagagagaga

SEQ ID NO: 220102 - RNA, 23 nt, Artificial Sequence
  Synthetic
cucaugagauucugagagagaga

SEQ ID NO: 220103 - RNA, 24 nt, Artificial Sequence
  Synthetic
ucucaugagauucugagagagaga

SEQ ID NO: 220104 - RNA, 18 nt, Artificial Sequence
  Synthetic
gagagagugagagagaga

SEQ ID NO: 220105 - RNA, 19 nt, Artificial Sequence
  Synthetic
agagagagugagagagaga

SEQ ID NO: 220106 - RNA, 20 nt, Artificial Sequence
  Synthetic
gagagagagugagagagaga

SEQ ID NO: 220107 - RNA, 21 nt, Artificial Sequence
  Synthetic
agagagagagugagagagaga

SEQ ID NO: 220108 - RNA, 22 nt, Artificial Sequence
  Synthetic
gagagagagagugagagagaga

SEQ ID NO: 220109 - RNA, 23 nt, Artificial Sequence
  Synthetic
agagagagagagugagagagaga

SEQ ID NO: 220110 - RNA, 24 nt, Artificial Sequence
  Synthetic
gagagagagagagugagagagaga

SEQ ID NO: 220111 - RNA, 18 nt, Artificial Sequence
  Synthetic
guguaugugagagagaga

SEQ ID NO: 220112 - RNA, 19 nt, Artificial Sequence
  Synthetic
uguguaugugagagagaga

SEQ ID NO: 220113 - RNA, 20 nt, Artificial Sequence
  Synthetic
guguguaugugagagagaga

SEQ ID NO: 220114 - RNA, 21 nt, Artificial Sequence
  Synthetic
uguguguaugugagagagaga

SEQ ID NO: 220115 - RNA, 22 nt, Artificial Sequence
  Synthetic
guguguguaugugagagagaga

SEQ ID NO: 220116 - RNA, 23 nt, Artificial Sequence
  Synthetic
uguguguguaugugagagagaga

SEQ ID NO: 220117 - RNA, 24 nt, Artificial Sequence
  Synthetic
guguguguguaugugagagagaga

SEQ ID NO: 220118 - RNA, 18 nt, Artificial Sequence
  Synthetic
gugugugugagagagaga

SEQ ID NO: 220119 - RNA, 19 nt, Artificial Sequence
  Synthetic
ugugugugugagagagaga

SEQ ID NO: 220120 - RNA, 20 nt, Artificial Sequence
  Synthetic
gugugugugugagagagaga

SEQ ID NO: 220121 - RNA, 21 nt, Artificial Sequence
  Synthetic
ugugugugugugagagagaga

SEQ ID NO: 220122 - RNA, 22 nt, Artificial Sequence
  Synthetic
gugugugugugugagagagaga

SEQ ID NO: 220123 - RNA, 23 nt, Artificial Sequence
  Synthetic
ugugugugugugugagagagaga

SEQ ID NO: 220124 - RNA, 24 nt, Artificial Sequence
  Synthetic
gugugugugugugugagagagaga

SEQ ID NO: 220125 - RNA, 18 nt, Artificial Sequence
  Synthetic
gagagauugagagagaga

SEQ ID NO: 220126 - RNA, 19 nt, Artificial Sequence
  Synthetic
agagagauugagagagaga

SEQ ID NO: 220127 - RNA, 20 nt, Artificial Sequence
  Synthetic
gagagagauugagagagaga

SEQ ID NO: 220128 - RNA, 21 nt, Artificial Sequence
  Synthetic
agagagagauugagagagaga

SEQ ID NO: 220129 - RNA, 22 nt, Artificial Sequence
  Synthetic
gagagagagauugagagagaga

SEQ ID NO: 220130 - RNA, 23 nt, Artificial Sequence
  Synthetic
agagagagagauugagagagaga

SEQ ID NO: 220131 - RNA, 24 nt, Artificial Sequence
  Synthetic
gagagagagagauugagagagaga

SEQ ID NO: 220132 - RNA, 18 nt, Artificial Sequence
  Synthetic
uucaauuugagagagaga

SEQ ID NO: 220133 - RNA, 19 nt, Artificial Sequence
  Synthetic
auucaauuugagagagaga

SEQ ID NO: 220134 - RNA, 20 nt, Artificial Sequence
  Synthetic
aauucaauuugagagagaga

SEQ ID NO: 220135 - RNA, 21 nt, Artificial Sequence
  Synthetic
uaauucaauuugagagagaga

SEQ ID NO: 220136 - RNA, 22 nt, Artificial Sequence
  Synthetic
uuaauucaauuugagagagaga

SEQ ID NO: 220137 - RNA, 23 nt, Artificial Sequence
  Synthetic
uuuaauucaauuugagagagaga

SEQ ID NO: 220138 - RNA, 24 nt, Artificial Sequence
  Synthetic
auuuaauucaauuugagagagaga

SEQ ID NO: 220139 - RNA, 18 nt, Artificial Sequence
  Synthetic
agguuggauagagagaga

SEQ ID NO: 220140 - RNA, 19 nt, Artificial Sequence
  Synthetic
gagguuggauagagagaga

SEQ ID NO: 220141 - RNA, 20 nt, Artificial Sequence
  Synthetic
ggagguuggauagagagaga

SEQ ID NO: 220142 - RNA, 21 nt, Artificial Sequence
  Synthetic
aggagguuggauagagagaga

SEQ ID NO: 220143 - RNA, 22 nt, Artificial Sequence
  Synthetic
caggagguuggauagagagaga

SEQ ID NO: 220144 - RNA, 23 nt, Artificial Sequence
  Synthetic
acaggagguuggauagagagaga

SEQ ID NO: 220145 - RNA, 24 nt, Artificial Sequence
  Synthetic
uacaggagguuggauagagagaga

SEQ ID NO: 220146 - RNA, 18 nt, Artificial Sequence
  Synthetic
uauauauauagagagaga

SEQ ID NO: 220147 - RNA, 19 nt, Artificial Sequence
  Synthetic
auauauauauagagagaga

SEQ ID NO: 220148 - RNA, 20 nt, Artificial Sequence
  Synthetic
uauauauauauagagagaga

SEQ ID NO: 220149 - RNA, 21 nt, Artificial Sequence
  Synthetic
auauauauauauagagagaga

SEQ ID NO: 220150 - RNA, 22 nt, Artificial Sequence
  Synthetic
uauauauauauauagagagaga

SEQ ID NO: 220151 - RNA, 23 nt, Artificial Sequence
  Synthetic
auauauauauauauagagagaga

SEQ ID NO: 220152 - RNA, 24 nt, Artificial Sequence
  Synthetic
uauauauauauauauagagagaga

SEQ ID NO: 220153 - RNA, 18 nt, Artificial Sequence
  Synthetic
uauauauuuagagagaga

SEQ ID NO: 220154 - RNA, 19 nt, Artificial Sequence
  Synthetic
auauauauuuagagagaga

SEQ ID NO: 220155 - RNA, 20 nt, Artificial Sequence
  Synthetic
uauauauauuuagagagaga

SEQ ID NO: 220156 - RNA, 22 nt, Artificial Sequence
  Synthetic
cauauauauauuuagagagaga

SEQ ID NO: 220157 - RNA, 23 nt, Artificial Sequence
  Synthetic
gcauauauauauuuagagagaga

SEQ ID NO: 220158 - RNA, 24 nt, Artificial Sequence
  Synthetic
ugcauauauauauuuagagagaga

SEQ ID NO: 220159 - RNA, 18 nt, Artificial Sequence
  Synthetic
cucugguuucgagagaga

SEQ ID NO: 220160 - RNA, 19 nt, Artificial Sequence
  Synthetic
ucucugguuucgagagaga

SEQ ID NO: 220161 - RNA, 20 nt, Artificial Sequence
  Synthetic
cucucugguuucgagagaga

SEQ ID NO: 220162 - RNA, 21 nt, Artificial Sequence
  Synthetic
ccucucugguuucgagagaga

SEQ ID NO: 220163 - RNA, 22 nt, Artificial Sequence
  Synthetic
cccucucugguuucgagagaga

SEQ ID NO: 220164 - RNA, 23 nt, Artificial Sequence
  Synthetic
ucccucucugguuucgagagaga

SEQ ID NO: 220165 - RNA, 24 nt, Artificial Sequence
  Synthetic
cucccucucugguuucgagagaga

SEQ ID NO: 220166 - RNA, 18 nt, Artificial Sequence
  Synthetic
aaggcagcaggagagaga

SEQ ID NO: 220167 - RNA, 19 nt, Artificial Sequence
  Synthetic
caaggcagcaggagagaga

SEQ ID NO: 220168 - RNA, 20 nt, Artificial Sequence
  Synthetic
acaaggcagcaggagagaga

SEQ ID NO: 220169 - RNA, 21 nt, Artificial Sequence
  Synthetic
cacaaggcagcaggagagaga

SEQ ID NO: 220170 - RNA, 22 nt, Artificial Sequence
  Synthetic
ucacaaggcagcaggagagaga

SEQ ID NO: 220171 - RNA, 23 nt, Artificial Sequence
  Synthetic
uucacaaggcagcaggagagaga

SEQ ID NO: 220172 - RNA, 24 nt, Artificial Sequence
  Synthetic
cuucacaaggcagcaggagagaga

SEQ ID NO: 220173 - RNA, 18 nt, Artificial Sequence
  Synthetic
gggaggcagggagagaga

SEQ ID NO: 220174 - RNA, 19 nt, Artificial Sequence
  Synthetic
agggaggcagggagagaga

SEQ ID NO: 220175 - RNA, 20 nt, Artificial Sequence
  Synthetic
uagggaggcagggagagaga

SEQ ID NO: 220176 - RNA, 21 nt, Artificial Sequence
  Synthetic
uuagggaggcagggagagaga

SEQ ID NO: 220177 - RNA, 22 nt, Artificial Sequence
  Synthetic
auuagggaggcagggagagaga

SEQ ID NO: 220178 - RNA, 23 nt, Artificial Sequence
  Synthetic
aauuagggaggcagggagagaga

SEQ ID NO: 220179 - RNA, 24 nt, Artificial Sequence
  Synthetic
aaauuagggaggcagggagagaga

SEQ ID NO: 220180 - RNA, 18 nt, Artificial Sequence
  Synthetic
ggaggagagggagagaga

SEQ ID NO: 220181 - RNA, 19 nt, Artificial Sequence
  Synthetic
aggaggagagggagagaga

SEQ ID NO: 220182 - RNA, 20 nt, Artificial Sequence
  Synthetic
caggaggagagggagagaga

SEQ ID NO: 220183 - RNA, 21 nt, Artificial Sequence
  Synthetic
gcaggaggagagggagagaga

SEQ ID NO: 220184 - RNA, 22 nt, Artificial Sequence
  Synthetic
agcaggaggagagggagagaga

SEQ ID NO: 220185 - RNA, 23 nt, Artificial Sequence
  Synthetic
gagcaggaggagagggagagaga

SEQ ID NO: 220186 - RNA, 24 nt, Artificial Sequence
  Synthetic
ggagcaggaggagagggagagaga

SEQ ID NO: 220187 - RNA, 19 nt, Artificial Sequence
  Synthetic
gggaggagagggagagaga

SEQ ID NO: 220188 - RNA, 20 nt, Artificial Sequence
  Synthetic
cgggaggagagggagagaga

SEQ ID NO: 220189 - RNA, 21 nt, Artificial Sequence
  Synthetic
acgggaggagagggagagaga

SEQ ID NO: 220190 - RNA, 22 nt, Artificial Sequence
  Synthetic
gacgggaggagagggagagaga

SEQ ID NO: 220191 - RNA, 23 nt, Artificial Sequence
  Synthetic
ggacgggaggagagggagagaga

SEQ ID NO: 220192 - RNA, 24 nt, Artificial Sequence
  Synthetic
gggacgggaggagagggagagaga

SEQ ID NO: 220193 - RNA, 18 nt, Artificial Sequence
  Synthetic
aaaacaaguggagagaga

SEQ ID NO: 220194 - RNA, 19 nt, Artificial Sequence
  Synthetic
gaaaacaaguggagagaga

SEQ ID NO: 220195 - RNA, 20 nt, Artificial Sequence
  Synthetic
ggaaaacaaguggagagaga

SEQ ID NO: 220196 - RNA, 21 nt, Artificial Sequence
  Synthetic
aggaaaacaaguggagagaga

SEQ ID NO: 220197 - RNA, 22 nt, Artificial Sequence
  Synthetic
gaggaaaacaaguggagagaga

SEQ ID NO: 220198 - RNA, 23 nt, Artificial Sequence
  Synthetic
agaggaaaacaaguggagagaga

SEQ ID NO: 220199 - RNA, 24 nt, Artificial Sequence
  Synthetic
aagaggaaaacaaguggagagaga

SEQ ID NO: 220200 - RNA, 18 nt, Artificial Sequence
  Synthetic
augagauucugagagaga

SEQ ID NO: 220201 - RNA, 19 nt, Artificial Sequence
  Synthetic
caugagauucugagagaga

SEQ ID NO: 220202 - RNA, 20 nt, Artificial Sequence
  Synthetic
ucaugagauucugagagaga

SEQ ID NO: 220203 - RNA, 21 nt, Artificial Sequence
  Synthetic
cucaugagauucugagagaga

SEQ ID NO: 220204 - RNA, 22 nt, Artificial Sequence
  Synthetic
ucucaugagauucugagagaga

SEQ ID NO: 220205 - RNA, 23 nt, Artificial Sequence
  Synthetic
aucucaugagauucugagagaga

SEQ ID NO: 220206 - RNA, 24 nt, Artificial Sequence
  Synthetic
aaucucaugagauucugagagaga

SEQ ID NO: 220207 - RNA, 18 nt, Artificial Sequence
  Synthetic
gagagagagugagagaga

SEQ ID NO: 220208 - RNA, 19 nt, Artificial Sequence
  Synthetic
agagagagagugagagaga

SEQ ID NO: 220209 - RNA, 20 nt, Artificial Sequence
  Synthetic
gagagagagagugagagaga

SEQ ID NO: 220210 - RNA, 21 nt, Artificial Sequence
  Synthetic
agagagagagagugagagaga

SEQ ID NO: 220211 - RNA, 22 nt, Artificial Sequence
  Synthetic
gagagagagagagugagagaga

SEQ ID NO: 220212 - RNA, 23 nt, Artificial Sequence
  Synthetic
agagagagagagagugagagaga

SEQ ID NO: 220213 - RNA, 24 nt, Artificial Sequence
  Synthetic
gagagagagagagagugagagaga

SEQ ID NO: 220214 - RNA, 18 nt, Artificial Sequence
  Synthetic
guguguaugugagagaga

SEQ ID NO: 220215 - RNA, 19 nt, Artificial Sequence
  Synthetic
uguguguaugugagagaga

SEQ ID NO: 220216 - RNA, 20 nt, Artificial Sequence
  Synthetic
guguguguaugugagagaga

SEQ ID NO: 220217 - RNA, 21 nt, Artificial Sequence
  Synthetic
uguguguguaugugagagaga

SEQ ID NO: 220218 - RNA, 22 nt, Artificial Sequence
  Synthetic
guguguguguaugugagagaga

SEQ ID NO: 220219 - RNA, 23 nt, Artificial Sequence
  Synthetic
uguguguguguaugugagagaga

SEQ ID NO: 220220 - RNA, 24 nt, Artificial Sequence
  Synthetic
guguguguguguaugugagagaga

SEQ ID NO: 220221 - RNA, 18 nt, Artificial Sequence
  Synthetic
gugugugugugagagaga

SEQ ID NO: 220222 - RNA, 19 nt, Artificial Sequence
  Synthetic
ugugugugugugagagaga

SEQ ID NO: 220223 - RNA, 20 nt, Artificial Sequence
  Synthetic
gugugugugugugagagaga

SEQ ID NO: 220224 - RNA, 21 nt, Artificial Sequence
  Synthetic
ugugugugugugugagagaga

SEQ ID NO: 220225 - RNA, 22 nt, Artificial Sequence
  Synthetic
gugugugugugugugagagaga

SEQ ID NO: 220226 - RNA, 23 nt, Artificial Sequence
  Synthetic
ugugugugugugugugagagaga

SEQ ID NO: 220227 - RNA, 24 nt, Artificial Sequence
  Synthetic
gugugugugugugugugagagaga

SEQ ID NO: 220228 - RNA, 18 nt, Artificial Sequence
  Synthetic
gagagagauugagagaga

SEQ ID NO: 220229 - RNA, 19 nt, Artificial Sequence
  Synthetic
agagagagauugagagaga

SEQ ID NO: 220230 - RNA, 20 nt, Artificial Sequence
  Synthetic
gagagagagauugagagaga

SEQ ID NO: 220231 - RNA, 21 nt, Artificial Sequence
  Synthetic
agagagagagauugagagaga

SEQ ID NO: 220232 - RNA, 22 nt, Artificial Sequence
  Synthetic
gagagagagagauugagagaga

SEQ ID NO: 220233 - RNA, 23 nt, Artificial Sequence
  Synthetic
agagagagagagauugagagaga

SEQ ID NO: 220234 - RNA, 24 nt, Artificial Sequence
  Synthetic
gagagagagagagauugagagaga

SEQ ID NO: 220235 - RNA, 18 nt, Artificial Sequence
  Synthetic
aauucaauuugagagaga

SEQ ID NO: 220236 - RNA, 19 nt, Artificial Sequence
  Synthetic
uaauucaauuugagagaga

SEQ ID NO: 220237 - RNA, 20 nt, Artificial Sequence
  Synthetic
uuaauucaauuugagagaga

SEQ ID NO: 220238 - RNA, 21 nt, Artificial Sequence
  Synthetic
uuuaauucaauuugagagaga

SEQ ID NO: 220239 - RNA, 22 nt, Artificial Sequence
  Synthetic
auuuaauucaauuugagagaga

SEQ ID NO: 220240 - RNA, 23 nt, Artificial Sequence
  Synthetic
aauuuaauucaauuugagagaga

SEQ ID NO: 220241 - RNA, 24 nt, Artificial Sequence
  Synthetic
uaauuuaauucaauuugagagaga

SEQ ID NO: 220242 - RNA, 18 nt, Artificial Sequence
  Synthetic
uauauauauauagagaga

SEQ ID NO: 220243 - RNA, 19 nt, Artificial Sequence
  Synthetic
auauauauauauagagaga

SEQ ID NO: 220244 - RNA, 20 nt, Artificial Sequence
  Synthetic
uauauauauauauagagaga

SEQ ID NO: 220245 - RNA, 21 nt, Artificial Sequence
  Synthetic
auauauauauauauagagaga

SEQ ID NO: 220246 - RNA, 22 nt, Artificial Sequence
  Synthetic
uauauauauauauauagagaga

SEQ ID NO: 220247 - RNA, 23 nt, Artificial Sequence
  Synthetic
auauauauauauauauagagaga

SEQ ID NO: 220248 - RNA, 24 nt, Artificial Sequence
  Synthetic
uauauauauauauauauagagaga

SEQ ID NO: 220249 - RNA, 18 nt, Artificial Sequence
  Synthetic
uaguugauuuuagagaga

SEQ ID NO: 220250 - RNA, 19 nt, Artificial Sequence
  Synthetic
uuaguugauuuuagagaga

SEQ ID NO: 220251 - RNA, 20 nt, Artificial Sequence
  Synthetic
auuaguugauuuuagagaga

SEQ ID NO: 220252 - RNA, 21 nt, Artificial Sequence
  Synthetic
aauuaguugauuuuagagaga

SEQ ID NO: 220253 - RNA, 22 nt, Artificial Sequence
  Synthetic
uaauuaguugauuuuagagaga

SEQ ID NO: 220254 - RNA, 23 nt, Artificial Sequence
  Synthetic
auaauuaguugauuuuagagaga

SEQ ID NO: 220255 - RNA, 24 nt, Artificial Sequence
  Synthetic
aauaauuaguugauuuuagagaga

SEQ ID NO: 220256 - RNA, 18 nt, Artificial Sequence
  Synthetic
cucucugguuucgagaga

SEQ ID NO: 220257 - RNA, 19 nt, Artificial Sequence
  Synthetic
ccucucugguuucgagaga

SEQ ID NO: 220258 - RNA, 20 nt, Artificial Sequence
  Synthetic
cccucucugguuucgagaga

SEQ ID NO: 220259 - RNA, 21 nt, Artificial Sequence
  Synthetic
ucccucucugguuucgagaga

SEQ ID NO: 220260 - RNA, 22 nt, Artificial Sequence
  Synthetic
cucccucucugguuucgagaga

SEQ ID NO: 220261 - RNA, 23 nt, Artificial Sequence
  Synthetic
ucucccucucugguuucgagaga

SEQ ID NO: 220262 - RNA, 24 nt, Artificial Sequence
  Synthetic
cucucccucucugguuucgagaga

SEQ ID NO: 220263 - RNA, 18 nt, Artificial Sequence
  Synthetic
gaggauagaaaggagaga

SEQ ID NO: 220264 - RNA, 19 nt, Artificial Sequence
  Synthetic
ggaggauagaaaggagaga

SEQ ID NO: 220265 - RNA, 20 nt, Artificial Sequence
  Synthetic
gggaggauagaaaggagaga

SEQ ID NO: 220266 - RNA, 21 nt, Artificial Sequence
  Synthetic
agggaggauagaaaggagaga

SEQ ID NO: 220267 - RNA, 22 nt, Artificial Sequence
  Synthetic
gagggaggauagaaaggagaga

SEQ ID NO: 220268 - RNA, 23 nt, Artificial Sequence
  Synthetic
agagggaggauagaaaggagaga

SEQ ID NO: 220269 - RNA, 24 nt, Artificial Sequence
  Synthetic
gagagggaggauagaaaggagaga

SEQ ID NO: 220270 - RNA, 18 nt, Artificial Sequence
  Synthetic
agaagugugaaggagaga

SEQ ID NO: 220271 - RNA, 19 nt, Artificial Sequence
  Synthetic
gagaagugugaaggagaga

SEQ ID NO: 220272 - RNA, 20 nt, Artificial Sequence
  Synthetic
agagaagugugaaggagaga

SEQ ID NO: 220273 - RNA, 21 nt, Artificial Sequence
  Synthetic
aagagaagugugaaggagaga

SEQ ID NO: 220274 - RNA, 22 nt, Artificial Sequence
  Synthetic
gaagagaagugugaaggagaga

SEQ ID NO: 220275 - RNA, 23 nt, Artificial Sequence
  Synthetic
agaagagaagugugaaggagaga

SEQ ID NO: 220276 - RNA, 24 nt, Artificial Sequence
  Synthetic
gagaagagaagugugaaggagaga

SEQ ID NO: 220277 - RNA, 18 nt, Artificial Sequence
  Synthetic
acaaggcagcaggagaga

SEQ ID NO: 220278 - RNA, 19 nt, Artificial Sequence
  Synthetic
cacaaggcagcaggagaga

SEQ ID NO: 220279 - RNA, 20 nt, Artificial Sequence
  Synthetic
ucacaaggcagcaggagaga

SEQ ID NO: 220280 - RNA, 21 nt, Artificial Sequence
  Synthetic
uucacaaggcagcaggagaga

SEQ ID NO: 220281 - RNA, 22 nt, Artificial Sequence
  Synthetic
cuucacaaggcagcaggagaga

SEQ ID NO: 220282 - RNA, 23 nt, Artificial Sequence
  Synthetic
ccuucacaaggcagcaggagaga

SEQ ID NO: 220283 - RNA, 24 nt, Artificial Sequence
  Synthetic
accuucacaaggcagcaggagaga

SEQ ID NO: 220284 - RNA, 18 nt, Artificial Sequence
  Synthetic
agcaggauugaggagaga

SEQ ID NO: 220285 - RNA, 19 nt, Artificial Sequence
  Synthetic
cagcaggauugaggagaga

SEQ ID NO: 220286 - RNA, 20 nt, Artificial Sequence
  Synthetic
gcagcaggauugaggagaga

SEQ ID NO: 220287 - RNA, 21 nt, Artificial Sequence
  Synthetic
ggcagcaggauugaggagaga

SEQ ID NO: 220288 - RNA, 22 nt, Artificial Sequence
  Synthetic
aggcagcaggauugaggagaga

SEQ ID NO: 220289 - RNA, 23 nt, Artificial Sequence
  Synthetic
aaggcagcaggauugaggagaga

SEQ ID NO: 220290 - RNA, 24 nt, Artificial Sequence
  Synthetic
aaaggcagcaggauugaggagaga

SEQ ID NO: 220291 - RNA, 18 nt, Artificial Sequence
  Synthetic
agaggccaaagggagaga

SEQ ID NO: 220292 - RNA, 19 nt, Artificial Sequence
  Synthetic
cagaggccaaagggagaga

SEQ ID NO: 220293 - RNA, 20 nt, Artificial Sequence
  Synthetic
ucagaggccaaagggagaga

SEQ ID NO: 220294 - RNA, 21 nt, Artificial Sequence
  Synthetic
cucagaggccaaagggagaga

SEQ ID NO: 220295 - RNA, 22 nt, Artificial Sequence
  Synthetic
ccucagaggccaaagggagaga

SEQ ID NO: 220296 - RNA, 23 nt, Artificial Sequence
  Synthetic
gccucagaggccaaagggagaga

SEQ ID NO: 220297 - RNA, 24 nt, Artificial Sequence
  Synthetic
ugccucagaggccaaagggagaga

SEQ ID NO: 220298 - RNA, 18 nt, Artificial Sequence
  Synthetic
gagggaggaagggagaga

SEQ ID NO: 220299 - RNA, 19 nt, Artificial Sequence
  Synthetic
agagggaggaagggagaga

SEQ ID NO: 220300 - RNA, 20 nt, Artificial Sequence
  Synthetic
gagagggaggaagggagaga

SEQ ID NO: 220301 - RNA, 21 nt, Artificial Sequence
  Synthetic
agagagggaggaagggagaga

SEQ ID NO: 220302 - RNA, 22 nt, Artificial Sequence
  Synthetic
gagagagggaggaagggagaga

SEQ ID NO: 220303 - RNA, 23 nt, Artificial Sequence
  Synthetic
agagagagggaggaagggagaga

SEQ ID NO: 220304 - RNA, 24 nt, Artificial Sequence
  Synthetic
gagagagagggaggaagggagaga

SEQ ID NO: 220305 - RNA, 18 nt, Artificial Sequence
  Synthetic
uagggaggcagggagaga

SEQ ID NO: 220306 - RNA, 19 nt, Artificial Sequence
  Synthetic
uuagggaggcagggagaga

SEQ ID NO: 220307 - RNA, 20 nt, Artificial Sequence
  Synthetic
auuagggaggcagggagaga

SEQ ID NO: 220308 - RNA, 21 nt, Artificial Sequence
  Synthetic
aauuagggaggcagggagaga

SEQ ID NO: 220309 - RNA, 22 nt, Artificial Sequence
  Synthetic
aaauuagggaggcagggagaga

SEQ ID NO: 220310 - RNA, 23 nt, Artificial Sequence
  Synthetic
aaaauuagggaggcagggagaga

SEQ ID NO: 220311 - RNA, 24 nt, Artificial Sequence
  Synthetic
aaaaauuagggaggcagggagaga

SEQ ID NO: 220312 - RNA, 18 nt, Artificial Sequence
  Synthetic
gggaaggagagggagaga

SEQ ID NO: 220313 - RNA, 19 nt, Artificial Sequence
  Synthetic
ugggaaggagagggagaga

SEQ ID NO: 220314 - RNA, 20 nt, Artificial Sequence
  Synthetic
augggaaggagagggagaga

SEQ ID NO: 220315 - RNA, 21 nt, Artificial Sequence
  Synthetic
aaugggaaggagagggagaga

SEQ ID NO: 220316 - RNA, 22 nt, Artificial Sequence
  Synthetic
gaaugggaaggagagggagaga

SEQ ID NO: 220317 - RNA, 23 nt, Artificial Sequence
  Synthetic
agaaugggaaggagagggagaga

SEQ ID NO: 220318 - RNA, 24 nt, Artificial Sequence
  Synthetic
gagaaugggaaggagagggagaga

SEQ ID NO: 220319 - RNA, 18 nt, Artificial Sequence
  Synthetic
caggaggagagggagaga

SEQ ID NO: 220320 - RNA, 19 nt, Artificial Sequence
  Synthetic
gcaggaggagagggagaga

SEQ ID NO: 220321 - RNA, 20 nt, Artificial Sequence
  Synthetic
agcaggaggagagggagaga

SEQ ID NO: 220322 - RNA, 21 nt, Artificial Sequence
  Synthetic
gagcaggaggagagggagaga

SEQ ID NO: 220323 - RNA, 22 nt, Artificial Sequence
  Synthetic
ggagcaggaggagagggagaga

SEQ ID NO: 220324 - RNA, 23 nt, Artificial Sequence
  Synthetic
aggagcaggaggagagggagaga

SEQ ID NO: 220325 - RNA, 24 nt, Artificial Sequence
  Synthetic
gaggagcaggaggagagggagaga

SEQ ID NO: 220326 - RNA, 18 nt, Artificial Sequence
  Synthetic
cgggaggagagggagaga

SEQ ID NO: 220327 - RNA, 19 nt, Artificial Sequence
  Synthetic
acgggaggagagggagaga

SEQ ID NO: 220328 - RNA, 20 nt, Artificial Sequence
  Synthetic
gacgggaggagagggagaga

SEQ ID NO: 220329 - RNA, 21 nt, Artificial Sequence
  Synthetic
ggacgggaggagagggagaga

SEQ ID NO: 220330 - RNA, 22 nt, Artificial Sequence
  Synthetic
gggacgggaggagagggagaga

SEQ ID NO: 220331 - RNA, 23 nt, Artificial Sequence
  Synthetic
agggacgggaggagagggagaga

SEQ ID NO: 220332 - RNA, 24 nt, Artificial Sequence
  Synthetic
gagggacgggaggagagggagaga

SEQ ID NO: 220333 - RNA, 18 nt, Artificial Sequence
  Synthetic
cugggagggagggagaga

SEQ ID NO: 220334 - RNA, 19 nt, Artificial Sequence
  Synthetic
gcugggagggagggagaga

SEQ ID NO: 220335 - RNA, 20 nt, Artificial Sequence
  Synthetic
ggcugggagggagggagaga

SEQ ID NO: 220336 - RNA, 21 nt, Artificial Sequence
  Synthetic
cggcugggagggagggagaga

SEQ ID NO: 220337 - RNA, 22 nt, Artificial Sequence
  Synthetic
acggcugggagggagggagaga

SEQ ID NO: 220338 - RNA, 23 nt, Artificial Sequence
  Synthetic
uacggcugggagggagggagaga

SEQ ID NO: 220339 - RNA, 24 nt, Artificial Sequence
  Synthetic
guacggcugggagggagggagaga

SEQ ID NO: 220340 - RNA, 18 nt, Artificial Sequence
  Synthetic
uggguggguagggagaga

SEQ ID NO: 220341 - RNA, 19 nt, Artificial Sequence
  Synthetic
guggguggguagggagaga

SEQ ID NO: 220342 - RNA, 20 nt, Artificial Sequence
  Synthetic
gguggguggguagggagaga

SEQ ID NO: 220343 - RNA, 21 nt, Artificial Sequence
  Synthetic
agguggguggguagggagaga

SEQ ID NO: 220344 - RNA, 22 nt, Artificial Sequence
  Synthetic
gagguggguggguagggagaga

SEQ ID NO: 220345 - RNA, 23 nt, Artificial Sequence
  Synthetic
agagguggguggguagggagaga

SEQ ID NO: 220346 - RNA, 24 nt, Artificial Sequence
  Synthetic
gagagguggguggguagggagaga

SEQ ID NO: 220347 - RNA, 18 nt, Artificial Sequence
  Synthetic
acgauuguacuggagaga

SEQ ID NO: 220348 - RNA, 19 nt, Artificial Sequence
  Synthetic
gacgauuguacuggagaga

SEQ ID NO: 220349 - RNA, 20 nt, Artificial Sequence
  Synthetic
ggacgauuguacuggagaga

SEQ ID NO: 220350 - RNA, 21 nt, Artificial Sequence
  Synthetic
aggacgauuguacuggagaga

SEQ ID NO: 220351 - RNA, 22 nt, Artificial Sequence
  Synthetic
aaggacgauuguacuggagaga

SEQ ID NO: 220352 - RNA, 23 nt, Artificial Sequence
  Synthetic
caaggacgauuguacuggagaga

SEQ ID NO: 220353 - RNA, 24 nt, Artificial Sequence
  Synthetic
acaaggacgauuguacuggagaga

SEQ ID NO: 220354 - RNA, 18 nt, Artificial Sequence
  Synthetic
ggaaaacaaguggagaga

SEQ ID NO: 220355 - RNA, 19 nt, Artificial Sequence
  Synthetic
aggaaaacaaguggagaga

SEQ ID NO: 220356 - RNA, 20 nt, Artificial Sequence
  Synthetic
gaggaaaacaaguggagaga

SEQ ID NO: 220357 - RNA, 21 nt, Artificial Sequence
  Synthetic
agaggaaaacaaguggagaga

SEQ ID NO: 220358 - RNA, 22 nt, Artificial Sequence
  Synthetic
aagaggaaaacaaguggagaga

SEQ ID NO: 220359 - RNA, 23 nt, Artificial Sequence
  Synthetic
aaagaggaaaacaaguggagaga

SEQ ID NO: 220360 - RNA, 24 nt, Artificial Sequence
  Synthetic
caaagaggaaaacaaguggagaga

SEQ ID NO: 220361 - RNA, 18 nt, Artificial Sequence
  Synthetic
uuuuguuacuuggagaga

SEQ ID NO: 220362 - RNA, 19 nt, Artificial Sequence
  Synthetic
cuuuuguuacuuggagaga

SEQ ID NO: 220363 - RNA, 20 nt, Artificial Sequence
  Synthetic
ccuuuuguuacuuggagaga

SEQ ID NO: 220364 - RNA, 21 nt, Artificial Sequence
  Synthetic
accuuuuguuacuuggagaga

SEQ ID NO: 220365 - RNA, 22 nt, Artificial Sequence
  Synthetic
gaccuuuuguuacuuggagaga

SEQ ID NO: 220366 - RNA, 23 nt, Artificial Sequence
  Synthetic
agaccuuuuguuacuuggagaga

SEQ ID NO: 220367 - RNA, 24 nt, Artificial Sequence
  Synthetic
cagaccuuuuguuacuuggagaga

SEQ ID NO: 220368 - RNA, 18 nt, Artificial Sequence
  Synthetic
ggcaacacagaugagaga

SEQ ID NO: 220369 - RNA, 19 nt, Artificial Sequence
  Synthetic
gggcaacacagaugagaga

SEQ ID NO: 220370 - RNA, 20 nt, Artificial Sequence
  Synthetic
agggcaacacagaugagaga

SEQ ID NO: 220371 - RNA, 21 nt, Artificial Sequence
  Synthetic
cagggcaacacagaugagaga

SEQ ID NO: 220372 - RNA, 22 nt, Artificial Sequence
  Synthetic
acagggcaacacagaugagaga

SEQ ID NO: 220373 - RNA, 23 nt, Artificial Sequence
  Synthetic
cacagggcaacacagaugagaga

SEQ ID NO: 220374 - RNA, 24 nt, Artificial Sequence
  Synthetic
gcacagggcaacacagaugagaga

SEQ ID NO: 220375 - RNA, 18 nt, Artificial Sequence
  Synthetic
ucaugagauucugagaga

SEQ ID NO: 220376 - RNA, 19 nt, Artificial Sequence
  Synthetic
cucaugagauucugagaga

SEQ ID NO: 220377 - RNA, 20 nt, Artificial Sequence
  Synthetic
ucucaugagauucugagaga

SEQ ID NO: 220378 - RNA, 21 nt, Artificial Sequence
  Synthetic
aucucaugagauucugagaga

SEQ ID NO: 220379 - RNA, 22 nt, Artificial Sequence
  Synthetic
aaucucaugagauucugagaga

SEQ ID NO: 220380 - RNA, 23 nt, Artificial Sequence
  Synthetic
gaaucucaugagauucugagaga

SEQ ID NO: 220381 - RNA, 24 nt, Artificial Sequence
  Synthetic
ugaaucucaugagauucugagaga

SEQ ID NO: 220382 - RNA, 18 nt, Artificial Sequence
  Synthetic
gagagagagagugagaga

SEQ ID NO: 220383 - RNA, 19 nt, Artificial Sequence
  Synthetic
agagagagagagugagaga

SEQ ID NO: 220384 - RNA, 20 nt, Artificial Sequence
  Synthetic
gagagagagagagugagaga

SEQ ID NO: 220385 - RNA, 21 nt, Artificial Sequence
  Synthetic
agagagagagagagugagaga

SEQ ID NO: 220386 - RNA, 22 nt, Artificial Sequence
  Synthetic
gagagagagagagagugagaga

SEQ ID NO: 220387 - RNA, 23 nt, Artificial Sequence
  Synthetic
agagagagagagagagugagaga

SEQ ID NO: 220388 - RNA, 24 nt, Artificial Sequence
  Synthetic
gagagagagagagagagugagaga

SEQ ID NO: 220389 - RNA, 18 nt, Artificial Sequence
  Synthetic
uuuguauauggugagaga

SEQ ID NO: 220390 - RNA, 19 nt, Artificial Sequence
  Synthetic
uuuuguauauggugagaga

SEQ ID NO: 220391 - RNA, 20 nt, Artificial Sequence
  Synthetic
uuuuuguauauggugagaga

SEQ ID NO: 220392 - RNA, 21 nt, Artificial Sequence
  Synthetic
auuuuuguauauggugagaga

SEQ ID NO: 220393 - RNA, 22 nt, Artificial Sequence
  Synthetic
gauuuuuguauauggugagaga

SEQ ID NO: 220394 - RNA, 23 nt, Artificial Sequence
  Synthetic
ugauuuuuguauauggugagaga

SEQ ID NO: 220395 - RNA, 24 nt, Artificial Sequence
  Synthetic
uugauuuuuguauauggugagaga

SEQ ID NO: 220396 - RNA, 18 nt, Artificial Sequence
  Synthetic
augggguauggugagaga

SEQ ID NO: 220397 - RNA, 19 nt, Artificial Sequence
  Synthetic
uaugggguauggugagaga

SEQ ID NO: 220398 - RNA, 20 nt, Artificial Sequence
  Synthetic
guaugggguauggugagaga

SEQ ID NO: 220399 - RNA, 21 nt, Artificial Sequence
  Synthetic
uguaugggguauggugagaga

SEQ ID NO: 220400 - RNA, 22 nt, Artificial Sequence
  Synthetic
guguaugggguauggugagaga

SEQ ID NO: 220401 - RNA, 23 nt, Artificial Sequence
  Synthetic
uguguaugggguauggugagaga

SEQ ID NO: 220402 - RNA, 24 nt, Artificial Sequence
  Synthetic
uuguguaugggguauggugagaga

SEQ ID NO: 220403 - RNA, 18 nt, Artificial Sequence
  Synthetic
guguguguaugugagaga

SEQ ID NO: 220404 - RNA, 19 nt, Artificial Sequence
  Synthetic
uguguguguaugugagaga

SEQ ID NO: 220405 - RNA, 20 nt, Artificial Sequence
  Synthetic
guguguguguaugugagaga

SEQ ID NO: 220406 - RNA, 21 nt, Artificial Sequence
  Synthetic
uguguguguguaugugagaga

SEQ ID NO: 220407 - RNA, 22 nt, Artificial Sequence
  Synthetic
guguguguguguaugugagaga

SEQ ID NO: 220408 - RNA, 23 nt, Artificial Sequence
  Synthetic
uguguguguguguaugugagaga

SEQ ID NO: 220409 - RNA, 24 nt, Artificial Sequence
  Synthetic
guguguguguguguaugugagaga

SEQ ID NO: 220410 - RNA, 18 nt, Artificial Sequence
  Synthetic
gugugugugugugagaga

SEQ ID NO: 220411 - RNA, 19 nt, Artificial Sequence
  Synthetic
ugugugugugugugagaga

SEQ ID NO: 220412 - RNA, 20 nt, Artificial Sequence
  Synthetic
gugugugugugugugagaga

SEQ ID NO: 220413 - RNA, 24 nt, Artificial Sequence
  Synthetic
gugugugugugugugugugagaga

SEQ ID NO: 220414 - RNA, 18 nt, Artificial Sequence
  Synthetic
gagagagagauugagaga

SEQ ID NO: 220415 - RNA, 19 nt, Artificial Sequence
  Synthetic
agagagagagauugagaga

SEQ ID NO: 220416 - RNA, 20 nt, Artificial Sequence
  Synthetic
gagagagagagauugagaga

SEQ ID NO: 220417 - RNA, 21 nt, Artificial Sequence
  Synthetic
agagagagagagauugagaga

SEQ ID NO: 220418 - RNA, 22 nt, Artificial Sequence
  Synthetic
gagagagagagagauugagaga

SEQ ID NO: 220419 - RNA, 23 nt, Artificial Sequence
  Synthetic
agagagagagagagauugagaga

SEQ ID NO: 220420 - RNA, 24 nt, Artificial Sequence
  Synthetic
gagagagagagagagauugagaga

SEQ ID NO: 220421 - RNA, 18 nt, Artificial Sequence
  Synthetic
uacaaucaacuugagaga

SEQ ID NO: 220422 - RNA, 19 nt, Artificial Sequence
  Synthetic
auacaaucaacuugagaga

SEQ ID NO: 220423 - RNA, 20 nt, Artificial Sequence
  Synthetic
uauacaaucaacuugagaga

SEQ ID NO: 220424 - RNA, 21 nt, Artificial Sequence
  Synthetic
auauacaaucaacuugagaga

SEQ ID NO: 220425 - RNA, 22 nt, Artificial Sequence
  Synthetic
uauauacaaucaacuugagaga

SEQ ID NO: 220426 - RNA, 23 nt, Artificial Sequence
  Synthetic
guauauacaaucaacuugagaga

SEQ ID NO: 220427 - RNA, 24 nt, Artificial Sequence
  Synthetic
gguauauacaaucaacuugagaga

SEQ ID NO: 220428 - RNA, 18 nt, Artificial Sequence
  Synthetic
uguggaucccuugagaga

SEQ ID NO: 220429 - RNA, 19 nt, Artificial Sequence
  Synthetic
auguggaucccuugagaga

SEQ ID NO: 220430 - RNA, 20 nt, Artificial Sequence
  Synthetic
cauguggaucccuugagaga

SEQ ID NO: 220431 - RNA, 21 nt, Artificial Sequence
  Synthetic
ccauguggaucccuugagaga

SEQ ID NO: 220432 - RNA, 22 nt, Artificial Sequence
  Synthetic
cccauguggaucccuugagaga

SEQ ID NO: 220433 - RNA, 23 nt, Artificial Sequence
  Synthetic
acccauguggaucccuugagaga

SEQ ID NO: 220434 - RNA, 24 nt, Artificial Sequence
  Synthetic
aacccauguggaucccuugagaga

SEQ ID NO: 220435 - RNA, 18 nt, Artificial Sequence
  Synthetic
ccauagagaguugagaga

SEQ ID NO: 220436 - RNA, 19 nt, Artificial Sequence
  Synthetic
accauagagaguugagaga

SEQ ID NO: 220437 - RNA, 20 nt, Artificial Sequence
  Synthetic
gaccauagagaguugagaga

SEQ ID NO: 220438 - RNA, 21 nt, Artificial Sequence
  Synthetic
agaccauagagaguugagaga

SEQ ID NO: 220439 - RNA, 22 nt, Artificial Sequence
  Synthetic
gagaccauagagaguugagaga

SEQ ID NO: 220440 - RNA, 23 nt, Artificial Sequence
  Synthetic
agagaccauagagaguugagaga

SEQ ID NO: 220441 - RNA, 24 nt, Artificial Sequence
  Synthetic
uagagaccauagagaguugagaga

SEQ ID NO: 220442 - RNA, 18 nt, Artificial Sequence
  Synthetic
agacucacuguugagaga

SEQ ID NO: 220443 - RNA, 19 nt, Artificial Sequence
  Synthetic
aagacucacuguugagaga

SEQ ID NO: 220444 - RNA, 20 nt, Artificial Sequence
  Synthetic
uaagacucacuguugagaga

SEQ ID NO: 220445 - RNA, 21 nt, Artificial Sequence
  Synthetic
auaagacucacuguugagaga

SEQ ID NO: 220446 - RNA, 22 nt, Artificial Sequence
  Synthetic
aauaagacucacuguugagaga

SEQ ID NO: 220447 - RNA, 23 nt, Artificial Sequence
  Synthetic
aaauaagacucacuguugagaga

SEQ ID NO: 220448 - RNA, 24 nt, Artificial Sequence
  Synthetic
aaaauaagacucacuguugagaga

SEQ ID NO: 220449 - RNA, 18 nt, Artificial Sequence
  Synthetic
uuaauucaauuugagaga

SEQ ID NO: 220450 - RNA, 19 nt, Artificial Sequence
  Synthetic
uuuaauucaauuugagaga

SEQ ID NO: 220451 - RNA, 20 nt, Artificial Sequence
  Synthetic
auuuaauucaauuugagaga

SEQ ID NO: 220452 - RNA, 21 nt, Artificial Sequence
  Synthetic
aauuuaauucaauuugagaga

SEQ ID NO: 220453 - RNA, 22 nt, Artificial Sequence
  Synthetic
uaauuuaauucaauuugagaga

SEQ ID NO: 220454 - RNA, 23 nt, Artificial Sequence
  Synthetic
guaauuuaauucaauuugagaga

SEQ ID NO: 220455 - RNA, 24 nt, Artificial Sequence
  Synthetic
aguaauuuaauucaauuugagaga

SEQ ID NO: 220456 - RNA, 18 nt, Artificial Sequence
  Synthetic
gcuugccccuuugagaga

SEQ ID NO: 220457 - RNA, 19 nt, Artificial Sequence
  Synthetic
ugcuugccccuuugagaga

SEQ ID NO: 220458 - RNA, 20 nt, Artificial Sequence
  Synthetic
uugcuugccccuuugagaga

SEQ ID NO: 220459 - RNA, 21 nt, Artificial Sequence
  Synthetic
uuugcuugccccuuugagaga

SEQ ID NO: 220460 - RNA, 22 nt, Artificial Sequence
  Synthetic
cuuugcuugccccuuugagaga

SEQ ID NO: 220461 - RNA, 23 nt, Artificial Sequence
  Synthetic
ccuuugcuugccccuuugagaga

SEQ ID NO: 220462 - RNA, 24 nt, Artificial Sequence
  Synthetic
uccuuugcuugccccuuugagaga

SEQ ID NO: 220463 - RNA, 18 nt, Artificial Sequence
  Synthetic
acaggauucuaauagaga

SEQ ID NO: 220464 - RNA, 19 nt, Artificial Sequence
  Synthetic
aacaggauucuaauagaga

SEQ ID NO: 220465 - RNA, 20 nt, Artificial Sequence
  Synthetic
aaacaggauucuaauagaga

SEQ ID NO: 220466 - RNA, 21 nt, Artificial Sequence
  Synthetic
gaaacaggauucuaauagaga

SEQ ID NO: 220467 - RNA, 22 nt, Artificial Sequence
  Synthetic
agaaacaggauucuaauagaga

SEQ ID NO: 220468 - RNA, 23 nt, Artificial Sequence
  Synthetic
aagaaacaggauucuaauagaga

SEQ ID NO: 220469 - RNA, 24 nt, Artificial Sequence
  Synthetic
caagaaacaggauucuaauagaga

SEQ ID NO: 220470 - RNA, 18 nt, Artificial Sequence
  Synthetic
auuucagcuuaauagaga

SEQ ID NO: 220471 - RNA, 19 nt, Artificial Sequence
  Synthetic
uauuucagcuuaauagaga

SEQ ID NO: 220472 - RNA, 20 nt, Artificial Sequence
  Synthetic
auauuucagcuuaauagaga

SEQ ID NO: 220473 - RNA, 21 nt, Artificial Sequence
  Synthetic
uauauuucagcuuaauagaga

SEQ ID NO: 220474 - RNA, 22 nt, Artificial Sequence
  Synthetic
guauauuucagcuuaauagaga

SEQ ID NO: 220475 - RNA, 23 nt, Artificial Sequence
  Synthetic
cguauauuucagcuuaauagaga

SEQ ID NO: 220476 - RNA, 24 nt, Artificial Sequence
  Synthetic
acguauauuucagcuuaauagaga

SEQ ID NO: 220477 - RNA, 18 nt, Artificial Sequence
  Synthetic
auuuccuucacauagaga

SEQ ID NO: 220478 - RNA, 19 nt, Artificial Sequence
  Synthetic
aauuuccuucacauagaga

SEQ ID NO: 220479 - RNA, 20 nt, Artificial Sequence
  Synthetic
aaauuuccuucacauagaga

SEQ ID NO: 220480 - RNA, 21 nt, Artificial Sequence
  Synthetic
uaaauuuccuucacauagaga

SEQ ID NO: 220481 - RNA, 22 nt, Artificial Sequence
  Synthetic
uuaaauuuccuucacauagaga

SEQ ID NO: 220482 - RNA, 23 nt, Artificial Sequence
  Synthetic
auuaaauuuccuucacauagaga

SEQ ID NO: 220483 - RNA, 24 nt, Artificial Sequence
  Synthetic
uauuaaauuuccuucacauagaga

SEQ ID NO: 220484 - RNA, 18 nt, Artificial Sequence
  Synthetic
uggcuuugaagauagaga

SEQ ID NO: 220485 - RNA, 19 nt, Artificial Sequence
  Synthetic
cuggcuuugaagauagaga

SEQ ID NO: 220486 - RNA, 20 nt, Artificial Sequence
  Synthetic
gcuggcuuugaagauagaga

SEQ ID NO: 220487 - RNA, 21 nt, Artificial Sequence
  Synthetic
ugcuggcuuugaagauagaga

SEQ ID NO: 220488 - RNA, 22 nt, Artificial Sequence
  Synthetic
cugcuggcuuugaagauagaga

SEQ ID NO: 220489 - RNA, 23 nt, Artificial Sequence
  Synthetic
ccugcuggcuuugaagauagaga

SEQ ID NO: 220490 - RNA, 24 nt, Artificial Sequence
  Synthetic
cccugcuggcuuugaagauagaga

SEQ ID NO: 220491 - RNA, 18 nt, Artificial Sequence
  Synthetic
uauauauauauauagaga

SEQ ID NO: 220492 - RNA, 19 nt, Artificial Sequence
  Synthetic
auauauauauauauagaga

SEQ ID NO: 220493 - RNA, 20 nt, Artificial Sequence
  Synthetic
uauauauauauauauagaga

SEQ ID NO: 220494 - RNA, 21 nt, Artificial Sequence
  Synthetic
auauauauauauauauagaga

SEQ ID NO: 220495 - RNA, 22 nt, Artificial Sequence
  Synthetic
uauauauauauauauauagaga

SEQ ID NO: 220496 - RNA, 23 nt, Artificial Sequence
  Synthetic
auauauauauauauauauagaga

SEQ ID NO: 220497 - RNA, 24 nt, Artificial Sequence
  Synthetic
uauauauauauauauauauagaga

SEQ ID NO: 220498 - RNA, 18 nt, Artificial Sequence
  Synthetic
agaauacuugccuagaga

SEQ ID NO: 220499 - RNA, 19 nt, Artificial Sequence
  Synthetic
gagaauacuugccuagaga

SEQ ID NO: 220500 - RNA, 20 nt, Artificial Sequence
  Synthetic
ggagaauacuugccuagaga

SEQ ID NO: 220501 - RNA, 21 nt, Artificial Sequence
  Synthetic
gggagaauacuugccuagaga

SEQ ID NO: 220502 - RNA, 22 nt, Artificial Sequence
  Synthetic
cgggagaauacuugccuagaga

SEQ ID NO: 220503 - RNA, 23 nt, Artificial Sequence
  Synthetic
gcgggagaauacuugccuagaga

SEQ ID NO: 220504 - RNA, 24 nt, Artificial Sequence
  Synthetic
ugcgggagaauacuugccuagaga

SEQ ID NO: 220505 - RNA, 18 nt, Artificial Sequence
  Synthetic
uagcuagcuagcuagaga

SEQ ID NO: 220506 - RNA, 19 nt, Artificial Sequence
  Synthetic
uuagcuagcuagcuagaga

SEQ ID NO: 220507 - RNA, 20 nt, Artificial Sequence
  Synthetic
auuagcuagcuagcuagaga

SEQ ID NO: 220508 - RNA, 21 nt, Artificial Sequence
  Synthetic
aauuagcuagcuagcuagaga

SEQ ID NO: 220509 - RNA, 22 nt, Artificial Sequence
  Synthetic
uaauuagcuagcuagcuagaga

SEQ ID NO: 220510 - RNA, 23 nt, Artificial Sequence
  Synthetic
uuaauuagcuagcuagcuagaga

SEQ ID NO: 220511 - RNA, 24 nt, Artificial Sequence
  Synthetic
auuaauuagcuagcuagcuagaga

SEQ ID NO: 220512 - RNA, 18 nt, Artificial Sequence
  Synthetic
aaugcugcagucuagaga

SEQ ID NO: 220513 - RNA, 19 nt, Artificial Sequence
  Synthetic
aaaugcugcagucuagaga

SEQ ID NO: 220514 - RNA, 20 nt, Artificial Sequence
  Synthetic
gaaaugcugcagucuagaga

SEQ ID NO: 220515 - RNA, 21 nt, Artificial Sequence
  Synthetic
agaaaugcugcagucuagaga

SEQ ID NO: 220516 - RNA, 22 nt, Artificial Sequence
  Synthetic
aagaaaugcugcagucuagaga

SEQ ID NO: 220517 - RNA, 23 nt, Artificial Sequence
  Synthetic
aaagaaaugcugcagucuagaga

SEQ ID NO: 220518 - RNA, 24 nt, Artificial Sequence
  Synthetic
aaaagaaaugcugcagucuagaga

SEQ ID NO: 220519 - RNA, 18 nt, Artificial Sequence
  Synthetic
gagauaucaaaguagaga

SEQ ID NO: 220520 - RNA, 19 nt, Artificial Sequence
  Synthetic
agagauaucaaaguagaga

SEQ ID NO: 220521 - RNA, 20 nt, Artificial Sequence
  Synthetic
aagagauaucaaaguagaga

SEQ ID NO: 220522 - RNA, 21 nt, Artificial Sequence
  Synthetic
aaagagauaucaaaguagaga

SEQ ID NO: 220523 - RNA, 22 nt, Artificial Sequence
  Synthetic
uaaagagauaucaaaguagaga

SEQ ID NO: 220524 - RNA, 23 nt, Artificial Sequence
  Synthetic
uuaaagagauaucaaaguagaga

SEQ ID NO: 220525 - RNA, 24 nt, Artificial Sequence
  Synthetic
cuuaaagagauaucaaaguagaga

SEQ ID NO: 220526 - RNA, 18 nt, Artificial Sequence
  Synthetic
uuguguuuucaguagaga

SEQ ID NO: 220527 - RNA, 19 nt, Artificial Sequence
  Synthetic
uuuguguuuucaguagaga

SEQ ID NO: 220528 - RNA, 20 nt, Artificial Sequence
  Synthetic
uuuuguguuuucaguagaga

SEQ ID NO: 220529 - RNA, 21 nt, Artificial Sequence
  Synthetic
uuuuuguguuuucaguagaga

SEQ ID NO: 220530 - RNA, 22 nt, Artificial Sequence
  Synthetic
auuuuuguguuuucaguagaga

SEQ ID NO: 220531 - RNA, 23 nt, Artificial Sequence
  Synthetic
aauuuuuguguuuucaguagaga

SEQ ID NO: 220532 - RNA, 24 nt, Artificial Sequence
  Synthetic
uaauuuuuguguuuucaguagaga

SEQ ID NO: 220533 - RNA, 18 nt, Artificial Sequence
  Synthetic
aauuacagcagguagaga

SEQ ID NO: 220534 - RNA, 19 nt, Artificial Sequence
  Synthetic
gaauuacagcagguagaga

SEQ ID NO: 220535 - RNA, 20 nt, Artificial Sequence
  Synthetic
ugaauuacagcagguagaga

SEQ ID NO: 220536 - RNA, 21 nt, Artificial Sequence
  Synthetic
uugaauuacagcagguagaga

SEQ ID NO: 220537 - RNA, 22 nt, Artificial Sequence
  Synthetic
guugaauuacagcagguagaga

SEQ ID NO: 220538 - RNA, 23 nt, Artificial Sequence
  Synthetic
gguugaauuacagcagguagaga

SEQ ID NO: 220539 - RNA, 24 nt, Artificial Sequence
  Synthetic
ggguugaauuacagcagguagaga

SEQ ID NO: 220540 - RNA, 18 nt, Artificial Sequence
  Synthetic
uuaaacaggagguagaga

SEQ ID NO: 220541 - RNA, 19 nt, Artificial Sequence
  Synthetic
cuuaaacaggagguagaga

SEQ ID NO: 220542 - RNA, 20 nt, Artificial Sequence
  Synthetic
ccuuaaacaggagguagaga

SEQ ID NO: 220543 - RNA, 21 nt, Artificial Sequence
  Synthetic
gccuuaaacaggagguagaga

SEQ ID NO: 220544 - RNA, 22 nt, Artificial Sequence
  Synthetic
ggccuuaaacaggagguagaga

SEQ ID NO: 220545 - RNA, 23 nt, Artificial Sequence
  Synthetic
uggccuuaaacaggagguagaga

SEQ ID NO: 220546 - RNA, 24 nt, Artificial Sequence
  Synthetic
uuggccuuaaacaggagguagaga

SEQ ID NO: 220547 - RNA, 18 nt, Artificial Sequence
  Synthetic
agaagaagaugguagaga

SEQ ID NO: 220548 - RNA, 19 nt, Artificial Sequence
  Synthetic
gagaagaagaugguagaga

SEQ ID NO: 220549 - RNA, 20 nt, Artificial Sequence
  Synthetic
ugagaagaagaugguagaga

SEQ ID NO: 220550 - RNA, 21 nt, Artificial Sequence
  Synthetic
augagaagaagaugguagaga

SEQ ID NO: 220551 - RNA, 22 nt, Artificial Sequence
  Synthetic
aaugagaagaagaugguagaga

SEQ ID NO: 220552 - RNA, 23 nt, Artificial Sequence
  Synthetic
caaugagaagaagaugguagaga

SEQ ID NO: 220553 - RNA, 24 nt, Artificial Sequence
  Synthetic
gcaaugagaagaagaugguagaga

SEQ ID NO: 220554 - RNA, 18 nt, Artificial Sequence
  Synthetic
guauucauuugguagaga

SEQ ID NO: 220555 - RNA, 19 nt, Artificial Sequence
  Synthetic
gguauucauuugguagaga

SEQ ID NO: 220556 - RNA, 20 nt, Artificial Sequence
  Synthetic
ugguauucauuugguagaga

SEQ ID NO: 220557 - RNA, 21 nt, Artificial Sequence
  Synthetic
cugguauucauuugguagaga

SEQ ID NO: 220558 - RNA, 22 nt, Artificial Sequence
  Synthetic
acugguauucauuugguagaga

SEQ ID NO: 220559 - RNA, 23 nt, Artificial Sequence
  Synthetic
uacugguauucauuugguagaga

SEQ ID NO: 220560 - RNA, 24 nt, Artificial Sequence
  Synthetic
uuacugguauucauuugguagaga

SEQ ID NO: 220561 - RNA, 18 nt, Artificial Sequence
  Synthetic
auagauugaguguagaga

SEQ ID NO: 220562 - RNA, 19 nt, Artificial Sequence
  Synthetic
gauagauugaguguagaga

SEQ ID NO: 220563 - RNA, 20 nt, Artificial Sequence
  Synthetic
agauagauugaguguagaga

SEQ ID NO: 220564 - RNA, 21 nt, Artificial Sequence
  Synthetic
cagauagauugaguguagaga

SEQ ID NO: 220565 - RNA, 22 nt, Artificial Sequence
  Synthetic
ucagauagauugaguguagaga

SEQ ID NO: 220566 - RNA, 23 nt, Artificial Sequence
  Synthetic
cucagauagauugaguguagaga

SEQ ID NO: 220567 - RNA, 24 nt, Artificial Sequence
  Synthetic
ucucagauagauugaguguagaga

SEQ ID NO: 220568 - RNA, 18 nt, Artificial Sequence
  Synthetic
guuuuuuuuuuguagaga

SEQ ID NO: 220569 - RNA, 19 nt, Artificial Sequence
  Synthetic
uguuuuuuuuuuguagaga

SEQ ID NO: 220570 - RNA, 20 nt, Artificial Sequence
  Synthetic
uuguuuuuuuuuuguagaga

SEQ ID NO: 220571 - RNA, 21 nt, Artificial Sequence
  Synthetic
uuuguuuuuuuuuuguagaga

SEQ ID NO: 220572 - RNA, 22 nt, Artificial Sequence
  Synthetic
uuuuguuuuuuuuuuguagaga

SEQ ID NO: 220573 - RNA, 23 nt, Artificial Sequence
  Synthetic
uuuuuguuuuuuuuuuguagaga

SEQ ID NO: 220574 - RNA, 24 nt, Artificial Sequence
  Synthetic
uuuuuuguuuuuuuuuuguagaga

SEQ ID NO: 220575 - RNA, 18 nt, Artificial Sequence
  Synthetic
cucuaaaaaaauuagaga

SEQ ID NO: 220576 - RNA, 19 nt, Artificial Sequence
  Synthetic
ccucuaaaaaaauuagaga

SEQ ID NO: 220577 - RNA, 20 nt, Artificial Sequence
  Synthetic
accucuaaaaaaauuagaga

SEQ ID NO: 220578 - RNA, 21 nt, Artificial Sequence
  Synthetic
aaccucuaaaaaaauuagaga

SEQ ID NO: 220579 - RNA, 22 nt, Artificial Sequence
  Synthetic
aaaccucuaaaaaaauuagaga

SEQ ID NO: 220580 - RNA, 23 nt, Artificial Sequence
  Synthetic
gaaaccucuaaaaaaauuagaga

SEQ ID NO: 220581 - RNA, 24 nt, Artificial Sequence
  Synthetic
agaaaccucuaaaaaaauuagaga

SEQ ID NO: 220582 - RNA, 18 nt, Artificial Sequence
  Synthetic
acaagaauuuauuagaga

SEQ ID NO: 220583 - RNA, 19 nt, Artificial Sequence
  Synthetic
aacaagaauuuauuagaga

SEQ ID NO: 220584 - RNA, 20 nt, Artificial Sequence
  Synthetic
gaacaagaauuuauuagaga

SEQ ID NO: 220585 - RNA, 21 nt, Artificial Sequence
  Synthetic
agaacaagaauuuauuagaga

SEQ ID NO: 220586 - RNA, 22 nt, Artificial Sequence
  Synthetic
aagaacaagaauuuauuagaga

SEQ ID NO: 220587 - RNA, 23 nt, Artificial Sequence
  Synthetic
caagaacaagaauuuauuagaga

SEQ ID NO: 220588 - RNA, 24 nt, Artificial Sequence
  Synthetic
gcaagaacaagaauuuauuagaga

SEQ ID NO: 220589 - RNA, 18 nt, Artificial Sequence
  Synthetic
uuaaaaaagauuuagaga

SEQ ID NO: 220590 - RNA, 19 nt, Artificial Sequence
  Synthetic
uuuaaaaaagauuuagaga

SEQ ID NO: 220591 - RNA, 20 nt, Artificial Sequence
  Synthetic
auuuaaaaaagauuuagaga

SEQ ID NO: 220592 - RNA, 21 nt, Artificial Sequence
  Synthetic
aauuuaaaaaagauuuagaga

SEQ ID NO: 220593 - RNA, 22 nt, Artificial Sequence
  Synthetic
gaauuuaaaaaagauuuagaga

SEQ ID NO: 220594 - RNA, 23 nt, Artificial Sequence
  Synthetic
agaauuuaaaaaagauuuagaga

SEQ ID NO: 220595 - RNA, 24 nt, Artificial Sequence
  Synthetic
aagaauuuaaaaaagauuuagaga

SEQ ID NO: 220596 - RNA, 18 nt, Artificial Sequence
  Synthetic
cauauauauauuuagaga

SEQ ID NO: 220597 - RNA, 19 nt, Artificial Sequence
  Synthetic
gcauauauauauuuagaga

SEQ ID NO: 220598 - RNA, 20 nt, Artificial Sequence
  Synthetic
ugcauauauauauuuagaga

SEQ ID NO: 220599 - RNA, 21 nt, Artificial Sequence
  Synthetic
augcauauauauauuuagaga

SEQ ID NO: 220600 - RNA, 22 nt, Artificial Sequence
  Synthetic
uaugcauauauauauuuagaga

SEQ ID NO: 220601 - RNA, 23 nt, Artificial Sequence
  Synthetic
auaugcauauauauauuuagaga

SEQ ID NO: 220602 - RNA, 24 nt, Artificial Sequence
  Synthetic
cauaugcauauauauauuuagaga

SEQ ID NO: 220603 - RNA, 18 nt, Artificial Sequence
  Synthetic
cuacucccauuuuagaga

SEQ ID NO: 220604 - RNA, 19 nt, Artificial Sequence
  Synthetic
acuacucccauuuuagaga

SEQ ID NO: 220605 - RNA, 20 nt, Artificial Sequence
  Synthetic
uacuacucccauuuuagaga

SEQ ID NO: 220606 - RNA, 21 nt, Artificial Sequence
  Synthetic
uuacuacucccauuuuagaga

SEQ ID NO: 220607 - RNA, 22 nt, Artificial Sequence
  Synthetic
auuacuacucccauuuuagaga

SEQ ID NO: 220608 - RNA, 23 nt, Artificial Sequence
  Synthetic
aauuacuacucccauuuuagaga

SEQ ID NO: 220609 - RNA, 24 nt, Artificial Sequence
  Synthetic
aaauuacuacucccauuuuagaga

SEQ ID NO: 220610 - RNA, 18 nt, Artificial Sequence
  Synthetic
aauauuagauuaacgaga

SEQ ID NO: 220611 - RNA, 19 nt, Artificial Sequence
  Synthetic
caauauuagauuaacgaga

SEQ ID NO: 220612 - RNA, 20 nt, Artificial Sequence
  Synthetic
ucaauauuagauuaacgaga

SEQ ID NO: 220613 - RNA, 21 nt, Artificial Sequence
  Synthetic
gucaauauuagauuaacgaga

SEQ ID NO: 220614 - RNA, 22 nt, Artificial Sequence
  Synthetic
ugucaauauuagauuaacgaga

SEQ ID NO: 220615 - RNA, 23 nt, Artificial Sequence
  Synthetic
cugucaauauuagauuaacgaga

SEQ ID NO: 220616 - RNA, 24 nt, Artificial Sequence
  Synthetic
acugucaauauuagauuaacgaga

SEQ ID NO: 220617 - RNA, 18 nt, Artificial Sequence
  Synthetic
auaaagacauacccgaga

SEQ ID NO: 220618 - RNA, 19 nt, Artificial Sequence
  Synthetic
gauaaagacauacccgaga

SEQ ID NO: 220619 - RNA, 20 nt, Artificial Sequence
  Synthetic
ggauaaagacauacccgaga

SEQ ID NO: 220620 - RNA, 21 nt, Artificial Sequence
  Synthetic
cggauaaagacauacccgaga

SEQ ID NO: 220621 - RNA, 22 nt, Artificial Sequence
  Synthetic
gcggauaaagacauacccgaga

SEQ ID NO: 220622 - RNA, 23 nt, Artificial Sequence
  Synthetic
ugcggauaaagacauacccgaga

SEQ ID NO: 220623 - RNA, 24 nt, Artificial Sequence
  Synthetic
cugcggauaaagacauacccgaga

SEQ ID NO: 220624 - RNA, 18 nt, Artificial Sequence
  Synthetic
aguaggggaaaagcgaga

SEQ ID NO: 220625 - RNA, 19 nt, Artificial Sequence
  Synthetic
aaguaggggaaaagcgaga

SEQ ID NO: 220626 - RNA, 20 nt, Artificial Sequence
  Synthetic
gaaguaggggaaaagcgaga

SEQ ID NO: 220627 - RNA, 21 nt, Artificial Sequence
  Synthetic
ggaaguaggggaaaagcgaga

SEQ ID NO: 220628 - RNA, 22 nt, Artificial Sequence
  Synthetic
gggaaguaggggaaaagcgaga

SEQ ID NO: 220629 - RNA, 23 nt, Artificial Sequence
  Synthetic
ggggaaguaggggaaaagcgaga

SEQ ID NO: 220630 - RNA, 24 nt, Artificial Sequence
  Synthetic
gggggaaguaggggaaaagcgaga

SEQ ID NO: 220631 - RNA, 18 nt, Artificial Sequence
  Synthetic
ccuggaacaccagcgaga

SEQ ID NO: 220632 - RNA, 19 nt, Artificial Sequence
  Synthetic
accuggaacaccagcgaga

SEQ ID NO: 220633 - RNA, 20 nt, Artificial Sequence
  Synthetic
caccuggaacaccagcgaga

SEQ ID NO: 220634 - RNA, 21 nt, Artificial Sequence
  Synthetic
ucaccuggaacaccagcgaga

SEQ ID NO: 220635 - RNA, 22 nt, Artificial Sequence
  Synthetic
gucaccuggaacaccagcgaga

SEQ ID NO: 220636 - RNA, 23 nt, Artificial Sequence
  Synthetic
cgucaccuggaacaccagcgaga

SEQ ID NO: 220637 - RNA, 24 nt, Artificial Sequence
  Synthetic
gcgucaccuggaacaccagcgaga

SEQ ID NO: 220638 - RNA, 18 nt, Artificial Sequence
  Synthetic
uugcuugugaaaucgaga

SEQ ID NO: 220639 - RNA, 19 nt, Artificial Sequence
  Synthetic
guugcuugugaaaucgaga

SEQ ID NO: 220640 - RNA, 20 nt, Artificial Sequence
  Synthetic
aguugcuugugaaaucgaga

SEQ ID NO: 220641 - RNA, 21 nt, Artificial Sequence
  Synthetic
gaguugcuugugaaaucgaga

SEQ ID NO: 220642 - RNA, 22 nt, Artificial Sequence
  Synthetic
ggaguugcuugugaaaucgaga

SEQ ID NO: 220643 - RNA, 23 nt, Artificial Sequence
  Synthetic
aggaguugcuugugaaaucgaga

SEQ ID NO: 220644 - RNA, 24 nt, Artificial Sequence
  Synthetic
caggaguugcuugugaaaucgaga

SEQ ID NO: 220645 - RNA, 18 nt, Artificial Sequence
  Synthetic
cccucucugguuucgaga

SEQ ID NO: 220646 - RNA, 19 nt, Artificial Sequence
  Synthetic
ucccucucugguuucgaga

SEQ ID NO: 220647 - RNA, 20 nt, Artificial Sequence
  Synthetic
cucccucucugguuucgaga

SEQ ID NO: 220648 - RNA, 21 nt, Artificial Sequence
  Synthetic
ucucccucucugguuucgaga

SEQ ID NO: 220649 - RNA, 22 nt, Artificial Sequence
  Synthetic
cucucccucucugguuucgaga

SEQ ID NO: 220650 - RNA, 23 nt, Artificial Sequence
  Synthetic
ucucucccucucugguuucgaga

SEQ ID NO: 220651 - RNA, 24 nt, Artificial Sequence
  Synthetic
gucucucccucucugguuucgaga

SEQ ID NO: 220652 - RNA, 18 nt, Artificial Sequence
  Synthetic
uuggauuuucaaaggaga

SEQ ID NO: 220653 - RNA, 19 nt, Artificial Sequence
  Synthetic
cuuggauuuucaaaggaga

SEQ ID NO: 220654 - RNA, 20 nt, Artificial Sequence
  Synthetic
ccuuggauuuucaaaggaga

SEQ ID NO: 220655 - RNA, 21 nt, Artificial Sequence
  Synthetic
accuuggauuuucaaaggaga

SEQ ID NO: 220656 - RNA, 22 nt, Artificial Sequence
  Synthetic
uaccuuggauuuucaaaggaga

SEQ ID NO: 220657 - RNA, 23 nt, Artificial Sequence
  Synthetic
uuaccuuggauuuucaaaggaga

SEQ ID NO: 220658 - RNA, 24 nt, Artificial Sequence
  Synthetic
guuaccuuggauuuucaaaggaga

SEQ ID NO: 220659 - RNA, 18 nt, Artificial Sequence
  Synthetic
gggaggauagaaaggaga

SEQ ID NO: 220660 - RNA, 19 nt, Artificial Sequence
  Synthetic
agggaggauagaaaggaga

SEQ ID NO: 220661 - RNA, 20 nt, Artificial Sequence
  Synthetic
gagggaggauagaaaggaga

SEQ ID NO: 220662 - RNA, 21 nt, Artificial Sequence
  Synthetic
agagggaggauagaaaggaga

SEQ ID NO: 220663 - RNA, 22 nt, Artificial Sequence
  Synthetic
gagagggaggauagaaaggaga

SEQ ID NO: 220664 - RNA, 23 nt, Artificial Sequence
  Synthetic
agagagggaggauagaaaggaga

SEQ ID NO: 220665 - RNA, 24 nt, Artificial Sequence
  Synthetic
gagagagggaggauagaaaggaga

SEQ ID NO: 220666 - RNA, 18 nt, Artificial Sequence
  Synthetic
uucugcuuauaaaggaga

SEQ ID NO: 220667 - RNA, 19 nt, Artificial Sequence
  Synthetic
uuucugcuuauaaaggaga

SEQ ID NO: 220668 - RNA, 20 nt, Artificial Sequence
  Synthetic
uuuucugcuuauaaaggaga

SEQ ID NO: 220669 - RNA, 21 nt, Artificial Sequence
  Synthetic
uuuuucugcuuauaaaggaga

SEQ ID NO: 220670 - RNA, 22 nt, Artificial Sequence
  Synthetic
uuuuuucugcuuauaaaggaga

SEQ ID NO: 220671 - RNA, 23 nt, Artificial Sequence
  Synthetic
auuuuuucugcuuauaaaggaga

SEQ ID NO: 220672 - RNA, 24 nt, Artificial Sequence
  Synthetic
cauuuuuucugcuuauaaaggaga

SEQ ID NO: 220673 - RNA, 18 nt, Artificial Sequence
  Synthetic
caaugcauuuaaaggaga

SEQ ID NO: 220674 - RNA, 19 nt, Artificial Sequence
  Synthetic
ucaaugcauuuaaaggaga

SEQ ID NO: 220675 - RNA, 20 nt, Artificial Sequence
  Synthetic
cucaaugcauuuaaaggaga

SEQ ID NO: 220676 - RNA, 21 nt, Artificial Sequence
  Synthetic
ccucaaugcauuuaaaggaga

SEQ ID NO: 220677 - RNA, 22 nt, Artificial Sequence
  Synthetic
accucaaugcauuuaaaggaga

SEQ ID NO: 220678 - RNA, 23 nt, Artificial Sequence
  Synthetic
aaccucaaugcauuuaaaggaga

SEQ ID NO: 220679 - RNA, 24 nt, Artificial Sequence
  Synthetic
uaaccucaaugcauuuaaaggaga

SEQ ID NO: 220680 - RNA, 18 nt, Artificial Sequence
  Synthetic
gcaugaguaacaaggaga

SEQ ID NO: 220681 - RNA, 19 nt, Artificial Sequence
  Synthetic
ggcaugaguaacaaggaga

SEQ ID NO: 220682 - RNA, 20 nt, Artificial Sequence
  Synthetic
gggcaugaguaacaaggaga

SEQ ID NO: 220683 - RNA, 21 nt, Artificial Sequence
  Synthetic
ugggcaugaguaacaaggaga

SEQ ID NO: 220684 - RNA, 22 nt, Artificial Sequence
  Synthetic
augggcaugaguaacaaggaga

SEQ ID NO: 220685 - RNA, 23 nt, Artificial Sequence
  Synthetic
gaugggcaugaguaacaaggaga

SEQ ID NO: 220686 - RNA, 24 nt, Artificial Sequence
  Synthetic
agaugggcaugaguaacaaggaga

SEQ ID NO: 220687 - RNA, 18 nt, Artificial Sequence
  Synthetic
agaagaagaagaaggaga

SEQ ID NO: 220688 - RNA, 19 nt, Artificial Sequence
  Synthetic
aagaagaagaagaaggaga

SEQ ID NO: 220689 - RNA, 20 nt, Artificial Sequence
  Synthetic
gaagaagaagaagaaggaga

SEQ ID NO: 220690 - RNA, 21 nt, Artificial Sequence
  Synthetic
agaagaagaagaagaaggaga

SEQ ID NO: 220691 - RNA, 22 nt, Artificial Sequence
  Synthetic
aagaagaagaagaagaaggaga

SEQ ID NO: 220692 - RNA, 23 nt, Artificial Sequence
  Synthetic
uaagaagaagaagaagaaggaga

SEQ ID NO: 220693 - RNA, 24 nt, Artificial Sequence
  Synthetic
auaagaagaagaagaagaaggaga

SEQ ID NO: 220694 - RNA, 18 nt, Artificial Sequence
  Synthetic
ggaaaaaggggaaggaga

SEQ ID NO: 220695 - RNA, 19 nt, Artificial Sequence
  Synthetic
aggaaaaaggggaaggaga

SEQ ID NO: 220696 - RNA, 20 nt, Artificial Sequence
  Synthetic
caggaaaaaggggaaggaga

SEQ ID NO: 220697 - RNA, 21 nt, Artificial Sequence
  Synthetic
gcaggaaaaaggggaaggaga

SEQ ID NO: 220698 - RNA, 22 nt, Artificial Sequence
  Synthetic
agcaggaaaaaggggaaggaga

SEQ ID NO: 220699 - RNA, 23 nt, Artificial Sequence
  Synthetic
aagcaggaaaaaggggaaggaga

SEQ ID NO: 220700 - RNA, 24 nt, Artificial Sequence
  Synthetic
aaagcaggaaaaaggggaaggaga

SEQ ID NO: 220701 - RNA, 18 nt, Artificial Sequence
  Synthetic
gggagaaugggaaggaga

SEQ ID NO: 220702 - RNA, 19 nt, Artificial Sequence
  Synthetic
agggagaaugggaaggaga

SEQ ID NO: 220703 - RNA, 20 nt, Artificial Sequence
  Synthetic
gagggagaaugggaaggaga

SEQ ID NO: 220704 - RNA, 21 nt, Artificial Sequence
  Synthetic
agagggagaaugggaaggaga

SEQ ID NO: 220705 - RNA, 22 nt, Artificial Sequence
  Synthetic
cagagggagaaugggaaggaga

SEQ ID NO: 220706 - RNA, 23 nt, Artificial Sequence
  Synthetic
acagagggagaaugggaaggaga

SEQ ID NO: 220707 - RNA, 24 nt, Artificial Sequence
  Synthetic
gacagagggagaaugggaaggaga

SEQ ID NO: 220708 - RNA, 18 nt, Artificial Sequence
  Synthetic
gagcagaacugaaggaga

SEQ ID NO: 220709 - RNA, 19 nt, Artificial Sequence
  Synthetic
agagcagaacugaaggaga

SEQ ID NO: 220710 - RNA, 20 nt, Artificial Sequence
  Synthetic
cagagcagaacugaaggaga

SEQ ID NO: 220711 - RNA, 21 nt, Artificial Sequence
  Synthetic
ucagagcagaacugaaggaga

SEQ ID NO: 220712 - RNA, 22 nt, Artificial Sequence
  Synthetic
aucagagcagaacugaaggaga

SEQ ID NO: 220713 - RNA, 23 nt, Artificial Sequence
  Synthetic
gaucagagcagaacugaaggaga

SEQ ID NO: 220714 - RNA, 24 nt, Artificial Sequence
  Synthetic
cgaucagagcagaacugaaggaga

SEQ ID NO: 220715 - RNA, 18 nt, Artificial Sequence
  Synthetic
agagaagugugaaggaga

SEQ ID NO: 220716 - RNA, 19 nt, Artificial Sequence
  Synthetic
aagagaagugugaaggaga

SEQ ID NO: 220717 - RNA, 20 nt, Artificial Sequence
  Synthetic
gaagagaagugugaaggaga

SEQ ID NO: 220718 - RNA, 21 nt, Artificial Sequence
  Synthetic
agaagagaagugugaaggaga

SEQ ID NO: 220719 - RNA, 22 nt, Artificial Sequence
  Synthetic
gagaagagaagugugaaggaga

SEQ ID NO: 220720 - RNA, 23 nt, Artificial Sequence
  Synthetic
ggagaagagaagugugaaggaga

SEQ ID NO: 220721 - RNA, 24 nt, Artificial Sequence
  Synthetic
aggagaagagaagugugaaggaga

SEQ ID NO: 220722 - RNA, 18 nt, Artificial Sequence
  Synthetic
uauuaccaaaacaggaga

SEQ ID NO: 220723 - RNA, 19 nt, Artificial Sequence
  Synthetic
uuauuaccaaaacaggaga

SEQ ID NO: 220724 - RNA, 20 nt, Artificial Sequence
  Synthetic
uuuauuaccaaaacaggaga

SEQ ID NO: 220725 - RNA, 21 nt, Artificial Sequence
  Synthetic
uuuuauuaccaaaacaggaga

SEQ ID NO: 220726 - RNA, 22 nt, Artificial Sequence
  Synthetic
guuuuauuaccaaaacaggaga

SEQ ID NO: 220727 - RNA, 23 nt, Artificial Sequence
  Synthetic
uguuuuauuaccaaaacaggaga

SEQ ID NO: 220728 - RNA, 24 nt, Artificial Sequence
  Synthetic
auguuuuauuaccaaaacaggaga

SEQ ID NO: 220729 - RNA, 18 nt, Artificial Sequence
  Synthetic
cccacagagaacaggaga

SEQ ID NO: 220730 - RNA, 19 nt, Artificial Sequence
  Synthetic
ucccacagagaacaggaga

SEQ ID NO: 220731 - RNA, 20 nt, Artificial Sequence
  Synthetic
uucccacagagaacaggaga

SEQ ID NO: 220732 - RNA, 21 nt, Artificial Sequence
  Synthetic
cuucccacagagaacaggaga

SEQ ID NO: 220733 - RNA, 22 nt, Artificial Sequence
  Synthetic
ucuucccacagagaacaggaga

SEQ ID NO: 220734 - RNA, 23 nt, Artificial Sequence
  Synthetic
aucuucccacagagaacaggaga

SEQ ID NO: 220735 - RNA, 24 nt, Artificial Sequence
  Synthetic
uaucuucccacagagaacaggaga

SEQ ID NO: 220736 - RNA, 18 nt, Artificial Sequence
  Synthetic
aaaaaagauaacaggaga

SEQ ID NO: 220737 - RNA, 19 nt, Artificial Sequence
  Synthetic
aaaaaaagauaacaggaga

SEQ ID NO: 220738 - RNA, 20 nt, Artificial Sequence
  Synthetic
aaaaaaaagauaacaggaga

SEQ ID NO: 220739 - RNA, 21 nt, Artificial Sequence
  Synthetic
aaaaaaaaagauaacaggaga

SEQ ID NO: 220740 - RNA, 22 nt, Artificial Sequence
  Synthetic
aaaaaaaaaagauaacaggaga

SEQ ID NO: 220741 - RNA, 23 nt, Artificial Sequence
  Synthetic
aaaaaaaaaaagauaacaggaga

SEQ ID NO: 220742 - RNA, 24 nt, Artificial Sequence
  Synthetic
gaaaaaaaaaaagauaacaggaga

SEQ ID NO: 220743 - RNA, 18 nt, Artificial Sequence
  Synthetic
caggggaaacacaggaga

SEQ ID NO: 220744 - RNA, 19 nt, Artificial Sequence
  Synthetic
acaggggaaacacaggaga

SEQ ID NO: 220745 - RNA, 20 nt, Artificial Sequence
  Synthetic
aacaggggaaacacaggaga

SEQ ID NO: 220746 - RNA, 21 nt, Artificial Sequence
  Synthetic
uaacaggggaaacacaggaga

SEQ ID NO: 220747 - RNA, 22 nt, Artificial Sequence
  Synthetic
auaacaggggaaacacaggaga

SEQ ID NO: 220748 - RNA, 23 nt, Artificial Sequence
  Synthetic
aauaacaggggaaacacaggaga

SEQ ID NO: 220749 - RNA, 24 nt, Artificial Sequence
  Synthetic
aaauaacaggggaaacacaggaga

SEQ ID NO: 220750 - RNA, 18 nt, Artificial Sequence
  Synthetic
acauucucucacaggaga

SEQ ID NO: 220751 - RNA, 19 nt, Artificial Sequence
  Synthetic
uacauucucucacaggaga

SEQ ID NO: 220752 - RNA, 20 nt, Artificial Sequence
  Synthetic
uuacauucucucacaggaga

SEQ ID NO: 220753 - RNA, 21 nt, Artificial Sequence
  Synthetic
auuacauucucucacaggaga

SEQ ID NO: 220754 - RNA, 22 nt, Artificial Sequence
  Synthetic
uauuacauucucucacaggaga

SEQ ID NO: 220755 - RNA, 23 nt, Artificial Sequence
  Synthetic
auauuacauucucucacaggaga

SEQ ID NO: 220756 - RNA, 24 nt, Artificial Sequence
  Synthetic
gauauuacauucucucacaggaga

SEQ ID NO: 220757 - RNA, 18 nt, Artificial Sequence
  Synthetic
uaacaauuucccaggaga

SEQ ID NO: 220758 - RNA, 19 nt, Artificial Sequence
  Synthetic
auaacaauuucccaggaga

SEQ ID NO: 220759 - RNA, 20 nt, Artificial Sequence
  Synthetic
cauaacaauuucccaggaga

SEQ ID NO: 220760 - RNA, 21 nt, Artificial Sequence
  Synthetic
ccauaacaauuucccaggaga

SEQ ID NO: 220761 - RNA, 22 nt, Artificial Sequence
  Synthetic
gccauaacaauuucccaggaga

SEQ ID NO: 220762 - RNA, 23 nt, Artificial Sequence
  Synthetic
ggccauaacaauuucccaggaga

SEQ ID NO: 220763 - RNA, 24 nt, Artificial Sequence
  Synthetic
uggccauaacaauuucccaggaga

SEQ ID NO: 220764 - RNA, 18 nt, Artificial Sequence
  Synthetic
cauucuuucuccaggaga

SEQ ID NO: 220765 - RNA, 19 nt, Artificial Sequence
  Synthetic
ccauucuuucuccaggaga

SEQ ID NO: 220766 - RNA, 20 nt, Artificial Sequence
  Synthetic
uccauucuuucuccaggaga

SEQ ID NO: 220767 - RNA, 21 nt, Artificial Sequence
  Synthetic
cuccauucuuucuccaggaga

SEQ ID NO: 220768 - RNA, 22 nt, Artificial Sequence
  Synthetic
ucuccauucuuucuccaggaga

SEQ ID NO: 220769 - RNA, 23 nt, Artificial Sequence
  Synthetic
cucuccauucuuucuccaggaga

SEQ ID NO: 220770 - RNA, 24 nt, Artificial Sequence
  Synthetic
ucucuccauucuuucuccaggaga

SEQ ID NO: 220771 - RNA, 18 nt, Artificial Sequence
  Synthetic
gaaaauggaagcaggaga

SEQ ID NO: 220772 - RNA, 19 nt, Artificial Sequence
  Synthetic
ugaaaauggaagcaggaga

SEQ ID NO: 220773 - RNA, 20 nt, Artificial Sequence
  Synthetic
gugaaaauggaagcaggaga

SEQ ID NO: 220774 - RNA, 21 nt, Artificial Sequence
  Synthetic
agugaaaauggaagcaggaga

SEQ ID NO: 220775 - RNA, 22 nt, Artificial Sequence
  Synthetic
aagugaaaauggaagcaggaga

SEQ ID NO: 220776 - RNA, 23 nt, Artificial Sequence
  Synthetic
uaagugaaaauggaagcaggaga

SEQ ID NO: 220777 - RNA, 24 nt, Artificial Sequence
  Synthetic
auaagugaaaauggaagcaggaga

SEQ ID NO: 220778 - RNA, 18 nt, Artificial Sequence
  Synthetic
ucacaaggcagcaggaga

SEQ ID NO: 220779 - RNA, 19 nt, Artificial Sequence
  Synthetic
uucacaaggcagcaggaga

SEQ ID NO: 220780 - RNA, 20 nt, Artificial Sequence
  Synthetic
cuucacaaggcagcaggaga

SEQ ID NO: 220781 - RNA, 21 nt, Artificial Sequence
  Synthetic
ccuucacaaggcagcaggaga

SEQ ID NO: 220782 - RNA, 22 nt, Artificial Sequence
  Synthetic
accuucacaaggcagcaggaga

SEQ ID NO: 220783 - RNA, 23 nt, Artificial Sequence
  Synthetic
caccuucacaaggcagcaggaga

SEQ ID NO: 220784 - RNA, 24 nt, Artificial Sequence
  Synthetic
gcaccuucacaaggcagcaggaga

SEQ ID NO: 220785 - RNA, 18 nt, Artificial Sequence
  Synthetic
agauuggagagcaggaga

SEQ ID NO: 220786 - RNA, 19 nt, Artificial Sequence
  Synthetic
gagauuggagagcaggaga

SEQ ID NO: 220787 - RNA, 20 nt, Artificial Sequence
  Synthetic
ggagauuggagagcaggaga

SEQ ID NO: 220788 - RNA, 21 nt, Artificial Sequence
  Synthetic
aggagauuggagagcaggaga

SEQ ID NO: 220789 - RNA, 22 nt, Artificial Sequence
  Synthetic
caggagauuggagagcaggaga

SEQ ID NO: 220790 - RNA, 23 nt, Artificial Sequence
  Synthetic
gcaggagauuggagagcaggaga

SEQ ID NO: 220791 - RNA, 24 nt, Artificial Sequence
  Synthetic
ggcaggagauuggagagcaggaga

SEQ ID NO: 220792 - RNA, 18 nt, Artificial Sequence
  Synthetic
gggcaaucaggcaggaga

SEQ ID NO: 220793 - RNA, 19 nt, Artificial Sequence
  Synthetic
agggcaaucaggcaggaga

SEQ ID NO: 220794 - RNA, 20 nt, Artificial Sequence
  Synthetic
cagggcaaucaggcaggaga

SEQ ID NO: 220795 - RNA, 18 nt, Artificial Sequence
  Synthetic
aggagaagcggcaggaga

SEQ ID NO: 220796 - RNA, 19 nt, Artificial Sequence
  Synthetic
gaggagaagcggcaggaga

SEQ ID NO: 220797 - RNA, 20 nt, Artificial Sequence
  Synthetic
ggaggagaagcggcaggaga

SEQ ID NO: 220798 - RNA, 21 nt, Artificial Sequence
  Synthetic
aggaggagaagcggcaggaga

SEQ ID NO: 220799 - RNA, 22 nt, Artificial Sequence
  Synthetic
gaggaggagaagcggcaggaga

SEQ ID NO: 220800 - RNA, 23 nt, Artificial Sequence
  Synthetic
ugaggaggagaagcggcaggaga

SEQ ID NO: 220801 - RNA, 24 nt, Artificial Sequence
  Synthetic
gugaggaggagaagcggcaggaga

SEQ ID NO: 220802 - RNA, 18 nt, Artificial Sequence
  Synthetic
ggaggcguuggcaggaga

SEQ ID NO: 220803 - RNA, 19 nt, Artificial Sequence
  Synthetic
gggaggcguuggcaggaga

SEQ ID NO: 220804 - RNA, 20 nt, Artificial Sequence
  Synthetic
ugggaggcguuggcaggaga

SEQ ID NO: 220805 - RNA, 21 nt, Artificial Sequence
  Synthetic
gugggaggcguuggcaggaga

SEQ ID NO: 220806 - RNA, 22 nt, Artificial Sequence
  Synthetic
agugggaggcguuggcaggaga

SEQ ID NO: 220807 - RNA, 23 nt, Artificial Sequence
  Synthetic
cagugggaggcguuggcaggaga

SEQ ID NO: 220808 - RNA, 24 nt, Artificial Sequence
  Synthetic
ccagugggaggcguuggcaggaga

SEQ ID NO: 220809 - RNA, 18 nt, Artificial Sequence
  Synthetic
gaucacaaagucaggaga

SEQ ID NO: 220810 - RNA, 19 nt, Artificial Sequence
  Synthetic
ggaucacaaagucaggaga

SEQ ID NO: 220811 - RNA, 20 nt, Artificial Sequence
  Synthetic
cggaucacaaagucaggaga

SEQ ID NO: 220812 - RNA, 21 nt, Artificial Sequence
  Synthetic
gcggaucacaaagucaggaga

SEQ ID NO: 220813 - RNA, 22 nt, Artificial Sequence
  Synthetic
ggcggaucacaaagucaggaga

SEQ ID NO: 220814 - RNA, 23 nt, Artificial Sequence
  Synthetic
gggcggaucacaaagucaggaga

SEQ ID NO: 220815 - RNA, 24 nt, Artificial Sequence
  Synthetic
ugggcggaucacaaagucaggaga

SEQ ID NO: 220816 - RNA, 18 nt, Artificial Sequence
  Synthetic
gcacuaggagucaggaga

SEQ ID NO: 220817 - RNA, 19 nt, Artificial Sequence
  Synthetic
ugcacuaggagucaggaga

SEQ ID NO: 220818 - RNA, 20 nt, Artificial Sequence
  Synthetic
gugcacuaggagucaggaga

SEQ ID NO: 220819 - RNA, 21 nt, Artificial Sequence
  Synthetic
ugugcacuaggagucaggaga

SEQ ID NO: 220820 - RNA, 22 nt, Artificial Sequence
  Synthetic
augugcacuaggagucaggaga

SEQ ID NO: 220821 - RNA, 23 nt, Artificial Sequence
  Synthetic
caugugcacuaggagucaggaga

SEQ ID NO: 220822 - RNA, 24 nt, Artificial Sequence
  Synthetic
acaugugcacuaggagucaggaga

SEQ ID NO: 220823 - RNA, 19 nt, Artificial Sequence
  Synthetic
agaucacaaggucaggaga

SEQ ID NO: 220824 - RNA, 20 nt, Artificial Sequence
  Synthetic
cagaucacaaggucaggaga

SEQ ID NO: 220825 - RNA, 21 nt, Artificial Sequence
  Synthetic
gcagaucacaaggucaggaga

SEQ ID NO: 220826 - RNA, 22 nt, Artificial Sequence
  Synthetic
ggcagaucacaaggucaggaga

SEQ ID NO: 220827 - RNA, 23 nt, Artificial Sequence
  Synthetic
gggcagaucacaaggucaggaga

SEQ ID NO: 220828 - RNA, 24 nt, Artificial Sequence
  Synthetic
cgggcagaucacaaggucaggaga

SEQ ID NO: 220829 - RNA, 18 nt, Artificial Sequence
  Synthetic
gaucacgaggucaggaga

SEQ ID NO: 220830 - RNA, 19 nt, Artificial Sequence
  Synthetic
agaucacgaggucaggaga

SEQ ID NO: 220831 - RNA, 20 nt, Artificial Sequence
  Synthetic
cagaucacgaggucaggaga

SEQ ID NO: 220832 - RNA, 21 nt, Artificial Sequence
  Synthetic
gcagaucacgaggucaggaga

SEQ ID NO: 220833 - RNA, 22 nt, Artificial Sequence
  Synthetic
ggcagaucacgaggucaggaga

SEQ ID NO: 220834 - RNA, 23 nt, Artificial Sequence
  Synthetic
aggcagaucacgaggucaggaga

SEQ ID NO: 220835 - RNA, 24 nt, Artificial Sequence
  Synthetic
caggcagaucacgaggucaggaga

SEQ ID NO: 220836 - RNA, 23 nt, Artificial Sequence
  Synthetic
gggcagaucacgaggucaggaga

SEQ ID NO: 220837 - RNA, 24 nt, Artificial Sequence
  Synthetic
ugggcagaucacgaggucaggaga

SEQ ID NO: 220838 - RNA, 19 nt, Artificial Sequence
  Synthetic
ggaucacgaggucaggaga

SEQ ID NO: 220839 - RNA, 20 nt, Artificial Sequence
  Synthetic
aggaucacgaggucaggaga

SEQ ID NO: 220840 - RNA, 21 nt, Artificial Sequence
  Synthetic
aaggaucacgaggucaggaga

SEQ ID NO: 220841 - RNA, 22 nt, Artificial Sequence
  Synthetic
gaaggaucacgaggucaggaga

SEQ ID NO: 220842 - RNA, 23 nt, Artificial Sequence
  Synthetic
agaaggaucacgaggucaggaga

SEQ ID NO: 220843 - RNA, 24 nt, Artificial Sequence
  Synthetic
cagaaggaucacgaggucaggaga

SEQ ID NO: 220844 - RNA, 21 nt, Artificial Sequence
  Synthetic
gcggaucacgaggucaggaga

SEQ ID NO: 220845 - RNA, 22 nt, Artificial Sequence
  Synthetic
ggcggaucacgaggucaggaga

SEQ ID NO: 220846 - RNA, 23 nt, Artificial Sequence
  Synthetic
aggcggaucacgaggucaggaga

SEQ ID NO: 220847 - RNA, 24 nt, Artificial Sequence
  Synthetic
caggcggaucacgaggucaggaga

SEQ ID NO: 220848 - RNA, 24 nt, Artificial Sequence
  Synthetic
ugggcggaucacgaggucaggaga

SEQ ID NO: 220849 - RNA, 24 nt, Artificial Sequence
  Synthetic
cggguggaucacgaggucaggaga

SEQ ID NO: 220850 - RNA, 21 nt, Artificial Sequence
  Synthetic
uuggaucacgaggucaggaga

SEQ ID NO: 220851 - RNA, 22 nt, Artificial Sequence
  Synthetic
guuggaucacgaggucaggaga

SEQ ID NO: 220852 - RNA, 23 nt, Artificial Sequence
  Synthetic
aguuggaucacgaggucaggaga

SEQ ID NO: 220853 - RNA, 24 nt, Artificial Sequence
  Synthetic
caguuggaucacgaggucaggaga

SEQ ID NO: 220854 - RNA, 19 nt, Artificial Sequence
  Synthetic
ugaucacgaggucaggaga

SEQ ID NO: 220855 - RNA, 20 nt, Artificial Sequence
  Synthetic
cugaucacgaggucaggaga

SEQ ID NO: 220856 - RNA, 21 nt, Artificial Sequence
  Synthetic
gcugaucacgaggucaggaga

SEQ ID NO: 220857 - RNA, 22 nt, Artificial Sequence
  Synthetic
ggcugaucacgaggucaggaga

SEQ ID NO: 220858 - RNA, 23 nt, Artificial Sequence
  Synthetic
gggcugaucacgaggucaggaga

SEQ ID NO: 220859 - RNA, 24 nt, Artificial Sequence
  Synthetic
cgggcugaucacgaggucaggaga

SEQ ID NO: 220860 - RNA, 20 nt, Artificial Sequence
  Synthetic
cggaucaugaggucaggaga

SEQ ID NO: 220861 - RNA, 21 nt, Artificial Sequence
  Synthetic
gcggaucaugaggucaggaga

SEQ ID NO: 220862 - RNA, 22 nt, Artificial Sequence
  Synthetic
ggcggaucaugaggucaggaga

SEQ ID NO: 220863 - RNA, 23 nt, Artificial Sequence
  Synthetic
aggcggaucaugaggucaggaga

SEQ ID NO: 220864 - RNA, 24 nt, Artificial Sequence
  Synthetic
caggcggaucaugaggucaggaga

SEQ ID NO: 220865 - RNA, 18 nt, Artificial Sequence
  Synthetic
gaucaugaugucaggaga

SEQ ID NO: 220866 - RNA, 19 nt, Artificial Sequence
  Synthetic
ggaucaugaugucaggaga

SEQ ID NO: 220867 - RNA, 20 nt, Artificial Sequence
  Synthetic
cggaucaugaugucaggaga

SEQ ID NO: 220868 - RNA, 21 nt, Artificial Sequence
  Synthetic
gcggaucaugaugucaggaga

SEQ ID NO: 220869 - RNA, 22 nt, Artificial Sequence
  Synthetic
ggcggaucaugaugucaggaga

SEQ ID NO: 220870 - RNA, 23 nt, Artificial Sequence
  Synthetic
gggcggaucaugaugucaggaga

SEQ ID NO: 220871 - RNA, 24 nt, Artificial Sequence
  Synthetic
cgggcggaucaugaugucaggaga

SEQ ID NO: 220872 - RNA, 18 nt, Artificial Sequence
  Synthetic
aacuauuaauucaggaga

SEQ ID NO: 220873 - RNA, 19 nt, Artificial Sequence
  Synthetic
caacuauuaauucaggaga

SEQ ID NO: 220874 - RNA, 20 nt, Artificial Sequence
  Synthetic
gcaacuauuaauucaggaga

SEQ ID NO: 220875 - RNA, 21 nt, Artificial Sequence
  Synthetic
agcaacuauuaauucaggaga

SEQ ID NO: 220876 - RNA, 22 nt, Artificial Sequence
  Synthetic
uagcaacuauuaauucaggaga

SEQ ID NO: 220877 - RNA, 23 nt, Artificial Sequence
  Synthetic
uuagcaacuauuaauucaggaga

SEQ ID NO: 220878 - RNA, 24 nt, Artificial Sequence
  Synthetic
cuuagcaacuauuaauucaggaga

SEQ ID NO: 220879 - RNA, 18 nt, Artificial Sequence
  Synthetic
accaagcuaaagaggaga

SEQ ID NO: 220880 - RNA, 19 nt, Artificial Sequence
  Synthetic
gaccaagcuaaagaggaga

SEQ ID NO: 220881 - RNA, 20 nt, Artificial Sequence
  Synthetic
agaccaagcuaaagaggaga

SEQ ID NO: 220882 - RNA, 21 nt, Artificial Sequence
  Synthetic
gagaccaagcuaaagaggaga

SEQ ID NO: 220883 - RNA, 22 nt, Artificial Sequence
  Synthetic
agagaccaagcuaaagaggaga

SEQ ID NO: 220884 - RNA, 23 nt, Artificial Sequence
  Synthetic
aagagaccaagcuaaagaggaga

SEQ ID NO: 220885 - RNA, 24 nt, Artificial Sequence
  Synthetic
caagagaccaagcuaaagaggaga

SEQ ID NO: 220886 - RNA, 18 nt, Artificial Sequence
  Synthetic
gcagcaggaaggaggaga

SEQ ID NO: 220887 - RNA, 19 nt, Artificial Sequence
  Synthetic
ggcagcaggaaggaggaga

SEQ ID NO: 220888 - RNA, 20 nt, Artificial Sequence
  Synthetic
uggcagcaggaaggaggaga

SEQ ID NO: 220889 - RNA, 21 nt, Artificial Sequence
  Synthetic
auggcagcaggaaggaggaga

SEQ ID NO: 220890 - RNA, 22 nt, Artificial Sequence
  Synthetic
cauggcagcaggaaggaggaga

SEQ ID NO: 220891 - RNA, 23 nt, Artificial Sequence
  Synthetic
acauggcagcaggaaggaggaga

SEQ ID NO: 220892 - RNA, 24 nt, Artificial Sequence
  Synthetic
cacauggcagcaggaaggaggaga

SEQ ID NO: 220893 - RNA, 18 nt, Artificial Sequence
  Synthetic
aggaggagcaggaggaga

SEQ ID NO: 220894 - RNA, 19 nt, Artificial Sequence
  Synthetic
gaggaggagcaggaggaga

SEQ ID NO: 220895 - RNA, 20 nt, Artificial Sequence
  Synthetic
ggaggaggagcaggaggaga

SEQ ID NO: 220896 - RNA, 21 nt, Artificial Sequence
  Synthetic
aggaggaggagcaggaggaga

SEQ ID NO: 220897 - RNA, 22 nt, Artificial Sequence
  Synthetic
gaggaggaggagcaggaggaga

SEQ ID NO: 220898 - RNA, 23 nt, Artificial Sequence
  Synthetic
ggaggaggaggagcaggaggaga

SEQ ID NO: 220899 - RNA, 24 nt, Artificial Sequence
  Synthetic
aggaggaggaggagcaggaggaga

SEQ ID NO: 220900 - RNA, 18 nt, Artificial Sequence
  Synthetic
gcuuaagugaggaggaga

SEQ ID NO: 220901 - RNA, 19 nt, Artificial Sequence
  Synthetic
ggcuuaagugaggaggaga

SEQ ID NO: 220902 - RNA, 20 nt, Artificial Sequence
  Synthetic
uggcuuaagugaggaggaga

SEQ ID NO: 220903 - RNA, 21 nt, Artificial Sequence
  Synthetic
uuggcuuaagugaggaggaga

SEQ ID NO: 220904 - RNA, 22 nt, Artificial Sequence
  Synthetic
uuuggcuuaagugaggaggaga

SEQ ID NO: 220905 - RNA, 23 nt, Artificial Sequence
  Synthetic
guuuggcuuaagugaggaggaga

SEQ ID NO: 220906 - RNA, 24 nt, Artificial Sequence
  Synthetic
gguuuggcuuaagugaggaggaga

SEQ ID NO: 220907 - RNA, 18 nt, Artificial Sequence
  Synthetic
gagagggacgggaggaga

SEQ ID NO: 220908 - RNA, 19 nt, Artificial Sequence
  Synthetic
agagagggacgggaggaga

SEQ ID NO: 220909 - RNA, 20 nt, Artificial Sequence
  Synthetic
aagagagggacgggaggaga

SEQ ID NO: 220910 - RNA, 21 nt, Artificial Sequence
  Synthetic
aaagagagggacgggaggaga

SEQ ID NO: 220911 - RNA, 22 nt, Artificial Sequence
  Synthetic
gaaagagagggacgggaggaga

SEQ ID NO: 220912 - RNA, 23 nt, Artificial Sequence
  Synthetic
agaaagagagggacgggaggaga

SEQ ID NO: 220913 - RNA, 24 nt, Artificial Sequence
  Synthetic
gagaaagagagggacgggaggaga

SEQ ID NO: 220914 - RNA, 18 nt, Artificial Sequence
  Synthetic
ugaggauaccugaggaga

SEQ ID NO: 220915 - RNA, 19 nt, Artificial Sequence
  Synthetic
augaggauaccugaggaga

SEQ ID NO: 220916 - RNA, 20 nt, Artificial Sequence
  Synthetic
gaugaggauaccugaggaga

SEQ ID NO: 220917 - RNA, 21 nt, Artificial Sequence
  Synthetic
agaugaggauaccugaggaga

SEQ ID NO: 220918 - RNA, 22 nt, Artificial Sequence
  Synthetic
uagaugaggauaccugaggaga

SEQ ID NO: 220919 - RNA, 23 nt, Artificial Sequence
  Synthetic
cuagaugaggauaccugaggaga

SEQ ID NO: 220920 - RNA, 24 nt, Artificial Sequence
  Synthetic
gcuagaugaggauaccugaggaga

SEQ ID NO: 220921 - RNA, 18 nt, Artificial Sequence
  Synthetic
gcagcaggauugaggaga

SEQ ID NO: 220922 - RNA, 19 nt, Artificial Sequence
  Synthetic
ggcagcaggauugaggaga

SEQ ID NO: 220923 - RNA, 20 nt, Artificial Sequence
  Synthetic
aggcagcaggauugaggaga

SEQ ID NO: 220924 - RNA, 21 nt, Artificial Sequence
  Synthetic
aaggcagcaggauugaggaga

SEQ ID NO: 220925 - RNA, 22 nt, Artificial Sequence
  Synthetic
aaaggcagcaggauugaggaga

SEQ ID NO: 220926 - RNA, 23 nt, Artificial Sequence
  Synthetic
uaaaggcagcaggauugaggaga

SEQ ID NO: 220927 - RNA, 24 nt, Artificial Sequence
  Synthetic
guaaaggcagcaggauugaggaga

SEQ ID NO: 220928 - RNA, 18 nt, Artificial Sequence
  Synthetic
gacucaaauacuaggaga

SEQ ID NO: 220929 - RNA, 19 nt, Artificial Sequence
  Synthetic
ggacucaaauacuaggaga

SEQ ID NO: 220930 - RNA, 20 nt, Artificial Sequence
  Synthetic
aggacucaaauacuaggaga

SEQ ID NO: 220931 - RNA, 21 nt, Artificial Sequence
  Synthetic
aaggacucaaauacuaggaga

SEQ ID NO: 220932 - RNA, 22 nt, Artificial Sequence
  Synthetic
aaaggacucaaauacuaggaga

SEQ ID NO: 220933 - RNA, 23 nt, Artificial Sequence
  Synthetic
uaaaggacucaaauacuaggaga

SEQ ID NO: 220934 - RNA, 24 nt, Artificial Sequence
  Synthetic
uuaaaggacucaaauacuaggaga

SEQ ID NO: 220935 - RNA, 18 nt, Artificial Sequence
  Synthetic
uugcuuguaccuaggaga

SEQ ID NO: 220936 - RNA, 19 nt, Artificial Sequence
  Synthetic
auugcuuguaccuaggaga

SEQ ID NO: 220937 - RNA, 20 nt, Artificial Sequence
  Synthetic
aauugcuuguaccuaggaga

SEQ ID NO: 220938 - RNA, 21 nt, Artificial Sequence
  Synthetic
gaauugcuuguaccuaggaga

SEQ ID NO: 220939 - RNA, 22 nt, Artificial Sequence
  Synthetic
agaauugcuuguaccuaggaga

SEQ ID NO: 220940 - RNA, 23 nt, Artificial Sequence
  Synthetic
aagaauugcuuguaccuaggaga

SEQ ID NO: 220941 - RNA, 24 nt, Artificial Sequence
  Synthetic
gaagaauugcuuguaccuaggaga

SEQ ID NO: 220942 - RNA, 18 nt, Artificial Sequence
  Synthetic
ggaaguaccaguaggaga

SEQ ID NO: 220943 - RNA, 19 nt, Artificial Sequence
  Synthetic
aggaaguaccaguaggaga

SEQ ID NO: 220944 - RNA, 20 nt, Artificial Sequence
  Synthetic
caggaaguaccaguaggaga

SEQ ID NO: 220945 - RNA, 21 nt, Artificial Sequence
  Synthetic
ccaggaaguaccaguaggaga

SEQ ID NO: 220946 - RNA, 22 nt, Artificial Sequence
  Synthetic
cccaggaaguaccaguaggaga

SEQ ID NO: 220947 - RNA, 23 nt, Artificial Sequence
  Synthetic
ucccaggaaguaccaguaggaga

SEQ ID NO: 220948 - RNA, 24 nt, Artificial Sequence
  Synthetic
aucccaggaaguaccaguaggaga

SEQ ID NO: 220949 - RNA, 18 nt, Artificial Sequence
  Synthetic
gaauauuaccguaggaga

SEQ ID NO: 220950 - RNA, 19 nt, Artificial Sequence
  Synthetic
agaauauuaccguaggaga

SEQ ID NO: 220951 - RNA, 20 nt, Artificial Sequence
  Synthetic
cagaauauuaccguaggaga

SEQ ID NO: 220952 - RNA, 21 nt, Artificial Sequence
  Synthetic
gcagaauauuaccguaggaga

SEQ ID NO: 220953 - RNA, 22 nt, Artificial Sequence
  Synthetic
ggcagaauauuaccguaggaga

SEQ ID NO: 220954 - RNA, 23 nt, Artificial Sequence
  Synthetic
gggcagaauauuaccguaggaga

SEQ ID NO: 220955 - RNA, 24 nt, Artificial Sequence
  Synthetic
cgggcagaauauuaccguaggaga

SEQ ID NO: 220956 - RNA, 18 nt, Artificial Sequence
  Synthetic
caugguuguagacggaga

SEQ ID NO: 220957 - RNA, 19 nt, Artificial Sequence
  Synthetic
acaugguuguagacggaga

SEQ ID NO: 220958 - RNA, 20 nt, Artificial Sequence
  Synthetic
aacaugguuguagacggaga

SEQ ID NO: 220959 - RNA, 21 nt, Artificial Sequence
  Synthetic
aaacaugguuguagacggaga

SEQ ID NO: 220960 - RNA, 22 nt, Artificial Sequence
  Synthetic
uaaacaugguuguagacggaga

SEQ ID NO: 220961 - RNA, 23 nt, Artificial Sequence
  Synthetic
auaaacaugguuguagacggaga

SEQ ID NO: 220962 - RNA, 24 nt, Artificial Sequence
  Synthetic
aauaaacaugguuguagacggaga

SEQ ID NO: 220963 - RNA, 18 nt, Artificial Sequence
  Synthetic
cagcuagagauacggaga

SEQ ID NO: 220964 - RNA, 19 nt, Artificial Sequence
  Synthetic
ucagcuagagauacggaga

SEQ ID NO: 220965 - RNA, 20 nt, Artificial Sequence
  Synthetic
uucagcuagagauacggaga

SEQ ID NO: 220966 - RNA, 21 nt, Artificial Sequence
  Synthetic
guucagcuagagauacggaga

SEQ ID NO: 220967 - RNA, 22 nt, Artificial Sequence
  Synthetic
gguucagcuagagauacggaga

SEQ ID NO: 220968 - RNA, 23 nt, Artificial Sequence
  Synthetic
ugguucagcuagagauacggaga

SEQ ID NO: 220969 - RNA, 24 nt, Artificial Sequence
  Synthetic
gugguucagcuagagauacggaga

SEQ ID NO: 220970 - RNA, 18 nt, Artificial Sequence
  Synthetic
ugaggaacaaaagggaga

SEQ ID NO: 220971 - RNA, 19 nt, Artificial Sequence
  Synthetic
augaggaacaaaagggaga

SEQ ID NO: 220972 - RNA, 20 nt, Artificial Sequence
  Synthetic
gaugaggaacaaaagggaga

SEQ ID NO: 220973 - RNA, 21 nt, Artificial Sequence
  Synthetic
agaugaggaacaaaagggaga

SEQ ID NO: 220974 - RNA, 22 nt, Artificial Sequence
  Synthetic
cagaugaggaacaaaagggaga

SEQ ID NO: 220975 - RNA, 23 nt, Artificial Sequence
  Synthetic
ucagaugaggaacaaaagggaga

SEQ ID NO: 220976 - RNA, 24 nt, Artificial Sequence
  Synthetic
cucagaugaggaacaaaagggaga

SEQ ID NO: 220977 - RNA, 18 nt, Artificial Sequence
  Synthetic
cugauaacccaagggaga

SEQ ID NO: 220978 - RNA, 19 nt, Artificial Sequence
  Synthetic
ucugauaacccaagggaga

SEQ ID NO: 220979 - RNA, 20 nt, Artificial Sequence
  Synthetic
gucugauaacccaagggaga

SEQ ID NO: 220980 - RNA, 21 nt, Artificial Sequence
  Synthetic
agucugauaacccaagggaga

SEQ ID NO: 220981 - RNA, 22 nt, Artificial Sequence
  Synthetic
aagucugauaacccaagggaga

SEQ ID NO: 220982 - RNA, 23 nt, Artificial Sequence
  Synthetic
aaagucugauaacccaagggaga

SEQ ID NO: 220983 - RNA, 24 nt, Artificial Sequence
  Synthetic
uaaagucugauaacccaagggaga

SEQ ID NO: 220984 - RNA, 18 nt, Artificial Sequence
  Synthetic
aacuaauggcaagggaga

SEQ ID NO: 220985 - RNA, 19 nt, Artificial Sequence
  Synthetic
aaacuaauggcaagggaga

SEQ ID NO: 220986 - RNA, 20 nt, Artificial Sequence
  Synthetic
caaacuaauggcaagggaga

SEQ ID NO: 220987 - RNA, 21 nt, Artificial Sequence
  Synthetic
ccaaacuaauggcaagggaga

SEQ ID NO: 220988 - RNA, 22 nt, Artificial Sequence
  Synthetic
gccaaacuaauggcaagggaga

SEQ ID NO: 220989 - RNA, 23 nt, Artificial Sequence
  Synthetic
agccaaacuaauggcaagggaga

SEQ ID NO: 220990 - RNA, 24 nt, Artificial Sequence
  Synthetic
uagccaaacuaauggcaagggaga

SEQ ID NO: 220991 - RNA, 18 nt, Artificial Sequence
  Synthetic
cuguugagagaagggaga

SEQ ID NO: 220992 - RNA, 19 nt, Artificial Sequence
  Synthetic
acuguugagagaagggaga

SEQ ID NO: 220993 - RNA, 20 nt, Artificial Sequence
  Synthetic
cacuguugagagaagggaga

SEQ ID NO: 220994 - RNA, 21 nt, Artificial Sequence
  Synthetic
ucacuguugagagaagggaga

SEQ ID NO: 220995 - RNA, 22 nt, Artificial Sequence
  Synthetic
cucacuguugagagaagggaga

SEQ ID NO: 220996 - RNA, 23 nt, Artificial Sequence
  Synthetic
acucacuguugagagaagggaga

SEQ ID NO: 220997 - RNA, 24 nt, Artificial Sequence
  Synthetic
gacucacuguugagagaagggaga

SEQ ID NO: 220998 - RNA, 18 nt, Artificial Sequence
  Synthetic
cuuuaagaggaagggaga

SEQ ID NO: 220999 - RNA, 19 nt, Artificial Sequence
  Synthetic
acuuuaagaggaagggaga

SEQ ID NO: 221000 - RNA, 20 nt, Artificial Sequence
  Synthetic
uacuuuaagaggaagggaga

SEQ ID NO: 221001 - RNA, 21 nt, Artificial Sequence
  Synthetic
uuacuuuaagaggaagggaga

SEQ ID NO: 221002 - RNA, 22 nt, Artificial Sequence
  Synthetic
guuacuuuaagaggaagggaga

SEQ ID NO: 221003 - RNA, 23 nt, Artificial Sequence
  Synthetic
aguuacuuuaagaggaagggaga

SEQ ID NO: 221004 - RNA, 24 nt, Artificial Sequence
  Synthetic
gaguuacuuuaagaggaagggaga

SEQ ID NO: 221005 - RNA, 18 nt, Artificial Sequence
  Synthetic
gagagggaggaagggaga

SEQ ID NO: 221006 - RNA, 19 nt, Artificial Sequence
  Synthetic
agagagggaggaagggaga

SEQ ID NO: 221007 - RNA, 20 nt, Artificial Sequence
  Synthetic
gagagagggaggaagggaga

SEQ ID NO: 221008 - RNA, 21 nt, Artificial Sequence
  Synthetic
agagagagggaggaagggaga

SEQ ID NO: 221009 - RNA, 22 nt, Artificial Sequence
  Synthetic
gagagagagggaggaagggaga

SEQ ID NO: 221010 - RNA, 23 nt, Artificial Sequence
  Synthetic
agagagagagggaggaagggaga

SEQ ID NO: 221011 - RNA, 24 nt, Artificial Sequence
  Synthetic
gagagagagagggaggaagggaga

SEQ ID NO: 221012 - RNA, 18 nt, Artificial Sequence
  Synthetic
gggauggaggaagggaga

SEQ ID NO: 221013 - RNA, 19 nt, Artificial Sequence
  Synthetic
agggauggaggaagggaga

SEQ ID NO: 221014 - RNA, 20 nt, Artificial Sequence
  Synthetic
gagggauggaggaagggaga

SEQ ID NO: 221015 - RNA, 21 nt, Artificial Sequence
  Synthetic
ggagggauggaggaagggaga

SEQ ID NO: 221016 - RNA, 22 nt, Artificial Sequence
  Synthetic
gggagggauggaggaagggaga

SEQ ID NO: 221017 - RNA, 23 nt, Artificial Sequence
  Synthetic
agggagggauggaggaagggaga

SEQ ID NO: 221018 - RNA, 24 nt, Artificial Sequence
  Synthetic
gagggagggauggaggaagggaga

SEQ ID NO: 221019 - RNA, 18 nt, Artificial Sequence
  Synthetic
ugguuacuuccagggaga

SEQ ID NO: 221020 - RNA, 19 nt, Artificial Sequence
  Synthetic
augguuacuuccagggaga

SEQ ID NO: 221021 - RNA, 20 nt, Artificial Sequence
  Synthetic
aaugguuacuuccagggaga

SEQ ID NO: 221022 - RNA, 21 nt, Artificial Sequence
  Synthetic
gaaugguuacuuccagggaga

SEQ ID NO: 221023 - RNA, 22 nt, Artificial Sequence
  Synthetic
agaaugguuacuuccagggaga

SEQ ID NO: 221024 - RNA, 23 nt, Artificial Sequence
  Synthetic
gagaaugguuacuuccagggaga

SEQ ID NO: 221025 - RNA, 24 nt, Artificial Sequence
  Synthetic
ggagaaugguuacuuccagggaga

SEQ ID NO: 221026 - RNA, 18 nt, Artificial Sequence
  Synthetic
uuuacuggagcagggaga

SEQ ID NO: 221027 - RNA, 19 nt, Artificial Sequence
  Synthetic
uuuuacuggagcagggaga

SEQ ID NO: 221028 - RNA, 20 nt, Artificial Sequence
  Synthetic
uuuuuacuggagcagggaga

SEQ ID NO: 221029 - RNA, 21 nt, Artificial Sequence
  Synthetic
uuuuuuacuggagcagggaga

SEQ ID NO: 221030 - RNA, 22 nt, Artificial Sequence
  Synthetic
guuuuuuacuggagcagggaga

SEQ ID NO: 221031 - RNA, 23 nt, Artificial Sequence
  Synthetic
uguuuuuuacuggagcagggaga

SEQ ID NO: 221032 - RNA, 24 nt, Artificial Sequence
  Synthetic
auguuuuuuacuggagcagggaga

SEQ ID NO: 221033 - RNA, 18 nt, Artificial Sequence
  Synthetic
auuagggaggcagggaga

SEQ ID NO: 221034 - RNA, 19 nt, Artificial Sequence
  Synthetic
aauuagggaggcagggaga

SEQ ID NO: 221035 - RNA, 20 nt, Artificial Sequence
  Synthetic
aaauuagggaggcagggaga

SEQ ID NO: 221036 - RNA, 21 nt, Artificial Sequence
  Synthetic
aaaauuagggaggcagggaga

SEQ ID NO: 221037 - RNA, 22 nt, Artificial Sequence
  Synthetic
aaaaauuagggaggcagggaga

SEQ ID NO: 221038 - RNA, 23 nt, Artificial Sequence
  Synthetic
caaaaauuagggaggcagggaga

SEQ ID NO: 221039 - RNA, 24 nt, Artificial Sequence
  Synthetic
ccaaaaauuagggaggcagggaga

SEQ ID NO: 221040 - RNA, 18 nt, Artificial Sequence
  Synthetic
aggaaggacagagggaga

SEQ ID NO: 221041 - RNA, 19 nt, Artificial Sequence
  Synthetic
caggaaggacagagggaga

SEQ ID NO: 221042 - RNA, 20 nt, Artificial Sequence
  Synthetic
acaggaaggacagagggaga

SEQ ID NO: 221043 - RNA, 21 nt, Artificial Sequence
  Synthetic
aacaggaaggacagagggaga

SEQ ID NO: 221044 - RNA, 22 nt, Artificial Sequence
  Synthetic
gaacaggaaggacagagggaga

SEQ ID NO: 221045 - RNA, 23 nt, Artificial Sequence
  Synthetic
agaacaggaaggacagagggaga

SEQ ID NO: 221046 - RNA, 24 nt, Artificial Sequence
  Synthetic
gagaacaggaaggacagagggaga

SEQ ID NO: 221047 - RNA, 18 nt, Artificial Sequence
  Synthetic
gagagaggcagagggaga

SEQ ID NO: 221048 - RNA, 19 nt, Artificial Sequence
  Synthetic
ggagagaggcagagggaga

SEQ ID NO: 221049 - RNA, 20 nt, Artificial Sequence
  Synthetic
aggagagaggcagagggaga

SEQ ID NO: 221050 - RNA, 21 nt, Artificial Sequence
  Synthetic
gaggagagaggcagagggaga

SEQ ID NO: 221051 - RNA, 22 nt, Artificial Sequence
  Synthetic
ggaggagagaggcagagggaga

SEQ ID NO: 221052 - RNA, 23 nt, Artificial Sequence
  Synthetic
aggaggagagaggcagagggaga

SEQ ID NO: 221053 - RNA, 24 nt, Artificial Sequence
  Synthetic
aaggaggagagaggcagagggaga

SEQ ID NO: 221054 - RNA, 18 nt, Artificial Sequence
  Synthetic
augggaaggagagggaga

SEQ ID NO: 221055 - RNA, 19 nt, Artificial Sequence
  Synthetic
aaugggaaggagagggaga

SEQ ID NO: 221056 - RNA, 20 nt, Artificial Sequence
  Synthetic
gaaugggaaggagagggaga

SEQ ID NO: 221057 - RNA, 21 nt, Artificial Sequence
  Synthetic
agaaugggaaggagagggaga

SEQ ID NO: 221058 - RNA, 22 nt, Artificial Sequence
  Synthetic
gagaaugggaaggagagggaga

SEQ ID NO: 221059 - RNA, 23 nt, Artificial Sequence
  Synthetic
ggagaaugggaaggagagggaga

SEQ ID NO: 221060 - RNA, 24 nt, Artificial Sequence
  Synthetic
gggagaaugggaaggagagggaga

SEQ ID NO: 221061 - RNA, 18 nt, Artificial Sequence
  Synthetic
agcaggaggagagggaga

SEQ ID NO: 221062 - RNA, 19 nt, Artificial Sequence
  Synthetic
gagcaggaggagagggaga

SEQ ID NO: 221063 - RNA, 20 nt, Artificial Sequence
  Synthetic
ggagcaggaggagagggaga

SEQ ID NO: 221064 - RNA, 21 nt, Artificial Sequence
  Synthetic
aggagcaggaggagagggaga

SEQ ID NO: 221065 - RNA, 22 nt, Artificial Sequence
  Synthetic
gaggagcaggaggagagggaga

SEQ ID NO: 221066 - RNA, 23 nt, Artificial Sequence
  Synthetic
ggaggagcaggaggagagggaga

SEQ ID NO: 221067 - RNA, 24 nt, Artificial Sequence
  Synthetic
aggaggagcaggaggagagggaga

SEQ ID NO: 221068 - RNA, 18 nt, Artificial Sequence
  Synthetic
gacgggaggagagggaga

SEQ ID NO: 221069 - RNA, 19 nt, Artificial Sequence
  Synthetic
ggacgggaggagagggaga

SEQ ID NO: 221070 - RNA, 20 nt, Artificial Sequence
  Synthetic
gggacgggaggagagggaga

SEQ ID NO: 221071 - RNA, 21 nt, Artificial Sequence
  Synthetic
agggacgggaggagagggaga

SEQ ID NO: 221072 - RNA, 22 nt, Artificial Sequence
  Synthetic
gagggacgggaggagagggaga

SEQ ID NO: 221073 - RNA, 23 nt, Artificial Sequence
  Synthetic
agagggacgggaggagagggaga

SEQ ID NO: 221074 - RNA, 24 nt, Artificial Sequence
  Synthetic
gagagggacgggaggagagggaga

SEQ ID NO: 221075 - RNA, 18 nt, Artificial Sequence
  Synthetic
auuacauaaggagggaga

SEQ ID NO: 221076 - RNA, 19 nt, Artificial Sequence
  Synthetic
uauuacauaaggagggaga

SEQ ID NO: 221077 - RNA, 20 nt, Artificial Sequence
  Synthetic
cuauuacauaaggagggaga

SEQ ID NO: 221078 - RNA, 21 nt, Artificial Sequence
  Synthetic
gcuauuacauaaggagggaga

SEQ ID NO: 221079 - RNA, 22 nt, Artificial Sequence
  Synthetic
ggcuauuacauaaggagggaga

SEQ ID NO: 221080 - RNA, 23 nt, Artificial Sequence
  Synthetic
aggcuauuacauaaggagggaga

SEQ ID NO: 221081 - RNA, 24 nt, Artificial Sequence
  Synthetic
caggcuauuacauaaggagggaga

SEQ ID NO: 221082 - RNA, 18 nt, Artificial Sequence
  Synthetic
ggcugggagggagggaga

SEQ ID NO: 221083 - RNA, 19 nt, Artificial Sequence
  Synthetic
cggcugggagggagggaga

SEQ ID NO: 221084 - RNA, 20 nt, Artificial Sequence
  Synthetic
acggcugggagggagggaga

SEQ ID NO: 221085 - RNA, 21 nt, Artificial Sequence
  Synthetic
uacggcugggagggagggaga

SEQ ID NO: 221086 - RNA, 22 nt, Artificial Sequence
  Synthetic
guacggcugggagggagggaga

SEQ ID NO: 221087 - RNA, 23 nt, Artificial Sequence
  Synthetic
aguacggcugggagggagggaga

SEQ ID NO: 221088 - RNA, 24 nt, Artificial Sequence
  Synthetic
gaguacggcugggagggagggaga

SEQ ID NO: 221089 - RNA, 18 nt, Artificial Sequence
  Synthetic
gccauuaugggagggaga

SEQ ID NO: 221090 - RNA, 19 nt, Artificial Sequence
  Synthetic
ugccauuaugggagggaga

SEQ ID NO: 221091 - RNA, 20 nt, Artificial Sequence
  Synthetic
uugccauuaugggagggaga

SEQ ID NO: 221092 - RNA, 21 nt, Artificial Sequence
  Synthetic
cuugccauuaugggagggaga

SEQ ID NO: 221093 - RNA, 22 nt, Artificial Sequence
  Synthetic
acuugccauuaugggagggaga

SEQ ID NO: 221094 - RNA, 23 nt, Artificial Sequence
  Synthetic
uacuugccauuaugggagggaga

SEQ ID NO: 221095 - RNA, 24 nt, Artificial Sequence
  Synthetic
cuacuugccauuaugggagggaga

SEQ ID NO: 221096 - RNA, 18 nt, Artificial Sequence
  Synthetic
cucugggagugagggaga

SEQ ID NO: 221097 - RNA, 19 nt, Artificial Sequence
  Synthetic
gcucugggagugagggaga

SEQ ID NO: 221098 - RNA, 20 nt, Artificial Sequence
  Synthetic
cgcucugggagugagggaga

SEQ ID NO: 221099 - RNA, 21 nt, Artificial Sequence
  Synthetic
acgcucugggagugagggaga

SEQ ID NO: 221100 - RNA, 22 nt, Artificial Sequence
  Synthetic
uacgcucugggagugagggaga

SEQ ID NO: 221101 - RNA, 23 nt, Artificial Sequence
  Synthetic
auacgcucugggagugagggaga

SEQ ID NO: 221102 - RNA, 24 nt, Artificial Sequence
  Synthetic
gauacgcucugggagugagggaga

SEQ ID NO: 221103 - RNA, 18 nt, Artificial Sequence
  Synthetic
aucaguuuucuagggaga

SEQ ID NO: 221104 - RNA, 19 nt, Artificial Sequence
  Synthetic
uaucaguuuucuagggaga

SEQ ID NO: 221105 - RNA, 20 nt, Artificial Sequence
  Synthetic
uuaucaguuuucuagggaga

SEQ ID NO: 221106 - RNA, 21 nt, Artificial Sequence
  Synthetic
uuuaucaguuuucuagggaga

SEQ ID NO: 221107 - RNA, 22 nt, Artificial Sequence
  Synthetic
cuuuaucaguuuucuagggaga

SEQ ID NO: 221108 - RNA, 23 nt, Artificial Sequence
  Synthetic
acuuuaucaguuuucuagggaga

SEQ ID NO: 221109 - RNA, 24 nt, Artificial Sequence
  Synthetic
aacuuuaucaguuuucuagggaga

SEQ ID NO: 221110 - RNA, 18 nt, Artificial Sequence
  Synthetic
aaucguugaaaggggaga

SEQ ID NO: 221111 - RNA, 19 nt, Artificial Sequence
  Synthetic
uaaucguugaaaggggaga

SEQ ID NO: 221112 - RNA, 20 nt, Artificial Sequence
  Synthetic
uuaaucguugaaaggggaga

SEQ ID NO: 221113 - RNA, 21 nt, Artificial Sequence
  Synthetic
uuuaaucguugaaaggggaga

SEQ ID NO: 221114 - RNA, 22 nt, Artificial Sequence
  Synthetic
uuuuaaucguugaaaggggaga

SEQ ID NO: 221115 - RNA, 23 nt, Artificial Sequence
  Synthetic
uuuuuaaucguugaaaggggaga

SEQ ID NO: 221116 - RNA, 24 nt, Artificial Sequence
  Synthetic
uuuuuuaaucguugaaaggggaga

SEQ ID NO: 221117 - RNA, 18 nt, Artificial Sequence
  Synthetic
aggauggauaaggggaga

SEQ ID NO: 221118 - RNA, 19 nt, Artificial Sequence
  Synthetic
caggauggauaaggggaga

SEQ ID NO: 221119 - RNA, 20 nt, Artificial Sequence
  Synthetic
acaggauggauaaggggaga

SEQ ID NO: 221120 - RNA, 21 nt, Artificial Sequence
  Synthetic
cacaggauggauaaggggaga

SEQ ID NO: 221121 - RNA, 22 nt, Artificial Sequence
  Synthetic
acacaggauggauaaggggaga

SEQ ID NO: 221122 - RNA, 23 nt, Artificial Sequence
  Synthetic
uacacaggauggauaaggggaga

SEQ ID NO: 221123 - RNA, 24 nt, Artificial Sequence
  Synthetic
cuacacaggauggauaaggggaga

SEQ ID NO: 221124 - RNA, 18 nt, Artificial Sequence
  Synthetic
uuacaacaucaggggaga

SEQ ID NO: 221125 - RNA, 19 nt, Artificial Sequence
  Synthetic
auuacaacaucaggggaga

SEQ ID NO: 221126 - RNA, 20 nt, Artificial Sequence
  Synthetic
uauuacaacaucaggggaga

SEQ ID NO: 221127 - RNA, 21 nt, Artificial Sequence
  Synthetic
cuauuacaacaucaggggaga

SEQ ID NO: 221128 - RNA, 22 nt, Artificial Sequence
  Synthetic
ucuauuacaacaucaggggaga

SEQ ID NO: 221129 - RNA, 23 nt, Artificial Sequence
  Synthetic
uucuauuacaacaucaggggaga

SEQ ID NO: 221130 - RNA, 24 nt, Artificial Sequence
  Synthetic
cuucuauuacaacaucaggggaga

SEQ ID NO: 221131 - RNA, 18 nt, Artificial Sequence
  Synthetic
gaccugcuucaggggaga

SEQ ID NO: 221132 - RNA, 19 nt, Artificial Sequence
  Synthetic
ugaccugcuucaggggaga

SEQ ID NO: 221133 - RNA, 20 nt, Artificial Sequence
  Synthetic
augaccugcuucaggggaga

SEQ ID NO: 221134 - RNA, 21 nt, Artificial Sequence
  Synthetic
caugaccugcuucaggggaga

SEQ ID NO: 221135 - RNA, 22 nt, Artificial Sequence
  Synthetic
ucaugaccugcuucaggggaga

SEQ ID NO: 221136 - RNA, 23 nt, Artificial Sequence
  Synthetic
cucaugaccugcuucaggggaga

SEQ ID NO: 221137 - RNA, 24 nt, Artificial Sequence
  Synthetic
ucucaugaccugcuucaggggaga

SEQ ID NO: 221138 - RNA, 18 nt, Artificial Sequence
  Synthetic
uaaaucacugaggggaga

SEQ ID NO: 221139 - RNA, 19 nt, Artificial Sequence
  Synthetic
uuaaaucacugaggggaga

SEQ ID NO: 221140 - RNA, 20 nt, Artificial Sequence
  Synthetic
uuuaaaucacugaggggaga

SEQ ID NO: 221141 - RNA, 21 nt, Artificial Sequence
  Synthetic
uuuuaaaucacugaggggaga

SEQ ID NO: 221142 - RNA, 22 nt, Artificial Sequence
  Synthetic
guuuuaaaucacugaggggaga

SEQ ID NO: 221143 - RNA, 23 nt, Artificial Sequence
  Synthetic
uguuuuaaaucacugaggggaga

SEQ ID NO: 221144 - RNA, 24 nt, Artificial Sequence
  Synthetic
uuguuuuaaaucacugaggggaga

SEQ ID NO: 221145 - RNA, 18 nt, Artificial Sequence
  Synthetic
cugaaagugauggggaga

SEQ ID NO: 221146 - RNA, 19 nt, Artificial Sequence
  Synthetic
ccugaaagugauggggaga

SEQ ID NO: 221147 - RNA, 20 nt, Artificial Sequence
  Synthetic
accugaaagugauggggaga

SEQ ID NO: 221148 - RNA, 21 nt, Artificial Sequence
  Synthetic
uaccugaaagugauggggaga

SEQ ID NO: 221149 - RNA, 22 nt, Artificial Sequence
  Synthetic
guaccugaaagugauggggaga

SEQ ID NO: 221150 - RNA, 23 nt, Artificial Sequence
  Synthetic
uguaccugaaagugauggggaga

SEQ ID NO: 221151 - RNA, 24 nt, Artificial Sequence
  Synthetic
guguaccugaaagugauggggaga

SEQ ID NO: 221152 - RNA, 18 nt, Artificial Sequence
  Synthetic
uaaacaaggguggggaga

SEQ ID NO: 221153 - RNA, 19 nt, Artificial Sequence
  Synthetic
uuaaacaaggguggggaga

SEQ ID NO: 221154 - RNA, 20 nt, Artificial Sequence
  Synthetic
guuaaacaaggguggggaga

SEQ ID NO: 221155 - RNA, 21 nt, Artificial Sequence
  Synthetic
aguuaaacaaggguggggaga

SEQ ID NO: 221156 - RNA, 22 nt, Artificial Sequence
  Synthetic
aaguuaaacaaggguggggaga

SEQ ID NO: 221157 - RNA, 23 nt, Artificial Sequence
  Synthetic
uaaguuaaacaaggguggggaga

SEQ ID NO: 221158 - RNA, 24 nt, Artificial Sequence
  Synthetic
cuaaguuaaacaaggguggggaga

SEQ ID NO: 221159 - RNA, 18 nt, Artificial Sequence
  Synthetic
aaaaguuugaaugggaga

SEQ ID NO: 221160 - RNA, 19 nt, Artificial Sequence
  Synthetic
uaaaaguuugaaugggaga

SEQ ID NO: 221161 - RNA, 20 nt, Artificial Sequence
  Synthetic
auaaaaguuugaaugggaga

SEQ ID NO: 221162 - RNA, 21 nt, Artificial Sequence
  Synthetic
gauaaaaguuugaaugggaga

SEQ ID NO: 221163 - RNA, 22 nt, Artificial Sequence
  Synthetic
ugauaaaaguuugaaugggaga

SEQ ID NO: 221164 - RNA, 23 nt, Artificial Sequence
  Synthetic
uugauaaaaguuugaaugggaga

SEQ ID NO: 221165 - RNA, 24 nt, Artificial Sequence
  Synthetic
guugauaaaaguuugaaugggaga

SEQ ID NO: 221166 - RNA, 18 nt, Artificial Sequence
  Synthetic
auauaguuacaugggaga

SEQ ID NO: 221167 - RNA, 19 nt, Artificial Sequence
  Synthetic
gauauaguuacaugggaga

SEQ ID NO: 221168 - RNA, 20 nt, Artificial Sequence
  Synthetic
ggauauaguuacaugggaga

SEQ ID NO: 221169 - RNA, 21 nt, Artificial Sequence
  Synthetic
uggauauaguuacaugggaga

SEQ ID NO: 221170 - RNA, 22 nt, Artificial Sequence
  Synthetic
guggauauaguuacaugggaga

SEQ ID NO: 221171 - RNA, 23 nt, Artificial Sequence
  Synthetic
aguggauauaguuacaugggaga

SEQ ID NO: 221172 - RNA, 24 nt, Artificial Sequence
  Synthetic
uaguggauauaguuacaugggaga

SEQ ID NO: 221173 - RNA, 18 nt, Artificial Sequence
  Synthetic
uugcuugaaacugggaga

SEQ ID NO: 221174 - RNA, 19 nt, Artificial Sequence
  Synthetic
auugcuugaaacugggaga

SEQ ID NO: 221175 - RNA, 20 nt, Artificial Sequence
  Synthetic
aauugcuugaaacugggaga

SEQ ID NO: 221176 - RNA, 21 nt, Artificial Sequence
  Synthetic
gaauugcuugaaacugggaga

SEQ ID NO: 221177 - RNA, 22 nt, Artificial Sequence
  Synthetic
agaauugcuugaaacugggaga

SEQ ID NO: 221178 - RNA, 23 nt, Artificial Sequence
  Synthetic
gagaauugcuugaaacugggaga

SEQ ID NO: 221179 - RNA, 24 nt, Artificial Sequence
  Synthetic
ugagaauugcuugaaacugggaga

SEQ ID NO: 221180 - RNA, 18 nt, Artificial Sequence
  Synthetic
uggcgugaaccugggaga

SEQ ID NO: 221181 - RNA, 19 nt, Artificial Sequence
  Synthetic
auggcgugaaccugggaga

SEQ ID NO: 221182 - RNA, 20 nt, Artificial Sequence
  Synthetic
aauggcgugaaccugggaga

SEQ ID NO: 221183 - RNA, 21 nt, Artificial Sequence
  Synthetic
gaauggcgugaaccugggaga

SEQ ID NO: 221184 - RNA, 22 nt, Artificial Sequence
  Synthetic
agaauggcgugaaccugggaga

SEQ ID NO: 221185 - RNA, 23 nt, Artificial Sequence
  Synthetic
gagaauggcgugaaccugggaga

SEQ ID NO: 221186 - RNA, 24 nt, Artificial Sequence
  Synthetic
ggagaauggcgugaaccugggaga

SEQ ID NO: 221187 - RNA, 18 nt, Artificial Sequence
  Synthetic
uugcuugaaccugggaga

SEQ ID NO: 221188 - RNA, 19 nt, Artificial Sequence
  Synthetic
auugcuugaaccugggaga

SEQ ID NO: 221189 - RNA, 20 nt, Artificial Sequence
  Synthetic
gauugcuugaaccugggaga

SEQ ID NO: 221190 - RNA, 21 nt, Artificial Sequence
  Synthetic
agauugcuugaaccugggaga

SEQ ID NO: 221191 - RNA, 22 nt, Artificial Sequence
  Synthetic
aagauugcuugaaccugggaga

SEQ ID NO: 221192 - RNA, 23 nt, Artificial Sequence
  Synthetic
gaagauugcuugaaccugggaga

SEQ ID NO: 221193 - RNA, 24 nt, Artificial Sequence
  Synthetic
ggaagauugcuugaaccugggaga

SEQ ID NO: 221194 - RNA, 18 nt, Artificial Sequence
  Synthetic
aagagggauggugggaga

SEQ ID NO: 221195 - RNA, 19 nt, Artificial Sequence
  Synthetic
gaagagggauggugggaga

SEQ ID NO: 221196 - RNA, 20 nt, Artificial Sequence
  Synthetic
ggaagagggauggugggaga

SEQ ID NO: 221197 - RNA, 21 nt, Artificial Sequence
  Synthetic
uggaagagggauggugggaga

SEQ ID NO: 221198 - RNA, 22 nt, Artificial Sequence
  Synthetic
auggaagagggauggugggaga

SEQ ID NO: 221199 - RNA, 23 nt, Artificial Sequence
  Synthetic
aauggaagagggauggugggaga

SEQ ID NO: 221200 - RNA, 24 nt, Artificial Sequence
  Synthetic
aaauggaagagggauggugggaga

SEQ ID NO: 221201 - RNA, 18 nt, Artificial Sequence
  Synthetic
gaucacgagguugggaga

SEQ ID NO: 221202 - RNA, 19 nt, Artificial Sequence
  Synthetic
agaucacgagguugggaga

SEQ ID NO: 221203 - RNA, 20 nt, Artificial Sequence
  Synthetic
cagaucacgagguugggaga

SEQ ID NO: 221204 - RNA, 21 nt, Artificial Sequence
  Synthetic
gcagaucacgagguugggaga

SEQ ID NO: 221205 - RNA, 22 nt, Artificial Sequence
  Synthetic
ggcagaucacgagguugggaga

SEQ ID NO: 221206 - RNA, 23 nt, Artificial Sequence
  Synthetic
gggcagaucacgagguugggaga

SEQ ID NO: 221207 - RNA, 24 nt, Artificial Sequence
  Synthetic
cgggcagaucacgagguugggaga

SEQ ID NO: 221208 - RNA, 18 nt, Artificial Sequence
  Synthetic
accuucaaccaauggaga

SEQ ID NO: 221209 - RNA, 19 nt, Artificial Sequence
  Synthetic
aaccuucaaccaauggaga

SEQ ID NO: 221210 - RNA, 20 nt, Artificial Sequence
  Synthetic
caaccuucaaccaauggaga

SEQ ID NO: 221211 - RNA, 21 nt, Artificial Sequence
  Synthetic
gcaaccuucaaccaauggaga

SEQ ID NO: 221212 - RNA, 22 nt, Artificial Sequence
  Synthetic
agcaaccuucaaccaauggaga

SEQ ID NO: 221213 - RNA, 23 nt, Artificial Sequence
  Synthetic
gagcaaccuucaaccaauggaga

SEQ ID NO: 221214 - RNA, 24 nt, Artificial Sequence
  Synthetic
ugagcaaccuucaaccaauggaga

SEQ ID NO: 221215 - RNA, 18 nt, Artificial Sequence
  Synthetic
gaggcucugcaauggaga

SEQ ID NO: 221216 - RNA, 19 nt, Artificial Sequence
  Synthetic
agaggcucugcaauggaga

SEQ ID NO: 221217 - RNA, 20 nt, Artificial Sequence
  Synthetic
gagaggcucugcaauggaga

SEQ ID NO: 221218 - RNA, 21 nt, Artificial Sequence
  Synthetic
ugagaggcucugcaauggaga

SEQ ID NO: 221219 - RNA, 22 nt, Artificial Sequence
  Synthetic
cugagaggcucugcaauggaga

SEQ ID NO: 221220 - RNA, 23 nt, Artificial Sequence
  Synthetic
gcugagaggcucugcaauggaga

SEQ ID NO: 221221 - RNA, 24 nt, Artificial Sequence
  Synthetic
ugcugagaggcucugcaauggaga

SEQ ID NO: 221222 - RNA, 18 nt, Artificial Sequence
  Synthetic
gaugagaacacauggaga

SEQ ID NO: 221223 - RNA, 19 nt, Artificial Sequence
  Synthetic
cgaugagaacacauggaga

SEQ ID NO: 221224 - RNA, 20 nt, Artificial Sequence
  Synthetic
acgaugagaacacauggaga

SEQ ID NO: 221225 - RNA, 21 nt, Artificial Sequence
  Synthetic
aacgaugagaacacauggaga

SEQ ID NO: 221226 - RNA, 22 nt, Artificial Sequence
  Synthetic
gaacgaugagaacacauggaga

SEQ ID NO: 221227 - RNA, 23 nt, Artificial Sequence
  Synthetic
ugaacgaugagaacacauggaga

SEQ ID NO: 221228 - RNA, 24 nt, Artificial Sequence
  Synthetic
uugaacgaugagaacacauggaga

SEQ ID NO: 221229 - RNA, 18 nt, Artificial Sequence
  Synthetic
gggagggaagcauggaga

SEQ ID NO: 221230 - RNA, 19 nt, Artificial Sequence
  Synthetic
agggagggaagcauggaga

SEQ ID NO: 221231 - RNA, 20 nt, Artificial Sequence
  Synthetic
gagggagggaagcauggaga

SEQ ID NO: 221232 - RNA, 21 nt, Artificial Sequence
  Synthetic
agagggagggaagcauggaga

SEQ ID NO: 221233 - RNA, 22 nt, Artificial Sequence
  Synthetic
gagagggagggaagcauggaga

SEQ ID NO: 221234 - RNA, 23 nt, Artificial Sequence
  Synthetic
agagagggagggaagcauggaga

SEQ ID NO: 221235 - RNA, 24 nt, Artificial Sequence
  Synthetic
gagagagggagggaagcauggaga

SEQ ID NO: 221236 - RNA, 18 nt, Artificial Sequence
  Synthetic
acaagcacaucauggaga

SEQ ID NO: 221237 - RNA, 19 nt, Artificial Sequence
  Synthetic
aacaagcacaucauggaga

SEQ ID NO: 221238 - RNA, 20 nt, Artificial Sequence
  Synthetic
aaacaagcacaucauggaga

SEQ ID NO: 221239 - RNA, 21 nt, Artificial Sequence
  Synthetic
gaaacaagcacaucauggaga

SEQ ID NO: 221240 - RNA, 22 nt, Artificial Sequence
  Synthetic
ugaaacaagcacaucauggaga

SEQ ID NO: 221241 - RNA, 23 nt, Artificial Sequence
  Synthetic
gugaaacaagcacaucauggaga

SEQ ID NO: 221242 - RNA, 24 nt, Artificial Sequence
  Synthetic
ugugaaacaagcacaucauggaga

SEQ ID NO: 221243 - RNA, 18 nt, Artificial Sequence
  Synthetic
auaaucacaucauggaga

SEQ ID NO: 221244 - RNA, 19 nt, Artificial Sequence
  Synthetic
aauaaucacaucauggaga

SEQ ID NO: 221245 - RNA, 20 nt, Artificial Sequence
  Synthetic
uaauaaucacaucauggaga

SEQ ID NO: 221246 - RNA, 21 nt, Artificial Sequence
  Synthetic
auaauaaucacaucauggaga

SEQ ID NO: 221247 - RNA, 22 nt, Artificial Sequence
  Synthetic
cauaauaaucacaucauggaga

SEQ ID NO: 221248 - RNA, 23 nt, Artificial Sequence
  Synthetic
gcauaauaaucacaucauggaga

SEQ ID NO: 221249 - RNA, 24 nt, Artificial Sequence
  Synthetic
ugcauaauaaucacaucauggaga

SEQ ID NO: 221250 - RNA, 18 nt, Artificial Sequence
  Synthetic
aaaaaaaaaaacuggaga

SEQ ID NO: 221251 - RNA, 19 nt, Artificial Sequence
  Synthetic
aaaaaaaaaaaacuggaga

SEQ ID NO: 221252 - RNA, 20 nt, Artificial Sequence
  Synthetic
aaaaaaaaaaaaacuggaga

SEQ ID NO: 221253 - RNA, 21 nt, Artificial Sequence
  Synthetic
aaaaaaaaaaaaaacuggaga

SEQ ID NO: 221254 - RNA, 22 nt, Artificial Sequence
  Synthetic
aaaaaaaaaaaaaaacuggaga

SEQ ID NO: 221255 - RNA, 23 nt, Artificial Sequence
  Synthetic
aaaaaaaaaaaaaaaacuggaga

SEQ ID NO: 221256 - RNA, 24 nt, Artificial Sequence
  Synthetic
aaaaaaaaaaaaaaaaacuggaga

SEQ ID NO: 221257 - RNA, 18 nt, Artificial Sequence
  Synthetic
uacagagagaacuggaga

SEQ ID NO: 221258 - RNA, 19 nt, Artificial Sequence
  Synthetic
guacagagagaacuggaga

SEQ ID NO: 221259 - RNA, 20 nt, Artificial Sequence
  Synthetic
gguacagagagaacuggaga

SEQ ID NO: 221260 - RNA, 21 nt, Artificial Sequence
  Synthetic
ugguacagagagaacuggaga

SEQ ID NO: 221261 - RNA, 22 nt, Artificial Sequence
  Synthetic
uugguacagagagaacuggaga

SEQ ID NO: 221262 - RNA, 23 nt, Artificial Sequence
  Synthetic
uuugguacagagagaacuggaga

SEQ ID NO: 221263 - RNA, 24 nt, Artificial Sequence
  Synthetic
auuugguacagagagaacuggaga

SEQ ID NO: 221264 - RNA, 18 nt, Artificial Sequence
  Synthetic
uaauuugaauacuggaga

SEQ ID NO: 221265 - RNA, 19 nt, Artificial Sequence
  Synthetic
auaauuugaauacuggaga

SEQ ID NO: 221266 - RNA, 20 nt, Artificial Sequence
  Synthetic
aauaauuugaauacuggaga

SEQ ID NO: 221267 - RNA, 21 nt, Artificial Sequence
  Synthetic
caauaauuugaauacuggaga

SEQ ID NO: 221268 - RNA, 22 nt, Artificial Sequence
  Synthetic
ccaauaauuugaauacuggaga

SEQ ID NO: 221269 - RNA, 23 nt, Artificial Sequence
  Synthetic
cccaauaauuugaauacuggaga

SEQ ID NO: 221270 - RNA, 24 nt, Artificial Sequence
  Synthetic
gcccaauaauuugaauacuggaga

SEQ ID NO: 221271 - RNA, 18 nt, Artificial Sequence
  Synthetic
gcagaaggaagcuggaga

SEQ ID NO: 221272 - RNA, 19 nt, Artificial Sequence
  Synthetic
agcagaaggaagcuggaga

SEQ ID NO: 221273 - RNA, 20 nt, Artificial Sequence
  Synthetic
aagcagaaggaagcuggaga

SEQ ID NO: 221274 - RNA, 21 nt, Artificial Sequence
  Synthetic
aaagcagaaggaagcuggaga

SEQ ID NO: 221275 - RNA, 22 nt, Artificial Sequence
  Synthetic
aaaagcagaaggaagcuggaga

SEQ ID NO: 221276 - RNA, 23 nt, Artificial Sequence
  Synthetic
gaaaagcagaaggaagcuggaga

SEQ ID NO: 221277 - RNA, 24 nt, Artificial Sequence
  Synthetic
ugaaaagcagaaggaagcuggaga

SEQ ID NO: 221278 - RNA, 18 nt, Artificial Sequence
  Synthetic
cagccaggaagcuggaga

SEQ ID NO: 221279 - RNA, 19 nt, Artificial Sequence
  Synthetic
ccagccaggaagcuggaga

SEQ ID NO: 221280 - RNA, 20 nt, Artificial Sequence
  Synthetic
uccagccaggaagcuggaga

SEQ ID NO: 221281 - RNA, 21 nt, Artificial Sequence
  Synthetic
cuccagccaggaagcuggaga

SEQ ID NO: 221282 - RNA, 22 nt, Artificial Sequence
  Synthetic
ucuccagccaggaagcuggaga

SEQ ID NO: 221283 - RNA, 23 nt, Artificial Sequence
  Synthetic
uucuccagccaggaagcuggaga

SEQ ID NO: 221284 - RNA, 24 nt, Artificial Sequence
  Synthetic
cuucuccagccaggaagcuggaga

SEQ ID NO: 221285 - RNA, 18 nt, Artificial Sequence
  Synthetic
gcagcuaacugcuggaga

SEQ ID NO: 221286 - RNA, 19 nt, Artificial Sequence
  Synthetic
agcagcuaacugcuggaga

SEQ ID NO: 221287 - RNA, 20 nt, Artificial Sequence
  Synthetic
uagcagcuaacugcuggaga

SEQ ID NO: 221288 - RNA, 21 nt, Artificial Sequence
  Synthetic
guagcagcuaacugcuggaga

SEQ ID NO: 221289 - RNA, 22 nt, Artificial Sequence
  Synthetic
uguagcagcuaacugcuggaga

SEQ ID NO: 221290 - RNA, 23 nt, Artificial Sequence
  Synthetic
cuguagcagcuaacugcuggaga

SEQ ID NO: 221291 - RNA, 24 nt, Artificial Sequence
  Synthetic
ucuguagcagcuaacugcuggaga

SEQ ID NO: 221292 - RNA, 18 nt, Artificial Sequence
  Synthetic
ccagugaagcucuggaga

SEQ ID NO: 221293 - RNA, 19 nt, Artificial Sequence
  Synthetic
uccagugaagcucuggaga

SEQ ID NO: 221294 - RNA, 20 nt, Artificial Sequence
  Synthetic
uuccagugaagcucuggaga

SEQ ID NO: 221295 - RNA, 21 nt, Artificial Sequence
  Synthetic
cuuccagugaagcucuggaga

SEQ ID NO: 221296 - RNA, 22 nt, Artificial Sequence
  Synthetic
acuuccagugaagcucuggaga

SEQ ID NO: 221297 - RNA, 23 nt, Artificial Sequence
  Synthetic
aacuuccagugaagcucuggaga

SEQ ID NO: 221298 - RNA, 24 nt, Artificial Sequence
  Synthetic
aaacuuccagugaagcucuggaga

SEQ ID NO: 221299 - RNA, 18 nt, Artificial Sequence
  Synthetic
agcuauuuauucuggaga

SEQ ID NO: 221300 - RNA, 19 nt, Artificial Sequence
  Synthetic
cagcuauuuauucuggaga

SEQ ID NO: 221301 - RNA, 20 nt, Artificial Sequence
  Synthetic
acagcuauuuauucuggaga

SEQ ID NO: 221302 - RNA, 21 nt, Artificial Sequence
  Synthetic
cacagcuauuuauucuggaga

SEQ ID NO: 221303 - RNA, 22 nt, Artificial Sequence
  Synthetic
acacagcuauuuauucuggaga

SEQ ID NO: 221304 - RNA, 23 nt, Artificial Sequence
  Synthetic
uacacagcuauuuauucuggaga

SEQ ID NO: 221305 - RNA, 24 nt, Artificial Sequence
  Synthetic
cuacacagcuauuuauucuggaga

SEQ ID NO: 221306 - RNA, 18 nt, Artificial Sequence
  Synthetic
gaggaaaacaaguggaga

SEQ ID NO: 221307 - RNA, 19 nt, Artificial Sequence
  Synthetic
agaggaaaacaaguggaga

SEQ ID NO: 221308 - RNA, 20 nt, Artificial Sequence
  Synthetic
aagaggaaaacaaguggaga

SEQ ID NO: 221309 - RNA, 21 nt, Artificial Sequence
  Synthetic
aaagaggaaaacaaguggaga

SEQ ID NO: 221310 - RNA, 22 nt, Artificial Sequence
  Synthetic
caaagaggaaaacaaguggaga

SEQ ID NO: 221311 - RNA, 23 nt, Artificial Sequence
  Synthetic
acaaagaggaaaacaaguggaga

SEQ ID NO: 221312 - RNA, 24 nt, Artificial Sequence
  Synthetic
aacaaagaggaaaacaaguggaga

SEQ ID NO: 221313 - RNA, 18 nt, Artificial Sequence
  Synthetic
aaauaaaaacaguggaga

SEQ ID NO: 221314 - RNA, 19 nt, Artificial Sequence
  Synthetic
caaauaaaaacaguggaga

SEQ ID NO: 221315 - RNA, 20 nt, Artificial Sequence
  Synthetic
gcaaauaaaaacaguggaga

SEQ ID NO: 221316 - RNA, 21 nt, Artificial Sequence
  Synthetic
ggcaaauaaaaacaguggaga

SEQ ID NO: 221317 - RNA, 22 nt, Artificial Sequence
  Synthetic
uggcaaauaaaaacaguggaga

SEQ ID NO: 221318 - RNA, 23 nt, Artificial Sequence
  Synthetic
uuggcaaauaaaaacaguggaga

SEQ ID NO: 221319 - RNA, 24 nt, Artificial Sequence
  Synthetic
uuuggcaaauaaaaacaguggaga

SEQ ID NO: 221320 - RNA, 18 nt, Artificial Sequence
  Synthetic
auaagcuuucaguggaga

SEQ ID NO: 221321 - RNA, 19 nt, Artificial Sequence
  Synthetic
aauaagcuuucaguggaga

SEQ ID NO: 221322 - RNA, 20 nt, Artificial Sequence
  Synthetic
aaauaagcuuucaguggaga

SEQ ID NO: 221323 - RNA, 21 nt, Artificial Sequence
  Synthetic
aaaauaagcuuucaguggaga

SEQ ID NO: 221324 - RNA, 22 nt, Artificial Sequence
  Synthetic
aaaaauaagcuuucaguggaga

SEQ ID NO: 221325 - RNA, 23 nt, Artificial Sequence
  Synthetic
gaaaaauaagcuuucaguggaga

SEQ ID NO: 221326 - RNA, 24 nt, Artificial Sequence
  Synthetic
agaaaaauaagcuuucaguggaga

SEQ ID NO: 221327 - RNA, 18 nt, Artificial Sequence
  Synthetic
aaaagacccugguggaga

SEQ ID NO: 221328 - RNA, 19 nt, Artificial Sequence
  Synthetic
aaaaagacccugguggaga

SEQ ID NO: 221329 - RNA, 20 nt, Artificial Sequence
  Synthetic
gaaaaagacccugguggaga

SEQ ID NO: 221330 - RNA, 21 nt, Artificial Sequence
  Synthetic
ugaaaaagacccugguggaga

SEQ ID NO: 221331 - RNA, 22 nt, Artificial Sequence
  Synthetic
augaaaaagacccugguggaga

SEQ ID NO: 221332 - RNA, 23 nt, Artificial Sequence
  Synthetic
uaugaaaaagacccugguggaga

SEQ ID NO: 221333 - RNA, 24 nt, Artificial Sequence
  Synthetic
cuaugaaaaagacccugguggaga

SEQ ID NO: 221334 - RNA, 18 nt, Artificial Sequence
  Synthetic
auagaucaccuguggaga

SEQ ID NO: 221335 - RNA, 19 nt, Artificial Sequence
  Synthetic
uauagaucaccuguggaga

SEQ ID NO: 221336 - RNA, 20 nt, Artificial Sequence
  Synthetic
cuauagaucaccuguggaga

SEQ ID NO: 221337 - RNA, 21 nt, Artificial Sequence
  Synthetic
gcuauagaucaccuguggaga

SEQ ID NO: 221338 - RNA, 22 nt, Artificial Sequence
  Synthetic
agcuauagaucaccuguggaga

SEQ ID NO: 221339 - RNA, 23 nt, Artificial Sequence
  Synthetic
aagcuauagaucaccuguggaga

SEQ ID NO: 221340 - RNA, 24 nt, Artificial Sequence
  Synthetic
caagcuauagaucaccuguggaga

SEQ ID NO: 221341 - RNA, 18 nt, Artificial Sequence
  Synthetic
gaucagaaacauuggaga

SEQ ID NO: 221342 - RNA, 19 nt, Artificial Sequence
  Synthetic
ugaucagaaacauuggaga

SEQ ID NO: 221343 - RNA, 20 nt, Artificial Sequence
  Synthetic
uugaucagaaacauuggaga

SEQ ID NO: 221344 - RNA, 21 nt, Artificial Sequence
  Synthetic
cuugaucagaaacauuggaga

SEQ ID NO: 221345 - RNA, 22 nt, Artificial Sequence
  Synthetic
gcuugaucagaaacauuggaga

SEQ ID NO: 221346 - RNA, 23 nt, Artificial Sequence
  Synthetic
ugcuugaucagaaacauuggaga

SEQ ID NO: 221347 - RNA, 24 nt, Artificial Sequence
  Synthetic
cugcuugaucagaaacauuggaga

SEQ ID NO: 221348 - RNA, 18 nt, Artificial Sequence
  Synthetic
agugauaagcauuggaga

SEQ ID NO: 221349 - RNA, 19 nt, Artificial Sequence
  Synthetic
uagugauaagcauuggaga

SEQ ID NO: 221350 - RNA, 20 nt, Artificial Sequence
  Synthetic
guagugauaagcauuggaga

SEQ ID NO: 221351 - RNA, 21 nt, Artificial Sequence
  Synthetic
uguagugauaagcauuggaga

SEQ ID NO: 221352 - RNA, 22 nt, Artificial Sequence
  Synthetic
guguagugauaagcauuggaga

SEQ ID NO: 221353 - RNA, 23 nt, Artificial Sequence
  Synthetic
uguguagugauaagcauuggaga

SEQ ID NO: 221354 - RNA, 24 nt, Artificial Sequence
  Synthetic
guguguagugauaagcauuggaga

SEQ ID NO: 221355 - RNA, 18 nt, Artificial Sequence
  Synthetic
gaucaaaaaacuuggaga

SEQ ID NO: 221356 - RNA, 19 nt, Artificial Sequence
  Synthetic
ugaucaaaaaacuuggaga

SEQ ID NO: 221357 - RNA, 20 nt, Artificial Sequence
  Synthetic
gugaucaaaaaacuuggaga

SEQ ID NO: 221358 - RNA, 21 nt, Artificial Sequence
  Synthetic
ggugaucaaaaaacuuggaga

SEQ ID NO: 221359 - RNA, 22 nt, Artificial Sequence
  Synthetic
aggugaucaaaaaacuuggaga

SEQ ID NO: 221360 - RNA, 23 nt, Artificial Sequence
  Synthetic
aaggugaucaaaaaacuuggaga

SEQ ID NO: 221361 - RNA, 24 nt, Artificial Sequence
  Synthetic
aaaggugaucaaaaaacuuggaga

SEQ ID NO: 221362 - RNA, 18 nt, Artificial Sequence
  Synthetic
aacagaaauucuuggaga

SEQ ID NO: 221363 - RNA, 19 nt, Artificial Sequence
  Synthetic
aaacagaaauucuuggaga

SEQ ID NO: 221364 - RNA, 20 nt, Artificial Sequence
  Synthetic
gaaacagaaauucuuggaga

SEQ ID NO: 221365 - RNA, 21 nt, Artificial Sequence
  Synthetic
ugaaacagaaauucuuggaga

SEQ ID NO: 221366 - RNA, 22 nt, Artificial Sequence
  Synthetic
cugaaacagaaauucuuggaga

SEQ ID NO: 221367 - RNA, 23 nt, Artificial Sequence
  Synthetic
acugaaacagaaauucuuggaga

SEQ ID NO: 221368 - RNA, 24 nt, Artificial Sequence
  Synthetic
uacugaaacagaaauucuuggaga

SEQ ID NO: 221369 - RNA, 18 nt, Artificial Sequence
  Synthetic
auauuuuuauguuggaga

SEQ ID NO: 221370 - RNA, 19 nt, Artificial Sequence
  Synthetic
aauauuuuuauguuggaga

SEQ ID NO: 221371 - RNA, 20 nt, Artificial Sequence
  Synthetic
gaauauuuuuauguuggaga

SEQ ID NO: 221372 - RNA, 21 nt, Artificial Sequence
  Synthetic
ugaauauuuuuauguuggaga

SEQ ID NO: 221373 - RNA, 22 nt, Artificial Sequence
  Synthetic
cugaauauuuuuauguuggaga

SEQ ID NO: 221374 - RNA, 23 nt, Artificial Sequence
  Synthetic
ucugaauauuuuuauguuggaga

SEQ ID NO: 221375 - RNA, 24 nt, Artificial Sequence
  Synthetic
cucugaauauuuuuauguuggaga

SEQ ID NO: 221376 - RNA, 18 nt, Artificial Sequence
  Synthetic
aagaauucacuuuggaga

SEQ ID NO: 221377 - RNA, 19 nt, Artificial Sequence
  Synthetic
aaagaauucacuuuggaga

SEQ ID NO: 221378 - RNA, 20 nt, Artificial Sequence
  Synthetic
uaaagaauucacuuuggaga

SEQ ID NO: 221379 - RNA, 21 nt, Artificial Sequence
  Synthetic
uuaaagaauucacuuuggaga

SEQ ID NO: 221380 - RNA, 22 nt, Artificial Sequence
  Synthetic
uuuaaagaauucacuuuggaga

SEQ ID NO: 221381 - RNA, 23 nt, Artificial Sequence
  Synthetic
auuuaaagaauucacuuuggaga

SEQ ID NO: 221382 - RNA, 24 nt, Artificial Sequence
  Synthetic
gauuuaaagaauucacuuuggaga

SEQ ID NO: 221383 - RNA, 18 nt, Artificial Sequence
  Synthetic
agucuuugaaaaaugaga

SEQ ID NO: 221384 - RNA, 19 nt, Artificial Sequence
  Synthetic
aagucuuugaaaaaugaga

SEQ ID NO: 221385 - RNA, 20 nt, Artificial Sequence
  Synthetic
aaagucuuugaaaaaugaga

SEQ ID NO: 221386 - RNA, 21 nt, Artificial Sequence
  Synthetic
aaaagucuuugaaaaaugaga

SEQ ID NO: 221387 - RNA, 22 nt, Artificial Sequence
  Synthetic
aaaaagucuuugaaaaaugaga

SEQ ID NO: 221388 - RNA, 23 nt, Artificial Sequence
  Synthetic
aaaaaagucuuugaaaaaugaga

SEQ ID NO: 221389 - RNA, 24 nt, Artificial Sequence
  Synthetic
aaaaaaagucuuugaaaaaugaga

SEQ ID NO: 221390 - RNA, 18 nt, Artificial Sequence
  Synthetic
uucagaaucaaaaugaga

SEQ ID NO: 221391 - RNA, 19 nt, Artificial Sequence
  Synthetic
guucagaaucaaaaugaga

SEQ ID NO: 221392 - RNA, 20 nt, Artificial Sequence
  Synthetic
aguucagaaucaaaaugaga

SEQ ID NO: 221393 - RNA, 21 nt, Artificial Sequence
  Synthetic
aaguucagaaucaaaaugaga

SEQ ID NO: 221394 - RNA, 22 nt, Artificial Sequence
  Synthetic
caaguucagaaucaaaaugaga

SEQ ID NO: 221395 - RNA, 23 nt, Artificial Sequence
  Synthetic
ccaaguucagaaucaaaaugaga

SEQ ID NO: 221396 - RNA, 24 nt, Artificial Sequence
  Synthetic
gccaaguucagaaucaaaaugaga

SEQ ID NO: 221397 - RNA, 18 nt, Artificial Sequence
  Synthetic
uggacaaggcaaaugaga

SEQ ID NO: 221398 - RNA, 19 nt, Artificial Sequence
  Synthetic
guggacaaggcaaaugaga

SEQ ID NO: 221399 - RNA, 20 nt, Artificial Sequence
  Synthetic
aguggacaaggcaaaugaga

SEQ ID NO: 221400 - RNA, 21 nt, Artificial Sequence
  Synthetic
caguggacaaggcaaaugaga

SEQ ID NO: 221401 - RNA, 22 nt, Artificial Sequence
  Synthetic
acaguggacaaggcaaaugaga

SEQ ID NO: 221402 - RNA, 23 nt, Artificial Sequence
  Synthetic
cacaguggacaaggcaaaugaga

SEQ ID NO: 221403 - RNA, 24 nt, Artificial Sequence
  Synthetic
ucacaguggacaaggcaaaugaga

SEQ ID NO: 221404 - RNA, 18 nt, Artificial Sequence
  Synthetic
cugcucaaggaaaugaga

SEQ ID NO: 221405 - RNA, 19 nt, Artificial Sequence
  Synthetic
acugcucaaggaaaugaga

SEQ ID NO: 221406 - RNA, 20 nt, Artificial Sequence
  Synthetic
cacugcucaaggaaaugaga

SEQ ID NO: 221407 - RNA, 21 nt, Artificial Sequence
  Synthetic
ccacugcucaaggaaaugaga

SEQ ID NO: 221408 - RNA, 22 nt, Artificial Sequence
  Synthetic
accacugcucaaggaaaugaga

SEQ ID NO: 221409 - RNA, 23 nt, Artificial Sequence
  Synthetic
aaccacugcucaaggaaaugaga

SEQ ID NO: 221410 - RNA, 24 nt, Artificial Sequence
  Synthetic
aaaccacugcucaaggaaaugaga

SEQ ID NO: 221411 - RNA, 18 nt, Artificial Sequence
  Synthetic
agcuugaaggaaaugaga

SEQ ID NO: 221412 - RNA, 19 nt, Artificial Sequence
  Synthetic
gagcuugaaggaaaugaga

SEQ ID NO: 221413 - RNA, 20 nt, Artificial Sequence
  Synthetic
ugagcuugaaggaaaugaga

SEQ ID NO: 221414 - RNA, 21 nt, Artificial Sequence
  Synthetic
uugagcuugaaggaaaugaga

SEQ ID NO: 221415 - RNA, 22 nt, Artificial Sequence
  Synthetic
uuugagcuugaaggaaaugaga

SEQ ID NO: 221416 - RNA, 23 nt, Artificial Sequence
  Synthetic
cuuugagcuugaaggaaaugaga

SEQ ID NO: 221417 - RNA, 24 nt, Artificial Sequence
  Synthetic
gcuuugagcuugaaggaaaugaga

SEQ ID NO: 221418 - RNA, 18 nt, Artificial Sequence
  Synthetic
aaggagugaucaaugaga

SEQ ID NO: 221419 - RNA, 19 nt, Artificial Sequence
  Synthetic
aaaggagugaucaaugaga

SEQ ID NO: 221420 - RNA, 20 nt, Artificial Sequence
  Synthetic
aaaaggagugaucaaugaga

SEQ ID NO: 221421 - RNA, 21 nt, Artificial Sequence
  Synthetic
gaaaaggagugaucaaugaga

SEQ ID NO: 221422 - RNA, 22 nt, Artificial Sequence
  Synthetic
agaaaaggagugaucaaugaga

SEQ ID NO: 221423 - RNA, 23 nt, Artificial Sequence
  Synthetic
aagaaaaggagugaucaaugaga

SEQ ID NO: 221424 - RNA, 24 nt, Artificial Sequence
  Synthetic
aaagaaaaggagugaucaaugaga

SEQ ID NO: 221425 - RNA, 18 nt, Artificial Sequence
  Synthetic
guugaaaucagaaugaga

SEQ ID NO: 221426 - RNA, 19 nt, Artificial Sequence
  Synthetic
aguugaaaucagaaugaga

SEQ ID NO: 221427 - RNA, 20 nt, Artificial Sequence
  Synthetic
aaguugaaaucagaaugaga

SEQ ID NO: 221428 - RNA, 21 nt, Artificial Sequence
  Synthetic
aaaguugaaaucagaaugaga

SEQ ID NO: 221429 - RNA, 22 nt, Artificial Sequence
  Synthetic
aaaaguugaaaucagaaugaga

SEQ ID NO: 221430 - RNA, 23 nt, Artificial Sequence
  Synthetic
uaaaaguugaaaucagaaugaga

SEQ ID NO: 221431 - RNA, 24 nt, Artificial Sequence
  Synthetic
auaaaaguugaaaucagaaugaga

SEQ ID NO: 221432 - RNA, 18 nt, Artificial Sequence
  Synthetic
acucauaauagaaugaga

SEQ ID NO: 221433 - RNA, 19 nt, Artificial Sequence
  Synthetic
aacucauaauagaaugaga

SEQ ID NO: 221434 - RNA, 20 nt, Artificial Sequence
  Synthetic
aaacucauaauagaaugaga

SEQ ID NO: 221435 - RNA, 21 nt, Artificial Sequence
  Synthetic
aaaacucauaauagaaugaga

SEQ ID NO: 221436 - RNA, 22 nt, Artificial Sequence
  Synthetic
aaaaacucauaauagaaugaga

SEQ ID NO: 221437 - RNA, 23 nt, Artificial Sequence
  Synthetic
gaaaaacucauaauagaaugaga

SEQ ID NO: 221438 - RNA, 24 nt, Artificial Sequence
  Synthetic
ugaaaaacucauaauagaaugaga

SEQ ID NO: 221439 - RNA, 18 nt, Artificial Sequence
  Synthetic
ggcuaugauagaaugaga

SEQ ID NO: 221440 - RNA, 19 nt, Artificial Sequence
  Synthetic
gggcuaugauagaaugaga

SEQ ID NO: 221441 - RNA, 20 nt, Artificial Sequence
  Synthetic
ugggcuaugauagaaugaga

SEQ ID NO: 221442 - RNA, 21 nt, Artificial Sequence
  Synthetic
augggcuaugauagaaugaga

SEQ ID NO: 221443 - RNA, 22 nt, Artificial Sequence
  Synthetic
caugggcuaugauagaaugaga

SEQ ID NO: 221444 - RNA, 23 nt, Artificial Sequence
  Synthetic
acaugggcuaugauagaaugaga

SEQ ID NO: 221445 - RNA, 24 nt, Artificial Sequence
  Synthetic
aacaugggcuaugauagaaugaga

SEQ ID NO: 221446 - RNA, 18 nt, Artificial Sequence
  Synthetic
cuuuuaaucugaaugaga

SEQ ID NO: 221447 - RNA, 19 nt, Artificial Sequence
  Synthetic
gcuuuuaaucugaaugaga

SEQ ID NO: 221448 - RNA, 20 nt, Artificial Sequence
  Synthetic
agcuuuuaaucugaaugaga

SEQ ID NO: 221449 - RNA, 21 nt, Artificial Sequence
  Synthetic
uagcuuuuaaucugaaugaga

SEQ ID NO: 221450 - RNA, 22 nt, Artificial Sequence
  Synthetic
uuagcuuuuaaucugaaugaga

SEQ ID NO: 221451 - RNA, 23 nt, Artificial Sequence
  Synthetic
uuuagcuuuuaaucugaaugaga

SEQ ID NO: 221452 - RNA, 24 nt, Artificial Sequence
  Synthetic
cuuuagcuuuuaaucugaaugaga

SEQ ID NO: 221453 - RNA, 18 nt, Artificial Sequence
  Synthetic
aggggaccacuaaugaga

SEQ ID NO: 221454 - RNA, 19 nt, Artificial Sequence
  Synthetic
gaggggaccacuaaugaga

SEQ ID NO: 221455 - RNA, 20 nt, Artificial Sequence
  Synthetic
ggaggggaccacuaaugaga

SEQ ID NO: 221456 - RNA, 21 nt, Artificial Sequence
  Synthetic
aggaggggaccacuaaugaga

SEQ ID NO: 221457 - RNA, 22 nt, Artificial Sequence
  Synthetic
caggaggggaccacuaaugaga

SEQ ID NO: 221458 - RNA, 23 nt, Artificial Sequence
  Synthetic
ccaggaggggaccacuaaugaga

SEQ ID NO: 221459 - RNA, 24 nt, Artificial Sequence
  Synthetic
cccaggaggggaccacuaaugaga

SEQ ID NO: 221460 - RNA, 18 nt, Artificial Sequence
  Synthetic
uucucauucuacaugaga

SEQ ID NO: 221461 - RNA, 19 nt, Artificial Sequence
  Synthetic
cuucucauucuacaugaga

SEQ ID NO: 221462 - RNA, 20 nt, Artificial Sequence
  Synthetic
ucuucucauucuacaugaga

SEQ ID NO: 221463 - RNA, 21 nt, Artificial Sequence
  Synthetic
gucuucucauucuacaugaga

SEQ ID NO: 221464 - RNA, 22 nt, Artificial Sequence
  Synthetic
ugucuucucauucuacaugaga

SEQ ID NO: 221465 - RNA, 23 nt, Artificial Sequence
  Synthetic
uugucuucucauucuacaugaga

SEQ ID NO: 221466 - RNA, 24 nt, Artificial Sequence
  Synthetic
auugucuucucauucuacaugaga

SEQ ID NO: 221467 - RNA, 18 nt, Artificial Sequence
  Synthetic
cuucauagcagcaugaga

SEQ ID NO: 221468 - RNA, 19 nt, Artificial Sequence
  Synthetic
ucuucauagcagcaugaga

SEQ ID NO: 221469 - RNA, 20 nt, Artificial Sequence
  Synthetic
uucuucauagcagcaugaga

SEQ ID NO: 221470 - RNA, 21 nt, Artificial Sequence
  Synthetic
uuucuucauagcagcaugaga

SEQ ID NO: 221471 - RNA, 22 nt, Artificial Sequence
  Synthetic
auuucuucauagcagcaugaga

SEQ ID NO: 221472 - RNA, 23 nt, Artificial Sequence
  Synthetic
uauuucuucauagcagcaugaga

SEQ ID NO: 221473 - RNA, 24 nt, Artificial Sequence
  Synthetic
guauuucuucauagcagcaugaga

SEQ ID NO: 221474 - RNA, 18 nt, Artificial Sequence
  Synthetic
uaguuugagagcaugaga

SEQ ID NO: 221475 - RNA, 19 nt, Artificial Sequence
  Synthetic
uuaguuugagagcaugaga

SEQ ID NO: 221476 - RNA, 20 nt, Artificial Sequence
  Synthetic
cuuaguuugagagcaugaga

SEQ ID NO: 221477 - RNA, 21 nt, Artificial Sequence
  Synthetic
ucuuaguuugagagcaugaga

SEQ ID NO: 221478 - RNA, 22 nt, Artificial Sequence
  Synthetic
cucuuaguuugagagcaugaga

SEQ ID NO: 221479 - RNA, 23 nt, Artificial Sequence
  Synthetic
acucuuaguuugagagcaugaga

SEQ ID NO: 221480 - RNA, 24 nt, Artificial Sequence
  Synthetic
uacucuuaguuugagagcaugaga

SEQ ID NO: 221481 - RNA, 18 nt, Artificial Sequence
  Synthetic
acuuguccaggcaugaga

SEQ ID NO: 221482 - RNA, 19 nt, Artificial Sequence
  Synthetic
uacuuguccaggcaugaga

SEQ ID NO: 221483 - RNA, 20 nt, Artificial Sequence
  Synthetic
uuacuuguccaggcaugaga

SEQ ID NO: 221484 - RNA, 21 nt, Artificial Sequence
  Synthetic
guuacuuguccaggcaugaga

SEQ ID NO: 221485 - RNA, 22 nt, Artificial Sequence
  Synthetic
aguuacuuguccaggcaugaga

SEQ ID NO: 221486 - RNA, 23 nt, Artificial Sequence
  Synthetic
aaguuacuuguccaggcaugaga

SEQ ID NO: 221487 - RNA, 24 nt, Artificial Sequence
  Synthetic
uaaguuacuuguccaggcaugaga

SEQ ID NO: 221488 - RNA, 18 nt, Artificial Sequence
  Synthetic
aaagaaagaggcaugaga

SEQ ID NO: 221489 - RNA, 19 nt, Artificial Sequence
  Synthetic
uaaagaaagaggcaugaga

SEQ ID NO: 221490 - RNA, 20 nt, Artificial Sequence
  Synthetic
auaaagaaagaggcaugaga

SEQ ID NO: 221491 - RNA, 21 nt, Artificial Sequence
  Synthetic
gauaaagaaagaggcaugaga

SEQ ID NO: 221492 - RNA, 22 nt, Artificial Sequence
  Synthetic
ugauaaagaaagaggcaugaga

SEQ ID NO: 221493 - RNA, 23 nt, Artificial Sequence
  Synthetic
augauaaagaaagaggcaugaga

SEQ ID NO: 221494 - RNA, 24 nt, Artificial Sequence
  Synthetic
gaugauaaagaaagaggcaugaga

SEQ ID NO: 221495 - RNA, 18 nt, Artificial Sequence
  Synthetic
agggcaacacagaugaga

SEQ ID NO: 221496 - RNA, 19 nt, Artificial Sequence
  Synthetic
cagggcaacacagaugaga

SEQ ID NO: 221497 - RNA, 20 nt, Artificial Sequence
  Synthetic
acagggcaacacagaugaga

SEQ ID NO: 221498 - RNA, 21 nt, Artificial Sequence
  Synthetic
cacagggcaacacagaugaga

SEQ ID NO: 221499 - RNA, 22 nt, Artificial Sequence
  Synthetic
gcacagggcaacacagaugaga

SEQ ID NO: 221500 - RNA, 23 nt, Artificial Sequence
  Synthetic
agcacagggcaacacagaugaga

SEQ ID NO: 221501 - RNA, 24 nt, Artificial Sequence
  Synthetic
uagcacagggcaacacagaugaga

SEQ ID NO: 221502 - RNA, 18 nt, Artificial Sequence
  Synthetic
auaggauacaaacugaga

SEQ ID NO: 221503 - RNA, 19 nt, Artificial Sequence
  Synthetic
gauaggauacaaacugaga

SEQ ID NO: 221504 - RNA, 20 nt, Artificial Sequence
  Synthetic
ggauaggauacaaacugaga

SEQ ID NO: 221505 - RNA, 21 nt, Artificial Sequence
  Synthetic
gggauaggauacaaacugaga

SEQ ID NO: 221506 - RNA, 22 nt, Artificial Sequence
  Synthetic
agggauaggauacaaacugaga

SEQ ID NO: 221507 - RNA, 23 nt, Artificial Sequence
  Synthetic
cagggauaggauacaaacugaga

SEQ ID NO: 221508 - RNA, 24 nt, Artificial Sequence
  Synthetic
gcagggauaggauacaaacugaga

SEQ ID NO: 221509 - RNA, 18 nt, Artificial Sequence
  Synthetic
ccuacuaaugaacugaga

SEQ ID NO: 221510 - RNA, 19 nt, Artificial Sequence
  Synthetic
uccuacuaaugaacugaga

SEQ ID NO: 221511 - RNA, 20 nt, Artificial Sequence
  Synthetic
uuccuacuaaugaacugaga

SEQ ID NO: 221512 - RNA, 21 nt, Artificial Sequence
  Synthetic
uuuccuacuaaugaacugaga

SEQ ID NO: 221513 - RNA, 22 nt, Artificial Sequence
  Synthetic
auuuccuacuaaugaacugaga

SEQ ID NO: 221514 - RNA, 23 nt, Artificial Sequence
  Synthetic
gauuuccuacuaaugaacugaga

SEQ ID NO: 221515 - RNA, 24 nt, Artificial Sequence
  Synthetic
ggauuuccuacuaaugaacugaga

SEQ ID NO: 221516 - RNA, 18 nt, Artificial Sequence
  Synthetic
ugacauucuacacugaga

SEQ ID NO: 221517 - RNA, 19 nt, Artificial Sequence
  Synthetic
augacauucuacacugaga

SEQ ID NO: 221518 - RNA, 20 nt, Artificial Sequence
  Synthetic
aaugacauucuacacugaga

SEQ ID NO: 221519 - RNA, 21 nt, Artificial Sequence
  Synthetic
gaaugacauucuacacugaga

SEQ ID NO: 221520 - RNA, 22 nt, Artificial Sequence
  Synthetic
ugaaugacauucuacacugaga

SEQ ID NO: 221521 - RNA, 23 nt, Artificial Sequence
  Synthetic
augaaugacauucuacacugaga

SEQ ID NO: 221522 - RNA, 24 nt, Artificial Sequence
  Synthetic
aaugaaugacauucuacacugaga

SEQ ID NO: 221523 - RNA, 18 nt, Artificial Sequence
  Synthetic
ggucaucauuuacugaga

SEQ ID NO: 221524 - RNA, 19 nt, Artificial Sequence
  Synthetic
gggucaucauuuacugaga

SEQ ID NO: 221525 - RNA, 20 nt, Artificial Sequence
  Synthetic
ggggucaucauuuacugaga

SEQ ID NO: 221526 - RNA, 21 nt, Artificial Sequence
  Synthetic
uggggucaucauuuacugaga

SEQ ID NO: 221527 - RNA, 22 nt, Artificial Sequence
  Synthetic
auggggucaucauuuacugaga

SEQ ID NO: 221528 - RNA, 23 nt, Artificial Sequence
  Synthetic
gauggggucaucauuuacugaga

SEQ ID NO: 221529 - RNA, 24 nt, Artificial Sequence
  Synthetic
agauggggucaucauuuacugaga

SEQ ID NO: 221530 - RNA, 18 nt, Artificial Sequence
  Synthetic
gauaagaacaaccugaga

SEQ ID NO: 221531 - RNA, 19 nt, Artificial Sequence
  Synthetic
ugauaagaacaaccugaga

SEQ ID NO: 221532 - RNA, 20 nt, Artificial Sequence
  Synthetic
cugauaagaacaaccugaga

SEQ ID NO: 221533 - RNA, 21 nt, Artificial Sequence
  Synthetic
ucugauaagaacaaccugaga

SEQ ID NO: 221534 - RNA, 22 nt, Artificial Sequence
  Synthetic
aucugauaagaacaaccugaga

SEQ ID NO: 221535 - RNA, 23 nt, Artificial Sequence
  Synthetic
caucugauaagaacaaccugaga

SEQ ID NO: 221536 - RNA, 24 nt, Artificial Sequence
  Synthetic
ucaucugauaagaacaaccugaga

SEQ ID NO: 221537 - RNA, 18 nt, Artificial Sequence
  Synthetic
gugaugucuaaccugaga

SEQ ID NO: 221538 - RNA, 19 nt, Artificial Sequence
  Synthetic
agugaugucuaaccugaga

SEQ ID NO: 221539 - RNA, 20 nt, Artificial Sequence
  Synthetic
aagugaugucuaaccugaga

SEQ ID NO: 221540 - RNA, 21 nt, Artificial Sequence
  Synthetic
gaagugaugucuaaccugaga

SEQ ID NO: 221541 - RNA, 22 nt, Artificial Sequence
  Synthetic
ggaagugaugucuaaccugaga

SEQ ID NO: 221542 - RNA, 23 nt, Artificial Sequence
  Synthetic
aggaagugaugucuaaccugaga

SEQ ID NO: 221543 - RNA, 24 nt, Artificial Sequence
  Synthetic
gaggaagugaugucuaaccugaga

SEQ ID NO: 221544 - RNA, 18 nt, Artificial Sequence
  Synthetic
gggaagcauacccugaga

SEQ ID NO: 221545 - RNA, 19 nt, Artificial Sequence
  Synthetic
ugggaagcauacccugaga

SEQ ID NO: 221546 - RNA, 20 nt, Artificial Sequence
  Synthetic
cugggaagcauacccugaga

SEQ ID NO: 221547 - RNA, 21 nt, Artificial Sequence
  Synthetic
acugggaagcauacccugaga

SEQ ID NO: 221548 - RNA, 22 nt, Artificial Sequence
  Synthetic
gacugggaagcauacccugaga

SEQ ID NO: 221549 - RNA, 23 nt, Artificial Sequence
  Synthetic
ugacugggaagcauacccugaga

SEQ ID NO: 221550 - RNA, 24 nt, Artificial Sequence
  Synthetic
gugacugggaagcauacccugaga

SEQ ID NO: 221551 - RNA, 18 nt, Artificial Sequence
  Synthetic
uaaagaacuucccugaga

SEQ ID NO: 221552 - RNA, 19 nt, Artificial Sequence
  Synthetic
auaaagaacuucccugaga

SEQ ID NO: 221553 - RNA, 20 nt, Artificial Sequence
  Synthetic
uauaaagaacuucccugaga

SEQ ID NO: 221554 - RNA, 21 nt, Artificial Sequence
  Synthetic
cuauaaagaacuucccugaga

SEQ ID NO: 221555 - RNA, 22 nt, Artificial Sequence
  Synthetic
gcuauaaagaacuucccugaga

SEQ ID NO: 221556 - RNA, 23 nt, Artificial Sequence
  Synthetic
ugcuauaaagaacuucccugaga

SEQ ID NO: 221557 - RNA, 24 nt, Artificial Sequence
  Synthetic
cugcuauaaagaacuucccugaga

SEQ ID NO: 221558 - RNA, 18 nt, Artificial Sequence
  Synthetic
uuaggaaugggccugaga

SEQ ID NO: 221559 - RNA, 19 nt, Artificial Sequence
  Synthetic
cuuaggaaugggccugaga

SEQ ID NO: 221560 - RNA, 20 nt, Artificial Sequence
  Synthetic
ccuuaggaaugggccugaga

SEQ ID NO: 221561 - RNA, 21 nt, Artificial Sequence
  Synthetic
gccuuaggaaugggccugaga

SEQ ID NO: 221562 - RNA, 22 nt, Artificial Sequence
  Synthetic
ugccuuaggaaugggccugaga

SEQ ID NO: 221563 - RNA, 23 nt, Artificial Sequence
  Synthetic
gugccuuaggaaugggccugaga

SEQ ID NO: 221564 - RNA, 24 nt, Artificial Sequence
  Synthetic
ugugccuuaggaaugggccugaga

SEQ ID NO: 221565 - RNA, 18 nt, Artificial Sequence
  Synthetic
auaauaaccugccugaga

SEQ ID NO: 221566 - RNA, 19 nt, Artificial Sequence
  Synthetic
gauaauaaccugccugaga

SEQ ID NO: 221567 - RNA, 20 nt, Artificial Sequence
  Synthetic
ggauaauaaccugccugaga

SEQ ID NO: 221568 - RNA, 21 nt, Artificial Sequence
  Synthetic
aggauaauaaccugccugaga

SEQ ID NO: 221569 - RNA, 22 nt, Artificial Sequence
  Synthetic
aaggauaauaaccugccugaga

SEQ ID NO: 221570 - RNA, 23 nt, Artificial Sequence
  Synthetic
uaaggauaauaaccugccugaga

SEQ ID NO: 221571 - RNA, 24 nt, Artificial Sequence
  Synthetic
guaaggauaauaaccugccugaga

SEQ ID NO: 221572 - RNA, 18 nt, Artificial Sequence
  Synthetic
gcuggcugcugccugaga

SEQ ID NO: 221573 - RNA, 19 nt, Artificial Sequence
  Synthetic
ggcuggcugcugccugaga

SEQ ID NO: 221574 - RNA, 20 nt, Artificial Sequence
  Synthetic
gggcuggcugcugccugaga

SEQ ID NO: 221575 - RNA, 21 nt, Artificial Sequence
  Synthetic
ggggcuggcugcugccugaga

SEQ ID NO: 221576 - RNA, 22 nt, Artificial Sequence
  Synthetic
aggggcuggcugcugccugaga

SEQ ID NO: 221577 - RNA, 23 nt, Artificial Sequence
  Synthetic
caggggcuggcugcugccugaga

SEQ ID NO: 221578 - RNA, 24 nt, Artificial Sequence
  Synthetic
ccaggggcuggcugcugccugaga

SEQ ID NO: 221579 - RNA, 18 nt, Artificial Sequence
  Synthetic
uuucucuggaagcugaga

SEQ ID NO: 221580 - RNA, 19 nt, Artificial Sequence
  Synthetic
uuuucucuggaagcugaga

SEQ ID NO: 221581 - RNA, 20 nt, Artificial Sequence
  Synthetic
guuuucucuggaagcugaga

SEQ ID NO: 221582 - RNA, 21 nt, Artificial Sequence
  Synthetic
aguuuucucuggaagcugaga

SEQ ID NO: 221583 - RNA, 22 nt, Artificial Sequence
  Synthetic
gaguuuucucuggaagcugaga

SEQ ID NO: 221584 - RNA, 23 nt, Artificial Sequence
  Synthetic
ugaguuuucucuggaagcugaga

SEQ ID NO: 221585 - RNA, 24 nt, Artificial Sequence
  Synthetic
augaguuuucucuggaagcugaga

SEQ ID NO: 221586 - RNA, 18 nt, Artificial Sequence
  Synthetic
cuuuaaggggagcugaga

SEQ ID NO: 221587 - RNA, 19 nt, Artificial Sequence
  Synthetic
acuuuaaggggagcugaga

SEQ ID NO: 221588 - RNA, 20 nt, Artificial Sequence
  Synthetic
uacuuuaaggggagcugaga

SEQ ID NO: 221589 - RNA, 21 nt, Artificial Sequence
  Synthetic
guacuuuaaggggagcugaga

SEQ ID NO: 221590 - RNA, 22 nt, Artificial Sequence
  Synthetic
uguacuuuaaggggagcugaga

SEQ ID NO: 221591 - RNA, 23 nt, Artificial Sequence
  Synthetic
cuguacuuuaaggggagcugaga

SEQ ID NO: 221592 - RNA, 24 nt, Artificial Sequence
  Synthetic
gcuguacuuuaaggggagcugaga

SEQ ID NO: 221593 - RNA, 18 nt, Artificial Sequence
  Synthetic
gguugcagugagcugaga

SEQ ID NO: 221594 - RNA, 19 nt, Artificial Sequence
  Synthetic
agguugcagugagcugaga

SEQ ID NO: 221595 - RNA, 20 nt, Artificial Sequence
  Synthetic
gagguugcagugagcugaga

SEQ ID NO: 221596 - RNA, 18 nt, Artificial Sequence
  Synthetic
cuacucaggaggcugaga

SEQ ID NO: 221597 - RNA, 19 nt, Artificial Sequence
  Synthetic
gcuacucaggaggcugaga

SEQ ID NO: 221598 - RNA, 20 nt, Artificial Sequence
  Synthetic
agcuacucaggaggcugaga

SEQ ID NO: 221599 - RNA, 21 nt, Artificial Sequence
  Synthetic
cagcuacucaggaggcugaga

SEQ ID NO: 221600 - RNA, 22 nt, Artificial Sequence
  Synthetic
ccagcuacucaggaggcugaga

SEQ ID NO: 221601 - RNA, 23 nt, Artificial Sequence
  Synthetic
cccagcuacucaggaggcugaga

SEQ ID NO: 221602 - RNA, 24 nt, Artificial Sequence
  Synthetic
ccccagcuacucaggaggcugaga

SEQ ID NO: 221603 - RNA, 18 nt, Artificial Sequence
  Synthetic
cuacucgggaggcugaga

SEQ ID NO: 221604 - RNA, 19 nt, Artificial Sequence
  Synthetic
gcuacucgggaggcugaga

SEQ ID NO: 221605 - RNA, 20 nt, Artificial Sequence
  Synthetic
ugcuacucgggaggcugaga

SEQ ID NO: 221606 - RNA, 21 nt, Artificial Sequence
  Synthetic
cugcuacucgggaggcugaga

SEQ ID NO: 221607 - RNA, 22 nt, Artificial Sequence
  Synthetic
ccugcuacucgggaggcugaga

SEQ ID NO: 221608 - RNA, 23 nt, Artificial Sequence
  Synthetic
uccugcuacucgggaggcugaga

SEQ ID NO: 221609 - RNA, 24 nt, Artificial Sequence
  Synthetic
uuccugcuacucgggaggcugaga

SEQ ID NO: 221610 - RNA, 18 nt, Artificial Sequence
  Synthetic
augucaauagugcugaga

SEQ ID NO: 221611 - RNA, 19 nt, Artificial Sequence
  Synthetic
aaugucaauagugcugaga

SEQ ID NO: 221612 - RNA, 20 nt, Artificial Sequence
  Synthetic
aaaugucaauagugcugaga

SEQ ID NO: 221613 - RNA, 21 nt, Artificial Sequence
  Synthetic
aaaaugucaauagugcugaga

SEQ ID NO: 221614 - RNA, 22 nt, Artificial Sequence
  Synthetic
aaaaaugucaauagugcugaga

SEQ ID NO: 221615 - RNA, 23 nt, Artificial Sequence
  Synthetic
caaaaaugucaauagugcugaga

SEQ ID NO: 221616 - RNA, 24 nt, Artificial Sequence
  Synthetic
acaaaaaugucaauagugcugaga

SEQ ID NO: 221617 - RNA, 18 nt, Artificial Sequence
  Synthetic
uuaagcuaguugcugaga

SEQ ID NO: 221618 - RNA, 19 nt, Artificial Sequence
  Synthetic
auuaagcuaguugcugaga

SEQ ID NO: 221619 - RNA, 20 nt, Artificial Sequence
  Synthetic
aauuaagcuaguugcugaga

SEQ ID NO: 221620 - RNA, 21 nt, Artificial Sequence
  Synthetic
gaauuaagcuaguugcugaga

SEQ ID NO: 221621 - RNA, 22 nt, Artificial Sequence
  Synthetic
agaauuaagcuaguugcugaga

SEQ ID NO: 221622 - RNA, 23 nt, Artificial Sequence
  Synthetic
aagaauuaagcuaguugcugaga

SEQ ID NO: 221623 - RNA, 24 nt, Artificial Sequence
  Synthetic
caagaauuaagcuaguugcugaga

SEQ ID NO: 221624 - RNA, 18 nt, Artificial Sequence
  Synthetic
ugguuuaugaaucugaga

SEQ ID NO: 221625 - RNA, 19 nt, Artificial Sequence
  Synthetic
augguuuaugaaucugaga

SEQ ID NO: 221626 - RNA, 20 nt, Artificial Sequence
  Synthetic
caugguuuaugaaucugaga

SEQ ID NO: 221627 - RNA, 21 nt, Artificial Sequence
  Synthetic
ccaugguuuaugaaucugaga

SEQ ID NO: 221628 - RNA, 22 nt, Artificial Sequence
  Synthetic
cccaugguuuaugaaucugaga

SEQ ID NO: 221629 - RNA, 23 nt, Artificial Sequence
  Synthetic
ucccaugguuuaugaaucugaga

SEQ ID NO: 221630 - RNA, 24 nt, Artificial Sequence
  Synthetic
cucccaugguuuaugaaucugaga

SEQ ID NO: 221631 - RNA, 18 nt, Artificial Sequence
  Synthetic
uagguguggacucugaga

SEQ ID NO: 221632 - RNA, 19 nt, Artificial Sequence
  Synthetic
guagguguggacucugaga

SEQ ID NO: 221633 - RNA, 20 nt, Artificial Sequence
  Synthetic
uguagguguggacucugaga

SEQ ID NO: 221634 - RNA, 21 nt, Artificial Sequence
  Synthetic
auguagguguggacucugaga

SEQ ID NO: 221635 - RNA, 22 nt, Artificial Sequence
  Synthetic
cauguagguguggacucugaga

SEQ ID NO: 221636 - RNA, 23 nt, Artificial Sequence
  Synthetic
acauguagguguggacucugaga

SEQ ID NO: 221637 - RNA, 24 nt, Artificial Sequence
  Synthetic
uacauguagguguggacucugaga

SEQ ID NO: 221638 - RNA, 18 nt, Artificial Sequence
  Synthetic
ucucaugagauucugaga

SEQ ID NO: 221639 - RNA, 19 nt, Artificial Sequence
  Synthetic
aucucaugagauucugaga

SEQ ID NO: 221640 - RNA, 20 nt, Artificial Sequence
  Synthetic
aaucucaugagauucugaga

SEQ ID NO: 221641 - RNA, 21 nt, Artificial Sequence
  Synthetic
gaaucucaugagauucugaga

SEQ ID NO: 221642 - RNA, 22 nt, Artificial Sequence
  Synthetic
ugaaucucaugagauucugaga

SEQ ID NO: 221643 - RNA, 23 nt, Artificial Sequence
  Synthetic
augaaucucaugagauucugaga

SEQ ID NO: 221644 - RNA, 24 nt, Artificial Sequence
  Synthetic
gaugaaucucaugagauucugaga

SEQ ID NO: 221645 - RNA, 18 nt, Artificial Sequence
  Synthetic
ucauggcagaaagugaga

SEQ ID NO: 221646 - RNA, 19 nt, Artificial Sequence
  Synthetic
gucauggcagaaagugaga

SEQ ID NO: 221647 - RNA, 20 nt, Artificial Sequence
  Synthetic
agucauggcagaaagugaga

SEQ ID NO: 221648 - RNA, 21 nt, Artificial Sequence
  Synthetic
gagucauggcagaaagugaga

SEQ ID NO: 221649 - RNA, 22 nt, Artificial Sequence
  Synthetic
ggagucauggcagaaagugaga

SEQ ID NO: 221650 - RNA, 23 nt, Artificial Sequence
  Synthetic
uggagucauggcagaaagugaga

SEQ ID NO: 221651 - RNA, 24 nt, Artificial Sequence
  Synthetic
uuggagucauggcagaaagugaga

SEQ ID NO: 221652 - RNA, 18 nt, Artificial Sequence
  Synthetic
aauuccuaguaagugaga

SEQ ID NO: 221653 - RNA, 19 nt, Artificial Sequence
  Synthetic
gaauuccuaguaagugaga

SEQ ID NO: 221654 - RNA, 20 nt, Artificial Sequence
  Synthetic
ugaauuccuaguaagugaga

SEQ ID NO: 221655 - RNA, 21 nt, Artificial Sequence
  Synthetic
uugaauuccuaguaagugaga

SEQ ID NO: 221656 - RNA, 22 nt, Artificial Sequence
  Synthetic
uuugaauuccuaguaagugaga

SEQ ID NO: 221657 - RNA, 23 nt, Artificial Sequence
  Synthetic
uuuugaauuccuaguaagugaga

SEQ ID NO: 221658 - RNA, 24 nt, Artificial Sequence
  Synthetic
auuuugaauuccuaguaagugaga

SEQ ID NO: 221659 - RNA, 18 nt, Artificial Sequence
  Synthetic
aaucaaaggucagugaga

SEQ ID NO: 221660 - RNA, 19 nt, Artificial Sequence
  Synthetic
aaaucaaaggucagugaga

SEQ ID NO: 221661 - RNA, 20 nt, Artificial Sequence
  Synthetic
gaaaucaaaggucagugaga

SEQ ID NO: 221662 - RNA, 21 nt, Artificial Sequence
  Synthetic
agaaaucaaaggucagugaga

SEQ ID NO: 221663 - RNA, 22 nt, Artificial Sequence
  Synthetic
cagaaaucaaaggucagugaga

SEQ ID NO: 221664 - RNA, 23 nt, Artificial Sequence
  Synthetic
ccagaaaucaaaggucagugaga

SEQ ID NO: 221665 - RNA, 24 nt, Artificial Sequence
  Synthetic
cccagaaaucaaaggucagugaga

SEQ ID NO: 221666 - RNA, 18 nt, Artificial Sequence
  Synthetic
gagagagagagagugaga

SEQ ID NO: 221667 - RNA, 19 nt, Artificial Sequence
  Synthetic
agagagagagagagugaga

SEQ ID NO: 221668 - RNA, 20 nt, Artificial Sequence
  Synthetic
gagagagagagagagugaga

SEQ ID NO: 221669 - RNA, 21 nt, Artificial Sequence
  Synthetic
agagagagagagagagugaga

SEQ ID NO: 221670 - RNA, 22 nt, Artificial Sequence
  Synthetic
gagagagagagagagagugaga

SEQ ID NO: 221671 - RNA, 23 nt, Artificial Sequence
  Synthetic
agagagagagagagagagugaga

SEQ ID NO: 221672 - RNA, 24 nt, Artificial Sequence
  Synthetic
gagagagagagagagagagugaga

SEQ ID NO: 221673 - RNA, 18 nt, Artificial Sequence
  Synthetic
uuuuaucuacuagugaga

SEQ ID NO: 221674 - RNA, 19 nt, Artificial Sequence
  Synthetic
auuuuaucuacuagugaga

SEQ ID NO: 221675 - RNA, 20 nt, Artificial Sequence
  Synthetic
uauuuuaucuacuagugaga

SEQ ID NO: 221676 - RNA, 21 nt, Artificial Sequence
  Synthetic
uuauuuuaucuacuagugaga

SEQ ID NO: 221677 - RNA, 22 nt, Artificial Sequence
  Synthetic
guuauuuuaucuacuagugaga

SEQ ID NO: 221678 - RNA, 23 nt, Artificial Sequence
  Synthetic
aguuauuuuaucuacuagugaga

SEQ ID NO: 221679 - RNA, 24 nt, Artificial Sequence
  Synthetic
gaguuauuuuaucuacuagugaga

SEQ ID NO: 221680 - RNA, 18 nt, Artificial Sequence
  Synthetic
aaguagauuguagugaga

SEQ ID NO: 221681 - RNA, 19 nt, Artificial Sequence
  Synthetic
gaaguagauuguagugaga

SEQ ID NO: 221682 - RNA, 20 nt, Artificial Sequence
  Synthetic
agaaguagauuguagugaga

SEQ ID NO: 221683 - RNA, 21 nt, Artificial Sequence
  Synthetic
aagaaguagauuguagugaga

SEQ ID NO: 221684 - RNA, 22 nt, Artificial Sequence
  Synthetic
aaagaaguagauuguagugaga

SEQ ID NO: 221685 - RNA, 23 nt, Artificial Sequence
  Synthetic
gaaagaaguagauuguagugaga

SEQ ID NO: 221686 - RNA, 24 nt, Artificial Sequence
  Synthetic
ugaaagaaguagauuguagugaga

SEQ ID NO: 221687 - RNA, 18 nt, Artificial Sequence
  Synthetic
ggccccuuuaacgugaga

SEQ ID NO: 221688 - RNA, 19 nt, Artificial Sequence
  Synthetic
aggccccuuuaacgugaga

SEQ ID NO: 221689 - RNA, 20 nt, Artificial Sequence
  Synthetic
aaggccccuuuaacgugaga

SEQ ID NO: 221690 - RNA, 21 nt, Artificial Sequence
  Synthetic
gaaggccccuuuaacgugaga

SEQ ID NO: 221691 - RNA, 22 nt, Artificial Sequence
  Synthetic
agaaggccccuuuaacgugaga

SEQ ID NO: 221692 - RNA, 23 nt, Artificial Sequence
  Synthetic
gagaaggccccuuuaacgugaga

SEQ ID NO: 221693 - RNA, 24 nt, Artificial Sequence
  Synthetic
agagaaggccccuuuaacgugaga

SEQ ID NO: 221694 - RNA, 18 nt, Artificial Sequence
  Synthetic
gcuucugaggaggugaga

SEQ ID NO: 221695 - RNA, 19 nt, Artificial Sequence
  Synthetic
ugcuucugaggaggugaga

SEQ ID NO: 221696 - RNA, 20 nt, Artificial Sequence
  Synthetic
uugcuucugaggaggugaga

SEQ ID NO: 221697 - RNA, 21 nt, Artificial Sequence
  Synthetic
auugcuucugaggaggugaga

SEQ ID NO: 221698 - RNA, 22 nt, Artificial Sequence
  Synthetic
gauugcuucugaggaggugaga

SEQ ID NO: 221699 - RNA, 23 nt, Artificial Sequence
  Synthetic
agauugcuucugaggaggugaga

SEQ ID NO: 221700 - RNA, 24 nt, Artificial Sequence
  Synthetic
gagauugcuucugaggaggugaga

SEQ ID NO: 221701 - RNA, 18 nt, Artificial Sequence
  Synthetic
aaagaauucagggugaga

SEQ ID NO: 221702 - RNA, 19 nt, Artificial Sequence
  Synthetic
aaaagaauucagggugaga

SEQ ID NO: 221703 - RNA, 20 nt, Artificial Sequence
  Synthetic
gaaaagaauucagggugaga

SEQ ID NO: 221704 - RNA, 21 nt, Artificial Sequence
  Synthetic
ggaaaagaauucagggugaga

SEQ ID NO: 221705 - RNA, 22 nt, Artificial Sequence
  Synthetic
aggaaaagaauucagggugaga

SEQ ID NO: 221706 - RNA, 23 nt, Artificial Sequence
  Synthetic
aaggaaaagaauucagggugaga

SEQ ID NO: 221707 - RNA, 24 nt, Artificial Sequence
  Synthetic
aaaggaaaagaauucagggugaga

SEQ ID NO: 221708 - RNA, 18 nt, Artificial Sequence
  Synthetic
aguggggugggggugaga

SEQ ID NO: 221709 - RNA, 19 nt, Artificial Sequence
  Synthetic
caguggggugggggugaga

SEQ ID NO: 221710 - RNA, 20 nt, Artificial Sequence
  Synthetic
ucaguggggugggggugaga

SEQ ID NO: 221711 - RNA, 21 nt, Artificial Sequence
  Synthetic
aucaguggggugggggugaga

SEQ ID NO: 221712 - RNA, 22 nt, Artificial Sequence
  Synthetic
aaucaguggggugggggugaga

SEQ ID NO: 221713 - RNA, 23 nt, Artificial Sequence
  Synthetic
gaaucaguggggugggggugaga

SEQ ID NO: 221714 - RNA, 24 nt, Artificial Sequence
  Synthetic
agaaucaguggggugggggugaga

SEQ ID NO: 221715 - RNA, 18 nt, Artificial Sequence
  Synthetic
guagguuuaugggugaga

SEQ ID NO: 221716 - RNA, 19 nt, Artificial Sequence
  Synthetic
uguagguuuaugggugaga

SEQ ID NO: 221717 - RNA, 20 nt, Artificial Sequence
  Synthetic
guguagguuuaugggugaga

SEQ ID NO: 221718 - RNA, 21 nt, Artificial Sequence
  Synthetic
aguguagguuuaugggugaga

SEQ ID NO: 221719 - RNA, 22 nt, Artificial Sequence
  Synthetic
gaguguagguuuaugggugaga

SEQ ID NO: 221720 - RNA, 23 nt, Artificial Sequence
  Synthetic
agaguguagguuuaugggugaga

SEQ ID NO: 221721 - RNA, 24 nt, Artificial Sequence
  Synthetic
cagaguguagguuuaugggugaga

SEQ ID NO: 221722 - RNA, 18 nt, Artificial Sequence
  Synthetic
agugaugacugggugaga

SEQ ID NO: 221723 - RNA, 19 nt, Artificial Sequence
  Synthetic
aagugaugacugggugaga

SEQ ID NO: 221724 - RNA, 20 nt, Artificial Sequence
  Synthetic
gaagugaugacugggugaga

SEQ ID NO: 221725 - RNA, 21 nt, Artificial Sequence
  Synthetic
ugaagugaugacugggugaga

SEQ ID NO: 221726 - RNA, 22 nt, Artificial Sequence
  Synthetic
augaagugaugacugggugaga

SEQ ID NO: 221727 - RNA, 23 nt, Artificial Sequence
  Synthetic
uaugaagugaugacugggugaga

SEQ ID NO: 221728 - RNA, 24 nt, Artificial Sequence
  Synthetic
cuaugaagugaugacugggugaga

SEQ ID NO: 221729 - RNA, 18 nt, Artificial Sequence
  Synthetic
guaugggguauggugaga

SEQ ID NO: 221730 - RNA, 19 nt, Artificial Sequence
  Synthetic
uguaugggguauggugaga

SEQ ID NO: 221731 - RNA, 20 nt, Artificial Sequence
  Synthetic
guguaugggguauggugaga

SEQ ID NO: 221732 - RNA, 21 nt, Artificial Sequence
  Synthetic
uguguaugggguauggugaga

SEQ ID NO: 221733 - RNA, 22 nt, Artificial Sequence
  Synthetic
uuguguaugggguauggugaga

SEQ ID NO: 221734 - RNA, 23 nt, Artificial Sequence
  Synthetic
cuuguguaugggguauggugaga

SEQ ID NO: 221735 - RNA, 24 nt, Artificial Sequence
  Synthetic
ccuuguguaugggguauggugaga

SEQ ID NO: 221736 - RNA, 18 nt, Artificial Sequence
  Synthetic
ugaauaggaguggugaga

SEQ ID NO: 221737 - RNA, 19 nt, Artificial Sequence
  Synthetic
uugaauaggaguggugaga

SEQ ID NO: 221738 - RNA, 20 nt, Artificial Sequence
  Synthetic
guugaauaggaguggugaga

SEQ ID NO: 221739 - RNA, 21 nt, Artificial Sequence
  Synthetic
uguugaauaggaguggugaga

SEQ ID NO: 221740 - RNA, 22 nt, Artificial Sequence
  Synthetic
auguugaauaggaguggugaga

SEQ ID NO: 221741 - RNA, 23 nt, Artificial Sequence
  Synthetic
uauguugaauaggaguggugaga

SEQ ID NO: 221742 - RNA, 24 nt, Artificial Sequence
  Synthetic
cuauguugaauaggaguggugaga

SEQ ID NO: 221743 - RNA, 18 nt, Artificial Sequence
  Synthetic
aagaaugaaaaugugaga

SEQ ID NO: 221744 - RNA, 19 nt, Artificial Sequence
  Synthetic
aaagaaugaaaaugugaga

SEQ ID NO: 221745 - RNA, 20 nt, Artificial Sequence
  Synthetic
aaaagaaugaaaaugugaga

SEQ ID NO: 221746 - RNA, 21 nt, Artificial Sequence
  Synthetic
aaaaagaaugaaaaugugaga

SEQ ID NO: 221747 - RNA, 22 nt, Artificial Sequence
  Synthetic
aaaaaagaaugaaaaugugaga

SEQ ID NO: 221748 - RNA, 23 nt, Artificial Sequence
  Synthetic
uaaaaaagaaugaaaaugugaga

SEQ ID NO: 221749 - RNA, 24 nt, Artificial Sequence
  Synthetic
uuaaaaaagaaugaaaaugugaga

SEQ ID NO: 221750 - RNA, 18 nt, Artificial Sequence
  Synthetic
guguguguguaugugaga

SEQ ID NO: 221751 - RNA, 19 nt, Artificial Sequence
  Synthetic
uguguguguguaugugaga

SEQ ID NO: 221752 - RNA, 20 nt, Artificial Sequence
  Synthetic
guguguguguguaugugaga

SEQ ID NO: 221753 - RNA, 21 nt, Artificial Sequence
  Synthetic
uguguguguguguaugugaga

SEQ ID NO: 221754 - RNA, 22 nt, Artificial Sequence
  Synthetic
guguguguguguguaugugaga

SEQ ID NO: 221755 - RNA, 23 nt, Artificial Sequence
  Synthetic
uguguguguguguguaugugaga

SEQ ID NO: 221756 - RNA, 24 nt, Artificial Sequence
  Synthetic
guguguguguguguguaugugaga

SEQ ID NO: 221757 - RNA, 18 nt, Artificial Sequence
  Synthetic
aaacaaaugugugugaga

SEQ ID NO: 221758 - RNA, 19 nt, Artificial Sequence
  Synthetic
uaaacaaaugugugugaga

SEQ ID NO: 221759 - RNA, 20 nt, Artificial Sequence
  Synthetic
uuaaacaaaugugugugaga

SEQ ID NO: 221760 - RNA, 21 nt, Artificial Sequence
  Synthetic
auuaaacaaaugugugugaga

SEQ ID NO: 221761 - RNA, 22 nt, Artificial Sequence
  Synthetic
cauuaaacaaaugugugugaga

SEQ ID NO: 221762 - RNA, 23 nt, Artificial Sequence
  Synthetic
ucauuaaacaaaugugugugaga

SEQ ID NO: 221763 - RNA, 24 nt, Artificial Sequence
  Synthetic
aucauuaaacaaaugugugugaga

SEQ ID NO: 221764 - RNA, 18 nt, Artificial Sequence
  Synthetic
gugugugugugugugaga

SEQ ID NO: 221765 - RNA, 19 nt, Artificial Sequence
  Synthetic
ugugugugugugugugaga

SEQ ID NO: 221766 - RNA, 20 nt, Artificial Sequence
  Synthetic
gugugugugugugugugaga

SEQ ID NO: 221767 - RNA, 21 nt, Artificial Sequence
  Synthetic
ugugugugugugugugugaga

SEQ ID NO: 221768 - RNA, 22 nt, Artificial Sequence
  Synthetic
gugugugugugugugugugaga

SEQ ID NO: 221769 - RNA, 23 nt, Artificial Sequence
  Synthetic
ugugugugugugugugugugaga

SEQ ID NO: 221770 - RNA, 24 nt, Artificial Sequence
  Synthetic
gugugugugugugugugugugaga

SEQ ID NO: 221771 - RNA, 18 nt, Artificial Sequence
  Synthetic
auuucauuuuuugugaga

SEQ ID NO: 221772 - RNA, 19 nt, Artificial Sequence
  Synthetic
uauuucauuuuuugugaga

SEQ ID NO: 221773 - RNA, 20 nt, Artificial Sequence
  Synthetic
uuauuucauuuuuugugaga

SEQ ID NO: 221774 - RNA, 21 nt, Artificial Sequence
  Synthetic
uuuauuucauuuuuugugaga

SEQ ID NO: 221775 - RNA, 22 nt, Artificial Sequence
  Synthetic
cuuuauuucauuuuuugugaga

SEQ ID NO: 221776 - RNA, 23 nt, Artificial Sequence
  Synthetic
acuuuauuucauuuuuugugaga

SEQ ID NO: 221777 - RNA, 24 nt, Artificial Sequence
  Synthetic
aacuuuauuucauuuuuugugaga

SEQ ID NO: 221778 - RNA, 18 nt, Artificial Sequence
  Synthetic
uuguuuggcaaauugaga

SEQ ID NO: 221779 - RNA, 19 nt, Artificial Sequence
  Synthetic
cuuguuuggcaaauugaga

SEQ ID NO: 221780 - RNA, 20 nt, Artificial Sequence
  Synthetic
acuuguuuggcaaauugaga

SEQ ID NO: 221781 - RNA, 21 nt, Artificial Sequence
  Synthetic
cacuuguuuggcaaauugaga

SEQ ID NO: 221782 - RNA, 22 nt, Artificial Sequence
  Synthetic
ucacuuguuuggcaaauugaga

SEQ ID NO: 221783 - RNA, 23 nt, Artificial Sequence
  Synthetic
aucacuuguuuggcaaauugaga

SEQ ID NO: 221784 - RNA, 24 nt, Artificial Sequence
  Synthetic
uaucacuuguuuggcaaauugaga

SEQ ID NO: 221785 - RNA, 18 nt, Artificial Sequence
  Synthetic
ccucgcugaccauugaga

SEQ ID NO: 221786 - RNA, 19 nt, Artificial Sequence
  Synthetic
gccucgcugaccauugaga

SEQ ID NO: 221787 - RNA, 20 nt, Artificial Sequence
  Synthetic
agccucgcugaccauugaga

SEQ ID NO: 221788 - RNA, 21 nt, Artificial Sequence
  Synthetic
aagccucgcugaccauugaga

SEQ ID NO: 221789 - RNA, 22 nt, Artificial Sequence
  Synthetic
caagccucgcugaccauugaga

SEQ ID NO: 221790 - RNA, 23 nt, Artificial Sequence
  Synthetic
ccaagccucgcugaccauugaga

SEQ ID NO: 221791 - RNA, 24 nt, Artificial Sequence
  Synthetic
cccaagccucgcugaccauugaga

SEQ ID NO: 221792 - RNA, 18 nt, Artificial Sequence
  Synthetic
cauguaauuucauugaga

SEQ ID NO: 221793 - RNA, 19 nt, Artificial Sequence
  Synthetic
gcauguaauuucauugaga

SEQ ID NO: 221794 - RNA, 20 nt, Artificial Sequence
  Synthetic
ugcauguaauuucauugaga

SEQ ID NO: 221795 - RNA, 21 nt, Artificial Sequence
  Synthetic
cugcauguaauuucauugaga

SEQ ID NO: 221796 - RNA, 22 nt, Artificial Sequence
  Synthetic
gcugcauguaauuucauugaga

SEQ ID NO: 221797 - RNA, 23 nt, Artificial Sequence
  Synthetic
ugcugcauguaauuucauugaga

SEQ ID NO: 221798 - RNA, 24 nt, Artificial Sequence
  Synthetic
uugcugcauguaauuucauugaga

SEQ ID NO: 221799 - RNA, 18 nt, Artificial Sequence
  Synthetic
gguaaaugcagauugaga

SEQ ID NO: 221800 - RNA, 19 nt, Artificial Sequence
  Synthetic
agguaaaugcagauugaga

SEQ ID NO: 221801 - RNA, 20 nt, Artificial Sequence
  Synthetic
gagguaaaugcagauugaga

SEQ ID NO: 221802 - RNA, 21 nt, Artificial Sequence
  Synthetic
ugagguaaaugcagauugaga

SEQ ID NO: 221803 - RNA, 22 nt, Artificial Sequence
  Synthetic
cugagguaaaugcagauugaga

SEQ ID NO: 221804 - RNA, 23 nt, Artificial Sequence
  Synthetic
ucugagguaaaugcagauugaga

SEQ ID NO: 221805 - RNA, 24 nt, Artificial Sequence
  Synthetic
aucugagguaaaugcagauugaga

SEQ ID NO: 221806 - RNA, 18 nt, Artificial Sequence
  Synthetic
gagagagagagauugaga

SEQ ID NO: 221807 - RNA, 19 nt, Artificial Sequence
  Synthetic
agagagagagagauugaga

SEQ ID NO: 221808 - RNA, 20 nt, Artificial Sequence
  Synthetic
gagagagagagagauugaga

SEQ ID NO: 221809 - RNA, 21 nt, Artificial Sequence
  Synthetic
agagagagagagagauugaga

SEQ ID NO: 221810 - RNA, 22 nt, Artificial Sequence
  Synthetic
gagagagagagagagauugaga

SEQ ID NO: 221811 - RNA, 23 nt, Artificial Sequence
  Synthetic
agagagagagagagagauugaga

SEQ ID NO: 221812 - RNA, 24 nt, Artificial Sequence
  Synthetic
gagagagagagagagagauugaga

SEQ ID NO: 221813 - RNA, 18 nt, Artificial Sequence
  Synthetic
cuagaguggguauugaga

SEQ ID NO: 221814 - RNA, 19 nt, Artificial Sequence
  Synthetic
gcuagaguggguauugaga

SEQ ID NO: 221815 - RNA, 20 nt, Artificial Sequence
  Synthetic
agcuagaguggguauugaga

SEQ ID NO: 221816 - RNA, 21 nt, Artificial Sequence
  Synthetic
aagcuagaguggguauugaga

SEQ ID NO: 221817 - RNA, 22 nt, Artificial Sequence
  Synthetic
aaagcuagaguggguauugaga

SEQ ID NO: 221818 - RNA, 23 nt, Artificial Sequence
  Synthetic
aaaagcuagaguggguauugaga

SEQ ID NO: 221819 - RNA, 24 nt, Artificial Sequence
  Synthetic
uaaaagcuagaguggguauugaga

SEQ ID NO: 221820 - RNA, 18 nt, Artificial Sequence
  Synthetic
aaucucauucccuugaga

SEQ ID NO: 221821 - RNA, 19 nt, Artificial Sequence
  Synthetic
uaaucucauucccuugaga

SEQ ID NO: 221822 - RNA, 20 nt, Artificial Sequence
  Synthetic
auaaucucauucccuugaga

SEQ ID NO: 221823 - RNA, 21 nt, Artificial Sequence
  Synthetic
uauaaucucauucccuugaga

SEQ ID NO: 221824 - RNA, 22 nt, Artificial Sequence
  Synthetic
cuauaaucucauucccuugaga

SEQ ID NO: 221825 - RNA, 23 nt, Artificial Sequence
  Synthetic
acuauaaucucauucccuugaga

SEQ ID NO: 221826 - RNA, 24 nt, Artificial Sequence
  Synthetic
uacuauaaucucauucccuugaga

SEQ ID NO: 221827 - RNA, 18 nt, Artificial Sequence
  Synthetic
gaccagaaaggcuugaga

SEQ ID NO: 221828 - RNA, 19 nt, Artificial Sequence
  Synthetic
ggaccagaaaggcuugaga

SEQ ID NO: 221829 - RNA, 20 nt, Artificial Sequence
  Synthetic
aggaccagaaaggcuugaga

SEQ ID NO: 221830 - RNA, 21 nt, Artificial Sequence
  Synthetic
uaggaccagaaaggcuugaga

SEQ ID NO: 221831 - RNA, 22 nt, Artificial Sequence
  Synthetic
auaggaccagaaaggcuugaga

SEQ ID NO: 221832 - RNA, 23 nt, Artificial Sequence
  Synthetic
cauaggaccagaaaggcuugaga

SEQ ID NO: 221833 - RNA, 24 nt, Artificial Sequence
  Synthetic
ccauaggaccagaaaggcuugaga

SEQ ID NO: 221834 - RNA, 18 nt, Artificial Sequence
  Synthetic
gguauguguggcuugaga

SEQ ID NO: 221835 - RNA, 19 nt, Artificial Sequence
  Synthetic
ugguauguguggcuugaga

SEQ ID NO: 221836 - RNA, 20 nt, Artificial Sequence
  Synthetic
gugguauguguggcuugaga

SEQ ID NO: 221837 - RNA, 21 nt, Artificial Sequence
  Synthetic
agugguauguguggcuugaga

SEQ ID NO: 221838 - RNA, 22 nt, Artificial Sequence
  Synthetic
gagugguauguguggcuugaga

SEQ ID NO: 221839 - RNA, 23 nt, Artificial Sequence
  Synthetic
agagugguauguguggcuugaga

SEQ ID NO: 221840 - RNA, 24 nt, Artificial Sequence
  Synthetic
gagagugguauguguggcuugaga

SEQ ID NO: 221841 - RNA, 18 nt, Artificial Sequence
  Synthetic
uauauuaccaaguugaga

SEQ ID NO: 221842 - RNA, 19 nt, Artificial Sequence
  Synthetic
auauauuaccaaguugaga

SEQ ID NO: 221843 - RNA, 20 nt, Artificial Sequence
  Synthetic
aauauauuaccaaguugaga

SEQ ID NO: 221844 - RNA, 21 nt, Artificial Sequence
  Synthetic
aaauauauuaccaaguugaga

SEQ ID NO: 221845 - RNA, 22 nt, Artificial Sequence
  Synthetic
uaaauauauuaccaaguugaga

SEQ ID NO: 221846 - RNA, 23 nt, Artificial Sequence
  Synthetic
auaaauauauuaccaaguugaga

SEQ ID NO: 221847 - RNA, 24 nt, Artificial Sequence
  Synthetic
aauaaauauauuaccaaguugaga

SEQ ID NO: 221848 - RNA, 18 nt, Artificial Sequence
  Synthetic
guuccucccucguugaga

SEQ ID NO: 221849 - RNA, 19 nt, Artificial Sequence
  Synthetic
uguuccucccucguugaga

SEQ ID NO: 221850 - RNA, 20 nt, Artificial Sequence
  Synthetic
cuguuccucccucguugaga

SEQ ID NO: 221851 - RNA, 21 nt, Artificial Sequence
  Synthetic
acuguuccucccucguugaga

SEQ ID NO: 221852 - RNA, 22 nt, Artificial Sequence
  Synthetic
uacuguuccucccucguugaga

SEQ ID NO: 221853 - RNA, 23 nt, Artificial Sequence
  Synthetic
guacuguuccucccucguugaga

SEQ ID NO: 221854 - RNA, 24 nt, Artificial Sequence
  Synthetic
uguacuguuccucccucguugaga

SEQ ID NO: 221855 - RNA, 18 nt, Artificial Sequence
  Synthetic
auuuaauucaauuugaga

SEQ ID NO: 221856 - RNA, 19 nt, Artificial Sequence
  Synthetic
aauuuaauucaauuugaga

SEQ ID NO: 221857 - RNA, 20 nt, Artificial Sequence
  Synthetic
uaauuuaauucaauuugaga

SEQ ID NO: 221858 - RNA, 21 nt, Artificial Sequence
  Synthetic
guaauuuaauucaauuugaga

SEQ ID NO: 221859 - RNA, 22 nt, Artificial Sequence
  Synthetic
aguaauuuaauucaauuugaga

SEQ ID NO: 221860 - RNA, 23 nt, Artificial Sequence
  Synthetic
gaguaauuuaauucaauuugaga

SEQ ID NO: 221861 - RNA, 24 nt, Artificial Sequence
  Synthetic
agaguaauuuaauucaauuugaga

SEQ ID NO: 221862 - RNA, 18 nt, Artificial Sequence
  Synthetic
aaggaaaaugauuugaga

SEQ ID NO: 221863 - RNA, 19 nt, Artificial Sequence
  Synthetic
uaaggaaaaugauuugaga

SEQ ID NO: 221864 - RNA, 20 nt, Artificial Sequence
  Synthetic
auaaggaaaaugauuugaga

SEQ ID NO: 221865 - RNA, 21 nt, Artificial Sequence
  Synthetic
cauaaggaaaaugauuugaga

SEQ ID NO: 221866 - RNA, 22 nt, Artificial Sequence
  Synthetic
gcauaaggaaaaugauuugaga

SEQ ID NO: 221867 - RNA, 23 nt, Artificial Sequence
  Synthetic
agcauaaggaaaaugauuugaga

SEQ ID NO: 221868 - RNA, 24 nt, Artificial Sequence
  Synthetic
cagcauaaggaaaaugauuugaga

SEQ ID NO: 221869 - RNA, 18 nt, Artificial Sequence
  Synthetic
aagcaggugacuuugaga

SEQ ID NO: 221870 - RNA, 19 nt, Artificial Sequence
  Synthetic
uaagcaggugacuuugaga

SEQ ID NO: 221871 - RNA, 20 nt, Artificial Sequence
  Synthetic
cuaagcaggugacuuugaga

SEQ ID NO: 221872 - RNA, 21 nt, Artificial Sequence
  Synthetic
gcuaagcaggugacuuugaga

SEQ ID NO: 221873 - RNA, 22 nt, Artificial Sequence
  Synthetic
ugcuaagcaggugacuuugaga

SEQ ID NO: 221874 - RNA, 23 nt, Artificial Sequence
  Synthetic
uugcuaagcaggugacuuugaga

SEQ ID NO: 221875 - RNA, 24 nt, Artificial Sequence
  Synthetic
guugcuaagcaggugacuuugaga

SEQ ID NO: 221876 - RNA, 18 nt, Artificial Sequence
  Synthetic
uggaagggugguuugaga

SEQ ID NO: 221877 - RNA, 19 nt, Artificial Sequence
  Synthetic
guggaagggugguuugaga

SEQ ID NO: 221878 - RNA, 20 nt, Artificial Sequence
  Synthetic
gguggaagggugguuugaga

SEQ ID NO: 221879 - RNA, 21 nt, Artificial Sequence
  Synthetic
agguggaagggugguuugaga

SEQ ID NO: 221880 - RNA, 22 nt, Artificial Sequence
  Synthetic
uagguggaagggugguuugaga

SEQ ID NO: 221881 - RNA, 23 nt, Artificial Sequence
  Synthetic
guagguggaagggugguuugaga

SEQ ID NO: 221882 - RNA, 24 nt, Artificial Sequence
  Synthetic
uguagguggaagggugguuugaga

SEQ ID NO: 221883 - RNA, 18 nt, Artificial Sequence
  Synthetic
acuucuucaauuuugaga

SEQ ID NO: 221884 - RNA, 19 nt, Artificial Sequence
  Synthetic
cacuucuucaauuuugaga

SEQ ID NO: 221885 - RNA, 20 nt, Artificial Sequence
  Synthetic
acacuucuucaauuuugaga

SEQ ID NO: 221886 - RNA, 21 nt, Artificial Sequence
  Synthetic
aacacuucuucaauuuugaga

SEQ ID NO: 221887 - RNA, 22 nt, Artificial Sequence
  Synthetic
aaacacuucuucaauuuugaga

SEQ ID NO: 221888 - RNA, 23 nt, Artificial Sequence
  Synthetic
gaaacacuucuucaauuuugaga

SEQ ID NO: 221889 - RNA, 24 nt, Artificial Sequence
  Synthetic
ugaaacacuucuucaauuuugaga

SEQ ID NO: 221890 - RNA, 18 nt, Artificial Sequence
  Synthetic
ccuaucaguauuuugaga

SEQ ID NO: 221891 - RNA, 19 nt, Artificial Sequence
  Synthetic
uccuaucaguauuuugaga

SEQ ID NO: 221892 - RNA, 20 nt, Artificial Sequence
  Synthetic
auccuaucaguauuuugaga

SEQ ID NO: 221893 - RNA, 21 nt, Artificial Sequence
  Synthetic
cauccuaucaguauuuugaga

SEQ ID NO: 221894 - RNA, 22 nt, Artificial Sequence
  Synthetic
ucauccuaucaguauuuugaga

SEQ ID NO: 221895 - RNA, 23 nt, Artificial Sequence
  Synthetic
aucauccuaucaguauuuugaga

SEQ ID NO: 221896 - RNA, 24 nt, Artificial Sequence
  Synthetic
caucauccuaucaguauuuugaga

SEQ ID NO: 221897 - RNA, 18 nt, Artificial Sequence
  Synthetic
aauaaaguucuuuugaga

SEQ ID NO: 221898 - RNA, 19 nt, Artificial Sequence
  Synthetic
caauaaaguucuuuugaga

SEQ ID NO: 221899 - RNA, 20 nt, Artificial Sequence
  Synthetic
acaauaaaguucuuuugaga

SEQ ID NO: 221900 - RNA, 21 nt, Artificial Sequence
  Synthetic
aacaauaaaguucuuuugaga

SEQ ID NO: 221901 - RNA, 22 nt, Artificial Sequence
  Synthetic
caacaauaaaguucuuuugaga

SEQ ID NO: 221902 - RNA, 23 nt, Artificial Sequence
  Synthetic
acaacaauaaaguucuuuugaga

SEQ ID NO: 221903 - RNA, 24 nt, Artificial Sequence
  Synthetic
uacaacaauaaaguucuuuugaga

SEQ ID NO: 221904 - RNA, 18 nt, Artificial Sequence
  Synthetic
uggaguucaaaaaauaga

SEQ ID NO: 221905 - RNA, 19 nt, Artificial Sequence
  Synthetic
cuggaguucaaaaaauaga

SEQ ID NO: 221906 - RNA, 20 nt, Artificial Sequence
  Synthetic
ucuggaguucaaaaaauaga

SEQ ID NO: 221907 - RNA, 21 nt, Artificial Sequence
  Synthetic
cucuggaguucaaaaaauaga

SEQ ID NO: 221908 - RNA, 22 nt, Artificial Sequence
  Synthetic
ucucuggaguucaaaaaauaga

SEQ ID NO: 221909 - RNA, 23 nt, Artificial Sequence
  Synthetic
cucucuggaguucaaaaaauaga

SEQ ID NO: 221910 - RNA, 24 nt, Artificial Sequence
  Synthetic
ucucucuggaguucaaaaaauaga

SEQ ID NO: 221911 - RNA, 18 nt, Artificial Sequence
  Synthetic
agaauuuagaaaaauaga

SEQ ID NO: 221912 - RNA, 19 nt, Artificial Sequence
  Synthetic
aagaauuuagaaaaauaga

SEQ ID NO: 221913 - RNA, 20 nt, Artificial Sequence
  Synthetic
gaagaauuuagaaaaauaga

SEQ ID NO: 221914 - RNA, 21 nt, Artificial Sequence
  Synthetic
ugaagaauuuagaaaaauaga

SEQ ID NO: 221915 - RNA, 22 nt, Artificial Sequence
  Synthetic
uugaagaauuuagaaaaauaga

SEQ ID NO: 221916 - RNA, 23 nt, Artificial Sequence
  Synthetic
auugaagaauuuagaaaaauaga

SEQ ID NO: 221917 - RNA, 24 nt, Artificial Sequence
  Synthetic
cauugaagaauuuagaaaaauaga

SEQ ID NO: 221918 - RNA, 18 nt, Artificial Sequence
  Synthetic
aaaaagugugaaaauaga

SEQ ID NO: 221919 - RNA, 19 nt, Artificial Sequence
  Synthetic
aaaaaagugugaaaauaga

SEQ ID NO: 221920 - RNA, 20 nt, Artificial Sequence
  Synthetic
gaaaaaagugugaaaauaga

SEQ ID NO: 221921 - RNA, 21 nt, Artificial Sequence
  Synthetic
ggaaaaaagugugaaaauaga

SEQ ID NO: 221922 - RNA, 22 nt, Artificial Sequence
  Synthetic
aggaaaaaagugugaaaauaga

SEQ ID NO: 221923 - RNA, 23 nt, Artificial Sequence
  Synthetic
uaggaaaaaagugugaaaauaga

SEQ ID NO: 221924 - RNA, 24 nt, Artificial Sequence
  Synthetic
uuaggaaaaaagugugaaaauaga

SEQ ID NO: 221925 - RNA, 18 nt, Artificial Sequence
  Synthetic
gucuaucuaacaaauaga

SEQ ID NO: 221926 - RNA, 19 nt, Artificial Sequence
  Synthetic
ugucuaucuaacaaauaga

SEQ ID NO: 221927 - RNA, 20 nt, Artificial Sequence
  Synthetic
augucuaucuaacaaauaga

SEQ ID NO: 221928 - RNA, 21 nt, Artificial Sequence
  Synthetic
caugucuaucuaacaaauaga

SEQ ID NO: 221929 - RNA, 22 nt, Artificial Sequence
  Synthetic
ccaugucuaucuaacaaauaga

SEQ ID NO: 221930 - RNA, 23 nt, Artificial Sequence
  Synthetic
accaugucuaucuaacaaauaga

SEQ ID NO: 221931 - RNA, 24 nt, Artificial Sequence
  Synthetic
caccaugucuaucuaacaaauaga

SEQ ID NO: 221932 - RNA, 18 nt, Artificial Sequence
  Synthetic
gcugugaccccaaauaga

SEQ ID NO: 221933 - RNA, 19 nt, Artificial Sequence
  Synthetic
ggcugugaccccaaauaga

SEQ ID NO: 221934 - RNA, 20 nt, Artificial Sequence
  Synthetic
aggcugugaccccaaauaga

SEQ ID NO: 221935 - RNA, 21 nt, Artificial Sequence
  Synthetic
aaggcugugaccccaaauaga

SEQ ID NO: 221936 - RNA, 22 nt, Artificial Sequence
  Synthetic
caaggcugugaccccaaauaga

SEQ ID NO: 221937 - RNA, 23 nt, Artificial Sequence
  Synthetic
ucaaggcugugaccccaaauaga

SEQ ID NO: 221938 - RNA, 24 nt, Artificial Sequence
  Synthetic
uucaaggcugugaccccaaauaga

SEQ ID NO: 221939 - RNA, 18 nt, Artificial Sequence
  Synthetic
gaaugccaaggaaauaga

SEQ ID NO: 221940 - RNA, 19 nt, Artificial Sequence
  Synthetic
agaaugccaaggaaauaga

SEQ ID NO: 221941 - RNA, 20 nt, Artificial Sequence
  Synthetic
aagaaugccaaggaaauaga

SEQ ID NO: 221942 - RNA, 21 nt, Artificial Sequence
  Synthetic
gaagaaugccaaggaaauaga

SEQ ID NO: 221943 - RNA, 22 nt, Artificial Sequence
  Synthetic
ugaagaaugccaaggaaauaga

SEQ ID NO: 221944 - RNA, 23 nt, Artificial Sequence
  Synthetic
gugaagaaugccaaggaaauaga

SEQ ID NO: 221945 - RNA, 24 nt, Artificial Sequence
  Synthetic
ugugaagaaugccaaggaaauaga

SEQ ID NO: 221946 - RNA, 18 nt, Artificial Sequence
  Synthetic
gacauagcaauaaauaga

SEQ ID NO: 221947 - RNA, 19 nt, Artificial Sequence
  Synthetic
agacauagcaauaaauaga

SEQ ID NO: 221948 - RNA, 20 nt, Artificial Sequence
  Synthetic
gagacauagcaauaaauaga

SEQ ID NO: 221949 - RNA, 21 nt, Artificial Sequence
  Synthetic
agagacauagcaauaaauaga

SEQ ID NO: 221950 - RNA, 22 nt, Artificial Sequence
  Synthetic
aagagacauagcaauaaauaga

SEQ ID NO: 221951 - RNA, 23 nt, Artificial Sequence
  Synthetic
uaagagacauagcaauaaauaga

SEQ ID NO: 221952 - RNA, 24 nt, Artificial Sequence
  Synthetic
uuaagagacauagcaauaaauaga

SEQ ID NO: 221953 - RNA, 18 nt, Artificial Sequence
  Synthetic
uaaauauuccuaaauaga

SEQ ID NO: 221954 - RNA, 19 nt, Artificial Sequence
  Synthetic
uuaaauauuccuaaauaga

SEQ ID NO: 221955 - RNA, 20 nt, Artificial Sequence
  Synthetic
guuaaauauuccuaaauaga

SEQ ID NO: 221956 - RNA, 21 nt, Artificial Sequence
  Synthetic
uguuaaauauuccuaaauaga

SEQ ID NO: 221957 - RNA, 22 nt, Artificial Sequence
  Synthetic
auguuaaauauuccuaaauaga

SEQ ID NO: 221958 - RNA, 23 nt, Artificial Sequence
  Synthetic
uauguuaaauauuccuaaauaga

SEQ ID NO: 221959 - RNA, 24 nt, Artificial Sequence
  Synthetic
auauguuaaauauuccuaaauaga

SEQ ID NO: 221960 - RNA, 18 nt, Artificial Sequence
  Synthetic
cccaaauucaacaauaga

SEQ ID NO: 221961 - RNA, 19 nt, Artificial Sequence
  Synthetic
ccccaaauucaacaauaga

SEQ ID NO: 221962 - RNA, 20 nt, Artificial Sequence
  Synthetic
accccaaauucaacaauaga

SEQ ID NO: 221963 - RNA, 21 nt, Artificial Sequence
  Synthetic
uaccccaaauucaacaauaga

SEQ ID NO: 221964 - RNA, 22 nt, Artificial Sequence
  Synthetic
cuaccccaaauucaacaauaga

SEQ ID NO: 221965 - RNA, 23 nt, Artificial Sequence
  Synthetic
ucuaccccaaauucaacaauaga

SEQ ID NO: 221966 - RNA, 24 nt, Artificial Sequence
  Synthetic
uucuaccccaaauucaacaauaga

SEQ ID NO: 221967 - RNA, 18 nt, Artificial Sequence
  Synthetic
gggugcgaucacaauaga

SEQ ID NO: 221968 - RNA, 19 nt, Artificial Sequence
  Synthetic
agggugcgaucacaauaga

SEQ ID NO: 221969 - RNA, 20 nt, Artificial Sequence
  Synthetic
uagggugcgaucacaauaga

SEQ ID NO: 221970 - RNA, 21 nt, Artificial Sequence
  Synthetic
auagggugcgaucacaauaga

SEQ ID NO: 221971 - RNA, 22 nt, Artificial Sequence
  Synthetic
gauagggugcgaucacaauaga

SEQ ID NO: 221972 - RNA, 23 nt, Artificial Sequence
  Synthetic
ggauagggugcgaucacaauaga

SEQ ID NO: 221973 - RNA, 24 nt, Artificial Sequence
  Synthetic
aggauagggugcgaucacaauaga

SEQ ID NO: 221974 - RNA, 18 nt, Artificial Sequence
  Synthetic
aggagaauagacaauaga

SEQ ID NO: 221975 - RNA, 19 nt, Artificial Sequence
  Synthetic
gaggagaauagacaauaga

SEQ ID NO: 221976 - RNA, 20 nt, Artificial Sequence
  Synthetic
ggaggagaauagacaauaga

SEQ ID NO: 221977 - RNA, 21 nt, Artificial Sequence
  Synthetic
aggaggagaauagacaauaga

SEQ ID NO: 221978 - RNA, 22 nt, Artificial Sequence
  Synthetic
gaggaggagaauagacaauaga

SEQ ID NO: 221979 - RNA, 23 nt, Artificial Sequence
  Synthetic
ggaggaggagaauagacaauaga

SEQ ID NO: 221980 - RNA, 24 nt, Artificial Sequence
  Synthetic
aggaggaggagaauagacaauaga

SEQ ID NO: 221981 - RNA, 18 nt, Artificial Sequence
  Synthetic
guuugcagugccaauaga

SEQ ID NO: 221982 - RNA, 19 nt, Artificial Sequence
  Synthetic
gguuugcagugccaauaga

SEQ ID NO: 221983 - RNA, 20 nt, Artificial Sequence
  Synthetic
agguuugcagugccaauaga

SEQ ID NO: 221984 - RNA, 21 nt, Artificial Sequence
  Synthetic
gagguuugcagugccaauaga

SEQ ID NO: 221985 - RNA, 22 nt, Artificial Sequence
  Synthetic
agagguuugcagugccaauaga

SEQ ID NO: 221986 - RNA, 23 nt, Artificial Sequence
  Synthetic
uagagguuugcagugccaauaga

SEQ ID NO: 221987 - RNA, 24 nt, Artificial Sequence
  Synthetic
auagagguuugcagugccaauaga

SEQ ID NO: 221988 - RNA, 18 nt, Artificial Sequence
  Synthetic
ucugcuuccagcaauaga

SEQ ID NO: 221989 - RNA, 19 nt, Artificial Sequence
  Synthetic
uucugcuuccagcaauaga

SEQ ID NO: 221990 - RNA, 20 nt, Artificial Sequence
  Synthetic
cuucugcuuccagcaauaga

SEQ ID NO: 221991 - RNA, 21 nt, Artificial Sequence
  Synthetic
ucuucugcuuccagcaauaga

SEQ ID NO: 221992 - RNA, 22 nt, Artificial Sequence
  Synthetic
gucuucugcuuccagcaauaga

SEQ ID NO: 221993 - RNA, 23 nt, Artificial Sequence
  Synthetic
agucuucugcuuccagcaauaga

SEQ ID NO: 221994 - RNA, 24 nt, Artificial Sequence
  Synthetic
gagucuucugcuuccagcaauaga

SEQ ID NO: 221995 - RNA, 18 nt, Artificial Sequence
  Synthetic
aaaucugacaucaauaga

SEQ ID NO: 221996 - RNA, 19 nt, Artificial Sequence
  Synthetic
caaaucugacaucaauaga

SEQ ID NO: 221997 - RNA, 20 nt, Artificial Sequence
  Synthetic
ccaaaucugacaucaauaga

SEQ ID NO: 221998 - RNA, 21 nt, Artificial Sequence
  Synthetic
gccaaaucugacaucaauaga

SEQ ID NO: 221999 - RNA, 22 nt, Artificial Sequence
  Synthetic
ugccaaaucugacaucaauaga

SEQ ID NO: 222000 - RNA, 23 nt, Artificial Sequence
  Synthetic
uugccaaaucugacaucaauaga

SEQ ID NO: 222001 - RNA, 24 nt, Artificial Sequence
  Synthetic
guugccaaaucugacaucaauaga

SEQ ID NO: 222002 - RNA, 18 nt, Artificial Sequence
  Synthetic
uucaacaugaucaauaga

SEQ ID NO: 222003 - RNA, 19 nt, Artificial Sequence
  Synthetic
uuucaacaugaucaauaga

SEQ ID NO: 222004 - RNA, 20 nt, Artificial Sequence
  Synthetic
cuuucaacaugaucaauaga

SEQ ID NO: 222005 - RNA, 21 nt, Artificial Sequence
  Synthetic
ucuuucaacaugaucaauaga

SEQ ID NO: 222006 - RNA, 22 nt, Artificial Sequence
  Synthetic
uucuuucaacaugaucaauaga

SEQ ID NO: 222007 - RNA, 23 nt, Artificial Sequence
  Synthetic
uuucuuucaacaugaucaauaga

SEQ ID NO: 222008 - RNA, 24 nt, Artificial Sequence
  Synthetic
uuuucuuucaacaugaucaauaga

SEQ ID NO: 222009 - RNA, 18 nt, Artificial Sequence
  Synthetic
acaugguaguucaauaga

SEQ ID NO: 222010 - RNA, 19 nt, Artificial Sequence
  Synthetic
cacaugguaguucaauaga

SEQ ID NO: 222011 - RNA, 20 nt, Artificial Sequence
  Synthetic
acacaugguaguucaauaga

SEQ ID NO: 222012 - RNA, 21 nt, Artificial Sequence
  Synthetic
gacacaugguaguucaauaga

SEQ ID NO: 222013 - RNA, 22 nt, Artificial Sequence
  Synthetic
ugacacaugguaguucaauaga

SEQ ID NO: 222014 - RNA, 23 nt, Artificial Sequence
  Synthetic
cugacacaugguaguucaauaga

SEQ ID NO: 222015 - RNA, 24 nt, Artificial Sequence
  Synthetic
acugacacaugguaguucaauaga

SEQ ID NO: 222016 - RNA, 18 nt, Artificial Sequence
  Synthetic
aggaaacauuucaauaga

SEQ ID NO: 222017 - RNA, 19 nt, Artificial Sequence
  Synthetic
uaggaaacauuucaauaga

SEQ ID NO: 222018 - RNA, 20 nt, Artificial Sequence
  Synthetic
auaggaaacauuucaauaga

SEQ ID NO: 222019 - RNA, 21 nt, Artificial Sequence
  Synthetic
aauaggaaacauuucaauaga

SEQ ID NO: 222020 - RNA, 22 nt, Artificial Sequence
  Synthetic
uaauaggaaacauuucaauaga

SEQ ID NO: 222021 - RNA, 23 nt, Artificial Sequence
  Synthetic
guaauaggaaacauuucaauaga

SEQ ID NO: 222022 - RNA, 24 nt, Artificial Sequence
  Synthetic
gguaauaggaaacauuucaauaga

SEQ ID NO: 222023 - RNA, 18 nt, Artificial Sequence
  Synthetic
accaaggacaagaauaga

SEQ ID NO: 222024 - RNA, 19 nt, Artificial Sequence
  Synthetic
aaccaaggacaagaauaga

SEQ ID NO: 222025 - RNA, 20 nt, Artificial Sequence
  Synthetic
gaaccaaggacaagaauaga

SEQ ID NO: 222026 - RNA, 21 nt, Artificial Sequence
  Synthetic
ugaaccaaggacaagaauaga

SEQ ID NO: 222027 - RNA, 22 nt, Artificial Sequence
  Synthetic
uugaaccaaggacaagaauaga

SEQ ID NO: 222028 - RNA, 23 nt, Artificial Sequence
  Synthetic
cuugaaccaaggacaagaauaga

SEQ ID NO: 222029 - RNA, 24 nt, Artificial Sequence
  Synthetic
ccuugaaccaaggacaagaauaga

SEQ ID NO: 222030 - RNA, 18 nt, Artificial Sequence
  Synthetic
aauuuaaaagagaauaga

SEQ ID NO: 222031 - RNA, 19 nt, Artificial Sequence
  Synthetic
gaauuuaaaagagaauaga

SEQ ID NO: 222032 - RNA, 20 nt, Artificial Sequence
  Synthetic
ugaauuuaaaagagaauaga

SEQ ID NO: 222033 - RNA, 21 nt, Artificial Sequence
  Synthetic
augaauuuaaaagagaauaga

SEQ ID NO: 222034 - RNA, 22 nt, Artificial Sequence
  Synthetic
aaugaauuuaaaagagaauaga

SEQ ID NO: 222035 - RNA, 23 nt, Artificial Sequence
  Synthetic
aaaugaauuuaaaagagaauaga

SEQ ID NO: 222036 - RNA, 24 nt, Artificial Sequence
  Synthetic
uaaaugaauuuaaaagagaauaga

SEQ ID NO: 222037 - RNA, 18 nt, Artificial Sequence
  Synthetic
uuaagaaaggagaauaga

SEQ ID NO: 222038 - RNA, 19 nt, Artificial Sequence
  Synthetic
auuaagaaaggagaauaga

SEQ ID NO: 222039 - RNA, 20 nt, Artificial Sequence
  Synthetic
uauuaagaaaggagaauaga

SEQ ID NO: 222040 - RNA, 21 nt, Artificial Sequence
  Synthetic
cuauuaagaaaggagaauaga

SEQ ID NO: 222041 - RNA, 22 nt, Artificial Sequence
  Synthetic
acuauuaagaaaggagaauaga

SEQ ID NO: 222042 - RNA, 23 nt, Artificial Sequence
  Synthetic
gacuauuaagaaaggagaauaga

SEQ ID NO: 222043 - RNA, 24 nt, Artificial Sequence
  Synthetic
agacuauuaagaaaggagaauaga

SEQ ID NO: 222044 - RNA, 18 nt, Artificial Sequence
  Synthetic
agugcucuuaugaauaga

SEQ ID NO: 222045 - RNA, 19 nt, Artificial Sequence
  Synthetic
cagugcucuuaugaauaga

SEQ ID NO: 222046 - RNA, 20 nt, Artificial Sequence
  Synthetic
acagugcucuuaugaauaga

SEQ ID NO: 222047 - RNA, 21 nt, Artificial Sequence
  Synthetic
cacagugcucuuaugaauaga

SEQ ID NO: 222048 - RNA, 22 nt, Artificial Sequence
  Synthetic
acacagugcucuuaugaauaga

SEQ ID NO: 222049 - RNA, 23 nt, Artificial Sequence
  Synthetic
uacacagugcucuuaugaauaga

SEQ ID NO: 222050 - RNA, 24 nt, Artificial Sequence
  Synthetic
guacacagugcucuuaugaauaga

SEQ ID NO: 222051 - RNA, 18 nt, Artificial Sequence
  Synthetic
auaaagaaauugaauaga

SEQ ID NO: 222052 - RNA, 19 nt, Artificial Sequence
  Synthetic
uauaaagaaauugaauaga

SEQ ID NO: 222053 - RNA, 20 nt, Artificial Sequence
  Synthetic
auauaaagaaauugaauaga

SEQ ID NO: 222054 - RNA, 21 nt, Artificial Sequence
  Synthetic
aauauaaagaaauugaauaga

SEQ ID NO: 222055 - RNA, 22 nt, Artificial Sequence
  Synthetic
uaauauaaagaaauugaauaga

SEQ ID NO: 222056 - RNA, 23 nt, Artificial Sequence
  Synthetic
auaauauaaagaaauugaauaga

SEQ ID NO: 222057 - RNA, 24 nt, Artificial Sequence
  Synthetic
cauaauauaaagaaauugaauaga

SEQ ID NO: 222058 - RNA, 18 nt, Artificial Sequence
  Synthetic
uugaugagguugaauaga

SEQ ID NO: 222059 - RNA, 19 nt, Artificial Sequence
  Synthetic
auugaugagguugaauaga

SEQ ID NO: 222060 - RNA, 20 nt, Artificial Sequence
  Synthetic
aauugaugagguugaauaga

SEQ ID NO: 222061 - RNA, 21 nt, Artificial Sequence
  Synthetic
aaauugaugagguugaauaga

SEQ ID NO: 222062 - RNA, 22 nt, Artificial Sequence
  Synthetic
gaaauugaugagguugaauaga

SEQ ID NO: 222063 - RNA, 23 nt, Artificial Sequence
  Synthetic
agaaauugaugagguugaauaga

SEQ ID NO: 222064 - RNA, 24 nt, Artificial Sequence
  Synthetic
aagaaauugaugagguugaauaga

SEQ ID NO: 222065 - RNA, 18 nt, Artificial Sequence
  Synthetic
uguucauaaaauaauaga

SEQ ID NO: 222066 - RNA, 19 nt, Artificial Sequence
  Synthetic
auguucauaaaauaauaga

SEQ ID NO: 222067 - RNA, 20 nt, Artificial Sequence
  Synthetic
uauguucauaaaauaauaga

SEQ ID NO: 222068 - RNA, 21 nt, Artificial Sequence
  Synthetic
cuauguucauaaaauaauaga

SEQ ID NO: 222069 - RNA, 22 nt, Artificial Sequence
  Synthetic
acuauguucauaaaauaauaga

SEQ ID NO: 222070 - RNA, 23 nt, Artificial Sequence
  Synthetic
gacuauguucauaaaauaauaga

SEQ ID NO: 222071 - RNA, 24 nt, Artificial Sequence
  Synthetic
ggacuauguucauaaaauaauaga

SEQ ID NO: 222072 - RNA, 18 nt, Artificial Sequence
  Synthetic
ugaaaaacucauaauaga

SEQ ID NO: 222073 - RNA, 19 nt, Artificial Sequence
  Synthetic
cugaaaaacucauaauaga

SEQ ID NO: 222074 - RNA, 20 nt, Artificial Sequence
  Synthetic
ucugaaaaacucauaauaga

SEQ ID NO: 222075 - RNA, 21 nt, Artificial Sequence
  Synthetic
cucugaaaaacucauaauaga

SEQ ID NO: 222076 - RNA, 22 nt, Artificial Sequence
  Synthetic
ccucugaaaaacucauaauaga

SEQ ID NO: 222077 - RNA, 23 nt, Artificial Sequence
  Synthetic
gccucugaaaaacucauaauaga

SEQ ID NO: 222078 - RNA, 24 nt, Artificial Sequence
  Synthetic
agccucugaaaaacucauaauaga

SEQ ID NO: 222079 - RNA, 18 nt, Artificial Sequence
  Synthetic
aaguuaccagauaauaga

SEQ ID NO: 222080 - RNA, 19 nt, Artificial Sequence
  Synthetic
gaaguuaccagauaauaga

SEQ ID NO: 222081 - RNA, 20 nt, Artificial Sequence
  Synthetic
agaaguuaccagauaauaga

SEQ ID NO: 222082 - RNA, 21 nt, Artificial Sequence
  Synthetic
cagaaguuaccagauaauaga

SEQ ID NO: 222083 - RNA, 22 nt, Artificial Sequence
  Synthetic
gcagaaguuaccagauaauaga

SEQ ID NO: 222084 - RNA, 23 nt, Artificial Sequence
  Synthetic
ugcagaaguuaccagauaauaga

SEQ ID NO: 222085 - RNA, 24 nt, Artificial Sequence
  Synthetic
cugcagaaguuaccagauaauaga

SEQ ID NO: 222086 - RNA, 18 nt, Artificial Sequence
  Synthetic
aaacuagggacuaauaga

SEQ ID NO: 222087 - RNA, 19 nt, Artificial Sequence
  Synthetic
gaaacuagggacuaauaga

SEQ ID NO: 222088 - RNA, 20 nt, Artificial Sequence
  Synthetic
agaaacuagggacuaauaga

SEQ ID NO: 222089 - RNA, 21 nt, Artificial Sequence
  Synthetic
uagaaacuagggacuaauaga

SEQ ID NO: 222090 - RNA, 22 nt, Artificial Sequence
  Synthetic
guagaaacuagggacuaauaga

SEQ ID NO: 222091 - RNA, 23 nt, Artificial Sequence
  Synthetic
aguagaaacuagggacuaauaga

SEQ ID NO: 222092 - RNA, 24 nt, Artificial Sequence
  Synthetic
caguagaaacuagggacuaauaga

SEQ ID NO: 222093 - RNA, 18 nt, Artificial Sequence
  Synthetic
caucaacauucuaauaga

SEQ ID NO: 222094 - RNA, 19 nt, Artificial Sequence
  Synthetic
ucaucaacauucuaauaga

SEQ ID NO: 222095 - RNA, 20 nt, Artificial Sequence
  Synthetic
uucaucaacauucuaauaga

SEQ ID NO: 222096 - RNA, 21 nt, Artificial Sequence
  Synthetic
cuucaucaacauucuaauaga

SEQ ID NO: 222097 - RNA, 22 nt, Artificial Sequence
  Synthetic
ucuucaucaacauucuaauaga

SEQ ID NO: 222098 - RNA, 23 nt, Artificial Sequence
  Synthetic
gucuucaucaacauucuaauaga

SEQ ID NO: 222099 - RNA, 24 nt, Artificial Sequence
  Synthetic
ugucuucaucaacauucuaauaga

SEQ ID NO: 222100 - RNA, 18 nt, Artificial Sequence
  Synthetic
auauuucagcuuaauaga

SEQ ID NO: 222101 - RNA, 19 nt, Artificial Sequence
  Synthetic
uauauuucagcuuaauaga

SEQ ID NO: 222102 - RNA, 20 nt, Artificial Sequence
  Synthetic
guauauuucagcuuaauaga

SEQ ID NO: 222103 - RNA, 21 nt, Artificial Sequence
  Synthetic
cguauauuucagcuuaauaga

SEQ ID NO: 222104 - RNA, 22 nt, Artificial Sequence
  Synthetic
acguauauuucagcuuaauaga

SEQ ID NO: 222105 - RNA, 23 nt, Artificial Sequence
  Synthetic
aacguauauuucagcuuaauaga

SEQ ID NO: 222106 - RNA, 24 nt, Artificial Sequence
  Synthetic
gaacguauauuucagcuuaauaga

SEQ ID NO: 222107 - RNA, 18 nt, Artificial Sequence
  Synthetic
uaaccaaagccacauaga

SEQ ID NO: 222108 - RNA, 19 nt, Artificial Sequence
  Synthetic
auaaccaaagccacauaga

SEQ ID NO: 222109 - RNA, 20 nt, Artificial Sequence
  Synthetic
uauaaccaaagccacauaga

SEQ ID NO: 222110 - RNA, 21 nt, Artificial Sequence
  Synthetic
auauaaccaaagccacauaga

SEQ ID NO: 222111 - RNA, 22 nt, Artificial Sequence
  Synthetic
uauauaaccaaagccacauaga

SEQ ID NO: 222112 - RNA, 23 nt, Artificial Sequence
  Synthetic
auauauaaccaaagccacauaga

SEQ ID NO: 222113 - RNA, 24 nt, Artificial Sequence
  Synthetic
aauauauaaccaaagccacauaga

SEQ ID NO: 222114 - RNA, 18 nt, Artificial Sequence
  Synthetic
ucuucauucucacauaga

SEQ ID NO: 222115 - RNA, 19 nt, Artificial Sequence
  Synthetic
aucuucauucucacauaga

SEQ ID NO: 222116 - RNA, 20 nt, Artificial Sequence
  Synthetic
gaucuucauucucacauaga

SEQ ID NO: 222117 - RNA, 21 nt, Artificial Sequence
  Synthetic
ugaucuucauucucacauaga

SEQ ID NO: 222118 - RNA, 22 nt, Artificial Sequence
  Synthetic
gugaucuucauucucacauaga

SEQ ID NO: 222119 - RNA, 23 nt, Artificial Sequence
  Synthetic
agugaucuucauucucacauaga

SEQ ID NO: 222120 - RNA, 24 nt, Artificial Sequence
  Synthetic
aagugaucuucauucucacauaga

SEQ ID NO: 222121 - RNA, 18 nt, Artificial Sequence
  Synthetic
aagauuaauagacauaga

SEQ ID NO: 222122 - RNA, 19 nt, Artificial Sequence
  Synthetic
aaagauuaauagacauaga

SEQ ID NO: 222123 - RNA, 20 nt, Artificial Sequence
  Synthetic
uaaagauuaauagacauaga

SEQ ID NO: 222124 - RNA, 21 nt, Artificial Sequence
  Synthetic
auaaagauuaauagacauaga

SEQ ID NO: 222125 - RNA, 22 nt, Artificial Sequence
  Synthetic
aauaaagauuaauagacauaga

SEQ ID NO: 222126 - RNA, 23 nt, Artificial Sequence
  Synthetic
uaauaaagauuaauagacauaga

SEQ ID NO: 222127 - RNA, 24 nt, Artificial Sequence
  Synthetic
cuaauaaagauuaauagacauaga

SEQ ID NO: 222128 - RNA, 18 nt, Artificial Sequence
  Synthetic
ucacaagguguacauaga

SEQ ID NO: 222129 - RNA, 19 nt, Artificial Sequence
  Synthetic
aucacaagguguacauaga

SEQ ID NO: 222130 - RNA, 20 nt, Artificial Sequence
  Synthetic
caucacaagguguacauaga

SEQ ID NO: 222131 - RNA, 21 nt, Artificial Sequence
  Synthetic
ccaucacaagguguacauaga

SEQ ID NO: 222132 - RNA, 22 nt, Artificial Sequence
  Synthetic
uccaucacaagguguacauaga

SEQ ID NO: 222133 - RNA, 23 nt, Artificial Sequence
  Synthetic
uuccaucacaagguguacauaga

SEQ ID NO: 222134 - RNA, 24 nt, Artificial Sequence
  Synthetic
uuuccaucacaagguguacauaga

SEQ ID NO: 222135 - RNA, 18 nt, Artificial Sequence
  Synthetic
guauguguugaccauaga

SEQ ID NO: 222136 - RNA, 19 nt, Artificial Sequence
  Synthetic
uguauguguugaccauaga

SEQ ID NO: 222137 - RNA, 20 nt, Artificial Sequence
  Synthetic
uuguauguguugaccauaga

SEQ ID NO: 222138 - RNA, 21 nt, Artificial Sequence
  Synthetic
uuuguauguguugaccauaga

SEQ ID NO: 222139 - RNA, 22 nt, Artificial Sequence
  Synthetic
guuuguauguguugaccauaga

SEQ ID NO: 222140 - RNA, 23 nt, Artificial Sequence
  Synthetic
uguuuguauguguugaccauaga

SEQ ID NO: 222141 - RNA, 24 nt, Artificial Sequence
  Synthetic
auguuuguauguguugaccauaga

SEQ ID NO: 222142 - RNA, 18 nt, Artificial Sequence
  Synthetic
agugucagaucccauaga

SEQ ID NO: 222143 - RNA, 19 nt, Artificial Sequence
  Synthetic
uagugucagaucccauaga

SEQ ID NO: 222144 - RNA, 20 nt, Artificial Sequence
  Synthetic
auagugucagaucccauaga

SEQ ID NO: 222145 - RNA, 21 nt, Artificial Sequence
  Synthetic
gauagugucagaucccauaga

SEQ ID NO: 222146 - RNA, 22 nt, Artificial Sequence
  Synthetic
agauagugucagaucccauaga

SEQ ID NO: 222147 - RNA, 23 nt, Artificial Sequence
  Synthetic
gagauagugucagaucccauaga

SEQ ID NO: 222148 - RNA, 24 nt, Artificial Sequence
  Synthetic
agagauagugucagaucccauaga

SEQ ID NO: 222149 - RNA, 18 nt, Artificial Sequence
  Synthetic
gguauacagggccauaga

SEQ ID NO: 222150 - RNA, 19 nt, Artificial Sequence
  Synthetic
ugguauacagggccauaga

SEQ ID NO: 222151 - RNA, 20 nt, Artificial Sequence
  Synthetic
cugguauacagggccauaga

SEQ ID NO: 222152 - RNA, 21 nt, Artificial Sequence
  Synthetic
acugguauacagggccauaga

SEQ ID NO: 222153 - RNA, 22 nt, Artificial Sequence
  Synthetic
aacugguauacagggccauaga

SEQ ID NO: 222154 - RNA, 23 nt, Artificial Sequence
  Synthetic
gaacugguauacagggccauaga

SEQ ID NO: 222155 - RNA, 24 nt, Artificial Sequence
  Synthetic
agaacugguauacagggccauaga

SEQ ID NO: 222156 - RNA, 18 nt, Artificial Sequence
  Synthetic
ccacuuacuuagcauaga

SEQ ID NO: 222157 - RNA, 19 nt, Artificial Sequence
  Synthetic
accacuuacuuagcauaga

SEQ ID NO: 222158 - RNA, 20 nt, Artificial Sequence
  Synthetic
uaccacuuacuuagcauaga

SEQ ID NO: 222159 - RNA, 21 nt, Artificial Sequence
  Synthetic
auaccacuuacuuagcauaga

SEQ ID NO: 222160 - RNA, 22 nt, Artificial Sequence
  Synthetic
aauaccacuuacuuagcauaga

SEQ ID NO: 222161 - RNA, 23 nt, Artificial Sequence
  Synthetic
gaauaccacuuacuuagcauaga

SEQ ID NO: 222162 - RNA, 24 nt, Artificial Sequence
  Synthetic
agaauaccacuuacuuagcauaga

SEQ ID NO: 222163 - RNA, 18 nt, Artificial Sequence
  Synthetic
cauguauauaugcauaga

SEQ ID NO: 222164 - RNA, 19 nt, Artificial Sequence
  Synthetic
ccauguauauaugcauaga

SEQ ID NO: 222165 - RNA, 20 nt, Artificial Sequence
  Synthetic
uccauguauauaugcauaga

SEQ ID NO: 222166 - RNA, 21 nt, Artificial Sequence
  Synthetic
uuccauguauauaugcauaga

SEQ ID NO: 222167 - RNA, 22 nt, Artificial Sequence
  Synthetic
guuccauguauauaugcauaga

SEQ ID NO: 222168 - RNA, 23 nt, Artificial Sequence
  Synthetic
aguuccauguauauaugcauaga

SEQ ID NO: 222169 - RNA, 24 nt, Artificial Sequence
  Synthetic
uaguuccauguauauaugcauaga

SEQ ID NO: 222170 - RNA, 18 nt, Artificial Sequence
  Synthetic
aacgcuaccuaucauaga

SEQ ID NO: 222171 - RNA, 19 nt, Artificial Sequence
  Synthetic
aaacgcuaccuaucauaga

SEQ ID NO: 222172 - RNA, 20 nt, Artificial Sequence
  Synthetic
aaaacgcuaccuaucauaga

SEQ ID NO: 222173 - RNA, 21 nt, Artificial Sequence
  Synthetic
aaaaacgcuaccuaucauaga

SEQ ID NO: 222174 - RNA, 22 nt, Artificial Sequence
  Synthetic
uaaaaacgcuaccuaucauaga

SEQ ID NO: 222175 - RNA, 23 nt, Artificial Sequence
  Synthetic
auaaaaacgcuaccuaucauaga

SEQ ID NO: 222176 - RNA, 24 nt, Artificial Sequence
  Synthetic
cauaaaaacgcuaccuaucauaga

SEQ ID NO: 222177 - RNA, 18 nt, Artificial Sequence
  Synthetic
ucauaccucccucauaga

SEQ ID NO: 222178 - RNA, 19 nt, Artificial Sequence
  Synthetic
aucauaccucccucauaga

SEQ ID NO: 222179 - RNA, 20 nt, Artificial Sequence
  Synthetic
uaucauaccucccucauaga

SEQ ID NO: 222180 - RNA, 21 nt, Artificial Sequence
  Synthetic
guaucauaccucccucauaga

SEQ ID NO: 222181 - RNA, 22 nt, Artificial Sequence
  Synthetic
gguaucauaccucccucauaga

SEQ ID NO: 222182 - RNA, 23 nt, Artificial Sequence
  Synthetic
ggguaucauaccucccucauaga

SEQ ID NO: 222183 - RNA, 24 nt, Artificial Sequence
  Synthetic
uggguaucauaccucccucauaga

SEQ ID NO: 222184 - RNA, 18 nt, Artificial Sequence
  Synthetic
ccuauucuaugucauaga

SEQ ID NO: 222185 - RNA, 19 nt, Artificial Sequence
  Synthetic
uccuauucuaugucauaga

SEQ ID NO: 222186 - RNA, 20 nt, Artificial Sequence
  Synthetic
uuccuauucuaugucauaga

SEQ ID NO: 222187 - RNA, 21 nt, Artificial Sequence
  Synthetic
uuuccuauucuaugucauaga

SEQ ID NO: 222188 - RNA, 22 nt, Artificial Sequence
  Synthetic
auuuccuauucuaugucauaga

SEQ ID NO: 222189 - RNA, 23 nt, Artificial Sequence
  Synthetic
cauuuccuauucuaugucauaga

SEQ ID NO: 222190 - RNA, 24 nt, Artificial Sequence
  Synthetic
gcauuuccuauucuaugucauaga

SEQ ID NO: 222191 - RNA, 18 nt, Artificial Sequence
  Synthetic
gucaucaguauucauaga

SEQ ID NO: 222192 - RNA, 19 nt, Artificial Sequence
  Synthetic
ugucaucaguauucauaga

SEQ ID NO: 222193 - RNA, 20 nt, Artificial Sequence
  Synthetic
cugucaucaguauucauaga

SEQ ID NO: 222194 - RNA, 21 nt, Artificial Sequence
  Synthetic
ucugucaucaguauucauaga

SEQ ID NO: 222195 - RNA, 22 nt, Artificial Sequence
  Synthetic
gucugucaucaguauucauaga

SEQ ID NO: 222196 - RNA, 23 nt, Artificial Sequence
  Synthetic
cgucugucaucaguauucauaga

SEQ ID NO: 222197 - RNA, 24 nt, Artificial Sequence
  Synthetic
ccgucugucaucaguauucauaga

SEQ ID NO: 222198 - RNA, 18 nt, Artificial Sequence
  Synthetic
uugggaaagcuucauaga

SEQ ID NO: 222199 - RNA, 19 nt, Artificial Sequence
  Synthetic
auugggaaagcuucauaga

SEQ ID NO: 222200 - RNA, 20 nt, Artificial Sequence
  Synthetic
aauugggaaagcuucauaga

SEQ ID NO: 222201 - RNA, 21 nt, Artificial Sequence
  Synthetic
gaauugggaaagcuucauaga

SEQ ID NO: 222202 - RNA, 22 nt, Artificial Sequence
  Synthetic
agaauugggaaagcuucauaga

SEQ ID NO: 222203 - RNA, 23 nt, Artificial Sequence
  Synthetic
aagaauugggaaagcuucauaga

SEQ ID NO: 222204 - RNA, 24 nt, Artificial Sequence
  Synthetic
gaagaauugggaaagcuucauaga

SEQ ID NO: 222205 - RNA, 18 nt, Artificial Sequence
  Synthetic
agaauaaguguucauaga

SEQ ID NO: 222206 - RNA, 19 nt, Artificial Sequence
  Synthetic
cagaauaaguguucauaga

SEQ ID NO: 222207 - RNA, 20 nt, Artificial Sequence
  Synthetic
ccagaauaaguguucauaga

SEQ ID NO: 222208 - RNA, 21 nt, Artificial Sequence
  Synthetic
uccagaauaaguguucauaga

SEQ ID NO: 222209 - RNA, 22 nt, Artificial Sequence
  Synthetic
uuccagaauaaguguucauaga

SEQ ID NO: 222210 - RNA, 23 nt, Artificial Sequence
  Synthetic
cuuccagaauaaguguucauaga

SEQ ID NO: 222211 - RNA, 24 nt, Artificial Sequence
  Synthetic
ucuuccagaauaaguguucauaga

SEQ ID NO: 222212 - RNA, 18 nt, Artificial Sequence
  Synthetic
uauauauucaaagauaga

SEQ ID NO: 222213 - RNA, 19 nt, Artificial Sequence
  Synthetic
auauauauucaaagauaga

SEQ ID NO: 222214 - RNA, 20 nt, Artificial Sequence
  Synthetic
cauauauauucaaagauaga

SEQ ID NO: 222215 - RNA, 21 nt, Artificial Sequence
  Synthetic
ccauauauauucaaagauaga

SEQ ID NO: 222216 - RNA, 22 nt, Artificial Sequence
  Synthetic
gccauauauauucaaagauaga

SEQ ID NO: 222217 - RNA, 23 nt, Artificial Sequence
  Synthetic
ugccauauauauucaaagauaga

SEQ ID NO: 222218 - RNA, 24 nt, Artificial Sequence
  Synthetic
augccauauauauucaaagauaga

SEQ ID NO: 222219 - RNA, 18 nt, Artificial Sequence
  Synthetic
cacaacugcacagauaga

SEQ ID NO: 222220 - RNA, 19 nt, Artificial Sequence
  Synthetic
ccacaacugcacagauaga

SEQ ID NO: 222221 - RNA, 20 nt, Artificial Sequence
  Synthetic
cccacaacugcacagauaga

SEQ ID NO: 222222 - RNA, 21 nt, Artificial Sequence
  Synthetic
ucccacaacugcacagauaga

SEQ ID NO: 222223 - RNA, 22 nt, Artificial Sequence
  Synthetic
uucccacaacugcacagauaga

SEQ ID NO: 222224 - RNA, 23 nt, Artificial Sequence
  Synthetic
uuucccacaacugcacagauaga

SEQ ID NO: 222225 - RNA, 24 nt, Artificial Sequence
  Synthetic
auuucccacaacugcacagauaga

SEQ ID NO: 222226 - RNA, 18 nt, Artificial Sequence
  Synthetic
gaguaacaaggagauaga

SEQ ID NO: 222227 - RNA, 19 nt, Artificial Sequence
  Synthetic
ugaguaacaaggagauaga

SEQ ID NO: 222228 - RNA, 20 nt, Artificial Sequence
  Synthetic
augaguaacaaggagauaga

SEQ ID NO: 222229 - RNA, 21 nt, Artificial Sequence
  Synthetic
caugaguaacaaggagauaga

SEQ ID NO: 222230 - RNA, 22 nt, Artificial Sequence
  Synthetic
gcaugaguaacaaggagauaga

SEQ ID NO: 222231 - RNA, 23 nt, Artificial Sequence
  Synthetic
ggcaugaguaacaaggagauaga

SEQ ID NO: 222232 - RNA, 24 nt, Artificial Sequence
  Synthetic
gggcaugaguaacaaggagauaga

SEQ ID NO: 222233 - RNA, 18 nt, Artificial Sequence
  Synthetic
auaaagacuauagauaga

SEQ ID NO: 222234 - RNA, 19 nt, Artificial Sequence
  Synthetic
aauaaagacuauagauaga

SEQ ID NO: 222235 - RNA, 20 nt, Artificial Sequence
  Synthetic
uaauaaagacuauagauaga

SEQ ID NO: 222236 - RNA, 21 nt, Artificial Sequence
  Synthetic
auaauaaagacuauagauaga

SEQ ID NO: 222237 - RNA, 22 nt, Artificial Sequence
  Synthetic
aauaauaaagacuauagauaga

SEQ ID NO: 222238 - RNA, 23 nt, Artificial Sequence
  Synthetic
aaauaauaaagacuauagauaga

SEQ ID NO: 222239 - RNA, 24 nt, Artificial Sequence
  Synthetic
gaaauaauaaagacuauagauaga

SEQ ID NO: 222240 - RNA, 18 nt, Artificial Sequence
  Synthetic
ggagagagggaggauaga

SEQ ID NO: 222241 - RNA, 19 nt, Artificial Sequence
  Synthetic
aggagagagggaggauaga

SEQ ID NO: 222242 - RNA, 20 nt, Artificial Sequence
  Synthetic
aaggagagagggaggauaga

SEQ ID NO: 222243 - RNA, 21 nt, Artificial Sequence
  Synthetic
gaaggagagagggaggauaga

SEQ ID NO: 222244 - RNA, 22 nt, Artificial Sequence
  Synthetic
ugaaggagagagggaggauaga

SEQ ID NO: 222245 - RNA, 23 nt, Artificial Sequence
  Synthetic
gugaaggagagagggaggauaga

SEQ ID NO: 222246 - RNA, 24 nt, Artificial Sequence
  Synthetic
ugugaaggagagagggaggauaga

SEQ ID NO: 222247 - RNA, 18 nt, Artificial Sequence
  Synthetic
gguaaagugggggauaga

SEQ ID NO: 222248 - RNA, 19 nt, Artificial Sequence
  Synthetic
ggguaaagugggggauaga

SEQ ID NO: 222249 - RNA, 20 nt, Artificial Sequence
  Synthetic
gggguaaagugggggauaga

SEQ ID NO: 222250 - RNA, 21 nt, Artificial Sequence
  Synthetic
ggggguaaagugggggauaga

SEQ ID NO: 222251 - RNA, 22 nt, Artificial Sequence
  Synthetic
aggggguaaagugggggauaga

SEQ ID NO: 222252 - RNA, 23 nt, Artificial Sequence
  Synthetic
uaggggguaaagugggggauaga

SEQ ID NO: 222253 - RNA, 24 nt, Artificial Sequence
  Synthetic
uuaggggguaaagugggggauaga

SEQ ID NO: 222254 - RNA, 18 nt, Artificial Sequence
  Synthetic
uacaggagguuggauaga

SEQ ID NO: 222255 - RNA, 19 nt, Artificial Sequence
  Synthetic
uuacaggagguuggauaga

SEQ ID NO: 222256 - RNA, 20 nt, Artificial Sequence
  Synthetic
auuacaggagguuggauaga

SEQ ID NO: 222257 - RNA, 21 nt, Artificial Sequence
  Synthetic
uauuacaggagguuggauaga

SEQ ID NO: 222258 - RNA, 22 nt, Artificial Sequence
  Synthetic
guauuacaggagguuggauaga

SEQ ID NO: 222259 - RNA, 23 nt, Artificial Sequence
  Synthetic
aguauuacaggagguuggauaga

SEQ ID NO: 222260 - RNA, 24 nt, Artificial Sequence
  Synthetic
gaguauuacaggagguuggauaga

SEQ ID NO: 222261 - RNA, 18 nt, Artificial Sequence
  Synthetic
aacaugggcuaugauaga

SEQ ID NO: 222262 - RNA, 19 nt, Artificial Sequence
  Synthetic
aaacaugggcuaugauaga

SEQ ID NO: 222263 - RNA, 20 nt, Artificial Sequence
  Synthetic
aaaacaugggcuaugauaga

SEQ ID NO: 222264 - RNA, 21 nt, Artificial Sequence
  Synthetic
uaaaacaugggcuaugauaga

SEQ ID NO: 222265 - RNA, 22 nt, Artificial Sequence
  Synthetic
uuaaaacaugggcuaugauaga

SEQ ID NO: 222266 - RNA, 23 nt, Artificial Sequence
  Synthetic
uuuaaaacaugggcuaugauaga

SEQ ID NO: 222267 - RNA, 24 nt, Artificial Sequence
  Synthetic
uuuuaaaacaugggcuaugauaga

SEQ ID NO: 222268 - RNA, 18 nt, Artificial Sequence
  Synthetic
aaaauaaggguugauaga

SEQ ID NO: 222269 - RNA, 19 nt, Artificial Sequence
  Synthetic
uaaaauaaggguugauaga

SEQ ID NO: 222270 - RNA, 20 nt, Artificial Sequence
  Synthetic
guaaaauaaggguugauaga

SEQ ID NO: 222271 - RNA, 21 nt, Artificial Sequence
  Synthetic
aguaaaauaaggguugauaga

SEQ ID NO: 222272 - RNA, 22 nt, Artificial Sequence
  Synthetic
caguaaaauaaggguugauaga

SEQ ID NO: 222273 - RNA, 23 nt, Artificial Sequence
  Synthetic
ccaguaaaauaaggguugauaga

SEQ ID NO: 222274 - RNA, 24 nt, Artificial Sequence
  Synthetic
gccaguaaaauaaggguugauaga

SEQ ID NO: 222275 - RNA, 18 nt, Artificial Sequence
  Synthetic
acuaaggaagaauauaga

SEQ ID NO: 222276 - RNA, 19 nt, Artificial Sequence
  Synthetic
cacuaaggaagaauauaga

SEQ ID NO: 222277 - RNA, 20 nt, Artificial Sequence
  Synthetic
ucacuaaggaagaauauaga

SEQ ID NO: 222278 - RNA, 21 nt, Artificial Sequence
  Synthetic
aucacuaaggaagaauauaga

SEQ ID NO: 222279 - RNA, 22 nt, Artificial Sequence
  Synthetic
uaucacuaaggaagaauauaga

SEQ ID NO: 222280 - RNA, 23 nt, Artificial Sequence
  Synthetic
guaucacuaaggaagaauauaga

SEQ ID NO: 222281 - RNA, 24 nt, Artificial Sequence
  Synthetic
uguaucacuaaggaagaauauaga

SEQ ID NO: 222282 - RNA, 18 nt, Artificial Sequence
  Synthetic
uauauauauauauauaga

SEQ ID NO: 222283 - RNA, 19 nt, Artificial Sequence
  Synthetic
auauauauauauauauaga

SEQ ID NO: 222284 - RNA, 20 nt, Artificial Sequence
  Synthetic
uauauauauauauauauaga

SEQ ID NO: 222285 - RNA, 21 nt, Artificial Sequence
  Synthetic
auauauauauauauauauaga

SEQ ID NO: 222286 - RNA, 22 nt, Artificial Sequence
  Synthetic
uauauauauauauauauauaga

SEQ ID NO: 222287 - RNA, 23 nt, Artificial Sequence
  Synthetic
auauauauauauauauauauaga

SEQ ID NO: 222288 - RNA, 24 nt, Artificial Sequence
  Synthetic
uauauauauauauauauauauaga

SEQ ID NO: 222289 - RNA, 18 nt, Artificial Sequence
  Synthetic
auuuaaaguuuauauaga

SEQ ID NO: 222290 - RNA, 19 nt, Artificial Sequence
  Synthetic
aauuuaaaguuuauauaga

SEQ ID NO: 222291 - RNA, 20 nt, Artificial Sequence
  Synthetic
uaauuuaaaguuuauauaga

SEQ ID NO: 222292 - RNA, 21 nt, Artificial Sequence
  Synthetic
guaauuuaaaguuuauauaga

SEQ ID NO: 222293 - RNA, 22 nt, Artificial Sequence
  Synthetic
uguaauuuaaaguuuauauaga

SEQ ID NO: 222294 - RNA, 23 nt, Artificial Sequence
  Synthetic
auguaauuuaaaguuuauauaga

SEQ ID NO: 222295 - RNA, 24 nt, Artificial Sequence
  Synthetic
gauguaauuuaaaguuuauauaga

SEQ ID NO: 222296 - RNA, 18 nt, Artificial Sequence
  Synthetic
aaaaaaaauaucuauaga

SEQ ID NO: 222297 - RNA, 19 nt, Artificial Sequence
  Synthetic
aaaaaaaaauaucuauaga

SEQ ID NO: 222298 - RNA, 20 nt, Artificial Sequence
  Synthetic
aaaaaaaaaauaucuauaga

SEQ ID NO: 222299 - RNA, 21 nt, Artificial Sequence
  Synthetic
aaaaaaaaaaauaucuauaga

SEQ ID NO: 222300 - RNA, 22 nt, Artificial Sequence
  Synthetic
aaaaaaaaaaaauaucuauaga

SEQ ID NO: 222301 - RNA, 23 nt, Artificial Sequence
  Synthetic
gaaaaaaaaaaaauaucuauaga

SEQ ID NO: 222302 - RNA, 24 nt, Artificial Sequence
  Synthetic
ggaaaaaaaaaaaauaucuauaga

SEQ ID NO: 222303 - RNA, 18 nt, Artificial Sequence
  Synthetic
agacaguagguguauaga

SEQ ID NO: 222304 - RNA, 19 nt, Artificial Sequence
  Synthetic
cagacaguagguguauaga

SEQ ID NO: 222305 - RNA, 20 nt, Artificial Sequence
  Synthetic
ccagacaguagguguauaga

SEQ ID NO: 222306 - RNA, 21 nt, Artificial Sequence
  Synthetic
uccagacaguagguguauaga

SEQ ID NO: 222307 - RNA, 22 nt, Artificial Sequence
  Synthetic
uuccagacaguagguguauaga

SEQ ID NO: 222308 - RNA, 23 nt, Artificial Sequence
  Synthetic
auuccagacaguagguguauaga

SEQ ID NO: 222309 - RNA, 24 nt, Artificial Sequence
  Synthetic
aauuccagacaguagguguauaga

SEQ ID NO: 222310 - RNA, 18 nt, Artificial Sequence
  Synthetic
cguuggcauuuguauaga

SEQ ID NO: 222311 - RNA, 19 nt, Artificial Sequence
  Synthetic
gcguuggcauuuguauaga

SEQ ID NO: 222312 - RNA, 20 nt, Artificial Sequence
  Synthetic
agcguuggcauuuguauaga

SEQ ID NO: 222313 - RNA, 21 nt, Artificial Sequence
  Synthetic
cagcguuggcauuuguauaga

SEQ ID NO: 222314 - RNA, 22 nt, Artificial Sequence
  Synthetic
ccagcguuggcauuuguauaga

SEQ ID NO: 222315 - RNA, 23 nt, Artificial Sequence
  Synthetic
accagcguuggcauuuguauaga

SEQ ID NO: 222316 - RNA, 24 nt, Artificial Sequence
  Synthetic
caccagcguuggcauuuguauaga

SEQ ID NO: 222317 - RNA, 18 nt, Artificial Sequence
  Synthetic
uuauacugcaauuauaga

SEQ ID NO: 222318 - RNA, 19 nt, Artificial Sequence
  Synthetic
uuuauacugcaauuauaga

SEQ ID NO: 222319 - RNA, 20 nt, Artificial Sequence
  Synthetic
guuuauacugcaauuauaga

SEQ ID NO: 222320 - RNA, 21 nt, Artificial Sequence
  Synthetic
uguuuauacugcaauuauaga

SEQ ID NO: 222321 - RNA, 22 nt, Artificial Sequence
  Synthetic
uuguuuauacugcaauuauaga

SEQ ID NO: 222322 - RNA, 23 nt, Artificial Sequence
  Synthetic
auuguuuauacugcaauuauaga

SEQ ID NO: 222323 - RNA, 24 nt, Artificial Sequence
  Synthetic
uauuguuuauacugcaauuauaga

SEQ ID NO: 222324 - RNA, 18 nt, Artificial Sequence
  Synthetic
gaagcuugucauuauaga

SEQ ID NO: 222325 - RNA, 19 nt, Artificial Sequence
  Synthetic
agaagcuugucauuauaga

SEQ ID NO: 222326 - RNA, 20 nt, Artificial Sequence
  Synthetic
uagaagcuugucauuauaga

SEQ ID NO: 222327 - RNA, 21 nt, Artificial Sequence
  Synthetic
guagaagcuugucauuauaga

SEQ ID NO: 222328 - RNA, 22 nt, Artificial Sequence
  Synthetic
aguagaagcuugucauuauaga

SEQ ID NO: 222329 - RNA, 23 nt, Artificial Sequence
  Synthetic
gaguagaagcuugucauuauaga

SEQ ID NO: 222330 - RNA, 24 nt, Artificial Sequence
  Synthetic
ugaguagaagcuugucauuauaga

SEQ ID NO: 222331 - RNA, 18 nt, Artificial Sequence
  Synthetic
uaugaacaugauuauaga

SEQ ID NO: 222332 - RNA, 19 nt, Artificial Sequence
  Synthetic
guaugaacaugauuauaga

SEQ ID NO: 222333 - RNA, 20 nt, Artificial Sequence
  Synthetic
gguaugaacaugauuauaga

SEQ ID NO: 222334 - RNA, 21 nt, Artificial Sequence
  Synthetic
agguaugaacaugauuauaga

SEQ ID NO: 222335 - RNA, 22 nt, Artificial Sequence
  Synthetic
uagguaugaacaugauuauaga

SEQ ID NO: 222336 - RNA, 23 nt, Artificial Sequence
  Synthetic
uuagguaugaacaugauuauaga

SEQ ID NO: 222337 - RNA, 24 nt, Artificial Sequence
  Synthetic
auuagguaugaacaugauuauaga

SEQ ID NO: 222338 - RNA, 18 nt, Artificial Sequence
  Synthetic
gcaggcaguauuuauaga

SEQ ID NO: 222339 - RNA, 19 nt, Artificial Sequence
  Synthetic
ggcaggcaguauuuauaga

SEQ ID NO: 222340 - RNA, 20 nt, Artificial Sequence
  Synthetic
gggcaggcaguauuuauaga

SEQ ID NO: 222341 - RNA, 21 nt, Artificial Sequence
  Synthetic
ugggcaggcaguauuuauaga

SEQ ID NO: 222342 - RNA, 22 nt, Artificial Sequence
  Synthetic
gugggcaggcaguauuuauaga

SEQ ID NO: 222343 - RNA, 23 nt, Artificial Sequence
  Synthetic
ggugggcaggcaguauuuauaga

SEQ ID NO: 222344 - RNA, 24 nt, Artificial Sequence
  Synthetic
aggugggcaggcaguauuuauaga

SEQ ID NO: 222345 - RNA, 18 nt, Artificial Sequence
  Synthetic
auauggcauguuuauaga

SEQ ID NO: 222346 - RNA, 19 nt, Artificial Sequence
  Synthetic
uauauggcauguuuauaga

SEQ ID NO: 222347 - RNA, 20 nt, Artificial Sequence
  Synthetic
uuauauggcauguuuauaga

SEQ ID NO: 222348 - RNA, 21 nt, Artificial Sequence
  Synthetic
auuauauggcauguuuauaga

SEQ ID NO: 222349 - RNA, 22 nt, Artificial Sequence
  Synthetic
gauuauauggcauguuuauaga

SEQ ID NO: 222350 - RNA, 23 nt, Artificial Sequence
  Synthetic
ggauuauauggcauguuuauaga

SEQ ID NO: 222351 - RNA, 24 nt, Artificial Sequence
  Synthetic
uggauuauauggcauguuuauaga

SEQ ID NO: 222352 - RNA, 18 nt, Artificial Sequence
  Synthetic
aaauaaaaugaaacuaga

SEQ ID NO: 222353 - RNA, 19 nt, Artificial Sequence
  Synthetic
aaaauaaaaugaaacuaga

SEQ ID NO: 222354 - RNA, 20 nt, Artificial Sequence
  Synthetic
uaaaauaaaaugaaacuaga

SEQ ID NO: 222355 - RNA, 21 nt, Artificial Sequence
  Synthetic
guaaaauaaaaugaaacuaga

SEQ ID NO: 222356 - RNA, 22 nt, Artificial Sequence
  Synthetic
uguaaaauaaaaugaaacuaga

SEQ ID NO: 222357 - RNA, 23 nt, Artificial Sequence
  Synthetic
guguaaaauaaaaugaaacuaga

SEQ ID NO: 222358 - RNA, 24 nt, Artificial Sequence
  Synthetic
uguguaaaauaaaaugaaacuaga

SEQ ID NO: 222359 - RNA, 18 nt, Artificial Sequence
  Synthetic
uacaaaguuucaacuaga

SEQ ID NO: 222360 - RNA, 19 nt, Artificial Sequence
  Synthetic
uuacaaaguuucaacuaga

SEQ ID NO: 222361 - RNA, 20 nt, Artificial Sequence
  Synthetic
auuacaaaguuucaacuaga

SEQ ID NO: 222362 - RNA, 21 nt, Artificial Sequence
  Synthetic
gauuacaaaguuucaacuaga

SEQ ID NO: 222363 - RNA, 22 nt, Artificial Sequence
  Synthetic
agauuacaaaguuucaacuaga

SEQ ID NO: 222364 - RNA, 23 nt, Artificial Sequence
  Synthetic
aagauuacaaaguuucaacuaga

SEQ ID NO: 222365 - RNA, 24 nt, Artificial Sequence
  Synthetic
aaagauuacaaaguuucaacuaga

SEQ ID NO: 222366 - RNA, 18 nt, Artificial Sequence
  Synthetic
acguuacuaggcacuaga

SEQ ID NO: 222367 - RNA, 19 nt, Artificial Sequence
  Synthetic
cacguuacuaggcacuaga

SEQ ID NO: 222368 - RNA, 20 nt, Artificial Sequence
  Synthetic
acacguuacuaggcacuaga

SEQ ID NO: 222369 - RNA, 21 nt, Artificial Sequence
  Synthetic
aacacguuacuaggcacuaga

SEQ ID NO: 222370 - RNA, 22 nt, Artificial Sequence
  Synthetic
caacacguuacuaggcacuaga

SEQ ID NO: 222371 - RNA, 23 nt, Artificial Sequence
  Synthetic
gcaacacguuacuaggcacuaga

SEQ ID NO: 222372 - RNA, 24 nt, Artificial Sequence
  Synthetic
agcaacacguuacuaggcacuaga

SEQ ID NO: 222373 - RNA, 18 nt, Artificial Sequence
  Synthetic
ucuuccucugagacuaga

SEQ ID NO: 222374 - RNA, 19 nt, Artificial Sequence
  Synthetic
cucuuccucugagacuaga

SEQ ID NO: 222375 - RNA, 20 nt, Artificial Sequence
  Synthetic
ccucuuccucugagacuaga

SEQ ID NO: 222376 - RNA, 21 nt, Artificial Sequence
  Synthetic
gccucuuccucugagacuaga

SEQ ID NO: 222377 - RNA, 22 nt, Artificial Sequence
  Synthetic
cgccucuuccucugagacuaga

SEQ ID NO: 222378 - RNA, 23 nt, Artificial Sequence
  Synthetic
ucgccucuuccucugagacuaga

SEQ ID NO: 222379 - RNA, 24 nt, Artificial Sequence
  Synthetic
gucgccucuuccucugagacuaga

SEQ ID NO: 222380 - RNA, 18 nt, Artificial Sequence
  Synthetic
augauuacuuggacuaga

SEQ ID NO: 222381 - RNA, 19 nt, Artificial Sequence
  Synthetic
aaugauuacuuggacuaga

SEQ ID NO: 222382 - RNA, 20 nt, Artificial Sequence
  Synthetic
aaaugauuacuuggacuaga

SEQ ID NO: 222383 - RNA, 21 nt, Artificial Sequence
  Synthetic
gaaaugauuacuuggacuaga

SEQ ID NO: 222384 - RNA, 22 nt, Artificial Sequence
  Synthetic
ggaaaugauuacuuggacuaga

SEQ ID NO: 222385 - RNA, 23 nt, Artificial Sequence
  Synthetic
aggaaaugauuacuuggacuaga

SEQ ID NO: 222386 - RNA, 24 nt, Artificial Sequence
  Synthetic
aaggaaaugauuacuuggacuaga

SEQ ID NO: 222387 - RNA, 18 nt, Artificial Sequence
  Synthetic
acauuggggacuacuaga

SEQ ID NO: 222388 - RNA, 19 nt, Artificial Sequence
  Synthetic
gacauuggggacuacuaga

SEQ ID NO: 222389 - RNA, 20 nt, Artificial Sequence
  Synthetic
agacauuggggacuacuaga

SEQ ID NO: 222390 - RNA, 21 nt, Artificial Sequence
  Synthetic
uagacauuggggacuacuaga

SEQ ID NO: 222391 - RNA, 22 nt, Artificial Sequence
  Synthetic
auagacauuggggacuacuaga

SEQ ID NO: 222392 - RNA, 23 nt, Artificial Sequence
  Synthetic
aauagacauuggggacuacuaga

SEQ ID NO: 222393 - RNA, 24 nt, Artificial Sequence
  Synthetic
caauagacauuggggacuacuaga

SEQ ID NO: 222394 - RNA, 18 nt, Artificial Sequence
  Synthetic
caucauuauauuacuaga

SEQ ID NO: 222395 - RNA, 19 nt, Artificial Sequence
  Synthetic
ucaucauuauauuacuaga

SEQ ID NO: 222396 - RNA, 20 nt, Artificial Sequence
  Synthetic
gucaucauuauauuacuaga

SEQ ID NO: 222397 - RNA, 21 nt, Artificial Sequence
  Synthetic
ugucaucauuauauuacuaga

SEQ ID NO: 222398 - RNA, 22 nt, Artificial Sequence
  Synthetic
uugucaucauuauauuacuaga

SEQ ID NO: 222399 - RNA, 23 nt, Artificial Sequence
  Synthetic
guugucaucauuauauuacuaga

SEQ ID NO: 222400 - RNA, 24 nt, Artificial Sequence
  Synthetic
uguugucaucauuauauuacuaga

SEQ ID NO: 222401 - RNA, 18 nt, Artificial Sequence
  Synthetic
uuggccugccuuacuaga

SEQ ID NO: 222402 - RNA, 19 nt, Artificial Sequence
  Synthetic
guuggccugccuuacuaga

SEQ ID NO: 222403 - RNA, 20 nt, Artificial Sequence
  Synthetic
cguuggccugccuuacuaga

SEQ ID NO: 222404 - RNA, 21 nt, Artificial Sequence
  Synthetic
acguuggccugccuuacuaga

SEQ ID NO: 222405 - RNA, 22 nt, Artificial Sequence
  Synthetic
aacguuggccugccuuacuaga

SEQ ID NO: 222406 - RNA, 23 nt, Artificial Sequence
  Synthetic
gaacguuggccugccuuacuaga

SEQ ID NO: 222407 - RNA, 24 nt, Artificial Sequence
  Synthetic
ugaacguuggccugccuuacuaga

SEQ ID NO: 222408 - RNA, 18 nt, Artificial Sequence
  Synthetic
uccuaucaaaaaccuaga

SEQ ID NO: 222409 - RNA, 19 nt, Artificial Sequence
  Synthetic
cuccuaucaaaaaccuaga

SEQ ID NO: 222410 - RNA, 20 nt, Artificial Sequence
  Synthetic
acuccuaucaaaaaccuaga

SEQ ID NO: 222411 - RNA, 21 nt, Artificial Sequence
  Synthetic
cacuccuaucaaaaaccuaga

SEQ ID NO: 222412 - RNA, 22 nt, Artificial Sequence
  Synthetic
ccacuccuaucaaaaaccuaga

SEQ ID NO: 222413 - RNA, 23 nt, Artificial Sequence
  Synthetic
cccacuccuaucaaaaaccuaga

SEQ ID NO: 222414 - RNA, 24 nt, Artificial Sequence
  Synthetic
ucccacuccuaucaaaaaccuaga

SEQ ID NO: 222415 - RNA, 18 nt, Artificial Sequence
  Synthetic
caaagaaaucaaccuaga

SEQ ID NO: 222416 - RNA, 19 nt, Artificial Sequence
  Synthetic
acaaagaaaucaaccuaga

SEQ ID NO: 222417 - RNA, 20 nt, Artificial Sequence
  Synthetic
cacaaagaaaucaaccuaga

SEQ ID NO: 222418 - RNA, 21 nt, Artificial Sequence
  Synthetic
acacaaagaaaucaaccuaga

SEQ ID NO: 222419 - RNA, 22 nt, Artificial Sequence
  Synthetic
uacacaaagaaaucaaccuaga

SEQ ID NO: 222420 - RNA, 23 nt, Artificial Sequence
  Synthetic
uuacacaaagaaaucaaccuaga

SEQ ID NO: 222421 - RNA, 24 nt, Artificial Sequence
  Synthetic
uuuacacaaagaaaucaaccuaga

SEQ ID NO: 222422 - RNA, 18 nt, Artificial Sequence
  Synthetic
acauaacugcuaccuaga

SEQ ID NO: 222423 - RNA, 19 nt, Artificial Sequence
  Synthetic
aacauaacugcuaccuaga

SEQ ID NO: 222424 - RNA, 20 nt, Artificial Sequence
  Synthetic
gaacauaacugcuaccuaga

SEQ ID NO: 222425 - RNA, 21 nt, Artificial Sequence
  Synthetic
ggaacauaacugcuaccuaga

SEQ ID NO: 222426 - RNA, 22 nt, Artificial Sequence
  Synthetic
uggaacauaacugcuaccuaga

SEQ ID NO: 222427 - RNA, 23 nt, Artificial Sequence
  Synthetic
guggaacauaacugcuaccuaga

SEQ ID NO: 222428 - RNA, 24 nt, Artificial Sequence
  Synthetic
uguggaacauaacugcuaccuaga

SEQ ID NO: 222429 - RNA, 18 nt, Artificial Sequence
  Synthetic
aguuugauaaacccuaga

SEQ ID NO: 222430 - RNA, 19 nt, Artificial Sequence
  Synthetic
uaguuugauaaacccuaga

SEQ ID NO: 222431 - RNA, 20 nt, Artificial Sequence
  Synthetic
guaguuugauaaacccuaga

SEQ ID NO: 222432 - RNA, 21 nt, Artificial Sequence
  Synthetic
uguaguuugauaaacccuaga

SEQ ID NO: 222433 - RNA, 22 nt, Artificial Sequence
  Synthetic
cuguaguuugauaaacccuaga

SEQ ID NO: 222434 - RNA, 23 nt, Artificial Sequence
  Synthetic
ucuguaguuugauaaacccuaga

SEQ ID NO: 222435 - RNA, 24 nt, Artificial Sequence
  Synthetic
uucuguaguuugauaaacccuaga

SEQ ID NO: 222436 - RNA, 18 nt, Artificial Sequence
  Synthetic
uaguuagugaacccuaga

SEQ ID NO: 222437 - RNA, 19 nt, Artificial Sequence
  Synthetic
guaguuagugaacccuaga

SEQ ID NO: 222438 - RNA, 20 nt, Artificial Sequence
  Synthetic
uguaguuagugaacccuaga

SEQ ID NO: 222439 - RNA, 21 nt, Artificial Sequence
  Synthetic
cuguaguuagugaacccuaga

SEQ ID NO: 222440 - RNA, 22 nt, Artificial Sequence
  Synthetic
acuguaguuagugaacccuaga

SEQ ID NO: 222441 - RNA, 23 nt, Artificial Sequence
  Synthetic
gacuguaguuagugaacccuaga

SEQ ID NO: 222442 - RNA, 24 nt, Artificial Sequence
  Synthetic
ugacuguaguuagugaacccuaga

SEQ ID NO: 222443 - RNA, 18 nt, Artificial Sequence
  Synthetic
gcacccaagagcccuaga

SEQ ID NO: 222444 - RNA, 19 nt, Artificial Sequence
  Synthetic
ggcacccaagagcccuaga

SEQ ID NO: 222445 - RNA, 20 nt, Artificial Sequence
  Synthetic
aggcacccaagagcccuaga

SEQ ID NO: 222446 - RNA, 21 nt, Artificial Sequence
  Synthetic
uaggcacccaagagcccuaga

SEQ ID NO: 222447 - RNA, 22 nt, Artificial Sequence
  Synthetic
uuaggcacccaagagcccuaga

SEQ ID NO: 222448 - RNA, 23 nt, Artificial Sequence
  Synthetic
uuuaggcacccaagagcccuaga

SEQ ID NO: 222449 - RNA, 24 nt, Artificial Sequence
  Synthetic
guuuaggcacccaagagcccuaga

SEQ ID NO: 222450 - RNA, 18 nt, Artificial Sequence
  Synthetic
aaauuggacaucccuaga

SEQ ID NO: 222451 - RNA, 19 nt, Artificial Sequence
  Synthetic
gaaauuggacaucccuaga

SEQ ID NO: 222452 - RNA, 20 nt, Artificial Sequence
  Synthetic
agaaauuggacaucccuaga

SEQ ID NO: 222453 - RNA, 21 nt, Artificial Sequence
  Synthetic
cagaaauuggacaucccuaga

SEQ ID NO: 222454 - RNA, 22 nt, Artificial Sequence
  Synthetic
gcagaaauuggacaucccuaga

SEQ ID NO: 222455 - RNA, 23 nt, Artificial Sequence
  Synthetic
ugcagaaauuggacaucccuaga

SEQ ID NO: 222456 - RNA, 24 nt, Artificial Sequence
  Synthetic
cugcagaaauuggacaucccuaga

SEQ ID NO: 222457 - RNA, 18 nt, Artificial Sequence
  Synthetic
auuucucucaguccuaga

SEQ ID NO: 222458 - RNA, 19 nt, Artificial Sequence
  Synthetic
cauuucucucaguccuaga

SEQ ID NO: 222459 - RNA, 20 nt, Artificial Sequence
  Synthetic
gcauuucucucaguccuaga

SEQ ID NO: 222460 - RNA, 21 nt, Artificial Sequence
  Synthetic
agcauuucucucaguccuaga

SEQ ID NO: 222461 - RNA, 22 nt, Artificial Sequence
  Synthetic
uagcauuucucucaguccuaga

SEQ ID NO: 222462 - RNA, 23 nt, Artificial Sequence
  Synthetic
uuagcauuucucucaguccuaga

SEQ ID NO: 222463 - RNA, 24 nt, Artificial Sequence
  Synthetic
auuagcauuucucucaguccuaga

SEQ ID NO: 222464 - RNA, 18 nt, Artificial Sequence
  Synthetic
acuguaaugauuccuaga

SEQ ID NO: 222465 - RNA, 19 nt, Artificial Sequence
  Synthetic
uacuguaaugauuccuaga

SEQ ID NO: 222466 - RNA, 20 nt, Artificial Sequence
  Synthetic
uuacuguaaugauuccuaga

SEQ ID NO: 222467 - RNA, 21 nt, Artificial Sequence
  Synthetic
auuacuguaaugauuccuaga

SEQ ID NO: 222468 - RNA, 22 nt, Artificial Sequence
  Synthetic
uauuacuguaaugauuccuaga

SEQ ID NO: 222469 - RNA, 23 nt, Artificial Sequence
  Synthetic
uuauuacuguaaugauuccuaga

SEQ ID NO: 222470 - RNA, 24 nt, Artificial Sequence
  Synthetic
uuuauuacuguaaugauuccuaga

SEQ ID NO: 222471 - RNA, 18 nt, Artificial Sequence
  Synthetic
gaaggaagcguuccuaga

SEQ ID NO: 222472 - RNA, 19 nt, Artificial Sequence
  Synthetic
agaaggaagcguuccuaga

SEQ ID NO: 222473 - RNA, 20 nt, Artificial Sequence
  Synthetic
aagaaggaagcguuccuaga

SEQ ID NO: 222474 - RNA, 21 nt, Artificial Sequence
  Synthetic
uaagaaggaagcguuccuaga

SEQ ID NO: 222475 - RNA, 22 nt, Artificial Sequence
  Synthetic
cuaagaaggaagcguuccuaga

SEQ ID NO: 222476 - RNA, 23 nt, Artificial Sequence
  Synthetic
ccuaagaaggaagcguuccuaga

SEQ ID NO: 222477 - RNA, 24 nt, Artificial Sequence
  Synthetic
gccuaagaaggaagcguuccuaga

SEQ ID NO: 222478 - RNA, 18 nt, Artificial Sequence
  Synthetic
aguggaagaaaagcuaga

SEQ ID NO: 222479 - RNA, 19 nt, Artificial Sequence
  Synthetic
caguggaagaaaagcuaga

SEQ ID NO: 222480 - RNA, 20 nt, Artificial Sequence
  Synthetic
acaguggaagaaaagcuaga

SEQ ID NO: 222481 - RNA, 21 nt, Artificial Sequence
  Synthetic
gacaguggaagaaaagcuaga

SEQ ID NO: 222482 - RNA, 22 nt, Artificial Sequence
  Synthetic
ugacaguggaagaaaagcuaga

SEQ ID NO: 222483 - RNA, 23 nt, Artificial Sequence
  Synthetic
cugacaguggaagaaaagcuaga

SEQ ID NO: 222484 - RNA, 24 nt, Artificial Sequence
  Synthetic
ucugacaguggaagaaaagcuaga

SEQ ID NO: 222485 - RNA, 18 nt, Artificial Sequence
  Synthetic
uggaacagucaagcuaga

SEQ ID NO: 222486 - RNA, 19 nt, Artificial Sequence
  Synthetic
guggaacagucaagcuaga

SEQ ID NO: 222487 - RNA, 20 nt, Artificial Sequence
  Synthetic
uguggaacagucaagcuaga

SEQ ID NO: 222488 - RNA, 21 nt, Artificial Sequence
  Synthetic
uuguggaacagucaagcuaga

SEQ ID NO: 222489 - RNA, 22 nt, Artificial Sequence
  Synthetic
uuuguggaacagucaagcuaga

SEQ ID NO: 222490 - RNA, 23 nt, Artificial Sequence
  Synthetic
guuuguggaacagucaagcuaga

SEQ ID NO: 222491 - RNA, 24 nt, Artificial Sequence
  Synthetic
uguuuguggaacagucaagcuaga

SEQ ID NO: 222492 - RNA, 18 nt, Artificial Sequence
  Synthetic
guuaauacaugagcuaga

SEQ ID NO: 222493 - RNA, 19 nt, Artificial Sequence
  Synthetic
uguuaauacaugagcuaga

SEQ ID NO: 222494 - RNA, 20 nt, Artificial Sequence
  Synthetic
auguuaauacaugagcuaga

SEQ ID NO: 222495 - RNA, 21 nt, Artificial Sequence
  Synthetic
cauguuaauacaugagcuaga

SEQ ID NO: 222496 - RNA, 22 nt, Artificial Sequence
  Synthetic
acauguuaauacaugagcuaga

SEQ ID NO: 222497 - RNA, 23 nt, Artificial Sequence
  Synthetic
cacauguuaauacaugagcuaga

SEQ ID NO: 222498 - RNA, 24 nt, Artificial Sequence
  Synthetic
ucacauguuaauacaugagcuaga

SEQ ID NO: 222499 - RNA, 18 nt, Artificial Sequence
  Synthetic
aggacuuucauagcuaga

SEQ ID NO: 222500 - RNA, 19 nt, Artificial Sequence
  Synthetic
uaggacuuucauagcuaga

SEQ ID NO: 222501 - RNA, 20 nt, Artificial Sequence
  Synthetic
cuaggacuuucauagcuaga

SEQ ID NO: 222502 - RNA, 21 nt, Artificial Sequence
  Synthetic
ucuaggacuuucauagcuaga

SEQ ID NO: 222503 - RNA, 22 nt, Artificial Sequence
  Synthetic
aucuaggacuuucauagcuaga

SEQ ID NO: 222504 - RNA, 23 nt, Artificial Sequence
  Synthetic
caucuaggacuuucauagcuaga

SEQ ID NO: 222505 - RNA, 24 nt, Artificial Sequence
  Synthetic
ccaucuaggacuuucauagcuaga

SEQ ID NO: 222506 - RNA, 18 nt, Artificial Sequence
  Synthetic
cguuuucauaccgcuaga

SEQ ID NO: 222507 - RNA, 19 nt, Artificial Sequence
  Synthetic
ccguuuucauaccgcuaga

SEQ ID NO: 222508 - RNA, 20 nt, Artificial Sequence
  Synthetic
cccguuuucauaccgcuaga

SEQ ID NO: 222509 - RNA, 21 nt, Artificial Sequence
  Synthetic
gcccguuuucauaccgcuaga

SEQ ID NO: 222510 - RNA, 22 nt, Artificial Sequence
  Synthetic
agcccguuuucauaccgcuaga

SEQ ID NO: 222511 - RNA, 23 nt, Artificial Sequence
  Synthetic
uagcccguuuucauaccgcuaga

SEQ ID NO: 222512 - RNA, 24 nt, Artificial Sequence
  Synthetic
uuagcccguuuucauaccgcuaga

SEQ ID NO: 222513 - RNA, 18 nt, Artificial Sequence
  Synthetic
cacgacaguggggcuaga

SEQ ID NO: 222514 - RNA, 19 nt, Artificial Sequence
  Synthetic
ccacgacaguggggcuaga

SEQ ID NO: 222515 - RNA, 20 nt, Artificial Sequence
  Synthetic
gccacgacaguggggcuaga

SEQ ID NO: 222516 - RNA, 21 nt, Artificial Sequence
  Synthetic
ggccacgacaguggggcuaga

SEQ ID NO: 222517 - RNA, 22 nt, Artificial Sequence
  Synthetic
aggccacgacaguggggcuaga

SEQ ID NO: 222518 - RNA, 23 nt, Artificial Sequence
  Synthetic
aaggccacgacaguggggcuaga

SEQ ID NO: 222519 - RNA, 24 nt, Artificial Sequence
  Synthetic
aaaggccacgacaguggggcuaga

SEQ ID NO: 222520 - RNA, 18 nt, Artificial Sequence
  Synthetic
aucugcaguguggcuaga

SEQ ID NO: 222521 - RNA, 19 nt, Artificial Sequence
  Synthetic
uaucugcaguguggcuaga

SEQ ID NO: 222522 - RNA, 20 nt, Artificial Sequence
  Synthetic
uuaucugcaguguggcuaga

SEQ ID NO: 222523 - RNA, 21 nt, Artificial Sequence
  Synthetic
guuaucugcaguguggcuaga

SEQ ID NO: 222524 - RNA, 22 nt, Artificial Sequence
  Synthetic
gguuaucugcaguguggcuaga

SEQ ID NO: 222525 - RNA, 23 nt, Artificial Sequence
  Synthetic
ugguuaucugcaguguggcuaga

SEQ ID NO: 222526 - RNA, 24 nt, Artificial Sequence
  Synthetic
cugguuaucugcaguguggcuaga

SEQ ID NO: 222527 - RNA, 18 nt, Artificial Sequence
  Synthetic
uucucuuggauugcuaga

SEQ ID NO: 222528 - RNA, 19 nt, Artificial Sequence
  Synthetic
guucucuuggauugcuaga

SEQ ID NO: 222529 - RNA, 20 nt, Artificial Sequence
  Synthetic
uguucucuuggauugcuaga

SEQ ID NO: 222530 - RNA, 21 nt, Artificial Sequence
  Synthetic
auguucucuuggauugcuaga

SEQ ID NO: 222531 - RNA, 22 nt, Artificial Sequence
  Synthetic
gauguucucuuggauugcuaga

SEQ ID NO: 222532 - RNA, 23 nt, Artificial Sequence
  Synthetic
ugauguucucuuggauugcuaga

SEQ ID NO: 222533 - RNA, 24 nt, Artificial Sequence
  Synthetic
gugauguucucuuggauugcuaga

SEQ ID NO: 222534 - RNA, 18 nt, Artificial Sequence
  Synthetic
acauacucaucaucuaga

SEQ ID NO: 222535 - RNA, 19 nt, Artificial Sequence
  Synthetic
cacauacucaucaucuaga

SEQ ID NO: 222536 - RNA, 20 nt, Artificial Sequence
  Synthetic
ucacauacucaucaucuaga

SEQ ID NO: 222537 - RNA, 21 nt, Artificial Sequence
  Synthetic
uucacauacucaucaucuaga

SEQ ID NO: 222538 - RNA, 22 nt, Artificial Sequence
  Synthetic
cuucacauacucaucaucuaga

SEQ ID NO: 222539 - RNA, 23 nt, Artificial Sequence
  Synthetic
ucuucacauacucaucaucuaga

SEQ ID NO: 222540 - RNA, 24 nt, Artificial Sequence
  Synthetic
aucuucacauacucaucaucuaga

SEQ ID NO: 222541 - RNA, 18 nt, Artificial Sequence
  Synthetic
cuaaaauucauaucuaga

SEQ ID NO: 222542 - RNA, 19 nt, Artificial Sequence
  Synthetic
acuaaaauucauaucuaga

SEQ ID NO: 222543 - RNA, 20 nt, Artificial Sequence
  Synthetic
gacuaaaauucauaucuaga

SEQ ID NO: 222544 - RNA, 21 nt, Artificial Sequence
  Synthetic
agacuaaaauucauaucuaga

SEQ ID NO: 222545 - RNA, 22 nt, Artificial Sequence
  Synthetic
cagacuaaaauucauaucuaga

SEQ ID NO: 222546 - RNA, 23 nt, Artificial Sequence
  Synthetic
ucagacuaaaauucauaucuaga

SEQ ID NO: 222547 - RNA, 24 nt, Artificial Sequence
  Synthetic
aucagacuaaaauucauaucuaga

SEQ ID NO: 222548 - RNA, 18 nt, Artificial Sequence
  Synthetic
auugauaauaccucuaga

SEQ ID NO: 222549 - RNA, 19 nt, Artificial Sequence
  Synthetic
aauugauaauaccucuaga

SEQ ID NO: 222550 - RNA, 20 nt, Artificial Sequence
  Synthetic
aaauugauaauaccucuaga

SEQ ID NO: 222551 - RNA, 21 nt, Artificial Sequence
  Synthetic
caaauugauaauaccucuaga

SEQ ID NO: 222552 - RNA, 22 nt, Artificial Sequence
  Synthetic
ccaaauugauaauaccucuaga

SEQ ID NO: 222553 - RNA, 23 nt, Artificial Sequence
  Synthetic
uccaaauugauaauaccucuaga

SEQ ID NO: 222554 - RNA, 24 nt, Artificial Sequence
  Synthetic
cuccaaauugauaauaccucuaga

SEQ ID NO: 222555 - RNA, 18 nt, Artificial Sequence
  Synthetic
ucuuaaaaguccucuaga

SEQ ID NO: 222556 - RNA, 19 nt, Artificial Sequence
  Synthetic
cucuuaaaaguccucuaga

SEQ ID NO: 222557 - RNA, 20 nt, Artificial Sequence
  Synthetic
ccucuuaaaaguccucuaga

SEQ ID NO: 222558 - RNA, 21 nt, Artificial Sequence
  Synthetic
gccucuuaaaaguccucuaga

SEQ ID NO: 222559 - RNA, 22 nt, Artificial Sequence
  Synthetic
ggccucuuaaaaguccucuaga

SEQ ID NO: 222560 - RNA, 23 nt, Artificial Sequence
  Synthetic
aggccucuuaaaaguccucuaga

SEQ ID NO: 222561 - RNA, 24 nt, Artificial Sequence
  Synthetic
uaggccucuuaaaaguccucuaga

SEQ ID NO: 222562 - RNA, 18 nt, Artificial Sequence
  Synthetic
ugauucauuagcucuaga

SEQ ID NO: 222563 - RNA, 19 nt, Artificial Sequence
  Synthetic
uugauucauuagcucuaga

SEQ ID NO: 222564 - RNA, 20 nt, Artificial Sequence
  Synthetic
uuugauucauuagcucuaga

SEQ ID NO: 222565 - RNA, 21 nt, Artificial Sequence
  Synthetic
uuuugauucauuagcucuaga

SEQ ID NO: 222566 - RNA, 22 nt, Artificial Sequence
  Synthetic
auuuugauucauuagcucuaga

SEQ ID NO: 222567 - RNA, 23 nt, Artificial Sequence
  Synthetic
gauuuugauucauuagcucuaga

SEQ ID NO: 222568 - RNA, 24 nt, Artificial Sequence
  Synthetic
agauuuugauucauuagcucuaga

SEQ ID NO: 222569 - RNA, 18 nt, Artificial Sequence
  Synthetic
agaucauauuagucuaga

SEQ ID NO: 222570 - RNA, 19 nt, Artificial Sequence
  Synthetic
gagaucauauuagucuaga

SEQ ID NO: 222571 - RNA, 20 nt, Artificial Sequence
  Synthetic
ggagaucauauuagucuaga

SEQ ID NO: 222572 - RNA, 21 nt, Artificial Sequence
  Synthetic
uggagaucauauuagucuaga

SEQ ID NO: 222573 - RNA, 22 nt, Artificial Sequence
  Synthetic
cuggagaucauauuagucuaga

SEQ ID NO: 222574 - RNA, 23 nt, Artificial Sequence
  Synthetic
acuggagaucauauuagucuaga

SEQ ID NO: 222575 - RNA, 24 nt, Artificial Sequence
  Synthetic
cacuggagaucauauuagucuaga

SEQ ID NO: 222576 - RNA, 18 nt, Artificial Sequence
  Synthetic
auagugugugauucuaga

SEQ ID NO: 222577 - RNA, 19 nt, Artificial Sequence
  Synthetic
uauagugugugauucuaga

SEQ ID NO: 222578 - RNA, 20 nt, Artificial Sequence
  Synthetic
guauagugugugauucuaga

SEQ ID NO: 222579 - RNA, 21 nt, Artificial Sequence
  Synthetic
aguauagugugugauucuaga

SEQ ID NO: 222580 - RNA, 22 nt, Artificial Sequence
  Synthetic
aaguauagugugugauucuaga

SEQ ID NO: 222581 - RNA, 23 nt, Artificial Sequence
  Synthetic
aaaguauagugugugauucuaga

SEQ ID NO: 222582 - RNA, 24 nt, Artificial Sequence
  Synthetic
aaaaguauagugugugauucuaga

SEQ ID NO: 222583 - RNA, 18 nt, Artificial Sequence
  Synthetic
ugggagaggacuucuaga

SEQ ID NO: 222584 - RNA, 19 nt, Artificial Sequence
  Synthetic
uugggagaggacuucuaga

SEQ ID NO: 222585 - RNA, 20 nt, Artificial Sequence
  Synthetic
guugggagaggacuucuaga

SEQ ID NO: 222586 - RNA, 21 nt, Artificial Sequence
  Synthetic
aguugggagaggacuucuaga

SEQ ID NO: 222587 - RNA, 22 nt, Artificial Sequence
  Synthetic
aaguugggagaggacuucuaga

SEQ ID NO: 222588 - RNA, 23 nt, Artificial Sequence
  Synthetic
uaaguugggagaggacuucuaga

SEQ ID NO: 222589 - RNA, 24 nt, Artificial Sequence
  Synthetic
auaaguugggagaggacuucuaga

SEQ ID NO: 222590 - RNA, 18 nt, Artificial Sequence
  Synthetic
gaagcaaugacuucuaga

SEQ ID NO: 222591 - RNA, 19 nt, Artificial Sequence
  Synthetic
ugaagcaaugacuucuaga

SEQ ID NO: 222592 - RNA, 20 nt, Artificial Sequence
  Synthetic
cugaagcaaugacuucuaga

SEQ ID NO: 222593 - RNA, 21 nt, Artificial Sequence
  Synthetic
ccugaagcaaugacuucuaga

SEQ ID NO: 222594 - RNA, 22 nt, Artificial Sequence
  Synthetic
gccugaagcaaugacuucuaga

SEQ ID NO: 222595 - RNA, 23 nt, Artificial Sequence
  Synthetic
ugccugaagcaaugacuucuaga

SEQ ID NO: 222596 - RNA, 24 nt, Artificial Sequence
  Synthetic
uugccugaagcaaugacuucuaga

SEQ ID NO: 222597 - RNA, 18 nt, Artificial Sequence
  Synthetic
gcccaugccucuucuaga

SEQ ID NO: 222598 - RNA, 19 nt, Artificial Sequence
  Synthetic
ugcccaugccucuucuaga

SEQ ID NO: 222599 - RNA, 20 nt, Artificial Sequence
  Synthetic
uugcccaugccucuucuaga

SEQ ID NO: 222600 - RNA, 21 nt, Artificial Sequence
  Synthetic
guugcccaugccucuucuaga

SEQ ID NO: 222601 - RNA, 22 nt, Artificial Sequence
  Synthetic
aguugcccaugccucuucuaga

SEQ ID NO: 222602 - RNA, 23 nt, Artificial Sequence
  Synthetic
gaguugcccaugccucuucuaga

SEQ ID NO: 222603 - RNA, 24 nt, Artificial Sequence
  Synthetic
ggaguugcccaugccucuucuaga

SEQ ID NO: 222604 - RNA, 18 nt, Artificial Sequence
  Synthetic
cacugaugaaguucuaga

SEQ ID NO: 222605 - RNA, 19 nt, Artificial Sequence
  Synthetic
ucacugaugaaguucuaga

SEQ ID NO: 222606 - RNA, 20 nt, Artificial Sequence
  Synthetic
cucacugaugaaguucuaga

SEQ ID NO: 222607 - RNA, 21 nt, Artificial Sequence
  Synthetic
ucucacugaugaaguucuaga

SEQ ID NO: 222608 - RNA, 22 nt, Artificial Sequence
  Synthetic
uucucacugaugaaguucuaga

SEQ ID NO: 222609 - RNA, 23 nt, Artificial Sequence
  Synthetic
uuucucacugaugaaguucuaga

SEQ ID NO: 222610 - RNA, 24 nt, Artificial Sequence
  Synthetic
uuuucucacugaugaaguucuaga

SEQ ID NO: 222611 - RNA, 18 nt, Artificial Sequence
  Synthetic
acagugauagguucuaga

SEQ ID NO: 222612 - RNA, 19 nt, Artificial Sequence
  Synthetic
gacagugauagguucuaga

SEQ ID NO: 222613 - RNA, 20 nt, Artificial Sequence
  Synthetic
agacagugauagguucuaga

SEQ ID NO: 222614 - RNA, 21 nt, Artificial Sequence
  Synthetic
uagacagugauagguucuaga

SEQ ID NO: 222615 - RNA, 22 nt, Artificial Sequence
  Synthetic
guagacagugauagguucuaga

SEQ ID NO: 222616 - RNA, 23 nt, Artificial Sequence
  Synthetic
aguagacagugauagguucuaga

SEQ ID NO: 222617 - RNA, 24 nt, Artificial Sequence
  Synthetic
caguagacagugauagguucuaga

SEQ ID NO: 222618 - RNA, 18 nt, Artificial Sequence
  Synthetic
ccucucuuuauuucuaga

SEQ ID NO: 222619 - RNA, 19 nt, Artificial Sequence
  Synthetic
cccucucuuuauuucuaga

SEQ ID NO: 222620 - RNA, 20 nt, Artificial Sequence
  Synthetic
ucccucucuuuauuucuaga

SEQ ID NO: 222621 - RNA, 21 nt, Artificial Sequence
  Synthetic
aucccucucuuuauuucuaga

SEQ ID NO: 222622 - RNA, 22 nt, Artificial Sequence
  Synthetic
aaucccucucuuuauuucuaga

SEQ ID NO: 222623 - RNA, 23 nt, Artificial Sequence
  Synthetic
aaaucccucucuuuauuucuaga

SEQ ID NO: 222624 - RNA, 24 nt, Artificial Sequence
  Synthetic
uaaaucccucucuuuauuucuaga

SEQ ID NO: 222625 - RNA, 18 nt, Artificial Sequence
  Synthetic
aaaaacaagcuuucuaga

SEQ ID NO: 222626 - RNA, 19 nt, Artificial Sequence
  Synthetic
gaaaaacaagcuuucuaga

SEQ ID NO: 222627 - RNA, 20 nt, Artificial Sequence
  Synthetic
agaaaaacaagcuuucuaga

SEQ ID NO: 222628 - RNA, 21 nt, Artificial Sequence
  Synthetic
gagaaaaacaagcuuucuaga

SEQ ID NO: 222629 - RNA, 22 nt, Artificial Sequence
  Synthetic
ggagaaaaacaagcuuucuaga

SEQ ID NO: 222630 - RNA, 23 nt, Artificial Sequence
  Synthetic
uggagaaaaacaagcuuucuaga

SEQ ID NO: 222631 - RNA, 24 nt, Artificial Sequence
  Synthetic
uuggagaaaaacaagcuuucuaga

SEQ ID NO: 222632 - RNA, 18 nt, Artificial Sequence
  Synthetic
cauuuaauucuuucuaga

SEQ ID NO: 222633 - RNA, 19 nt, Artificial Sequence
  Synthetic
acauuuaauucuuucuaga

SEQ ID NO: 222634 - RNA, 20 nt, Artificial Sequence
  Synthetic
uacauuuaauucuuucuaga

SEQ ID NO: 222635 - RNA, 21 nt, Artificial Sequence
  Synthetic
uuacauuuaauucuuucuaga

SEQ ID NO: 222636 - RNA, 22 nt, Artificial Sequence
  Synthetic
auuacauuuaauucuuucuaga

SEQ ID NO: 222637 - RNA, 23 nt, Artificial Sequence
  Synthetic
cauuacauuuaauucuuucuaga

SEQ ID NO: 222638 - RNA, 24 nt, Artificial Sequence
  Synthetic
acauuacauuuaauucuuucuaga

SEQ ID NO: 222639 - RNA, 18 nt, Artificial Sequence
  Synthetic
acauaguuguuuucuaga

SEQ ID NO: 222640 - RNA, 19 nt, Artificial Sequence
  Synthetic
gacauaguuguuuucuaga

SEQ ID NO: 222641 - RNA, 20 nt, Artificial Sequence
  Synthetic
cgacauaguuguuuucuaga

SEQ ID NO: 222642 - RNA, 21 nt, Artificial Sequence
  Synthetic
ccgacauaguuguuuucuaga

SEQ ID NO: 222643 - RNA, 22 nt, Artificial Sequence
  Synthetic
cccgacauaguuguuuucuaga

SEQ ID NO: 222644 - RNA, 23 nt, Artificial Sequence
  Synthetic
ccccgacauaguuguuuucuaga

SEQ ID NO: 222645 - RNA, 24 nt, Artificial Sequence
  Synthetic
cccccgacauaguuguuuucuaga

SEQ ID NO: 222646 - RNA, 18 nt, Artificial Sequence
  Synthetic
auaaaagaacaaaguaga

SEQ ID NO: 222647 - RNA, 19 nt, Artificial Sequence
  Synthetic
aauaaaagaacaaaguaga

SEQ ID NO: 222648 - RNA, 20 nt, Artificial Sequence
  Synthetic
aaauaaaagaacaaaguaga

SEQ ID NO: 222649 - RNA, 21 nt, Artificial Sequence
  Synthetic
uaaauaaaagaacaaaguaga

SEQ ID NO: 222650 - RNA, 22 nt, Artificial Sequence
  Synthetic
guaaauaaaagaacaaaguaga

SEQ ID NO: 222651 - RNA, 23 nt, Artificial Sequence
  Synthetic
uguaaauaaaagaacaaaguaga

SEQ ID NO: 222652 - RNA, 24 nt, Artificial Sequence
  Synthetic
auguaaauaaaagaacaaaguaga

SEQ ID NO: 222653 - RNA, 18 nt, Artificial Sequence
  Synthetic
cuguaauaggaaaguaga

SEQ ID NO: 222654 - RNA, 19 nt, Artificial Sequence
  Synthetic
ucuguaauaggaaaguaga

SEQ ID NO: 222655 - RNA, 20 nt, Artificial Sequence
  Synthetic
cucuguaauaggaaaguaga

SEQ ID NO: 222656 - RNA, 21 nt, Artificial Sequence
  Synthetic
ccucuguaauaggaaaguaga

SEQ ID NO: 222657 - RNA, 22 nt, Artificial Sequence
  Synthetic
gccucuguaauaggaaaguaga

SEQ ID NO: 222658 - RNA, 23 nt, Artificial Sequence
  Synthetic
ugccucuguaauaggaaaguaga

SEQ ID NO: 222659 - RNA, 24 nt, Artificial Sequence
  Synthetic
augccucuguaauaggaaaguaga

SEQ ID NO: 222660 - RNA, 18 nt, Artificial Sequence
  Synthetic
cucagcaucccaaguaga

SEQ ID NO: 222661 - RNA, 19 nt, Artificial Sequence
  Synthetic
ucucagcaucccaaguaga

SEQ ID NO: 222662 - RNA, 20 nt, Artificial Sequence
  Synthetic
cucucagcaucccaaguaga

SEQ ID NO: 222663 - RNA, 21 nt, Artificial Sequence
  Synthetic
ucucucagcaucccaaguaga

SEQ ID NO: 222664 - RNA, 22 nt, Artificial Sequence
  Synthetic
gucucucagcaucccaaguaga

SEQ ID NO: 222665 - RNA, 23 nt, Artificial Sequence
  Synthetic
agucucucagcaucccaaguaga

SEQ ID NO: 222666 - RNA, 24 nt, Artificial Sequence
  Synthetic
gagucucucagcaucccaaguaga

SEQ ID NO: 222667 - RNA, 18 nt, Artificial Sequence
  Synthetic
gcugugcauccaaguaga

SEQ ID NO: 222668 - RNA, 19 nt, Artificial Sequence
  Synthetic
agcugugcauccaaguaga

SEQ ID NO: 222669 - RNA, 20 nt, Artificial Sequence
  Synthetic
cagcugugcauccaaguaga

SEQ ID NO: 222670 - RNA, 21 nt, Artificial Sequence
  Synthetic
gcagcugugcauccaaguaga

SEQ ID NO: 222671 - RNA, 22 nt, Artificial Sequence
  Synthetic
ggcagcugugcauccaaguaga

SEQ ID NO: 222672 - RNA, 23 nt, Artificial Sequence
  Synthetic
gggcagcugugcauccaaguaga

SEQ ID NO: 222673 - RNA, 24 nt, Artificial Sequence
  Synthetic
ugggcagcugugcauccaaguaga

SEQ ID NO: 222674 - RNA, 18 nt, Artificial Sequence
  Synthetic
gcaauaaguccaaguaga

SEQ ID NO: 222675 - RNA, 19 nt, Artificial Sequence
  Synthetic
agcaauaaguccaaguaga

SEQ ID NO: 222676 - RNA, 20 nt, Artificial Sequence
  Synthetic
gagcaauaaguccaaguaga

SEQ ID NO: 222677 - RNA, 21 nt, Artificial Sequence
  Synthetic
agagcaauaaguccaaguaga

SEQ ID NO: 222678 - RNA, 22 nt, Artificial Sequence
  Synthetic
uagagcaauaaguccaaguaga

SEQ ID NO: 222679 - RNA, 23 nt, Artificial Sequence
  Synthetic
auagagcaauaaguccaaguaga

SEQ ID NO: 222680 - RNA, 24 nt, Artificial Sequence
  Synthetic
aauagagcaauaaguccaaguaga

SEQ ID NO: 222681 - RNA, 18 nt, Artificial Sequence
  Synthetic
augccuuguggaaguaga

SEQ ID NO: 222682 - RNA, 19 nt, Artificial Sequence
  Synthetic
aaugccuuguggaaguaga

SEQ ID NO: 222683 - RNA, 20 nt, Artificial Sequence
  Synthetic
aaaugccuuguggaaguaga

SEQ ID NO: 222684 - RNA, 21 nt, Artificial Sequence
  Synthetic
uaaaugccuuguggaaguaga

SEQ ID NO: 222685 - RNA, 22 nt, Artificial Sequence
  Synthetic
uuaaaugccuuguggaaguaga

SEQ ID NO: 222686 - RNA, 23 nt, Artificial Sequence
  Synthetic
uuuaaaugccuuguggaaguaga

SEQ ID NO: 222687 - RNA, 24 nt, Artificial Sequence
  Synthetic
guuuaaaugccuuguggaaguaga

SEQ ID NO: 222688 - RNA, 18 nt, Artificial Sequence
  Synthetic
gaaauuguaagcaguaga

SEQ ID NO: 222689 - RNA, 19 nt, Artificial Sequence
  Synthetic
ugaaauuguaagcaguaga

SEQ ID NO: 222690 - RNA, 20 nt, Artificial Sequence
  Synthetic
cugaaauuguaagcaguaga

SEQ ID NO: 222691 - RNA, 21 nt, Artificial Sequence
  Synthetic
acugaaauuguaagcaguaga

SEQ ID NO: 222692 - RNA, 22 nt, Artificial Sequence
  Synthetic
uacugaaauuguaagcaguaga

SEQ ID NO: 222693 - RNA, 23 nt, Artificial Sequence
  Synthetic
auacugaaauuguaagcaguaga

SEQ ID NO: 222694 - RNA, 24 nt, Artificial Sequence
  Synthetic
aauacugaaauuguaagcaguaga

SEQ ID NO: 222695 - RNA, 18 nt, Artificial Sequence
  Synthetic
cacauuugaaucaguaga

SEQ ID NO: 222696 - RNA, 19 nt, Artificial Sequence
  Synthetic
ucacauuugaaucaguaga

SEQ ID NO: 222697 - RNA, 20 nt, Artificial Sequence
  Synthetic
uucacauuugaaucaguaga

SEQ ID NO: 222698 - RNA, 21 nt, Artificial Sequence
  Synthetic
auucacauuugaaucaguaga

SEQ ID NO: 222699 - RNA, 22 nt, Artificial Sequence
  Synthetic
gauucacauuugaaucaguaga

SEQ ID NO: 222700 - RNA, 23 nt, Artificial Sequence
  Synthetic
agauucacauuugaaucaguaga

SEQ ID NO: 222701 - RNA, 24 nt, Artificial Sequence
  Synthetic
gagauucacauuugaaucaguaga

SEQ ID NO: 222702 - RNA, 18 nt, Artificial Sequence
  Synthetic
aguguaggagucaguaga

SEQ ID NO: 222703 - RNA, 19 nt, Artificial Sequence
  Synthetic
caguguaggagucaguaga

SEQ ID NO: 222704 - RNA, 20 nt, Artificial Sequence
  Synthetic
gcaguguaggagucaguaga

SEQ ID NO: 222705 - RNA, 21 nt, Artificial Sequence
  Synthetic
agcaguguaggagucaguaga

SEQ ID NO: 222706 - RNA, 22 nt, Artificial Sequence
  Synthetic
gagcaguguaggagucaguaga

SEQ ID NO: 222707 - RNA, 23 nt, Artificial Sequence
  Synthetic
ggagcaguguaggagucaguaga

SEQ ID NO: 222708 - RNA, 24 nt, Artificial Sequence
  Synthetic
aggagcaguguaggagucaguaga

SEQ ID NO: 222709 - RNA, 18 nt, Artificial Sequence
  Synthetic
aauuugcaguucaguaga

SEQ ID NO: 222710 - RNA, 19 nt, Artificial Sequence
  Synthetic
aaauuugcaguucaguaga

SEQ ID NO: 222711 - RNA, 20 nt, Artificial Sequence
  Synthetic
gaaauuugcaguucaguaga

SEQ ID NO: 222712 - RNA, 21 nt, Artificial Sequence
  Synthetic
ggaaauuugcaguucaguaga

SEQ ID NO: 222713 - RNA, 22 nt, Artificial Sequence
  Synthetic
gggaaauuugcaguucaguaga

SEQ ID NO: 222714 - RNA, 23 nt, Artificial Sequence
  Synthetic
agggaaauuugcaguucaguaga

SEQ ID NO: 222715 - RNA, 24 nt, Artificial Sequence
  Synthetic
cagggaaauuugcaguucaguaga

SEQ ID NO: 222716 - RNA, 18 nt, Artificial Sequence
  Synthetic
caauuuuugaauaguaga

SEQ ID NO: 222717 - RNA, 19 nt, Artificial Sequence
  Synthetic
acaauuuuugaauaguaga

SEQ ID NO: 222718 - RNA, 20 nt, Artificial Sequence
  Synthetic
uacaauuuuugaauaguaga

SEQ ID NO: 222719 - RNA, 21 nt, Artificial Sequence
  Synthetic
auacaauuuuugaauaguaga

SEQ ID NO: 222720 - RNA, 22 nt, Artificial Sequence
  Synthetic
uauacaauuuuugaauaguaga

SEQ ID NO: 222721 - RNA, 23 nt, Artificial Sequence
  Synthetic
guauacaauuuuugaauaguaga

SEQ ID NO: 222722 - RNA, 24 nt, Artificial Sequence
  Synthetic
aguauacaauuuuugaauaguaga

SEQ ID NO: 222723 - RNA, 18 nt, Artificial Sequence
  Synthetic
gcucuacuugguaguaga

SEQ ID NO: 222724 - RNA, 19 nt, Artificial Sequence
  Synthetic
ugcucuacuugguaguaga

SEQ ID NO: 222725 - RNA, 20 nt, Artificial Sequence
  Synthetic
uugcucuacuugguaguaga

SEQ ID NO: 222726 - RNA, 21 nt, Artificial Sequence
  Synthetic
uuugcucuacuugguaguaga

SEQ ID NO: 222727 - RNA, 22 nt, Artificial Sequence
  Synthetic
auuugcucuacuugguaguaga

SEQ ID NO: 222728 - RNA, 23 nt, Artificial Sequence
  Synthetic
aauuugcucuacuugguaguaga

SEQ ID NO: 222729 - RNA, 24 nt, Artificial Sequence
  Synthetic
gaauuugcucuacuugguaguaga

SEQ ID NO: 222730 - RNA, 18 nt, Artificial Sequence
  Synthetic
auaaucaacuguaguaga

SEQ ID NO: 222731 - RNA, 19 nt, Artificial Sequence
  Synthetic
uauaaucaacuguaguaga

SEQ ID NO: 222732 - RNA, 20 nt, Artificial Sequence
  Synthetic
uuauaaucaacuguaguaga

SEQ ID NO: 222733 - RNA, 21 nt, Artificial Sequence
  Synthetic
cuuauaaucaacuguaguaga

SEQ ID NO: 222734 - RNA, 22 nt, Artificial Sequence
  Synthetic
acuuauaaucaacuguaguaga

SEQ ID NO: 222735 - RNA, 23 nt, Artificial Sequence
  Synthetic
aacuuauaaucaacuguaguaga

SEQ ID NO: 222736 - RNA, 24 nt, Artificial Sequence
  Synthetic
aaacuuauaaucaacuguaguaga

SEQ ID NO: 222737 - RNA, 18 nt, Artificial Sequence
  Synthetic
uaaauccuugaacguaga

SEQ ID NO: 222738 - RNA, 19 nt, Artificial Sequence
  Synthetic
auaaauccuugaacguaga

SEQ ID NO: 222739 - RNA, 20 nt, Artificial Sequence
  Synthetic
aauaaauccuugaacguaga

SEQ ID NO: 222740 - RNA, 21 nt, Artificial Sequence
  Synthetic
aaauaaauccuugaacguaga

SEQ ID NO: 222741 - RNA, 22 nt, Artificial Sequence
  Synthetic
uaaauaaauccuugaacguaga

SEQ ID NO: 222742 - RNA, 23 nt, Artificial Sequence
  Synthetic
uuaaauaaauccuugaacguaga

SEQ ID NO: 222743 - RNA, 24 nt, Artificial Sequence
  Synthetic
auuaaauaaauccuugaacguaga

SEQ ID NO: 222744 - RNA, 18 nt, Artificial Sequence
  Synthetic
acauuacugugagguaga

SEQ ID NO: 222745 - RNA, 19 nt, Artificial Sequence
  Synthetic
aacauuacugugagguaga

SEQ ID NO: 222746 - RNA, 20 nt, Artificial Sequence
  Synthetic
caacauuacugugagguaga

SEQ ID NO: 222747 - RNA, 21 nt, Artificial Sequence
  Synthetic
acaacauuacugugagguaga

SEQ ID NO: 222748 - RNA, 22 nt, Artificial Sequence
  Synthetic
uacaacauuacugugagguaga

SEQ ID NO: 222749 - RNA, 23 nt, Artificial Sequence
  Synthetic
uuacaacauuacugugagguaga

SEQ ID NO: 222750 - RNA, 24 nt, Artificial Sequence
  Synthetic
cuuacaacauuacugugagguaga

SEQ ID NO: 222751 - RNA, 18 nt, Artificial Sequence
  Synthetic
cacaaucauuuagguaga

SEQ ID NO: 222752 - RNA, 19 nt, Artificial Sequence
  Synthetic
ucacaaucauuuagguaga

SEQ ID NO: 222753 - RNA, 20 nt, Artificial Sequence
  Synthetic
uucacaaucauuuagguaga

SEQ ID NO: 222754 - RNA, 21 nt, Artificial Sequence
  Synthetic
uuucacaaucauuuagguaga

SEQ ID NO: 222755 - RNA, 22 nt, Artificial Sequence
  Synthetic
cuuucacaaucauuuagguaga

SEQ ID NO: 222756 - RNA, 23 nt, Artificial Sequence
  Synthetic
acuuucacaaucauuuagguaga

SEQ ID NO: 222757 - RNA, 24 nt, Artificial Sequence
  Synthetic
gacuuucacaaucauuuagguaga

SEQ ID NO: 222758 - RNA, 18 nt, Artificial Sequence
  Synthetic
agccaguggaaggguaga

SEQ ID NO: 222759 - RNA, 19 nt, Artificial Sequence
  Synthetic
aagccaguggaaggguaga

SEQ ID NO: 222760 - RNA, 20 nt, Artificial Sequence
  Synthetic
caagccaguggaaggguaga

SEQ ID NO: 222761 - RNA, 21 nt, Artificial Sequence
  Synthetic
acaagccaguggaaggguaga

SEQ ID NO: 222762 - RNA, 22 nt, Artificial Sequence
  Synthetic
aacaagccaguggaaggguaga

SEQ ID NO: 222763 - RNA, 23 nt, Artificial Sequence
  Synthetic
aaacaagccaguggaaggguaga

SEQ ID NO: 222764 - RNA, 24 nt, Artificial Sequence
  Synthetic
aaaacaagccaguggaaggguaga

SEQ ID NO: 222765 - RNA, 18 nt, Artificial Sequence
  Synthetic
ucuuguauucaggguaga

SEQ ID NO: 222766 - RNA, 19 nt, Artificial Sequence
  Synthetic
cucuuguauucaggguaga

SEQ ID NO: 222767 - RNA, 20 nt, Artificial Sequence
  Synthetic
ucucuuguauucaggguaga

SEQ ID NO: 222768 - RNA, 21 nt, Artificial Sequence
  Synthetic
gucucuuguauucaggguaga

SEQ ID NO: 222769 - RNA, 22 nt, Artificial Sequence
  Synthetic
ggucucuuguauucaggguaga

SEQ ID NO: 222770 - RNA, 23 nt, Artificial Sequence
  Synthetic
gggucucuuguauucaggguaga

SEQ ID NO: 222771 - RNA, 24 nt, Artificial Sequence
  Synthetic
agggucucuuguauucaggguaga

SEQ ID NO: 222772 - RNA, 18 nt, Artificial Sequence
  Synthetic
uaaaauuacauggguaga

SEQ ID NO: 222773 - RNA, 19 nt, Artificial Sequence
  Synthetic
cuaaaauuacauggguaga

SEQ ID NO: 222774 - RNA, 20 nt, Artificial Sequence
  Synthetic
gcuaaaauuacauggguaga

SEQ ID NO: 222775 - RNA, 21 nt, Artificial Sequence
  Synthetic
ugcuaaaauuacauggguaga

SEQ ID NO: 222776 - RNA, 22 nt, Artificial Sequence
  Synthetic
augcuaaaauuacauggguaga

SEQ ID NO: 222777 - RNA, 23 nt, Artificial Sequence
  Synthetic
aaugcuaaaauuacauggguaga

SEQ ID NO: 222778 - RNA, 24 nt, Artificial Sequence
  Synthetic
caaugcuaaaauuacauggguaga

SEQ ID NO: 222779 - RNA, 18 nt, Artificial Sequence
  Synthetic
aaaugggauauggguaga

SEQ ID NO: 222780 - RNA, 19 nt, Artificial Sequence
  Synthetic
gaaaugggauauggguaga

SEQ ID NO: 222781 - RNA, 20 nt, Artificial Sequence
  Synthetic
ggaaaugggauauggguaga

SEQ ID NO: 222782 - RNA, 21 nt, Artificial Sequence
  Synthetic
gggaaaugggauauggguaga

SEQ ID NO: 222783 - RNA, 22 nt, Artificial Sequence
  Synthetic
ggggaaaugggauauggguaga

SEQ ID NO: 222784 - RNA, 23 nt, Artificial Sequence
  Synthetic
uggggaaaugggauauggguaga

SEQ ID NO: 222785 - RNA, 24 nt, Artificial Sequence
  Synthetic
auggggaaaugggauauggguaga

SEQ ID NO: 222786 - RNA, 18 nt, Artificial Sequence
  Synthetic
ugagaagaagaugguaga

SEQ ID NO: 222787 - RNA, 19 nt, Artificial Sequence
  Synthetic
augagaagaagaugguaga

SEQ ID NO: 222788 - RNA, 20 nt, Artificial Sequence
  Synthetic
aaugagaagaagaugguaga

SEQ ID NO: 222789 - RNA, 21 nt, Artificial Sequence
  Synthetic
caaugagaagaagaugguaga

SEQ ID NO: 222790 - RNA, 22 nt, Artificial Sequence
  Synthetic
gcaaugagaagaagaugguaga

SEQ ID NO: 222791 - RNA, 23 nt, Artificial Sequence
  Synthetic
ggcaaugagaagaagaugguaga

SEQ ID NO: 222792 - RNA, 24 nt, Artificial Sequence
  Synthetic
uggcaaugagaagaagaugguaga

SEQ ID NO: 222793 - RNA, 18 nt, Artificial Sequence
  Synthetic
gcauucucagaugguaga

SEQ ID NO: 222794 - RNA, 19 nt, Artificial Sequence
  Synthetic
ggcauucucagaugguaga

SEQ ID NO: 222795 - RNA, 20 nt, Artificial Sequence
  Synthetic
aggcauucucagaugguaga

SEQ ID NO: 222796 - RNA, 21 nt, Artificial Sequence
  Synthetic
uaggcauucucagaugguaga

SEQ ID NO: 222797 - RNA, 22 nt, Artificial Sequence
  Synthetic
guaggcauucucagaugguaga

SEQ ID NO: 222798 - RNA, 23 nt, Artificial Sequence
  Synthetic
uguaggcauucucagaugguaga

SEQ ID NO: 222799 - RNA, 24 nt, Artificial Sequence
  Synthetic
cuguaggcauucucagaugguaga

SEQ ID NO: 222800 - RNA, 18 nt, Artificial Sequence
  Synthetic
ccagacucagcugguaga

SEQ ID NO: 222801 - RNA, 19 nt, Artificial Sequence
  Synthetic
cccagacucagcugguaga

SEQ ID NO: 222802 - RNA, 20 nt, Artificial Sequence
  Synthetic
ccccagacucagcugguaga

SEQ ID NO: 222803 - RNA, 21 nt, Artificial Sequence
  Synthetic
accccagacucagcugguaga

SEQ ID NO: 222804 - RNA, 22 nt, Artificial Sequence
  Synthetic
aaccccagacucagcugguaga

SEQ ID NO: 222805 - RNA, 23 nt, Artificial Sequence
  Synthetic
aaaccccagacucagcugguaga

SEQ ID NO: 222806 - RNA, 24 nt, Artificial Sequence
  Synthetic
aaaaccccagacucagcugguaga

SEQ ID NO: 222807 - RNA, 18 nt, Artificial Sequence
  Synthetic
agguuggaaucugguaga

SEQ ID NO: 222808 - RNA, 19 nt, Artificial Sequence
  Synthetic
aagguuggaaucugguaga

SEQ ID NO: 222809 - RNA, 20 nt, Artificial Sequence
  Synthetic
aaagguuggaaucugguaga

SEQ ID NO: 222810 - RNA, 21 nt, Artificial Sequence
  Synthetic
uaaagguuggaaucugguaga

SEQ ID NO: 222811 - RNA, 22 nt, Artificial Sequence
  Synthetic
cuaaagguuggaaucugguaga

SEQ ID NO: 222812 - RNA, 23 nt, Artificial Sequence
  Synthetic
acuaaagguuggaaucugguaga

SEQ ID NO: 222813 - RNA, 24 nt, Artificial Sequence
  Synthetic
aacuaaagguuggaaucugguaga

SEQ ID NO: 222814 - RNA, 18 nt, Artificial Sequence
  Synthetic
ggcagacagagugguaga

SEQ ID NO: 222815 - RNA, 19 nt, Artificial Sequence
  Synthetic
aggcagacagagugguaga

SEQ ID NO: 222816 - RNA, 20 nt, Artificial Sequence
  Synthetic
aaggcagacagagugguaga

SEQ ID NO: 222817 - RNA, 21 nt, Artificial Sequence
  Synthetic
aaaggcagacagagugguaga

SEQ ID NO: 222818 - RNA, 22 nt, Artificial Sequence
  Synthetic
caaaggcagacagagugguaga

SEQ ID NO: 222819 - RNA, 23 nt, Artificial Sequence
  Synthetic
acaaaggcagacagagugguaga

SEQ ID NO: 222820 - RNA, 24 nt, Artificial Sequence
  Synthetic
cacaaaggcagacagagugguaga

SEQ ID NO: 222821 - RNA, 18 nt, Artificial Sequence
  Synthetic
uaaaugaggguugguaga

SEQ ID NO: 222822 - RNA, 19 nt, Artificial Sequence
  Synthetic
auaaaugaggguugguaga

SEQ ID NO: 222823 - RNA, 20 nt, Artificial Sequence
  Synthetic
gauaaaugaggguugguaga

SEQ ID NO: 222824 - RNA, 21 nt, Artificial Sequence
  Synthetic
ggauaaaugaggguugguaga

SEQ ID NO: 222825 - RNA, 22 nt, Artificial Sequence
  Synthetic
gggauaaaugaggguugguaga

SEQ ID NO: 222826 - RNA, 23 nt, Artificial Sequence
  Synthetic
agggauaaaugaggguugguaga

SEQ ID NO: 222827 - RNA, 24 nt, Artificial Sequence
  Synthetic
gagggauaaaugaggguugguaga

SEQ ID NO: 222828 - RNA, 18 nt, Artificial Sequence
  Synthetic
uuagagaaaaaauguaga

SEQ ID NO: 222829 - RNA, 19 nt, Artificial Sequence
  Synthetic
uuuagagaaaaaauguaga

SEQ ID NO: 222830 - RNA, 20 nt, Artificial Sequence
  Synthetic
uuuuagagaaaaaauguaga

SEQ ID NO: 222831 - RNA, 21 nt, Artificial Sequence
  Synthetic
auuuuagagaaaaaauguaga

SEQ ID NO: 222832 - RNA, 22 nt, Artificial Sequence
  Synthetic
uauuuuagagaaaaaauguaga

SEQ ID NO: 222833 - RNA, 23 nt, Artificial Sequence
  Synthetic
auauuuuagagaaaaaauguaga

SEQ ID NO: 222834 - RNA, 24 nt, Artificial Sequence
  Synthetic
uauauuuuagagaaaaaauguaga

SEQ ID NO: 222835 - RNA, 18 nt, Artificial Sequence
  Synthetic
ucagagcacaacuguaga

SEQ ID NO: 222836 - RNA, 19 nt, Artificial Sequence
  Synthetic
gucagagcacaacuguaga

SEQ ID NO: 222837 - RNA, 20 nt, Artificial Sequence
  Synthetic
agucagagcacaacuguaga

SEQ ID NO: 222838 - RNA, 21 nt, Artificial Sequence
  Synthetic
uagucagagcacaacuguaga

SEQ ID NO: 222839 - RNA, 22 nt, Artificial Sequence
  Synthetic
guagucagagcacaacuguaga

SEQ ID NO: 222840 - RNA, 23 nt, Artificial Sequence
  Synthetic
uguagucagagcacaacuguaga

SEQ ID NO: 222841 - RNA, 24 nt, Artificial Sequence
  Synthetic
uuguagucagagcacaacuguaga

SEQ ID NO: 222842 - RNA, 18 nt, Artificial Sequence
  Synthetic
gaugugucacacuguaga

SEQ ID NO: 222843 - RNA, 19 nt, Artificial Sequence
  Synthetic
agaugugucacacuguaga

SEQ ID NO: 222844 - RNA, 20 nt, Artificial Sequence
  Synthetic
gagaugugucacacuguaga

SEQ ID NO: 222845 - RNA, 21 nt, Artificial Sequence
  Synthetic
ugagaugugucacacuguaga

SEQ ID NO: 222846 - RNA, 22 nt, Artificial Sequence
  Synthetic
augagaugugucacacuguaga

SEQ ID NO: 222847 - RNA, 23 nt, Artificial Sequence
  Synthetic
aaugagaugugucacacuguaga

SEQ ID NO: 222848 - RNA, 24 nt, Artificial Sequence
  Synthetic
uaaugagaugugucacacuguaga

SEQ ID NO: 222849 - RNA, 18 nt, Artificial Sequence
  Synthetic
ucaauugucagcuguaga

SEQ ID NO: 222850 - RNA, 19 nt, Artificial Sequence
  Synthetic
uucaauugucagcuguaga

SEQ ID NO: 222851 - RNA, 20 nt, Artificial Sequence
  Synthetic
auucaauugucagcuguaga

SEQ ID NO: 222852 - RNA, 21 nt, Artificial Sequence
  Synthetic
gauucaauugucagcuguaga

SEQ ID NO: 222853 - RNA, 22 nt, Artificial Sequence
  Synthetic
agauucaauugucagcuguaga

SEQ ID NO: 222854 - RNA, 23 nt, Artificial Sequence
  Synthetic
uagauucaauugucagcuguaga

SEQ ID NO: 222855 - RNA, 24 nt, Artificial Sequence
  Synthetic
guagauucaauugucagcuguaga

SEQ ID NO: 222856 - RNA, 18 nt, Artificial Sequence
  Synthetic
agauagauugaguguaga

SEQ ID NO: 222857 - RNA, 19 nt, Artificial Sequence
  Synthetic
cagauagauugaguguaga

SEQ ID NO: 222858 - RNA, 20 nt, Artificial Sequence
  Synthetic
ucagauagauugaguguaga

SEQ ID NO: 222859 - RNA, 21 nt, Artificial Sequence
  Synthetic
cucagauagauugaguguaga

SEQ ID NO: 222860 - RNA, 22 nt, Artificial Sequence
  Synthetic
ucucagauagauugaguguaga

SEQ ID NO: 222861 - RNA, 23 nt, Artificial Sequence
  Synthetic
uucucagauagauugaguguaga

SEQ ID NO: 222862 - RNA, 24 nt, Artificial Sequence
  Synthetic
cuucucagauagauugaguguaga

SEQ ID NO: 222863 - RNA, 18 nt, Artificial Sequence
  Synthetic
ugcugccuauaguguaga

SEQ ID NO: 222864 - RNA, 19 nt, Artificial Sequence
  Synthetic
uugcugccuauaguguaga

SEQ ID NO: 222865 - RNA, 20 nt, Artificial Sequence
  Synthetic
uuugcugccuauaguguaga

SEQ ID NO: 222866 - RNA, 21 nt, Artificial Sequence
  Synthetic
uuuugcugccuauaguguaga

SEQ ID NO: 222867 - RNA, 22 nt, Artificial Sequence
  Synthetic
auuuugcugccuauaguguaga

SEQ ID NO: 222868 - RNA, 23 nt, Artificial Sequence
  Synthetic
aauuuugcugccuauaguguaga

SEQ ID NO: 222869 - RNA, 24 nt, Artificial Sequence
  Synthetic
gaauuuugcugccuauaguguaga

SEQ ID NO: 222870 - RNA, 18 nt, Artificial Sequence
  Synthetic
gauuucucaggguguaga

SEQ ID NO: 222871 - RNA, 19 nt, Artificial Sequence
  Synthetic
agauuucucaggguguaga

SEQ ID NO: 222872 - RNA, 20 nt, Artificial Sequence
  Synthetic
cagauuucucaggguguaga

SEQ ID NO: 222873 - RNA, 21 nt, Artificial Sequence
  Synthetic
ucagauuucucaggguguaga

SEQ ID NO: 222874 - RNA, 22 nt, Artificial Sequence
  Synthetic
uucagauuucucaggguguaga

SEQ ID NO: 222875 - RNA, 23 nt, Artificial Sequence
  Synthetic
uuucagauuucucaggguguaga

SEQ ID NO: 222876 - RNA, 24 nt, Artificial Sequence
  Synthetic
uuuucagauuucucaggguguaga

SEQ ID NO: 222877 - RNA, 18 nt, Artificial Sequence
  Synthetic
acugaugccccuuguaga

SEQ ID NO: 222878 - RNA, 19 nt, Artificial Sequence
  Synthetic
uacugaugccccuuguaga

SEQ ID NO: 222879 - RNA, 20 nt, Artificial Sequence
  Synthetic
auacugaugccccuuguaga

SEQ ID NO: 222880 - RNA, 21 nt, Artificial Sequence
  Synthetic
gauacugaugccccuuguaga

SEQ ID NO: 222881 - RNA, 22 nt, Artificial Sequence
  Synthetic
ggauacugaugccccuuguaga

SEQ ID NO: 222882 - RNA, 23 nt, Artificial Sequence
  Synthetic
aggauacugaugccccuuguaga

SEQ ID NO: 222883 - RNA, 24 nt, Artificial Sequence
  Synthetic
caggauacugaugccccuuguaga

SEQ ID NO: 222884 - RNA, 18 nt, Artificial Sequence
  Synthetic
uuguucuguucuuguaga

SEQ ID NO: 222885 - RNA, 19 nt, Artificial Sequence
  Synthetic
cuuguucuguucuuguaga

SEQ ID NO: 222886 - RNA, 20 nt, Artificial Sequence
  Synthetic
ucuuguucuguucuuguaga

SEQ ID NO: 222887 - RNA, 21 nt, Artificial Sequence
  Synthetic
cucuuguucuguucuuguaga

SEQ ID NO: 222888 - RNA, 22 nt, Artificial Sequence
  Synthetic
ccucuuguucuguucuuguaga

SEQ ID NO: 222889 - RNA, 23 nt, Artificial Sequence
  Synthetic
uccucuuguucuguucuuguaga

SEQ ID NO: 222890 - RNA, 24 nt, Artificial Sequence
  Synthetic
uuccucuuguucuguucuuguaga

SEQ ID NO: 222891 - RNA, 18 nt, Artificial Sequence
  Synthetic
cuguauaacaguuguaga

SEQ ID NO: 222892 - RNA, 19 nt, Artificial Sequence
  Synthetic
gcuguauaacaguuguaga

SEQ ID NO: 222893 - RNA, 20 nt, Artificial Sequence
  Synthetic
agcuguauaacaguuguaga

SEQ ID NO: 222894 - RNA, 21 nt, Artificial Sequence
  Synthetic
cagcuguauaacaguuguaga

SEQ ID NO: 222895 - RNA, 22 nt, Artificial Sequence
  Synthetic
acagcuguauaacaguuguaga

SEQ ID NO: 222896 - RNA, 23 nt, Artificial Sequence
  Synthetic
aacagcuguauaacaguuguaga

SEQ ID NO: 222897 - RNA, 24 nt, Artificial Sequence
  Synthetic
caacagcuguauaacaguuguaga

SEQ ID NO: 222898 - RNA, 18 nt, Artificial Sequence
  Synthetic
aauaaacaugguuguaga

SEQ ID NO: 222899 - RNA, 19 nt, Artificial Sequence
  Synthetic
aaauaaacaugguuguaga

SEQ ID NO: 222900 - RNA, 20 nt, Artificial Sequence
  Synthetic
aaaauaaacaugguuguaga

SEQ ID NO: 222901 - RNA, 21 nt, Artificial Sequence
  Synthetic
uaaaauaaacaugguuguaga

SEQ ID NO: 222902 - RNA, 22 nt, Artificial Sequence
  Synthetic
uuaaaauaaacaugguuguaga

SEQ ID NO: 222903 - RNA, 23 nt, Artificial Sequence
  Synthetic
cuuaaaauaaacaugguuguaga

SEQ ID NO: 222904 - RNA, 24 nt, Artificial Sequence
  Synthetic
ucuuaaaauaaacaugguuguaga

SEQ ID NO: 222905 - RNA, 18 nt, Artificial Sequence
  Synthetic
auucucaagacaauuaga

SEQ ID NO: 222906 - RNA, 19 nt, Artificial Sequence
  Synthetic
cauucucaagacaauuaga

SEQ ID NO: 222907 - RNA, 20 nt, Artificial Sequence
  Synthetic
acauucucaagacaauuaga

SEQ ID NO: 222908 - RNA, 21 nt, Artificial Sequence
  Synthetic
gacauucucaagacaauuaga

SEQ ID NO: 222909 - RNA, 22 nt, Artificial Sequence
  Synthetic
ugacauucucaagacaauuaga

SEQ ID NO: 222910 - RNA, 23 nt, Artificial Sequence
  Synthetic
augacauucucaagacaauuaga

SEQ ID NO: 222911 - RNA, 24 nt, Artificial Sequence
  Synthetic
aaugacauucucaagacaauuaga

SEQ ID NO: 222912 - RNA, 18 nt, Artificial Sequence
  Synthetic
gcuggcaggccaauuaga

SEQ ID NO: 222913 - RNA, 19 nt, Artificial Sequence
  Synthetic
agcuggcaggccaauuaga

SEQ ID NO: 222914 - RNA, 20 nt, Artificial Sequence
  Synthetic
uagcuggcaggccaauuaga

SEQ ID NO: 222915 - RNA, 21 nt, Artificial Sequence
  Synthetic
auagcuggcaggccaauuaga

SEQ ID NO: 222916 - RNA, 22 nt, Artificial Sequence
  Synthetic
aauagcuggcaggccaauuaga

SEQ ID NO: 222917 - RNA, 23 nt, Artificial Sequence
  Synthetic
caauagcuggcaggccaauuaga

SEQ ID NO: 222918 - RNA, 24 nt, Artificial Sequence
  Synthetic
ucaauagcuggcaggccaauuaga

SEQ ID NO: 222919 - RNA, 18 nt, Artificial Sequence
  Synthetic
acaauaaagucaauuaga

SEQ ID NO: 222920 - RNA, 19 nt, Artificial Sequence
  Synthetic
aacaauaaagucaauuaga

SEQ ID NO: 222921 - RNA, 20 nt, Artificial Sequence
  Synthetic
gaacaauaaagucaauuaga

SEQ ID NO: 222922 - RNA, 21 nt, Artificial Sequence
  Synthetic
ugaacaauaaagucaauuaga

SEQ ID NO: 222923 - RNA, 22 nt, Artificial Sequence
  Synthetic
augaacaauaaagucaauuaga

SEQ ID NO: 222924 - RNA, 23 nt, Artificial Sequence
  Synthetic
uaugaacaauaaagucaauuaga

SEQ ID NO: 222925 - RNA, 24 nt, Artificial Sequence
  Synthetic
uuaugaacaauaaagucaauuaga

SEQ ID NO: 222926 - RNA, 18 nt, Artificial Sequence
  Synthetic
aaugugucuauaauuaga

SEQ ID NO: 222927 - RNA, 19 nt, Artificial Sequence
  Synthetic
uaaugugucuauaauuaga

SEQ ID NO: 222928 - RNA, 20 nt, Artificial Sequence
  Synthetic
uuaaugugucuauaauuaga

SEQ ID NO: 222929 - RNA, 21 nt, Artificial Sequence
  Synthetic
uuuaaugugucuauaauuaga

SEQ ID NO: 222930 - RNA, 22 nt, Artificial Sequence
  Synthetic
uuuuaaugugucuauaauuaga

SEQ ID NO: 222931 - RNA, 23 nt, Artificial Sequence
  Synthetic
guuuuaaugugucuauaauuaga

SEQ ID NO: 222932 - RNA, 24 nt, Artificial Sequence
  Synthetic
uguuuuaaugugucuauaauuaga

SEQ ID NO: 222933 - RNA, 18 nt, Artificial Sequence
  Synthetic
auuaucuuuuccauuaga

SEQ ID NO: 222934 - RNA, 19 nt, Artificial Sequence
  Synthetic
uauuaucuuuuccauuaga

SEQ ID NO: 222935 - RNA, 20 nt, Artificial Sequence
  Synthetic
uuauuaucuuuuccauuaga

SEQ ID NO: 222936 - RNA, 21 nt, Artificial Sequence
  Synthetic
uuuauuaucuuuuccauuaga

SEQ ID NO: 222937 - RNA, 22 nt, Artificial Sequence
  Synthetic
guuuauuaucuuuuccauuaga

SEQ ID NO: 222938 - RNA, 23 nt, Artificial Sequence
  Synthetic
uguuuauuaucuuuuccauuaga

SEQ ID NO: 222939 - RNA, 24 nt, Artificial Sequence
  Synthetic
auguuuauuaucuuuuccauuaga

SEQ ID NO: 222940 - RNA, 18 nt, Artificial Sequence
  Synthetic
uucugacauugcauuaga

SEQ ID NO: 222941 - RNA, 19 nt, Artificial Sequence
  Synthetic
cuucugacauugcauuaga

SEQ ID NO: 222942 - RNA, 20 nt, Artificial Sequence
  Synthetic
acuucugacauugcauuaga

SEQ ID NO: 222943 - RNA, 21 nt, Artificial Sequence
  Synthetic
uacuucugacauugcauuaga

SEQ ID NO: 222944 - RNA, 22 nt, Artificial Sequence
  Synthetic
guacuucugacauugcauuaga

SEQ ID NO: 222945 - RNA, 23 nt, Artificial Sequence
  Synthetic
aguacuucugacauugcauuaga

SEQ ID NO: 222946 - RNA, 24 nt, Artificial Sequence
  Synthetic
uaguacuucugacauugcauuaga

SEQ ID NO: 222947 - RNA, 18 nt, Artificial Sequence
  Synthetic
ucuuuccuagucauuaga

SEQ ID NO: 222948 - RNA, 19 nt, Artificial Sequence
  Synthetic
cucuuuccuagucauuaga

SEQ ID NO: 222949 - RNA, 20 nt, Artificial Sequence
  Synthetic
acucuuuccuagucauuaga

SEQ ID NO: 222950 - RNA, 21 nt, Artificial Sequence
  Synthetic
uacucuuuccuagucauuaga

SEQ ID NO: 222951 - RNA, 22 nt, Artificial Sequence
  Synthetic
auacucuuuccuagucauuaga

SEQ ID NO: 222952 - RNA, 23 nt, Artificial Sequence
  Synthetic
uauacucuuuccuagucauuaga

SEQ ID NO: 222953 - RNA, 24 nt, Artificial Sequence
  Synthetic
uuauacucuuuccuagucauuaga

SEQ ID NO: 222954 - RNA, 18 nt, Artificial Sequence
  Synthetic
ccuauuuuguucauuaga

SEQ ID NO: 222955 - RNA, 19 nt, Artificial Sequence
  Synthetic
accuauuuuguucauuaga

SEQ ID NO: 222956 - RNA, 20 nt, Artificial Sequence
  Synthetic
gaccuauuuuguucauuaga

SEQ ID NO: 222957 - RNA, 21 nt, Artificial Sequence
  Synthetic
agaccuauuuuguucauuaga

SEQ ID NO: 222958 - RNA, 22 nt, Artificial Sequence
  Synthetic
gagaccuauuuuguucauuaga

SEQ ID NO: 222959 - RNA, 23 nt, Artificial Sequence
  Synthetic
ugagaccuauuuuguucauuaga

SEQ ID NO: 222960 - RNA, 24 nt, Artificial Sequence
  Synthetic
cugagaccuauuuuguucauuaga

SEQ ID NO: 222961 - RNA, 18 nt, Artificial Sequence
  Synthetic
uggcguucaaagauuaga

SEQ ID NO: 222962 - RNA, 19 nt, Artificial Sequence
  Synthetic
auggcguucaaagauuaga

SEQ ID NO: 222963 - RNA, 20 nt, Artificial Sequence
  Synthetic
aauggcguucaaagauuaga

SEQ ID NO: 222964 - RNA, 21 nt, Artificial Sequence
  Synthetic
caauggcguucaaagauuaga

SEQ ID NO: 222965 - RNA, 22 nt, Artificial Sequence
  Synthetic
acaauggcguucaaagauuaga

SEQ ID NO: 222966 - RNA, 23 nt, Artificial Sequence
  Synthetic
aacaauggcguucaaagauuaga

SEQ ID NO: 222967 - RNA, 24 nt, Artificial Sequence
  Synthetic
aaacaauggcguucaaagauuaga

SEQ ID NO: 222968 - RNA, 18 nt, Artificial Sequence
  Synthetic
aaagacauccagauuaga

SEQ ID NO: 222969 - RNA, 19 nt, Artificial Sequence
  Synthetic
aaaagacauccagauuaga

SEQ ID NO: 222970 - RNA, 20 nt, Artificial Sequence
  Synthetic
uaaaagacauccagauuaga

SEQ ID NO: 222971 - RNA, 21 nt, Artificial Sequence
  Synthetic
auaaaagacauccagauuaga

SEQ ID NO: 222972 - RNA, 22 nt, Artificial Sequence
  Synthetic
aauaaaagacauccagauuaga

SEQ ID NO: 222973 - RNA, 23 nt, Artificial Sequence
  Synthetic
aaauaaaagacauccagauuaga

SEQ ID NO: 222974 - RNA, 24 nt, Artificial Sequence
  Synthetic
uaaauaaaagacauccagauuaga

SEQ ID NO: 222975 - RNA, 18 nt, Artificial Sequence
  Synthetic
caucaaugauagauuaga

SEQ ID NO: 222976 - RNA, 19 nt, Artificial Sequence
  Synthetic
ucaucaaugauagauuaga

SEQ ID NO: 222977 - RNA, 20 nt, Artificial Sequence
  Synthetic
aucaucaaugauagauuaga

SEQ ID NO: 222978 - RNA, 21 nt, Artificial Sequence
  Synthetic
uaucaucaaugauagauuaga

SEQ ID NO: 222979 - RNA, 22 nt, Artificial Sequence
  Synthetic
uuaucaucaaugauagauuaga

SEQ ID NO: 222980 - RNA, 23 nt, Artificial Sequence
  Synthetic
cuuaucaucaaugauagauuaga

SEQ ID NO: 222981 - RNA, 24 nt, Artificial Sequence
  Synthetic
ccuuaucaucaaugauagauuaga

SEQ ID NO: 222982 - RNA, 18 nt, Artificial Sequence
  Synthetic
aaucacuacuagauuaga

SEQ ID NO: 222983 - RNA, 19 nt, Artificial Sequence
  Synthetic
uaaucacuacuagauuaga

SEQ ID NO: 222984 - RNA, 20 nt, Artificial Sequence
  Synthetic
uuaaucacuacuagauuaga

SEQ ID NO: 222985 - RNA, 21 nt, Artificial Sequence
  Synthetic
auuaaucacuacuagauuaga

SEQ ID NO: 222986 - RNA, 22 nt, Artificial Sequence
  Synthetic
cauuaaucacuacuagauuaga

SEQ ID NO: 222987 - RNA, 23 nt, Artificial Sequence
  Synthetic
acauuaaucacuacuagauuaga

SEQ ID NO: 222988 - RNA, 24 nt, Artificial Sequence
  Synthetic
aacauuaaucacuacuagauuaga

SEQ ID NO: 222989 - RNA, 18 nt, Artificial Sequence
  Synthetic
uacaaagucacgauuaga

SEQ ID NO: 222990 - RNA, 19 nt, Artificial Sequence
  Synthetic
guacaaagucacgauuaga

SEQ ID NO: 222991 - RNA, 20 nt, Artificial Sequence
  Synthetic
gguacaaagucacgauuaga

SEQ ID NO: 222992 - RNA, 21 nt, Artificial Sequence
  Synthetic
ggguacaaagucacgauuaga

SEQ ID NO: 222993 - RNA, 22 nt, Artificial Sequence
  Synthetic
uggguacaaagucacgauuaga

SEQ ID NO: 222994 - RNA, 23 nt, Artificial Sequence
  Synthetic
auggguacaaagucacgauuaga

SEQ ID NO: 222995 - RNA, 24 nt, Artificial Sequence
  Synthetic
aauggguacaaagucacgauuaga

SEQ ID NO: 222996 - RNA, 18 nt, Artificial Sequence
  Synthetic
agaaaaccccggauuaga

SEQ ID NO: 222997 - RNA, 19 nt, Artificial Sequence
  Synthetic
cagaaaaccccggauuaga

SEQ ID NO: 222998 - RNA, 20 nt, Artificial Sequence
  Synthetic
acagaaaaccccggauuaga

SEQ ID NO: 222999 - RNA, 21 nt, Artificial Sequence
  Synthetic
aacagaaaaccccggauuaga

SEQ ID NO: 223000 - RNA, 22 nt, Artificial Sequence
  Synthetic
uaacagaaaaccccggauuaga

SEQ ID NO: 223001 - RNA, 23 nt, Artificial Sequence
  Synthetic
auaacagaaaaccccggauuaga

SEQ ID NO: 223002 - RNA, 24 nt, Artificial Sequence
  Synthetic
uauaacagaaaaccccggauuaga

SEQ ID NO: 223003 - RNA, 18 nt, Artificial Sequence
  Synthetic
gaaaugacugggauuaga

SEQ ID NO: 223004 - RNA, 19 nt, Artificial Sequence
  Synthetic
agaaaugacugggauuaga

SEQ ID NO: 223005 - RNA, 20 nt, Artificial Sequence
  Synthetic
gagaaaugacugggauuaga

SEQ ID NO: 223006 - RNA, 21 nt, Artificial Sequence
  Synthetic
agagaaaugacugggauuaga

SEQ ID NO: 223007 - RNA, 22 nt, Artificial Sequence
  Synthetic
uagagaaaugacugggauuaga

SEQ ID NO: 223008 - RNA, 23 nt, Artificial Sequence
  Synthetic
guagagaaaugacugggauuaga

SEQ ID NO: 223009 - RNA, 24 nt, Artificial Sequence
  Synthetic
uguagagaaaugacugggauuaga

SEQ ID NO: 223010 - RNA, 18 nt, Artificial Sequence
  Synthetic
aaaaaccuguggauuaga

SEQ ID NO: 223011 - RNA, 19 nt, Artificial Sequence
  Synthetic
uaaaaaccuguggauuaga

SEQ ID NO: 223012 - RNA, 20 nt, Artificial Sequence
  Synthetic
uuaaaaaccuguggauuaga

SEQ ID NO: 223013 - RNA, 21 nt, Artificial Sequence
  Synthetic
uuuaaaaaccuguggauuaga

SEQ ID NO: 223014 - RNA, 22 nt, Artificial Sequence
  Synthetic
cuuuaaaaaccuguggauuaga

SEQ ID NO: 223015 - RNA, 23 nt, Artificial Sequence
  Synthetic
acuuuaaaaaccuguggauuaga

SEQ ID NO: 223016 - RNA, 24 nt, Artificial Sequence
  Synthetic
aacuuuaaaaaccuguggauuaga

SEQ ID NO: 223017 - RNA, 18 nt, Artificial Sequence
  Synthetic
aggaaagacaugauuaga

SEQ ID NO: 223018 - RNA, 19 nt, Artificial Sequence
  Synthetic
caggaaagacaugauuaga

SEQ ID NO: 223019 - RNA, 20 nt, Artificial Sequence
  Synthetic
ucaggaaagacaugauuaga

SEQ ID NO: 223020 - RNA, 21 nt, Artificial Sequence
  Synthetic
uucaggaaagacaugauuaga

SEQ ID NO: 223021 - RNA, 22 nt, Artificial Sequence
  Synthetic
cuucaggaaagacaugauuaga

SEQ ID NO: 223022 - RNA, 23 nt, Artificial Sequence
  Synthetic
gcuucaggaaagacaugauuaga

SEQ ID NO: 223023 - RNA, 24 nt, Artificial Sequence
  Synthetic
ugcuucaggaaagacaugauuaga

SEQ ID NO: 223024 - RNA, 18 nt, Artificial Sequence
  Synthetic
auaaaauacuauauuaga

SEQ ID NO: 223025 - RNA, 19 nt, Artificial Sequence
  Synthetic
aauaaaauacuauauuaga

SEQ ID NO: 223026 - RNA, 20 nt, Artificial Sequence
  Synthetic
aaauaaaauacuauauuaga

SEQ ID NO: 223027 - RNA, 21 nt, Artificial Sequence
  Synthetic
uaaauaaaauacuauauuaga

SEQ ID NO: 223028 - RNA, 22 nt, Artificial Sequence
  Synthetic
uuaaauaaaauacuauauuaga

SEQ ID NO: 223029 - RNA, 23 nt, Artificial Sequence
  Synthetic
auuaaauaaaauacuauauuaga

SEQ ID NO: 223030 - RNA, 24 nt, Artificial Sequence
  Synthetic
aauuaaauaaaauacuauauuaga

SEQ ID NO: 223031 - RNA, 18 nt, Artificial Sequence
  Synthetic
ucuaauaacucuauuaga

SEQ ID NO: 223032 - RNA, 19 nt, Artificial Sequence
  Synthetic
uucuaauaacucuauuaga

SEQ ID NO: 223033 - RNA, 20 nt, Artificial Sequence
  Synthetic
auucuaauaacucuauuaga

SEQ ID NO: 223034 - RNA, 21 nt, Artificial Sequence
  Synthetic
aauucuaauaacucuauuaga

SEQ ID NO: 223035 - RNA, 22 nt, Artificial Sequence
  Synthetic
aaauucuaauaacucuauuaga

SEQ ID NO: 223036 - RNA, 23 nt, Artificial Sequence
  Synthetic
aaaauucuaauaacucuauuaga

SEQ ID NO: 223037 - RNA, 24 nt, Artificial Sequence
  Synthetic
uaaaauucuaauaacucuauuaga

SEQ ID NO: 223038 - RNA, 18 nt, Artificial Sequence
  Synthetic
auauuguauaguauuaga

SEQ ID NO: 223039 - RNA, 19 nt, Artificial Sequence
  Synthetic
aauauuguauaguauuaga

SEQ ID NO: 223040 - RNA, 20 nt, Artificial Sequence
  Synthetic
uaauauuguauaguauuaga

SEQ ID NO: 223041 - RNA, 21 nt, Artificial Sequence
  Synthetic
cuaauauuguauaguauuaga

SEQ ID NO: 223042 - RNA, 22 nt, Artificial Sequence
  Synthetic
ucuaauauuguauaguauuaga

SEQ ID NO: 223043 - RNA, 23 nt, Artificial Sequence
  Synthetic
aucuaauauuguauaguauuaga

SEQ ID NO: 223044 - RNA, 24 nt, Artificial Sequence
  Synthetic
aaucuaauauuguauaguauuaga

SEQ ID NO: 223045 - RNA, 18 nt, Artificial Sequence
  Synthetic
cauaggguuguuauuaga

SEQ ID NO: 223046 - RNA, 19 nt, Artificial Sequence
  Synthetic
ucauaggguuguuauuaga

SEQ ID NO: 223047 - RNA, 20 nt, Artificial Sequence
  Synthetic
cucauaggguuguuauuaga

SEQ ID NO: 223048 - RNA, 21 nt, Artificial Sequence
  Synthetic
ccucauaggguuguuauuaga

SEQ ID NO: 223049 - RNA, 22 nt, Artificial Sequence
  Synthetic
accucauaggguuguuauuaga

SEQ ID NO: 223050 - RNA, 23 nt, Artificial Sequence
  Synthetic
gaccucauaggguuguuauuaga

SEQ ID NO: 223051 - RNA, 24 nt, Artificial Sequence
  Synthetic
ugaccucauaggguuguuauuaga

SEQ ID NO: 223052 - RNA, 18 nt, Artificial Sequence
  Synthetic
aaacccaucuaacuuaga

SEQ ID NO: 223053 - RNA, 19 nt, Artificial Sequence
  Synthetic
aaaacccaucuaacuuaga

SEQ ID NO: 223054 - RNA, 20 nt, Artificial Sequence
  Synthetic
aaaaacccaucuaacuuaga

SEQ ID NO: 223055 - RNA, 21 nt, Artificial Sequence
  Synthetic
aaaaaacccaucuaacuuaga

SEQ ID NO: 223056 - RNA, 22 nt, Artificial Sequence
  Synthetic
caaaaaacccaucuaacuuaga

SEQ ID NO: 223057 - RNA, 23 nt, Artificial Sequence
  Synthetic
acaaaaaacccaucuaacuuaga

SEQ ID NO: 223058 - RNA, 24 nt, Artificial Sequence
  Synthetic
aacaaaaaacccaucuaacuuaga

SEQ ID NO: 223059 - RNA, 18 nt, Artificial Sequence
  Synthetic
ugauucaguagacuuaga

SEQ ID NO: 223060 - RNA, 19 nt, Artificial Sequence
  Synthetic
cugauucaguagacuuaga

SEQ ID NO: 223061 - RNA, 20 nt, Artificial Sequence
  Synthetic
ucugauucaguagacuuaga

SEQ ID NO: 223062 - RNA, 21 nt, Artificial Sequence
  Synthetic
uucugauucaguagacuuaga

SEQ ID NO: 223063 - RNA, 22 nt, Artificial Sequence
  Synthetic
auucugauucaguagacuuaga

SEQ ID NO: 223064 - RNA, 23 nt, Artificial Sequence
  Synthetic
aauucugauucaguagacuuaga

SEQ ID NO: 223065 - RNA, 24 nt, Artificial Sequence
  Synthetic
aaauucugauucaguagacuuaga

SEQ ID NO: 223066 - RNA, 18 nt, Artificial Sequence
  Synthetic
ugugagaaacuacuuaga

SEQ ID NO: 223067 - RNA, 19 nt, Artificial Sequence
  Synthetic
gugugagaaacuacuuaga

SEQ ID NO: 223068 - RNA, 20 nt, Artificial Sequence
  Synthetic
ugugugagaaacuacuuaga

SEQ ID NO: 223069 - RNA, 21 nt, Artificial Sequence
  Synthetic
uugugugagaaacuacuuaga

SEQ ID NO: 223070 - RNA, 22 nt, Artificial Sequence
  Synthetic
uuugugugagaaacuacuuaga

SEQ ID NO: 223071 - RNA, 23 nt, Artificial Sequence
  Synthetic
auuugugugagaaacuacuuaga

SEQ ID NO: 223072 - RNA, 24 nt, Artificial Sequence
  Synthetic
gauuugugugagaaacuacuuaga

SEQ ID NO: 223073 - RNA, 18 nt, Artificial Sequence
  Synthetic
aaaaacagaaugcuuaga

SEQ ID NO: 223074 - RNA, 19 nt, Artificial Sequence
  Synthetic
uaaaaacagaaugcuuaga

SEQ ID NO: 223075 - RNA, 20 nt, Artificial Sequence
  Synthetic
cuaaaaacagaaugcuuaga

SEQ ID NO: 223076 - RNA, 21 nt, Artificial Sequence
  Synthetic
gcuaaaaacagaaugcuuaga

SEQ ID NO: 223077 - RNA, 22 nt, Artificial Sequence
  Synthetic
agcuaaaaacagaaugcuuaga

SEQ ID NO: 223078 - RNA, 23 nt, Artificial Sequence
  Synthetic
aagcuaaaaacagaaugcuuaga

SEQ ID NO: 223079 - RNA, 24 nt, Artificial Sequence
  Synthetic
gaagcuaaaaacagaaugcuuaga

SEQ ID NO: 223080 - RNA, 18 nt, Artificial Sequence
  Synthetic
gagcaaaugcugcuuaga

SEQ ID NO: 223081 - RNA, 19 nt, Artificial Sequence
  Synthetic
ugagcaaaugcugcuuaga

SEQ ID NO: 223082 - RNA, 20 nt, Artificial Sequence
  Synthetic
uugagcaaaugcugcuuaga

SEQ ID NO: 223083 - RNA, 21 nt, Artificial Sequence
  Synthetic
uuugagcaaaugcugcuuaga

SEQ ID NO: 223084 - RNA, 22 nt, Artificial Sequence
  Synthetic
uuuugagcaaaugcugcuuaga

SEQ ID NO: 223085 - RNA, 23 nt, Artificial Sequence
  Synthetic
auuuugagcaaaugcugcuuaga

SEQ ID NO: 223086 - RNA, 24 nt, Artificial Sequence
  Synthetic
uauuuugagcaaaugcugcuuaga

SEQ ID NO: 223087 - RNA, 18 nt, Artificial Sequence
  Synthetic
auucucuuagugcuuaga

SEQ ID NO: 223088 - RNA, 19 nt, Artificial Sequence
  Synthetic
gauucucuuagugcuuaga

SEQ ID NO: 223089 - RNA, 20 nt, Artificial Sequence
  Synthetic
agauucucuuagugcuuaga

SEQ ID NO: 223090 - RNA, 21 nt, Artificial Sequence
  Synthetic
aagauucucuuagugcuuaga

SEQ ID NO: 223091 - RNA, 22 nt, Artificial Sequence
  Synthetic
uaagauucucuuagugcuuaga

SEQ ID NO: 223092 - RNA, 23 nt, Artificial Sequence
  Synthetic
uuaagauucucuuagugcuuaga

SEQ ID NO: 223093 - RNA, 24 nt, Artificial Sequence
  Synthetic
uuuaagauucucuuagugcuuaga

SEQ ID NO: 223094 - RNA, 18 nt, Artificial Sequence
  Synthetic
ugaguguaugugcuuaga

SEQ ID NO: 223095 - RNA, 19 nt, Artificial Sequence
  Synthetic
uugaguguaugugcuuaga

SEQ ID NO: 223096 - RNA, 20 nt, Artificial Sequence
  Synthetic
uuugaguguaugugcuuaga

SEQ ID NO: 223097 - RNA, 21 nt, Artificial Sequence
  Synthetic
guuugaguguaugugcuuaga

SEQ ID NO: 223098 - RNA, 22 nt, Artificial Sequence
  Synthetic
cguuugaguguaugugcuuaga

SEQ ID NO: 223099 - RNA, 23 nt, Artificial Sequence
  Synthetic
acguuugaguguaugugcuuaga

SEQ ID NO: 223100 - RNA, 24 nt, Artificial Sequence
  Synthetic
cacguuugaguguaugugcuuaga

SEQ ID NO: 223101 - RNA, 18 nt, Artificial Sequence
  Synthetic
auuuccaugaaaguuaga

SEQ ID NO: 223102 - RNA, 19 nt, Artificial Sequence
  Synthetic
gauuuccaugaaaguuaga

SEQ ID NO: 223103 - RNA, 20 nt, Artificial Sequence
  Synthetic
agauuuccaugaaaguuaga

SEQ ID NO: 223104 - RNA, 21 nt, Artificial Sequence
  Synthetic
gagauuuccaugaaaguuaga

SEQ ID NO: 223105 - RNA, 22 nt, Artificial Sequence
  Synthetic
ggagauuuccaugaaaguuaga

SEQ ID NO: 223106 - RNA, 23 nt, Artificial Sequence
  Synthetic
aggagauuuccaugaaaguuaga

SEQ ID NO: 223107 - RNA, 24 nt, Artificial Sequence
  Synthetic
aaggagauuuccaugaaaguuaga

SEQ ID NO: 223108 - RNA, 18 nt, Artificial Sequence
  Synthetic
uacaaaauuucaguuaga

SEQ ID NO: 223109 - RNA, 19 nt, Artificial Sequence
  Synthetic
auacaaaauuucaguuaga

SEQ ID NO: 223110 - RNA, 20 nt, Artificial Sequence
  Synthetic
gauacaaaauuucaguuaga

SEQ ID NO: 223111 - RNA, 21 nt, Artificial Sequence
  Synthetic
ggauacaaaauuucaguuaga

SEQ ID NO: 223112 - RNA, 22 nt, Artificial Sequence
  Synthetic
aggauacaaaauuucaguuaga

SEQ ID NO: 223113 - RNA, 23 nt, Artificial Sequence
  Synthetic
gaggauacaaaauuucaguuaga

SEQ ID NO: 223114 - RNA, 24 nt, Artificial Sequence
  Synthetic
agaggauacaaaauuucaguuaga

SEQ ID NO: 223115 - RNA, 18 nt, Artificial Sequence
  Synthetic
ugcugaguagagguuaga

SEQ ID NO: 223116 - RNA, 19 nt, Artificial Sequence
  Synthetic
uugcugaguagagguuaga

SEQ ID NO: 223117 - RNA, 20 nt, Artificial Sequence
  Synthetic
auugcugaguagagguuaga

SEQ ID NO: 223118 - RNA, 21 nt, Artificial Sequence
  Synthetic
cauugcugaguagagguuaga

SEQ ID NO: 223119 - RNA, 22 nt, Artificial Sequence
  Synthetic
ucauugcugaguagagguuaga

SEQ ID NO: 223120 - RNA, 23 nt, Artificial Sequence
  Synthetic
aucauugcugaguagagguuaga

SEQ ID NO: 223121 - RNA, 24 nt, Artificial Sequence
  Synthetic
caucauugcugaguagagguuaga

SEQ ID NO: 223122 - RNA, 18 nt, Artificial Sequence
  Synthetic
uaucugaaugugguuaga

SEQ ID NO: 223123 - RNA, 19 nt, Artificial Sequence
  Synthetic
uuaucugaaugugguuaga

SEQ ID NO: 223124 - RNA, 20 nt, Artificial Sequence
  Synthetic
guuaucugaaugugguuaga

SEQ ID NO: 223125 - RNA, 21 nt, Artificial Sequence
  Synthetic
gguuaucugaaugugguuaga

SEQ ID NO: 223126 - RNA, 22 nt, Artificial Sequence
  Synthetic
agguuaucugaaugugguuaga

SEQ ID NO: 223127 - RNA, 23 nt, Artificial Sequence
  Synthetic
cagguuaucugaaugugguuaga

SEQ ID NO: 223128 - RNA, 24 nt, Artificial Sequence
  Synthetic
ucagguuaucugaaugugguuaga

SEQ ID NO: 223129 - RNA, 18 nt, Artificial Sequence
  Synthetic
acgcaagcagauguuaga

SEQ ID NO: 223130 - RNA, 19 nt, Artificial Sequence
  Synthetic
aacgcaagcagauguuaga

SEQ ID NO: 223131 - RNA, 20 nt, Artificial Sequence
  Synthetic
caacgcaagcagauguuaga

SEQ ID NO: 223132 - RNA, 21 nt, Artificial Sequence
  Synthetic
gcaacgcaagcagauguuaga

SEQ ID NO: 223133 - RNA, 22 nt, Artificial Sequence
  Synthetic
ugcaacgcaagcagauguuaga

SEQ ID NO: 223134 - RNA, 23 nt, Artificial Sequence
  Synthetic
gugcaacgcaagcagauguuaga

SEQ ID NO: 223135 - RNA, 24 nt, Artificial Sequence
  Synthetic
agugcaacgcaagcagauguuaga

SEQ ID NO: 223136 - RNA, 18 nt, Artificial Sequence
  Synthetic
uauaagagguauguuaga

SEQ ID NO: 223137 - RNA, 19 nt, Artificial Sequence
  Synthetic
auauaagagguauguuaga

SEQ ID NO: 223138 - RNA, 20 nt, Artificial Sequence
  Synthetic
uauauaagagguauguuaga

SEQ ID NO: 223139 - RNA, 21 nt, Artificial Sequence
  Synthetic
auauauaagagguauguuaga

SEQ ID NO: 223140 - RNA, 22 nt, Artificial Sequence
  Synthetic
aauauauaagagguauguuaga

SEQ ID NO: 223141 - RNA, 23 nt, Artificial Sequence
  Synthetic
caauauauaagagguauguuaga

SEQ ID NO: 223142 - RNA, 24 nt, Artificial Sequence
  Synthetic
acaauauauaagagguauguuaga

SEQ ID NO: 223143 - RNA, 18 nt, Artificial Sequence
  Synthetic
gugcuuugcacuguuaga

SEQ ID NO: 223144 - RNA, 19 nt, Artificial Sequence
  Synthetic
agugcuuugcacuguuaga

SEQ ID NO: 223145 - RNA, 20 nt, Artificial Sequence
  Synthetic
aagugcuuugcacuguuaga

SEQ ID NO: 223146 - RNA, 21 nt, Artificial Sequence
  Synthetic
uaagugcuuugcacuguuaga

SEQ ID NO: 223147 - RNA, 22 nt, Artificial Sequence
  Synthetic
cuaagugcuuugcacuguuaga

SEQ ID NO: 223148 - RNA, 23 nt, Artificial Sequence
  Synthetic
ucuaagugcuuugcacuguuaga

SEQ ID NO: 223149 - RNA, 24 nt, Artificial Sequence
  Synthetic
uucuaagugcuuugcacuguuaga

SEQ ID NO: 223150 - RNA, 18 nt, Artificial Sequence
  Synthetic
aguggcuccuguguuaga

SEQ ID NO: 223151 - RNA, 19 nt, Artificial Sequence
  Synthetic
caguggcuccuguguuaga

SEQ ID NO: 223152 - RNA, 20 nt, Artificial Sequence
  Synthetic
ccaguggcuccuguguuaga

SEQ ID NO: 223153 - RNA, 21 nt, Artificial Sequence
  Synthetic
gccaguggcuccuguguuaga

SEQ ID NO: 223154 - RNA, 22 nt, Artificial Sequence
  Synthetic
agccaguggcuccuguguuaga

SEQ ID NO: 223155 - RNA, 23 nt, Artificial Sequence
  Synthetic
cagccaguggcuccuguguuaga

SEQ ID NO: 223156 - RNA, 24 nt, Artificial Sequence
  Synthetic
acagccaguggcuccuguguuaga

SEQ ID NO: 223157 - RNA, 18 nt, Artificial Sequence
  Synthetic
aaauuagcauuuguuaga

SEQ ID NO: 223158 - RNA, 19 nt, Artificial Sequence
  Synthetic
gaaauuagcauuuguuaga

SEQ ID NO: 223159 - RNA, 20 nt, Artificial Sequence
  Synthetic
agaaauuagcauuuguuaga

SEQ ID NO: 223160 - RNA, 21 nt, Artificial Sequence
  Synthetic
gagaaauuagcauuuguuaga

SEQ ID NO: 223161 - RNA, 22 nt, Artificial Sequence
  Synthetic
ugagaaauuagcauuuguuaga

SEQ ID NO: 223162 - RNA, 23 nt, Artificial Sequence
  Synthetic
uugagaaauuagcauuuguuaga

SEQ ID NO: 223163 - RNA, 24 nt, Artificial Sequence
  Synthetic
guugagaaauuagcauuuguuaga

SEQ ID NO: 223164 - RNA, 18 nt, Artificial Sequence
  Synthetic
uauucagaaacauuuaga

SEQ ID NO: 223165 - RNA, 19 nt, Artificial Sequence
  Synthetic
uuauucagaaacauuuaga

SEQ ID NO: 223166 - RNA, 20 nt, Artificial Sequence
  Synthetic
uuuauucagaaacauuuaga

SEQ ID NO: 223167 - RNA, 21 nt, Artificial Sequence
  Synthetic
auuuauucagaaacauuuaga

SEQ ID NO: 223168 - RNA, 22 nt, Artificial Sequence
  Synthetic
uauuuauucagaaacauuuaga

SEQ ID NO: 223169 - RNA, 23 nt, Artificial Sequence
  Synthetic
uuauuuauucagaaacauuuaga

SEQ ID NO: 223170 - RNA, 24 nt, Artificial Sequence
  Synthetic
uuuauuuauucagaaacauuuaga

SEQ ID NO: 223171 - RNA, 18 nt, Artificial Sequence
  Synthetic
uucugguuaagauuuaga

SEQ ID NO: 223172 - RNA, 19 nt, Artificial Sequence
  Synthetic
uuucugguuaagauuuaga

SEQ ID NO: 223173 - RNA, 20 nt, Artificial Sequence
  Synthetic
uuuucugguuaagauuuaga

SEQ ID NO: 223174 - RNA, 21 nt, Artificial Sequence
  Synthetic
auuuucugguuaagauuuaga

SEQ ID NO: 223175 - RNA, 22 nt, Artificial Sequence
  Synthetic
gauuuucugguuaagauuuaga

SEQ ID NO: 223176 - RNA, 23 nt, Artificial Sequence
  Synthetic
agauuuucugguuaagauuuaga

SEQ ID NO: 223177 - RNA, 24 nt, Artificial Sequence
  Synthetic
gagauuuucugguuaagauuuaga

SEQ ID NO: 223178 - RNA, 18 nt, Artificial Sequence
  Synthetic
agacuguaaauauuuaga

SEQ ID NO: 223179 - RNA, 19 nt, Artificial Sequence
  Synthetic
cagacuguaaauauuuaga

SEQ ID NO: 223180 - RNA, 20 nt, Artificial Sequence
  Synthetic
gcagacuguaaauauuuaga

SEQ ID NO: 223181 - RNA, 21 nt, Artificial Sequence
  Synthetic
ugcagacuguaaauauuuaga

SEQ ID NO: 223182 - RNA, 22 nt, Artificial Sequence
  Synthetic
gugcagacuguaaauauuuaga

SEQ ID NO: 223183 - RNA, 23 nt, Artificial Sequence
  Synthetic
ugugcagacuguaaauauuuaga

SEQ ID NO: 223184 - RNA, 24 nt, Artificial Sequence
  Synthetic
augugcagacuguaaauauuuaga

SEQ ID NO: 223185 - RNA, 18 nt, Artificial Sequence
  Synthetic
ugcauauauauauuuaga

SEQ ID NO: 223186 - RNA, 19 nt, Artificial Sequence
  Synthetic
augcauauauauauuuaga

SEQ ID NO: 223187 - RNA, 20 nt, Artificial Sequence
  Synthetic
uaugcauauauauauuuaga

SEQ ID NO: 223188 - RNA, 21 nt, Artificial Sequence
  Synthetic
auaugcauauauauauuuaga

SEQ ID NO: 223189 - RNA, 22 nt, Artificial Sequence
  Synthetic
cauaugcauauauauauuuaga

SEQ ID NO: 223190 - RNA, 23 nt, Artificial Sequence
  Synthetic
acauaugcauauauauauuuaga

SEQ ID NO: 223191 - RNA, 24 nt, Artificial Sequence
  Synthetic
uacauaugcauauauauauuuaga

SEQ ID NO: 223192 - RNA, 18 nt, Artificial Sequence
  Synthetic
gcuaaagcaguauuuaga

SEQ ID NO: 223193 - RNA, 19 nt, Artificial Sequence
  Synthetic
agcuaaagcaguauuuaga

SEQ ID NO: 223194 - RNA, 20 nt, Artificial Sequence
  Synthetic
cagcuaaagcaguauuuaga

SEQ ID NO: 223195 - RNA, 21 nt, Artificial Sequence
  Synthetic
acagcuaaagcaguauuuaga

SEQ ID NO: 223196 - RNA, 22 nt, Artificial Sequence
  Synthetic
cacagcuaaagcaguauuuaga

SEQ ID NO: 223197 - RNA, 23 nt, Artificial Sequence
  Synthetic
acacagcuaaagcaguauuuaga

SEQ ID NO: 223198 - RNA, 24 nt, Artificial Sequence
  Synthetic
gacacagcuaaagcaguauuuaga

SEQ ID NO: 223199 - RNA, 18 nt, Artificial Sequence
  Synthetic
guuuauauuguauuuaga

SEQ ID NO: 223200 - RNA, 19 nt, Artificial Sequence
  Synthetic
gguuuauauuguauuuaga

SEQ ID NO: 223201 - RNA, 20 nt, Artificial Sequence
  Synthetic
ugguuuauauuguauuuaga

SEQ ID NO: 223202 - RNA, 21 nt, Artificial Sequence
  Synthetic
cugguuuauauuguauuuaga

SEQ ID NO: 223203 - RNA, 22 nt, Artificial Sequence
  Synthetic
acugguuuauauuguauuuaga

SEQ ID NO: 223204 - RNA, 23 nt, Artificial Sequence
  Synthetic
aacugguuuauauuguauuuaga

SEQ ID NO: 223205 - RNA, 24 nt, Artificial Sequence
  Synthetic
gaacugguuuauauuguauuuaga

SEQ ID NO: 223206 - RNA, 18 nt, Artificial Sequence
  Synthetic
ucuagcagauuauuuaga

SEQ ID NO: 223207 - RNA, 19 nt, Artificial Sequence
  Synthetic
cucuagcagauuauuuaga

SEQ ID NO: 223208 - RNA, 20 nt, Artificial Sequence
  Synthetic
acucuagcagauuauuuaga

SEQ ID NO: 223209 - RNA, 21 nt, Artificial Sequence
  Synthetic
aacucuagcagauuauuuaga

SEQ ID NO: 223210 - RNA, 22 nt, Artificial Sequence
  Synthetic
uaacucuagcagauuauuuaga

SEQ ID NO: 223211 - RNA, 23 nt, Artificial Sequence
  Synthetic
uuaacucuagcagauuauuuaga

SEQ ID NO: 223212 - RNA, 24 nt, Artificial Sequence
  Synthetic
uuuaacucuagcagauuauuuaga

SEQ ID NO: 223213 - RNA, 18 nt, Artificial Sequence
  Synthetic
uaguaggcuuuauuuaga

SEQ ID NO: 223214 - RNA, 19 nt, Artificial Sequence
  Synthetic
auaguaggcuuuauuuaga

SEQ ID NO: 223215 - RNA, 20 nt, Artificial Sequence
  Synthetic
cauaguaggcuuuauuuaga

SEQ ID NO: 223216 - RNA, 21 nt, Artificial Sequence
  Synthetic
ccauaguaggcuuuauuuaga

SEQ ID NO: 223217 - RNA, 22 nt, Artificial Sequence
  Synthetic
gccauaguaggcuuuauuuaga

SEQ ID NO: 223218 - RNA, 23 nt, Artificial Sequence
  Synthetic
ggccauaguaggcuuuauuuaga

SEQ ID NO: 223219 - RNA, 24 nt, Artificial Sequence
  Synthetic
uggccauaguaggcuuuauuuaga

SEQ ID NO: 223220 - RNA, 18 nt, Artificial Sequence
  Synthetic
cuucacuacuccuuuaga

SEQ ID NO: 223221 - RNA, 19 nt, Artificial Sequence
  Synthetic
ccuucacuacuccuuuaga

SEQ ID NO: 223222 - RNA, 20 nt, Artificial Sequence
  Synthetic
uccuucacuacuccuuuaga

SEQ ID NO: 223223 - RNA, 21 nt, Artificial Sequence
  Synthetic
guccuucacuacuccuuuaga

SEQ ID NO: 223224 - RNA, 22 nt, Artificial Sequence
  Synthetic
aguccuucacuacuccuuuaga

SEQ ID NO: 223225 - RNA, 23 nt, Artificial Sequence
  Synthetic
caguccuucacuacuccuuuaga

SEQ ID NO: 223226 - RNA, 24 nt, Artificial Sequence
  Synthetic
gcaguccuucacuacuccuuuaga

SEQ ID NO: 223227 - RNA, 18 nt, Artificial Sequence
  Synthetic
cucuaauagaaguuuaga

SEQ ID NO: 223228 - RNA, 19 nt, Artificial Sequence
  Synthetic
gcucuaauagaaguuuaga

SEQ ID NO: 223229 - RNA, 20 nt, Artificial Sequence
  Synthetic
ggcucuaauagaaguuuaga

SEQ ID NO: 223230 - RNA, 21 nt, Artificial Sequence
  Synthetic
aggcucuaauagaaguuuaga

SEQ ID NO: 223231 - RNA, 22 nt, Artificial Sequence
  Synthetic
gaggcucuaauagaaguuuaga

SEQ ID NO: 223232 - RNA, 23 nt, Artificial Sequence
  Synthetic
ugaggcucuaauagaaguuuaga

SEQ ID NO: 223233 - RNA, 24 nt, Artificial Sequence
  Synthetic
augaggcucuaauagaaguuuaga

SEQ ID NO: 223234 - RNA, 18 nt, Artificial Sequence
  Synthetic
aggauuauuaaguuuaga

SEQ ID NO: 223235 - RNA, 19 nt, Artificial Sequence
  Synthetic
aaggauuauuaaguuuaga

SEQ ID NO: 223236 - RNA, 20 nt, Artificial Sequence
  Synthetic
aaaggauuauuaaguuuaga

SEQ ID NO: 223237 - RNA, 21 nt, Artificial Sequence
  Synthetic
uaaaggauuauuaaguuuaga

SEQ ID NO: 223238 - RNA, 22 nt, Artificial Sequence
  Synthetic
guaaaggauuauuaaguuuaga

SEQ ID NO: 223239 - RNA, 23 nt, Artificial Sequence
  Synthetic
aguaaaggauuauuaaguuuaga

SEQ ID NO: 223240 - RNA, 24 nt, Artificial Sequence
  Synthetic
uaguaaaggauuauuaaguuuaga

SEQ ID NO: 223241 - RNA, 18 nt, Artificial Sequence
  Synthetic
uagaauaaccaguuuaga

SEQ ID NO: 223242 - RNA, 19 nt, Artificial Sequence
  Synthetic
cuagaauaaccaguuuaga

SEQ ID NO: 223243 - RNA, 20 nt, Artificial Sequence
  Synthetic
acuagaauaaccaguuuaga

SEQ ID NO: 223244 - RNA, 21 nt, Artificial Sequence
  Synthetic
aacuagaauaaccaguuuaga

SEQ ID NO: 223245 - RNA, 22 nt, Artificial Sequence
  Synthetic
uaacuagaauaaccaguuuaga

SEQ ID NO: 223246 - RNA, 23 nt, Artificial Sequence
  Synthetic
cuaacuagaauaaccaguuuaga

SEQ ID NO: 223247 - RNA, 24 nt, Artificial Sequence
  Synthetic
gcuaacuagaauaaccaguuuaga

SEQ ID NO: 223248 - RNA, 18 nt, Artificial Sequence
  Synthetic
uauuuaggaagguuuaga

SEQ ID NO: 223249 - RNA, 19 nt, Artificial Sequence
  Synthetic
cuauuuaggaagguuuaga

SEQ ID NO: 223250 - RNA, 20 nt, Artificial Sequence
  Synthetic
gcuauuuaggaagguuuaga

SEQ ID NO: 223251 - RNA, 21 nt, Artificial Sequence
  Synthetic
ggcuauuuaggaagguuuaga

SEQ ID NO: 223252 - RNA, 22 nt, Artificial Sequence
  Synthetic
aggcuauuuaggaagguuuaga

SEQ ID NO: 223253 - RNA, 23 nt, Artificial Sequence
  Synthetic
gaggcuauuuaggaagguuuaga

SEQ ID NO: 223254 - RNA, 24 nt, Artificial Sequence
  Synthetic
agaggcuauuuaggaagguuuaga

SEQ ID NO: 223255 - RNA, 18 nt, Artificial Sequence
  Synthetic
aggagccugagguuuaga

SEQ ID NO: 223256 - RNA, 19 nt, Artificial Sequence
  Synthetic
aaggagccugagguuuaga

SEQ ID NO: 223257 - RNA, 20 nt, Artificial Sequence
  Synthetic
uaaggagccugagguuuaga

SEQ ID NO: 223258 - RNA, 21 nt, Artificial Sequence
  Synthetic
uuaaggagccugagguuuaga

SEQ ID NO: 223259 - RNA, 22 nt, Artificial Sequence
  Synthetic
auuaaggagccugagguuuaga

SEQ ID NO: 223260 - RNA, 23 nt, Artificial Sequence
  Synthetic
gauuaaggagccugagguuuaga

SEQ ID NO: 223261 - RNA, 24 nt, Artificial Sequence
  Synthetic
agauuaaggagccugagguuuaga

SEQ ID NO: 223262 - RNA, 18 nt, Artificial Sequence
  Synthetic
uagaaagaaacuuuuaga

SEQ ID NO: 223263 - RNA, 19 nt, Artificial Sequence
  Synthetic
uuagaaagaaacuuuuaga

SEQ ID NO: 223264 - RNA, 20 nt, Artificial Sequence
  Synthetic
auuagaaagaaacuuuuaga

SEQ ID NO: 223265 - RNA, 21 nt, Artificial Sequence
  Synthetic
uauuagaaagaaacuuuuaga

SEQ ID NO: 223266 - RNA, 22 nt, Artificial Sequence
  Synthetic
auauuagaaagaaacuuuuaga

SEQ ID NO: 223267 - RNA, 23 nt, Artificial Sequence
  Synthetic
uauauuagaaagaaacuuuuaga

SEQ ID NO: 223268 - RNA, 24 nt, Artificial Sequence
  Synthetic
cuauauuagaaagaaacuuuuaga

SEQ ID NO: 223269 - RNA, 18 nt, Artificial Sequence
  Synthetic
uccuuaauaacuuuuaga

SEQ ID NO: 223270 - RNA, 19 nt, Artificial Sequence
  Synthetic
uuccuuaauaacuuuuaga

SEQ ID NO: 223271 - RNA, 20 nt, Artificial Sequence
  Synthetic
cuuccuuaauaacuuuuaga

SEQ ID NO: 223272 - RNA, 21 nt, Artificial Sequence
  Synthetic
ucuuccuuaauaacuuuuaga

SEQ ID NO: 223273 - RNA, 22 nt, Artificial Sequence
  Synthetic
cucuuccuuaauaacuuuuaga

SEQ ID NO: 223274 - RNA, 23 nt, Artificial Sequence
  Synthetic
acucuuccuuaauaacuuuuaga

SEQ ID NO: 223275 - RNA, 24 nt, Artificial Sequence
  Synthetic
gacucuuccuuaauaacuuuuaga

SEQ ID NO: 223276 - RNA, 18 nt, Artificial Sequence
  Synthetic
ggagaacauucuuuuaga

SEQ ID NO: 223277 - RNA, 19 nt, Artificial Sequence
  Synthetic
gggagaacauucuuuuaga

SEQ ID NO: 223278 - RNA, 20 nt, Artificial Sequence
  Synthetic
agggagaacauucuuuuaga

SEQ ID NO: 223279 - RNA, 21 nt, Artificial Sequence
  Synthetic
aagggagaacauucuuuuaga

SEQ ID NO: 223280 - RNA, 22 nt, Artificial Sequence
  Synthetic
uaagggagaacauucuuuuaga

SEQ ID NO: 223281 - RNA, 23 nt, Artificial Sequence
  Synthetic
auaagggagaacauucuuuuaga

SEQ ID NO: 223282 - RNA, 24 nt, Artificial Sequence
  Synthetic
uauaagggagaacauucuuuuaga

SEQ ID NO: 223283 - RNA, 18 nt, Artificial Sequence
  Synthetic
caugugaauuguuuuaga

SEQ ID NO: 223284 - RNA, 19 nt, Artificial Sequence
  Synthetic
acaugugaauuguuuuaga

SEQ ID NO: 223285 - RNA, 20 nt, Artificial Sequence
  Synthetic
cacaugugaauuguuuuaga

SEQ ID NO: 223286 - RNA, 21 nt, Artificial Sequence
  Synthetic
acacaugugaauuguuuuaga

SEQ ID NO: 223287 - RNA, 22 nt, Artificial Sequence
  Synthetic
uacacaugugaauuguuuuaga

SEQ ID NO: 223288 - RNA, 23 nt, Artificial Sequence
  Synthetic
uuacacaugugaauuguuuuaga

SEQ ID NO: 223289 - RNA, 24 nt, Artificial Sequence
  Synthetic
auuacacaugugaauuguuuuaga

SEQ ID NO: 223290 - RNA, 18 nt, Artificial Sequence
  Synthetic
uagguguuagaaaaacga

SEQ ID NO: 223291 - RNA, 19 nt, Artificial Sequence
  Synthetic
uuagguguuagaaaaacga

SEQ ID NO: 223292 - RNA, 20 nt, Artificial Sequence
  Synthetic
uuuagguguuagaaaaacga

SEQ ID NO: 223293 - RNA, 21 nt, Artificial Sequence
  Synthetic
uuuuagguguuagaaaaacga

SEQ ID NO: 223294 - RNA, 22 nt, Artificial Sequence
  Synthetic
guuuuagguguuagaaaaacga

SEQ ID NO: 223295 - RNA, 23 nt, Artificial Sequence
  Synthetic
gguuuuagguguuagaaaaacga

SEQ ID NO: 223296 - RNA, 24 nt, Artificial Sequence
  Synthetic
ugguuuuagguguuagaaaaacga

SEQ ID NO: 223297 - RNA, 18 nt, Artificial Sequence
  Synthetic
gaguagacuuaaaaacga

SEQ ID NO: 223298 - RNA, 19 nt, Artificial Sequence
  Synthetic
agaguagacuuaaaaacga

SEQ ID NO: 223299 - RNA, 20 nt, Artificial Sequence
  Synthetic
uagaguagacuuaaaaacga

SEQ ID NO: 223300 - RNA, 21 nt, Artificial Sequence
  Synthetic
auagaguagacuuaaaaacga

SEQ ID NO: 223301 - RNA, 22 nt, Artificial Sequence
  Synthetic
cauagaguagacuuaaaaacga

SEQ ID NO: 223302 - RNA, 23 nt, Artificial Sequence
  Synthetic
ucauagaguagacuuaaaaacga

SEQ ID NO: 223303 - RNA, 24 nt, Artificial Sequence
  Synthetic
cucauagaguagacuuaaaaacga

SEQ ID NO: 223304 - RNA, 18 nt, Artificial Sequence
  Synthetic
agaaaaugaaagaaacga

SEQ ID NO: 223305 - RNA, 19 nt, Artificial Sequence
  Synthetic
gagaaaaugaaagaaacga

SEQ ID NO: 223306 - RNA, 20 nt, Artificial Sequence
  Synthetic
ugagaaaaugaaagaaacga

SEQ ID NO: 223307 - RNA, 21 nt, Artificial Sequence
  Synthetic
augagaaaaugaaagaaacga

SEQ ID NO: 223308 - RNA, 22 nt, Artificial Sequence
  Synthetic
aaugagaaaaugaaagaaacga

SEQ ID NO: 223309 - RNA, 23 nt, Artificial Sequence
  Synthetic
aaaugagaaaaugaaagaaacga

SEQ ID NO: 223310 - RNA, 24 nt, Artificial Sequence
  Synthetic
aaaaugagaaaaugaaagaaacga

SEQ ID NO: 223311 - RNA, 18 nt, Artificial Sequence
  Synthetic
guaacuacacauaaacga

SEQ ID NO: 223312 - RNA, 19 nt, Artificial Sequence
  Synthetic
cguaacuacacauaaacga

SEQ ID NO: 223313 - RNA, 20 nt, Artificial Sequence
  Synthetic
acguaacuacacauaaacga

SEQ ID NO: 223314 - RNA, 21 nt, Artificial Sequence
  Synthetic
uacguaacuacacauaaacga

SEQ ID NO: 223315 - RNA, 22 nt, Artificial Sequence
  Synthetic
auacguaacuacacauaaacga

SEQ ID NO: 223316 - RNA, 23 nt, Artificial Sequence
  Synthetic
aauacguaacuacacauaaacga

SEQ ID NO: 223317 - RNA, 24 nt, Artificial Sequence
  Synthetic
uaauacguaacuacacauaaacga

SEQ ID NO: 223318 - RNA, 18 nt, Artificial Sequence
  Synthetic
uucuaagagacagaacga

SEQ ID NO: 223319 - RNA, 19 nt, Artificial Sequence
  Synthetic
guucuaagagacagaacga

SEQ ID NO: 223320 - RNA, 20 nt, Artificial Sequence
  Synthetic
aguucuaagagacagaacga

SEQ ID NO: 223321 - RNA, 21 nt, Artificial Sequence
  Synthetic
gaguucuaagagacagaacga

SEQ ID NO: 223322 - RNA, 22 nt, Artificial Sequence
  Synthetic
ugaguucuaagagacagaacga

SEQ ID NO: 223323 - RNA, 23 nt, Artificial Sequence
  Synthetic
cugaguucuaagagacagaacga

SEQ ID NO: 223324 - RNA, 24 nt, Artificial Sequence
  Synthetic
ucugaguucuaagagacagaacga

SEQ ID NO: 223325 - RNA, 18 nt, Artificial Sequence
  Synthetic
agauuaucaaagacacga

SEQ ID NO: 223326 - RNA, 19 nt, Artificial Sequence
  Synthetic
cagauuaucaaagacacga

SEQ ID NO: 223327 - RNA, 20 nt, Artificial Sequence
  Synthetic
ucagauuaucaaagacacga

SEQ ID NO: 223328 - RNA, 21 nt, Artificial Sequence
  Synthetic
uucagauuaucaaagacacga

SEQ ID NO: 223329 - RNA, 22 nt, Artificial Sequence
  Synthetic
auucagauuaucaaagacacga

SEQ ID NO: 223330 - RNA, 23 nt, Artificial Sequence
  Synthetic
aauucagauuaucaaagacacga

SEQ ID NO: 223331 - RNA, 24 nt, Artificial Sequence
  Synthetic
aaauucagauuaucaaagacacga

SEQ ID NO: 223332 - RNA, 18 nt, Artificial Sequence
  Synthetic
ccagccugggcgacacga

SEQ ID NO: 223333 - RNA, 19 nt, Artificial Sequence
  Synthetic
uccagccugggcgacacga

SEQ ID NO: 223334 - RNA, 20 nt, Artificial Sequence
  Synthetic
cuccagccugggcgacacga

SEQ ID NO: 223335 - RNA, 21 nt, Artificial Sequence
  Synthetic
acuccagccugggcgacacga

SEQ ID NO: 223336 - RNA, 22 nt, Artificial Sequence
  Synthetic
cacuccagccugggcgacacga

SEQ ID NO: 223337 - RNA, 23 nt, Artificial Sequence
  Synthetic
gcacuccagccugggcgacacga

SEQ ID NO: 223338 - RNA, 24 nt, Artificial Sequence
  Synthetic
ugcacuccagccugggcgacacga

SEQ ID NO: 223339 - RNA, 18 nt, Artificial Sequence
  Synthetic
aacugucuuuguacacga

SEQ ID NO: 223340 - RNA, 19 nt, Artificial Sequence
  Synthetic
aaacugucuuuguacacga

SEQ ID NO: 223341 - RNA, 20 nt, Artificial Sequence
  Synthetic
aaaacugucuuuguacacga

SEQ ID NO: 223342 - RNA, 21 nt, Artificial Sequence
  Synthetic
caaaacugucuuuguacacga

SEQ ID NO: 223343 - RNA, 22 nt, Artificial Sequence
  Synthetic
ccaaaacugucuuuguacacga

SEQ ID NO: 223344 - RNA, 23 nt, Artificial Sequence
  Synthetic
accaaaacugucuuuguacacga

SEQ ID NO: 223345 - RNA, 24 nt, Artificial Sequence
  Synthetic
caccaaaacugucuuuguacacga

SEQ ID NO: 223346 - RNA, 18 nt, Artificial Sequence
  Synthetic
gauuauacgaggagacga

SEQ ID NO: 223347 - RNA, 19 nt, Artificial Sequence
  Synthetic
ggauuauacgaggagacga

SEQ ID NO: 223348 - RNA, 20 nt, Artificial Sequence
  Synthetic
uggauuauacgaggagacga

SEQ ID NO: 223349 - RNA, 21 nt, Artificial Sequence
  Synthetic
uuggauuauacgaggagacga

SEQ ID NO: 223350 - RNA, 22 nt, Artificial Sequence
  Synthetic
uuuggauuauacgaggagacga

SEQ ID NO: 223351 - RNA, 23 nt, Artificial Sequence
  Synthetic
guuuggauuauacgaggagacga

SEQ ID NO: 223352 - RNA, 24 nt, Artificial Sequence
  Synthetic
aguuuggauuauacgaggagacga

SEQ ID NO: 223353 - RNA, 18 nt, Artificial Sequence
  Synthetic
aagacacccagaauacga

SEQ ID NO: 223354 - RNA, 19 nt, Artificial Sequence
  Synthetic
caagacacccagaauacga

SEQ ID NO: 223355 - RNA, 20 nt, Artificial Sequence
  Synthetic
ccaagacacccagaauacga

SEQ ID NO: 223356 - RNA, 21 nt, Artificial Sequence
  Synthetic
accaagacacccagaauacga

SEQ ID NO: 223357 - RNA, 22 nt, Artificial Sequence
  Synthetic
uaccaagacacccagaauacga

SEQ ID NO: 223358 - RNA, 23 nt, Artificial Sequence
  Synthetic
guaccaagacacccagaauacga

SEQ ID NO: 223359 - RNA, 24 nt, Artificial Sequence
  Synthetic
aguaccaagacacccagaauacga

SEQ ID NO: 223360 - RNA, 18 nt, Artificial Sequence
  Synthetic
uacaaacacaguauacga

SEQ ID NO: 223361 - RNA, 19 nt, Artificial Sequence
  Synthetic
guacaaacacaguauacga

SEQ ID NO: 223362 - RNA, 20 nt, Artificial Sequence
  Synthetic
gguacaaacacaguauacga

SEQ ID NO: 223363 - RNA, 21 nt, Artificial Sequence
  Synthetic
agguacaaacacaguauacga

SEQ ID NO: 223364 - RNA, 22 nt, Artificial Sequence
  Synthetic
cagguacaaacacaguauacga

SEQ ID NO: 223365 - RNA, 23 nt, Artificial Sequence
  Synthetic
acagguacaaacacaguauacga

SEQ ID NO: 223366 - RNA, 24 nt, Artificial Sequence
  Synthetic
aacagguacaaacacaguauacga

SEQ ID NO: 223367 - RNA, 18 nt, Artificial Sequence
  Synthetic
uuuggaaaacaacuacga

SEQ ID NO: 223368 - RNA, 19 nt, Artificial Sequence
  Synthetic
cuuuggaaaacaacuacga

SEQ ID NO: 223369 - RNA, 20 nt, Artificial Sequence
  Synthetic
acuuuggaaaacaacuacga

SEQ ID NO: 223370 - RNA, 21 nt, Artificial Sequence
  Synthetic
cacuuuggaaaacaacuacga

SEQ ID NO: 223371 - RNA, 22 nt, Artificial Sequence
  Synthetic
acacuuuggaaaacaacuacga

SEQ ID NO: 223372 - RNA, 23 nt, Artificial Sequence
  Synthetic
aacacuuuggaaaacaacuacga

SEQ ID NO: 223373 - RNA, 24 nt, Artificial Sequence
  Synthetic
caacacuuuggaaaacaacuacga

SEQ ID NO: 223374 - RNA, 18 nt, Artificial Sequence
  Synthetic
aaguaccaaaaucuacga

SEQ ID NO: 223375 - RNA, 19 nt, Artificial Sequence
  Synthetic
uaaguaccaaaaucuacga

SEQ ID NO: 223376 - RNA, 20 nt, Artificial Sequence
  Synthetic
guaaguaccaaaaucuacga

SEQ ID NO: 223377 - RNA, 21 nt, Artificial Sequence
  Synthetic
aguaaguaccaaaaucuacga

SEQ ID NO: 223378 - RNA, 22 nt, Artificial Sequence
  Synthetic
caguaaguaccaaaaucuacga

SEQ ID NO: 223379 - RNA, 23 nt, Artificial Sequence
  Synthetic
ucaguaaguaccaaaaucuacga

SEQ ID NO: 223380 - RNA, 24 nt, Artificial Sequence
  Synthetic
aucaguaaguaccaaaaucuacga

SEQ ID NO: 223381 - RNA, 18 nt, Artificial Sequence
  Synthetic
cuuagcucccacuuacga

SEQ ID NO: 223382 - RNA, 19 nt, Artificial Sequence
  Synthetic
gcuuagcucccacuuacga

SEQ ID NO: 223383 - RNA, 20 nt, Artificial Sequence
  Synthetic
agcuuagcucccacuuacga

SEQ ID NO: 223384 - RNA, 21 nt, Artificial Sequence
  Synthetic
uagcuuagcucccacuuacga

SEQ ID NO: 223385 - RNA, 22 nt, Artificial Sequence
  Synthetic
auagcuuagcucccacuuacga

SEQ ID NO: 223386 - RNA, 23 nt, Artificial Sequence
  Synthetic
cauagcuuagcucccacuuacga

SEQ ID NO: 223387 - RNA, 24 nt, Artificial Sequence
  Synthetic
ucauagcuuagcucccacuuacga

SEQ ID NO: 223388 - RNA, 18 nt, Artificial Sequence
  Synthetic
uucaauucccacuuacga

SEQ ID NO: 223389 - RNA, 19 nt, Artificial Sequence
  Synthetic
guucaauucccacuuacga

SEQ ID NO: 223390 - RNA, 20 nt, Artificial Sequence
  Synthetic
uguucaauucccacuuacga

SEQ ID NO: 223391 - RNA, 21 nt, Artificial Sequence
  Synthetic
uuguucaauucccacuuacga

SEQ ID NO: 223392 - RNA, 22 nt, Artificial Sequence
  Synthetic
auuguucaauucccacuuacga

SEQ ID NO: 223393 - RNA, 23 nt, Artificial Sequence
  Synthetic
cauuguucaauucccacuuacga

SEQ ID NO: 223394 - RNA, 24 nt, Artificial Sequence
  Synthetic
ucauuguucaauucccacuuacga

SEQ ID NO: 223395 - RNA, 18 nt, Artificial Sequence
  Synthetic
uuuuuuucagucuuacga

SEQ ID NO: 223396 - RNA, 19 nt, Artificial Sequence
  Synthetic
cuuuuuuucagucuuacga

SEQ ID NO: 223397 - RNA, 20 nt, Artificial Sequence
  Synthetic
acuuuuuuucagucuuacga

SEQ ID NO: 223398 - RNA, 21 nt, Artificial Sequence
  Synthetic
cacuuuuuuucagucuuacga

SEQ ID NO: 223399 - RNA, 22 nt, Artificial Sequence
  Synthetic
ucacuuuuuuucagucuuacga

SEQ ID NO: 223400 - RNA, 23 nt, Artificial Sequence
  Synthetic
uucacuuuuuuucagucuuacga

SEQ ID NO: 223401 - RNA, 24 nt, Artificial Sequence
  Synthetic
cuucacuuuuuuucagucuuacga

SEQ ID NO: 223402 - RNA, 18 nt, Artificial Sequence
  Synthetic
uccagccugggcaaccga

SEQ ID NO: 223403 - RNA, 19 nt, Artificial Sequence
  Synthetic
uuccagccugggcaaccga

SEQ ID NO: 223404 - RNA, 20 nt, Artificial Sequence
  Synthetic
auuccagccugggcaaccga

SEQ ID NO: 223405 - RNA, 21 nt, Artificial Sequence
  Synthetic
cauuccagccugggcaaccga

SEQ ID NO: 223406 - RNA, 22 nt, Artificial Sequence
  Synthetic
gcauuccagccugggcaaccga

SEQ ID NO: 223407 - RNA, 23 nt, Artificial Sequence
  Synthetic
ugcauuccagccugggcaaccga

SEQ ID NO: 223408 - RNA, 24 nt, Artificial Sequence
  Synthetic
cugcauuccagccugggcaaccga

SEQ ID NO: 223409 - RNA, 18 nt, Artificial Sequence
  Synthetic
uauuacugcuguaaccga

SEQ ID NO: 223410 - RNA, 19 nt, Artificial Sequence
  Synthetic
uuauuacugcuguaaccga

SEQ ID NO: 223411 - RNA, 20 nt, Artificial Sequence
  Synthetic
uuuauuacugcuguaaccga

SEQ ID NO: 223412 - RNA, 21 nt, Artificial Sequence
  Synthetic
uuuuauuacugcuguaaccga

SEQ ID NO: 223413 - RNA, 22 nt, Artificial Sequence
  Synthetic
uuuuuauuacugcuguaaccga

SEQ ID NO: 223414 - RNA, 23 nt, Artificial Sequence
  Synthetic
uuuuuuauuacugcuguaaccga

SEQ ID NO: 223415 - RNA, 24 nt, Artificial Sequence
  Synthetic
uuuuuuuauuacugcuguaaccga

SEQ ID NO: 223416 - RNA, 18 nt, Artificial Sequence
  Synthetic
ggaggaaagaggcaccga

SEQ ID NO: 223417 - RNA, 19 nt, Artificial Sequence
  Synthetic
uggaggaaagaggcaccga

SEQ ID NO: 223418 - RNA, 20 nt, Artificial Sequence
  Synthetic
cuggaggaaagaggcaccga

SEQ ID NO: 223419 - RNA, 21 nt, Artificial Sequence
  Synthetic
ccuggaggaaagaggcaccga

SEQ ID NO: 223420 - RNA, 22 nt, Artificial Sequence
  Synthetic
uccuggaggaaagaggcaccga

SEQ ID NO: 223421 - RNA, 23 nt, Artificial Sequence
  Synthetic
cuccuggaggaaagaggcaccga

SEQ ID NO: 223422 - RNA, 24 nt, Artificial Sequence
  Synthetic
ucuccuggaggaaagaggcaccga

SEQ ID NO: 223423 - RNA, 18 nt, Artificial Sequence
  Synthetic
agagauuuaaaagaccga

SEQ ID NO: 223424 - RNA, 19 nt, Artificial Sequence
  Synthetic
gagagauuuaaaagaccga

SEQ ID NO: 223425 - RNA, 20 nt, Artificial Sequence
  Synthetic
ggagagauuuaaaagaccga

SEQ ID NO: 223426 - RNA, 21 nt, Artificial Sequence
  Synthetic
aggagagauuuaaaagaccga

SEQ ID NO: 223427 - RNA, 22 nt, Artificial Sequence
  Synthetic
aaggagagauuuaaaagaccga

SEQ ID NO: 223428 - RNA, 23 nt, Artificial Sequence
  Synthetic
aaaggagagauuuaaaagaccga

SEQ ID NO: 223429 - RNA, 24 nt, Artificial Sequence
  Synthetic
aaaaggagagauuuaaaagaccga

SEQ ID NO: 223430 - RNA, 18 nt, Artificial Sequence
  Synthetic
agcauccguggggaccga

SEQ ID NO: 223431 - RNA, 19 nt, Artificial Sequence
  Synthetic
aagcauccguggggaccga

SEQ ID NO: 223432 - RNA, 20 nt, Artificial Sequence
  Synthetic
aaagcauccguggggaccga

SEQ ID NO: 223433 - RNA, 21 nt, Artificial Sequence
  Synthetic
aaaagcauccguggggaccga

SEQ ID NO: 223434 - RNA, 22 nt, Artificial Sequence
  Synthetic
uaaaagcauccguggggaccga

SEQ ID NO: 223435 - RNA, 23 nt, Artificial Sequence
  Synthetic
cuaaaagcauccguggggaccga

SEQ ID NO: 223436 - RNA, 24 nt, Artificial Sequence
  Synthetic
acuaaaagcauccguggggaccga

SEQ ID NO: 223437 - RNA, 18 nt, Artificial Sequence
  Synthetic
guugccaguagcuaccga

SEQ ID NO: 223438 - RNA, 19 nt, Artificial Sequence
  Synthetic
uguugccaguagcuaccga

SEQ ID NO: 223439 - RNA, 20 nt, Artificial Sequence
  Synthetic
auguugccaguagcuaccga

SEQ ID NO: 223440 - RNA, 21 nt, Artificial Sequence
  Synthetic
gauguugccaguagcuaccga

SEQ ID NO: 223441 - RNA, 22 nt, Artificial Sequence
  Synthetic
agauguugccaguagcuaccga

SEQ ID NO: 223442 - RNA, 23 nt, Artificial Sequence
  Synthetic
cagauguugccaguagcuaccga

SEQ ID NO: 223443 - RNA, 24 nt, Artificial Sequence
  Synthetic
ccagauguugccaguagcuaccga

SEQ ID NO: 223444 - RNA, 18 nt, Artificial Sequence
  Synthetic
uucuuaagaaguuaccga

SEQ ID NO: 223445 - RNA, 19 nt, Artificial Sequence
  Synthetic
auucuuaagaaguuaccga

SEQ ID NO: 223446 - RNA, 20 nt, Artificial Sequence
  Synthetic
gauucuuaagaaguuaccga

SEQ ID NO: 223447 - RNA, 21 nt, Artificial Sequence
  Synthetic
agauucuuaagaaguuaccga

SEQ ID NO: 223448 - RNA, 22 nt, Artificial Sequence
  Synthetic
aagauucuuaagaaguuaccga

SEQ ID NO: 223449 - RNA, 23 nt, Artificial Sequence
  Synthetic
gaagauucuuaagaaguuaccga

SEQ ID NO: 223450 - RNA, 24 nt, Artificial Sequence
  Synthetic
ugaagauucuuaagaaguuaccga

SEQ ID NO: 223451 - RNA, 18 nt, Artificial Sequence
  Synthetic
agcguaagaguagcccga

SEQ ID NO: 223452 - RNA, 19 nt, Artificial Sequence
  Synthetic
uagcguaagaguagcccga

SEQ ID NO: 223453 - RNA, 20 nt, Artificial Sequence
  Synthetic
uuagcguaagaguagcccga

SEQ ID NO: 223454 - RNA, 21 nt, Artificial Sequence
  Synthetic
cuuagcguaagaguagcccga

SEQ ID NO: 223455 - RNA, 22 nt, Artificial Sequence
  Synthetic
ucuuagcguaagaguagcccga

SEQ ID NO: 223456 - RNA, 23 nt, Artificial Sequence
  Synthetic
cucuuagcguaagaguagcccga

SEQ ID NO: 223457 - RNA, 24 nt, Artificial Sequence
  Synthetic
ccucuuagcguaagaguagcccga

SEQ ID NO: 223458 - RNA, 18 nt, Artificial Sequence
  Synthetic
aaggccauauauucccga

SEQ ID NO: 223459 - RNA, 19 nt, Artificial Sequence
  Synthetic
gaaggccauauauucccga

SEQ ID NO: 223460 - RNA, 20 nt, Artificial Sequence
  Synthetic
agaaggccauauauucccga

SEQ ID NO: 223461 - RNA, 21 nt, Artificial Sequence
  Synthetic
uagaaggccauauauucccga

SEQ ID NO: 223462 - RNA, 22 nt, Artificial Sequence
  Synthetic
uuagaaggccauauauucccga

SEQ ID NO: 223463 - RNA, 23 nt, Artificial Sequence
  Synthetic
uuuagaaggccauauauucccga

SEQ ID NO: 223464 - RNA, 24 nt, Artificial Sequence
  Synthetic
uuuuagaaggccauauauucccga

SEQ ID NO: 223465 - RNA, 18 nt, Artificial Sequence
  Synthetic
gccaccgugcccagccga

SEQ ID NO: 223466 - RNA, 19 nt, Artificial Sequence
  Synthetic
agccaccgugcccagccga

SEQ ID NO: 223467 - RNA, 20 nt, Artificial Sequence
  Synthetic
gagccaccgugcccagccga

SEQ ID NO: 223468 - RNA, 21 nt, Artificial Sequence
  Synthetic
ugagccaccgugcccagccga

SEQ ID NO: 223469 - RNA, 22 nt, Artificial Sequence
  Synthetic
gugagccaccgugcccagccga

SEQ ID NO: 223470 - RNA, 23 nt, Artificial Sequence
  Synthetic
ugugagccaccgugcccagccga

SEQ ID NO: 223471 - RNA, 24 nt, Artificial Sequence
  Synthetic
gugugagccaccgugcccagccga

SEQ ID NO: 223472 - RNA, 18 nt, Artificial Sequence
  Synthetic
caauucugugaaugccga

SEQ ID NO: 223473 - RNA, 19 nt, Artificial Sequence
  Synthetic
gcaauucugugaaugccga

SEQ ID NO: 223474 - RNA, 20 nt, Artificial Sequence
  Synthetic
ugcaauucugugaaugccga

SEQ ID NO: 223475 - RNA, 21 nt, Artificial Sequence
  Synthetic
cugcaauucugugaaugccga

SEQ ID NO: 223476 - RNA, 22 nt, Artificial Sequence
  Synthetic
ucugcaauucugugaaugccga

SEQ ID NO: 223477 - RNA, 23 nt, Artificial Sequence
  Synthetic
cucugcaauucugugaaugccga

SEQ ID NO: 223478 - RNA, 24 nt, Artificial Sequence
  Synthetic
ucucugcaauucugugaaugccga

SEQ ID NO: 223479 - RNA, 18 nt, Artificial Sequence
  Synthetic
caaaaauccaucauccga

SEQ ID NO: 223480 - RNA, 19 nt, Artificial Sequence
  Synthetic
acaaaaauccaucauccga

SEQ ID NO: 223481 - RNA, 20 nt, Artificial Sequence
  Synthetic
uacaaaaauccaucauccga

SEQ ID NO: 223482 - RNA, 21 nt, Artificial Sequence
  Synthetic
uuacaaaaauccaucauccga

SEQ ID NO: 223483 - RNA, 22 nt, Artificial Sequence
  Synthetic
uuuacaaaaauccaucauccga

SEQ ID NO: 223484 - RNA, 23 nt, Artificial Sequence
  Synthetic
cuuuacaaaaauccaucauccga

SEQ ID NO: 223485 - RNA, 24 nt, Artificial Sequence
  Synthetic
ucuuuacaaaaauccaucauccga

SEQ ID NO: 223486 - RNA, 18 nt, Artificial Sequence
  Synthetic
uccaacacuaugauccga

SEQ ID NO: 223487 - RNA, 19 nt, Artificial Sequence
  Synthetic
guccaacacuaugauccga

SEQ ID NO: 223488 - RNA, 20 nt, Artificial Sequence
  Synthetic
uguccaacacuaugauccga

SEQ ID NO: 223489 - RNA, 21 nt, Artificial Sequence
  Synthetic
cuguccaacacuaugauccga

SEQ ID NO: 223490 - RNA, 22 nt, Artificial Sequence
  Synthetic
acuguccaacacuaugauccga

SEQ ID NO: 223491 - RNA, 23 nt, Artificial Sequence
  Synthetic
aacuguccaacacuaugauccga

SEQ ID NO: 223492 - RNA, 24 nt, Artificial Sequence
  Synthetic
gaacuguccaacacuaugauccga

SEQ ID NO: 223493 - RNA, 18 nt, Artificial Sequence
  Synthetic
acgaauuaggcacuccga

SEQ ID NO: 223494 - RNA, 19 nt, Artificial Sequence
  Synthetic
cacgaauuaggcacuccga

SEQ ID NO: 223495 - RNA, 20 nt, Artificial Sequence
  Synthetic
acacgaauuaggcacuccga

SEQ ID NO: 223496 - RNA, 21 nt, Artificial Sequence
  Synthetic
aacacgaauuaggcacuccga

SEQ ID NO: 223497 - RNA, 22 nt, Artificial Sequence
  Synthetic
caacacgaauuaggcacuccga

SEQ ID NO: 223498 - RNA, 23 nt, Artificial Sequence
  Synthetic
ccaacacgaauuaggcacuccga

SEQ ID NO: 223499 - RNA, 24 nt, Artificial Sequence
  Synthetic
uccaacacgaauuaggcacuccga

SEQ ID NO: 223500 - RNA, 18 nt, Artificial Sequence
  Synthetic
gaaauuccaauacuccga

SEQ ID NO: 223501 - RNA, 19 nt, Artificial Sequence
  Synthetic
agaaauuccaauacuccga

SEQ ID NO: 223502 - RNA, 20 nt, Artificial Sequence
  Synthetic
uagaaauuccaauacuccga

SEQ ID NO: 223503 - RNA, 21 nt, Artificial Sequence
  Synthetic
auagaaauuccaauacuccga

SEQ ID NO: 223504 - RNA, 22 nt, Artificial Sequence
  Synthetic
aauagaaauuccaauacuccga

SEQ ID NO: 223505 - RNA, 23 nt, Artificial Sequence
  Synthetic
uaauagaaauuccaauacuccga

SEQ ID NO: 223506 - RNA, 24 nt, Artificial Sequence
  Synthetic
uuaauagaaauuccaauacuccga

SEQ ID NO: 223507 - RNA, 18 nt, Artificial Sequence
  Synthetic
accaggcagaaauuccga

SEQ ID NO: 223508 - RNA, 19 nt, Artificial Sequence
  Synthetic
uaccaggcagaaauuccga

SEQ ID NO: 223509 - RNA, 20 nt, Artificial Sequence
  Synthetic
guaccaggcagaaauuccga

SEQ ID NO: 223510 - RNA, 21 nt, Artificial Sequence
  Synthetic
gguaccaggcagaaauuccga

SEQ ID NO: 223511 - RNA, 22 nt, Artificial Sequence
  Synthetic
ugguaccaggcagaaauuccga

SEQ ID NO: 223512 - RNA, 23 nt, Artificial Sequence
  Synthetic
gugguaccaggcagaaauuccga

SEQ ID NO: 223513 - RNA, 24 nt, Artificial Sequence
  Synthetic
ugugguaccaggcagaaauuccga

SEQ ID NO: 223514 - RNA, 18 nt, Artificial Sequence
  Synthetic
cacacacauagauuccga

SEQ ID NO: 223515 - RNA, 19 nt, Artificial Sequence
  Synthetic
acacacacauagauuccga

SEQ ID NO: 223516 - RNA, 20 nt, Artificial Sequence
  Synthetic
uacacacacauagauuccga

SEQ ID NO: 223517 - RNA, 21 nt, Artificial Sequence
  Synthetic
guacacacacauagauuccga

SEQ ID NO: 223518 - RNA, 22 nt, Artificial Sequence
  Synthetic
cguacacacacauagauuccga

SEQ ID NO: 223519 - RNA, 23 nt, Artificial Sequence
  Synthetic
acguacacacacauagauuccga

SEQ ID NO: 223520 - RNA, 24 nt, Artificial Sequence
  Synthetic
aacguacacacacauagauuccga

SEQ ID NO: 223521 - RNA, 18 nt, Artificial Sequence
  Synthetic
ccauagaggcaacagcga

SEQ ID NO: 223522 - RNA, 19 nt, Artificial Sequence
  Synthetic
accauagaggcaacagcga

SEQ ID NO: 223523 - RNA, 20 nt, Artificial Sequence
  Synthetic
caccauagaggcaacagcga

SEQ ID NO: 223524 - RNA, 21 nt, Artificial Sequence
  Synthetic
acaccauagaggcaacagcga

SEQ ID NO: 223525 - RNA, 22 nt, Artificial Sequence
  Synthetic
gacaccauagaggcaacagcga

SEQ ID NO: 223526 - RNA, 23 nt, Artificial Sequence
  Synthetic
agacaccauagaggcaacagcga

SEQ ID NO: 223527 - RNA, 24 nt, Artificial Sequence
  Synthetic
aagacaccauagaggcaacagcga

SEQ ID NO: 223528 - RNA, 18 nt, Artificial Sequence
  Synthetic
gagcgaaggagacagcga

SEQ ID NO: 223529 - RNA, 19 nt, Artificial Sequence
  Synthetic
ggagcgaaggagacagcga

SEQ ID NO: 223530 - RNA, 20 nt, Artificial Sequence
  Synthetic
aggagcgaaggagacagcga

SEQ ID NO: 223531 - RNA, 21 nt, Artificial Sequence
  Synthetic
aaggagcgaaggagacagcga

SEQ ID NO: 223532 - RNA, 22 nt, Artificial Sequence
  Synthetic
gaaggagcgaaggagacagcga

SEQ ID NO: 223533 - RNA, 23 nt, Artificial Sequence
  Synthetic
agaaggagcgaaggagacagcga

SEQ ID NO: 223534 - RNA, 24 nt, Artificial Sequence
  Synthetic
gagaaggagcgaaggagacagcga

SEQ ID NO: 223535 - RNA, 18 nt, Artificial Sequence
  Synthetic
cagaaugagaaggagcga

SEQ ID NO: 223536 - RNA, 19 nt, Artificial Sequence
  Synthetic
ucagaaugagaaggagcga

SEQ ID NO: 223537 - RNA, 20 nt, Artificial Sequence
  Synthetic
aucagaaugagaaggagcga

SEQ ID NO: 223538 - RNA, 21 nt, Artificial Sequence
  Synthetic
aaucagaaugagaaggagcga

SEQ ID NO: 223539 - RNA, 22 nt, Artificial Sequence
  Synthetic
aaaucagaaugagaaggagcga

SEQ ID NO: 223540 - RNA, 23 nt, Artificial Sequence
  Synthetic
gaaaucagaaugagaaggagcga

SEQ ID NO: 223541 - RNA, 24 nt, Artificial Sequence
  Synthetic
ugaaaucagaaugagaaggagcga

SEQ ID NO: 223542 - RNA, 18 nt, Artificial Sequence
  Synthetic
cuauaaucugaaaggcga

SEQ ID NO: 223543 - RNA, 19 nt, Artificial Sequence
  Synthetic
ccuauaaucugaaaggcga

SEQ ID NO: 223544 - RNA, 20 nt, Artificial Sequence
  Synthetic
accuauaaucugaaaggcga

SEQ ID NO: 223545 - RNA, 21 nt, Artificial Sequence
  Synthetic
gaccuauaaucugaaaggcga

SEQ ID NO: 223546 - RNA, 22 nt, Artificial Sequence
  Synthetic
agaccuauaaucugaaaggcga

SEQ ID NO: 223547 - RNA, 23 nt, Artificial Sequence
  Synthetic
aagaccuauaaucugaaaggcga

SEQ ID NO: 223548 - RNA, 24 nt, Artificial Sequence
  Synthetic
uaagaccuauaaucugaaaggcga

SEQ ID NO: 223549 - RNA, 18 nt, Artificial Sequence
  Synthetic
aaucauggcagaaggcga

SEQ ID NO: 223550 - RNA, 19 nt, Artificial Sequence
  Synthetic
caaucauggcagaaggcga

SEQ ID NO: 223551 - RNA, 20 nt, Artificial Sequence
  Synthetic
acaaucauggcagaaggcga

SEQ ID NO: 223552 - RNA, 21 nt, Artificial Sequence
  Synthetic
cacaaucauggcagaaggcga

SEQ ID NO: 223553 - RNA, 22 nt, Artificial Sequence
  Synthetic
ucacaaucauggcagaaggcga

SEQ ID NO: 223554 - RNA, 23 nt, Artificial Sequence
  Synthetic
cucacaaucauggcagaaggcga

SEQ ID NO: 223555 - RNA, 24 nt, Artificial Sequence
  Synthetic
ccucacaaucauggcagaaggcga

SEQ ID NO: 223556 - RNA, 18 nt, Artificial Sequence
  Synthetic
ugucgggggguggggcga

SEQ ID NO: 223557 - RNA, 19 nt, Artificial Sequence
  Synthetic
cugucgggggguggggcga

SEQ ID NO: 223558 - RNA, 20 nt, Artificial Sequence
  Synthetic
ccugucgggggguggggcga

SEQ ID NO: 223559 - RNA, 21 nt, Artificial Sequence
  Synthetic
gccugucgggggguggggcga

SEQ ID NO: 223560 - RNA, 22 nt, Artificial Sequence
  Synthetic
ggccugucgggggguggggcga

SEQ ID NO: 223561 - RNA, 23 nt, Artificial Sequence
  Synthetic
aggccugucgggggguggggcga

SEQ ID NO: 223562 - RNA, 24 nt, Artificial Sequence
  Synthetic
gaggccugucgggggguggggcga

SEQ ID NO: 223563 - RNA, 18 nt, Artificial Sequence
  Synthetic
uauaugcagaaugggcga

SEQ ID NO: 223564 - RNA, 19 nt, Artificial Sequence
  Synthetic
auauaugcagaaugggcga

SEQ ID NO: 223565 - RNA, 20 nt, Artificial Sequence
  Synthetic
gauauaugcagaaugggcga

SEQ ID NO: 223566 - RNA, 21 nt, Artificial Sequence
  Synthetic
agauauaugcagaaugggcga

SEQ ID NO: 223567 - RNA, 22 nt, Artificial Sequence
  Synthetic
gagauauaugcagaaugggcga

SEQ ID NO: 223568 - RNA, 23 nt, Artificial Sequence
  Synthetic
ugagauauaugcagaaugggcga

SEQ ID NO: 223569 - RNA, 24 nt, Artificial Sequence
  Synthetic
augagauauaugcagaaugggcga

SEQ ID NO: 223570 - RNA, 18 nt, Artificial Sequence
  Synthetic
gcacuccaaccugggcga

SEQ ID NO: 223571 - RNA, 19 nt, Artificial Sequence
  Synthetic
ugcacuccaaccugggcga

SEQ ID NO: 223572 - RNA, 20 nt, Artificial Sequence
  Synthetic
cugcacuccaaccugggcga

SEQ ID NO: 223573 - RNA, 21 nt, Artificial Sequence
  Synthetic
acugcacuccaaccugggcga

SEQ ID NO: 223574 - RNA, 22 nt, Artificial Sequence
  Synthetic
cacugcacuccaaccugggcga

SEQ ID NO: 223575 - RNA, 23 nt, Artificial Sequence
  Synthetic
ccacugcacuccaaccugggcga

SEQ ID NO: 223576 - RNA, 24 nt, Artificial Sequence
  Synthetic
gccacugcacuccaaccugggcga

SEQ ID NO: 223577 - RNA, 18 nt, Artificial Sequence
  Synthetic
gcgcuccaaccugggcga

SEQ ID NO: 223578 - RNA, 19 nt, Artificial Sequence
  Synthetic
ugcgcuccaaccugggcga

SEQ ID NO: 223579 - RNA, 20 nt, Artificial Sequence
  Synthetic
cugcgcuccaaccugggcga

SEQ ID NO: 223580 - RNA, 21 nt, Artificial Sequence
  Synthetic
acugcgcuccaaccugggcga

SEQ ID NO: 223581 - RNA, 22 nt, Artificial Sequence
  Synthetic
cacugcgcuccaaccugggcga

SEQ ID NO: 223582 - RNA, 23 nt, Artificial Sequence
  Synthetic
ccacugcgcuccaaccugggcga

SEQ ID NO: 223583 - RNA, 24 nt, Artificial Sequence
  Synthetic
gccacugcgcuccaaccugggcga

SEQ ID NO: 223584 - RNA, 18 nt, Artificial Sequence
  Synthetic
gcacuacagccugggcga

SEQ ID NO: 223585 - RNA, 19 nt, Artificial Sequence
  Synthetic
ugcacuacagccugggcga

SEQ ID NO: 223586 - RNA, 20 nt, Artificial Sequence
  Synthetic
cugcacuacagccugggcga

SEQ ID NO: 223587 - RNA, 21 nt, Artificial Sequence
  Synthetic
acugcacuacagccugggcga

SEQ ID NO: 223588 - RNA, 22 nt, Artificial Sequence
  Synthetic
cacugcacuacagccugggcga

SEQ ID NO: 223589 - RNA, 23 nt, Artificial Sequence
  Synthetic
ccacugcacuacagccugggcga

SEQ ID NO: 223590 - RNA, 24 nt, Artificial Sequence
  Synthetic
gccacugcacuacagccugggcga

SEQ ID NO: 223591 - RNA, 18 nt, Artificial Sequence
  Synthetic
ccacuccagccugggcga

SEQ ID NO: 223592 - RNA, 19 nt, Artificial Sequence
  Synthetic
uccacuccagccugggcga

SEQ ID NO: 223593 - RNA, 20 nt, Artificial Sequence
  Synthetic
cuccacuccagccugggcga

SEQ ID NO: 223594 - RNA, 21 nt, Artificial Sequence
  Synthetic
acuccacuccagccugggcga

SEQ ID NO: 223595 - RNA, 22 nt, Artificial Sequence
  Synthetic
cacuccacuccagccugggcga

SEQ ID NO: 223596 - RNA, 23 nt, Artificial Sequence
  Synthetic
ccacuccacuccagccugggcga

SEQ ID NO: 223597 - RNA, 24 nt, Artificial Sequence
  Synthetic
gccacuccacuccagccugggcga

SEQ ID NO: 223598 - RNA, 21 nt, Artificial Sequence
  Synthetic
acugcacuccagccugggcga

SEQ ID NO: 223599 - RNA, 22 nt, Artificial Sequence
  Synthetic
cacugcacuccagccugggcga

SEQ ID NO: 223600 - RNA, 23 nt, Artificial Sequence
  Synthetic
ccacugcacuccagccugggcga

SEQ ID NO: 223601 - RNA, 24 nt, Artificial Sequence
  Synthetic
gccacugcacuccagccugggcga

SEQ ID NO: 223602 - RNA, 22 nt, Artificial Sequence
  Synthetic
uacugcacuccagccugggcga

SEQ ID NO: 223603 - RNA, 23 nt, Artificial Sequence
  Synthetic
cuacugcacuccagccugggcga

SEQ ID NO: 223604 - RNA, 24 nt, Artificial Sequence
  Synthetic
gcuacugcacuccagccugggcga

SEQ ID NO: 223605 - RNA, 21 nt, Artificial Sequence
  Synthetic
gcugcacuccagccugggcga

SEQ ID NO: 223606 - RNA, 22 nt, Artificial Sequence
  Synthetic
ugcugcacuccagccugggcga

SEQ ID NO: 223607 - RNA, 23 nt, Artificial Sequence
  Synthetic
cugcugcacuccagccugggcga

SEQ ID NO: 223608 - RNA, 24 nt, Artificial Sequence
  Synthetic
acugcugcacuccagccugggcga

SEQ ID NO: 223609 - RNA, 18 nt, Artificial Sequence
  Synthetic
gcaguccggccugggcga

SEQ ID NO: 223610 - RNA, 19 nt, Artificial Sequence
  Synthetic
ugcaguccggccugggcga

SEQ ID NO: 223611 - RNA, 20 nt, Artificial Sequence
  Synthetic
cugcaguccggccugggcga

SEQ ID NO: 223612 - RNA, 21 nt, Artificial Sequence
  Synthetic
acugcaguccggccugggcga

SEQ ID NO: 223613 - RNA, 22 nt, Artificial Sequence
  Synthetic
cacugcaguccggccugggcga

SEQ ID NO: 223614 - RNA, 23 nt, Artificial Sequence
  Synthetic
gcacugcaguccggccugggcga

SEQ ID NO: 223615 - RNA, 24 nt, Artificial Sequence
  Synthetic
agcacugcaguccggccugggcga

SEQ ID NO: 223616 - RNA, 18 nt, Artificial Sequence
  Synthetic
uaaccaggggcugggcga

SEQ ID NO: 223617 - RNA, 19 nt, Artificial Sequence
  Synthetic
guaaccaggggcugggcga

SEQ ID NO: 223618 - RNA, 20 nt, Artificial Sequence
  Synthetic
aguaaccaggggcugggcga

SEQ ID NO: 223619 - RNA, 21 nt, Artificial Sequence
  Synthetic
uaguaaccaggggcugggcga

SEQ ID NO: 223620 - RNA, 22 nt, Artificial Sequence
  Synthetic
auaguaaccaggggcugggcga

SEQ ID NO: 223621 - RNA, 23 nt, Artificial Sequence
  Synthetic
gauaguaaccaggggcugggcga

SEQ ID NO: 223622 - RNA, 24 nt, Artificial Sequence
  Synthetic
ugauaguaaccaggggcugggcga

SEQ ID NO: 223623 - RNA, 18 nt, Artificial Sequence
  Synthetic
gcaaaagaagcauggcga

SEQ ID NO: 223624 - RNA, 19 nt, Artificial Sequence
  Synthetic
agcaaaagaagcauggcga

SEQ ID NO: 223625 - RNA, 20 nt, Artificial Sequence
  Synthetic
aagcaaaagaagcauggcga

SEQ ID NO: 223626 - RNA, 21 nt, Artificial Sequence
  Synthetic
uaagcaaaagaagcauggcga

SEQ ID NO: 223627 - RNA, 22 nt, Artificial Sequence
  Synthetic
cuaagcaaaagaagcauggcga

SEQ ID NO: 223628 - RNA, 23 nt, Artificial Sequence
  Synthetic
ucuaagcaaaagaagcauggcga

SEQ ID NO: 223629 - RNA, 24 nt, Artificial Sequence
  Synthetic
uucuaagcaaaagaagcauggcga

SEQ ID NO: 223630 - RNA, 18 nt, Artificial Sequence
  Synthetic
ugcacuccagccuggcga

SEQ ID NO: 223631 - RNA, 19 nt, Artificial Sequence
  Synthetic
cugcacuccagccuggcga

SEQ ID NO: 223632 - RNA, 20 nt, Artificial Sequence
  Synthetic
acugcacuccagccuggcga

SEQ ID NO: 223633 - RNA, 24 nt, Artificial Sequence
  Synthetic
ugccacugcacuccagccuggcga

SEQ ID NO: 223634 - RNA, 18 nt, Artificial Sequence
  Synthetic
uauacuccagccuggcga

SEQ ID NO: 223635 - RNA, 19 nt, Artificial Sequence
  Synthetic
cuauacuccagccuggcga

SEQ ID NO: 223636 - RNA, 20 nt, Artificial Sequence
  Synthetic
gcuauacuccagccuggcga

SEQ ID NO: 223637 - RNA, 21 nt, Artificial Sequence
  Synthetic
cgcuauacuccagccuggcga

SEQ ID NO: 223638 - RNA, 22 nt, Artificial Sequence
  Synthetic
ccgcuauacuccagccuggcga

SEQ ID NO: 223639 - RNA, 23 nt, Artificial Sequence
  Synthetic
gccgcuauacuccagccuggcga

SEQ ID NO: 223640 - RNA, 24 nt, Artificial Sequence
  Synthetic
ugccgcuauacuccagccuggcga

SEQ ID NO: 223641 - RNA, 18 nt, Artificial Sequence
  Synthetic
uuucuguaaaaaaugcga

SEQ ID NO: 223642 - RNA, 19 nt, Artificial Sequence
  Synthetic
auuucuguaaaaaaugcga

SEQ ID NO: 223643 - RNA, 20 nt, Artificial Sequence
  Synthetic
uauuucuguaaaaaaugcga

SEQ ID NO: 223644 - RNA, 21 nt, Artificial Sequence
  Synthetic
uuauuucuguaaaaaaugcga

SEQ ID NO: 223645 - RNA, 22 nt, Artificial Sequence
  Synthetic
cuuauuucuguaaaaaaugcga

SEQ ID NO: 223646 - RNA, 23 nt, Artificial Sequence
  Synthetic
ccuuauuucuguaaaaaaugcga

SEQ ID NO: 223647 - RNA, 24 nt, Artificial Sequence
  Synthetic
accuuauuucuguaaaaaaugcga

SEQ ID NO: 223648 - RNA, 18 nt, Artificial Sequence
  Synthetic
uaagacuuuuggcugcga

SEQ ID NO: 223649 - RNA, 19 nt, Artificial Sequence
  Synthetic
uuaagacuuuuggcugcga

SEQ ID NO: 223650 - RNA, 20 nt, Artificial Sequence
  Synthetic
uuuaagacuuuuggcugcga

SEQ ID NO: 223651 - RNA, 21 nt, Artificial Sequence
  Synthetic
uuuuaagacuuuuggcugcga

SEQ ID NO: 223652 - RNA, 22 nt, Artificial Sequence
  Synthetic
auuuuaagacuuuuggcugcga

SEQ ID NO: 223653 - RNA, 23 nt, Artificial Sequence
  Synthetic
uauuuuaagacuuuuggcugcga

SEQ ID NO: 223654 - RNA, 24 nt, Artificial Sequence
  Synthetic
uuauuuuaagacuuuuggcugcga

SEQ ID NO: 223655 - RNA, 18 nt, Artificial Sequence
  Synthetic
guguuugaaugucugcga

SEQ ID NO: 223656 - RNA, 19 nt, Artificial Sequence
  Synthetic
gguguuugaaugucugcga

SEQ ID NO: 223657 - RNA, 20 nt, Artificial Sequence
  Synthetic
ugguguuugaaugucugcga

SEQ ID NO: 223658 - RNA, 21 nt, Artificial Sequence
  Synthetic
augguguuugaaugucugcga

SEQ ID NO: 223659 - RNA, 22 nt, Artificial Sequence
  Synthetic
gaugguguuugaaugucugcga

SEQ ID NO: 223660 - RNA, 23 nt, Artificial Sequence
  Synthetic
ugaugguguuugaaugucugcga

SEQ ID NO: 223661 - RNA, 24 nt, Artificial Sequence
  Synthetic
augaugguguuugaaugucugcga

SEQ ID NO: 223662 - RNA, 18 nt, Artificial Sequence
  Synthetic
uaaauuacaaguuugcga

SEQ ID NO: 223663 - RNA, 19 nt, Artificial Sequence
  Synthetic
uuaaauuacaaguuugcga

SEQ ID NO: 223664 - RNA, 20 nt, Artificial Sequence
  Synthetic
uuuaaauuacaaguuugcga

SEQ ID NO: 223665 - RNA, 21 nt, Artificial Sequence
  Synthetic
uuuuaaauuacaaguuugcga

SEQ ID NO: 223666 - RNA, 22 nt, Artificial Sequence
  Synthetic
uuuuuaaauuacaaguuugcga

SEQ ID NO: 223667 - RNA, 23 nt, Artificial Sequence
  Synthetic
uuuuuuaaauuacaaguuugcga

SEQ ID NO: 223668 - RNA, 24 nt, Artificial Sequence
  Synthetic
uuuuuuuaaauuacaaguuugcga

SEQ ID NO: 223669 - RNA, 18 nt, Artificial Sequence
  Synthetic
uacuaaucauuaaaucga

SEQ ID NO: 223670 - RNA, 19 nt, Artificial Sequence
  Synthetic
auacuaaucauuaaaucga

SEQ ID NO: 223671 - RNA, 20 nt, Artificial Sequence
  Synthetic
uauacuaaucauuaaaucga

SEQ ID NO: 223672 - RNA, 21 nt, Artificial Sequence
  Synthetic
uuauacuaaucauuaaaucga

SEQ ID NO: 223673 - RNA, 22 nt, Artificial Sequence
  Synthetic
uuuauacuaaucauuaaaucga

SEQ ID NO: 223674 - RNA, 23 nt, Artificial Sequence
  Synthetic
uuuuauacuaaucauuaaaucga

SEQ ID NO: 223675 - RNA, 24 nt, Artificial Sequence
  Synthetic
auuuuauacuaaucauuaaaucga

SEQ ID NO: 223676 - RNA, 18 nt, Artificial Sequence
  Synthetic
uaaaguggauuaaaucga

SEQ ID NO: 223677 - RNA, 19 nt, Artificial Sequence
  Synthetic
auaaaguggauuaaaucga

SEQ ID NO: 223678 - RNA, 20 nt, Artificial Sequence
  Synthetic
cauaaaguggauuaaaucga

SEQ ID NO: 223679 - RNA, 21 nt, Artificial Sequence
  Synthetic
ucauaaaguggauuaaaucga

SEQ ID NO: 223680 - RNA, 22 nt, Artificial Sequence
  Synthetic
uucauaaaguggauuaaaucga

SEQ ID NO: 223681 - RNA, 23 nt, Artificial Sequence
  Synthetic
auucauaaaguggauuaaaucga

SEQ ID NO: 223682 - RNA, 24 nt, Artificial Sequence
  Synthetic
aauucauaaaguggauuaaaucga

SEQ ID NO: 223683 - RNA, 18 nt, Artificial Sequence
  Synthetic
ggaccuaaguccaaucga

SEQ ID NO: 223684 - RNA, 19 nt, Artificial Sequence
  Synthetic
aggaccuaaguccaaucga

SEQ ID NO: 223685 - RNA, 20 nt, Artificial Sequence
  Synthetic
gaggaccuaaguccaaucga

SEQ ID NO: 223686 - RNA, 21 nt, Artificial Sequence
  Synthetic
ugaggaccuaaguccaaucga

SEQ ID NO: 223687 - RNA, 22 nt, Artificial Sequence
  Synthetic
uugaggaccuaaguccaaucga

SEQ ID NO: 223688 - RNA, 23 nt, Artificial Sequence
  Synthetic
auugaggaccuaaguccaaucga

SEQ ID NO: 223689 - RNA, 24 nt, Artificial Sequence
  Synthetic
aauugaggaccuaaguccaaucga

SEQ ID NO: 223690 - RNA, 18 nt, Artificial Sequence
  Synthetic
auaaauauagauaaucga

SEQ ID NO: 223691 - RNA, 19 nt, Artificial Sequence
  Synthetic
gauaaauauagauaaucga

SEQ ID NO: 223692 - RNA, 20 nt, Artificial Sequence
  Synthetic
agauaaauauagauaaucga

SEQ ID NO: 223693 - RNA, 21 nt, Artificial Sequence
  Synthetic
uagauaaauauagauaaucga

SEQ ID NO: 223694 - RNA, 22 nt, Artificial Sequence
  Synthetic
auagauaaauauagauaaucga

SEQ ID NO: 223695 - RNA, 23 nt, Artificial Sequence
  Synthetic
aauagauaaauauagauaaucga

SEQ ID NO: 223696 - RNA, 24 nt, Artificial Sequence
  Synthetic
aaauagauaaauauagauaaucga

SEQ ID NO: 223697 - RNA, 18 nt, Artificial Sequence
  Synthetic
auaccaauacuuaaucga

SEQ ID NO: 223698 - RNA, 19 nt, Artificial Sequence
  Synthetic
cauaccaauacuuaaucga

SEQ ID NO: 223699 - RNA, 20 nt, Artificial Sequence
  Synthetic
ccauaccaauacuuaaucga

SEQ ID NO: 223700 - RNA, 21 nt, Artificial Sequence
  Synthetic
uccauaccaauacuuaaucga

SEQ ID NO: 223701 - RNA, 22 nt, Artificial Sequence
  Synthetic
cuccauaccaauacuuaaucga

SEQ ID NO: 223702 - RNA, 23 nt, Artificial Sequence
  Synthetic
acuccauaccaauacuuaaucga

SEQ ID NO: 223703 - RNA, 24 nt, Artificial Sequence
  Synthetic
gacuccauaccaauacuuaaucga

SEQ ID NO: 223704 - RNA, 18 nt, Artificial Sequence
  Synthetic
gcuuuccccuaccaucga

SEQ ID NO: 223705 - RNA, 19 nt, Artificial Sequence
  Synthetic
agcuuuccccuaccaucga

SEQ ID NO: 223706 - RNA, 20 nt, Artificial Sequence
  Synthetic
aagcuuuccccuaccaucga

SEQ ID NO: 223707 - RNA, 21 nt, Artificial Sequence
  Synthetic
caagcuuuccccuaccaucga

SEQ ID NO: 223708 - RNA, 22 nt, Artificial Sequence
  Synthetic
acaagcuuuccccuaccaucga

SEQ ID NO: 223709 - RNA, 23 nt, Artificial Sequence
  Synthetic
cacaagcuuuccccuaccaucga

SEQ ID NO: 223710 - RNA, 24 nt, Artificial Sequence
  Synthetic
ucacaagcuuuccccuaccaucga

SEQ ID NO: 223711 - RNA, 18 nt, Artificial Sequence
  Synthetic
ccaaggugggauuaucga

SEQ ID NO: 223712 - RNA, 19 nt, Artificial Sequence
  Synthetic
gccaaggugggauuaucga

SEQ ID NO: 223713 - RNA, 20 nt, Artificial Sequence
  Synthetic
ggccaaggugggauuaucga

SEQ ID NO: 223714 - RNA, 21 nt, Artificial Sequence
  Synthetic
aggccaaggugggauuaucga

SEQ ID NO: 223715 - RNA, 22 nt, Artificial Sequence
  Synthetic
gaggccaaggugggauuaucga

SEQ ID NO: 223716 - RNA, 23 nt, Artificial Sequence
  Synthetic
ggaggccaaggugggauuaucga

SEQ ID NO: 223717 - RNA, 24 nt, Artificial Sequence
  Synthetic
uggaggccaaggugggauuaucga

SEQ ID NO: 223718 - RNA, 18 nt, Artificial Sequence
  Synthetic
ucauagccauuuuaucga

SEQ ID NO: 223719 - RNA, 19 nt, Artificial Sequence
  Synthetic
gucauagccauuuuaucga

SEQ ID NO: 223720 - RNA, 20 nt, Artificial Sequence
  Synthetic
ugucauagccauuuuaucga

SEQ ID NO: 223721 - RNA, 21 nt, Artificial Sequence
  Synthetic
cugucauagccauuuuaucga

SEQ ID NO: 223722 - RNA, 22 nt, Artificial Sequence
  Synthetic
ucugucauagccauuuuaucga

SEQ ID NO: 223723 - RNA, 23 nt, Artificial Sequence
  Synthetic
cucugucauagccauuuuaucga

SEQ ID NO: 223724 - RNA, 24 nt, Artificial Sequence
  Synthetic
ucucugucauagccauuuuaucga

SEQ ID NO: 223725 - RNA, 18 nt, Artificial Sequence
  Synthetic
aacucgugguuuccucga

SEQ ID NO: 223726 - RNA, 19 nt, Artificial Sequence
  Synthetic
aaacucgugguuuccucga

SEQ ID NO: 223727 - RNA, 20 nt, Artificial Sequence
  Synthetic
caaacucgugguuuccucga

SEQ ID NO: 223728 - RNA, 21 nt, Artificial Sequence
  Synthetic
ucaaacucgugguuuccucga

SEQ ID NO: 223729 - RNA, 22 nt, Artificial Sequence
  Synthetic
cucaaacucgugguuuccucga

SEQ ID NO: 223730 - RNA, 23 nt, Artificial Sequence
  Synthetic
ucucaaacucgugguuuccucga

SEQ ID NO: 223731 - RNA, 24 nt, Artificial Sequence
  Synthetic
cucucaaacucgugguuuccucga

SEQ ID NO: 223732 - RNA, 18 nt, Artificial Sequence
  Synthetic
agaacacaguaagcucga

SEQ ID NO: 223733 - RNA, 19 nt, Artificial Sequence
  Synthetic
aagaacacaguaagcucga

SEQ ID NO: 223734 - RNA, 20 nt, Artificial Sequence
  Synthetic
gaagaacacaguaagcucga

SEQ ID NO: 223735 - RNA, 21 nt, Artificial Sequence
  Synthetic
agaagaacacaguaagcucga

SEQ ID NO: 223736 - RNA, 22 nt, Artificial Sequence
  Synthetic
aagaagaacacaguaagcucga

SEQ ID NO: 223737 - RNA, 23 nt, Artificial Sequence
  Synthetic
aaagaagaacacaguaagcucga

SEQ ID NO: 223738 - RNA, 24 nt, Artificial Sequence
  Synthetic
aaaagaagaacacaguaagcucga

SEQ ID NO: 223739 - RNA, 18 nt, Artificial Sequence
  Synthetic
agguacacagucucucga

SEQ ID NO: 223740 - RNA, 19 nt, Artificial Sequence
  Synthetic
gagguacacagucucucga

SEQ ID NO: 223741 - RNA, 20 nt, Artificial Sequence
  Synthetic
agagguacacagucucucga

SEQ ID NO: 223742 - RNA, 21 nt, Artificial Sequence
  Synthetic
aagagguacacagucucucga

SEQ ID NO: 223743 - RNA, 22 nt, Artificial Sequence
  Synthetic
caagagguacacagucucucga

SEQ ID NO: 223744 - RNA, 23 nt, Artificial Sequence
  Synthetic
ccaagagguacacagucucucga

SEQ ID NO: 223745 - RNA, 24 nt, Artificial Sequence
  Synthetic
uccaagagguacacagucucucga

SEQ ID NO: 223746 - RNA, 18 nt, Artificial Sequence
  Synthetic
aucauacagcaaagucga

SEQ ID NO: 223747 - RNA, 19 nt, Artificial Sequence
  Synthetic
aaucauacagcaaagucga

SEQ ID NO: 223748 - RNA, 20 nt, Artificial Sequence
  Synthetic
uaaucauacagcaaagucga

SEQ ID NO: 223749 - RNA, 21 nt, Artificial Sequence
  Synthetic
cuaaucauacagcaaagucga

SEQ ID NO: 223750 - RNA, 22 nt, Artificial Sequence
  Synthetic
gcuaaucauacagcaaagucga

SEQ ID NO: 223751 - RNA, 23 nt, Artificial Sequence
  Synthetic
ggcuaaucauacagcaaagucga

SEQ ID NO: 223752 - RNA, 24 nt, Artificial Sequence
  Synthetic
uggcuaaucauacagcaaagucga

SEQ ID NO: 223753 - RNA, 18 nt, Artificial Sequence
  Synthetic
uugugagcauaaagucga

SEQ ID NO: 223754 - RNA, 19 nt, Artificial Sequence
  Synthetic
uuugugagcauaaagucga

SEQ ID NO: 223755 - RNA, 20 nt, Artificial Sequence
  Synthetic
auuugugagcauaaagucga

SEQ ID NO: 223756 - RNA, 21 nt, Artificial Sequence
  Synthetic
cauuugugagcauaaagucga

SEQ ID NO: 223757 - RNA, 22 nt, Artificial Sequence
  Synthetic
acauuugugagcauaaagucga

SEQ ID NO: 223758 - RNA, 23 nt, Artificial Sequence
  Synthetic
cacauuugugagcauaaagucga

SEQ ID NO: 223759 - RNA, 24 nt, Artificial Sequence
  Synthetic
acacauuugugagcauaaagucga

SEQ ID NO: 223760 - RNA, 18 nt, Artificial Sequence
  Synthetic
cuucagaccagaagucga

SEQ ID NO: 223761 - RNA, 19 nt, Artificial Sequence
  Synthetic
ucuucagaccagaagucga

SEQ ID NO: 223762 - RNA, 20 nt, Artificial Sequence
  Synthetic
uucuucagaccagaagucga

SEQ ID NO: 223763 - RNA, 21 nt, Artificial Sequence
  Synthetic
auucuucagaccagaagucga

SEQ ID NO: 223764 - RNA, 22 nt, Artificial Sequence
  Synthetic
aauucuucagaccagaagucga

SEQ ID NO: 223765 - RNA, 23 nt, Artificial Sequence
  Synthetic
gaauucuucagaccagaagucga

SEQ ID NO: 223766 - RNA, 24 nt, Artificial Sequence
  Synthetic
agaauucuucagaccagaagucga

SEQ ID NO: 223767 - RNA, 18 nt, Artificial Sequence
  Synthetic
aaauuugaaaagcgucga

SEQ ID NO: 223768 - RNA, 19 nt, Artificial Sequence
  Synthetic
aaaauuugaaaagcgucga

SEQ ID NO: 223769 - RNA, 20 nt, Artificial Sequence
  Synthetic
caaaauuugaaaagcgucga

SEQ ID NO: 223770 - RNA, 21 nt, Artificial Sequence
  Synthetic
ucaaaauuugaaaagcgucga

SEQ ID NO: 223771 - RNA, 22 nt, Artificial Sequence
  Synthetic
gucaaaauuugaaaagcgucga

SEQ ID NO: 223772 - RNA, 23 nt, Artificial Sequence
  Synthetic
ugucaaaauuugaaaagcgucga

SEQ ID NO: 223773 - RNA, 24 nt, Artificial Sequence
  Synthetic
augucaaaauuugaaaagcgucga

SEQ ID NO: 223774 - RNA, 18 nt, Artificial Sequence
  Synthetic
ugaauaaauguuugucga

SEQ ID NO: 223775 - RNA, 19 nt, Artificial Sequence
  Synthetic
cugaauaaauguuugucga

SEQ ID NO: 223776 - RNA, 20 nt, Artificial Sequence
  Synthetic
acugaauaaauguuugucga

SEQ ID NO: 223777 - RNA, 21 nt, Artificial Sequence
  Synthetic
cacugaauaaauguuugucga

SEQ ID NO: 223778 - RNA, 22 nt, Artificial Sequence
  Synthetic
gcacugaauaaauguuugucga

SEQ ID NO: 223779 - RNA, 23 nt, Artificial Sequence
  Synthetic
agcacugaauaaauguuugucga

SEQ ID NO: 223780 - RNA, 24 nt, Artificial Sequence
  Synthetic
aagcacugaauaaauguuugucga

SEQ ID NO: 223781 - RNA, 18 nt, Artificial Sequence
  Synthetic
cuuggccuauagauucga

SEQ ID NO: 223782 - RNA, 19 nt, Artificial Sequence
  Synthetic
gcuuggccuauagauucga

SEQ ID NO: 223783 - RNA, 20 nt, Artificial Sequence
  Synthetic
agcuuggccuauagauucga

SEQ ID NO: 223784 - RNA, 21 nt, Artificial Sequence
  Synthetic
cagcuuggccuauagauucga

SEQ ID NO: 223785 - RNA, 22 nt, Artificial Sequence
  Synthetic
gcagcuuggccuauagauucga

SEQ ID NO: 223786 - RNA, 23 nt, Artificial Sequence
  Synthetic
ugcagcuuggccuauagauucga

SEQ ID NO: 223787 - RNA, 24 nt, Artificial Sequence
  Synthetic
cugcagcuuggccuauagauucga

SEQ ID NO: 223788 - RNA, 18 nt, Artificial Sequence
  Synthetic
aagucugcucuacuucga

SEQ ID NO: 223789 - RNA, 19 nt, Artificial Sequence
  Synthetic
caagucugcucuacuucga

SEQ ID NO: 223790 - RNA, 20 nt, Artificial Sequence
  Synthetic
ucaagucugcucuacuucga

SEQ ID NO: 223791 - RNA, 21 nt, Artificial Sequence
  Synthetic
cucaagucugcucuacuucga

SEQ ID NO: 223792 - RNA, 22 nt, Artificial Sequence
  Synthetic
ucucaagucugcucuacuucga

SEQ ID NO: 223793 - RNA, 23 nt, Artificial Sequence
  Synthetic
aucucaagucugcucuacuucga

SEQ ID NO: 223794 - RNA, 24 nt, Artificial Sequence
  Synthetic
uaucucaagucugcucuacuucga

SEQ ID NO: 223795 - RNA, 18 nt, Artificial Sequence
  Synthetic
cugcuuuucucccuucga

SEQ ID NO: 223796 - RNA, 19 nt, Artificial Sequence
  Synthetic
ccugcuuuucucccuucga

SEQ ID NO: 223797 - RNA, 20 nt, Artificial Sequence
  Synthetic
uccugcuuuucucccuucga

SEQ ID NO: 223798 - RNA, 21 nt, Artificial Sequence
  Synthetic
uuccugcuuuucucccuucga

SEQ ID NO: 223799 - RNA, 22 nt, Artificial Sequence
  Synthetic
uuuccugcuuuucucccuucga

SEQ ID NO: 223800 - RNA, 23 nt, Artificial Sequence
  Synthetic
auuuccugcuuuucucccuucga

SEQ ID NO: 223801 - RNA, 24 nt, Artificial Sequence
  Synthetic
uauuuccugcuuuucucccuucga

SEQ ID NO: 223802 - RNA, 18 nt, Artificial Sequence
  Synthetic
agagaaacaagauuucga

SEQ ID NO: 223803 - RNA, 19 nt, Artificial Sequence
  Synthetic
gagagaaacaagauuucga

SEQ ID NO: 223804 - RNA, 20 nt, Artificial Sequence
  Synthetic
agagagaaacaagauuucga

SEQ ID NO: 223805 - RNA, 21 nt, Artificial Sequence
  Synthetic
cagagagaaacaagauuucga

SEQ ID NO: 223806 - RNA, 22 nt, Artificial Sequence
  Synthetic
ucagagagaaacaagauuucga

SEQ ID NO: 223807 - RNA, 23 nt, Artificial Sequence
  Synthetic
uucagagagaaacaagauuucga

SEQ ID NO: 223808 - RNA, 24 nt, Artificial Sequence
  Synthetic
cuucagagagaaacaagauuucga

SEQ ID NO: 223809 - RNA, 18 nt, Artificial Sequence
  Synthetic
cucccucucugguuucga

SEQ ID NO: 223810 - RNA, 19 nt, Artificial Sequence
  Synthetic
ucucccucucugguuucga

SEQ ID NO: 223811 - RNA, 20 nt, Artificial Sequence
  Synthetic
cucucccucucugguuucga

SEQ ID NO: 223812 - RNA, 21 nt, Artificial Sequence
  Synthetic
ucucucccucucugguuucga

SEQ ID NO: 223813 - RNA, 22 nt, Artificial Sequence
  Synthetic
gucucucccucucugguuucga

SEQ ID NO: 223814 - RNA, 23 nt, Artificial Sequence
  Synthetic
agucucucccucucugguuucga

SEQ ID NO: 223815 - RNA, 24 nt, Artificial Sequence
  Synthetic
aagucucucccucucugguuucga

SEQ ID NO: 223816 - RNA, 18 nt, Artificial Sequence
  Synthetic
uaaauaggcaauuuucga

SEQ ID NO: 223817 - RNA, 19 nt, Artificial Sequence
  Synthetic
auaaauaggcaauuuucga

SEQ ID NO: 223818 - RNA, 20 nt, Artificial Sequence
  Synthetic
cauaaauaggcaauuuucga

SEQ ID NO: 223819 - RNA, 21 nt, Artificial Sequence
  Synthetic
acauaaauaggcaauuuucga

SEQ ID NO: 223820 - RNA, 22 nt, Artificial Sequence
  Synthetic
uacauaaauaggcaauuuucga

SEQ ID NO: 223821 - RNA, 23 nt, Artificial Sequence
  Synthetic
auacauaaauaggcaauuuucga

SEQ ID NO: 223822 - RNA, 24 nt, Artificial Sequence
  Synthetic
uauacauaaauaggcaauuuucga

SEQ ID NO: 223823 - RNA, 18 nt, Artificial Sequence
  Synthetic
aagugugagaauuuucga

SEQ ID NO: 223824 - RNA, 19 nt, Artificial Sequence
  Synthetic
uaagugugagaauuuucga

SEQ ID NO: 223825 - RNA, 20 nt, Artificial Sequence
  Synthetic
uuaagugugagaauuuucga

SEQ ID NO: 223826 - RNA, 21 nt, Artificial Sequence
  Synthetic
cuuaagugugagaauuuucga

SEQ ID NO: 223827 - RNA, 22 nt, Artificial Sequence
  Synthetic
gcuuaagugugagaauuuucga

SEQ ID NO: 223828 - RNA, 23 nt, Artificial Sequence
  Synthetic
ugcuuaagugugagaauuuucga

SEQ ID NO: 223829 - RNA, 24 nt, Artificial Sequence
  Synthetic
gugcuuaagugugagaauuuucga

SEQ ID NO: 223830 - RNA, 19 nt, Artificial Sequence
  Synthetic
aaaaaaaaaaaaaaaagga

SEQ ID NO: 223831 - RNA, 20 nt, Artificial Sequence
  Synthetic
aaaaaaaaaaaaaaaaagga

SEQ ID NO: 223832 - RNA, 21 nt, Artificial Sequence
  Synthetic
gaaaaaaaaaaaaaaaaagga

SEQ ID NO: 223833 - RNA, 22 nt, Artificial Sequence
  Synthetic
ggaaaaaaaaaaaaaaaaagga

SEQ ID NO: 223834 - RNA, 23 nt, Artificial Sequence
  Synthetic
uggaaaaaaaaaaaaaaaaagga

SEQ ID NO: 223835 - RNA, 24 nt, Artificial Sequence
  Synthetic
uuggaaaaaaaaaaaaaaaaagga

SEQ ID NO: 223836 - RNA, 18 nt, Artificial Sequence
  Synthetic
ucaaaaaaaaaaaaagga

SEQ ID NO: 223837 - RNA, 19 nt, Artificial Sequence
  Synthetic
cucaaaaaaaaaaaaagga

SEQ ID NO: 223838 - RNA, 20 nt, Artificial Sequence
  Synthetic
ucucaaaaaaaaaaaaagga

SEQ ID NO: 223839 - RNA, 21 nt, Artificial Sequence
  Synthetic
aucucaaaaaaaaaaaaagga

SEQ ID NO: 223840 - RNA, 22 nt, Artificial Sequence
  Synthetic
caucucaaaaaaaaaaaaagga

SEQ ID NO: 223841 - RNA, 23 nt, Artificial Sequence
  Synthetic
ccaucucaaaaaaaaaaaaagga

SEQ ID NO: 223842 - RNA, 24 nt, Artificial Sequence
  Synthetic
uccaucucaaaaaaaaaaaaagga

SEQ ID NO: 223843 - RNA, 18 nt, Artificial Sequence
  Synthetic
uccuguauaaaaaaagga

SEQ ID NO: 223844 - RNA, 19 nt, Artificial Sequence
  Synthetic
cuccuguauaaaaaaagga

SEQ ID NO: 223845 - RNA, 20 nt, Artificial Sequence
  Synthetic
ucuccuguauaaaaaaagga

SEQ ID NO: 223846 - RNA, 21 nt, Artificial Sequence
  Synthetic
gucuccuguauaaaaaaagga

SEQ ID NO: 223847 - RNA, 22 nt, Artificial Sequence
  Synthetic
agucuccuguauaaaaaaagga

SEQ ID NO: 223848 - RNA, 23 nt, Artificial Sequence
  Synthetic
aagucuccuguauaaaaaaagga

SEQ ID NO: 223849 - RNA, 24 nt, Artificial Sequence
  Synthetic
gaagucuccuguauaaaaaaagga

SEQ ID NO: 223850 - RNA, 18 nt, Artificial Sequence
  Synthetic
gaauuuaagaaaaaagga

SEQ ID NO: 223851 - RNA, 19 nt, Artificial Sequence
  Synthetic
ugaauuuaagaaaaaagga

SEQ ID NO: 223852 - RNA, 20 nt, Artificial Sequence
  Synthetic
augaauuuaagaaaaaagga

SEQ ID NO: 223853 - RNA, 21 nt, Artificial Sequence
  Synthetic
uaugaauuuaagaaaaaagga

SEQ ID NO: 223854 - RNA, 22 nt, Artificial Sequence
  Synthetic
uuaugaauuuaagaaaaaagga

SEQ ID NO: 223855 - RNA, 23 nt, Artificial Sequence
  Synthetic
uuuaugaauuuaagaaaaaagga

SEQ ID NO: 223856 - RNA, 24 nt, Artificial Sequence
  Synthetic
uuuuaugaauuuaagaaaaaagga

SEQ ID NO: 223857 - RNA, 18 nt, Artificial Sequence
  Synthetic
auucugcuuuaaaaagga

SEQ ID NO: 223858 - RNA, 19 nt, Artificial Sequence
  Synthetic
uauucugcuuuaaaaagga

SEQ ID NO: 223859 - RNA, 20 nt, Artificial Sequence
  Synthetic
guauucugcuuuaaaaagga

SEQ ID NO: 223860 - RNA, 21 nt, Artificial Sequence
  Synthetic
aguauucugcuuuaaaaagga

SEQ ID NO: 223861 - RNA, 22 nt, Artificial Sequence
  Synthetic
caguauucugcuuuaaaaagga

SEQ ID NO: 223862 - RNA, 23 nt, Artificial Sequence
  Synthetic
acaguauucugcuuuaaaaagga

SEQ ID NO: 223863 - RNA, 24 nt, Artificial Sequence
  Synthetic
aacaguauucugcuuuaaaaagga

SEQ ID NO: 223864 - RNA, 18 nt, Artificial Sequence
  Synthetic
cguggaggaacaaaagga

SEQ ID NO: 223865 - RNA, 19 nt, Artificial Sequence
  Synthetic
ccguggaggaacaaaagga

SEQ ID NO: 223866 - RNA, 20 nt, Artificial Sequence
  Synthetic
uccguggaggaacaaaagga

SEQ ID NO: 223867 - RNA, 21 nt, Artificial Sequence
  Synthetic
uuccguggaggaacaaaagga

SEQ ID NO: 223868 - RNA, 22 nt, Artificial Sequence
  Synthetic
guuccguggaggaacaaaagga

SEQ ID NO: 223869 - RNA, 23 nt, Artificial Sequence
  Synthetic
aguuccguggaggaacaaaagga

SEQ ID NO: 223870 - RNA, 24 nt, Artificial Sequence
  Synthetic
uaguuccguggaggaacaaaagga

SEQ ID NO: 223871 - RNA, 18 nt, Artificial Sequence
  Synthetic
agagcucacccaaaagga

SEQ ID NO: 223872 - RNA, 19 nt, Artificial Sequence
  Synthetic
aagagcucacccaaaagga

SEQ ID NO: 223873 - RNA, 20 nt, Artificial Sequence
  Synthetic
aaagagcucacccaaaagga

SEQ ID NO: 223874 - RNA, 21 nt, Artificial Sequence
  Synthetic
uaaagagcucacccaaaagga

SEQ ID NO: 223875 - RNA, 22 nt, Artificial Sequence
  Synthetic
auaaagagcucacccaaaagga

SEQ ID NO: 223876 - RNA, 23 nt, Artificial Sequence
  Synthetic
uauaaagagcucacccaaaagga

SEQ ID NO: 223877 - RNA, 24 nt, Artificial Sequence
  Synthetic
auauaaagagcucacccaaaagga

SEQ ID NO: 223878 - RNA, 18 nt, Artificial Sequence
  Synthetic
augauaaccucaaaagga

SEQ ID NO: 223879 - RNA, 19 nt, Artificial Sequence
  Synthetic
aaugauaaccucaaaagga

SEQ ID NO: 223880 - RNA, 20 nt, Artificial Sequence
  Synthetic
uaaugauaaccucaaaagga

SEQ ID NO: 223881 - RNA, 21 nt, Artificial Sequence
  Synthetic
guaaugauaaccucaaaagga

SEQ ID NO: 223882 - RNA, 22 nt, Artificial Sequence
  Synthetic
aguaaugauaaccucaaaagga

SEQ ID NO: 223883 - RNA, 23 nt, Artificial Sequence
  Synthetic
uaguaaugauaaccucaaaagga

SEQ ID NO: 223884 - RNA, 24 nt, Artificial Sequence
  Synthetic
auaguaaugauaaccucaaaagga

SEQ ID NO: 223885 - RNA, 18 nt, Artificial Sequence
  Synthetic
cuggaagaaagaaaagga

SEQ ID NO: 223886 - RNA, 19 nt, Artificial Sequence
  Synthetic
gcuggaagaaagaaaagga

SEQ ID NO: 223887 - RNA, 20 nt, Artificial Sequence
  Synthetic
cgcuggaagaaagaaaagga

SEQ ID NO: 223888 - RNA, 21 nt, Artificial Sequence
  Synthetic
gcgcuggaagaaagaaaagga

SEQ ID NO: 223889 - RNA, 22 nt, Artificial Sequence
  Synthetic
agcgcuggaagaaagaaaagga

SEQ ID NO: 223890 - RNA, 23 nt, Artificial Sequence
  Synthetic
uagcgcuggaagaaagaaaagga

SEQ ID NO: 223891 - RNA, 24 nt, Artificial Sequence
  Synthetic
auagcgcuggaagaaagaaaagga

SEQ ID NO: 223892 - RNA, 18 nt, Artificial Sequence
  Synthetic
auaaagcucagaaaagga

SEQ ID NO: 223893 - RNA, 19 nt, Artificial Sequence
  Synthetic
aauaaagcucagaaaagga

SEQ ID NO: 223894 - RNA, 20 nt, Artificial Sequence
  Synthetic
uaauaaagcucagaaaagga

SEQ ID NO: 223895 - RNA, 21 nt, Artificial Sequence
  Synthetic
guaauaaagcucagaaaagga

SEQ ID NO: 223896 - RNA, 22 nt, Artificial Sequence
  Synthetic
aguaauaaagcucagaaaagga

SEQ ID NO: 223897 - RNA, 23 nt, Artificial Sequence
  Synthetic
uaguaauaaagcucagaaaagga

SEQ ID NO: 223898 - RNA, 24 nt, Artificial Sequence
  Synthetic
guaguaauaaagcucagaaaagga

SEQ ID NO: 223899 - RNA, 18 nt, Artificial Sequence
  Synthetic
ugguuuucaggaaaagga

SEQ ID NO: 223900 - RNA, 19 nt, Artificial Sequence
  Synthetic
uugguuuucaggaaaagga

SEQ ID NO: 223901 - RNA, 20 nt, Artificial Sequence
  Synthetic
uuugguuuucaggaaaagga

SEQ ID NO: 223902 - RNA, 21 nt, Artificial Sequence
  Synthetic
auuugguuuucaggaaaagga

SEQ ID NO: 223903 - RNA, 22 nt, Artificial Sequence
  Synthetic
gauuugguuuucaggaaaagga

SEQ ID NO: 223904 - RNA, 23 nt, Artificial Sequence
  Synthetic
agauuugguuuucaggaaaagga

SEQ ID NO: 223905 - RNA, 24 nt, Artificial Sequence
  Synthetic
aagauuugguuuucaggaaaagga

SEQ ID NO: 223906 - RNA, 18 nt, Artificial Sequence
  Synthetic
cuacauuggggaaaagga

SEQ ID NO: 223907 - RNA, 19 nt, Artificial Sequence
  Synthetic
acuacauuggggaaaagga

SEQ ID NO: 223908 - RNA, 20 nt, Artificial Sequence
  Synthetic
cacuacauuggggaaaagga

SEQ ID NO: 223909 - RNA, 21 nt, Artificial Sequence
  Synthetic
ucacuacauuggggaaaagga

SEQ ID NO: 223910 - RNA, 22 nt, Artificial Sequence
  Synthetic
aucacuacauuggggaaaagga

SEQ ID NO: 223911 - RNA, 23 nt, Artificial Sequence
  Synthetic
aaucacuacauuggggaaaagga

SEQ ID NO: 223912 - RNA, 24 nt, Artificial Sequence
  Synthetic
aaaucacuacauuggggaaaagga

SEQ ID NO: 223913 - RNA, 18 nt, Artificial Sequence
  Synthetic
agcagauaccuaaaagga

SEQ ID NO: 223914 - RNA, 19 nt, Artificial Sequence
  Synthetic
aagcagauaccuaaaagga

SEQ ID NO: 223915 - RNA, 20 nt, Artificial Sequence
  Synthetic
uaagcagauaccuaaaagga

SEQ ID NO: 223916 - RNA, 21 nt, Artificial Sequence
  Synthetic
cuaagcagauaccuaaaagga

SEQ ID NO: 223917 - RNA, 22 nt, Artificial Sequence
  Synthetic
ccuaagcagauaccuaaaagga

SEQ ID NO: 223918 - RNA, 23 nt, Artificial Sequence
  Synthetic
gccuaagcagauaccuaaaagga

SEQ ID NO: 223919 - RNA, 24 nt, Artificial Sequence
  Synthetic
agccuaagcagauaccuaaaagga

SEQ ID NO: 223920 - RNA, 18 nt, Artificial Sequence
  Synthetic
ugcugcguaguaaaagga

SEQ ID NO: 223921 - RNA, 19 nt, Artificial Sequence
  Synthetic
cugcugcguaguaaaagga

SEQ ID NO: 223922 - RNA, 20 nt, Artificial Sequence
  Synthetic
ccugcugcguaguaaaagga

SEQ ID NO: 223923 - RNA, 21 nt, Artificial Sequence
  Synthetic
gccugcugcguaguaaaagga

SEQ ID NO: 223924 - RNA, 22 nt, Artificial Sequence
  Synthetic
ugccugcugcguaguaaaagga

SEQ ID NO: 223925 - RNA, 23 nt, Artificial Sequence
  Synthetic
augccugcugcguaguaaaagga

SEQ ID NO: 223926 - RNA, 24 nt, Artificial Sequence
  Synthetic
uaugccugcugcguaguaaaagga

SEQ ID NO: 223927 - RNA, 18 nt, Artificial Sequence
  Synthetic
gccuagugaaacaaagga

SEQ ID NO: 223928 - RNA, 19 nt, Artificial Sequence
  Synthetic
ggccuagugaaacaaagga

SEQ ID NO: 223929 - RNA, 20 nt, Artificial Sequence
  Synthetic
uggccuagugaaacaaagga

SEQ ID NO: 223930 - RNA, 21 nt, Artificial Sequence
  Synthetic
cuggccuagugaaacaaagga

SEQ ID NO: 223931 - RNA, 22 nt, Artificial Sequence
  Synthetic
ucuggccuagugaaacaaagga

SEQ ID NO: 223932 - RNA, 23 nt, Artificial Sequence
  Synthetic
cucuggccuagugaaacaaagga

SEQ ID NO: 223933 - RNA, 24 nt, Artificial Sequence
  Synthetic
acucuggccuagugaaacaaagga

SEQ ID NO: 223934 - RNA, 18 nt, Artificial Sequence
  Synthetic
aggaagacaaagaaagga

SEQ ID NO: 223935 - RNA, 19 nt, Artificial Sequence
  Synthetic
gaggaagacaaagaaagga

SEQ ID NO: 223936 - RNA, 20 nt, Artificial Sequence
  Synthetic
agaggaagacaaagaaagga

SEQ ID NO: 223937 - RNA, 21 nt, Artificial Sequence
  Synthetic
gagaggaagacaaagaaagga

SEQ ID NO: 223938 - RNA, 22 nt, Artificial Sequence
  Synthetic
agagaggaagacaaagaaagga

SEQ ID NO: 223939 - RNA, 23 nt, Artificial Sequence
  Synthetic
gagagaggaagacaaagaaagga

SEQ ID NO: 223940 - RNA, 24 nt, Artificial Sequence
  Synthetic
agagagaggaagacaaagaaagga

SEQ ID NO: 223941 - RNA, 18 nt, Artificial Sequence
  Synthetic
aaaaaaggaaagaaagga

SEQ ID NO: 223942 - RNA, 19 nt, Artificial Sequence
  Synthetic
aaaaaaaggaaagaaagga

SEQ ID NO: 223943 - RNA, 20 nt, Artificial Sequence
  Synthetic
aaaaaaaaggaaagaaagga

SEQ ID NO: 223944 - RNA, 21 nt, Artificial Sequence
  Synthetic
aaaaaaaaaggaaagaaagga

SEQ ID NO: 223945 - RNA, 22 nt, Artificial Sequence
  Synthetic
aaaaaaaaaaggaaagaaagga

SEQ ID NO: 223946 - RNA, 23 nt, Artificial Sequence
  Synthetic
aaaaaaaaaaaggaaagaaagga

SEQ ID NO: 223947 - RNA, 24 nt, Artificial Sequence
  Synthetic
aaaaaaaaaaaaggaaagaaagga

SEQ ID NO: 223948 - RNA, 18 nt, Artificial Sequence
  Synthetic
uguauauaagagaaagga

SEQ ID NO: 223949 - RNA, 19 nt, Artificial Sequence
  Synthetic
uuguauauaagagaaagga

SEQ ID NO: 223950 - RNA, 20 nt, Artificial Sequence
  Synthetic
guuguauauaagagaaagga

SEQ ID NO: 223951 - RNA, 21 nt, Artificial Sequence
  Synthetic
uguuguauauaagagaaagga

SEQ ID NO: 223952 - RNA, 22 nt, Artificial Sequence
  Synthetic
auguuguauauaagagaaagga

SEQ ID NO: 223953 - RNA, 23 nt, Artificial Sequence
  Synthetic
aauguuguauauaagagaaagga

SEQ ID NO: 223954 - RNA, 24 nt, Artificial Sequence
  Synthetic
caauguuguauauaagagaaagga

SEQ ID NO: 223955 - RNA, 18 nt, Artificial Sequence
  Synthetic
cuucacauagagaaagga

SEQ ID NO: 223956 - RNA, 19 nt, Artificial Sequence
  Synthetic
ccuucacauagagaaagga

SEQ ID NO: 223957 - RNA, 20 nt, Artificial Sequence
  Synthetic
uccuucacauagagaaagga

SEQ ID NO: 223958 - RNA, 21 nt, Artificial Sequence
  Synthetic
uuccuucacauagagaaagga

SEQ ID NO: 223959 - RNA, 22 nt, Artificial Sequence
  Synthetic
uuuccuucacauagagaaagga

SEQ ID NO: 223960 - RNA, 23 nt, Artificial Sequence
  Synthetic
auuuccuucacauagagaaagga

SEQ ID NO: 223961 - RNA, 24 nt, Artificial Sequence
  Synthetic
aauuuccuucacauagagaaagga

SEQ ID NO: 223962 - RNA, 18 nt, Artificial Sequence
  Synthetic
gagggaggauagaaagga

SEQ ID NO: 223963 - RNA, 19 nt, Artificial Sequence
  Synthetic
agagggaggauagaaagga

SEQ ID NO: 223964 - RNA, 20 nt, Artificial Sequence
  Synthetic
gagagggaggauagaaagga

SEQ ID NO: 223965 - RNA, 21 nt, Artificial Sequence
  Synthetic
agagagggaggauagaaagga

SEQ ID NO: 223966 - RNA, 22 nt, Artificial Sequence
  Synthetic
gagagagggaggauagaaagga

SEQ ID NO: 223967 - RNA, 23 nt, Artificial Sequence
  Synthetic
ggagagagggaggauagaaagga

SEQ ID NO: 223968 - RNA, 24 nt, Artificial Sequence
  Synthetic
aggagagagggaggauagaaagga

SEQ ID NO: 223969 - RNA, 18 nt, Artificial Sequence
  Synthetic
augaaagaaacgaaagga

SEQ ID NO: 223970 - RNA, 19 nt, Artificial Sequence
  Synthetic
aaugaaagaaacgaaagga

SEQ ID NO: 223971 - RNA, 20 nt, Artificial Sequence
  Synthetic
aaaugaaagaaacgaaagga

SEQ ID NO: 223972 - RNA, 21 nt, Artificial Sequence
  Synthetic
aaaaugaaagaaacgaaagga

SEQ ID NO: 223973 - RNA, 22 nt, Artificial Sequence
  Synthetic
gaaaaugaaagaaacgaaagga

SEQ ID NO: 223974 - RNA, 23 nt, Artificial Sequence
  Synthetic
agaaaaugaaagaaacgaaagga

SEQ ID NO: 223975 - RNA, 24 nt, Artificial Sequence
  Synthetic
gagaaaaugaaagaaacgaaagga

SEQ ID NO: 223976 - RNA, 18 nt, Artificial Sequence
  Synthetic
aagaaaggaaggaaagga

SEQ ID NO: 223977 - RNA, 19 nt, Artificial Sequence
  Synthetic
aaagaaaggaaggaaagga

SEQ ID NO: 223978 - RNA, 20 nt, Artificial Sequence
  Synthetic
gaaagaaaggaaggaaagga

SEQ ID NO: 223979 - RNA, 21 nt, Artificial Sequence
  Synthetic
ggaaagaaaggaaggaaagga

SEQ ID NO: 223980 - RNA, 22 nt, Artificial Sequence
  Synthetic
aggaaagaaaggaaggaaagga

SEQ ID NO: 223981 - RNA, 23 nt, Artificial Sequence
  Synthetic
aaggaaagaaaggaaggaaagga

SEQ ID NO: 223982 - RNA, 24 nt, Artificial Sequence
  Synthetic
aaaggaaagaaaggaaggaaagga

SEQ ID NO: 223983 - RNA, 18 nt, Artificial Sequence
  Synthetic
ugacccuuaaggaaagga

SEQ ID NO: 223984 - RNA, 19 nt, Artificial Sequence
  Synthetic
cugacccuuaaggaaagga

SEQ ID NO: 223985 - RNA, 20 nt, Artificial Sequence
  Synthetic
ucugacccuuaaggaaagga

SEQ ID NO: 223986 - RNA, 21 nt, Artificial Sequence
  Synthetic
aucugacccuuaaggaaagga

SEQ ID NO: 223987 - RNA, 22 nt, Artificial Sequence
  Synthetic
aaucugacccuuaaggaaagga

SEQ ID NO: 223988 - RNA, 23 nt, Artificial Sequence
  Synthetic
aaaucugacccuuaaggaaagga

SEQ ID NO: 223989 - RNA, 24 nt, Artificial Sequence
  Synthetic
uaaaucugacccuuaaggaaagga

SEQ ID NO: 223990 - RNA, 18 nt, Artificial Sequence
  Synthetic
ugugagcggaggaaagga

SEQ ID NO: 223991 - RNA, 19 nt, Artificial Sequence
  Synthetic
cugugagcggaggaaagga

SEQ ID NO: 223992 - RNA, 20 nt, Artificial Sequence
  Synthetic
ccugugagcggaggaaagga

SEQ ID NO: 223993 - RNA, 21 nt, Artificial Sequence
  Synthetic
accugugagcggaggaaagga

SEQ ID NO: 223994 - RNA, 22 nt, Artificial Sequence
  Synthetic
caccugugagcggaggaaagga

SEQ ID NO: 223995 - RNA, 23 nt, Artificial Sequence
  Synthetic
acaccugugagcggaggaaagga

SEQ ID NO: 223996 - RNA, 24 nt, Artificial Sequence
  Synthetic
aacaccugugagcggaggaaagga

SEQ ID NO: 223997 - RNA, 18 nt, Artificial Sequence
  Synthetic
uaauagaaggggaaagga

SEQ ID NO: 223998 - RNA, 19 nt, Artificial Sequence
  Synthetic
cuaauagaaggggaaagga

SEQ ID NO: 223999 - RNA, 20 nt, Artificial Sequence
  Synthetic
acuaauagaaggggaaagga

SEQ ID NO: 224000 - RNA, 21 nt, Artificial Sequence
  Synthetic
gacuaauagaaggggaaagga

SEQ ID NO: 224001 - RNA, 22 nt, Artificial Sequence
  Synthetic
ggacuaauagaaggggaaagga

SEQ ID NO: 224002 - RNA, 23 nt, Artificial Sequence
  Synthetic
gggacuaauagaaggggaaagga

SEQ ID NO: 224003 - RNA, 24 nt, Artificial Sequence
  Synthetic
agggacuaauagaaggggaaagga

SEQ ID NO: 224004 - RNA, 18 nt, Artificial Sequence
  Synthetic
acuagggaugugaaagga

SEQ ID NO: 224005 - RNA, 19 nt, Artificial Sequence
  Synthetic
uacuagggaugugaaagga

SEQ ID NO: 224006 - RNA, 20 nt, Artificial Sequence
  Synthetic
cuacuagggaugugaaagga

SEQ ID NO: 224007 - RNA, 21 nt, Artificial Sequence
  Synthetic
acuacuagggaugugaaagga

SEQ ID NO: 224008 - RNA, 22 nt, Artificial Sequence
  Synthetic
uacuacuagggaugugaaagga

SEQ ID NO: 224009 - RNA, 23 nt, Artificial Sequence
  Synthetic
auacuacuagggaugugaaagga

SEQ ID NO: 224010 - RNA, 24 nt, Artificial Sequence
  Synthetic
gauacuacuagggaugugaaagga

SEQ ID NO: 224011 - RNA, 18 nt, Artificial Sequence
  Synthetic
agugugacugugaaagga

SEQ ID NO: 224012 - RNA, 19 nt, Artificial Sequence
  Synthetic
gagugugacugugaaagga

SEQ ID NO: 224013 - RNA, 20 nt, Artificial Sequence
  Synthetic
agagugugacugugaaagga

SEQ ID NO: 224014 - RNA, 21 nt, Artificial Sequence
  Synthetic
aagagugugacugugaaagga

SEQ ID NO: 224015 - RNA, 22 nt, Artificial Sequence
  Synthetic
aaagagugugacugugaaagga

SEQ ID NO: 224016 - RNA, 23 nt, Artificial Sequence
  Synthetic
uaaagagugugacugugaaagga

SEQ ID NO: 224017 - RNA, 24 nt, Artificial Sequence
  Synthetic
cuaaagagugugacugugaaagga

SEQ ID NO: 224018 - RNA, 18 nt, Artificial Sequence
  Synthetic
uaaugaaaguugaaagga

SEQ ID NO: 224019 - RNA, 19 nt, Artificial Sequence
  Synthetic
auaaugaaaguugaaagga

SEQ ID NO: 224020 - RNA, 20 nt, Artificial Sequence
  Synthetic
gauaaugaaaguugaaagga

SEQ ID NO: 224021 - RNA, 21 nt, Artificial Sequence
  Synthetic
agauaaugaaaguugaaagga

SEQ ID NO: 224022 - RNA, 22 nt, Artificial Sequence
  Synthetic
aagauaaugaaaguugaaagga

SEQ ID NO: 224023 - RNA, 23 nt, Artificial Sequence
  Synthetic
gaagauaaugaaaguugaaagga

SEQ ID NO: 224024 - RNA, 24 nt, Artificial Sequence
  Synthetic
agaagauaaugaaaguugaaagga

SEQ ID NO: 224025 - RNA, 18 nt, Artificial Sequence
  Synthetic
uagucauuguugaaagga

SEQ ID NO: 224026 - RNA, 19 nt, Artificial Sequence
  Synthetic
guagucauuguugaaagga

SEQ ID NO: 224027 - RNA, 20 nt, Artificial Sequence
  Synthetic
uguagucauuguugaaagga

SEQ ID NO: 224028 - RNA, 21 nt, Artificial Sequence
  Synthetic
uuguagucauuguugaaagga

SEQ ID NO: 224029 - RNA, 22 nt, Artificial Sequence
  Synthetic
cuuguagucauuguugaaagga

SEQ ID NO: 224030 - RNA, 23 nt, Artificial Sequence
  Synthetic
gcuuguagucauuguugaaagga

SEQ ID NO: 224031 - RNA, 24 nt, Artificial Sequence
  Synthetic
agcuuguagucauuguugaaagga

SEQ ID NO: 224032 - RNA, 18 nt, Artificial Sequence
  Synthetic
ugaauaauuuauaaagga

SEQ ID NO: 224033 - RNA, 19 nt, Artificial Sequence
  Synthetic
cugaauaauuuauaaagga

SEQ ID NO: 224034 - RNA, 20 nt, Artificial Sequence
  Synthetic
acugaauaauuuauaaagga

SEQ ID NO: 224035 - RNA, 21 nt, Artificial Sequence
  Synthetic
gacugaauaauuuauaaagga

SEQ ID NO: 224036 - RNA, 22 nt, Artificial Sequence
  Synthetic
agacugaauaauuuauaaagga

SEQ ID NO: 224037 - RNA, 23 nt, Artificial Sequence
  Synthetic
aagacugaauaauuuauaaagga

SEQ ID NO: 224038 - RNA, 24 nt, Artificial Sequence
  Synthetic
caagacugaauaauuuauaaagga

SEQ ID NO: 224039 - RNA, 18 nt, Artificial Sequence
  Synthetic
uggguaauuuauaaagga

SEQ ID NO: 224040 - RNA, 19 nt, Artificial Sequence
  Synthetic
cuggguaauuuauaaagga

SEQ ID NO: 224041 - RNA, 20 nt, Artificial Sequence
  Synthetic
acuggguaauuuauaaagga

SEQ ID NO: 224042 - RNA, 24 nt, Artificial Sequence
  Synthetic
ugagacuggguaauuuauaaagga

SEQ ID NO: 224043 - RNA, 19 nt, Artificial Sequence
  Synthetic
uuggguaauuuauaaagga

SEQ ID NO: 224044 - RNA, 20 nt, Artificial Sequence
  Synthetic
auuggguaauuuauaaagga

SEQ ID NO: 224045 - RNA, 21 nt, Artificial Sequence
  Synthetic
gauuggguaauuuauaaagga

SEQ ID NO: 224046 - RNA, 22 nt, Artificial Sequence
  Synthetic
agauuggguaauuuauaaagga

SEQ ID NO: 224047 - RNA, 23 nt, Artificial Sequence
  Synthetic
gagauuggguaauuuauaaagga

SEQ ID NO: 224048 - RNA, 24 nt, Artificial Sequence
  Synthetic
cgagauuggguaauuuauaaagga

SEQ ID NO: 224049 - RNA, 18 nt, Artificial Sequence
  Synthetic
uggguaauuucuaaagga

SEQ ID NO: 224050 - RNA, 19 nt, Artificial Sequence
  Synthetic
cuggguaauuucuaaagga

SEQ ID NO: 224051 - RNA, 20 nt, Artificial Sequence
  Synthetic
acuggguaauuucuaaagga

SEQ ID NO: 224052 - RNA, 21 nt, Artificial Sequence
  Synthetic
gacuggguaauuucuaaagga

SEQ ID NO: 224053 - RNA, 22 nt, Artificial Sequence
  Synthetic
agacuggguaauuucuaaagga

SEQ ID NO: 224054 - RNA, 23 nt, Artificial Sequence
  Synthetic
gagacuggguaauuucuaaagga

SEQ ID NO: 224055 - RNA, 24 nt, Artificial Sequence
  Synthetic
cgagacuggguaauuucuaaagga

SEQ ID NO: 224056 - RNA, 18 nt, Artificial Sequence
  Synthetic
acacugaaguuuaaagga

SEQ ID NO: 224057 - RNA, 19 nt, Artificial Sequence
  Synthetic
gacacugaaguuuaaagga

SEQ ID NO: 224058 - RNA, 20 nt, Artificial Sequence
  Synthetic
ggacacugaaguuuaaagga

SEQ ID NO: 224059 - RNA, 21 nt, Artificial Sequence
  Synthetic
aggacacugaaguuuaaagga

SEQ ID NO: 224060 - RNA, 22 nt, Artificial Sequence
  Synthetic
aaggacacugaaguuuaaagga

SEQ ID NO: 224061 - RNA, 23 nt, Artificial Sequence
  Synthetic
caaggacacugaaguuuaaagga

SEQ ID NO: 224062 - RNA, 24 nt, Artificial Sequence
  Synthetic
ccaaggacacugaaguuuaaagga

SEQ ID NO: 224063 - RNA, 18 nt, Artificial Sequence
  Synthetic
uucugcugggaacaagga

SEQ ID NO: 224064 - RNA, 19 nt, Artificial Sequence
  Synthetic
auucugcugggaacaagga

SEQ ID NO: 224065 - RNA, 20 nt, Artificial Sequence
  Synthetic
uauucugcugggaacaagga

SEQ ID NO: 224066 - RNA, 21 nt, Artificial Sequence
  Synthetic
cuauucugcugggaacaagga

SEQ ID NO: 224067 - RNA, 22 nt, Artificial Sequence
  Synthetic
acuauucugcugggaacaagga

SEQ ID NO: 224068 - RNA, 23 nt, Artificial Sequence
  Synthetic
gacuauucugcugggaacaagga

SEQ ID NO: 224069 - RNA, 24 nt, Artificial Sequence
  Synthetic
ugacuauucugcugggaacaagga

SEQ ID NO: 224070 - RNA, 18 nt, Artificial Sequence
  Synthetic
gauuaacuggaacaagga

SEQ ID NO: 224071 - RNA, 19 nt, Artificial Sequence
  Synthetic
agauuaacuggaacaagga

SEQ ID NO: 224072 - RNA, 20 nt, Artificial Sequence
  Synthetic
uagauuaacuggaacaagga

SEQ ID NO: 224073 - RNA, 21 nt, Artificial Sequence
  Synthetic
auagauuaacuggaacaagga

SEQ ID NO: 224074 - RNA, 22 nt, Artificial Sequence
  Synthetic
aauagauuaacuggaacaagga

SEQ ID NO: 224075 - RNA, 23 nt, Artificial Sequence
  Synthetic
gaauagauuaacuggaacaagga

SEQ ID NO: 224076 - RNA, 24 nt, Artificial Sequence
  Synthetic
ugaauagauuaacuggaacaagga

SEQ ID NO: 224077 - RNA, 18 nt, Artificial Sequence
  Synthetic
cagagggucacacaagga

SEQ ID NO: 224078 - RNA, 19 nt, Artificial Sequence
  Synthetic
ucagagggucacacaagga

SEQ ID NO: 224079 - RNA, 20 nt, Artificial Sequence
  Synthetic
gucagagggucacacaagga

SEQ ID NO: 224080 - RNA, 21 nt, Artificial Sequence
  Synthetic
agucagagggucacacaagga

SEQ ID NO: 224081 - RNA, 22 nt, Artificial Sequence
  Synthetic
gagucagagggucacacaagga

SEQ ID NO: 224082 - RNA, 23 nt, Artificial Sequence
  Synthetic
ggagucagagggucacacaagga

SEQ ID NO: 224083 - RNA, 24 nt, Artificial Sequence
  Synthetic
uggagucagagggucacacaagga

SEQ ID NO: 224084 - RNA, 18 nt, Artificial Sequence
  Synthetic
uuuuaauucacacaagga

SEQ ID NO: 224085 - RNA, 19 nt, Artificial Sequence
  Synthetic
guuuuaauucacacaagga

SEQ ID NO: 224086 - RNA, 20 nt, Artificial Sequence
  Synthetic
cguuuuaauucacacaagga

SEQ ID NO: 224087 - RNA, 21 nt, Artificial Sequence
  Synthetic
ucguuuuaauucacacaagga

SEQ ID NO: 224088 - RNA, 22 nt, Artificial Sequence
  Synthetic
gucguuuuaauucacacaagga

SEQ ID NO: 224089 - RNA, 23 nt, Artificial Sequence
  Synthetic
ggucguuuuaauucacacaagga

SEQ ID NO: 224090 - RNA, 24 nt, Artificial Sequence
  Synthetic
aggucguuuuaauucacacaagga

SEQ ID NO: 224091 - RNA, 18 nt, Artificial Sequence
  Synthetic
agcaaacuaucacaagga

SEQ ID NO: 224092 - RNA, 19 nt, Artificial Sequence
  Synthetic
gagcaaacuaucacaagga

SEQ ID NO: 224093 - RNA, 20 nt, Artificial Sequence
  Synthetic
ugagcaaacuaucacaagga

SEQ ID NO: 224094 - RNA, 18 nt, Artificial Sequence
  Synthetic
guugcaguagcccaagga

SEQ ID NO: 224095 - RNA, 19 nt, Artificial Sequence
  Synthetic
aguugcaguagcccaagga

SEQ ID NO: 224096 - RNA, 20 nt, Artificial Sequence
  Synthetic
gaguugcaguagcccaagga

SEQ ID NO: 224097 - RNA, 21 nt, Artificial Sequence
  Synthetic
agaguugcaguagcccaagga

SEQ ID NO: 224098 - RNA, 22 nt, Artificial Sequence
  Synthetic
cagaguugcaguagcccaagga

SEQ ID NO: 224099 - RNA, 23 nt, Artificial Sequence
  Synthetic
acagaguugcaguagcccaagga

SEQ ID NO: 224100 - RNA, 24 nt, Artificial Sequence
  Synthetic
aacagaguugcaguagcccaagga

SEQ ID NO: 224101 - RNA, 20 nt, Artificial Sequence
  Synthetic
agaauagggaggcccaagga

SEQ ID NO: 224102 - RNA, 21 nt, Artificial Sequence
  Synthetic
cagaauagggaggcccaagga

SEQ ID NO: 224103 - RNA, 22 nt, Artificial Sequence
  Synthetic
ucagaauagggaggcccaagga

SEQ ID NO: 224104 - RNA, 23 nt, Artificial Sequence
  Synthetic
cucagaauagggaggcccaagga

SEQ ID NO: 224105 - RNA, 24 nt, Artificial Sequence
  Synthetic
ucucagaauagggaggcccaagga

SEQ ID NO: 224106 - RNA, 18 nt, Artificial Sequence
  Synthetic
gagagaccuagccaagga

SEQ ID NO: 224107 - RNA, 19 nt, Artificial Sequence
  Synthetic
agagagaccuagccaagga

SEQ ID NO: 224108 - RNA, 20 nt, Artificial Sequence
  Synthetic
cagagagaccuagccaagga

SEQ ID NO: 224109 - RNA, 21 nt, Artificial Sequence
  Synthetic
acagagagaccuagccaagga

SEQ ID NO: 224110 - RNA, 22 nt, Artificial Sequence
  Synthetic
gacagagagaccuagccaagga

SEQ ID NO: 224111 - RNA, 23 nt, Artificial Sequence
  Synthetic
ggacagagagaccuagccaagga

SEQ ID NO: 224112 - RNA, 24 nt, Artificial Sequence
  Synthetic
aggacagagagaccuagccaagga

SEQ ID NO: 224113 - RNA, 18 nt, Artificial Sequence
  Synthetic
acugaauccugccaagga

SEQ ID NO: 224114 - RNA, 19 nt, Artificial Sequence
  Synthetic
uacugaauccugccaagga

SEQ ID NO: 224115 - RNA, 20 nt, Artificial Sequence
  Synthetic
guacugaauccugccaagga

SEQ ID NO: 224116 - RNA, 21 nt, Artificial Sequence
  Synthetic
uguacugaauccugccaagga

SEQ ID NO: 224117 - RNA, 22 nt, Artificial Sequence
  Synthetic
cuguacugaauccugccaagga

SEQ ID NO: 224118 - RNA, 23 nt, Artificial Sequence
  Synthetic
acuguacugaauccugccaagga

SEQ ID NO: 224119 - RNA, 24 nt, Artificial Sequence
  Synthetic
aacuguacugaauccugccaagga

SEQ ID NO: 224120 - RNA, 18 nt, Artificial Sequence
  Synthetic
ugcugugugcagcaagga

SEQ ID NO: 224121 - RNA, 19 nt, Artificial Sequence
  Synthetic
cugcugugugcagcaagga

SEQ ID NO: 224122 - RNA, 20 nt, Artificial Sequence
  Synthetic
ucugcugugugcagcaagga

SEQ ID NO: 224123 - RNA, 21 nt, Artificial Sequence
  Synthetic
uucugcugugugcagcaagga

SEQ ID NO: 224124 - RNA, 22 nt, Artificial Sequence
  Synthetic
cuucugcugugugcagcaagga

SEQ ID NO: 224125 - RNA, 23 nt, Artificial Sequence
  Synthetic
ccuucugcugugugcagcaagga

SEQ ID NO: 224126 - RNA, 24 nt, Artificial Sequence
  Synthetic
cccuucugcugugugcagcaagga

SEQ ID NO: 224127 - RNA, 18 nt, Artificial Sequence
  Synthetic
gaagcaauggagcaagga

SEQ ID NO: 224128 - RNA, 19 nt, Artificial Sequence
  Synthetic
agaagcaauggagcaagga

SEQ ID NO: 224129 - RNA, 20 nt, Artificial Sequence
  Synthetic
cagaagcaauggagcaagga

SEQ ID NO: 224130 - RNA, 21 nt, Artificial Sequence
  Synthetic
ucagaagcaauggagcaagga

SEQ ID NO: 224131 - RNA, 22 nt, Artificial Sequence
  Synthetic
aucagaagcaauggagcaagga

SEQ ID NO: 224132 - RNA, 23 nt, Artificial Sequence
  Synthetic
gaucagaagcaauggagcaagga

SEQ ID NO: 224133 - RNA, 24 nt, Artificial Sequence
  Synthetic
ugaucagaagcaauggagcaagga

SEQ ID NO: 224134 - RNA, 18 nt, Artificial Sequence
  Synthetic
aaagaaagguagcaagga

SEQ ID NO: 224135 - RNA, 19 nt, Artificial Sequence
  Synthetic
aaaagaaagguagcaagga

SEQ ID NO: 224136 - RNA, 20 nt, Artificial Sequence
  Synthetic
caaaagaaagguagcaagga

SEQ ID NO: 224137 - RNA, 21 nt, Artificial Sequence
  Synthetic
acaaaagaaagguagcaagga

SEQ ID NO: 224138 - RNA, 22 nt, Artificial Sequence
  Synthetic
gacaaaagaaagguagcaagga

SEQ ID NO: 224139 - RNA, 23 nt, Artificial Sequence
  Synthetic
agacaaaagaaagguagcaagga

SEQ ID NO: 224140 - RNA, 24 nt, Artificial Sequence
  Synthetic
aagacaaaagaaagguagcaagga

SEQ ID NO: 224141 - RNA, 18 nt, Artificial Sequence
  Synthetic
aagugauuaaugcaagga

SEQ ID NO: 224142 - RNA, 19 nt, Artificial Sequence
  Synthetic
uaagugauuaaugcaagga

SEQ ID NO: 224143 - RNA, 20 nt, Artificial Sequence
  Synthetic
uuaagugauuaaugcaagga

SEQ ID NO: 224144 - RNA, 21 nt, Artificial Sequence
  Synthetic
auuaagugauuaaugcaagga

SEQ ID NO: 224145 - RNA, 22 nt, Artificial Sequence
  Synthetic
gauuaagugauuaaugcaagga

SEQ ID NO: 224146 - RNA, 23 nt, Artificial Sequence
  Synthetic
ugauuaagugauuaaugcaagga

SEQ ID NO: 224147 - RNA, 24 nt, Artificial Sequence
  Synthetic
augauuaagugauuaaugcaagga

SEQ ID NO: 224148 - RNA, 18 nt, Artificial Sequence
  Synthetic
gugauguauuugcaagga

SEQ ID NO: 224149 - RNA, 19 nt, Artificial Sequence
  Synthetic
agugauguauuugcaagga

SEQ ID NO: 224150 - RNA, 20 nt, Artificial Sequence
  Synthetic
gagugauguauuugcaagga

SEQ ID NO: 224151 - RNA, 21 nt, Artificial Sequence
  Synthetic
agagugauguauuugcaagga

SEQ ID NO: 224152 - RNA, 22 nt, Artificial Sequence
  Synthetic
gagagugauguauuugcaagga

SEQ ID NO: 224153 - RNA, 23 nt, Artificial Sequence
  Synthetic
ugagagugauguauuugcaagga

SEQ ID NO: 224154 - RNA, 24 nt, Artificial Sequence
  Synthetic
gugagagugauguauuugcaagga

SEQ ID NO: 224155 - RNA, 18 nt, Artificial Sequence
  Synthetic
gaacagaaaucucaagga

SEQ ID NO: 224156 - RNA, 19 nt, Artificial Sequence
  Synthetic
ugaacagaaaucucaagga

SEQ ID NO: 224157 - RNA, 20 nt, Artificial Sequence
  Synthetic
uugaacagaaaucucaagga

SEQ ID NO: 224158 - RNA, 21 nt, Artificial Sequence
  Synthetic
uuugaacagaaaucucaagga

SEQ ID NO: 224159 - RNA, 22 nt, Artificial Sequence
  Synthetic
auuugaacagaaaucucaagga

SEQ ID NO: 224160 - RNA, 23 nt, Artificial Sequence
  Synthetic
cauuugaacagaaaucucaagga

SEQ ID NO: 224161 - RNA, 24 nt, Artificial Sequence
  Synthetic
acauuugaacagaaaucucaagga

SEQ ID NO: 224162 - RNA, 18 nt, Artificial Sequence
  Synthetic
ccuaaaucaagucaagga

SEQ ID NO: 224163 - RNA, 19 nt, Artificial Sequence
  Synthetic
accuaaaucaagucaagga

SEQ ID NO: 224164 - RNA, 20 nt, Artificial Sequence
  Synthetic
gaccuaaaucaagucaagga

SEQ ID NO: 224165 - RNA, 21 nt, Artificial Sequence
  Synthetic
agaccuaaaucaagucaagga

SEQ ID NO: 224166 - RNA, 22 nt, Artificial Sequence
  Synthetic
gagaccuaaaucaagucaagga

SEQ ID NO: 224167 - RNA, 23 nt, Artificial Sequence
  Synthetic
agagaccuaaaucaagucaagga

SEQ ID NO: 224168 - RNA, 24 nt, Artificial Sequence
  Synthetic
cagagaccuaaaucaagucaagga

SEQ ID NO: 224169 - RNA, 18 nt, Artificial Sequence
  Synthetic
gaaugcgaaggucaagga

SEQ ID NO: 224170 - RNA, 19 nt, Artificial Sequence
  Synthetic
agaaugcgaaggucaagga

SEQ ID NO: 224171 - RNA, 20 nt, Artificial Sequence
  Synthetic
aagaaugcgaaggucaagga

SEQ ID NO: 224172 - RNA, 21 nt, Artificial Sequence
  Synthetic
caagaaugcgaaggucaagga

SEQ ID NO: 224173 - RNA, 22 nt, Artificial Sequence
  Synthetic
ucaagaaugcgaaggucaagga

SEQ ID NO: 224174 - RNA, 23 nt, Artificial Sequence
  Synthetic
gucaagaaugcgaaggucaagga

SEQ ID NO: 224175 - RNA, 24 nt, Artificial Sequence
  Synthetic
ggucaagaaugcgaaggucaagga

SEQ ID NO: 224176 - RNA, 18 nt, Artificial Sequence
  Synthetic
ccaauccauauucaagga

SEQ ID NO: 224177 - RNA, 19 nt, Artificial Sequence
  Synthetic
accaauccauauucaagga

SEQ ID NO: 224178 - RNA, 20 nt, Artificial Sequence
  Synthetic
gaccaauccauauucaagga

SEQ ID NO: 224179 - RNA, 21 nt, Artificial Sequence
  Synthetic
ugaccaauccauauucaagga

SEQ ID NO: 224180 - RNA, 22 nt, Artificial Sequence
  Synthetic
uugaccaauccauauucaagga

SEQ ID NO: 224181 - RNA, 23 nt, Artificial Sequence
  Synthetic
cuugaccaauccauauucaagga

SEQ ID NO: 224182 - RNA, 24 nt, Artificial Sequence
  Synthetic
acuugaccaauccauauucaagga

SEQ ID NO: 224183 - RNA, 18 nt, Artificial Sequence
  Synthetic
aaagaaagaaaagaagga

SEQ ID NO: 224184 - RNA, 19 nt, Artificial Sequence
  Synthetic
gaaagaaagaaaagaagga

SEQ ID NO: 224185 - RNA, 20 nt, Artificial Sequence
  Synthetic
ggaaagaaagaaaagaagga

SEQ ID NO: 224186 - RNA, 21 nt, Artificial Sequence
  Synthetic
aggaaagaaagaaaagaagga

SEQ ID NO: 224187 - RNA, 22 nt, Artificial Sequence
  Synthetic
aaggaaagaaagaaaagaagga

SEQ ID NO: 224188 - RNA, 23 nt, Artificial Sequence
  Synthetic
aaaggaaagaaagaaaagaagga

SEQ ID NO: 224189 - RNA, 24 nt, Artificial Sequence
  Synthetic
aaaaggaaagaaagaaaagaagga

SEQ ID NO: 224190 - RNA, 18 nt, Artificial Sequence
  Synthetic
uagaguuuuaaagaagga

SEQ ID NO: 224191 - RNA, 19 nt, Artificial Sequence
  Synthetic
cuagaguuuuaaagaagga

SEQ ID NO: 224192 - RNA, 20 nt, Artificial Sequence
  Synthetic
acuagaguuuuaaagaagga

SEQ ID NO: 224193 - RNA, 21 nt, Artificial Sequence
  Synthetic
gacuagaguuuuaaagaagga

SEQ ID NO: 224194 - RNA, 22 nt, Artificial Sequence
  Synthetic
ugacuagaguuuuaaagaagga

SEQ ID NO: 224195 - RNA, 23 nt, Artificial Sequence
  Synthetic
cugacuagaguuuuaaagaagga

SEQ ID NO: 224196 - RNA, 24 nt, Artificial Sequence
  Synthetic
ucugacuagaguuuuaaagaagga

SEQ ID NO: 224197 - RNA, 18 nt, Artificial Sequence
  Synthetic
guuuuaaggcaagaagga

SEQ ID NO: 224198 - RNA, 19 nt, Artificial Sequence
  Synthetic
uguuuuaaggcaagaagga

SEQ ID NO: 224199 - RNA, 20 nt, Artificial Sequence
  Synthetic
uuguuuuaaggcaagaagga

SEQ ID NO: 224200 - RNA, 21 nt, Artificial Sequence
  Synthetic
guuguuuuaaggcaagaagga

SEQ ID NO: 224201 - RNA, 22 nt, Artificial Sequence
  Synthetic
gguuguuuuaaggcaagaagga

SEQ ID NO: 224202 - RNA, 23 nt, Artificial Sequence
  Synthetic
ugguuguuuuaaggcaagaagga

SEQ ID NO: 224203 - RNA, 24 nt, Artificial Sequence
  Synthetic
uugguuguuuuaaggcaagaagga

SEQ ID NO: 224204 - RNA, 18 nt, Artificial Sequence
  Synthetic
uuuuuuagcuaagaagga

SEQ ID NO: 224205 - RNA, 19 nt, Artificial Sequence
  Synthetic
uuuuuuuagcuaagaagga

SEQ ID NO: 224206 - RNA, 20 nt, Artificial Sequence
  Synthetic
auuuuuuuagcuaagaagga

SEQ ID NO: 224207 - RNA, 21 nt, Artificial Sequence
  Synthetic
gauuuuuuuagcuaagaagga

SEQ ID NO: 224208 - RNA, 22 nt, Artificial Sequence
  Synthetic
ggauuuuuuuagcuaagaagga

SEQ ID NO: 224209 - RNA, 23 nt, Artificial Sequence
  Synthetic
uggauuuuuuuagcuaagaagga

SEQ ID NO: 224210 - RNA, 24 nt, Artificial Sequence
  Synthetic
uuggauuuuuuuagcuaagaagga

SEQ ID NO: 224211 - RNA, 18 nt, Artificial Sequence
  Synthetic
guuucagcagcagaagga

SEQ ID NO: 224212 - RNA, 19 nt, Artificial Sequence
  Synthetic
gguuucagcagcagaagga

SEQ ID NO: 224213 - RNA, 20 nt, Artificial Sequence
  Synthetic
ugguuucagcagcagaagga

SEQ ID NO: 224214 - RNA, 21 nt, Artificial Sequence
  Synthetic
uugguuucagcagcagaagga

SEQ ID NO: 224215 - RNA, 22 nt, Artificial Sequence
  Synthetic
auugguuucagcagcagaagga

SEQ ID NO: 224216 - RNA, 23 nt, Artificial Sequence
  Synthetic
gauugguuucagcagcagaagga

SEQ ID NO: 224217 - RNA, 24 nt, Artificial Sequence
  Synthetic
ggauugguuucagcagcagaagga

SEQ ID NO: 224218 - RNA, 18 nt, Artificial Sequence
  Synthetic
cuauuucacagagaagga

SEQ ID NO: 224219 - RNA, 19 nt, Artificial Sequence
  Synthetic
ccuauuucacagagaagga

SEQ ID NO: 224220 - RNA, 20 nt, Artificial Sequence
  Synthetic
cccuauuucacagagaagga

SEQ ID NO: 224221 - RNA, 21 nt, Artificial Sequence
  Synthetic
ucccuauuucacagagaagga

SEQ ID NO: 224222 - RNA, 22 nt, Artificial Sequence
  Synthetic
aucccuauuucacagagaagga

SEQ ID NO: 224223 - RNA, 23 nt, Artificial Sequence
  Synthetic
uaucccuauuucacagagaagga

SEQ ID NO: 224224 - RNA, 24 nt, Artificial Sequence
  Synthetic
guaucccuauuucacagagaagga

SEQ ID NO: 224225 - RNA, 18 nt, Artificial Sequence
  Synthetic
ccuuugugcagagaagga

SEQ ID NO: 224226 - RNA, 19 nt, Artificial Sequence
  Synthetic
uccuuugugcagagaagga

SEQ ID NO: 224227 - RNA, 20 nt, Artificial Sequence
  Synthetic
cuccuuugugcagagaagga

SEQ ID NO: 224228 - RNA, 21 nt, Artificial Sequence
  Synthetic
ccuccuuugugcagagaagga

SEQ ID NO: 224229 - RNA, 22 nt, Artificial Sequence
  Synthetic
uccuccuuugugcagagaagga

SEQ ID NO: 224230 - RNA, 23 nt, Artificial Sequence
  Synthetic
cuccuccuuugugcagagaagga

SEQ ID NO: 224231 - RNA, 24 nt, Artificial Sequence
  Synthetic
ucuccuccuuugugcagagaagga

SEQ ID NO: 224232 - RNA, 18 nt, Artificial Sequence
  Synthetic
gccccuuugagagaagga

SEQ ID NO: 224233 - RNA, 19 nt, Artificial Sequence
  Synthetic
ugccccuuugagagaagga

SEQ ID NO: 224234 - RNA, 20 nt, Artificial Sequence
  Synthetic
uugccccuuugagagaagga

SEQ ID NO: 224235 - RNA, 21 nt, Artificial Sequence
  Synthetic
cuugccccuuugagagaagga

SEQ ID NO: 224236 - RNA, 22 nt, Artificial Sequence
  Synthetic
gcuugccccuuugagagaagga

SEQ ID NO: 224237 - RNA, 23 nt, Artificial Sequence
  Synthetic
ugcuugccccuuugagagaagga

SEQ ID NO: 224238 - RNA, 24 nt, Artificial Sequence
  Synthetic
uugcuugccccuuugagagaagga

SEQ ID NO: 224239 - RNA, 18 nt, Artificial Sequence
  Synthetic
aaaagauuuagagaagga

SEQ ID NO: 224240 - RNA, 19 nt, Artificial Sequence
  Synthetic
aaaaagauuuagagaagga

SEQ ID NO: 224241 - RNA, 20 nt, Artificial Sequence
  Synthetic
aaaaaagauuuagagaagga

SEQ ID NO: 224242 - RNA, 21 nt, Artificial Sequence
  Synthetic
uaaaaaagauuuagagaagga

SEQ ID NO: 224243 - RNA, 22 nt, Artificial Sequence
  Synthetic
uuaaaaaagauuuagagaagga

SEQ ID NO: 224244 - RNA, 23 nt, Artificial Sequence
  Synthetic
uuuaaaaaagauuuagagaagga

SEQ ID NO: 224245 - RNA, 24 nt, Artificial Sequence
  Synthetic
auuuaaaaaagauuuagagaagga

SEQ ID NO: 224246 - RNA, 18 nt, Artificial Sequence
  Synthetic
aagaaggagggagaagga

SEQ ID NO: 224247 - RNA, 19 nt, Artificial Sequence
  Synthetic
caagaaggagggagaagga

SEQ ID NO: 224248 - RNA, 20 nt, Artificial Sequence
  Synthetic
gcaagaaggagggagaagga

SEQ ID NO: 224249 - RNA, 21 nt, Artificial Sequence
  Synthetic
ggcaagaaggagggagaagga

SEQ ID NO: 224250 - RNA, 22 nt, Artificial Sequence
  Synthetic
aggcaagaaggagggagaagga

SEQ ID NO: 224251 - RNA, 23 nt, Artificial Sequence
  Synthetic
aaggcaagaaggagggagaagga

SEQ ID NO: 224252 - RNA, 24 nt, Artificial Sequence
  Synthetic
uaaggcaagaaggagggagaagga

SEQ ID NO: 224253 - RNA, 18 nt, Artificial Sequence
  Synthetic
aaaucagaaugagaagga

SEQ ID NO: 224254 - RNA, 19 nt, Artificial Sequence
  Synthetic
gaaaucagaaugagaagga

SEQ ID NO: 224255 - RNA, 20 nt, Artificial Sequence
  Synthetic
ugaaaucagaaugagaagga

SEQ ID NO: 224256 - RNA, 21 nt, Artificial Sequence
  Synthetic
uugaaaucagaaugagaagga

SEQ ID NO: 224257 - RNA, 22 nt, Artificial Sequence
  Synthetic
guugaaaucagaaugagaagga

SEQ ID NO: 224258 - RNA, 23 nt, Artificial Sequence
  Synthetic
aguugaaaucagaaugagaagga

SEQ ID NO: 224259 - RNA, 24 nt, Artificial Sequence
  Synthetic
aaguugaaaucagaaugagaagga

SEQ ID NO: 224260 - RNA, 18 nt, Artificial Sequence
  Synthetic
accaaaguuauagaagga

SEQ ID NO: 224261 - RNA, 19 nt, Artificial Sequence
  Synthetic
aaccaaaguuauagaagga

SEQ ID NO: 224262 - RNA, 20 nt, Artificial Sequence
  Synthetic
uaaccaaaguuauagaagga

SEQ ID NO: 224263 - RNA, 21 nt, Artificial Sequence
  Synthetic
cuaaccaaaguuauagaagga

SEQ ID NO: 224264 - RNA, 22 nt, Artificial Sequence
  Synthetic
gcuaaccaaaguuauagaagga

SEQ ID NO: 224265 - RNA, 23 nt, Artificial Sequence
  Synthetic
ggcuaaccaaaguuauagaagga

SEQ ID NO: 224266 - RNA, 24 nt, Artificial Sequence
  Synthetic
aggcuaaccaaaguuauagaagga

SEQ ID NO: 224267 - RNA, 18 nt, Artificial Sequence
  Synthetic
aaaaugaaacuagaagga

SEQ ID NO: 224268 - RNA, 19 nt, Artificial Sequence
  Synthetic
uaaaaugaaacuagaagga

SEQ ID NO: 224269 - RNA, 20 nt, Artificial Sequence
  Synthetic
auaaaaugaaacuagaagga

SEQ ID NO: 224270 - RNA, 21 nt, Artificial Sequence
  Synthetic
aauaaaaugaaacuagaagga

SEQ ID NO: 224271 - RNA, 22 nt, Artificial Sequence
  Synthetic
aaauaaaaugaaacuagaagga

SEQ ID NO: 224272 - RNA, 23 nt, Artificial Sequence
  Synthetic
aaaauaaaaugaaacuagaagga

SEQ ID NO: 224273 - RNA, 24 nt, Artificial Sequence
  Synthetic
uaaaauaaaaugaaacuagaagga

SEQ ID NO: 224274 - RNA, 18 nt, Artificial Sequence
  Synthetic
aauaacuuccuagaagga

SEQ ID NO: 224275 - RNA, 19 nt, Artificial Sequence
  Synthetic
aaauaacuuccuagaagga

SEQ ID NO: 224276 - RNA, 20 nt, Artificial Sequence
  Synthetic
caaauaacuuccuagaagga

SEQ ID NO: 224277 - RNA, 21 nt, Artificial Sequence
  Synthetic
ucaaauaacuuccuagaagga

SEQ ID NO: 224278 - RNA, 22 nt, Artificial Sequence
  Synthetic
uucaaauaacuuccuagaagga

SEQ ID NO: 224279 - RNA, 23 nt, Artificial Sequence
  Synthetic
cuucaaauaacuuccuagaagga

SEQ ID NO: 224280 - RNA, 24 nt, Artificial Sequence
  Synthetic
acuucaaauaacuuccuagaagga

SEQ ID NO: 224281 - RNA, 18 nt, Artificial Sequence
  Synthetic
uggaaucugguagaagga

SEQ ID NO: 224282 - RNA, 19 nt, Artificial Sequence
  Synthetic
uuggaaucugguagaagga

SEQ ID NO: 224283 - RNA, 20 nt, Artificial Sequence
  Synthetic
guuggaaucugguagaagga

SEQ ID NO: 224284 - RNA, 21 nt, Artificial Sequence
  Synthetic
gguuggaaucugguagaagga

SEQ ID NO: 224285 - RNA, 22 nt, Artificial Sequence
  Synthetic
agguuggaaucugguagaagga

SEQ ID NO: 224286 - RNA, 23 nt, Artificial Sequence
  Synthetic
aagguuggaaucugguagaagga

SEQ ID NO: 224287 - RNA, 24 nt, Artificial Sequence
  Synthetic
aaagguuggaaucugguagaagga

SEQ ID NO: 224288 - RNA, 18 nt, Artificial Sequence
  Synthetic
agacaaagaaaggaagga

SEQ ID NO: 224289 - RNA, 19 nt, Artificial Sequence
  Synthetic
aagacaaagaaaggaagga

SEQ ID NO: 224290 - RNA, 20 nt, Artificial Sequence
  Synthetic
gaagacaaagaaaggaagga

SEQ ID NO: 224291 - RNA, 21 nt, Artificial Sequence
  Synthetic
ggaagacaaagaaaggaagga

SEQ ID NO: 224292 - RNA, 22 nt, Artificial Sequence
  Synthetic
aggaagacaaagaaaggaagga

SEQ ID NO: 224293 - RNA, 23 nt, Artificial Sequence
  Synthetic
gaggaagacaaagaaaggaagga

SEQ ID NO: 224294 - RNA, 24 nt, Artificial Sequence
  Synthetic
agaggaagacaaagaaaggaagga

SEQ ID NO: 224295 - RNA, 18 nt, Artificial Sequence
  Synthetic
aaggaaagaaaggaagga

SEQ ID NO: 224296 - RNA, 19 nt, Artificial Sequence
  Synthetic
aaaggaaagaaaggaagga

SEQ ID NO: 224297 - RNA, 20 nt, Artificial Sequence
  Synthetic
aaaaggaaagaaaggaagga

SEQ ID NO: 224298 - RNA, 21 nt, Artificial Sequence
  Synthetic
aaaaaggaaagaaaggaagga

SEQ ID NO: 224299 - RNA, 22 nt, Artificial Sequence
  Synthetic
aaaaaaggaaagaaaggaagga

SEQ ID NO: 224300 - RNA, 23 nt, Artificial Sequence
  Synthetic
aaaaaaaggaaagaaaggaagga

SEQ ID NO: 224301 - RNA, 24 nt, Artificial Sequence
  Synthetic
aaaaaaaaggaaagaaaggaagga

SEQ ID NO: 224302 - RNA, 18 nt, Artificial Sequence
  Synthetic
aaaaugagaaaggaagga

SEQ ID NO: 224303 - RNA, 19 nt, Artificial Sequence
  Synthetic
aaaaaugagaaaggaagga

SEQ ID NO: 224304 - RNA, 20 nt, Artificial Sequence
  Synthetic
gaaaaaugagaaaggaagga

SEQ ID NO: 224305 - RNA, 21 nt, Artificial Sequence
  Synthetic
ugaaaaaugagaaaggaagga

SEQ ID NO: 224306 - RNA, 22 nt, Artificial Sequence
  Synthetic
uugaaaaaugagaaaggaagga

SEQ ID NO: 224307 - RNA, 23 nt, Artificial Sequence
  Synthetic
uuugaaaaaugagaaaggaagga

SEQ ID NO: 224308 - RNA, 24 nt, Artificial Sequence
  Synthetic
cuuugaaaaaugagaaaggaagga

SEQ ID NO: 224309 - RNA, 18 nt, Artificial Sequence
  Synthetic
aaggaaggaaaggaagga

SEQ ID NO: 224310 - RNA, 19 nt, Artificial Sequence
  Synthetic
aaaggaaggaaaggaagga

SEQ ID NO: 224311 - RNA, 20 nt, Artificial Sequence
  Synthetic
gaaaggaaggaaaggaagga

SEQ ID NO: 224312 - RNA, 21 nt, Artificial Sequence
  Synthetic
agaaaggaaggaaaggaagga

SEQ ID NO: 224313 - RNA, 22 nt, Artificial Sequence
  Synthetic
aagaaaggaaggaaaggaagga

SEQ ID NO: 224314 - RNA, 23 nt, Artificial Sequence
  Synthetic
aaagaaaggaaggaaaggaagga

SEQ ID NO: 224315 - RNA, 24 nt, Artificial Sequence
  Synthetic
gaaagaaaggaaggaaaggaagga

SEQ ID NO: 224316 - RNA, 18 nt, Artificial Sequence
  Synthetic
ccuuaaggaaaggaagga

SEQ ID NO: 224317 - RNA, 19 nt, Artificial Sequence
  Synthetic
cccuuaaggaaaggaagga

SEQ ID NO: 224318 - RNA, 20 nt, Artificial Sequence
  Synthetic
acccuuaaggaaaggaagga

SEQ ID NO: 224319 - RNA, 21 nt, Artificial Sequence
  Synthetic
gacccuuaaggaaaggaagga

SEQ ID NO: 224320 - RNA, 22 nt, Artificial Sequence
  Synthetic
ugacccuuaaggaaaggaagga

SEQ ID NO: 224321 - RNA, 23 nt, Artificial Sequence
  Synthetic
cugacccuuaaggaaaggaagga

SEQ ID NO: 224322 - RNA, 24 nt, Artificial Sequence
  Synthetic
ucugacccuuaaggaaaggaagga

SEQ ID NO: 224323 - RNA, 18 nt, Artificial Sequence
  Synthetic
aaagaaaagaaggaagga

SEQ ID NO: 224324 - RNA, 19 nt, Artificial Sequence
  Synthetic
gaaagaaaagaaggaagga

SEQ ID NO: 224325 - RNA, 20 nt, Artificial Sequence
  Synthetic
agaaagaaaagaaggaagga

SEQ ID NO: 224326 - RNA, 21 nt, Artificial Sequence
  Synthetic
aagaaagaaaagaaggaagga

SEQ ID NO: 224327 - RNA, 22 nt, Artificial Sequence
  Synthetic
aaagaaagaaaagaaggaagga

SEQ ID NO: 224328 - RNA, 23 nt, Artificial Sequence
  Synthetic
gaaagaaagaaaagaaggaagga

SEQ ID NO: 224329 - RNA, 24 nt, Artificial Sequence
  Synthetic
ggaaagaaagaaaagaaggaagga

SEQ ID NO: 224330 - RNA, 18 nt, Artificial Sequence
  Synthetic
aaggaaaggaaggaagga

SEQ ID NO: 224331 - RNA, 19 nt, Artificial Sequence
  Synthetic
gaaggaaaggaaggaagga

SEQ ID NO: 224332 - RNA, 20 nt, Artificial Sequence
  Synthetic
ggaaggaaaggaaggaagga

SEQ ID NO: 224333 - RNA, 21 nt, Artificial Sequence
  Synthetic
aggaaggaaaggaaggaagga

SEQ ID NO: 224334 - RNA, 22 nt, Artificial Sequence
  Synthetic
aaggaaggaaaggaaggaagga

SEQ ID NO: 224335 - RNA, 23 nt, Artificial Sequence
  Synthetic
aaaggaaggaaaggaaggaagga

SEQ ID NO: 224336 - RNA, 24 nt, Artificial Sequence
  Synthetic
gaaaggaaggaaaggaaggaagga

SEQ ID NO: 224337 - RNA, 18 nt, Artificial Sequence
  Synthetic
aaaggaaggaaggaagga

SEQ ID NO: 224338 - RNA, 19 nt, Artificial Sequence
  Synthetic
gaaaggaaggaaggaagga

SEQ ID NO: 224339 - RNA, 20 nt, Artificial Sequence
  Synthetic
ggaaaggaaggaaggaagga

SEQ ID NO: 224340 - RNA, 21 nt, Artificial Sequence
  Synthetic
aggaaaggaaggaaggaagga

SEQ ID NO: 224341 - RNA, 22 nt, Artificial Sequence
  Synthetic
aaggaaaggaaggaaggaagga

SEQ ID NO: 224342 - RNA, 23 nt, Artificial Sequence
  Synthetic
gaaggaaaggaaggaaggaagga

SEQ ID NO: 224343 - RNA, 24 nt, Artificial Sequence
  Synthetic
ggaaggaaaggaaggaaggaagga

SEQ ID NO: 224344 - RNA, 18 nt, Artificial Sequence
  Synthetic
gaaggaaggaaggaagga

SEQ ID NO: 224345 - RNA, 19 nt, Artificial Sequence
  Synthetic
ggaaggaaggaaggaagga

SEQ ID NO: 224346 - RNA, 20 nt, Artificial Sequence
  Synthetic
aggaaggaaggaaggaagga

SEQ ID NO: 224347 - RNA, 21 nt, Artificial Sequence
  Synthetic
aaggaaggaaggaaggaagga

SEQ ID NO: 224348 - RNA, 22 nt, Artificial Sequence
  Synthetic
aaaggaaggaaggaaggaagga

SEQ ID NO: 224349 - RNA, 23 nt, Artificial Sequence
  Synthetic
gaaaggaaggaaggaaggaagga

SEQ ID NO: 224350 - RNA, 24 nt, Artificial Sequence
  Synthetic
ggaaaggaaggaaggaaggaagga

SEQ ID NO: 224351 - RNA, 18 nt, Artificial Sequence
  Synthetic
gagggagaacaggaagga

SEQ ID NO: 224352 - RNA, 19 nt, Artificial Sequence
  Synthetic
agagggagaacaggaagga

SEQ ID NO: 224353 - RNA, 20 nt, Artificial Sequence
  Synthetic
gagagggagaacaggaagga

SEQ ID NO: 224354 - RNA, 21 nt, Artificial Sequence
  Synthetic
agagagggagaacaggaagga

SEQ ID NO: 224355 - RNA, 22 nt, Artificial Sequence
  Synthetic
gagagagggagaacaggaagga

SEQ ID NO: 224356 - RNA, 23 nt, Artificial Sequence
  Synthetic
ggagagagggagaacaggaagga

SEQ ID NO: 224357 - RNA, 24 nt, Artificial Sequence
  Synthetic
aggagagagggagaacaggaagga

SEQ ID NO: 224358 - RNA, 18 nt, Artificial Sequence
  Synthetic
ugaaaggaggaggaagga

SEQ ID NO: 224359 - RNA, 19 nt, Artificial Sequence
  Synthetic
cugaaaggaggaggaagga

SEQ ID NO: 224360 - RNA, 20 nt, Artificial Sequence
  Synthetic
acugaaaggaggaggaagga

SEQ ID NO: 224361 - RNA, 21 nt, Artificial Sequence
  Synthetic
cacugaaaggaggaggaagga

SEQ ID NO: 224362 - RNA, 22 nt, Artificial Sequence
  Synthetic
ucacugaaaggaggaggaagga

SEQ ID NO: 224363 - RNA, 23 nt, Artificial Sequence
  Synthetic
aucacugaaaggaggaggaagga

SEQ ID NO: 224364 - RNA, 24 nt, Artificial Sequence
  Synthetic
aaucacugaaaggaggaggaagga

SEQ ID NO: 224365 - RNA, 18 nt, Artificial Sequence
  Synthetic
uagaagggggaggaagga

SEQ ID NO: 224366 - RNA, 19 nt, Artificial Sequence
  Synthetic
cuagaagggggaggaagga

SEQ ID NO: 224367 - RNA, 20 nt, Artificial Sequence
  Synthetic
acuagaagggggaggaagga

SEQ ID NO: 224368 - RNA, 21 nt, Artificial Sequence
  Synthetic
uacuagaagggggaggaagga

SEQ ID NO: 224369 - RNA, 22 nt, Artificial Sequence
  Synthetic
cuacuagaagggggaggaagga

SEQ ID NO: 224370 - RNA, 23 nt, Artificial Sequence
  Synthetic
acuacuagaagggggaggaagga

SEQ ID NO: 224371 - RNA, 24 nt, Artificial Sequence
  Synthetic
gacuacuagaagggggaggaagga

SEQ ID NO: 224372 - RNA, 18 nt, Artificial Sequence
  Synthetic
aggaaagaaagggaagga

SEQ ID NO: 224373 - RNA, 19 nt, Artificial Sequence
  Synthetic
gaggaaagaaagggaagga

SEQ ID NO: 224374 - RNA, 20 nt, Artificial Sequence
  Synthetic
ggaggaaagaaagggaagga

SEQ ID NO: 224375 - RNA, 21 nt, Artificial Sequence
  Synthetic
gggaggaaagaaagggaagga

SEQ ID NO: 224376 - RNA, 22 nt, Artificial Sequence
  Synthetic
agggaggaaagaaagggaagga

SEQ ID NO: 224377 - RNA, 23 nt, Artificial Sequence
  Synthetic
aagggaggaaagaaagggaagga

SEQ ID NO: 224378 - RNA, 24 nt, Artificial Sequence
  Synthetic
gaagggaggaaagaaagggaagga

SEQ ID NO: 224379 - RNA, 18 nt, Artificial Sequence
  Synthetic
aagagagugagggaagga

SEQ ID NO: 224380 - RNA, 19 nt, Artificial Sequence
  Synthetic
aaagagagugagggaagga

SEQ ID NO: 224381 - RNA, 20 nt, Artificial Sequence
  Synthetic
gaaagagagugagggaagga

SEQ ID NO: 224382 - RNA, 21 nt, Artificial Sequence
  Synthetic
agaaagagagugagggaagga

SEQ ID NO: 224383 - RNA, 22 nt, Artificial Sequence
  Synthetic
aagaaagagagugagggaagga

SEQ ID NO: 224384 - RNA, 23 nt, Artificial Sequence
  Synthetic
gaagaaagagagugagggaagga

SEQ ID NO: 224385 - RNA, 24 nt, Artificial Sequence
  Synthetic
ggaagaaagagagugagggaagga

SEQ ID NO: 224386 - RNA, 18 nt, Artificial Sequence
  Synthetic
caggaaaaaggggaagga

SEQ ID NO: 224387 - RNA, 19 nt, Artificial Sequence
  Synthetic
gcaggaaaaaggggaagga

SEQ ID NO: 224388 - RNA, 20 nt, Artificial Sequence
  Synthetic
agcaggaaaaaggggaagga

SEQ ID NO: 224389 - RNA, 21 nt, Artificial Sequence
  Synthetic
aagcaggaaaaaggggaagga

SEQ ID NO: 224390 - RNA, 22 nt, Artificial Sequence
  Synthetic
aaagcaggaaaaaggggaagga

SEQ ID NO: 224391 - RNA, 23 nt, Artificial Sequence
  Synthetic
gaaagcaggaaaaaggggaagga

SEQ ID NO: 224392 - RNA, 24 nt, Artificial Sequence
  Synthetic
ggaaagcaggaaaaaggggaagga

SEQ ID NO: 224393 - RNA, 18 nt, Artificial Sequence
  Synthetic
agagaagguggggaagga

SEQ ID NO: 224394 - RNA, 19 nt, Artificial Sequence
  Synthetic
aagagaagguggggaagga

SEQ ID NO: 224395 - RNA, 20 nt, Artificial Sequence
  Synthetic
uaagagaagguggggaagga

SEQ ID NO: 224396 - RNA, 21 nt, Artificial Sequence
  Synthetic
guaagagaagguggggaagga

SEQ ID NO: 224397 - RNA, 22 nt, Artificial Sequence
  Synthetic
uguaagagaagguggggaagga

SEQ ID NO: 224398 - RNA, 23 nt, Artificial Sequence
  Synthetic
guguaagagaagguggggaagga

SEQ ID NO: 224399 - RNA, 24 nt, Artificial Sequence
  Synthetic
aguguaagagaagguggggaagga

SEQ ID NO: 224400 - RNA, 18 nt, Artificial Sequence
  Synthetic
gagggagaaugggaagga

SEQ ID NO: 224401 - RNA, 19 nt, Artificial Sequence
  Synthetic
agagggagaaugggaagga

SEQ ID NO: 224402 - RNA, 20 nt, Artificial Sequence
  Synthetic
cagagggagaaugggaagga

SEQ ID NO: 224403 - RNA, 21 nt, Artificial Sequence
  Synthetic
acagagggagaaugggaagga

SEQ ID NO: 224404 - RNA, 22 nt, Artificial Sequence
  Synthetic
gacagagggagaaugggaagga

SEQ ID NO: 224405 - RNA, 23 nt, Artificial Sequence
  Synthetic
ggacagagggagaaugggaagga

SEQ ID NO: 224406 - RNA, 24 nt, Artificial Sequence
  Synthetic
aggacagagggagaaugggaagga

SEQ ID NO: 224407 - RNA, 18 nt, Artificial Sequence
  Synthetic
aggaaauaaauggaagga

SEQ ID NO: 224408 - RNA, 19 nt, Artificial Sequence
  Synthetic
gaggaaauaaauggaagga

SEQ ID NO: 224409 - RNA, 20 nt, Artificial Sequence
  Synthetic
ggaggaaauaaauggaagga

SEQ ID NO: 224410 - RNA, 21 nt, Artificial Sequence
  Synthetic
aggaggaaauaaauggaagga

SEQ ID NO: 224411 - RNA, 22 nt, Artificial Sequence
  Synthetic
aaggaggaaauaaauggaagga

SEQ ID NO: 224412 - RNA, 23 nt, Artificial Sequence
  Synthetic
caaggaggaaauaaauggaagga

SEQ ID NO: 224413 - RNA, 24 nt, Artificial Sequence
  Synthetic
acaaggaggaaauaaauggaagga

SEQ ID NO: 224414 - RNA, 18 nt, Artificial Sequence
  Synthetic
caccagaagguggaagga

SEQ ID NO: 224415 - RNA, 19 nt, Artificial Sequence
  Synthetic
gcaccagaagguggaagga

SEQ ID NO: 224416 - RNA, 20 nt, Artificial Sequence
  Synthetic
ggcaccagaagguggaagga

SEQ ID NO: 224417 - RNA, 21 nt, Artificial Sequence
  Synthetic
gggcaccagaagguggaagga

SEQ ID NO: 224418 - RNA, 22 nt, Artificial Sequence
  Synthetic
ugggcaccagaagguggaagga

SEQ ID NO: 224419 - RNA, 23 nt, Artificial Sequence
  Synthetic
augggcaccagaagguggaagga

SEQ ID NO: 224420 - RNA, 24 nt, Artificial Sequence
  Synthetic
uaugggcaccagaagguggaagga

SEQ ID NO: 224421 - RNA, 18 nt, Artificial Sequence
  Synthetic
uacccaaaacaugaagga

SEQ ID NO: 224422 - RNA, 19 nt, Artificial Sequence
  Synthetic
uuacccaaaacaugaagga

SEQ ID NO: 224423 - RNA, 20 nt, Artificial Sequence
  Synthetic
auuacccaaaacaugaagga

SEQ ID NO: 224424 - RNA, 21 nt, Artificial Sequence
  Synthetic
uauuacccaaaacaugaagga

SEQ ID NO: 224425 - RNA, 22 nt, Artificial Sequence
  Synthetic
uuauuacccaaaacaugaagga

SEQ ID NO: 224426 - RNA, 23 nt, Artificial Sequence
  Synthetic
uuuauuacccaaaacaugaagga

SEQ ID NO: 224427 - RNA, 24 nt, Artificial Sequence
  Synthetic
uuuuauuacccaaaacaugaagga

SEQ ID NO: 224428 - RNA, 18 nt, Artificial Sequence
  Synthetic
ggcauugaagaugaagga

SEQ ID NO: 224429 - RNA, 19 nt, Artificial Sequence
  Synthetic
uggcauugaagaugaagga

SEQ ID NO: 224430 - RNA, 20 nt, Artificial Sequence
  Synthetic
cuggcauugaagaugaagga

SEQ ID NO: 224431 - RNA, 21 nt, Artificial Sequence
  Synthetic
acuggcauugaagaugaagga

SEQ ID NO: 224432 - RNA, 22 nt, Artificial Sequence
  Synthetic
uacuggcauugaagaugaagga

SEQ ID NO: 224433 - RNA, 23 nt, Artificial Sequence
  Synthetic
cuacuggcauugaagaugaagga

SEQ ID NO: 224434 - RNA, 24 nt, Artificial Sequence
  Synthetic
acuacuggcauugaagaugaagga

SEQ ID NO: 224435 - RNA, 18 nt, Artificial Sequence
  Synthetic
acacuguucccugaagga

SEQ ID NO: 224436 - RNA, 19 nt, Artificial Sequence
  Synthetic
gacacuguucccugaagga

SEQ ID NO: 224437 - RNA, 20 nt, Artificial Sequence
  Synthetic
agacacuguucccugaagga

SEQ ID NO: 224438 - RNA, 21 nt, Artificial Sequence
  Synthetic
cagacacuguucccugaagga

SEQ ID NO: 224439 - RNA, 22 nt, Artificial Sequence
  Synthetic
ccagacacuguucccugaagga

SEQ ID NO: 224440 - RNA, 23 nt, Artificial Sequence
  Synthetic
accagacacuguucccugaagga

SEQ ID NO: 224441 - RNA, 24 nt, Artificial Sequence
  Synthetic
caccagacacuguucccugaagga

SEQ ID NO: 224442 - RNA, 18 nt, Artificial Sequence
  Synthetic
aaugcaacaggugaagga

SEQ ID NO: 224443 - RNA, 19 nt, Artificial Sequence
  Synthetic
gaaugcaacaggugaagga

SEQ ID NO: 224444 - RNA, 20 nt, Artificial Sequence
  Synthetic
ugaaugcaacaggugaagga

SEQ ID NO: 224445 - RNA, 21 nt, Artificial Sequence
  Synthetic
augaaugcaacaggugaagga

SEQ ID NO: 224446 - RNA, 22 nt, Artificial Sequence
  Synthetic
uaugaaugcaacaggugaagga

SEQ ID NO: 224447 - RNA, 23 nt, Artificial Sequence
  Synthetic
uuaugaaugcaacaggugaagga

SEQ ID NO: 224448 - RNA, 24 nt, Artificial Sequence
  Synthetic
auuaugaaugcaacaggugaagga

SEQ ID NO: 224449 - RNA, 18 nt, Artificial Sequence
  Synthetic
gaagagaagugugaagga

SEQ ID NO: 224450 - RNA, 19 nt, Artificial Sequence
  Synthetic
agaagagaagugugaagga

SEQ ID NO: 224451 - RNA, 20 nt, Artificial Sequence
  Synthetic
gagaagagaagugugaagga

SEQ ID NO: 224452 - RNA, 21 nt, Artificial Sequence
  Synthetic
ggagaagagaagugugaagga

SEQ ID NO: 224453 - RNA, 22 nt, Artificial Sequence
  Synthetic
aggagaagagaagugugaagga

SEQ ID NO: 224454 - RNA, 23 nt, Artificial Sequence
  Synthetic
gaggagaagagaagugugaagga

SEQ ID NO: 224455 - RNA, 24 nt, Artificial Sequence
  Synthetic
agaggagaagagaagugugaagga

SEQ ID NO: 224456 - RNA, 18 nt, Artificial Sequence
  Synthetic
gaaaccaggugugaagga

SEQ ID NO: 224457 - RNA, 19 nt, Artificial Sequence
  Synthetic
ugaaaccaggugugaagga

SEQ ID NO: 224458 - RNA, 20 nt, Artificial Sequence
  Synthetic
uugaaaccaggugugaagga

SEQ ID NO: 224459 - RNA, 21 nt, Artificial Sequence
  Synthetic
cuugaaaccaggugugaagga

SEQ ID NO: 224460 - RNA, 22 nt, Artificial Sequence
  Synthetic
ucuugaaaccaggugugaagga

SEQ ID NO: 224461 - RNA, 23 nt, Artificial Sequence
  Synthetic
aucuugaaaccaggugugaagga

SEQ ID NO: 224462 - RNA, 24 nt, Artificial Sequence
  Synthetic
aaucuugaaaccaggugugaagga

SEQ ID NO: 224463 - RNA, 18 nt, Artificial Sequence
  Synthetic
auaagaggaaaauaagga

SEQ ID NO: 224464 - RNA, 19 nt, Artificial Sequence
  Synthetic
cauaagaggaaaauaagga

SEQ ID NO: 224465 - RNA, 20 nt, Artificial Sequence
  Synthetic
gcauaagaggaaaauaagga

SEQ ID NO: 224466 - RNA, 21 nt, Artificial Sequence
  Synthetic
agcauaagaggaaaauaagga

SEQ ID NO: 224467 - RNA, 22 nt, Artificial Sequence
  Synthetic
aagcauaagaggaaaauaagga

SEQ ID NO: 224468 - RNA, 23 nt, Artificial Sequence
  Synthetic
uaagcauaagaggaaaauaagga

SEQ ID NO: 224469 - RNA, 24 nt, Artificial Sequence
  Synthetic
auaagcauaagaggaaaauaagga

SEQ ID NO: 224470 - RNA, 18 nt, Artificial Sequence
  Synthetic
aaagaaauaaaauaagga

SEQ ID NO: 224471 - RNA, 19 nt, Artificial Sequence
  Synthetic
aaaagaaauaaaauaagga

SEQ ID NO: 224472 - RNA, 20 nt, Artificial Sequence
  Synthetic
gaaaagaaauaaaauaagga

SEQ ID NO: 224473 - RNA, 21 nt, Artificial Sequence
  Synthetic
agaaaagaaauaaaauaagga

SEQ ID NO: 224474 - RNA, 22 nt, Artificial Sequence
  Synthetic
aagaaaagaaauaaaauaagga

SEQ ID NO: 224475 - RNA, 23 nt, Artificial Sequence
  Synthetic
gaagaaaagaaauaaaauaagga

SEQ ID NO: 224476 - RNA, 24 nt, Artificial Sequence
  Synthetic
ugaagaaaagaaauaaaauaagga

SEQ ID NO: 224477 - RNA, 18 nt, Artificial Sequence
  Synthetic
gggagguggaaauaagga

SEQ ID NO: 224478 - RNA, 19 nt, Artificial Sequence
  Synthetic
agggagguggaaauaagga

SEQ ID NO: 224479 - RNA, 20 nt, Artificial Sequence
  Synthetic
uagggagguggaaauaagga

SEQ ID NO: 224480 - RNA, 21 nt, Artificial Sequence
  Synthetic
guagggagguggaaauaagga

SEQ ID NO: 224481 - RNA, 22 nt, Artificial Sequence
  Synthetic
aguagggagguggaaauaagga

SEQ ID NO: 224482 - RNA, 23 nt, Artificial Sequence
  Synthetic
aaguagggagguggaaauaagga

SEQ ID NO: 224483 - RNA, 24 nt, Artificial Sequence
  Synthetic
gaaguagggagguggaaauaagga

SEQ ID NO: 224484 - RNA, 18 nt, Artificial Sequence
  Synthetic
caggcuauuacauaagga

SEQ ID NO: 224485 - RNA, 19 nt, Artificial Sequence
  Synthetic
acaggcuauuacauaagga

SEQ ID NO: 224486 - RNA, 20 nt, Artificial Sequence
  Synthetic
cacaggcuauuacauaagga

SEQ ID NO: 224487 - RNA, 21 nt, Artificial Sequence
  Synthetic
ucacaggcuauuacauaagga

SEQ ID NO: 224488 - RNA, 22 nt, Artificial Sequence
  Synthetic
uucacaggcuauuacauaagga

SEQ ID NO: 224489 - RNA, 23 nt, Artificial Sequence
  Synthetic
auucacaggcuauuacauaagga

SEQ ID NO: 224490 - RNA, 24 nt, Artificial Sequence
  Synthetic
uauucacaggcuauuacauaagga

SEQ ID NO: 224491 - RNA, 18 nt, Artificial Sequence
  Synthetic
ucgaaggaagcauaagga

SEQ ID NO: 224492 - RNA, 19 nt, Artificial Sequence
  Synthetic
cucgaaggaagcauaagga

SEQ ID NO: 224493 - RNA, 20 nt, Artificial Sequence
  Synthetic
gcucgaaggaagcauaagga

SEQ ID NO: 224494 - RNA, 21 nt, Artificial Sequence
  Synthetic
agcucgaaggaagcauaagga

SEQ ID NO: 224495 - RNA, 22 nt, Artificial Sequence
  Synthetic
aagcucgaaggaagcauaagga

SEQ ID NO: 224496 - RNA, 23 nt, Artificial Sequence
  Synthetic
uaagcucgaaggaagcauaagga

SEQ ID NO: 224497 - RNA, 24 nt, Artificial Sequence
  Synthetic
guaagcucgaaggaagcauaagga

SEQ ID NO: 224498 - RNA, 18 nt, Artificial Sequence
  Synthetic
uaggggaagagauaagga

SEQ ID NO: 224499 - RNA, 19 nt, Artificial Sequence
  Synthetic
guaggggaagagauaagga

SEQ ID NO: 224500 - RNA, 20 nt, Artificial Sequence
  Synthetic
aguaggggaagagauaagga

SEQ ID NO: 224501 - RNA, 21 nt, Artificial Sequence
  Synthetic
uaguaggggaagagauaagga

SEQ ID NO: 224502 - RNA, 22 nt, Artificial Sequence
  Synthetic
cuaguaggggaagagauaagga

SEQ ID NO: 224503 - RNA, 23 nt, Artificial Sequence
  Synthetic
acuaguaggggaagagauaagga

SEQ ID NO: 224504 - RNA, 24 nt, Artificial Sequence
  Synthetic
aacuaguaggggaagagauaagga

SEQ ID NO: 224505 - RNA, 18 nt, Artificial Sequence
  Synthetic
gguauuucaugauaagga

SEQ ID NO: 224506 - RNA, 19 nt, Artificial Sequence
  Synthetic
agguauuucaugauaagga

SEQ ID NO: 224507 - RNA, 20 nt, Artificial Sequence
  Synthetic
cagguauuucaugauaagga

SEQ ID NO: 224508 - RNA, 21 nt, Artificial Sequence
  Synthetic
ccagguauuucaugauaagga

SEQ ID NO: 224509 - RNA, 22 nt, Artificial Sequence
  Synthetic
cccagguauuucaugauaagga

SEQ ID NO: 224510 - RNA, 23 nt, Artificial Sequence
  Synthetic
ucccagguauuucaugauaagga

SEQ ID NO: 224511 - RNA, 24 nt, Artificial Sequence
  Synthetic
gucccagguauuucaugauaagga

SEQ ID NO: 224512 - RNA, 18 nt, Artificial Sequence
  Synthetic
aaaugagaacuauaagga

SEQ ID NO: 224513 - RNA, 19 nt, Artificial Sequence
  Synthetic
gaaaugagaacuauaagga

SEQ ID NO: 224514 - RNA, 20 nt, Artificial Sequence
  Synthetic
agaaaugagaacuauaagga

SEQ ID NO: 224515 - RNA, 21 nt, Artificial Sequence
  Synthetic
gagaaaugagaacuauaagga

SEQ ID NO: 224516 - RNA, 22 nt, Artificial Sequence
  Synthetic
agagaaaugagaacuauaagga

SEQ ID NO: 224517 - RNA, 23 nt, Artificial Sequence
  Synthetic
cagagaaaugagaacuauaagga

SEQ ID NO: 224518 - RNA, 24 nt, Artificial Sequence
  Synthetic
gcagagaaaugagaacuauaagga

SEQ ID NO: 224519 - RNA, 18 nt, Artificial Sequence
  Synthetic
aaaucugacccuuaagga

SEQ ID NO: 224520 - RNA, 19 nt, Artificial Sequence
  Synthetic
uaaaucugacccuuaagga

SEQ ID NO: 224521 - RNA, 20 nt, Artificial Sequence
  Synthetic
cuaaaucugacccuuaagga

SEQ ID NO: 224522 - RNA, 21 nt, Artificial Sequence
  Synthetic
acuaaaucugacccuuaagga

SEQ ID NO: 224523 - RNA, 22 nt, Artificial Sequence
  Synthetic
uacuaaaucugacccuuaagga

SEQ ID NO: 224524 - RNA, 23 nt, Artificial Sequence
  Synthetic
uuacuaaaucugacccuuaagga

SEQ ID NO: 224525 - RNA, 24 nt, Artificial Sequence
  Synthetic
auuacuaaaucugacccuuaagga

SEQ ID NO: 224526 - RNA, 18 nt, Artificial Sequence
  Synthetic
augguauaauguuaagga

SEQ ID NO: 224527 - RNA, 19 nt, Artificial Sequence
  Synthetic
uaugguauaauguuaagga

SEQ ID NO: 224528 - RNA, 20 nt, Artificial Sequence
  Synthetic
auaugguauaauguuaagga

SEQ ID NO: 224529 - RNA, 21 nt, Artificial Sequence
  Synthetic
aauaugguauaauguuaagga

SEQ ID NO: 224530 - RNA, 22 nt, Artificial Sequence
  Synthetic
caauaugguauaauguuaagga

SEQ ID NO: 224531 - RNA, 23 nt, Artificial Sequence
  Synthetic
ccaauaugguauaauguuaagga

SEQ ID NO: 224532 - RNA, 24 nt, Artificial Sequence
  Synthetic
uccaauaugguauaauguuaagga

SEQ ID NO: 224533 - RNA, 18 nt, Artificial Sequence
  Synthetic
uuuuuaaauuguuaagga

SEQ ID NO: 224534 - RNA, 19 nt, Artificial Sequence
  Synthetic
uuuuuuaaauuguuaagga

SEQ ID NO: 224535 - RNA, 20 nt, Artificial Sequence
  Synthetic
auuuuuuaaauuguuaagga

SEQ ID NO: 224536 - RNA, 21 nt, Artificial Sequence
  Synthetic
uauuuuuuaaauuguuaagga

SEQ ID NO: 224537 - RNA, 22 nt, Artificial Sequence
  Synthetic
guauuuuuuaaauuguuaagga

SEQ ID NO: 224538 - RNA, 23 nt, Artificial Sequence
  Synthetic
cguauuuuuuaaauuguuaagga

SEQ ID NO: 224539 - RNA, 24 nt, Artificial Sequence
  Synthetic
ccguauuuuuuaaauuguuaagga

SEQ ID NO: 224540 - RNA, 18 nt, Artificial Sequence
  Synthetic
aauagcaacauuuaagga

SEQ ID NO: 224541 - RNA, 19 nt, Artificial Sequence
  Synthetic
gaauagcaacauuuaagga

SEQ ID NO: 224542 - RNA, 20 nt, Artificial Sequence
  Synthetic
ggaauagcaacauuuaagga

SEQ ID NO: 224543 - RNA, 21 nt, Artificial Sequence
  Synthetic
gggaauagcaacauuuaagga

SEQ ID NO: 224544 - RNA, 22 nt, Artificial Sequence
  Synthetic
agggaauagcaacauuuaagga

SEQ ID NO: 224545 - RNA, 23 nt, Artificial Sequence
  Synthetic
uagggaauagcaacauuuaagga

SEQ ID NO: 224546 - RNA, 24 nt, Artificial Sequence
  Synthetic
cuagggaauagcaacauuuaagga

SEQ ID NO: 224547 - RNA, 18 nt, Artificial Sequence
  Synthetic
gcauuucuaguuuaagga

SEQ ID NO: 224548 - RNA, 19 nt, Artificial Sequence
  Synthetic
ggcauuucuaguuuaagga

SEQ ID NO: 224549 - RNA, 20 nt, Artificial Sequence
  Synthetic
cggcauuucuaguuuaagga

SEQ ID NO: 224550 - RNA, 21 nt, Artificial Sequence
  Synthetic
gcggcauuucuaguuuaagga

SEQ ID NO: 224551 - RNA, 22 nt, Artificial Sequence
  Synthetic
agcggcauuucuaguuuaagga

SEQ ID NO: 224552 - RNA, 23 nt, Artificial Sequence
  Synthetic
aagcggcauuucuaguuuaagga

SEQ ID NO: 224553 - RNA, 24 nt, Artificial Sequence
  Synthetic
uaagcggcauuucuaguuuaagga

SEQ ID NO: 224554 - RNA, 18 nt, Artificial Sequence
  Synthetic
uguaguccauuuuaagga

SEQ ID NO: 224555 - RNA, 19 nt, Artificial Sequence
  Synthetic
uuguaguccauuuuaagga

SEQ ID NO: 224556 - RNA, 20 nt, Artificial Sequence
  Synthetic
cuuguaguccauuuuaagga

SEQ ID NO: 224557 - RNA, 21 nt, Artificial Sequence
  Synthetic
ccuuguaguccauuuuaagga

SEQ ID NO: 224558 - RNA, 22 nt, Artificial Sequence
  Synthetic
accuuguaguccauuuuaagga

SEQ ID NO: 224559 - RNA, 23 nt, Artificial Sequence
  Synthetic
uaccuuguaguccauuuuaagga

SEQ ID NO: 224560 - RNA, 24 nt, Artificial Sequence
  Synthetic
guaccuuguaguccauuuuaagga

SEQ ID NO: 224561 - RNA, 18 nt, Artificial Sequence
  Synthetic
uuuugucuggaaacagga

SEQ ID NO: 224562 - RNA, 19 nt, Artificial Sequence
  Synthetic
uuuuugucuggaaacagga

SEQ ID NO: 224563 - RNA, 20 nt, Artificial Sequence
  Synthetic
auuuuugucuggaaacagga

SEQ ID NO: 224564 - RNA, 21 nt, Artificial Sequence
  Synthetic
gauuuuugucuggaaacagga

SEQ ID NO: 224565 - RNA, 22 nt, Artificial Sequence
  Synthetic
agauuuuugucuggaaacagga

SEQ ID NO: 224566 - RNA, 23 nt, Artificial Sequence
  Synthetic
gagauuuuugucuggaaacagga

SEQ ID NO: 224567 - RNA, 24 nt, Artificial Sequence
  Synthetic
ugagauuuuugucuggaaacagga

SEQ ID NO: 224568 - RNA, 18 nt, Artificial Sequence
  Synthetic
aggguuaaugaaacagga

SEQ ID NO: 224569 - RNA, 19 nt, Artificial Sequence
  Synthetic
uaggguuaaugaaacagga

SEQ ID NO: 224570 - RNA, 20 nt, Artificial Sequence
  Synthetic
auaggguuaaugaaacagga

SEQ ID NO: 224571 - RNA, 21 nt, Artificial Sequence
  Synthetic
aauaggguuaaugaaacagga

SEQ ID NO: 224572 - RNA, 22 nt, Artificial Sequence
  Synthetic
gaauaggguuaaugaaacagga

SEQ ID NO: 224573 - RNA, 23 nt, Artificial Sequence
  Synthetic
agaauaggguuaaugaaacagga

SEQ ID NO: 224574 - RNA, 24 nt, Artificial Sequence
  Synthetic
aagaauaggguuaaugaaacagga

SEQ ID NO: 224575 - RNA, 18 nt, Artificial Sequence
  Synthetic
gugacuggugaaacagga

SEQ ID NO: 224576 - RNA, 19 nt, Artificial Sequence
  Synthetic
ggugacuggugaaacagga

SEQ ID NO: 224577 - RNA, 20 nt, Artificial Sequence
  Synthetic
aggugacuggugaaacagga

SEQ ID NO: 224578 - RNA, 21 nt, Artificial Sequence
  Synthetic
caggugacuggugaaacagga

SEQ ID NO: 224579 - RNA, 22 nt, Artificial Sequence
  Synthetic
ucaggugacuggugaaacagga

SEQ ID NO: 224580 - RNA, 23 nt, Artificial Sequence
  Synthetic
gucaggugacuggugaaacagga

SEQ ID NO: 224581 - RNA, 24 nt, Artificial Sequence
  Synthetic
ggucaggugacuggugaaacagga

SEQ ID NO: 224582 - RNA, 18 nt, Artificial Sequence
  Synthetic
agaugccauuuaacagga

SEQ ID NO: 224583 - RNA, 19 nt, Artificial Sequence
  Synthetic
aagaugccauuuaacagga

SEQ ID NO: 224584 - RNA, 20 nt, Artificial Sequence
  Synthetic
gaagaugccauuuaacagga

SEQ ID NO: 224585 - RNA, 21 nt, Artificial Sequence
  Synthetic
cgaagaugccauuuaacagga

SEQ ID NO: 224586 - RNA, 22 nt, Artificial Sequence
  Synthetic
ccgaagaugccauuuaacagga

SEQ ID NO: 224587 - RNA, 23 nt, Artificial Sequence
  Synthetic
accgaagaugccauuuaacagga

SEQ ID NO: 224588 - RNA, 24 nt, Artificial Sequence
  Synthetic
caccgaagaugccauuuaacagga

SEQ ID NO: 224589 - RNA, 18 nt, Artificial Sequence
  Synthetic
cagcaaacuaacacagga

SEQ ID NO: 224590 - RNA, 19 nt, Artificial Sequence
  Synthetic
ucagcaaacuaacacagga

SEQ ID NO: 224591 - RNA, 20 nt, Artificial Sequence
  Synthetic
cucagcaaacuaacacagga

SEQ ID NO: 224592 - RNA, 21 nt, Artificial Sequence
  Synthetic
ccucagcaaacuaacacagga

SEQ ID NO: 224593 - RNA, 22 nt, Artificial Sequence
  Synthetic
uccucagcaaacuaacacagga

SEQ ID NO: 224594 - RNA, 23 nt, Artificial Sequence
  Synthetic
auccucagcaaacuaacacagga

SEQ ID NO: 224595 - RNA, 24 nt, Artificial Sequence
  Synthetic
cauccucagcaaacuaacacagga

SEQ ID NO: 224596 - RNA, 18 nt, Artificial Sequence
  Synthetic
gaacacauggacacagga

SEQ ID NO: 224597 - RNA, 19 nt, Artificial Sequence
  Synthetic
agaacacauggacacagga

SEQ ID NO: 224598 - RNA, 20 nt, Artificial Sequence
  Synthetic
gagaacacauggacacagga

SEQ ID NO: 224599 - RNA, 21 nt, Artificial Sequence
  Synthetic
ugagaacacauggacacagga

SEQ ID NO: 224600 - RNA, 22 nt, Artificial Sequence
  Synthetic
augagaacacauggacacagga

SEQ ID NO: 224601 - RNA, 23 nt, Artificial Sequence
  Synthetic
aaugagaacacauggacacagga

SEQ ID NO: 224602 - RNA, 24 nt, Artificial Sequence
  Synthetic
caaugagaacacauggacacagga

SEQ ID NO: 224603 - RNA, 18 nt, Artificial Sequence
  Synthetic
gaucacauggacacagga

SEQ ID NO: 224604 - RNA, 19 nt, Artificial Sequence
  Synthetic
agaucacauggacacagga

SEQ ID NO: 224605 - RNA, 20 nt, Artificial Sequence
  Synthetic
gagaucacauggacacagga

SEQ ID NO: 224606 - RNA, 21 nt, Artificial Sequence
  Synthetic
ugagaucacauggacacagga

SEQ ID NO: 224607 - RNA, 22 nt, Artificial Sequence
  Synthetic
augagaucacauggacacagga

SEQ ID NO: 224608 - RNA, 23 nt, Artificial Sequence
  Synthetic
aaugagaucacauggacacagga

SEQ ID NO: 224609 - RNA, 24 nt, Artificial Sequence
  Synthetic
caaugagaucacauggacacagga

SEQ ID NO: 224610 - RNA, 18 nt, Artificial Sequence
  Synthetic
caucucaggugcacagga

SEQ ID NO: 224611 - RNA, 19 nt, Artificial Sequence
  Synthetic
acaucucaggugcacagga

SEQ ID NO: 224612 - RNA, 20 nt, Artificial Sequence
  Synthetic
gacaucucaggugcacagga

SEQ ID NO: 224613 - RNA, 21 nt, Artificial Sequence
  Synthetic
ugacaucucaggugcacagga

SEQ ID NO: 224614 - RNA, 22 nt, Artificial Sequence
  Synthetic
augacaucucaggugcacagga

SEQ ID NO: 224615 - RNA, 23 nt, Artificial Sequence
  Synthetic
caugacaucucaggugcacagga

SEQ ID NO: 224616 - RNA, 24 nt, Artificial Sequence
  Synthetic
ucaugacaucucaggugcacagga

SEQ ID NO: 224617 - RNA, 18 nt, Artificial Sequence
  Synthetic
uaggcaucuugcacagga

SEQ ID NO: 224618 - RNA, 19 nt, Artificial Sequence
  Synthetic
uuaggcaucuugcacagga

SEQ ID NO: 224619 - RNA, 20 nt, Artificial Sequence
  Synthetic
guuaggcaucuugcacagga

SEQ ID NO: 224620 - RNA, 21 nt, Artificial Sequence
  Synthetic
gguuaggcaucuugcacagga

SEQ ID NO: 224621 - RNA, 22 nt, Artificial Sequence
  Synthetic
agguuaggcaucuugcacagga

SEQ ID NO: 224622 - RNA, 23 nt, Artificial Sequence
  Synthetic
cagguuaggcaucuugcacagga

SEQ ID NO: 224623 - RNA, 24 nt, Artificial Sequence
  Synthetic
ucagguuaggcaucuugcacagga

SEQ ID NO: 224624 - RNA, 18 nt, Artificial Sequence
  Synthetic
gccuuggcccagacagga

SEQ ID NO: 224625 - RNA, 19 nt, Artificial Sequence
  Synthetic
agccuuggcccagacagga

SEQ ID NO: 224626 - RNA, 20 nt, Artificial Sequence
  Synthetic
uagccuuggcccagacagga

SEQ ID NO: 224627 - RNA, 21 nt, Artificial Sequence
  Synthetic
auagccuuggcccagacagga

SEQ ID NO: 224628 - RNA, 22 nt, Artificial Sequence
  Synthetic
aauagccuuggcccagacagga

SEQ ID NO: 224629 - RNA, 23 nt, Artificial Sequence
  Synthetic
aaauagccuuggcccagacagga

SEQ ID NO: 224630 - RNA, 24 nt, Artificial Sequence
  Synthetic
aaaauagccuuggcccagacagga

SEQ ID NO: 224631 - RNA, 18 nt, Artificial Sequence
  Synthetic
uggagcagggagacagga

SEQ ID NO: 224632 - RNA, 19 nt, Artificial Sequence
  Synthetic
cuggagcagggagacagga

SEQ ID NO: 224633 - RNA, 20 nt, Artificial Sequence
  Synthetic
acuggagcagggagacagga

SEQ ID NO: 224634 - RNA, 21 nt, Artificial Sequence
  Synthetic
uacuggagcagggagacagga

SEQ ID NO: 224635 - RNA, 22 nt, Artificial Sequence
  Synthetic
uuacuggagcagggagacagga

SEQ ID NO: 224636 - RNA, 23 nt, Artificial Sequence
  Synthetic
uuuacuggagcagggagacagga

SEQ ID NO: 224637 - RNA, 24 nt, Artificial Sequence
  Synthetic
uuuuacuggagcagggagacagga

SEQ ID NO: 224638 - RNA, 18 nt, Artificial Sequence
  Synthetic
ggauggugggagacagga

SEQ ID NO: 224639 - RNA, 19 nt, Artificial Sequence
  Synthetic
gggauggugggagacagga

SEQ ID NO: 224640 - RNA, 20 nt, Artificial Sequence
  Synthetic
agggauggugggagacagga

SEQ ID NO: 224641 - RNA, 21 nt, Artificial Sequence
  Synthetic
gagggauggugggagacagga

SEQ ID NO: 224642 - RNA, 22 nt, Artificial Sequence
  Synthetic
agagggauggugggagacagga

SEQ ID NO: 224643 - RNA, 23 nt, Artificial Sequence
  Synthetic
aagagggauggugggagacagga

SEQ ID NO: 224644 - RNA, 24 nt, Artificial Sequence
  Synthetic
gaagagggauggugggagacagga

SEQ ID NO: 224645 - RNA, 18 nt, Artificial Sequence
  Synthetic
agggguuguaguacagga

SEQ ID NO: 224646 - RNA, 19 nt, Artificial Sequence
  Synthetic
cagggguuguaguacagga

SEQ ID NO: 224647 - RNA, 20 nt, Artificial Sequence
  Synthetic
gcagggguuguaguacagga

SEQ ID NO: 224648 - RNA, 21 nt, Artificial Sequence
  Synthetic
ugcagggguuguaguacagga

SEQ ID NO: 224649 - RNA, 22 nt, Artificial Sequence
  Synthetic
gugcagggguuguaguacagga

SEQ ID NO: 224650 - RNA, 23 nt, Artificial Sequence
  Synthetic
agugcagggguuguaguacagga

SEQ ID NO: 224651 - RNA, 24 nt, Artificial Sequence
  Synthetic
gagugcagggguuguaguacagga

SEQ ID NO: 224652 - RNA, 18 nt, Artificial Sequence
  Synthetic
uuacagugauguacagga

SEQ ID NO: 224653 - RNA, 19 nt, Artificial Sequence
  Synthetic
guuacagugauguacagga

SEQ ID NO: 224654 - RNA, 20 nt, Artificial Sequence
  Synthetic
uguuacagugauguacagga

SEQ ID NO: 224655 - RNA, 21 nt, Artificial Sequence
  Synthetic
cuguuacagugauguacagga

SEQ ID NO: 224656 - RNA, 22 nt, Artificial Sequence
  Synthetic
gcuguuacagugauguacagga

SEQ ID NO: 224657 - RNA, 23 nt, Artificial Sequence
  Synthetic
ugcuguuacagugauguacagga

SEQ ID NO: 224658 - RNA, 24 nt, Artificial Sequence
  Synthetic
cugcuguuacagugauguacagga

SEQ ID NO: 224659 - RNA, 18 nt, Artificial Sequence
  Synthetic
uuuuaaaauauuacagga

SEQ ID NO: 224660 - RNA, 19 nt, Artificial Sequence
  Synthetic
uuuuuaaaauauuacagga

SEQ ID NO: 224661 - RNA, 20 nt, Artificial Sequence
  Synthetic
cuuuuuaaaauauuacagga

SEQ ID NO: 224662 - RNA, 21 nt, Artificial Sequence
  Synthetic
ucuuuuuaaaauauuacagga

SEQ ID NO: 224663 - RNA, 22 nt, Artificial Sequence
  Synthetic
aucuuuuuaaaauauuacagga

SEQ ID NO: 224664 - RNA, 23 nt, Artificial Sequence
  Synthetic
caucuuuuuaaaauauuacagga

SEQ ID NO: 224665 - RNA, 24 nt, Artificial Sequence
  Synthetic
ucaucuuuuuaaaauauuacagga

SEQ ID NO: 224666 - RNA, 18 nt, Artificial Sequence
  Synthetic
uuguggagaucaccagga

SEQ ID NO: 224667 - RNA, 19 nt, Artificial Sequence
  Synthetic
cuuguggagaucaccagga

SEQ ID NO: 224668 - RNA, 20 nt, Artificial Sequence
  Synthetic
acuuguggagaucaccagga

SEQ ID NO: 224669 - RNA, 21 nt, Artificial Sequence
  Synthetic
cacuuguggagaucaccagga

SEQ ID NO: 224670 - RNA, 22 nt, Artificial Sequence
  Synthetic
acacuuguggagaucaccagga

SEQ ID NO: 224671 - RNA, 23 nt, Artificial Sequence
  Synthetic
aacacuuguggagaucaccagga

SEQ ID NO: 224672 - RNA, 24 nt, Artificial Sequence
  Synthetic
caacacuuguggagaucaccagga

SEQ ID NO: 224673 - RNA, 18 nt, Artificial Sequence
  Synthetic
agagaguguagaccagga

SEQ ID NO: 224674 - RNA, 19 nt, Artificial Sequence
  Synthetic
cagagaguguagaccagga

SEQ ID NO: 224675 - RNA, 20 nt, Artificial Sequence
  Synthetic
ccagagaguguagaccagga

SEQ ID NO: 224676 - RNA, 21 nt, Artificial Sequence
  Synthetic
accagagaguguagaccagga

SEQ ID NO: 224677 - RNA, 22 nt, Artificial Sequence
  Synthetic
caccagagaguguagaccagga

SEQ ID NO: 224678 - RNA, 23 nt, Artificial Sequence
  Synthetic
ccaccagagaguguagaccagga

SEQ ID NO: 224679 - RNA, 24 nt, Artificial Sequence
  Synthetic
gccaccagagaguguagaccagga

SEQ ID NO: 224680 - RNA, 18 nt, Artificial Sequence
  Synthetic
aaucgcuugaacccagga

SEQ ID NO: 224681 - RNA, 19 nt, Artificial Sequence
  Synthetic
gaaucgcuugaacccagga

SEQ ID NO: 224682 - RNA, 20 nt, Artificial Sequence
  Synthetic
agaaucgcuugaacccagga

SEQ ID NO: 224683 - RNA, 21 nt, Artificial Sequence
  Synthetic
gagaaucgcuugaacccagga

SEQ ID NO: 224684 - RNA, 22 nt, Artificial Sequence
  Synthetic
ggagaaucgcuugaacccagga

SEQ ID NO: 224685 - RNA, 23 nt, Artificial Sequence
  Synthetic
aggagaaucgcuugaacccagga

SEQ ID NO: 224686 - RNA, 24 nt, Artificial Sequence
  Synthetic
caggagaaucgcuugaacccagga

SEQ ID NO: 224687 - RNA, 18 nt, Artificial Sequence
  Synthetic
ugcuagaucugcccagga

SEQ ID NO: 224688 - RNA, 19 nt, Artificial Sequence
  Synthetic
augcuagaucugcccagga

SEQ ID NO: 224689 - RNA, 20 nt, Artificial Sequence
  Synthetic
aaugcuagaucugcccagga

SEQ ID NO: 224690 - RNA, 21 nt, Artificial Sequence
  Synthetic
aaaugcuagaucugcccagga

SEQ ID NO: 224691 - RNA, 22 nt, Artificial Sequence
  Synthetic
caaaugcuagaucugcccagga

SEQ ID NO: 224692 - RNA, 23 nt, Artificial Sequence
  Synthetic
ucaaaugcuagaucugcccagga

SEQ ID NO: 224693 - RNA, 24 nt, Artificial Sequence
  Synthetic
cucaaaugcuagaucugcccagga

SEQ ID NO: 224694 - RNA, 18 nt, Artificial Sequence
  Synthetic
gcucccagugucccagga

SEQ ID NO: 224695 - RNA, 19 nt, Artificial Sequence
  Synthetic
ugcucccagugucccagga

SEQ ID NO: 224696 - RNA, 20 nt, Artificial Sequence
  Synthetic
cugcucccagugucccagga

SEQ ID NO: 224697 - RNA, 21 nt, Artificial Sequence
  Synthetic
ccugcucccagugucccagga

SEQ ID NO: 224698 - RNA, 22 nt, Artificial Sequence
  Synthetic
cccugcucccagugucccagga

SEQ ID NO: 224699 - RNA, 23 nt, Artificial Sequence
  Synthetic
acccugcucccagugucccagga

SEQ ID NO: 224700 - RNA, 24 nt, Artificial Sequence
  Synthetic
gacccugcucccagugucccagga

SEQ ID NO: 224701 - RNA, 18 nt, Artificial Sequence
  Synthetic
cacauuguugucccagga

SEQ ID NO: 224702 - RNA, 19 nt, Artificial Sequence
  Synthetic
ucacauuguugucccagga

SEQ ID NO: 224703 - RNA, 20 nt, Artificial Sequence
  Synthetic
aucacauuguugucccagga

SEQ ID NO: 224704 - RNA, 21 nt, Artificial Sequence
  Synthetic
caucacauuguugucccagga

SEQ ID NO: 224705 - RNA, 22 nt, Artificial Sequence
  Synthetic
ccaucacauuguugucccagga

SEQ ID NO: 224706 - RNA, 23 nt, Artificial Sequence
  Synthetic
gccaucacauuguugucccagga

SEQ ID NO: 224707 - RNA, 24 nt, Artificial Sequence
  Synthetic
ggccaucacauuguugucccagga

SEQ ID NO: 224708 - RNA, 18 nt, Artificial Sequence
  Synthetic
cauaacaauuucccagga

SEQ ID NO: 224709 - RNA, 19 nt, Artificial Sequence
  Synthetic
ccauaacaauuucccagga

SEQ ID NO: 224710 - RNA, 20 nt, Artificial Sequence
  Synthetic
gccauaacaauuucccagga

SEQ ID NO: 224711 - RNA, 21 nt, Artificial Sequence
  Synthetic
ggccauaacaauuucccagga

SEQ ID NO: 224712 - RNA, 22 nt, Artificial Sequence
  Synthetic
uggccauaacaauuucccagga

SEQ ID NO: 224713 - RNA, 23 nt, Artificial Sequence
  Synthetic
auggccauaacaauuucccagga

SEQ ID NO: 224714 - RNA, 24 nt, Artificial Sequence
  Synthetic
cauggccauaacaauuucccagga

SEQ ID NO: 224715 - RNA, 18 nt, Artificial Sequence
  Synthetic
gggaaaacuaagccagga

SEQ ID NO: 224716 - RNA, 19 nt, Artificial Sequence
  Synthetic
agggaaaacuaagccagga

SEQ ID NO: 224717 - RNA, 20 nt, Artificial Sequence
  Synthetic
cagggaaaacuaagccagga

SEQ ID NO: 224718 - RNA, 21 nt, Artificial Sequence
  Synthetic
ucagggaaaacuaagccagga

SEQ ID NO: 224719 - RNA, 22 nt, Artificial Sequence
  Synthetic
uucagggaaaacuaagccagga

SEQ ID NO: 224720 - RNA, 23 nt, Artificial Sequence
  Synthetic
cuucagggaaaacuaagccagga

SEQ ID NO: 224721 - RNA, 24 nt, Artificial Sequence
  Synthetic
ucuucagggaaaacuaagccagga

SEQ ID NO: 224722 - RNA, 18 nt, Artificial Sequence
  Synthetic
cacuuugggaggccagga

SEQ ID NO: 224723 - RNA, 19 nt, Artificial Sequence
  Synthetic
gcacuuugggaggccagga

SEQ ID NO: 224724 - RNA, 20 nt, Artificial Sequence
  Synthetic
agcacuuugggaggccagga

SEQ ID NO: 224725 - RNA, 21 nt, Artificial Sequence
  Synthetic
cagcacuuugggaggccagga

SEQ ID NO: 224726 - RNA, 22 nt, Artificial Sequence
  Synthetic
ccagcacuuugggaggccagga

SEQ ID NO: 224727 - RNA, 23 nt, Artificial Sequence
  Synthetic
cccagcacuuugggaggccagga

SEQ ID NO: 224728 - RNA, 24 nt, Artificial Sequence
  Synthetic
ucccagcacuuugggaggccagga

SEQ ID NO: 224729 - RNA, 18 nt, Artificial Sequence
  Synthetic
agggaaaggcugccagga

SEQ ID NO: 224730 - RNA, 19 nt, Artificial Sequence
  Synthetic
cagggaaaggcugccagga

SEQ ID NO: 224731 - RNA, 20 nt, Artificial Sequence
  Synthetic
acagggaaaggcugccagga

SEQ ID NO: 224732 - RNA, 21 nt, Artificial Sequence
  Synthetic
cacagggaaaggcugccagga

SEQ ID NO: 224733 - RNA, 22 nt, Artificial Sequence
  Synthetic
acacagggaaaggcugccagga

SEQ ID NO: 224734 - RNA, 23 nt, Artificial Sequence
  Synthetic
cacacagggaaaggcugccagga

SEQ ID NO: 224735 - RNA, 24 nt, Artificial Sequence
  Synthetic
ccacacagggaaaggcugccagga

SEQ ID NO: 224736 - RNA, 18 nt, Artificial Sequence
  Synthetic
ugacuucggcugccagga

SEQ ID NO: 224737 - RNA, 19 nt, Artificial Sequence
  Synthetic
uugacuucggcugccagga

SEQ ID NO: 224738 - RNA, 20 nt, Artificial Sequence
  Synthetic
auugacuucggcugccagga

SEQ ID NO: 224739 - RNA, 21 nt, Artificial Sequence
  Synthetic
gauugacuucggcugccagga

SEQ ID NO: 224740 - RNA, 22 nt, Artificial Sequence
  Synthetic
agauugacuucggcugccagga

SEQ ID NO: 224741 - RNA, 23 nt, Artificial Sequence
  Synthetic
uagauugacuucggcugccagga

SEQ ID NO: 224742 - RNA, 24 nt, Artificial Sequence
  Synthetic
guagauugacuucggcugccagga

SEQ ID NO: 224743 - RNA, 18 nt, Artificial Sequence
  Synthetic
guaauaucagugccagga

SEQ ID NO: 224744 - RNA, 19 nt, Artificial Sequence
  Synthetic
uguaauaucagugccagga

SEQ ID NO: 224745 - RNA, 20 nt, Artificial Sequence
  Synthetic
uuguaauaucagugccagga

SEQ ID NO: 224746 - RNA, 21 nt, Artificial Sequence
  Synthetic
cuuguaauaucagugccagga

SEQ ID NO: 224747 - RNA, 22 nt, Artificial Sequence
  Synthetic
acuuguaauaucagugccagga

SEQ ID NO: 224748 - RNA, 23 nt, Artificial Sequence
  Synthetic
cacuuguaauaucagugccagga

SEQ ID NO: 224749 - RNA, 24 nt, Artificial Sequence
  Synthetic
acacuuguaauaucagugccagga

SEQ ID NO: 224750 - RNA, 18 nt, Artificial Sequence
  Synthetic
gagggcuuagaagcagga

SEQ ID NO: 224751 - RNA, 19 nt, Artificial Sequence
  Synthetic
agagggcuuagaagcagga

SEQ ID NO: 224752 - RNA, 20 nt, Artificial Sequence
  Synthetic
gagagggcuuagaagcagga

SEQ ID NO: 224753 - RNA, 21 nt, Artificial Sequence
  Synthetic
agagagggcuuagaagcagga

SEQ ID NO: 224754 - RNA, 22 nt, Artificial Sequence
  Synthetic
aagagagggcuuagaagcagga

SEQ ID NO: 224755 - RNA, 23 nt, Artificial Sequence
  Synthetic
caagagagggcuuagaagcagga

SEQ ID NO: 224756 - RNA, 24 nt, Artificial Sequence
  Synthetic
ucaagagagggcuuagaagcagga

SEQ ID NO: 224757 - RNA, 18 nt, Artificial Sequence
  Synthetic
ggugacccggaagcagga

SEQ ID NO: 224758 - RNA, 19 nt, Artificial Sequence
  Synthetic
gggugacccggaagcagga

SEQ ID NO: 224759 - RNA, 20 nt, Artificial Sequence
  Synthetic
agggugacccggaagcagga

SEQ ID NO: 224760 - RNA, 21 nt, Artificial Sequence
  Synthetic
aagggugacccggaagcagga

SEQ ID NO: 224761 - RNA, 22 nt, Artificial Sequence
  Synthetic
uaagggugacccggaagcagga

SEQ ID NO: 224762 - RNA, 23 nt, Artificial Sequence
  Synthetic
guaagggugacccggaagcagga

SEQ ID NO: 224763 - RNA, 24 nt, Artificial Sequence
  Synthetic
aguaagggugacccggaagcagga

SEQ ID NO: 224764 - RNA, 18 nt, Artificial Sequence
  Synthetic
ggaguaaaggcagcagga

SEQ ID NO: 224765 - RNA, 19 nt, Artificial Sequence
  Synthetic
gggaguaaaggcagcagga

SEQ ID NO: 224766 - RNA, 20 nt, Artificial Sequence
  Synthetic
agggaguaaaggcagcagga

SEQ ID NO: 224767 - RNA, 21 nt, Artificial Sequence
  Synthetic
gagggaguaaaggcagcagga

SEQ ID NO: 224768 - RNA, 22 nt, Artificial Sequence
  Synthetic
ggagggaguaaaggcagcagga

SEQ ID NO: 224769 - RNA, 23 nt, Artificial Sequence
  Synthetic
gggagggaguaaaggcagcagga

SEQ ID NO: 224770 - RNA, 24 nt, Artificial Sequence
  Synthetic
ugggagggaguaaaggcagcagga

SEQ ID NO: 224771 - RNA, 18 nt, Artificial Sequence
  Synthetic
cuucacaaggcagcagga

SEQ ID NO: 224772 - RNA, 19 nt, Artificial Sequence
  Synthetic
ccuucacaaggcagcagga

SEQ ID NO: 224773 - RNA, 20 nt, Artificial Sequence
  Synthetic
accuucacaaggcagcagga

SEQ ID NO: 224774 - RNA, 21 nt, Artificial Sequence
  Synthetic
caccuucacaaggcagcagga

SEQ ID NO: 224775 - RNA, 22 nt, Artificial Sequence
  Synthetic
gcaccuucacaaggcagcagga

SEQ ID NO: 224776 - RNA, 23 nt, Artificial Sequence
  Synthetic
agcaccuucacaaggcagcagga

SEQ ID NO: 224777 - RNA, 24 nt, Artificial Sequence
  Synthetic
aagcaccuucacaaggcagcagga

SEQ ID NO: 224778 - RNA, 18 nt, Artificial Sequence
  Synthetic
cuucacauggcagcagga

SEQ ID NO: 224779 - RNA, 19 nt, Artificial Sequence
  Synthetic
ucuucacauggcagcagga

SEQ ID NO: 224780 - RNA, 20 nt, Artificial Sequence
  Synthetic
uucuucacauggcagcagga

SEQ ID NO: 224781 - RNA, 21 nt, Artificial Sequence
  Synthetic
cuucuucacauggcagcagga

SEQ ID NO: 224782 - RNA, 22 nt, Artificial Sequence
  Synthetic
ucuucuucacauggcagcagga

SEQ ID NO: 224783 - RNA, 23 nt, Artificial Sequence
  Synthetic
uucuucuucacauggcagcagga

SEQ ID NO: 224784 - RNA, 24 nt, Artificial Sequence
  Synthetic
cuucuucuucacauggcagcagga

SEQ ID NO: 224785 - RNA, 18 nt, Artificial Sequence
  Synthetic
gcaaguguuagagcagga

SEQ ID NO: 224786 - RNA, 19 nt, Artificial Sequence
  Synthetic
ggcaaguguuagagcagga

SEQ ID NO: 224787 - RNA, 20 nt, Artificial Sequence
  Synthetic
aggcaaguguuagagcagga

SEQ ID NO: 224788 - RNA, 21 nt, Artificial Sequence
  Synthetic
gaggcaaguguuagagcagga

SEQ ID NO: 224789 - RNA, 22 nt, Artificial Sequence
  Synthetic
ugaggcaaguguuagagcagga

SEQ ID NO: 224790 - RNA, 23 nt, Artificial Sequence
  Synthetic
cugaggcaaguguuagagcagga

SEQ ID NO: 224791 - RNA, 24 nt, Artificial Sequence
  Synthetic
acugaggcaaguguuagagcagga

SEQ ID NO: 224792 - RNA, 18 nt, Artificial Sequence
  Synthetic
aaaggaaagggagcagga

SEQ ID NO: 224793 - RNA, 19 nt, Artificial Sequence
  Synthetic
gaaaggaaagggagcagga

SEQ ID NO: 224794 - RNA, 20 nt, Artificial Sequence
  Synthetic
ggaaaggaaagggagcagga

SEQ ID NO: 224795 - RNA, 21 nt, Artificial Sequence
  Synthetic
aggaaaggaaagggagcagga

SEQ ID NO: 224796 - RNA, 22 nt, Artificial Sequence
  Synthetic
gaggaaaggaaagggagcagga

SEQ ID NO: 224797 - RNA, 23 nt, Artificial Sequence
  Synthetic
ggaggaaaggaaagggagcagga

SEQ ID NO: 224798 - RNA, 24 nt, Artificial Sequence
  Synthetic
cggaggaaaggaaagggagcagga

SEQ ID NO: 224799 - RNA, 18 nt, Artificial Sequence
  Synthetic
aaugguaaaugagcagga

SEQ ID NO: 224800 - RNA, 19 nt, Artificial Sequence
  Synthetic
aaaugguaaaugagcagga

SEQ ID NO: 224801 - RNA, 20 nt, Artificial Sequence
  Synthetic
caaaugguaaaugagcagga

SEQ ID NO: 224802 - RNA, 21 nt, Artificial Sequence
  Synthetic
gcaaaugguaaaugagcagga

SEQ ID NO: 224803 - RNA, 22 nt, Artificial Sequence
  Synthetic
agcaaaugguaaaugagcagga

SEQ ID NO: 224804 - RNA, 23 nt, Artificial Sequence
  Synthetic
uagcaaaugguaaaugagcagga

SEQ ID NO: 224805 - RNA, 24 nt, Artificial Sequence
  Synthetic
uuagcaaaugguaaaugagcagga

SEQ ID NO: 224806 - RNA, 18 nt, Artificial Sequence
  Synthetic
aaggagaugauagcagga

SEQ ID NO: 224807 - RNA, 19 nt, Artificial Sequence
  Synthetic
gaaggagaugauagcagga

SEQ ID NO: 224808 - RNA, 20 nt, Artificial Sequence
  Synthetic
agaaggagaugauagcagga

SEQ ID NO: 224809 - RNA, 21 nt, Artificial Sequence
  Synthetic
uagaaggagaugauagcagga

SEQ ID NO: 224810 - RNA, 22 nt, Artificial Sequence
  Synthetic
uuagaaggagaugauagcagga

SEQ ID NO: 224811 - RNA, 23 nt, Artificial Sequence
  Synthetic
cuuagaaggagaugauagcagga

SEQ ID NO: 224812 - RNA, 24 nt, Artificial Sequence
  Synthetic
gcuuagaaggagaugauagcagga

SEQ ID NO: 224813 - RNA, 18 nt, Artificial Sequence
  Synthetic
ucuucucugcuagcagga

SEQ ID NO: 224814 - RNA, 19 nt, Artificial Sequence
  Synthetic
aucuucucugcuagcagga

SEQ ID NO: 224815 - RNA, 20 nt, Artificial Sequence
  Synthetic
uaucuucucugcuagcagga

SEQ ID NO: 224816 - RNA, 21 nt, Artificial Sequence
  Synthetic
auaucuucucugcuagcagga

SEQ ID NO: 224817 - RNA, 22 nt, Artificial Sequence
  Synthetic
cauaucuucucugcuagcagga

SEQ ID NO: 224818 - RNA, 23 nt, Artificial Sequence
  Synthetic
ucauaucuucucugcuagcagga

SEQ ID NO: 224819 - RNA, 24 nt, Artificial Sequence
  Synthetic
cucauaucuucucugcuagcagga

SEQ ID NO: 224820 - RNA, 18 nt, Artificial Sequence
  Synthetic
cuucacaaggccgcagga

SEQ ID NO: 224821 - RNA, 19 nt, Artificial Sequence
  Synthetic
ucuucacaaggccgcagga

SEQ ID NO: 224822 - RNA, 20 nt, Artificial Sequence
  Synthetic
uucuucacaaggccgcagga

SEQ ID NO: 224823 - RNA, 21 nt, Artificial Sequence
  Synthetic
cuucuucacaaggccgcagga

SEQ ID NO: 224824 - RNA, 22 nt, Artificial Sequence
  Synthetic
ucuucuucacaaggccgcagga

SEQ ID NO: 224825 - RNA, 23 nt, Artificial Sequence
  Synthetic
aucuucuucacaaggccgcagga

SEQ ID NO: 224826 - RNA, 24 nt, Artificial Sequence
  Synthetic
caucuucuucacaaggccgcagga

SEQ ID NO: 224827 - RNA, 18 nt, Artificial Sequence
  Synthetic
gaccugugugaggcagga

SEQ ID NO: 224828 - RNA, 19 nt, Artificial Sequence
  Synthetic
ugaccugugugaggcagga

SEQ ID NO: 224829 - RNA, 20 nt, Artificial Sequence
  Synthetic
cugaccugugugaggcagga

SEQ ID NO: 224830 - RNA, 21 nt, Artificial Sequence
  Synthetic
acugaccugugugaggcagga

SEQ ID NO: 224831 - RNA, 22 nt, Artificial Sequence
  Synthetic
aacugaccugugugaggcagga

SEQ ID NO: 224832 - RNA, 23 nt, Artificial Sequence
  Synthetic
caacugaccugugugaggcagga

SEQ ID NO: 224833 - RNA, 24 nt, Artificial Sequence
  Synthetic
acaacugaccugugugaggcagga

SEQ ID NO: 224834 - RNA, 18 nt, Artificial Sequence
  Synthetic
uccaaaagccuggcagga

SEQ ID NO: 224835 - RNA, 19 nt, Artificial Sequence
  Synthetic
auccaaaagccuggcagga

SEQ ID NO: 224836 - RNA, 20 nt, Artificial Sequence
  Synthetic
aauccaaaagccuggcagga

SEQ ID NO: 224837 - RNA, 21 nt, Artificial Sequence
  Synthetic
aaauccaaaagccuggcagga

SEQ ID NO: 224838 - RNA, 22 nt, Artificial Sequence
  Synthetic
aaaauccaaaagccuggcagga

SEQ ID NO: 224839 - RNA, 23 nt, Artificial Sequence
  Synthetic
uaaaauccaaaagccuggcagga

SEQ ID NO: 224840 - RNA, 24 nt, Artificial Sequence
  Synthetic
guaaaauccaaaagccuggcagga

SEQ ID NO: 224841 - RNA, 18 nt, Artificial Sequence
  Synthetic
cuucacaagguggcagga

SEQ ID NO: 224842 - RNA, 19 nt, Artificial Sequence
  Synthetic
ucuucacaagguggcagga

SEQ ID NO: 224843 - RNA, 20 nt, Artificial Sequence
  Synthetic
uucuucacaagguggcagga

SEQ ID NO: 224844 - RNA, 21 nt, Artificial Sequence
  Synthetic
cuucuucacaagguggcagga

SEQ ID NO: 224845 - RNA, 22 nt, Artificial Sequence
  Synthetic
ccuucuucacaagguggcagga

SEQ ID NO: 224846 - RNA, 23 nt, Artificial Sequence
  Synthetic
accuucuucacaagguggcagga

SEQ ID NO: 224847 - RNA, 24 nt, Artificial Sequence
  Synthetic
caccuucuucacaagguggcagga

SEQ ID NO: 224848 - RNA, 18 nt, Artificial Sequence
  Synthetic
gaccaucuagcugcagga

SEQ ID NO: 224849 - RNA, 19 nt, Artificial Sequence
  Synthetic
ggaccaucuagcugcagga

SEQ ID NO: 224850 - RNA, 20 nt, Artificial Sequence
  Synthetic
gggaccaucuagcugcagga

SEQ ID NO: 224851 - RNA, 21 nt, Artificial Sequence
  Synthetic
ugggaccaucuagcugcagga

SEQ ID NO: 224852 - RNA, 22 nt, Artificial Sequence
  Synthetic
augggaccaucuagcugcagga

SEQ ID NO: 224853 - RNA, 23 nt, Artificial Sequence
  Synthetic
gaugggaccaucuagcugcagga

SEQ ID NO: 224854 - RNA, 24 nt, Artificial Sequence
  Synthetic
agaugggaccaucuagcugcagga

SEQ ID NO: 224855 - RNA, 18 nt, Artificial Sequence
  Synthetic
auccuuuguagugcagga

SEQ ID NO: 224856 - RNA, 19 nt, Artificial Sequence
  Synthetic
aauccuuuguagugcagga

SEQ ID NO: 224857 - RNA, 20 nt, Artificial Sequence
  Synthetic
gaauccuuuguagugcagga

SEQ ID NO: 224858 - RNA, 21 nt, Artificial Sequence
  Synthetic
agaauccuuuguagugcagga

SEQ ID NO: 224859 - RNA, 22 nt, Artificial Sequence
  Synthetic
aagaauccuuuguagugcagga

SEQ ID NO: 224860 - RNA, 23 nt, Artificial Sequence
  Synthetic
gaagaauccuuuguagugcagga

SEQ ID NO: 224861 - RNA, 24 nt, Artificial Sequence
  Synthetic
cgaagaauccuuuguagugcagga

SEQ ID NO: 224862 - RNA, 18 nt, Artificial Sequence
  Synthetic
aauagaaggcaaucagga

SEQ ID NO: 224863 - RNA, 19 nt, Artificial Sequence
  Synthetic
gaauagaaggcaaucagga

SEQ ID NO: 224864 - RNA, 20 nt, Artificial Sequence
  Synthetic
agaauagaaggcaaucagga

SEQ ID NO: 224865 - RNA, 21 nt, Artificial Sequence
  Synthetic
uagaauagaaggcaaucagga

SEQ ID NO: 224866 - RNA, 22 nt, Artificial Sequence
  Synthetic
cuagaauagaaggcaaucagga

SEQ ID NO: 224867 - RNA, 23 nt, Artificial Sequence
  Synthetic
ucuagaauagaaggcaaucagga

SEQ ID NO: 224868 - RNA, 24 nt, Artificial Sequence
  Synthetic
cucuagaauagaaggcaaucagga

SEQ ID NO: 224869 - RNA, 18 nt, Artificial Sequence
  Synthetic
aaguacuagauaucagga

SEQ ID NO: 224870 - RNA, 19 nt, Artificial Sequence
  Synthetic
aaaguacuagauaucagga

SEQ ID NO: 224871 - RNA, 20 nt, Artificial Sequence
  Synthetic
gaaaguacuagauaucagga

SEQ ID NO: 224872 - RNA, 21 nt, Artificial Sequence
  Synthetic
agaaaguacuagauaucagga

SEQ ID NO: 224873 - RNA, 22 nt, Artificial Sequence
  Synthetic
gagaaaguacuagauaucagga

SEQ ID NO: 224874 - RNA, 23 nt, Artificial Sequence
  Synthetic
ugagaaaguacuagauaucagga

SEQ ID NO: 224875 - RNA, 24 nt, Artificial Sequence
  Synthetic
gugagaaaguacuagauaucagga

SEQ ID NO: 224876 - RNA, 18 nt, Artificial Sequence
  Synthetic
ggugaguggguaucagga

SEQ ID NO: 224877 - RNA, 19 nt, Artificial Sequence
  Synthetic
gggugaguggguaucagga

SEQ ID NO: 224878 - RNA, 20 nt, Artificial Sequence
  Synthetic
ggggugaguggguaucagga

SEQ ID NO: 224879 - RNA, 21 nt, Artificial Sequence
  Synthetic
gggggugaguggguaucagga

SEQ ID NO: 224880 - RNA, 22 nt, Artificial Sequence
  Synthetic
ugggggugaguggguaucagga

SEQ ID NO: 224881 - RNA, 23 nt, Artificial Sequence
  Synthetic
augggggugaguggguaucagga

SEQ ID NO: 224882 - RNA, 24 nt, Artificial Sequence
  Synthetic
aaugggggugaguggguaucagga

SEQ ID NO: 224883 - RNA, 18 nt, Artificial Sequence
  Synthetic
cuuugcuaacacucagga

SEQ ID NO: 224884 - RNA, 19 nt, Artificial Sequence
  Synthetic
acuuugcuaacacucagga

SEQ ID NO: 224885 - RNA, 20 nt, Artificial Sequence
  Synthetic
cacuuugcuaacacucagga

SEQ ID NO: 224886 - RNA, 21 nt, Artificial Sequence
  Synthetic
ucacuuugcuaacacucagga

SEQ ID NO: 224887 - RNA, 22 nt, Artificial Sequence
  Synthetic
aucacuuugcuaacacucagga

SEQ ID NO: 224888 - RNA, 23 nt, Artificial Sequence
  Synthetic
caucacuuugcuaacacucagga

SEQ ID NO: 224889 - RNA, 24 nt, Artificial Sequence
  Synthetic
ccaucacuuugcuaacacucagga

SEQ ID NO: 224890 - RNA, 18 nt, Artificial Sequence
  Synthetic
ggcacuacauacucagga

SEQ ID NO: 224891 - RNA, 19 nt, Artificial Sequence
  Synthetic
aggcacuacauacucagga

SEQ ID NO: 224892 - RNA, 20 nt, Artificial Sequence
  Synthetic
aaggcacuacauacucagga

SEQ ID NO: 224893 - RNA, 21 nt, Artificial Sequence
  Synthetic
caaggcacuacauacucagga

SEQ ID NO: 224894 - RNA, 22 nt, Artificial Sequence
  Synthetic
acaaggcacuacauacucagga

SEQ ID NO: 224895 - RNA, 23 nt, Artificial Sequence
  Synthetic
uacaaggcacuacauacucagga

SEQ ID NO: 224896 - RNA, 24 nt, Artificial Sequence
  Synthetic
uuacaaggcacuacauacucagga

SEQ ID NO: 224897 - RNA, 18 nt, Artificial Sequence
  Synthetic
ggucacacggccucagga

SEQ ID NO: 224898 - RNA, 19 nt, Artificial Sequence
  Synthetic
aggucacacggccucagga

SEQ ID NO: 224899 - RNA, 20 nt, Artificial Sequence
  Synthetic
caggucacacggccucagga

SEQ ID NO: 224900 - RNA, 21 nt, Artificial Sequence
  Synthetic
ucaggucacacggccucagga

SEQ ID NO: 224901 - RNA, 22 nt, Artificial Sequence
  Synthetic
aucaggucacacggccucagga

SEQ ID NO: 224902 - RNA, 23 nt, Artificial Sequence
  Synthetic
aaucaggucacacggccucagga

SEQ ID NO: 224903 - RNA, 24 nt, Artificial Sequence
  Synthetic
gaaucaggucacacggccucagga

SEQ ID NO: 224904 - RNA, 18 nt, Artificial Sequence
  Synthetic
cacagccaagagucagga

SEQ ID NO: 224905 - RNA, 19 nt, Artificial Sequence
  Synthetic
acacagccaagagucagga

SEQ ID NO: 224906 - RNA, 20 nt, Artificial Sequence
  Synthetic
aacacagccaagagucagga

SEQ ID NO: 224907 - RNA, 21 nt, Artificial Sequence
  Synthetic
caacacagccaagagucagga

SEQ ID NO: 224908 - RNA, 22 nt, Artificial Sequence
  Synthetic
gcaacacagccaagagucagga

SEQ ID NO: 224909 - RNA, 23 nt, Artificial Sequence
  Synthetic
ugcaacacagccaagagucagga

SEQ ID NO: 224910 - RNA, 24 nt, Artificial Sequence
  Synthetic
cugcaacacagccaagagucagga

SEQ ID NO: 224911 - RNA, 18 nt, Artificial Sequence
  Synthetic
ugagcauaugagucagga

SEQ ID NO: 224912 - RNA, 19 nt, Artificial Sequence
  Synthetic
cugagcauaugagucagga

SEQ ID NO: 224913 - RNA, 20 nt, Artificial Sequence
  Synthetic
acugagcauaugagucagga

SEQ ID NO: 224914 - RNA, 21 nt, Artificial Sequence
  Synthetic
aacugagcauaugagucagga

SEQ ID NO: 224915 - RNA, 22 nt, Artificial Sequence
  Synthetic
uaacugagcauaugagucagga

SEQ ID NO: 224916 - RNA, 23 nt, Artificial Sequence
  Synthetic
guaacugagcauaugagucagga

SEQ ID NO: 224917 - RNA, 24 nt, Artificial Sequence
  Synthetic
gguaacugagcauaugagucagga

SEQ ID NO: 224918 - RNA, 18 nt, Artificial Sequence
  Synthetic
gaaggcuguuagucagga

SEQ ID NO: 224919 - RNA, 19 nt, Artificial Sequence
  Synthetic
ggaaggcuguuagucagga

SEQ ID NO: 224920 - RNA, 20 nt, Artificial Sequence
  Synthetic
uggaaggcuguuagucagga

SEQ ID NO: 224921 - RNA, 21 nt, Artificial Sequence
  Synthetic
auggaaggcuguuagucagga

SEQ ID NO: 224922 - RNA, 22 nt, Artificial Sequence
  Synthetic
cauggaaggcuguuagucagga

SEQ ID NO: 224923 - RNA, 23 nt, Artificial Sequence
  Synthetic
gcauggaaggcuguuagucagga

SEQ ID NO: 224924 - RNA, 24 nt, Artificial Sequence
  Synthetic
ugcauggaaggcuguuagucagga

SEQ ID NO: 224925 - RNA, 18 nt, Artificial Sequence
  Synthetic
aagaaacuuuagucagga

SEQ ID NO: 224926 - RNA, 19 nt, Artificial Sequence
  Synthetic
caagaaacuuuagucagga

SEQ ID NO: 224927 - RNA, 20 nt, Artificial Sequence
  Synthetic
gcaagaaacuuuagucagga

SEQ ID NO: 224928 - RNA, 21 nt, Artificial Sequence
  Synthetic
ugcaagaaacuuuagucagga

SEQ ID NO: 224929 - RNA, 22 nt, Artificial Sequence
  Synthetic
augcaagaaacuuuagucagga

SEQ ID NO: 224930 - RNA, 23 nt, Artificial Sequence
  Synthetic
gaugcaagaaacuuuagucagga

SEQ ID NO: 224931 - RNA, 24 nt, Artificial Sequence
  Synthetic
ggaugcaagaaacuuuagucagga

SEQ ID NO: 224932 - RNA, 18 nt, Artificial Sequence
  Synthetic
uagguucugaugucagga

SEQ ID NO: 224933 - RNA, 19 nt, Artificial Sequence
  Synthetic
uuagguucugaugucagga

SEQ ID NO: 224934 - RNA, 20 nt, Artificial Sequence
  Synthetic
uuuagguucugaugucagga

SEQ ID NO: 224935 - RNA, 21 nt, Artificial Sequence
  Synthetic
guuuagguucugaugucagga

SEQ ID NO: 224936 - RNA, 22 nt, Artificial Sequence
  Synthetic
uguuuagguucugaugucagga

SEQ ID NO: 224937 - RNA, 23 nt, Artificial Sequence
  Synthetic
guguuuagguucugaugucagga

SEQ ID NO: 224938 - RNA, 24 nt, Artificial Sequence
  Synthetic
aguguuuagguucugaugucagga

SEQ ID NO: 224939 - RNA, 18 nt, Artificial Sequence
  Synthetic
aagugaaguaauucagga

SEQ ID NO: 224940 - RNA, 19 nt, Artificial Sequence
  Synthetic
uaagugaaguaauucagga

SEQ ID NO: 224941 - RNA, 20 nt, Artificial Sequence
  Synthetic
cuaagugaaguaauucagga

SEQ ID NO: 224942 - RNA, 21 nt, Artificial Sequence
  Synthetic
ucuaagugaaguaauucagga

SEQ ID NO: 224943 - RNA, 22 nt, Artificial Sequence
  Synthetic
uucuaagugaaguaauucagga

SEQ ID NO: 224944 - RNA, 23 nt, Artificial Sequence
  Synthetic
auucuaagugaaguaauucagga

SEQ ID NO: 224945 - RNA, 24 nt, Artificial Sequence
  Synthetic
uauucuaagugaaguaauucagga

SEQ ID NO: 224946 - RNA, 18 nt, Artificial Sequence
  Synthetic
auugacauuuauucagga

SEQ ID NO: 224947 - RNA, 19 nt, Artificial Sequence
  Synthetic
uauugacauuuauucagga

SEQ ID NO: 224948 - RNA, 20 nt, Artificial Sequence
  Synthetic
cuauugacauuuauucagga

SEQ ID NO: 224949 - RNA, 21 nt, Artificial Sequence
  Synthetic
ccuauugacauuuauucagga

SEQ ID NO: 224950 - RNA, 22 nt, Artificial Sequence
  Synthetic
uccuauugacauuuauucagga

SEQ ID NO: 224951 - RNA, 23 nt, Artificial Sequence
  Synthetic
uuccuauugacauuuauucagga

SEQ ID NO: 224952 - RNA, 24 nt, Artificial Sequence
  Synthetic
uuuccuauugacauuuauucagga

SEQ ID NO: 224953 - RNA, 18 nt, Artificial Sequence
  Synthetic
aggcaauaucuuucagga

SEQ ID NO: 224954 - RNA, 19 nt, Artificial Sequence
  Synthetic
uaggcaauaucuuucagga

SEQ ID NO: 224955 - RNA, 20 nt, Artificial Sequence
  Synthetic
cuaggcaauaucuuucagga

SEQ ID NO: 224956 - RNA, 21 nt, Artificial Sequence
  Synthetic
ucuaggcaauaucuuucagga

SEQ ID NO: 224957 - RNA, 22 nt, Artificial Sequence
  Synthetic
gucuaggcaauaucuuucagga

SEQ ID NO: 224958 - RNA, 23 nt, Artificial Sequence
  Synthetic
agucuaggcaauaucuuucagga

SEQ ID NO: 224959 - RNA, 24 nt, Artificial Sequence
  Synthetic
cagucuaggcaauaucuuucagga

SEQ ID NO: 224960 - RNA, 18 nt, Artificial Sequence
  Synthetic
aaagaggacaaaagagga

SEQ ID NO: 224961 - RNA, 19 nt, Artificial Sequence
  Synthetic
uaaagaggacaaaagagga

SEQ ID NO: 224962 - RNA, 20 nt, Artificial Sequence
  Synthetic
uuaaagaggacaaaagagga

SEQ ID NO: 224963 - RNA, 21 nt, Artificial Sequence
  Synthetic
auuaaagaggacaaaagagga

SEQ ID NO: 224964 - RNA, 22 nt, Artificial Sequence
  Synthetic
uauuaaagaggacaaaagagga

SEQ ID NO: 224965 - RNA, 23 nt, Artificial Sequence
  Synthetic
auauuaaagaggacaaaagagga

SEQ ID NO: 224966 - RNA, 24 nt, Artificial Sequence
  Synthetic
aauauuaaagaggacaaaagagga

SEQ ID NO: 224967 - RNA, 18 nt, Artificial Sequence
  Synthetic
gugccaauagaaagagga

SEQ ID NO: 224968 - RNA, 19 nt, Artificial Sequence
  Synthetic
agugccaauagaaagagga

SEQ ID NO: 224969 - RNA, 20 nt, Artificial Sequence
  Synthetic
cagugccaauagaaagagga

SEQ ID NO: 224970 - RNA, 21 nt, Artificial Sequence
  Synthetic
gcagugccaauagaaagagga

SEQ ID NO: 224971 - RNA, 22 nt, Artificial Sequence
  Synthetic
ugcagugccaauagaaagagga

SEQ ID NO: 224972 - RNA, 23 nt, Artificial Sequence
  Synthetic
uugcagugccaauagaaagagga

SEQ ID NO: 224973 - RNA, 24 nt, Artificial Sequence
  Synthetic
uuugcagugccaauagaaagagga

SEQ ID NO: 224974 - RNA, 18 nt, Artificial Sequence
  Synthetic
uuaaacgaguaaagagga

SEQ ID NO: 224975 - RNA, 19 nt, Artificial Sequence
  Synthetic
auuaaacgaguaaagagga

SEQ ID NO: 224976 - RNA, 20 nt, Artificial Sequence
  Synthetic
aauuaaacgaguaaagagga

SEQ ID NO: 224977 - RNA, 21 nt, Artificial Sequence
  Synthetic
uaauuaaacgaguaaagagga

SEQ ID NO: 224978 - RNA, 22 nt, Artificial Sequence
  Synthetic
auaauuaaacgaguaaagagga

SEQ ID NO: 224979 - RNA, 23 nt, Artificial Sequence
  Synthetic
cauaauuaaacgaguaaagagga

SEQ ID NO: 224980 - RNA, 24 nt, Artificial Sequence
  Synthetic
gcauaauuaaacgaguaaagagga

SEQ ID NO: 224981 - RNA, 18 nt, Artificial Sequence
  Synthetic
agaguuacuuuaagagga

SEQ ID NO: 224982 - RNA, 19 nt, Artificial Sequence
  Synthetic
uagaguuacuuuaagagga

SEQ ID NO: 224983 - RNA, 20 nt, Artificial Sequence
  Synthetic
uuagaguuacuuuaagagga

SEQ ID NO: 224984 - RNA, 21 nt, Artificial Sequence
  Synthetic
uuuagaguuacuuuaagagga

SEQ ID NO: 224985 - RNA, 22 nt, Artificial Sequence
  Synthetic
uuuuagaguuacuuuaagagga

SEQ ID NO: 224986 - RNA, 23 nt, Artificial Sequence
  Synthetic
auuuuagaguuacuuuaagagga

SEQ ID NO: 224987 - RNA, 24 nt, Artificial Sequence
  Synthetic
uauuuuagaguuacuuuaagagga

SEQ ID NO: 224988 - RNA, 18 nt, Artificial Sequence
  Synthetic
cuaaccguauccagagga

SEQ ID NO: 224989 - RNA, 19 nt, Artificial Sequence
  Synthetic
gcuaaccguauccagagga

SEQ ID NO: 224990 - RNA, 20 nt, Artificial Sequence
  Synthetic
ggcuaaccguauccagagga

SEQ ID NO: 224991 - RNA, 21 nt, Artificial Sequence
  Synthetic
uggcuaaccguauccagagga

SEQ ID NO: 224992 - RNA, 22 nt, Artificial Sequence
  Synthetic
cuggcuaaccguauccagagga

SEQ ID NO: 224993 - RNA, 23 nt, Artificial Sequence
  Synthetic
gcuggcuaaccguauccagagga

SEQ ID NO: 224994 - RNA, 24 nt, Artificial Sequence
  Synthetic
agcuggcuaaccguauccagagga

SEQ ID NO: 224995 - RNA, 18 nt, Artificial Sequence
  Synthetic
gaugaagcuuccagagga

SEQ ID NO: 224996 - RNA, 19 nt, Artificial Sequence
  Synthetic
ggaugaagcuuccagagga

SEQ ID NO: 224997 - RNA, 20 nt, Artificial Sequence
  Synthetic
gggaugaagcuuccagagga

SEQ ID NO: 224998 - RNA, 21 nt, Artificial Sequence
  Synthetic
ugggaugaagcuuccagagga

SEQ ID NO: 224999 - RNA, 22 nt, Artificial Sequence
  Synthetic
cugggaugaagcuuccagagga

SEQ ID NO: 225000 - RNA, 23 nt, Artificial Sequence
  Synthetic
ucugggaugaagcuuccagagga

SEQ ID NO: 225001 - RNA, 24 nt, Artificial Sequence
  Synthetic
cucugggaugaagcuuccagagga

SEQ ID NO: 225002 - RNA, 18 nt, Artificial Sequence
  Synthetic
ucucuuuuucucagagga

SEQ ID NO: 225003 - RNA, 19 nt, Artificial Sequence
  Synthetic
cucucuuuuucucagagga

SEQ ID NO: 225004 - RNA, 20 nt, Artificial Sequence
  Synthetic
ccucucuuuuucucagagga

SEQ ID NO: 225005 - RNA, 21 nt, Artificial Sequence
  Synthetic
accucucuuuuucucagagga

SEQ ID NO: 225006 - RNA, 22 nt, Artificial Sequence
  Synthetic
aaccucucuuuuucucagagga

SEQ ID NO: 225007 - RNA, 23 nt, Artificial Sequence
  Synthetic
aaaccucucuuuuucucagagga

SEQ ID NO: 225008 - RNA, 24 nt, Artificial Sequence
  Synthetic
aaaaccucucuuuuucucagagga

SEQ ID NO: 225009 - RNA, 18 nt, Artificial Sequence
  Synthetic
agauuaugaaagagagga

SEQ ID NO: 225010 - RNA, 19 nt, Artificial Sequence
  Synthetic
gagauuaugaaagagagga

SEQ ID NO: 225011 - RNA, 20 nt, Artificial Sequence
  Synthetic
agagauuaugaaagagagga

SEQ ID NO: 225012 - RNA, 21 nt, Artificial Sequence
  Synthetic
cagagauuaugaaagagagga

SEQ ID NO: 225013 - RNA, 22 nt, Artificial Sequence
  Synthetic
ucagagauuaugaaagagagga

SEQ ID NO: 225014 - RNA, 23 nt, Artificial Sequence
  Synthetic
cucagagauuaugaaagagagga

SEQ ID NO: 225015 - RNA, 24 nt, Artificial Sequence
  Synthetic
acucagagauuaugaaagagagga

SEQ ID NO: 225016 - RNA, 18 nt, Artificial Sequence
  Synthetic
aaaagaaggaagagagga

SEQ ID NO: 225017 - RNA, 19 nt, Artificial Sequence
  Synthetic
aaaaagaaggaagagagga

SEQ ID NO: 225018 - RNA, 20 nt, Artificial Sequence
  Synthetic
aaaaaagaaggaagagagga

SEQ ID NO: 225019 - RNA, 21 nt, Artificial Sequence
  Synthetic
aaaaaaagaaggaagagagga

SEQ ID NO: 225020 - RNA, 22 nt, Artificial Sequence
  Synthetic
gaaaaaaagaaggaagagagga

SEQ ID NO: 225021 - RNA, 23 nt, Artificial Sequence
  Synthetic
ggaaaaaaagaaggaagagagga

SEQ ID NO: 225022 - RNA, 24 nt, Artificial Sequence
  Synthetic
gggaaaaaaagaaggaagagagga

SEQ ID NO: 225023 - RNA, 18 nt, Artificial Sequence
  Synthetic
cuagagacagagagagga

SEQ ID NO: 225024 - RNA, 19 nt, Artificial Sequence
  Synthetic
gcuagagacagagagagga

SEQ ID NO: 225025 - RNA, 20 nt, Artificial Sequence
  Synthetic
agcuagagacagagagagga

SEQ ID NO: 225026 - RNA, 21 nt, Artificial Sequence
  Synthetic
uagcuagagacagagagagga

SEQ ID NO: 225027 - RNA, 22 nt, Artificial Sequence
  Synthetic
cuagcuagagacagagagagga

SEQ ID NO: 225028 - RNA, 23 nt, Artificial Sequence
  Synthetic
gcuagcuagagacagagagagga

SEQ ID NO: 225029 - RNA, 24 nt, Artificial Sequence
  Synthetic
agcuagcuagagacagagagagga

SEQ ID NO: 225030 - RNA, 18 nt, Artificial Sequence
  Synthetic
agagacagagagagagga

SEQ ID NO: 225031 - RNA, 19 nt, Artificial Sequence
  Synthetic
gagagacagagagagagga

SEQ ID NO: 225032 - RNA, 20 nt, Artificial Sequence
  Synthetic
agagagacagagagagagga

SEQ ID NO: 225033 - RNA, 21 nt, Artificial Sequence
  Synthetic
gagagagacagagagagagga

SEQ ID NO: 225034 - RNA, 22 nt, Artificial Sequence
  Synthetic
agagagagacagagagagagga

SEQ ID NO: 225035 - RNA, 23 nt, Artificial Sequence
  Synthetic
gagagagagacagagagagagga

SEQ ID NO: 225036 - RNA, 24 nt, Artificial Sequence
  Synthetic
agagagagagacagagagagagga

SEQ ID NO: 225037 - RNA, 18 nt, Artificial Sequence
  Synthetic
gagguugaauagagagga

SEQ ID NO: 225038 - RNA, 19 nt, Artificial Sequence
  Synthetic
ugagguugaauagagagga

SEQ ID NO: 225039 - RNA, 20 nt, Artificial Sequence
  Synthetic
augagguugaauagagagga

SEQ ID NO: 225040 - RNA, 21 nt, Artificial Sequence
  Synthetic
gaugagguugaauagagagga

SEQ ID NO: 225041 - RNA, 22 nt, Artificial Sequence
  Synthetic
ugaugagguugaauagagagga

SEQ ID NO: 225042 - RNA, 23 nt, Artificial Sequence
  Synthetic
uugaugagguugaauagagagga

SEQ ID NO: 225043 - RNA, 24 nt, Artificial Sequence
  Synthetic
auugaugagguugaauagagagga

SEQ ID NO: 225044 - RNA, 18 nt, Artificial Sequence
  Synthetic
ggguggaggaggagagga

SEQ ID NO: 225045 - RNA, 19 nt, Artificial Sequence
  Synthetic
uggguggaggaggagagga

SEQ ID NO: 225046 - RNA, 20 nt, Artificial Sequence
  Synthetic
guggguggaggaggagagga

SEQ ID NO: 225047 - RNA, 21 nt, Artificial Sequence
  Synthetic
uguggguggaggaggagagga

SEQ ID NO: 225048 - RNA, 22 nt, Artificial Sequence
  Synthetic
uuguggguggaggaggagagga

SEQ ID NO: 225049 - RNA, 23 nt, Artificial Sequence
  Synthetic
guuguggguggaggaggagagga

SEQ ID NO: 225050 - RNA, 24 nt, Artificial Sequence
  Synthetic
uguuguggguggaggaggagagga

SEQ ID NO: 225051 - RNA, 18 nt, Artificial Sequence
  Synthetic
aacaggugcuggagagga

SEQ ID NO: 225052 - RNA, 19 nt, Artificial Sequence
  Synthetic
caacaggugcuggagagga

SEQ ID NO: 225053 - RNA, 20 nt, Artificial Sequence
  Synthetic
acaacaggugcuggagagga

SEQ ID NO: 225054 - RNA, 21 nt, Artificial Sequence
  Synthetic
aacaacaggugcuggagagga

SEQ ID NO: 225055 - RNA, 22 nt, Artificial Sequence
  Synthetic
aaacaacaggugcuggagagga

SEQ ID NO: 225056 - RNA, 23 nt, Artificial Sequence
  Synthetic
gaaacaacaggugcuggagagga

SEQ ID NO: 225057 - RNA, 24 nt, Artificial Sequence
  Synthetic
ggaaacaacaggugcuggagagga

SEQ ID NO: 225058 - RNA, 18 nt, Artificial Sequence
  Synthetic
aaaaucaaguggagagga

SEQ ID NO: 225059 - RNA, 19 nt, Artificial Sequence
  Synthetic
uaaaaucaaguggagagga

SEQ ID NO: 225060 - RNA, 20 nt, Artificial Sequence
  Synthetic
guaaaaucaaguggagagga

SEQ ID NO: 225061 - RNA, 21 nt, Artificial Sequence
  Synthetic
cguaaaaucaaguggagagga

SEQ ID NO: 225062 - RNA, 22 nt, Artificial Sequence
  Synthetic
acguaaaaucaaguggagagga

SEQ ID NO: 225063 - RNA, 23 nt, Artificial Sequence
  Synthetic
cacguaaaaucaaguggagagga

SEQ ID NO: 225064 - RNA, 24 nt, Artificial Sequence
  Synthetic
gcacguaaaaucaaguggagagga

SEQ ID NO: 225065 - RNA, 18 nt, Artificial Sequence
  Synthetic
cugaaugaagguagagga

SEQ ID NO: 225066 - RNA, 19 nt, Artificial Sequence
  Synthetic
ccugaaugaagguagagga

SEQ ID NO: 225067 - RNA, 20 nt, Artificial Sequence
  Synthetic
uccugaaugaagguagagga

SEQ ID NO: 225068 - RNA, 21 nt, Artificial Sequence
  Synthetic
uuccugaaugaagguagagga

SEQ ID NO: 225069 - RNA, 22 nt, Artificial Sequence
  Synthetic
auuccugaaugaagguagagga

SEQ ID NO: 225070 - RNA, 23 nt, Artificial Sequence
  Synthetic
aauuccugaaugaagguagagga

SEQ ID NO: 225071 - RNA, 24 nt, Artificial Sequence
  Synthetic
aaauuccugaaugaagguagagga

SEQ ID NO: 225072 - RNA, 18 nt, Artificial Sequence
  Synthetic
gauguuccauaccgagga

SEQ ID NO: 225073 - RNA, 19 nt, Artificial Sequence
  Synthetic
ugauguuccauaccgagga

SEQ ID NO: 225074 - RNA, 20 nt, Artificial Sequence
  Synthetic
gugauguuccauaccgagga

SEQ ID NO: 225075 - RNA, 21 nt, Artificial Sequence
  Synthetic
ugugauguuccauaccgagga

SEQ ID NO: 225076 - RNA, 22 nt, Artificial Sequence
  Synthetic
gugugauguuccauaccgagga

SEQ ID NO: 225077 - RNA, 23 nt, Artificial Sequence
  Synthetic
ggugugauguuccauaccgagga

SEQ ID NO: 225078 - RNA, 24 nt, Artificial Sequence
  Synthetic
aggugugauguuccauaccgagga

SEQ ID NO: 225079 - RNA, 18 nt, Artificial Sequence
  Synthetic
gagaaucucccccgagga

SEQ ID NO: 225080 - RNA, 19 nt, Artificial Sequence
  Synthetic
agagaaucucccccgagga

SEQ ID NO: 225081 - RNA, 20 nt, Artificial Sequence
  Synthetic
gagagaaucucccccgagga

SEQ ID NO: 225082 - RNA, 21 nt, Artificial Sequence
  Synthetic
agagagaaucucccccgagga

SEQ ID NO: 225083 - RNA, 22 nt, Artificial Sequence
  Synthetic
gagagagaaucucccccgagga

SEQ ID NO: 225084 - RNA, 23 nt, Artificial Sequence
  Synthetic
ugagagagaaucucccccgagga

SEQ ID NO: 225085 - RNA, 24 nt, Artificial Sequence
  Synthetic
augagagagaaucucccccgagga

SEQ ID NO: 225086 - RNA, 18 nt, Artificial Sequence
  Synthetic
cguagaacuggucgagga

SEQ ID NO: 225087 - RNA, 19 nt, Artificial Sequence
  Synthetic
acguagaacuggucgagga

SEQ ID NO: 225088 - RNA, 20 nt, Artificial Sequence
  Synthetic
aacguagaacuggucgagga

SEQ ID NO: 225089 - RNA, 21 nt, Artificial Sequence
  Synthetic
aaacguagaacuggucgagga

SEQ ID NO: 225090 - RNA, 22 nt, Artificial Sequence
  Synthetic
aaaacguagaacuggucgagga

SEQ ID NO: 225091 - RNA, 23 nt, Artificial Sequence
  Synthetic
aaaaacguagaacuggucgagga

SEQ ID NO: 225092 - RNA, 24 nt, Artificial Sequence
  Synthetic
gaaaaacguagaacuggucgagga

SEQ ID NO: 225093 - RNA, 18 nt, Artificial Sequence
  Synthetic
aagauucacugucgagga

SEQ ID NO: 225094 - RNA, 19 nt, Artificial Sequence
  Synthetic
gaagauucacugucgagga

SEQ ID NO: 225095 - RNA, 20 nt, Artificial Sequence
  Synthetic
agaagauucacugucgagga

SEQ ID NO: 225096 - RNA, 21 nt, Artificial Sequence
  Synthetic
aagaagauucacugucgagga

SEQ ID NO: 225097 - RNA, 22 nt, Artificial Sequence
  Synthetic
aaagaagauucacugucgagga

SEQ ID NO: 225098 - RNA, 23 nt, Artificial Sequence
  Synthetic
caaagaagauucacugucgagga

SEQ ID NO: 225099 - RNA, 24 nt, Artificial Sequence
  Synthetic
acaaagaagauucacugucgagga

SEQ ID NO: 225100 - RNA, 18 nt, Artificial Sequence
  Synthetic
ggcacuccgaaaggagga

SEQ ID NO: 225101 - RNA, 19 nt, Artificial Sequence
  Synthetic
aggcacuccgaaaggagga

SEQ ID NO: 225102 - RNA, 20 nt, Artificial Sequence
  Synthetic
uaggcacuccgaaaggagga

SEQ ID NO: 225103 - RNA, 21 nt, Artificial Sequence
  Synthetic
uuaggcacuccgaaaggagga

SEQ ID NO: 225104 - RNA, 22 nt, Artificial Sequence
  Synthetic
auuaggcacuccgaaaggagga

SEQ ID NO: 225105 - RNA, 23 nt, Artificial Sequence
  Synthetic
aauuaggcacuccgaaaggagga

SEQ ID NO: 225106 - RNA, 24 nt, Artificial Sequence
  Synthetic
gaauuaggcacuccgaaaggagga

SEQ ID NO: 225107 - RNA, 18 nt, Artificial Sequence
  Synthetic
gacuucccacaaggagga

SEQ ID NO: 225108 - RNA, 19 nt, Artificial Sequence
  Synthetic
agacuucccacaaggagga

SEQ ID NO: 225109 - RNA, 20 nt, Artificial Sequence
  Synthetic
gagacuucccacaaggagga

SEQ ID NO: 225110 - RNA, 21 nt, Artificial Sequence
  Synthetic
ugagacuucccacaaggagga

SEQ ID NO: 225111 - RNA, 22 nt, Artificial Sequence
  Synthetic
cugagacuucccacaaggagga

SEQ ID NO: 225112 - RNA, 23 nt, Artificial Sequence
  Synthetic
ccugagacuucccacaaggagga

SEQ ID NO: 225113 - RNA, 24 nt, Artificial Sequence
  Synthetic
uccugagacuucccacaaggagga

SEQ ID NO: 225114 - RNA, 18 nt, Artificial Sequence
  Synthetic
guauuuggacaaggagga

SEQ ID NO: 225115 - RNA, 19 nt, Artificial Sequence
  Synthetic
gguauuuggacaaggagga

SEQ ID NO: 225116 - RNA, 20 nt, Artificial Sequence
  Synthetic
cgguauuuggacaaggagga

SEQ ID NO: 225117 - RNA, 21 nt, Artificial Sequence
  Synthetic
ucgguauuuggacaaggagga

SEQ ID NO: 225118 - RNA, 22 nt, Artificial Sequence
  Synthetic
uucgguauuuggacaaggagga

SEQ ID NO: 225119 - RNA, 23 nt, Artificial Sequence
  Synthetic
uuucgguauuuggacaaggagga

SEQ ID NO: 225120 - RNA, 24 nt, Artificial Sequence
  Synthetic
auuucgguauuuggacaaggagga

SEQ ID NO: 225121 - RNA, 18 nt, Artificial Sequence
  Synthetic
cauaaccaugaaggagga

SEQ ID NO: 225122 - RNA, 19 nt, Artificial Sequence
  Synthetic
acauaaccaugaaggagga

SEQ ID NO: 225123 - RNA, 20 nt, Artificial Sequence
  Synthetic
uacauaaccaugaaggagga

SEQ ID NO: 225124 - RNA, 21 nt, Artificial Sequence
  Synthetic
uuacauaaccaugaaggagga

SEQ ID NO: 225125 - RNA, 22 nt, Artificial Sequence
  Synthetic
auuacauaaccaugaaggagga

SEQ ID NO: 225126 - RNA, 23 nt, Artificial Sequence
  Synthetic
gauuacauaaccaugaaggagga

SEQ ID NO: 225127 - RNA, 24 nt, Artificial Sequence
  Synthetic
ggauuacauaaccaugaaggagga

SEQ ID NO: 225128 - RNA, 18 nt, Artificial Sequence
  Synthetic
auggaaugauaaggagga

SEQ ID NO: 225129 - RNA, 19 nt, Artificial Sequence
  Synthetic
cauggaaugauaaggagga

SEQ ID NO: 225130 - RNA, 20 nt, Artificial Sequence
  Synthetic
acauggaaugauaaggagga

SEQ ID NO: 225131 - RNA, 21 nt, Artificial Sequence
  Synthetic
gacauggaaugauaaggagga

SEQ ID NO: 225132 - RNA, 22 nt, Artificial Sequence
  Synthetic
ugacauggaaugauaaggagga

SEQ ID NO: 225133 - RNA, 23 nt, Artificial Sequence
  Synthetic
uugacauggaaugauaaggagga

SEQ ID NO: 225134 - RNA, 24 nt, Artificial Sequence
  Synthetic
guugacauggaaugauaaggagga

SEQ ID NO: 225135 - RNA, 18 nt, Artificial Sequence
  Synthetic
gagacagcgacaggagga

SEQ ID NO: 225136 - RNA, 19 nt, Artificial Sequence
  Synthetic
ggagacagcgacaggagga

SEQ ID NO: 225137 - RNA, 20 nt, Artificial Sequence
  Synthetic
aggagacagcgacaggagga

SEQ ID NO: 225138 - RNA, 21 nt, Artificial Sequence
  Synthetic
aaggagacagcgacaggagga

SEQ ID NO: 225139 - RNA, 22 nt, Artificial Sequence
  Synthetic
gaaggagacagcgacaggagga

SEQ ID NO: 225140 - RNA, 23 nt, Artificial Sequence
  Synthetic
cgaaggagacagcgacaggagga

SEQ ID NO: 225141 - RNA, 24 nt, Artificial Sequence
  Synthetic
gcgaaggagacagcgacaggagga

SEQ ID NO: 225142 - RNA, 18 nt, Artificial Sequence
  Synthetic
ggaggaggagcaggagga

SEQ ID NO: 225143 - RNA, 19 nt, Artificial Sequence
  Synthetic
aggaggaggagcaggagga

SEQ ID NO: 225144 - RNA, 20 nt, Artificial Sequence
  Synthetic
gaggaggaggagcaggagga

SEQ ID NO: 225145 - RNA, 21 nt, Artificial Sequence
  Synthetic
ggaggaggaggagcaggagga

SEQ ID NO: 225146 - RNA, 22 nt, Artificial Sequence
  Synthetic
aggaggaggaggagcaggagga

SEQ ID NO: 225147 - RNA, 23 nt, Artificial Sequence
  Synthetic
caggaggaggaggagcaggagga

SEQ ID NO: 225148 - RNA, 24 nt, Artificial Sequence
  Synthetic
gcaggaggaggaggagcaggagga

SEQ ID NO: 225149 - RNA, 18 nt, Artificial Sequence
  Synthetic
gggcuuggggcaggagga

SEQ ID NO: 225150 - RNA, 19 nt, Artificial Sequence
  Synthetic
ggggcuuggggcaggagga

SEQ ID NO: 225151 - RNA, 20 nt, Artificial Sequence
  Synthetic
uggggcuuggggcaggagga

SEQ ID NO: 225152 - RNA, 21 nt, Artificial Sequence
  Synthetic
guggggcuuggggcaggagga

SEQ ID NO: 225153 - RNA, 22 nt, Artificial Sequence
  Synthetic
gguggggcuuggggcaggagga

SEQ ID NO: 225154 - RNA, 23 nt, Artificial Sequence
  Synthetic
ugguggggcuuggggcaggagga

SEQ ID NO: 225155 - RNA, 24 nt, Artificial Sequence
  Synthetic
gugguggggcuuggggcaggagga

SEQ ID NO: 225156 - RNA, 18 nt, Artificial Sequence
  Synthetic
ccugauguaucaggagga

SEQ ID NO: 225157 - RNA, 19 nt, Artificial Sequence
  Synthetic
accugauguaucaggagga

SEQ ID NO: 225158 - RNA, 20 nt, Artificial Sequence
  Synthetic
caccugauguaucaggagga

SEQ ID NO: 225159 - RNA, 21 nt, Artificial Sequence
  Synthetic
gcaccugauguaucaggagga

SEQ ID NO: 225160 - RNA, 22 nt, Artificial Sequence
  Synthetic
agcaccugauguaucaggagga

SEQ ID NO: 225161 - RNA, 23 nt, Artificial Sequence
  Synthetic
gagcaccugauguaucaggagga

SEQ ID NO: 225162 - RNA, 24 nt, Artificial Sequence
  Synthetic
agagcaccugauguaucaggagga

SEQ ID NO: 225163 - RNA, 18 nt, Artificial Sequence
  Synthetic
ucacugaaaggaggagga

SEQ ID NO: 225164 - RNA, 19 nt, Artificial Sequence
  Synthetic
aucacugaaaggaggagga

SEQ ID NO: 225165 - RNA, 20 nt, Artificial Sequence
  Synthetic
aaucacugaaaggaggagga

SEQ ID NO: 225166 - RNA, 21 nt, Artificial Sequence
  Synthetic
aaaucacugaaaggaggagga

SEQ ID NO: 225167 - RNA, 22 nt, Artificial Sequence
  Synthetic
caaaucacugaaaggaggagga

SEQ ID NO: 225168 - RNA, 23 nt, Artificial Sequence
  Synthetic
ucaaaucacugaaaggaggagga

SEQ ID NO: 225169 - RNA, 24 nt, Artificial Sequence
  Synthetic
uucaaaucacugaaaggaggagga

SEQ ID NO: 225170 - RNA, 18 nt, Artificial Sequence
  Synthetic
gggaaggaaggaggagga

SEQ ID NO: 225171 - RNA, 19 nt, Artificial Sequence
  Synthetic
agggaaggaaggaggagga

SEQ ID NO: 225172 - RNA, 20 nt, Artificial Sequence
  Synthetic
aagggaaggaaggaggagga

SEQ ID NO: 225173 - RNA, 21 nt, Artificial Sequence
  Synthetic
aaagggaaggaaggaggagga

SEQ ID NO: 225174 - RNA, 22 nt, Artificial Sequence
  Synthetic
gaaagggaaggaaggaggagga

SEQ ID NO: 225175 - RNA, 23 nt, Artificial Sequence
  Synthetic
agaaagggaaggaaggaggagga

SEQ ID NO: 225176 - RNA, 24 nt, Artificial Sequence
  Synthetic
aagaaagggaaggaaggaggagga

SEQ ID NO: 225177 - RNA, 18 nt, Artificial Sequence
  Synthetic
guuguggguggaggagga

SEQ ID NO: 225178 - RNA, 19 nt, Artificial Sequence
  Synthetic
uguuguggguggaggagga

SEQ ID NO: 225179 - RNA, 20 nt, Artificial Sequence
  Synthetic
uuguuguggguggaggagga

SEQ ID NO: 225180 - RNA, 21 nt, Artificial Sequence
  Synthetic
uuuguuguggguggaggagga

SEQ ID NO: 225181 - RNA, 22 nt, Artificial Sequence
  Synthetic
guuuguuguggguggaggagga

SEQ ID NO: 225182 - RNA, 23 nt, Artificial Sequence
  Synthetic
gguuuguuguggguggaggagga

SEQ ID NO: 225183 - RNA, 24 nt, Artificial Sequence
  Synthetic
agguuuguuguggguggaggagga

SEQ ID NO: 225184 - RNA, 18 nt, Artificial Sequence
  Synthetic
aacguuaaaugaggagga

SEQ ID NO: 225185 - RNA, 19 nt, Artificial Sequence
  Synthetic
gaacguuaaaugaggagga

SEQ ID NO: 225186 - RNA, 20 nt, Artificial Sequence
  Synthetic
ggaacguuaaaugaggagga

SEQ ID NO: 225187 - RNA, 21 nt, Artificial Sequence
  Synthetic
uggaacguuaaaugaggagga

SEQ ID NO: 225188 - RNA, 22 nt, Artificial Sequence
  Synthetic
guggaacguuaaaugaggagga

SEQ ID NO: 225189 - RNA, 23 nt, Artificial Sequence
  Synthetic
gguggaacguuaaaugaggagga

SEQ ID NO: 225190 - RNA, 24 nt, Artificial Sequence
  Synthetic
ugguggaacguuaaaugaggagga

SEQ ID NO: 225191 - RNA, 18 nt, Artificial Sequence
  Synthetic
acaccugugagcggagga

SEQ ID NO: 225192 - RNA, 19 nt, Artificial Sequence
  Synthetic
aacaccugugagcggagga

SEQ ID NO: 225193 - RNA, 20 nt, Artificial Sequence
  Synthetic
uaacaccugugagcggagga

SEQ ID NO: 225194 - RNA, 21 nt, Artificial Sequence
  Synthetic
uuaacaccugugagcggagga

SEQ ID NO: 225195 - RNA, 22 nt, Artificial Sequence
  Synthetic
auuaacaccugugagcggagga

SEQ ID NO: 225196 - RNA, 23 nt, Artificial Sequence
  Synthetic
gauuaacaccugugagcggagga

SEQ ID NO: 225197 - RNA, 24 nt, Artificial Sequence
  Synthetic
ggauuaacaccugugagcggagga

SEQ ID NO: 225198 - RNA, 18 nt, Artificial Sequence
  Synthetic
gauggauggaucggagga

SEQ ID NO: 225199 - RNA, 19 nt, Artificial Sequence
  Synthetic
ugauggauggaucggagga

SEQ ID NO: 225200 - RNA, 20 nt, Artificial Sequence
  Synthetic
uugauggauggaucggagga

SEQ ID NO: 225201 - RNA, 21 nt, Artificial Sequence
  Synthetic
auugauggauggaucggagga

SEQ ID NO: 225202 - RNA, 22 nt, Artificial Sequence
  Synthetic
gauugauggauggaucggagga

SEQ ID NO: 225203 - RNA, 23 nt, Artificial Sequence
  Synthetic
ugauugauggauggaucggagga

SEQ ID NO: 225204 - RNA, 24 nt, Artificial Sequence
  Synthetic
uugauugauggauggaucggagga

SEQ ID NO: 225205 - RNA, 18 nt, Artificial Sequence
  Synthetic
agaacaaagaagggagga

SEQ ID NO: 225206 - RNA, 19 nt, Artificial Sequence
  Synthetic
gagaacaaagaagggagga

SEQ ID NO: 225207 - RNA, 20 nt, Artificial Sequence
  Synthetic
agagaacaaagaagggagga

SEQ ID NO: 225208 - RNA, 21 nt, Artificial Sequence
  Synthetic
gagagaacaaagaagggagga

SEQ ID NO: 225209 - RNA, 22 nt, Artificial Sequence
  Synthetic
ggagagaacaaagaagggagga

SEQ ID NO: 225210 - RNA, 23 nt, Artificial Sequence
  Synthetic
aggagagaacaaagaagggagga

SEQ ID NO: 225211 - RNA, 24 nt, Artificial Sequence
  Synthetic
aaggagagaacaaagaagggagga

SEQ ID NO: 225212 - RNA, 18 nt, Artificial Sequence
  Synthetic
agagagagagagggagga

SEQ ID NO: 225213 - RNA, 19 nt, Artificial Sequence
  Synthetic
gagagagagagagggagga

SEQ ID NO: 225214 - RNA, 20 nt, Artificial Sequence
  Synthetic
agagagagagagagggagga

SEQ ID NO: 225215 - RNA, 21 nt, Artificial Sequence
  Synthetic
gagagagagagagagggagga

SEQ ID NO: 225216 - RNA, 22 nt, Artificial Sequence
  Synthetic
agagagagagagagagggagga

SEQ ID NO: 225217 - RNA, 23 nt, Artificial Sequence
  Synthetic
gagagagagagagagagggagga

SEQ ID NO: 225218 - RNA, 24 nt, Artificial Sequence
  Synthetic
agagagagagagagagagggagga

SEQ ID NO: 225219 - RNA, 18 nt, Artificial Sequence
  Synthetic
ugaaggagagagggagga

SEQ ID NO: 225220 - RNA, 19 nt, Artificial Sequence
  Synthetic
gugaaggagagagggagga

SEQ ID NO: 225221 - RNA, 20 nt, Artificial Sequence
  Synthetic
ugugaaggagagagggagga

SEQ ID NO: 225222 - RNA, 21 nt, Artificial Sequence
  Synthetic
gugugaaggagagagggagga

SEQ ID NO: 225223 - RNA, 22 nt, Artificial Sequence
  Synthetic
agugugaaggagagagggagga

SEQ ID NO: 225224 - RNA, 23 nt, Artificial Sequence
  Synthetic
aagugugaaggagagagggagga

SEQ ID NO: 225225 - RNA, 24 nt, Artificial Sequence
  Synthetic
gaagugugaaggagagagggagga

SEQ ID NO: 225226 - RNA, 18 nt, Artificial Sequence
  Synthetic
aagagagggacgggagga

SEQ ID NO: 225227 - RNA, 19 nt, Artificial Sequence
  Synthetic
aaagagagggacgggagga

SEQ ID NO: 225228 - RNA, 20 nt, Artificial Sequence
  Synthetic
gaaagagagggacgggagga

SEQ ID NO: 225229 - RNA, 21 nt, Artificial Sequence
  Synthetic
agaaagagagggacgggagga

SEQ ID NO: 225230 - RNA, 22 nt, Artificial Sequence
  Synthetic
gagaaagagagggacgggagga

SEQ ID NO: 225231 - RNA, 23 nt, Artificial Sequence
  Synthetic
agagaaagagagggacgggagga

SEQ ID NO: 225232 - RNA, 24 nt, Artificial Sequence
  Synthetic
gagagaaagagagggacgggagga

SEQ ID NO: 225233 - RNA, 18 nt, Artificial Sequence
  Synthetic
cuacuagaagggggagga

SEQ ID NO: 225234 - RNA, 19 nt, Artificial Sequence
  Synthetic
acuacuagaagggggagga

SEQ ID NO: 225235 - RNA, 20 nt, Artificial Sequence
  Synthetic
gacuacuagaagggggagga

SEQ ID NO: 225236 - RNA, 21 nt, Artificial Sequence
  Synthetic
ggacuacuagaagggggagga

SEQ ID NO: 225237 - RNA, 22 nt, Artificial Sequence
  Synthetic
gggacuacuagaagggggagga

SEQ ID NO: 225238 - RNA, 23 nt, Artificial Sequence
  Synthetic
ggggacuacuagaagggggagga

SEQ ID NO: 225239 - RNA, 24 nt, Artificial Sequence
  Synthetic
uggggacuacuagaagggggagga

SEQ ID NO: 225240 - RNA, 18 nt, Artificial Sequence
  Synthetic
uaguuuagugggggagga

SEQ ID NO: 225241 - RNA, 19 nt, Artificial Sequence
  Synthetic
guaguuuagugggggagga

SEQ ID NO: 225242 - RNA, 20 nt, Artificial Sequence
  Synthetic
uguaguuuagugggggagga

SEQ ID NO: 225243 - RNA, 21 nt, Artificial Sequence
  Synthetic
cuguaguuuagugggggagga

SEQ ID NO: 225244 - RNA, 22 nt, Artificial Sequence
  Synthetic
ucuguaguuuagugggggagga

SEQ ID NO: 225245 - RNA, 23 nt, Artificial Sequence
  Synthetic
aucuguaguuuagugggggagga

SEQ ID NO: 225246 - RNA, 24 nt, Artificial Sequence
  Synthetic
gaucuguaguuuagugggggagga

SEQ ID NO: 225247 - RNA, 18 nt, Artificial Sequence
  Synthetic
agagggagggauggagga

SEQ ID NO: 225248 - RNA, 19 nt, Artificial Sequence
  Synthetic
gagagggagggauggagga

SEQ ID NO: 225249 - RNA, 20 nt, Artificial Sequence
  Synthetic
agagagggagggauggagga

SEQ ID NO: 225250 - RNA, 21 nt, Artificial Sequence
  Synthetic
gagagagggagggauggagga

SEQ ID NO: 225251 - RNA, 22 nt, Artificial Sequence
  Synthetic
ugagagagggagggauggagga

SEQ ID NO: 225252 - RNA, 23 nt, Artificial Sequence
  Synthetic
augagagagggagggauggagga

SEQ ID NO: 225253 - RNA, 24 nt, Artificial Sequence
  Synthetic
gaugagagagggagggauggagga

SEQ ID NO: 225254 - RNA, 18 nt, Artificial Sequence
  Synthetic
gacacacaugauggagga

SEQ ID NO: 225255 - RNA, 19 nt, Artificial Sequence
  Synthetic
agacacacaugauggagga

SEQ ID NO: 225256 - RNA, 20 nt, Artificial Sequence
  Synthetic
aagacacacaugauggagga

SEQ ID NO: 225257 - RNA, 21 nt, Artificial Sequence
  Synthetic
aaagacacacaugauggagga

SEQ ID NO: 225258 - RNA, 22 nt, Artificial Sequence
  Synthetic
uaaagacacacaugauggagga

SEQ ID NO: 225259 - RNA, 23 nt, Artificial Sequence
  Synthetic
guaaagacacacaugauggagga

SEQ ID NO: 225260 - RNA, 24 nt, Artificial Sequence
  Synthetic
gguaaagacacacaugauggagga

SEQ ID NO: 225261 - RNA, 18 nt, Artificial Sequence
  Synthetic
agaaugucuccuggagga

SEQ ID NO: 225262 - RNA, 19 nt, Artificial Sequence
  Synthetic
gagaaugucuccuggagga

SEQ ID NO: 225263 - RNA, 20 nt, Artificial Sequence
  Synthetic
ugagaaugucuccuggagga

SEQ ID NO: 225264 - RNA, 21 nt, Artificial Sequence
  Synthetic
gugagaaugucuccuggagga

SEQ ID NO: 225265 - RNA, 22 nt, Artificial Sequence
  Synthetic
agugagaaugucuccuggagga

SEQ ID NO: 225266 - RNA, 23 nt, Artificial Sequence
  Synthetic
uagugagaaugucuccuggagga

SEQ ID NO: 225267 - RNA, 24 nt, Artificial Sequence
  Synthetic
auagugagaaugucuccuggagga

SEQ ID NO: 225268 - RNA, 18 nt, Artificial Sequence
  Synthetic
ucuuacaguucuggagga

SEQ ID NO: 225269 - RNA, 19 nt, Artificial Sequence
  Synthetic
gucuuacaguucuggagga

SEQ ID NO: 225270 - RNA, 20 nt, Artificial Sequence
  Synthetic
ugucuuacaguucuggagga

SEQ ID NO: 225271 - RNA, 21 nt, Artificial Sequence
  Synthetic
uugucuuacaguucuggagga

SEQ ID NO: 225272 - RNA, 22 nt, Artificial Sequence
  Synthetic
guugucuuacaguucuggagga

SEQ ID NO: 225273 - RNA, 23 nt, Artificial Sequence
  Synthetic
uguugucuuacaguucuggagga

SEQ ID NO: 225274 - RNA, 24 nt, Artificial Sequence
  Synthetic
cuguugucuuacaguucuggagga

SEQ ID NO: 225275 - RNA, 18 nt, Artificial Sequence
  Synthetic
agaauuuggauuggagga

SEQ ID NO: 225276 - RNA, 19 nt, Artificial Sequence
  Synthetic
uagaauuuggauuggagga

SEQ ID NO: 225277 - RNA, 20 nt, Artificial Sequence
  Synthetic
auagaauuuggauuggagga

SEQ ID NO: 225278 - RNA, 21 nt, Artificial Sequence
  Synthetic
aauagaauuuggauuggagga

SEQ ID NO: 225279 - RNA, 22 nt, Artificial Sequence
  Synthetic
aaauagaauuuggauuggagga

SEQ ID NO: 225280 - RNA, 23 nt, Artificial Sequence
  Synthetic
aaaauagaauuuggauuggagga

SEQ ID NO: 225281 - RNA, 24 nt, Artificial Sequence
  Synthetic
uaaaauagaauuuggauuggagga

SEQ ID NO: 225282 - RNA, 18 nt, Artificial Sequence
  Synthetic
guagaauaaguuggagga

SEQ ID NO: 225283 - RNA, 19 nt, Artificial Sequence
  Synthetic
uguagaauaaguuggagga

SEQ ID NO: 225284 - RNA, 20 nt, Artificial Sequence
  Synthetic
auguagaauaaguuggagga

SEQ ID NO: 225285 - RNA, 21 nt, Artificial Sequence
  Synthetic
cauguagaauaaguuggagga

SEQ ID NO: 225286 - RNA, 22 nt, Artificial Sequence
  Synthetic
acauguagaauaaguuggagga

SEQ ID NO: 225287 - RNA, 23 nt, Artificial Sequence
  Synthetic
aacauguagaauaaguuggagga

SEQ ID NO: 225288 - RNA, 24 nt, Artificial Sequence
  Synthetic
gaacauguagaauaaguuggagga

SEQ ID NO: 225289 - RNA, 18 nt, Artificial Sequence
  Synthetic
uugaagagaaaaugagga

SEQ ID NO: 225290 - RNA, 19 nt, Artificial Sequence
  Synthetic
auugaagagaaaaugagga

SEQ ID NO: 225291 - RNA, 20 nt, Artificial Sequence
  Synthetic
cauugaagagaaaaugagga

SEQ ID NO: 225292 - RNA, 21 nt, Artificial Sequence
  Synthetic
ucauugaagagaaaaugagga

SEQ ID NO: 225293 - RNA, 22 nt, Artificial Sequence
  Synthetic
aucauugaagagaaaaugagga

SEQ ID NO: 225294 - RNA, 23 nt, Artificial Sequence
  Synthetic
uaucauugaagagaaaaugagga

SEQ ID NO: 225295 - RNA, 24 nt, Artificial Sequence
  Synthetic
auaucauugaagagaaaaugagga

SEQ ID NO: 225296 - RNA, 18 nt, Artificial Sequence
  Synthetic
ggcuguguguaaugagga

SEQ ID NO: 225297 - RNA, 19 nt, Artificial Sequence
  Synthetic
aggcuguguguaaugagga

SEQ ID NO: 225298 - RNA, 20 nt, Artificial Sequence
  Synthetic
uaggcuguguguaaugagga

SEQ ID NO: 225299 - RNA, 21 nt, Artificial Sequence
  Synthetic
guaggcuguguguaaugagga

SEQ ID NO: 225300 - RNA, 22 nt, Artificial Sequence
  Synthetic
gguaggcuguguguaaugagga

SEQ ID NO: 225301 - RNA, 23 nt, Artificial Sequence
  Synthetic
ggguaggcuguguguaaugagga

SEQ ID NO: 225302 - RNA, 24 nt, Artificial Sequence
  Synthetic
gggguaggcuguguguaaugagga

SEQ ID NO: 225303 - RNA, 18 nt, Artificial Sequence
  Synthetic
cuauucauucacugagga

SEQ ID NO: 225304 - RNA, 19 nt, Artificial Sequence
  Synthetic
gcuauucauucacugagga

SEQ ID NO: 225305 - RNA, 20 nt, Artificial Sequence
  Synthetic
ugcuauucauucacugagga

SEQ ID NO: 225306 - RNA, 21 nt, Artificial Sequence
  Synthetic
gugcuauucauucacugagga

SEQ ID NO: 225307 - RNA, 22 nt, Artificial Sequence
  Synthetic
ugugcuauucauucacugagga

SEQ ID NO: 225308 - RNA, 23 nt, Artificial Sequence
  Synthetic
gugugcuauucauucacugagga

SEQ ID NO: 225309 - RNA, 24 nt, Artificial Sequence
  Synthetic
agugugcuauucauucacugagga

SEQ ID NO: 225310 - RNA, 18 nt, Artificial Sequence
  Synthetic
ugaguuccagacugagga

SEQ ID NO: 225311 - RNA, 19 nt, Artificial Sequence
  Synthetic
augaguuccagacugagga

SEQ ID NO: 225312 - RNA, 20 nt, Artificial Sequence
  Synthetic
uaugaguuccagacugagga

SEQ ID NO: 225313 - RNA, 21 nt, Artificial Sequence
  Synthetic
guaugaguuccagacugagga

SEQ ID NO: 225314 - RNA, 22 nt, Artificial Sequence
  Synthetic
aguaugaguuccagacugagga

SEQ ID NO: 225315 - RNA, 23 nt, Artificial Sequence
  Synthetic
gaguaugaguuccagacugagga

SEQ ID NO: 225316 - RNA, 24 nt, Artificial Sequence
  Synthetic
agaguaugaguuccagacugagga

SEQ ID NO: 225317 - RNA, 18 nt, Artificial Sequence
  Synthetic
aaggagaaguacugagga

SEQ ID NO: 225318 - RNA, 19 nt, Artificial Sequence
  Synthetic
gaaggagaaguacugagga

SEQ ID NO: 225319 - RNA, 20 nt, Artificial Sequence
  Synthetic
ggaaggagaaguacugagga

SEQ ID NO: 225320 - RNA, 21 nt, Artificial Sequence
  Synthetic
aggaaggagaaguacugagga

SEQ ID NO: 225321 - RNA, 22 nt, Artificial Sequence
  Synthetic
caggaaggagaaguacugagga

SEQ ID NO: 225322 - RNA, 23 nt, Artificial Sequence
  Synthetic
gcaggaaggagaaguacugagga

SEQ ID NO: 225323 - RNA, 24 nt, Artificial Sequence
  Synthetic
ggcaggaaggagaaguacugagga

SEQ ID NO: 225324 - RNA, 18 nt, Artificial Sequence
  Synthetic
gaugaggauaccugagga

SEQ ID NO: 225325 - RNA, 19 nt, Artificial Sequence
  Synthetic
agaugaggauaccugagga

SEQ ID NO: 225326 - RNA, 20 nt, Artificial Sequence
  Synthetic
uagaugaggauaccugagga

SEQ ID NO: 225327 - RNA, 21 nt, Artificial Sequence
  Synthetic
cuagaugaggauaccugagga

SEQ ID NO: 225328 - RNA, 22 nt, Artificial Sequence
  Synthetic
gcuagaugaggauaccugagga

SEQ ID NO: 225329 - RNA, 23 nt, Artificial Sequence
  Synthetic
ugcuagaugaggauaccugagga

SEQ ID NO: 225330 - RNA, 24 nt, Artificial Sequence
  Synthetic
augcuagaugaggauaccugagga

SEQ ID NO: 225331 - RNA, 18 nt, Artificial Sequence
  Synthetic
gggacugugcccugagga

SEQ ID NO: 225332 - RNA, 19 nt, Artificial Sequence
  Synthetic
agggacugugcccugagga

SEQ ID NO: 225333 - RNA, 20 nt, Artificial Sequence
  Synthetic
gagggacugugcccugagga

SEQ ID NO: 225334 - RNA, 21 nt, Artificial Sequence
  Synthetic
ugagggacugugcccugagga

SEQ ID NO: 225335 - RNA, 22 nt, Artificial Sequence
  Synthetic
gugagggacugugcccugagga

SEQ ID NO: 225336 - RNA, 23 nt, Artificial Sequence
  Synthetic
cgugagggacugugcccugagga

SEQ ID NO: 225337 - RNA, 24 nt, Artificial Sequence
  Synthetic
ccgugagggacugugcccugagga

SEQ ID NO: 225338 - RNA, 18 nt, Artificial Sequence
  Synthetic
agagcugccuccugagga

SEQ ID NO: 225339 - RNA, 19 nt, Artificial Sequence
  Synthetic
uagagcugccuccugagga

SEQ ID NO: 225340 - RNA, 20 nt, Artificial Sequence
  Synthetic
uuagagcugccuccugagga

SEQ ID NO: 225341 - RNA, 21 nt, Artificial Sequence
  Synthetic
uuuagagcugccuccugagga

SEQ ID NO: 225342 - RNA, 22 nt, Artificial Sequence
  Synthetic
auuuagagcugccuccugagga

SEQ ID NO: 225343 - RNA, 23 nt, Artificial Sequence
  Synthetic
aauuuagagcugccuccugagga

SEQ ID NO: 225344 - RNA, 24 nt, Artificial Sequence
  Synthetic
caauuuagagcugccuccugagga

SEQ ID NO: 225345 - RNA, 18 nt, Artificial Sequence
  Synthetic
uugaaagcuuccugagga

SEQ ID NO: 225346 - RNA, 19 nt, Artificial Sequence
  Synthetic
auugaaagcuuccugagga

SEQ ID NO: 225347 - RNA, 20 nt, Artificial Sequence
  Synthetic
gauugaaagcuuccugagga

SEQ ID NO: 225348 - RNA, 21 nt, Artificial Sequence
  Synthetic
agauugaaagcuuccugagga

SEQ ID NO: 225349 - RNA, 22 nt, Artificial Sequence
  Synthetic
uagauugaaagcuuccugagga

SEQ ID NO: 225350 - RNA, 23 nt, Artificial Sequence
  Synthetic
auagauugaaagcuuccugagga

SEQ ID NO: 225351 - RNA, 24 nt, Artificial Sequence
  Synthetic
cauagauugaaagcuuccugagga

SEQ ID NO: 225352 - RNA, 18 nt, Artificial Sequence
  Synthetic
uguggugggugcugagga

SEQ ID NO: 225353 - RNA, 19 nt, Artificial Sequence
  Synthetic
uuguggugggugcugagga

SEQ ID NO: 225354 - RNA, 20 nt, Artificial Sequence
  Synthetic
cuuguggugggugcugagga

SEQ ID NO: 225355 - RNA, 21 nt, Artificial Sequence
  Synthetic
ccuuguggugggugcugagga

SEQ ID NO: 225356 - RNA, 22 nt, Artificial Sequence
  Synthetic
gccuuguggugggugcugagga

SEQ ID NO: 225357 - RNA, 23 nt, Artificial Sequence
  Synthetic
ggccuuguggugggugcugagga

SEQ ID NO: 225358 - RNA, 24 nt, Artificial Sequence
  Synthetic
gggccuuguggugggugcugagga

SEQ ID NO: 225359 - RNA, 18 nt, Artificial Sequence
  Synthetic
aauuucuacuucugagga

SEQ ID NO: 225360 - RNA, 19 nt, Artificial Sequence
  Synthetic
uaauuucuacuucugagga

SEQ ID NO: 225361 - RNA, 20 nt, Artificial Sequence
  Synthetic
uuaauuucuacuucugagga

SEQ ID NO: 225362 - RNA, 21 nt, Artificial Sequence
  Synthetic
cuuaauuucuacuucugagga

SEQ ID NO: 225363 - RNA, 22 nt, Artificial Sequence
  Synthetic
ucuuaauuucuacuucugagga

SEQ ID NO: 225364 - RNA, 23 nt, Artificial Sequence
  Synthetic
cucuuaauuucuacuucugagga

SEQ ID NO: 225365 - RNA, 24 nt, Artificial Sequence
  Synthetic
ucucuuaauuucuacuucugagga

SEQ ID NO: 225366 - RNA, 18 nt, Artificial Sequence
  Synthetic
guuagccccaagugagga

SEQ ID NO: 225367 - RNA, 19 nt, Artificial Sequence
  Synthetic
cguuagccccaagugagga

SEQ ID NO: 225368 - RNA, 20 nt, Artificial Sequence
  Synthetic
gcguuagccccaagugagga

SEQ ID NO: 225369 - RNA, 21 nt, Artificial Sequence
  Synthetic
ggcguuagccccaagugagga

SEQ ID NO: 225370 - RNA, 22 nt, Artificial Sequence
  Synthetic
uggcguuagccccaagugagga

SEQ ID NO: 225371 - RNA, 23 nt, Artificial Sequence
  Synthetic
auggcguuagccccaagugagga

SEQ ID NO: 225372 - RNA, 24 nt, Artificial Sequence
  Synthetic
aauggcguuagccccaagugagga

SEQ ID NO: 225373 - RNA, 18 nt, Artificial Sequence
  Synthetic
acaaaagaggagugagga

SEQ ID NO: 225374 - RNA, 19 nt, Artificial Sequence
  Synthetic
gacaaaagaggagugagga

SEQ ID NO: 225375 - RNA, 20 nt, Artificial Sequence
  Synthetic
ggacaaaagaggagugagga

SEQ ID NO: 225376 - RNA, 21 nt, Artificial Sequence
  Synthetic
aggacaaaagaggagugagga

SEQ ID NO: 225377 - RNA, 22 nt, Artificial Sequence
  Synthetic
gaggacaaaagaggagugagga

SEQ ID NO: 225378 - RNA, 23 nt, Artificial Sequence
  Synthetic
agaggacaaaagaggagugagga

SEQ ID NO: 225379 - RNA, 24 nt, Artificial Sequence
  Synthetic
aagaggacaaaagaggagugagga

SEQ ID NO: 225380 - RNA, 18 nt, Artificial Sequence
  Synthetic
ccuuuggucuugugagga

SEQ ID NO: 225381 - RNA, 19 nt, Artificial Sequence
  Synthetic
accuuuggucuugugagga

SEQ ID NO: 225382 - RNA, 20 nt, Artificial Sequence
  Synthetic
gaccuuuggucuugugagga

SEQ ID NO: 225383 - RNA, 21 nt, Artificial Sequence
  Synthetic
agaccuuuggucuugugagga

SEQ ID NO: 225384 - RNA, 22 nt, Artificial Sequence
  Synthetic
cagaccuuuggucuugugagga

SEQ ID NO: 225385 - RNA, 23 nt, Artificial Sequence
  Synthetic
ucagaccuuuggucuugugagga

SEQ ID NO: 225386 - RNA, 24 nt, Artificial Sequence
  Synthetic
uucagaccuuuggucuugugagga

SEQ ID NO: 225387 - RNA, 18 nt, Artificial Sequence
  Synthetic
acaaauaugcauugagga

SEQ ID NO: 225388 - RNA, 19 nt, Artificial Sequence
  Synthetic
aacaaauaugcauugagga

SEQ ID NO: 225389 - RNA, 20 nt, Artificial Sequence
  Synthetic
caacaaauaugcauugagga

SEQ ID NO: 225390 - RNA, 21 nt, Artificial Sequence
  Synthetic
acaacaaauaugcauugagga

SEQ ID NO: 225391 - RNA, 22 nt, Artificial Sequence
  Synthetic
uacaacaaauaugcauugagga

SEQ ID NO: 225392 - RNA, 23 nt, Artificial Sequence
  Synthetic
auacaacaaauaugcauugagga

SEQ ID NO: 225393 - RNA, 24 nt, Artificial Sequence
  Synthetic
uauacaacaaauaugcauugagga

SEQ ID NO: 225394 - RNA, 18 nt, Artificial Sequence
  Synthetic
aggcagcaggauugagga

SEQ ID NO: 225395 - RNA, 19 nt, Artificial Sequence
  Synthetic
aaggcagcaggauugagga

SEQ ID NO: 225396 - RNA, 20 nt, Artificial Sequence
  Synthetic
aaaggcagcaggauugagga

SEQ ID NO: 225397 - RNA, 21 nt, Artificial Sequence
  Synthetic
uaaaggcagcaggauugagga

SEQ ID NO: 225398 - RNA, 22 nt, Artificial Sequence
  Synthetic
guaaaggcagcaggauugagga

SEQ ID NO: 225399 - RNA, 23 nt, Artificial Sequence
  Synthetic
aguaaaggcagcaggauugagga

SEQ ID NO: 225400 - RNA, 24 nt, Artificial Sequence
  Synthetic
gaguaaaggcagcaggauugagga

SEQ ID NO: 225401 - RNA, 18 nt, Artificial Sequence
  Synthetic
ggcaagauauauugagga

SEQ ID NO: 225402 - RNA, 19 nt, Artificial Sequence
  Synthetic
aggcaagauauauugagga

SEQ ID NO: 225403 - RNA, 20 nt, Artificial Sequence
  Synthetic
aaggcaagauauauugagga

SEQ ID NO: 225404 - RNA, 21 nt, Artificial Sequence
  Synthetic
gaaggcaagauauauugagga

SEQ ID NO: 225405 - RNA, 22 nt, Artificial Sequence
  Synthetic
ugaaggcaagauauauugagga

SEQ ID NO: 225406 - RNA, 23 nt, Artificial Sequence
  Synthetic
uugaaggcaagauauauugagga

SEQ ID NO: 225407 - RNA, 24 nt, Artificial Sequence
  Synthetic
cuugaaggcaagauauauugagga

SEQ ID NO: 225408 - RNA, 18 nt, Artificial Sequence
  Synthetic
guaaaauuuccuugagga

SEQ ID NO: 225409 - RNA, 19 nt, Artificial Sequence
  Synthetic
aguaaaauuuccuugagga

SEQ ID NO: 225410 - RNA, 20 nt, Artificial Sequence
  Synthetic
aaguaaaauuuccuugagga

SEQ ID NO: 225411 - RNA, 21 nt, Artificial Sequence
  Synthetic
gaaguaaaauuuccuugagga

SEQ ID NO: 225412 - RNA, 22 nt, Artificial Sequence
  Synthetic
agaaguaaaauuuccuugagga

SEQ ID NO: 225413 - RNA, 23 nt, Artificial Sequence
  Synthetic
aagaaguaaaauuuccuugagga

SEQ ID NO: 225414 - RNA, 24 nt, Artificial Sequence
  Synthetic
gaagaaguaaaauuuccuugagga

SEQ ID NO: 225415 - RNA, 18 nt, Artificial Sequence
  Synthetic
auuaucaguaguugagga

SEQ ID NO: 225416 - RNA, 19 nt, Artificial Sequence
  Synthetic
aauuaucaguaguugagga

SEQ ID NO: 225417 - RNA, 20 nt, Artificial Sequence
  Synthetic
uaauuaucaguaguugagga

SEQ ID NO: 225418 - RNA, 21 nt, Artificial Sequence
  Synthetic
uuaauuaucaguaguugagga

SEQ ID NO: 225419 - RNA, 22 nt, Artificial Sequence
  Synthetic
cuuaauuaucaguaguugagga

SEQ ID NO: 225420 - RNA, 23 nt, Artificial Sequence
  Synthetic
acuuaauuaucaguaguugagga

SEQ ID NO: 225421 - RNA, 24 nt, Artificial Sequence
  Synthetic
uacuuaauuaucaguaguugagga

SEQ ID NO: 225422 - RNA, 18 nt, Artificial Sequence
  Synthetic
agcugaagugguugagga

SEQ ID NO: 225423 - RNA, 19 nt, Artificial Sequence
  Synthetic
uagcugaagugguugagga

SEQ ID NO: 225424 - RNA, 20 nt, Artificial Sequence
  Synthetic
uuagcugaagugguugagga

SEQ ID NO: 225425 - RNA, 21 nt, Artificial Sequence
  Synthetic
cuuagcugaagugguugagga

SEQ ID NO: 225426 - RNA, 22 nt, Artificial Sequence
  Synthetic
ucuuagcugaagugguugagga

SEQ ID NO: 225427 - RNA, 23 nt, Artificial Sequence
  Synthetic
gucuuagcugaagugguugagga

SEQ ID NO: 225428 - RNA, 24 nt, Artificial Sequence
  Synthetic
agucuuagcugaagugguugagga

SEQ ID NO: 225429 - RNA, 18 nt, Artificial Sequence
  Synthetic
ugcuguggucuuugagga

SEQ ID NO: 225430 - RNA, 19 nt, Artificial Sequence
  Synthetic
uugcuguggucuuugagga

SEQ ID NO: 225431 - RNA, 20 nt, Artificial Sequence
  Synthetic
auugcuguggucuuugagga

SEQ ID NO: 225432 - RNA, 21 nt, Artificial Sequence
  Synthetic
aauugcuguggucuuugagga

SEQ ID NO: 225433 - RNA, 22 nt, Artificial Sequence
  Synthetic
aaauugcuguggucuuugagga

SEQ ID NO: 225434 - RNA, 23 nt, Artificial Sequence
  Synthetic
caaauugcuguggucuuugagga

SEQ ID NO: 225435 - RNA, 24 nt, Artificial Sequence
  Synthetic
gcaaauugcuguggucuuugagga

SEQ ID NO: 225436 - RNA, 18 nt, Artificial Sequence
  Synthetic
uuagaugaugcaauagga

SEQ ID NO: 225437 - RNA, 19 nt, Artificial Sequence
  Synthetic
uuuagaugaugcaauagga

SEQ ID NO: 225438 - RNA, 20 nt, Artificial Sequence
  Synthetic
uuuuagaugaugcaauagga

SEQ ID NO: 225439 - RNA, 21 nt, Artificial Sequence
  Synthetic
uuuuuagaugaugcaauagga

SEQ ID NO: 225440 - RNA, 22 nt, Artificial Sequence
  Synthetic
uuuuuuagaugaugcaauagga

SEQ ID NO: 225441 - RNA, 23 nt, Artificial Sequence
  Synthetic
auuuuuuagaugaugcaauagga

SEQ ID NO: 225442 - RNA, 24 nt, Artificial Sequence
  Synthetic
aauuuuuuagaugaugcaauagga

SEQ ID NO: 225443 - RNA, 18 nt, Artificial Sequence
  Synthetic
gcgacagaucuaauagga

SEQ ID NO: 225444 - RNA, 19 nt, Artificial Sequence
  Synthetic
ggcgacagaucuaauagga

SEQ ID NO: 225445 - RNA, 20 nt, Artificial Sequence
  Synthetic
gggcgacagaucuaauagga

SEQ ID NO: 225446 - RNA, 21 nt, Artificial Sequence
  Synthetic
agggcgacagaucuaauagga

SEQ ID NO: 225447 - RNA, 22 nt, Artificial Sequence
  Synthetic
uagggcgacagaucuaauagga

SEQ ID NO: 225448 - RNA, 23 nt, Artificial Sequence
  Synthetic
guagggcgacagaucuaauagga

SEQ ID NO: 225449 - RNA, 24 nt, Artificial Sequence
  Synthetic
gguagggcgacagaucuaauagga

SEQ ID NO: 225450 - RNA, 18 nt, Artificial Sequence
  Synthetic
aauuccauuuacauagga

SEQ ID NO: 225451 - RNA, 19 nt, Artificial Sequence
  Synthetic
uaauuccauuuacauagga

SEQ ID NO: 225452 - RNA, 20 nt, Artificial Sequence
  Synthetic
auaauuccauuuacauagga

SEQ ID NO: 225453 - RNA, 21 nt, Artificial Sequence
  Synthetic
aauaauuccauuuacauagga

SEQ ID NO: 225454 - RNA, 22 nt, Artificial Sequence
  Synthetic
caauaauuccauuuacauagga

SEQ ID NO: 225455 - RNA, 23 nt, Artificial Sequence
  Synthetic
ccaauaauuccauuuacauagga

SEQ ID NO: 225456 - RNA, 24 nt, Artificial Sequence
  Synthetic
accaauaauuccauuuacauagga

SEQ ID NO: 225457 - RNA, 18 nt, Artificial Sequence
  Synthetic
acuggcuccuccauagga

SEQ ID NO: 225458 - RNA, 19 nt, Artificial Sequence
  Synthetic
gacuggcuccuccauagga

SEQ ID NO: 225459 - RNA, 20 nt, Artificial Sequence
  Synthetic
ggacuggcuccuccauagga

SEQ ID NO: 225460 - RNA, 21 nt, Artificial Sequence
  Synthetic
aggacuggcuccuccauagga

SEQ ID NO: 225461 - RNA, 22 nt, Artificial Sequence
  Synthetic
gaggacuggcuccuccauagga

SEQ ID NO: 225462 - RNA, 23 nt, Artificial Sequence
  Synthetic
agaggacuggcuccuccauagga

SEQ ID NO: 225463 - RNA, 24 nt, Artificial Sequence
  Synthetic
cagaggacuggcuccuccauagga

SEQ ID NO: 225464 - RNA, 18 nt, Artificial Sequence
  Synthetic
aauuagcuucagauagga

SEQ ID NO: 225465 - RNA, 19 nt, Artificial Sequence
  Synthetic
aaauuagcuucagauagga

SEQ ID NO: 225466 - RNA, 20 nt, Artificial Sequence
  Synthetic
gaaauuagcuucagauagga

SEQ ID NO: 225467 - RNA, 21 nt, Artificial Sequence
  Synthetic
agaaauuagcuucagauagga

SEQ ID NO: 225468 - RNA, 22 nt, Artificial Sequence
  Synthetic
uagaaauuagcuucagauagga

SEQ ID NO: 225469 - RNA, 23 nt, Artificial Sequence
  Synthetic
uuagaaauuagcuucagauagga

SEQ ID NO: 225470 - RNA, 24 nt, Artificial Sequence
  Synthetic
uuuagaaauuagcuucagauagga

SEQ ID NO: 225471 - RNA, 18 nt, Artificial Sequence
  Synthetic
gcaaauccagagauagga

SEQ ID NO: 225472 - RNA, 19 nt, Artificial Sequence
  Synthetic
ugcaaauccagagauagga

SEQ ID NO: 225473 - RNA, 20 nt, Artificial Sequence
  Synthetic
augcaaauccagagauagga

SEQ ID NO: 225474 - RNA, 21 nt, Artificial Sequence
  Synthetic
uaugcaaauccagagauagga

SEQ ID NO: 225475 - RNA, 22 nt, Artificial Sequence
  Synthetic
guaugcaaauccagagauagga

SEQ ID NO: 225476 - RNA, 23 nt, Artificial Sequence
  Synthetic
uguaugcaaauccagagauagga

SEQ ID NO: 225477 - RNA, 24 nt, Artificial Sequence
  Synthetic
guguaugcaaauccagagauagga

SEQ ID NO: 225478 - RNA, 18 nt, Artificial Sequence
  Synthetic
gcaggaaaugggauagga

SEQ ID NO: 225479 - RNA, 19 nt, Artificial Sequence
  Synthetic
agcaggaaaugggauagga

SEQ ID NO: 225480 - RNA, 20 nt, Artificial Sequence
  Synthetic
uagcaggaaaugggauagga

SEQ ID NO: 225481 - RNA, 21 nt, Artificial Sequence
  Synthetic
auagcaggaaaugggauagga

SEQ ID NO: 225482 - RNA, 22 nt, Artificial Sequence
  Synthetic
gauagcaggaaaugggauagga

SEQ ID NO: 225483 - RNA, 23 nt, Artificial Sequence
  Synthetic
agauagcaggaaaugggauagga

SEQ ID NO: 225484 - RNA, 24 nt, Artificial Sequence
  Synthetic
gagauagcaggaaaugggauagga

SEQ ID NO: 225485 - RNA, 18 nt, Artificial Sequence
  Synthetic
ccccucagaaauauagga

SEQ ID NO: 225486 - RNA, 19 nt, Artificial Sequence
  Synthetic
accccucagaaauauagga

SEQ ID NO: 225487 - RNA, 20 nt, Artificial Sequence
  Synthetic
caccccucagaaauauagga

SEQ ID NO: 225488 - RNA, 21 nt, Artificial Sequence
  Synthetic
ccaccccucagaaauauagga

SEQ ID NO: 225489 - RNA, 22 nt, Artificial Sequence
  Synthetic
uccaccccucagaaauauagga

SEQ ID NO: 225490 - RNA, 23 nt, Artificial Sequence
  Synthetic
uuccaccccucagaaauauagga

SEQ ID NO: 225491 - RNA, 24 nt, Artificial Sequence
  Synthetic
auuccaccccucagaaauauagga

SEQ ID NO: 225492 - RNA, 18 nt, Artificial Sequence
  Synthetic
auugcaaauaaacuagga

SEQ ID NO: 225493 - RNA, 19 nt, Artificial Sequence
  Synthetic
aauugcaaauaaacuagga

SEQ ID NO: 225494 - RNA, 20 nt, Artificial Sequence
  Synthetic
aaauugcaaauaaacuagga

SEQ ID NO: 225495 - RNA, 21 nt, Artificial Sequence
  Synthetic
uaaauugcaaauaaacuagga

SEQ ID NO: 225496 - RNA, 22 nt, Artificial Sequence
  Synthetic
cuaaauugcaaauaaacuagga

SEQ ID NO: 225497 - RNA, 23 nt, Artificial Sequence
  Synthetic
gcuaaauugcaaauaaacuagga

SEQ ID NO: 225498 - RNA, 24 nt, Artificial Sequence
  Synthetic
ggcuaaauugcaaauaaacuagga

SEQ ID NO: 225499 - RNA, 18 nt, Artificial Sequence
  Synthetic
gaugacucccaacuagga

SEQ ID NO: 225500 - RNA, 19 nt, Artificial Sequence
  Synthetic
ugaugacucccaacuagga

SEQ ID NO: 225501 - RNA, 20 nt, Artificial Sequence
  Synthetic
cugaugacucccaacuagga

SEQ ID NO: 225502 - RNA, 21 nt, Artificial Sequence
  Synthetic
ucugaugacucccaacuagga

SEQ ID NO: 225503 - RNA, 22 nt, Artificial Sequence
  Synthetic
uucugaugacucccaacuagga

SEQ ID NO: 225504 - RNA, 23 nt, Artificial Sequence
  Synthetic
auucugaugacucccaacuagga

SEQ ID NO: 225505 - RNA, 24 nt, Artificial Sequence
  Synthetic
cauucugaugacucccaacuagga

SEQ ID NO: 225506 - RNA, 18 nt, Artificial Sequence
  Synthetic
aaaacugcuagccuagga

SEQ ID NO: 225507 - RNA, 19 nt, Artificial Sequence
  Synthetic
gaaaacugcuagccuagga

SEQ ID NO: 225508 - RNA, 20 nt, Artificial Sequence
  Synthetic
agaaaacugcuagccuagga

SEQ ID NO: 225509 - RNA, 21 nt, Artificial Sequence
  Synthetic
cagaaaacugcuagccuagga

SEQ ID NO: 225510 - RNA, 22 nt, Artificial Sequence
  Synthetic
gcagaaaacugcuagccuagga

SEQ ID NO: 225511 - RNA, 23 nt, Artificial Sequence
  Synthetic
ugcagaaaacugcuagccuagga

SEQ ID NO: 225512 - RNA, 24 nt, Artificial Sequence
  Synthetic
uugcagaaaacugcuagccuagga

SEQ ID NO: 225513 - RNA, 18 nt, Artificial Sequence
  Synthetic
ugagaagagggccuagga

SEQ ID NO: 225514 - RNA, 19 nt, Artificial Sequence
  Synthetic
augagaagagggccuagga

SEQ ID NO: 225515 - RNA, 20 nt, Artificial Sequence
  Synthetic
gaugagaagagggccuagga

SEQ ID NO: 225516 - RNA, 21 nt, Artificial Sequence
  Synthetic
agaugagaagagggccuagga

SEQ ID NO: 225517 - RNA, 22 nt, Artificial Sequence
  Synthetic
uagaugagaagagggccuagga

SEQ ID NO: 225518 - RNA, 23 nt, Artificial Sequence
  Synthetic
guagaugagaagagggccuagga

SEQ ID NO: 225519 - RNA, 24 nt, Artificial Sequence
  Synthetic
cguagaugagaagagggccuagga

SEQ ID NO: 225520 - RNA, 18 nt, Artificial Sequence
  Synthetic
agucaauucaugcuagga

SEQ ID NO: 225521 - RNA, 19 nt, Artificial Sequence
  Synthetic
uagucaauucaugcuagga

SEQ ID NO: 225522 - RNA, 20 nt, Artificial Sequence
  Synthetic
auagucaauucaugcuagga

SEQ ID NO: 225523 - RNA, 21 nt, Artificial Sequence
  Synthetic
aauagucaauucaugcuagga

SEQ ID NO: 225524 - RNA, 22 nt, Artificial Sequence
  Synthetic
aaauagucaauucaugcuagga

SEQ ID NO: 225525 - RNA, 23 nt, Artificial Sequence
  Synthetic
gaaauagucaauucaugcuagga

SEQ ID NO: 225526 - RNA, 24 nt, Artificial Sequence
  Synthetic
ggaaauagucaauucaugcuagga

SEQ ID NO: 225527 - RNA, 18 nt, Artificial Sequence
  Synthetic
gaguugguuuugcuagga

SEQ ID NO: 225528 - RNA, 19 nt, Artificial Sequence
  Synthetic
agaguugguuuugcuagga

SEQ ID NO: 225529 - RNA, 20 nt, Artificial Sequence
  Synthetic
cagaguugguuuugcuagga

SEQ ID NO: 225530 - RNA, 21 nt, Artificial Sequence
  Synthetic
acagaguugguuuugcuagga

SEQ ID NO: 225531 - RNA, 22 nt, Artificial Sequence
  Synthetic
cacagaguugguuuugcuagga

SEQ ID NO: 225532 - RNA, 23 nt, Artificial Sequence
  Synthetic
ccacagaguugguuuugcuagga

SEQ ID NO: 225533 - RNA, 24 nt, Artificial Sequence
  Synthetic
accacagaguugguuuugcuagga

SEQ ID NO: 225534 - RNA, 18 nt, Artificial Sequence
  Synthetic
uugguuguacaucuagga

SEQ ID NO: 225535 - RNA, 19 nt, Artificial Sequence
  Synthetic
uuugguuguacaucuagga

SEQ ID NO: 225536 - RNA, 20 nt, Artificial Sequence
  Synthetic
uuuugguuguacaucuagga

SEQ ID NO: 225537 - RNA, 21 nt, Artificial Sequence
  Synthetic
uuuuugguuguacaucuagga

SEQ ID NO: 225538 - RNA, 22 nt, Artificial Sequence
  Synthetic
auuuuugguuguacaucuagga

SEQ ID NO: 225539 - RNA, 23 nt, Artificial Sequence
  Synthetic
cauuuuugguuguacaucuagga

SEQ ID NO: 225540 - RNA, 24 nt, Artificial Sequence
  Synthetic
acauuuuugguuguacaucuagga

SEQ ID NO: 225541 - RNA, 18 nt, Artificial Sequence
  Synthetic
ugauacguauuucuagga

SEQ ID NO: 225542 - RNA, 19 nt, Artificial Sequence
  Synthetic
augauacguauuucuagga

SEQ ID NO: 225543 - RNA, 20 nt, Artificial Sequence
  Synthetic
caugauacguauuucuagga

SEQ ID NO: 225544 - RNA, 21 nt, Artificial Sequence
  Synthetic
acaugauacguauuucuagga

SEQ ID NO: 225545 - RNA, 22 nt, Artificial Sequence
  Synthetic
gacaugauacguauuucuagga

SEQ ID NO: 225546 - RNA, 23 nt, Artificial Sequence
  Synthetic
agacaugauacguauuucuagga

SEQ ID NO: 225547 - RNA, 24 nt, Artificial Sequence
  Synthetic
aagacaugauacguauuucuagga

SEQ ID NO: 225548 - RNA, 18 nt, Artificial Sequence
  Synthetic
uuaacuguauuucuagga

SEQ ID NO: 225549 - RNA, 19 nt, Artificial Sequence
  Synthetic
guuaacuguauuucuagga

SEQ ID NO: 225550 - RNA, 20 nt, Artificial Sequence
  Synthetic
uguuaacuguauuucuagga

SEQ ID NO: 225551 - RNA, 21 nt, Artificial Sequence
  Synthetic
cuguuaacuguauuucuagga

SEQ ID NO: 225552 - RNA, 22 nt, Artificial Sequence
  Synthetic
ucuguuaacuguauuucuagga

SEQ ID NO: 225553 - RNA, 23 nt, Artificial Sequence
  Synthetic
aucuguuaacuguauuucuagga

SEQ ID NO: 225554 - RNA, 24 nt, Artificial Sequence
  Synthetic
uaucuguuaacuguauuucuagga

SEQ ID NO: 225555 - RNA, 18 nt, Artificial Sequence
  Synthetic
ugugucugagagguagga

SEQ ID NO: 225556 - RNA, 19 nt, Artificial Sequence
  Synthetic
uugugucugagagguagga

SEQ ID NO: 225557 - RNA, 20 nt, Artificial Sequence
  Synthetic
uuugugucugagagguagga

SEQ ID NO: 225558 - RNA, 21 nt, Artificial Sequence
  Synthetic
auuugugucugagagguagga

SEQ ID NO: 225559 - RNA, 22 nt, Artificial Sequence
  Synthetic
aauuugugucugagagguagga

SEQ ID NO: 225560 - RNA, 23 nt, Artificial Sequence
  Synthetic
uaauuugugucugagagguagga

SEQ ID NO: 225561 - RNA, 24 nt, Artificial Sequence
  Synthetic
auaauuugugucugagagguagga

SEQ ID NO: 225562 - RNA, 18 nt, Artificial Sequence
  Synthetic
gcuagggaguggguagga

SEQ ID NO: 225563 - RNA, 19 nt, Artificial Sequence
  Synthetic
ggcuagggaguggguagga

SEQ ID NO: 225564 - RNA, 20 nt, Artificial Sequence
  Synthetic
aggcuagggaguggguagga

SEQ ID NO: 225565 - RNA, 21 nt, Artificial Sequence
  Synthetic
caggcuagggaguggguagga

SEQ ID NO: 225566 - RNA, 22 nt, Artificial Sequence
  Synthetic
acaggcuagggaguggguagga

SEQ ID NO: 225567 - RNA, 23 nt, Artificial Sequence
  Synthetic
uacaggcuagggaguggguagga

SEQ ID NO: 225568 - RNA, 24 nt, Artificial Sequence
  Synthetic
auacaggcuagggaguggguagga

SEQ ID NO: 225569 - RNA, 18 nt, Artificial Sequence
  Synthetic
gaauaccaagaauuagga

SEQ ID NO: 225570 - RNA, 19 nt, Artificial Sequence
  Synthetic
agaauaccaagaauuagga

SEQ ID NO: 225571 - RNA, 20 nt, Artificial Sequence
  Synthetic
uagaauaccaagaauuagga

SEQ ID NO: 225572 - RNA, 21 nt, Artificial Sequence
  Synthetic
auagaauaccaagaauuagga

SEQ ID NO: 225573 - RNA, 22 nt, Artificial Sequence
  Synthetic
uauagaauaccaagaauuagga

SEQ ID NO: 225574 - RNA, 23 nt, Artificial Sequence
  Synthetic
auauagaauaccaagaauuagga

SEQ ID NO: 225575 - RNA, 24 nt, Artificial Sequence
  Synthetic
aauauagaauaccaagaauuagga

SEQ ID NO: 225576 - RNA, 18 nt, Artificial Sequence
  Synthetic
aguaguagugaauuagga

SEQ ID NO: 225577 - RNA, 19 nt, Artificial Sequence
  Synthetic
caguaguagugaauuagga

SEQ ID NO: 225578 - RNA, 20 nt, Artificial Sequence
  Synthetic
ccaguaguagugaauuagga

SEQ ID NO: 225579 - RNA, 21 nt, Artificial Sequence
  Synthetic
accaguaguagugaauuagga

SEQ ID NO: 225580 - RNA, 22 nt, Artificial Sequence
  Synthetic
aaccaguaguagugaauuagga

SEQ ID NO: 225581 - RNA, 23 nt, Artificial Sequence
  Synthetic
caaccaguaguagugaauuagga

SEQ ID NO: 225582 - RNA, 24 nt, Artificial Sequence
  Synthetic
acaaccaguaguagugaauuagga

SEQ ID NO: 225583 - RNA, 18 nt, Artificial Sequence
  Synthetic
ggaaggugguuauuagga

SEQ ID NO: 225584 - RNA, 19 nt, Artificial Sequence
  Synthetic
uggaaggugguuauuagga

SEQ ID NO: 225585 - RNA, 20 nt, Artificial Sequence
  Synthetic
uuggaaggugguuauuagga

SEQ ID NO: 225586 - RNA, 21 nt, Artificial Sequence
  Synthetic
cuuggaaggugguuauuagga

SEQ ID NO: 225587 - RNA, 22 nt, Artificial Sequence
  Synthetic
ucuuggaaggugguuauuagga

SEQ ID NO: 225588 - RNA, 23 nt, Artificial Sequence
  Synthetic
aucuuggaaggugguuauuagga

SEQ ID NO: 225589 - RNA, 24 nt, Artificial Sequence
  Synthetic
uaucuuggaaggugguuauuagga

SEQ ID NO: 225590 - RNA, 18 nt, Artificial Sequence
  Synthetic
accacauuuuuauuagga

SEQ ID NO: 225591 - RNA, 19 nt, Artificial Sequence
  Synthetic
uaccacauuuuuauuagga

SEQ ID NO: 225592 - RNA, 20 nt, Artificial Sequence
  Synthetic
uuaccacauuuuuauuagga

SEQ ID NO: 225593 - RNA, 21 nt, Artificial Sequence
  Synthetic
cuuaccacauuuuuauuagga

SEQ ID NO: 225594 - RNA, 22 nt, Artificial Sequence
  Synthetic
ucuuaccacauuuuuauuagga

SEQ ID NO: 225595 - RNA, 23 nt, Artificial Sequence
  Synthetic
aucuuaccacauuuuuauuagga

SEQ ID NO: 225596 - RNA, 24 nt, Artificial Sequence
  Synthetic
aaucuuaccacauuuuuauuagga

SEQ ID NO: 225597 - RNA, 18 nt, Artificial Sequence
  Synthetic
uagccuugugccuuagga

SEQ ID NO: 225598 - RNA, 19 nt, Artificial Sequence
  Synthetic
guagccuugugccuuagga

SEQ ID NO: 225599 - RNA, 20 nt, Artificial Sequence
  Synthetic
aguagccuugugccuuagga

SEQ ID NO: 225600 - RNA, 21 nt, Artificial Sequence
  Synthetic
aaguagccuugugccuuagga

SEQ ID NO: 225601 - RNA, 22 nt, Artificial Sequence
  Synthetic
caaguagccuugugccuuagga

SEQ ID NO: 225602 - RNA, 23 nt, Artificial Sequence
  Synthetic
gcaaguagccuugugccuuagga

SEQ ID NO: 225603 - RNA, 24 nt, Artificial Sequence
  Synthetic
ggcaaguagccuugugccuuagga

SEQ ID NO: 225604 - RNA, 18 nt, Artificial Sequence
  Synthetic
gaaggaucauccuuagga

SEQ ID NO: 225605 - RNA, 19 nt, Artificial Sequence
  Synthetic
ggaaggaucauccuuagga

SEQ ID NO: 225606 - RNA, 20 nt, Artificial Sequence
  Synthetic
aggaaggaucauccuuagga

SEQ ID NO: 225607 - RNA, 21 nt, Artificial Sequence
  Synthetic
caggaaggaucauccuuagga

SEQ ID NO: 225608 - RNA, 22 nt, Artificial Sequence
  Synthetic
ccaggaaggaucauccuuagga

SEQ ID NO: 225609 - RNA, 23 nt, Artificial Sequence
  Synthetic
accaggaaggaucauccuuagga

SEQ ID NO: 225610 - RNA, 24 nt, Artificial Sequence
  Synthetic
caccaggaaggaucauccuuagga

SEQ ID NO: 225611 - RNA, 18 nt, Artificial Sequence
  Synthetic
aguaaugggaaguuagga

SEQ ID NO: 225612 - RNA, 19 nt, Artificial Sequence
  Synthetic
uaguaaugggaaguuagga

SEQ ID NO: 225613 - RNA, 20 nt, Artificial Sequence
  Synthetic
auaguaaugggaaguuagga

SEQ ID NO: 225614 - RNA, 21 nt, Artificial Sequence
  Synthetic
uauaguaaugggaaguuagga

SEQ ID NO: 225615 - RNA, 22 nt, Artificial Sequence
  Synthetic
auauaguaaugggaaguuagga

SEQ ID NO: 225616 - RNA, 23 nt, Artificial Sequence
  Synthetic
cauauaguaaugggaaguuagga

SEQ ID NO: 225617 - RNA, 24 nt, Artificial Sequence
  Synthetic
ucauauaguaaugggaaguuagga

SEQ ID NO: 225618 - RNA, 18 nt, Artificial Sequence
  Synthetic
uuauaaaugaaguuagga

SEQ ID NO: 225619 - RNA, 19 nt, Artificial Sequence
  Synthetic
auuauaaaugaaguuagga

SEQ ID NO: 225620 - RNA, 20 nt, Artificial Sequence
  Synthetic
gauuauaaaugaaguuagga

SEQ ID NO: 225621 - RNA, 21 nt, Artificial Sequence
  Synthetic
ugauuauaaaugaaguuagga

SEQ ID NO: 225622 - RNA, 22 nt, Artificial Sequence
  Synthetic
uugauuauaaaugaaguuagga

SEQ ID NO: 225623 - RNA, 23 nt, Artificial Sequence
  Synthetic
cuugauuauaaaugaaguuagga

SEQ ID NO: 225624 - RNA, 24 nt, Artificial Sequence
  Synthetic
ccuugauuauaaaugaaguuagga

SEQ ID NO: 225625 - RNA, 18 nt, Artificial Sequence
  Synthetic
uuagcugauugguuagga

SEQ ID NO: 225626 - RNA, 19 nt, Artificial Sequence
  Synthetic
uuuagcugauugguuagga

SEQ ID NO: 225627 - RNA, 20 nt, Artificial Sequence
  Synthetic
uuuuagcugauugguuagga

SEQ ID NO: 225628 - RNA, 21 nt, Artificial Sequence
  Synthetic
guuuuagcugauugguuagga

SEQ ID NO: 225629 - RNA, 22 nt, Artificial Sequence
  Synthetic
aguuuuagcugauugguuagga

SEQ ID NO: 225630 - RNA, 23 nt, Artificial Sequence
  Synthetic
aaguuuuagcugauugguuagga

SEQ ID NO: 225631 - RNA, 24 nt, Artificial Sequence
  Synthetic
aaaguuuuagcugauugguuagga

SEQ ID NO: 225632 - RNA, 18 nt, Artificial Sequence
  Synthetic
guaaucugucauuuagga

SEQ ID NO: 225633 - RNA, 19 nt, Artificial Sequence
  Synthetic
aguaaucugucauuuagga

SEQ ID NO: 225634 - RNA, 20 nt, Artificial Sequence
  Synthetic
uaguaaucugucauuuagga

SEQ ID NO: 225635 - RNA, 21 nt, Artificial Sequence
  Synthetic
auaguaaucugucauuuagga

SEQ ID NO: 225636 - RNA, 22 nt, Artificial Sequence
  Synthetic
gauaguaaucugucauuuagga

SEQ ID NO: 225637 - RNA, 23 nt, Artificial Sequence
  Synthetic
ugauaguaaucugucauuuagga

SEQ ID NO: 225638 - RNA, 24 nt, Artificial Sequence
  Synthetic
uugauaguaaucugucauuuagga

SEQ ID NO: 225639 - RNA, 18 nt, Artificial Sequence
  Synthetic
ucaagggcauauuuagga

SEQ ID NO: 225640 - RNA, 19 nt, Artificial Sequence
  Synthetic
gucaagggcauauuuagga

SEQ ID NO: 225641 - RNA, 20 nt, Artificial Sequence
  Synthetic
agucaagggcauauuuagga

SEQ ID NO: 225642 - RNA, 21 nt, Artificial Sequence
  Synthetic
aagucaagggcauauuuagga

SEQ ID NO: 225643 - RNA, 22 nt, Artificial Sequence
  Synthetic
aaagucaagggcauauuuagga

SEQ ID NO: 225644 - RNA, 23 nt, Artificial Sequence
  Synthetic
aaaagucaagggcauauuuagga

SEQ ID NO: 225645 - RNA, 24 nt, Artificial Sequence
  Synthetic
caaaagucaagggcauauuuagga

SEQ ID NO: 225646 - RNA, 18 nt, Artificial Sequence
  Synthetic
uuguuuguuuauuuagga

SEQ ID NO: 225647 - RNA, 19 nt, Artificial Sequence
  Synthetic
uuuguuuguuuauuuagga

SEQ ID NO: 225648 - RNA, 20 nt, Artificial Sequence
  Synthetic
auuuguuuguuuauuuagga

SEQ ID NO: 225649 - RNA, 21 nt, Artificial Sequence
  Synthetic
cauuuguuuguuuauuuagga

SEQ ID NO: 225650 - RNA, 22 nt, Artificial Sequence
  Synthetic
ucauuuguuuguuuauuuagga

SEQ ID NO: 225651 - RNA, 23 nt, Artificial Sequence
  Synthetic
uucauuuguuuguuuauuuagga

SEQ ID NO: 225652 - RNA, 24 nt, Artificial Sequence
  Synthetic
guucauuuguuuguuuauuuagga

SEQ ID NO: 225653 - RNA, 18 nt, Artificial Sequence
  Synthetic
cacucuugagcuuuagga

SEQ ID NO: 225654 - RNA, 19 nt, Artificial Sequence
  Synthetic
ucacucuugagcuuuagga

SEQ ID NO: 225655 - RNA, 20 nt, Artificial Sequence
  Synthetic
uucacucuugagcuuuagga

SEQ ID NO: 225656 - RNA, 21 nt, Artificial Sequence
  Synthetic
uuucacucuugagcuuuagga

SEQ ID NO: 225657 - RNA, 22 nt, Artificial Sequence
  Synthetic
cuuucacucuugagcuuuagga

SEQ ID NO: 225658 - RNA, 23 nt, Artificial Sequence
  Synthetic
ccuuucacucuugagcuuuagga

SEQ ID NO: 225659 - RNA, 24 nt, Artificial Sequence
  Synthetic
uccuuucacucuugagcuuuagga

SEQ ID NO: 225660 - RNA, 18 nt, Artificial Sequence
  Synthetic
auaauggaaaguuuagga

SEQ ID NO: 225661 - RNA, 19 nt, Artificial Sequence
  Synthetic
gauaauggaaaguuuagga

SEQ ID NO: 225662 - RNA, 20 nt, Artificial Sequence
  Synthetic
agauaauggaaaguuuagga

SEQ ID NO: 225663 - RNA, 21 nt, Artificial Sequence
  Synthetic
cagauaauggaaaguuuagga

SEQ ID NO: 225664 - RNA, 22 nt, Artificial Sequence
  Synthetic
ccagauaauggaaaguuuagga

SEQ ID NO: 225665 - RNA, 23 nt, Artificial Sequence
  Synthetic
accagauaauggaaaguuuagga

SEQ ID NO: 225666 - RNA, 24 nt, Artificial Sequence
  Synthetic
aaccagauaauggaaaguuuagga

SEQ ID NO: 225667 - RNA, 18 nt, Artificial Sequence
  Synthetic
aauuuauauuguuuagga

SEQ ID NO: 225668 - RNA, 19 nt, Artificial Sequence
  Synthetic
uaauuuauauuguuuagga

SEQ ID NO: 225669 - RNA, 20 nt, Artificial Sequence
  Synthetic
auaauuuauauuguuuagga

SEQ ID NO: 225670 - RNA, 21 nt, Artificial Sequence
  Synthetic
uauaauuuauauuguuuagga

SEQ ID NO: 225671 - RNA, 22 nt, Artificial Sequence
  Synthetic
cuauaauuuauauuguuuagga

SEQ ID NO: 225672 - RNA, 23 nt, Artificial Sequence
  Synthetic
gcuauaauuuauauuguuuagga

SEQ ID NO: 225673 - RNA, 24 nt, Artificial Sequence
  Synthetic
ggcuauaauuuauauuguuuagga

SEQ ID NO: 225674 - RNA, 18 nt, Artificial Sequence
  Synthetic
aaaucaguaauuuuagga

SEQ ID NO: 225675 - RNA, 19 nt, Artificial Sequence
  Synthetic
aaaaucaguaauuuuagga

SEQ ID NO: 225676 - RNA, 20 nt, Artificial Sequence
  Synthetic
caaaaucaguaauuuuagga

SEQ ID NO: 225677 - RNA, 21 nt, Artificial Sequence
  Synthetic
ucaaaaucaguaauuuuagga

SEQ ID NO: 225678 - RNA, 22 nt, Artificial Sequence
  Synthetic
aucaaaaucaguaauuuuagga

SEQ ID NO: 225679 - RNA, 23 nt, Artificial Sequence
  Synthetic
aaucaaaaucaguaauuuuagga

SEQ ID NO: 225680 - RNA, 24 nt, Artificial Sequence
  Synthetic
aaaucaaaaucaguaauuuuagga

SEQ ID NO: 225681 - RNA, 18 nt, Artificial Sequence
  Synthetic
aaacaaauccuuuuagga

SEQ ID NO: 225682 - RNA, 19 nt, Artificial Sequence
  Synthetic
uaaacaaauccuuuuagga

SEQ ID NO: 225683 - RNA, 20 nt, Artificial Sequence
  Synthetic
uuaaacaaauccuuuuagga

SEQ ID NO: 225684 - RNA, 21 nt, Artificial Sequence
  Synthetic
uuuaaacaaauccuuuuagga

SEQ ID NO: 225685 - RNA, 22 nt, Artificial Sequence
  Synthetic
uuuuaaacaaauccuuuuagga

SEQ ID NO: 225686 - RNA, 23 nt, Artificial Sequence
  Synthetic
auuuuaaacaaauccuuuuagga

SEQ ID NO: 225687 - RNA, 24 nt, Artificial Sequence
  Synthetic
uauuuuaaacaaauccuuuuagga

SEQ ID NO: 225688 - RNA, 18 nt, Artificial Sequence
  Synthetic
aagaaaccaguuuuagga

SEQ ID NO: 225689 - RNA, 19 nt, Artificial Sequence
  Synthetic
uaagaaaccaguuuuagga

SEQ ID NO: 225690 - RNA, 20 nt, Artificial Sequence
  Synthetic
auaagaaaccaguuuuagga

SEQ ID NO: 225691 - RNA, 21 nt, Artificial Sequence
  Synthetic
uauaagaaaccaguuuuagga

SEQ ID NO: 225692 - RNA, 22 nt, Artificial Sequence
  Synthetic
auauaagaaaccaguuuuagga

SEQ ID NO: 225693 - RNA, 23 nt, Artificial Sequence
  Synthetic
aauauaagaaaccaguuuuagga

SEQ ID NO: 225694 - RNA, 24 nt, Artificial Sequence
  Synthetic
gaauauaagaaaccaguuuuagga

SEQ ID NO: 225695 - RNA, 18 nt, Artificial Sequence
  Synthetic
uacuuuucuguuuuagga

SEQ ID NO: 225696 - RNA, 19 nt, Artificial Sequence
  Synthetic
uuacuuuucuguuuuagga

SEQ ID NO: 225697 - RNA, 20 nt, Artificial Sequence
  Synthetic
auuacuuuucuguuuuagga

SEQ ID NO: 225698 - RNA, 21 nt, Artificial Sequence
  Synthetic
cauuacuuuucuguuuuagga

SEQ ID NO: 225699 - RNA, 22 nt, Artificial Sequence
  Synthetic
ucauuacuuuucuguuuuagga

SEQ ID NO: 225700 - RNA, 23 nt, Artificial Sequence
  Synthetic
uucauuacuuuucuguuuuagga

SEQ ID NO: 225701 - RNA, 24 nt, Artificial Sequence
  Synthetic
guucauuacuuuucuguuuuagga

SEQ ID NO: 225702 - RNA, 18 nt, Artificial Sequence
  Synthetic
aaaaauauauuuuuagga

SEQ ID NO: 225703 - RNA, 19 nt, Artificial Sequence
  Synthetic
aaaaaauauauuuuuagga

SEQ ID NO: 225704 - RNA, 20 nt, Artificial Sequence
  Synthetic
aaaaaaauauauuuuuagga

SEQ ID NO: 225705 - RNA, 21 nt, Artificial Sequence
  Synthetic
uaaaaaaauauauuuuuagga

SEQ ID NO: 225706 - RNA, 22 nt, Artificial Sequence
  Synthetic
uuaaaaaaauauauuuuuagga

SEQ ID NO: 225707 - RNA, 23 nt, Artificial Sequence
  Synthetic
auuaaaaaaauauauuuuuagga

SEQ ID NO: 225708 - RNA, 24 nt, Artificial Sequence
  Synthetic
aauuaaaaaaauauauuuuuagga

SEQ ID NO: 225709 - RNA, 18 nt, Artificial Sequence
  Synthetic
cccugaaaacugaacgga

SEQ ID NO: 225710 - RNA, 19 nt, Artificial Sequence
  Synthetic
gcccugaaaacugaacgga

SEQ ID NO: 225711 - RNA, 20 nt, Artificial Sequence
  Synthetic
ugcccugaaaacugaacgga

SEQ ID NO: 225712 - RNA, 21 nt, Artificial Sequence
  Synthetic
uugcccugaaaacugaacgga

SEQ ID NO: 225713 - RNA, 22 nt, Artificial Sequence
  Synthetic
auugcccugaaaacugaacgga

SEQ ID NO: 225714 - RNA, 23 nt, Artificial Sequence
  Synthetic
aauugcccugaaaacugaacgga

SEQ ID NO: 225715 - RNA, 24 nt, Artificial Sequence
  Synthetic
gaauugcccugaaaacugaacgga

SEQ ID NO: 225716 - RNA, 18 nt, Artificial Sequence
  Synthetic
aauuguucuagccacgga

SEQ ID NO: 225717 - RNA, 19 nt, Artificial Sequence
  Synthetic
gaauuguucuagccacgga

SEQ ID NO: 225718 - RNA, 20 nt, Artificial Sequence
  Synthetic
ugaauuguucuagccacgga

SEQ ID NO: 225719 - RNA, 21 nt, Artificial Sequence
  Synthetic
augaauuguucuagccacgga

SEQ ID NO: 225720 - RNA, 22 nt, Artificial Sequence
  Synthetic
gaugaauuguucuagccacgga

SEQ ID NO: 225721 - RNA, 23 nt, Artificial Sequence
  Synthetic
agaugaauuguucuagccacgga

SEQ ID NO: 225722 - RNA, 24 nt, Artificial Sequence
  Synthetic
gagaugaauuguucuagccacgga

SEQ ID NO: 225723 - RNA, 18 nt, Artificial Sequence
  Synthetic
uugggguggagggacgga

SEQ ID NO: 225724 - RNA, 19 nt, Artificial Sequence
  Synthetic
guugggguggagggacgga

SEQ ID NO: 225725 - RNA, 20 nt, Artificial Sequence
  Synthetic
gguugggguggagggacgga

SEQ ID NO: 225726 - RNA, 21 nt, Artificial Sequence
  Synthetic
ugguugggguggagggacgga

SEQ ID NO: 225727 - RNA, 22 nt, Artificial Sequence
  Synthetic
augguugggguggagggacgga

SEQ ID NO: 225728 - RNA, 23 nt, Artificial Sequence
  Synthetic
uaugguugggguggagggacgga

SEQ ID NO: 225729 - RNA, 24 nt, Artificial Sequence
  Synthetic
guaugguugggguggagggacgga

SEQ ID NO: 225730 - RNA, 18 nt, Artificial Sequence
  Synthetic
uagaacaaucauuacgga

SEQ ID NO: 225731 - RNA, 19 nt, Artificial Sequence
  Synthetic
cuagaacaaucauuacgga

SEQ ID NO: 225732 - RNA, 20 nt, Artificial Sequence
  Synthetic
gcuagaacaaucauuacgga

SEQ ID NO: 225733 - RNA, 21 nt, Artificial Sequence
  Synthetic
ggcuagaacaaucauuacgga

SEQ ID NO: 225734 - RNA, 22 nt, Artificial Sequence
  Synthetic
aggcuagaacaaucauuacgga

SEQ ID NO: 225735 - RNA, 23 nt, Artificial Sequence
  Synthetic
gaggcuagaacaaucauuacgga

SEQ ID NO: 225736 - RNA, 24 nt, Artificial Sequence
  Synthetic
agaggcuagaacaaucauuacgga

SEQ ID NO: 225737 - RNA, 18 nt, Artificial Sequence
  Synthetic
ucacuuuuauguuacgga

SEQ ID NO: 225738 - RNA, 19 nt, Artificial Sequence
  Synthetic
uucacuuuuauguuacgga

SEQ ID NO: 225739 - RNA, 20 nt, Artificial Sequence
  Synthetic
uuucacuuuuauguuacgga

SEQ ID NO: 225740 - RNA, 21 nt, Artificial Sequence
  Synthetic
cuuucacuuuuauguuacgga

SEQ ID NO: 225741 - RNA, 22 nt, Artificial Sequence
  Synthetic
ccuuucacuuuuauguuacgga

SEQ ID NO: 225742 - RNA, 23 nt, Artificial Sequence
  Synthetic
accuuucacuuuuauguuacgga

SEQ ID NO: 225743 - RNA, 24 nt, Artificial Sequence
  Synthetic
caccuuucacuuuuauguuacgga

SEQ ID NO: 225744 - RNA, 18 nt, Artificial Sequence
  Synthetic
ucccaggacccuagcgga

SEQ ID NO: 225745 - RNA, 19 nt, Artificial Sequence
  Synthetic
aucccaggacccuagcgga

SEQ ID NO: 225746 - RNA, 20 nt, Artificial Sequence
  Synthetic
caucccaggacccuagcgga

SEQ ID NO: 225747 - RNA, 21 nt, Artificial Sequence
  Synthetic
ucaucccaggacccuagcgga

SEQ ID NO: 225748 - RNA, 22 nt, Artificial Sequence
  Synthetic
cucaucccaggacccuagcgga

SEQ ID NO: 225749 - RNA, 23 nt, Artificial Sequence
  Synthetic
ucucaucccaggacccuagcgga

SEQ ID NO: 225750 - RNA, 24 nt, Artificial Sequence
  Synthetic
uucucaucccaggacccuagcgga

SEQ ID NO: 225751 - RNA, 18 nt, Artificial Sequence
  Synthetic
uucaggcucauaggcgga

SEQ ID NO: 225752 - RNA, 19 nt, Artificial Sequence
  Synthetic
uuucaggcucauaggcgga

SEQ ID NO: 225753 - RNA, 20 nt, Artificial Sequence
  Synthetic
uuuucaggcucauaggcgga

SEQ ID NO: 225754 - RNA, 21 nt, Artificial Sequence
  Synthetic
auuuucaggcucauaggcgga

SEQ ID NO: 225755 - RNA, 22 nt, Artificial Sequence
  Synthetic
gauuuucaggcucauaggcgga

SEQ ID NO: 225756 - RNA, 23 nt, Artificial Sequence
  Synthetic
ggauuuucaggcucauaggcgga

SEQ ID NO: 225757 - RNA, 24 nt, Artificial Sequence
  Synthetic
uggauuuucaggcucauaggcgga

SEQ ID NO: 225758 - RNA, 18 nt, Artificial Sequence
  Synthetic
ggguggagguugggcgga

SEQ ID NO: 225759 - RNA, 19 nt, Artificial Sequence
  Synthetic
aggguggagguugggcgga

SEQ ID NO: 225760 - RNA, 20 nt, Artificial Sequence
  Synthetic
gaggguggagguugggcgga

SEQ ID NO: 225761 - RNA, 21 nt, Artificial Sequence
  Synthetic
agaggguggagguugggcgga

SEQ ID NO: 225762 - RNA, 22 nt, Artificial Sequence
  Synthetic
cagaggguggagguugggcgga

SEQ ID NO: 225763 - RNA, 23 nt, Artificial Sequence
  Synthetic
ucagaggguggagguugggcgga

SEQ ID NO: 225764 - RNA, 24 nt, Artificial Sequence
  Synthetic
aucagaggguggagguugggcgga

SEQ ID NO: 225765 - RNA, 18 nt, Artificial Sequence
  Synthetic
uaacguacucccaucgga

SEQ ID NO: 225766 - RNA, 19 nt, Artificial Sequence
  Synthetic
auaacguacucccaucgga

SEQ ID NO: 225767 - RNA, 20 nt, Artificial Sequence
  Synthetic
gauaacguacucccaucgga

SEQ ID NO: 225768 - RNA, 21 nt, Artificial Sequence
  Synthetic
agauaacguacucccaucgga

SEQ ID NO: 225769 - RNA, 22 nt, Artificial Sequence
  Synthetic
gagauaacguacucccaucgga

SEQ ID NO: 225770 - RNA, 23 nt, Artificial Sequence
  Synthetic
ugagauaacguacucccaucgga

SEQ ID NO: 225771 - RNA, 24 nt, Artificial Sequence
  Synthetic
gugagauaacguacucccaucgga

SEQ ID NO: 225772 - RNA, 18 nt, Artificial Sequence
  Synthetic
uccuucugagggcucgga

SEQ ID NO: 225773 - RNA, 19 nt, Artificial Sequence
  Synthetic
uuccuucugagggcucgga

SEQ ID NO: 225774 - RNA, 20 nt, Artificial Sequence
  Synthetic
guuccuucugagggcucgga

SEQ ID NO: 225775 - RNA, 21 nt, Artificial Sequence
  Synthetic
gguuccuucugagggcucgga

SEQ ID NO: 225776 - RNA, 22 nt, Artificial Sequence
  Synthetic
ugguuccuucugagggcucgga

SEQ ID NO: 225777 - RNA, 23 nt, Artificial Sequence
  Synthetic
uugguuccuucugagggcucgga

SEQ ID NO: 225778 - RNA, 24 nt, Artificial Sequence
  Synthetic
guugguuccuucugagggcucgga

SEQ ID NO: 225779 - RNA, 18 nt, Artificial Sequence
  Synthetic
uuucuuuuagggcucgga

SEQ ID NO: 225780 - RNA, 19 nt, Artificial Sequence
  Synthetic
guuucuuuuagggcucgga

SEQ ID NO: 225781 - RNA, 20 nt, Artificial Sequence
  Synthetic
aguuucuuuuagggcucgga

SEQ ID NO: 225782 - RNA, 21 nt, Artificial Sequence
  Synthetic
uaguuucuuuuagggcucgga

SEQ ID NO: 225783 - RNA, 22 nt, Artificial Sequence
  Synthetic
guaguuucuuuuagggcucgga

SEQ ID NO: 225784 - RNA, 23 nt, Artificial Sequence
  Synthetic
aguaguuucuuuuagggcucgga

SEQ ID NO: 225785 - RNA, 24 nt, Artificial Sequence
  Synthetic
caguaguuucuuuuagggcucgga

SEQ ID NO: 225786 - RNA, 18 nt, Artificial Sequence
  Synthetic
uuccacagaucucucgga

SEQ ID NO: 225787 - RNA, 19 nt, Artificial Sequence
  Synthetic
auuccacagaucucucgga

SEQ ID NO: 225788 - RNA, 20 nt, Artificial Sequence
  Synthetic
aauuccacagaucucucgga

SEQ ID NO: 225789 - RNA, 21 nt, Artificial Sequence
  Synthetic
aaauuccacagaucucucgga

SEQ ID NO: 225790 - RNA, 22 nt, Artificial Sequence
  Synthetic
aaaauuccacagaucucucgga

SEQ ID NO: 225791 - RNA, 23 nt, Artificial Sequence
  Synthetic
caaaauuccacagaucucucgga

SEQ ID NO: 225792 - RNA, 24 nt, Artificial Sequence
  Synthetic
ucaaaauuccacagaucucucgga

SEQ ID NO: 225793 - RNA, 18 nt, Artificial Sequence
  Synthetic
aguuaaauugguuucgga

SEQ ID NO: 225794 - RNA, 19 nt, Artificial Sequence
  Synthetic
aaguuaaauugguuucgga

SEQ ID NO: 225795 - RNA, 20 nt, Artificial Sequence
  Synthetic
aaaguuaaauugguuucgga

SEQ ID NO: 225796 - RNA, 21 nt, Artificial Sequence
  Synthetic
uaaaguuaaauugguuucgga

SEQ ID NO: 225797 - RNA, 22 nt, Artificial Sequence
  Synthetic
cuaaaguuaaauugguuucgga

SEQ ID NO: 225798 - RNA, 23 nt, Artificial Sequence
  Synthetic
ccuaaaguuaaauugguuucgga

SEQ ID NO: 225799 - RNA, 24 nt, Artificial Sequence
  Synthetic
accuaaaguuaaauugguuucgga

SEQ ID NO: 225800 - RNA, 18 nt, Artificial Sequence
  Synthetic
cauuccuaaacaaaggga

SEQ ID NO: 225801 - RNA, 19 nt, Artificial Sequence
  Synthetic
ccauuccuaaacaaaggga

SEQ ID NO: 225802 - RNA, 20 nt, Artificial Sequence
  Synthetic
cccauuccuaaacaaaggga

SEQ ID NO: 225803 - RNA, 21 nt, Artificial Sequence
  Synthetic
ucccauuccuaaacaaaggga

SEQ ID NO: 225804 - RNA, 22 nt, Artificial Sequence
  Synthetic
uucccauuccuaaacaaaggga

SEQ ID NO: 225805 - RNA, 23 nt, Artificial Sequence
  Synthetic
guucccauuccuaaacaaaggga

SEQ ID NO: 225806 - RNA, 24 nt, Artificial Sequence
  Synthetic
uguucccauuccuaaacaaaggga

SEQ ID NO: 225807 - RNA, 18 nt, Artificial Sequence
  Synthetic
agggaggaaagaaaggga

SEQ ID NO: 225808 - RNA, 19 nt, Artificial Sequence
  Synthetic
aagggaggaaagaaaggga

SEQ ID NO: 225809 - RNA, 20 nt, Artificial Sequence
  Synthetic
gaagggaggaaagaaaggga

SEQ ID NO: 225810 - RNA, 21 nt, Artificial Sequence
  Synthetic
agaagggaggaaagaaaggga

SEQ ID NO: 225811 - RNA, 22 nt, Artificial Sequence
  Synthetic
aagaagggaggaaagaaaggga

SEQ ID NO: 225812 - RNA, 23 nt, Artificial Sequence
  Synthetic
aaagaagggaggaaagaaaggga

SEQ ID NO: 225813 - RNA, 24 nt, Artificial Sequence
  Synthetic
caaagaagggaggaaagaaaggga

SEQ ID NO: 225814 - RNA, 18 nt, Artificial Sequence
  Synthetic
aaagaaguaauaaaggga

SEQ ID NO: 225815 - RNA, 19 nt, Artificial Sequence
  Synthetic
uaaagaaguaauaaaggga

SEQ ID NO: 225816 - RNA, 20 nt, Artificial Sequence
  Synthetic
cuaaagaaguaauaaaggga

SEQ ID NO: 225817 - RNA, 21 nt, Artificial Sequence
  Synthetic
acuaaagaaguaauaaaggga

SEQ ID NO: 225818 - RNA, 22 nt, Artificial Sequence
  Synthetic
aacuaaagaaguaauaaaggga

SEQ ID NO: 225819 - RNA, 23 nt, Artificial Sequence
  Synthetic
aaacuaaagaaguaauaaaggga

SEQ ID NO: 225820 - RNA, 24 nt, Artificial Sequence
  Synthetic
uaaacuaaagaaguaauaaaggga

SEQ ID NO: 225821 - RNA, 18 nt, Artificial Sequence
  Synthetic
gucauauagcuaaaggga

SEQ ID NO: 225822 - RNA, 19 nt, Artificial Sequence
  Synthetic
agucauauagcuaaaggga

SEQ ID NO: 225823 - RNA, 20 nt, Artificial Sequence
  Synthetic
aagucauauagcuaaaggga

SEQ ID NO: 225824 - RNA, 21 nt, Artificial Sequence
  Synthetic
aaagucauauagcuaaaggga

SEQ ID NO: 225825 - RNA, 22 nt, Artificial Sequence
  Synthetic
caaagucauauagcuaaaggga

SEQ ID NO: 225826 - RNA, 23 nt, Artificial Sequence
  Synthetic
ucaaagucauauagcuaaaggga

SEQ ID NO: 225827 - RNA, 24 nt, Artificial Sequence
  Synthetic
cucaaagucauauagcuaaaggga

SEQ ID NO: 225828 - RNA, 18 nt, Artificial Sequence
  Synthetic
ccuaaggaauuaaaggga

SEQ ID NO: 225829 - RNA, 19 nt, Artificial Sequence
  Synthetic
uccuaaggaauuaaaggga

SEQ ID NO: 225830 - RNA, 20 nt, Artificial Sequence
  Synthetic
uuccuaaggaauuaaaggga

SEQ ID NO: 225831 - RNA, 21 nt, Artificial Sequence
  Synthetic
uuuccuaaggaauuaaaggga

SEQ ID NO: 225832 - RNA, 22 nt, Artificial Sequence
  Synthetic
uuuuccuaaggaauuaaaggga

SEQ ID NO: 225833 - RNA, 23 nt, Artificial Sequence
  Synthetic
guuuuccuaaggaauuaaaggga

SEQ ID NO: 225834 - RNA, 24 nt, Artificial Sequence
  Synthetic
gguuuuccuaaggaauuaaaggga

SEQ ID NO: 225835 - RNA, 18 nt, Artificial Sequence
  Synthetic
gucugauaacccaaggga

SEQ ID NO: 225836 - RNA, 19 nt, Artificial Sequence
  Synthetic
agucugauaacccaaggga

SEQ ID NO: 225837 - RNA, 20 nt, Artificial Sequence
  Synthetic
aagucugauaacccaaggga

SEQ ID NO: 225838 - RNA, 21 nt, Artificial Sequence
  Synthetic
aaagucugauaacccaaggga

SEQ ID NO: 225839 - RNA, 22 nt, Artificial Sequence
  Synthetic
uaaagucugauaacccaaggga

SEQ ID NO: 225840 - RNA, 23 nt, Artificial Sequence
  Synthetic
guaaagucugauaacccaaggga

SEQ ID NO: 225841 - RNA, 24 nt, Artificial Sequence
  Synthetic
uguaaagucugauaacccaaggga

SEQ ID NO: 225842 - RNA, 18 nt, Artificial Sequence
  Synthetic
guaacuaauuccaaggga

SEQ ID NO: 225843 - RNA, 19 nt, Artificial Sequence
  Synthetic
aguaacuaauuccaaggga

SEQ ID NO: 225844 - RNA, 20 nt, Artificial Sequence
  Synthetic
aaguaacuaauuccaaggga

SEQ ID NO: 225845 - RNA, 21 nt, Artificial Sequence
  Synthetic
gaaguaacuaauuccaaggga

SEQ ID NO: 225846 - RNA, 22 nt, Artificial Sequence
  Synthetic
ugaaguaacuaauuccaaggga

SEQ ID NO: 225847 - RNA, 23 nt, Artificial Sequence
  Synthetic
augaaguaacuaauuccaaggga

SEQ ID NO: 225848 - RNA, 24 nt, Artificial Sequence
  Synthetic
uaugaaguaacuaauuccaaggga

SEQ ID NO: 225849 - RNA, 18 nt, Artificial Sequence
  Synthetic
ggacaaucaggcaaggga

SEQ ID NO: 225850 - RNA, 19 nt, Artificial Sequence
  Synthetic
aggacaaucaggcaaggga

SEQ ID NO: 225851 - RNA, 20 nt, Artificial Sequence
  Synthetic
caggacaaucaggcaaggga

SEQ ID NO: 225852 - RNA, 21 nt, Artificial Sequence
  Synthetic
ccaggacaaucaggcaaggga

SEQ ID NO: 225853 - RNA, 22 nt, Artificial Sequence
  Synthetic
gccaggacaaucaggcaaggga

SEQ ID NO: 225854 - RNA, 23 nt, Artificial Sequence
  Synthetic
ggccaggacaaucaggcaaggga

SEQ ID NO: 225855 - RNA, 24 nt, Artificial Sequence
  Synthetic
uggccaggacaaucaggcaaggga

SEQ ID NO: 225856 - RNA, 18 nt, Artificial Sequence
  Synthetic
uuaccaggccucaaggga

SEQ ID NO: 225857 - RNA, 19 nt, Artificial Sequence
  Synthetic
uuuaccaggccucaaggga

SEQ ID NO: 225858 - RNA, 20 nt, Artificial Sequence
  Synthetic
cuuuaccaggccucaaggga

SEQ ID NO: 225859 - RNA, 21 nt, Artificial Sequence
  Synthetic
acuuuaccaggccucaaggga

SEQ ID NO: 225860 - RNA, 22 nt, Artificial Sequence
  Synthetic
aacuuuaccaggccucaaggga

SEQ ID NO: 225861 - RNA, 23 nt, Artificial Sequence
  Synthetic
aaacuuuaccaggccucaaggga

SEQ ID NO: 225862 - RNA, 24 nt, Artificial Sequence
  Synthetic
aaaacuuuaccaggccucaaggga

SEQ ID NO: 225863 - RNA, 18 nt, Artificial Sequence
  Synthetic
acuuccuggcucaaggga

SEQ ID NO: 225864 - RNA, 19 nt, Artificial Sequence
  Synthetic
uacuuccuggcucaaggga

SEQ ID NO: 225865 - RNA, 20 nt, Artificial Sequence
  Synthetic
guacuuccuggcucaaggga

SEQ ID NO: 225866 - RNA, 21 nt, Artificial Sequence
  Synthetic
uguacuuccuggcucaaggga

SEQ ID NO: 225867 - RNA, 22 nt, Artificial Sequence
  Synthetic
uuguacuuccuggcucaaggga

SEQ ID NO: 225868 - RNA, 23 nt, Artificial Sequence
  Synthetic
auuguacuuccuggcucaaggga

SEQ ID NO: 225869 - RNA, 24 nt, Artificial Sequence
  Synthetic
aauuguacuuccuggcucaaggga

SEQ ID NO: 225870 - RNA, 18 nt, Artificial Sequence
  Synthetic
uccccacaugucaaggga

SEQ ID NO: 225871 - RNA, 19 nt, Artificial Sequence
  Synthetic
auccccacaugucaaggga

SEQ ID NO: 225872 - RNA, 20 nt, Artificial Sequence
  Synthetic
aauccccacaugucaaggga

SEQ ID NO: 225873 - RNA, 21 nt, Artificial Sequence
  Synthetic
caauccccacaugucaaggga

SEQ ID NO: 225874 - RNA, 22 nt, Artificial Sequence
  Synthetic
acaauccccacaugucaaggga

SEQ ID NO: 225875 - RNA, 23 nt, Artificial Sequence
  Synthetic
cacaauccccacaugucaaggga

SEQ ID NO: 225876 - RNA, 24 nt, Artificial Sequence
  Synthetic
ccacaauccccacaugucaaggga

SEQ ID NO: 225877 - RNA, 18 nt, Artificial Sequence
  Synthetic
uuaguaacccagaaggga

SEQ ID NO: 225878 - RNA, 19 nt, Artificial Sequence
  Synthetic
cuuaguaacccagaaggga

SEQ ID NO: 225879 - RNA, 20 nt, Artificial Sequence
  Synthetic
ucuuaguaacccagaaggga

SEQ ID NO: 225880 - RNA, 21 nt, Artificial Sequence
  Synthetic
gucuuaguaacccagaaggga

SEQ ID NO: 225881 - RNA, 22 nt, Artificial Sequence
  Synthetic
ggucuuaguaacccagaaggga

SEQ ID NO: 225882 - RNA, 23 nt, Artificial Sequence
  Synthetic
gggucuuaguaacccagaaggga

SEQ ID NO: 225883 - RNA, 24 nt, Artificial Sequence
  Synthetic
ggggucuuaguaacccagaaggga

SEQ ID NO: 225884 - RNA, 18 nt, Artificial Sequence
  Synthetic
uaguaaacagagaaggga

SEQ ID NO: 225885 - RNA, 19 nt, Artificial Sequence
  Synthetic
cuaguaaacagagaaggga

SEQ ID NO: 225886 - RNA, 20 nt, Artificial Sequence
  Synthetic
ccuaguaaacagagaaggga

SEQ ID NO: 225887 - RNA, 21 nt, Artificial Sequence
  Synthetic
uccuaguaaacagagaaggga

SEQ ID NO: 225888 - RNA, 22 nt, Artificial Sequence
  Synthetic
uuccuaguaaacagagaaggga

SEQ ID NO: 225889 - RNA, 23 nt, Artificial Sequence
  Synthetic
auuccuaguaaacagagaaggga

SEQ ID NO: 225890 - RNA, 24 nt, Artificial Sequence
  Synthetic
uauuccuaguaaacagagaaggga

SEQ ID NO: 225891 - RNA, 18 nt, Artificial Sequence
  Synthetic
cacuguugagagaaggga

SEQ ID NO: 225892 - RNA, 19 nt, Artificial Sequence
  Synthetic
ucacuguugagagaaggga

SEQ ID NO: 225893 - RNA, 20 nt, Artificial Sequence
  Synthetic
cucacuguugagagaaggga

SEQ ID NO: 225894 - RNA, 21 nt, Artificial Sequence
  Synthetic
acucacuguugagagaaggga

SEQ ID NO: 225895 - RNA, 22 nt, Artificial Sequence
  Synthetic
gacucacuguugagagaaggga

SEQ ID NO: 225896 - RNA, 23 nt, Artificial Sequence
  Synthetic
agacucacuguugagagaaggga

SEQ ID NO: 225897 - RNA, 24 nt, Artificial Sequence
  Synthetic
aagacucacuguugagagaaggga

SEQ ID NO: 225898 - RNA, 18 nt, Artificial Sequence
  Synthetic
acaucaggggagaaggga

SEQ ID NO: 225899 - RNA, 19 nt, Artificial Sequence
  Synthetic
aacaucaggggagaaggga

SEQ ID NO: 225900 - RNA, 20 nt, Artificial Sequence
  Synthetic
caacaucaggggagaaggga

SEQ ID NO: 225901 - RNA, 21 nt, Artificial Sequence
  Synthetic
acaacaucaggggagaaggga

SEQ ID NO: 225902 - RNA, 22 nt, Artificial Sequence
  Synthetic
uacaacaucaggggagaaggga

SEQ ID NO: 225903 - RNA, 23 nt, Artificial Sequence
  Synthetic
uuacaacaucaggggagaaggga

SEQ ID NO: 225904 - RNA, 24 nt, Artificial Sequence
  Synthetic
auuacaacaucaggggagaaggga

SEQ ID NO: 225905 - RNA, 18 nt, Artificial Sequence
  Synthetic
gcagaaugggcgaaggga

SEQ ID NO: 225906 - RNA, 19 nt, Artificial Sequence
  Synthetic
ugcagaaugggcgaaggga

SEQ ID NO: 225907 - RNA, 20 nt, Artificial Sequence
  Synthetic
augcagaaugggcgaaggga

SEQ ID NO: 225908 - RNA, 21 nt, Artificial Sequence
  Synthetic
uaugcagaaugggcgaaggga

SEQ ID NO: 225909 - RNA, 22 nt, Artificial Sequence
  Synthetic
auaugcagaaugggcgaaggga

SEQ ID NO: 225910 - RNA, 23 nt, Artificial Sequence
  Synthetic
uauaugcagaaugggcgaaggga

SEQ ID NO: 225911 - RNA, 24 nt, Artificial Sequence
  Synthetic
auauaugcagaaugggcgaaggga

SEQ ID NO: 225912 - RNA, 18 nt, Artificial Sequence
  Synthetic
aagaaaggaaggaaggga

SEQ ID NO: 225913 - RNA, 19 nt, Artificial Sequence
  Synthetic
aaagaaaggaaggaaggga

SEQ ID NO: 225914 - RNA, 20 nt, Artificial Sequence
  Synthetic
caaagaaaggaaggaaggga

SEQ ID NO: 225915 - RNA, 21 nt, Artificial Sequence
  Synthetic
acaaagaaaggaaggaaggga

SEQ ID NO: 225916 - RNA, 22 nt, Artificial Sequence
  Synthetic
gacaaagaaaggaaggaaggga

SEQ ID NO: 225917 - RNA, 23 nt, Artificial Sequence
  Synthetic
agacaaagaaaggaaggaaggga

SEQ ID NO: 225918 - RNA, 24 nt, Artificial Sequence
  Synthetic
aagacaaagaaaggaaggaaggga

SEQ ID NO: 225919 - RNA, 18 nt, Artificial Sequence
  Synthetic
uacuuuaagaggaaggga

SEQ ID NO: 225920 - RNA, 19 nt, Artificial Sequence
  Synthetic
uuacuuuaagaggaaggga

SEQ ID NO: 225921 - RNA, 20 nt, Artificial Sequence
  Synthetic
guuacuuuaagaggaaggga

SEQ ID NO: 225922 - RNA, 21 nt, Artificial Sequence
  Synthetic
aguuacuuuaagaggaaggga

SEQ ID NO: 225923 - RNA, 22 nt, Artificial Sequence
  Synthetic
gaguuacuuuaagaggaaggga

SEQ ID NO: 225924 - RNA, 23 nt, Artificial Sequence
  Synthetic
agaguuacuuuaagaggaaggga

SEQ ID NO: 225925 - RNA, 24 nt, Artificial Sequence
  Synthetic
uagaguuacuuuaagaggaaggga

SEQ ID NO: 225926 - RNA, 18 nt, Artificial Sequence
  Synthetic
gagagagggaggaaggga

SEQ ID NO: 225927 - RNA, 19 nt, Artificial Sequence
  Synthetic
agagagagggaggaaggga

SEQ ID NO: 225928 - RNA, 20 nt, Artificial Sequence
  Synthetic
gagagagagggaggaaggga

SEQ ID NO: 225929 - RNA, 21 nt, Artificial Sequence
  Synthetic
agagagagagggaggaaggga

SEQ ID NO: 225930 - RNA, 22 nt, Artificial Sequence
  Synthetic
gagagagagagggaggaaggga

SEQ ID NO: 225931 - RNA, 23 nt, Artificial Sequence
  Synthetic
agagagagagagggaggaaggga

SEQ ID NO: 225932 - RNA, 24 nt, Artificial Sequence
  Synthetic
gagagagagagagggaggaaggga

SEQ ID NO: 225933 - RNA, 18 nt, Artificial Sequence
  Synthetic
ugcaucaauaauaaggga

SEQ ID NO: 225934 - RNA, 19 nt, Artificial Sequence
  Synthetic
cugcaucaauaauaaggga

SEQ ID NO: 225935 - RNA, 20 nt, Artificial Sequence
  Synthetic
ucugcaucaauaauaaggga

SEQ ID NO: 225936 - RNA, 21 nt, Artificial Sequence
  Synthetic
cucugcaucaauaauaaggga

SEQ ID NO: 225937 - RNA, 22 nt, Artificial Sequence
  Synthetic
ucucugcaucaauaauaaggga

SEQ ID NO: 225938 - RNA, 23 nt, Artificial Sequence
  Synthetic
gucucugcaucaauaauaaggga

SEQ ID NO: 225939 - RNA, 24 nt, Artificial Sequence
  Synthetic
ugucucugcaucaauaauaaggga

SEQ ID NO: 225940 - RNA, 18 nt, Artificial Sequence
  Synthetic
uauguggcuaauaaggga

SEQ ID NO: 225941 - RNA, 19 nt, Artificial Sequence
  Synthetic
uuauguggcuaauaaggga

SEQ ID NO: 225942 - RNA, 20 nt, Artificial Sequence
  Synthetic
auuauguggcuaauaaggga

SEQ ID NO: 225943 - RNA, 21 nt, Artificial Sequence
  Synthetic
cauuauguggcuaauaaggga

SEQ ID NO: 225944 - RNA, 22 nt, Artificial Sequence
  Synthetic
ucauuauguggcuaauaaggga

SEQ ID NO: 225945 - RNA, 23 nt, Artificial Sequence
  Synthetic
aucauuauguggcuaauaaggga

SEQ ID NO: 225946 - RNA, 24 nt, Artificial Sequence
  Synthetic
caucauuauguggcuaauaaggga

SEQ ID NO: 225947 - RNA, 18 nt, Artificial Sequence
  Synthetic
ccucauaguaguaaggga

SEQ ID NO: 225948 - RNA, 19 nt, Artificial Sequence
  Synthetic
uccucauaguaguaaggga

SEQ ID NO: 225949 - RNA, 20 nt, Artificial Sequence
  Synthetic
uuccucauaguaguaaggga

SEQ ID NO: 225950 - RNA, 21 nt, Artificial Sequence
  Synthetic
cuuccucauaguaguaaggga

SEQ ID NO: 225951 - RNA, 22 nt, Artificial Sequence
  Synthetic
gcuuccucauaguaguaaggga

SEQ ID NO: 225952 - RNA, 23 nt, Artificial Sequence
  Synthetic
ugcuuccucauaguaguaaggga

SEQ ID NO: 225953 - RNA, 24 nt, Artificial Sequence
  Synthetic
augcuuccucauaguaguaaggga

SEQ ID NO: 225954 - RNA, 18 nt, Artificial Sequence
  Synthetic
ugggggguggguaaggga

SEQ ID NO: 225955 - RNA, 19 nt, Artificial Sequence
  Synthetic
uugggggguggguaaggga

SEQ ID NO: 225956 - RNA, 20 nt, Artificial Sequence
  Synthetic
uuugggggguggguaaggga

SEQ ID NO: 225957 - RNA, 21 nt, Artificial Sequence
  Synthetic
uuuugggggguggguaaggga

SEQ ID NO: 225958 - RNA, 22 nt, Artificial Sequence
  Synthetic
uuuuugggggguggguaaggga

SEQ ID NO: 225959 - RNA, 23 nt, Artificial Sequence
  Synthetic
uuuuuugggggguggguaaggga

SEQ ID NO: 225960 - RNA, 24 nt, Artificial Sequence
  Synthetic
cuuuuuugggggguggguaaggga

SEQ ID NO: 225961 - RNA, 18 nt, Artificial Sequence
  Synthetic
uaaaaaagaauuaaggga

SEQ ID NO: 225962 - RNA, 19 nt, Artificial Sequence
  Synthetic
cuaaaaaagaauuaaggga

SEQ ID NO: 225963 - RNA, 20 nt, Artificial Sequence
  Synthetic
gcuaaaaaagaauuaaggga

SEQ ID NO: 225964 - RNA, 21 nt, Artificial Sequence
  Synthetic
agcuaaaaaagaauuaaggga

SEQ ID NO: 225965 - RNA, 22 nt, Artificial Sequence
  Synthetic
uagcuaaaaaagaauuaaggga

SEQ ID NO: 225966 - RNA, 23 nt, Artificial Sequence
  Synthetic
guagcuaaaaaagaauuaaggga

SEQ ID NO: 225967 - RNA, 24 nt, Artificial Sequence
  Synthetic
aguagcuaaaaaagaauuaaggga

SEQ ID NO: 225968 - RNA, 18 nt, Artificial Sequence
  Synthetic
auuuucagucuuaaggga

SEQ ID NO: 225969 - RNA, 19 nt, Artificial Sequence
  Synthetic
aauuuucagucuuaaggga

SEQ ID NO: 225970 - RNA, 20 nt, Artificial Sequence
  Synthetic
gaauuuucagucuuaaggga

SEQ ID NO: 225971 - RNA, 21 nt, Artificial Sequence
  Synthetic
ugaauuuucagucuuaaggga

SEQ ID NO: 225972 - RNA, 22 nt, Artificial Sequence
  Synthetic
gugaauuuucagucuuaaggga

SEQ ID NO: 225973 - RNA, 23 nt, Artificial Sequence
  Synthetic
agugaauuuucagucuuaaggga

SEQ ID NO: 225974 - RNA, 24 nt, Artificial Sequence
  Synthetic
uagugaauuuucagucuuaaggga

SEQ ID NO: 225975 - RNA, 18 nt, Artificial Sequence
  Synthetic
gcauuguuugaacaggga

SEQ ID NO: 225976 - RNA, 19 nt, Artificial Sequence
  Synthetic
ggcauuguuugaacaggga

SEQ ID NO: 225977 - RNA, 20 nt, Artificial Sequence
  Synthetic
uggcauuguuugaacaggga

SEQ ID NO: 225978 - RNA, 21 nt, Artificial Sequence
  Synthetic
auggcauuguuugaacaggga

SEQ ID NO: 225979 - RNA, 22 nt, Artificial Sequence
  Synthetic
aauggcauuguuugaacaggga

SEQ ID NO: 225980 - RNA, 23 nt, Artificial Sequence
  Synthetic
aaauggcauuguuugaacaggga

SEQ ID NO: 225981 - RNA, 24 nt, Artificial Sequence
  Synthetic
aaaauggcauuguuugaacaggga

SEQ ID NO: 225982 - RNA, 18 nt, Artificial Sequence
  Synthetic
agcccauggacacaggga

SEQ ID NO: 225983 - RNA, 19 nt, Artificial Sequence
  Synthetic
gagcccauggacacaggga

SEQ ID NO: 225984 - RNA, 20 nt, Artificial Sequence
  Synthetic
agagcccauggacacaggga

SEQ ID NO: 225985 - RNA, 21 nt, Artificial Sequence
  Synthetic
gagagcccauggacacaggga

SEQ ID NO: 225986 - RNA, 22 nt, Artificial Sequence
  Synthetic
cgagagcccauggacacaggga

SEQ ID NO: 225987 - RNA, 23 nt, Artificial Sequence
  Synthetic
acgagagcccauggacacaggga

SEQ ID NO: 225988 - RNA, 24 nt, Artificial Sequence
  Synthetic
aacgagagcccauggacacaggga

SEQ ID NO: 225989 - RNA, 18 nt, Artificial Sequence
  Synthetic
agauuggaugcacaggga

SEQ ID NO: 225990 - RNA, 19 nt, Artificial Sequence
  Synthetic
gagauuggaugcacaggga

SEQ ID NO: 225991 - RNA, 20 nt, Artificial Sequence
  Synthetic
agagauuggaugcacaggga

SEQ ID NO: 225992 - RNA, 21 nt, Artificial Sequence
  Synthetic
cagagauuggaugcacaggga

SEQ ID NO: 225993 - RNA, 22 nt, Artificial Sequence
  Synthetic
ucagagauuggaugcacaggga

SEQ ID NO: 225994 - RNA, 23 nt, Artificial Sequence
  Synthetic
aucagagauuggaugcacaggga

SEQ ID NO: 225995 - RNA, 24 nt, Artificial Sequence
  Synthetic
gaucagagauuggaugcacaggga

SEQ ID NO: 225996 - RNA, 18 nt, Artificial Sequence
  Synthetic
gaaggcaauuuccaggga

SEQ ID NO: 225997 - RNA, 19 nt, Artificial Sequence
  Synthetic
ugaaggcaauuuccaggga

SEQ ID NO: 225998 - RNA, 20 nt, Artificial Sequence
  Synthetic
cugaaggcaauuuccaggga

SEQ ID NO: 225999 - RNA, 21 nt, Artificial Sequence
  Synthetic
gcugaaggcaauuuccaggga

SEQ ID NO: 226000 - RNA, 22 nt, Artificial Sequence
  Synthetic
agcugaaggcaauuuccaggga

SEQ ID NO: 226001 - RNA, 23 nt, Artificial Sequence
  Synthetic
cagcugaaggcaauuuccaggga

SEQ ID NO: 226002 - RNA, 24 nt, Artificial Sequence
  Synthetic
acagcugaaggcaauuuccaggga

SEQ ID NO: 226003 - RNA, 18 nt, Artificial Sequence
  Synthetic
ugagaccaagagcaggga

SEQ ID NO: 226004 - RNA, 19 nt, Artificial Sequence
  Synthetic
uugagaccaagagcaggga

SEQ ID NO: 226005 - RNA, 20 nt, Artificial Sequence
  Synthetic
auugagaccaagagcaggga

SEQ ID NO: 226006 - RNA, 21 nt, Artificial Sequence
  Synthetic
uauugagaccaagagcaggga

SEQ ID NO: 226007 - RNA, 22 nt, Artificial Sequence
  Synthetic
cuauugagaccaagagcaggga

SEQ ID NO: 226008 - RNA, 23 nt, Artificial Sequence
  Synthetic
gcuauugagaccaagagcaggga

SEQ ID NO: 226009 - RNA, 24 nt, Artificial Sequence
  Synthetic
ggcuauugagaccaagagcaggga

SEQ ID NO: 226010 - RNA, 18 nt, Artificial Sequence
  Synthetic
agugagcuggagcaggga

SEQ ID NO: 226011 - RNA, 19 nt, Artificial Sequence
  Synthetic
aagugagcuggagcaggga

SEQ ID NO: 226012 - RNA, 20 nt, Artificial Sequence
  Synthetic
aaagugagcuggagcaggga

SEQ ID NO: 226013 - RNA, 21 nt, Artificial Sequence
  Synthetic
aaaagugagcuggagcaggga

SEQ ID NO: 226014 - RNA, 22 nt, Artificial Sequence
  Synthetic
gaaaagugagcuggagcaggga

SEQ ID NO: 226015 - RNA, 23 nt, Artificial Sequence
  Synthetic
ggaaaagugagcuggagcaggga

SEQ ID NO: 226016 - RNA, 24 nt, Artificial Sequence
  Synthetic
uggaaaagugagcuggagcaggga

SEQ ID NO: 226017 - RNA, 18 nt, Artificial Sequence
  Synthetic
acauguuucuagcaggga

SEQ ID NO: 226018 - RNA, 19 nt, Artificial Sequence
  Synthetic
cacauguuucuagcaggga

SEQ ID NO: 226019 - RNA, 20 nt, Artificial Sequence
  Synthetic
ucacauguuucuagcaggga

SEQ ID NO: 226020 - RNA, 21 nt, Artificial Sequence
  Synthetic
uucacauguuucuagcaggga

SEQ ID NO: 226021 - RNA, 22 nt, Artificial Sequence
  Synthetic
cuucacauguuucuagcaggga

SEQ ID NO: 226022 - RNA, 23 nt, Artificial Sequence
  Synthetic
ucuucacauguuucuagcaggga

SEQ ID NO: 226023 - RNA, 24 nt, Artificial Sequence
  Synthetic
gucuucacauguuucuagcaggga

SEQ ID NO: 226024 - RNA, 18 nt, Artificial Sequence
  Synthetic
aauuauuccaggcaggga

SEQ ID NO: 226025 - RNA, 19 nt, Artificial Sequence
  Synthetic
aaauuauuccaggcaggga

SEQ ID NO: 226026 - RNA, 20 nt, Artificial Sequence
  Synthetic
aaaauuauuccaggcaggga

SEQ ID NO: 226027 - RNA, 21 nt, Artificial Sequence
  Synthetic
gaaaauuauuccaggcaggga

SEQ ID NO: 226028 - RNA, 22 nt, Artificial Sequence
  Synthetic
ggaaaauuauuccaggcaggga

SEQ ID NO: 226029 - RNA, 23 nt, Artificial Sequence
  Synthetic
gggaaaauuauuccaggcaggga

SEQ ID NO: 226030 - RNA, 24 nt, Artificial Sequence
  Synthetic
ugggaaaauuauuccaggcaggga

SEQ ID NO: 226031 - RNA, 18 nt, Artificial Sequence
  Synthetic
aaauuagggaggcaggga

SEQ ID NO: 226032 - RNA, 19 nt, Artificial Sequence
  Synthetic
aaaauuagggaggcaggga

SEQ ID NO: 226033 - RNA, 20 nt, Artificial Sequence
  Synthetic
aaaaauuagggaggcaggga

SEQ ID NO: 226034 - RNA, 21 nt, Artificial Sequence
  Synthetic
caaaaauuagggaggcaggga

SEQ ID NO: 226035 - RNA, 22 nt, Artificial Sequence
  Synthetic
ccaaaaauuagggaggcaggga

SEQ ID NO: 226036 - RNA, 23 nt, Artificial Sequence
  Synthetic
cccaaaaauuagggaggcaggga

SEQ ID NO: 226037 - RNA, 24 nt, Artificial Sequence
  Synthetic
gcccaaaaauuagggaggcaggga

SEQ ID NO: 226038 - RNA, 18 nt, Artificial Sequence
  Synthetic
auauccaaagaucaggga

SEQ ID NO: 226039 - RNA, 19 nt, Artificial Sequence
  Synthetic
cauauccaaagaucaggga

SEQ ID NO: 226040 - RNA, 20 nt, Artificial Sequence
  Synthetic
gcauauccaaagaucaggga

SEQ ID NO: 226041 - RNA, 21 nt, Artificial Sequence
  Synthetic
ggcauauccaaagaucaggga

SEQ ID NO: 226042 - RNA, 22 nt, Artificial Sequence
  Synthetic
uggcauauccaaagaucaggga

SEQ ID NO: 226043 - RNA, 23 nt, Artificial Sequence
  Synthetic
guggcauauccaaagaucaggga

SEQ ID NO: 226044 - RNA, 24 nt, Artificial Sequence
  Synthetic
cguggcauauccaaagaucaggga

SEQ ID NO: 226045 - RNA, 18 nt, Artificial Sequence
  Synthetic
uaaggaacuauucaggga

SEQ ID NO: 226046 - RNA, 19 nt, Artificial Sequence
  Synthetic
auaaggaacuauucaggga

SEQ ID NO: 226047 - RNA, 20 nt, Artificial Sequence
  Synthetic
gauaaggaacuauucaggga

SEQ ID NO: 226048 - RNA, 21 nt, Artificial Sequence
  Synthetic
agauaaggaacuauucaggga

SEQ ID NO: 226049 - RNA, 22 nt, Artificial Sequence
  Synthetic
aagauaaggaacuauucaggga

SEQ ID NO: 226050 - RNA, 23 nt, Artificial Sequence
  Synthetic
uaagauaaggaacuauucaggga

SEQ ID NO: 226051 - RNA, 24 nt, Artificial Sequence
  Synthetic
auaagauaaggaacuauucaggga

SEQ ID NO: 226052 - RNA, 18 nt, Artificial Sequence
  Synthetic
ccacacucuuuucaggga

SEQ ID NO: 226053 - RNA, 19 nt, Artificial Sequence
  Synthetic
cccacacucuuuucaggga

SEQ ID NO: 226054 - RNA, 20 nt, Artificial Sequence
  Synthetic
ucccacacucuuuucaggga

SEQ ID NO: 226055 - RNA, 21 nt, Artificial Sequence
  Synthetic
cucccacacucuuuucaggga

SEQ ID NO: 226056 - RNA, 22 nt, Artificial Sequence
  Synthetic
acucccacacucuuuucaggga

SEQ ID NO: 226057 - RNA, 23 nt, Artificial Sequence
  Synthetic
aacucccacacucuuuucaggga

SEQ ID NO: 226058 - RNA, 24 nt, Artificial Sequence
  Synthetic
caacucccacacucuuuucaggga

SEQ ID NO: 226059 - RNA, 18 nt, Artificial Sequence
  Synthetic
cccaaacuuuuucaggga

SEQ ID NO: 226060 - RNA, 19 nt, Artificial Sequence
  Synthetic
acccaaacuuuuucaggga

SEQ ID NO: 226061 - RNA, 20 nt, Artificial Sequence
  Synthetic
cacccaaacuuuuucaggga

SEQ ID NO: 226062 - RNA, 21 nt, Artificial Sequence
  Synthetic
ucacccaaacuuuuucaggga

SEQ ID NO: 226063 - RNA, 22 nt, Artificial Sequence
  Synthetic
aucacccaaacuuuuucaggga

SEQ ID NO: 226064 - RNA, 23 nt, Artificial Sequence
  Synthetic
gaucacccaaacuuuuucaggga

SEQ ID NO: 226065 - RNA, 24 nt, Artificial Sequence
  Synthetic
ggaucacccaaacuuuuucaggga

SEQ ID NO: 226066 - RNA, 18 nt, Artificial Sequence
  Synthetic
agcaggaagcaagaggga

SEQ ID NO: 226067 - RNA, 19 nt, Artificial Sequence
  Synthetic
aagcaggaagcaagaggga

SEQ ID NO: 226068 - RNA, 20 nt, Artificial Sequence
  Synthetic
uaagcaggaagcaagaggga

SEQ ID NO: 226069 - RNA, 21 nt, Artificial Sequence
  Synthetic
auaagcaggaagcaagaggga

SEQ ID NO: 226070 - RNA, 22 nt, Artificial Sequence
  Synthetic
uauaagcaggaagcaagaggga

SEQ ID NO: 226071 - RNA, 23 nt, Artificial Sequence
  Synthetic
auauaagcaggaagcaagaggga

SEQ ID NO: 226072 - RNA, 24 nt, Artificial Sequence
  Synthetic
aauauaagcaggaagcaagaggga

SEQ ID NO: 226073 - RNA, 18 nt, Artificial Sequence
  Synthetic
uauaagcagcaagaggga

SEQ ID NO: 226074 - RNA, 19 nt, Artificial Sequence
  Synthetic
uuauaagcagcaagaggga

SEQ ID NO: 226075 - RNA, 20 nt, Artificial Sequence
  Synthetic
auuauaagcagcaagaggga

SEQ ID NO: 226076 - RNA, 21 nt, Artificial Sequence
  Synthetic
uauuauaagcagcaagaggga

SEQ ID NO: 226077 - RNA, 22 nt, Artificial Sequence
  Synthetic
guauuauaagcagcaagaggga

SEQ ID NO: 226078 - RNA, 23 nt, Artificial Sequence
  Synthetic
uguauuauaagcagcaagaggga

SEQ ID NO: 226079 - RNA, 24 nt, Artificial Sequence
  Synthetic
uuguauuauaagcagcaagaggga

SEQ ID NO: 226080 - RNA, 18 nt, Artificial Sequence
  Synthetic
uuugggagggaagaggga

SEQ ID NO: 226081 - RNA, 19 nt, Artificial Sequence
  Synthetic
uuuugggagggaagaggga

SEQ ID NO: 226082 - RNA, 20 nt, Artificial Sequence
  Synthetic
guuuugggagggaagaggga

SEQ ID NO: 226083 - RNA, 21 nt, Artificial Sequence
  Synthetic
uguuuugggagggaagaggga

SEQ ID NO: 226084 - RNA, 22 nt, Artificial Sequence
  Synthetic
auguuuugggagggaagaggga

SEQ ID NO: 226085 - RNA, 23 nt, Artificial Sequence
  Synthetic
uauguuuugggagggaagaggga

SEQ ID NO: 226086 - RNA, 24 nt, Artificial Sequence
  Synthetic
guauguuuugggagggaagaggga

SEQ ID NO: 226087 - RNA, 18 nt, Artificial Sequence
  Synthetic
caaguuaaugaagaggga

SEQ ID NO: 226088 - RNA, 19 nt, Artificial Sequence
  Synthetic
acaaguuaaugaagaggga

SEQ ID NO: 226089 - RNA, 20 nt, Artificial Sequence
  Synthetic
aacaaguuaaugaagaggga

SEQ ID NO: 226090 - RNA, 21 nt, Artificial Sequence
  Synthetic
caacaaguuaaugaagaggga

SEQ ID NO: 226091 - RNA, 22 nt, Artificial Sequence
  Synthetic
ucaacaaguuaaugaagaggga

SEQ ID NO: 226092 - RNA, 23 nt, Artificial Sequence
  Synthetic
uucaacaaguuaaugaagaggga

SEQ ID NO: 226093 - RNA, 24 nt, Artificial Sequence
  Synthetic
auucaacaaguuaaugaagaggga

SEQ ID NO: 226094 - RNA, 18 nt, Artificial Sequence
  Synthetic
auuaaauuuccagaggga

SEQ ID NO: 226095 - RNA, 19 nt, Artificial Sequence
  Synthetic
uauuaaauuuccagaggga

SEQ ID NO: 226096 - RNA, 20 nt, Artificial Sequence
  Synthetic
uuauuaaauuuccagaggga

SEQ ID NO: 226097 - RNA, 21 nt, Artificial Sequence
  Synthetic
uuuauuaaauuuccagaggga

SEQ ID NO: 226098 - RNA, 22 nt, Artificial Sequence
  Synthetic
uuuuauuaaauuuccagaggga

SEQ ID NO: 226099 - RNA, 23 nt, Artificial Sequence
  Synthetic
auuuuauuaaauuuccagaggga

SEQ ID NO: 226100 - RNA, 24 nt, Artificial Sequence
  Synthetic
uauuuuauuaaauuuccagaggga

SEQ ID NO: 226101 - RNA, 18 nt, Artificial Sequence
  Synthetic
uugagagaaagagaggga

SEQ ID NO: 226102 - RNA, 19 nt, Artificial Sequence
  Synthetic
cuugagagaaagagaggga

SEQ ID NO: 226103 - RNA, 20 nt, Artificial Sequence
  Synthetic
acuugagagaaagagaggga

SEQ ID NO: 226104 - RNA, 21 nt, Artificial Sequence
  Synthetic
aacuugagagaaagagaggga

SEQ ID NO: 226105 - RNA, 22 nt, Artificial Sequence
  Synthetic
caacuugagagaaagagaggga

SEQ ID NO: 226106 - RNA, 23 nt, Artificial Sequence
  Synthetic
ucaacuugagagaaagagaggga

SEQ ID NO: 226107 - RNA, 24 nt, Artificial Sequence
  Synthetic
aucaacuugagagaaagagaggga

SEQ ID NO: 226108 - RNA, 18 nt, Artificial Sequence
  Synthetic
gcaaggaagagagaggga

SEQ ID NO: 226109 - RNA, 19 nt, Artificial Sequence
  Synthetic
ugcaaggaagagagaggga

SEQ ID NO: 226110 - RNA, 20 nt, Artificial Sequence
  Synthetic
cugcaaggaagagagaggga

SEQ ID NO: 226111 - RNA, 21 nt, Artificial Sequence
  Synthetic
ucugcaaggaagagagaggga

SEQ ID NO: 226112 - RNA, 22 nt, Artificial Sequence
  Synthetic
cucugcaaggaagagagaggga

SEQ ID NO: 226113 - RNA, 23 nt, Artificial Sequence
  Synthetic
acucugcaaggaagagagaggga

SEQ ID NO: 226114 - RNA, 24 nt, Artificial Sequence
  Synthetic
gacucugcaaggaagagagaggga

SEQ ID NO: 226115 - RNA, 18 nt, Artificial Sequence
  Synthetic
gaggaagggagagaggga

SEQ ID NO: 226116 - RNA, 19 nt, Artificial Sequence
  Synthetic
ggaggaagggagagaggga

SEQ ID NO: 226117 - RNA, 20 nt, Artificial Sequence
  Synthetic
gggaggaagggagagaggga

SEQ ID NO: 226118 - RNA, 21 nt, Artificial Sequence
  Synthetic
agggaggaagggagagaggga

SEQ ID NO: 226119 - RNA, 22 nt, Artificial Sequence
  Synthetic
gagggaggaagggagagaggga

SEQ ID NO: 226120 - RNA, 23 nt, Artificial Sequence
  Synthetic
agagggaggaagggagagaggga

SEQ ID NO: 226121 - RNA, 24 nt, Artificial Sequence
  Synthetic
gagagggaggaagggagagaggga

SEQ ID NO: 226122 - RNA, 18 nt, Artificial Sequence
  Synthetic
gaaugggaaggagaggga

SEQ ID NO: 226123 - RNA, 19 nt, Artificial Sequence
  Synthetic
agaaugggaaggagaggga

SEQ ID NO: 226124 - RNA, 20 nt, Artificial Sequence
  Synthetic
gagaaugggaaggagaggga

SEQ ID NO: 226125 - RNA, 21 nt, Artificial Sequence
  Synthetic
ggagaaugggaaggagaggga

SEQ ID NO: 226126 - RNA, 22 nt, Artificial Sequence
  Synthetic
gggagaaugggaaggagaggga

SEQ ID NO: 226127 - RNA, 23 nt, Artificial Sequence
  Synthetic
agggagaaugggaaggagaggga

SEQ ID NO: 226128 - RNA, 24 nt, Artificial Sequence
  Synthetic
gagggagaaugggaaggagaggga

SEQ ID NO: 226129 - RNA, 18 nt, Artificial Sequence
  Synthetic
ggagcaggaggagaggga

SEQ ID NO: 226130 - RNA, 19 nt, Artificial Sequence
  Synthetic
aggagcaggaggagaggga

SEQ ID NO: 226131 - RNA, 20 nt, Artificial Sequence
  Synthetic
gaggagcaggaggagaggga

SEQ ID NO: 226132 - RNA, 21 nt, Artificial Sequence
  Synthetic
ggaggagcaggaggagaggga

SEQ ID NO: 226133 - RNA, 22 nt, Artificial Sequence
  Synthetic
aggaggagcaggaggagaggga

SEQ ID NO: 226134 - RNA, 23 nt, Artificial Sequence
  Synthetic
gaggaggagcaggaggagaggga

SEQ ID NO: 226135 - RNA, 24 nt, Artificial Sequence
  Synthetic
ggaggaggagcaggaggagaggga

SEQ ID NO: 226136 - RNA, 18 nt, Artificial Sequence
  Synthetic
gggacgggaggagaggga

SEQ ID NO: 226137 - RNA, 19 nt, Artificial Sequence
  Synthetic
agggacgggaggagaggga

SEQ ID NO: 226138 - RNA, 20 nt, Artificial Sequence
  Synthetic
gagggacgggaggagaggga

SEQ ID NO: 226139 - RNA, 21 nt, Artificial Sequence
  Synthetic
agagggacgggaggagaggga

SEQ ID NO: 226140 - RNA, 22 nt, Artificial Sequence
  Synthetic
gagagggacgggaggagaggga

SEQ ID NO: 226141 - RNA, 23 nt, Artificial Sequence
  Synthetic
agagagggacgggaggagaggga

SEQ ID NO: 226142 - RNA, 24 nt, Artificial Sequence
  Synthetic
aagagagggacgggaggagaggga

SEQ ID NO: 226143 - RNA, 18 nt, Artificial Sequence
  Synthetic
gucacuuucaccgaggga

SEQ ID NO: 226144 - RNA, 19 nt, Artificial Sequence
  Synthetic
agucacuuucaccgaggga

SEQ ID NO: 226145 - RNA, 20 nt, Artificial Sequence
  Synthetic
aagucacuuucaccgaggga

SEQ ID NO: 226146 - RNA, 21 nt, Artificial Sequence
  Synthetic
uaagucacuuucaccgaggga

SEQ ID NO: 226147 - RNA, 22 nt, Artificial Sequence
  Synthetic
cuaagucacuuucaccgaggga

SEQ ID NO: 226148 - RNA, 23 nt, Artificial Sequence
  Synthetic
ccuaagucacuuucaccgaggga

SEQ ID NO: 226149 - RNA, 24 nt, Artificial Sequence
  Synthetic
uccuaagucacuuucaccgaggga

SEQ ID NO: 226150 - RNA, 18 nt, Artificial Sequence
  Synthetic
gagugagggaaggaggga

SEQ ID NO: 226151 - RNA, 19 nt, Artificial Sequence
  Synthetic
agagugagggaaggaggga

SEQ ID NO: 226152 - RNA, 20 nt, Artificial Sequence
  Synthetic
gagagugagggaaggaggga

SEQ ID NO: 226153 - RNA, 21 nt, Artificial Sequence
  Synthetic
agagagugagggaaggaggga

SEQ ID NO: 226154 - RNA, 22 nt, Artificial Sequence
  Synthetic
aagagagugagggaaggaggga

SEQ ID NO: 226155 - RNA, 23 nt, Artificial Sequence
  Synthetic
aaagagagugagggaaggaggga

SEQ ID NO: 226156 - RNA, 24 nt, Artificial Sequence
  Synthetic
gaaagagagugagggaaggaggga

SEQ ID NO: 226157 - RNA, 18 nt, Artificial Sequence
  Synthetic
acccggaagcaggaggga

SEQ ID NO: 226158 - RNA, 19 nt, Artificial Sequence
  Synthetic
gacccggaagcaggaggga

SEQ ID NO: 226159 - RNA, 20 nt, Artificial Sequence
  Synthetic
ugacccggaagcaggaggga

SEQ ID NO: 226160 - RNA, 21 nt, Artificial Sequence
  Synthetic
gugacccggaagcaggaggga

SEQ ID NO: 226161 - RNA, 22 nt, Artificial Sequence
  Synthetic
ggugacccggaagcaggaggga

SEQ ID NO: 226162 - RNA, 23 nt, Artificial Sequence
  Synthetic
gggugacccggaagcaggaggga

SEQ ID NO: 226163 - RNA, 24 nt, Artificial Sequence
  Synthetic
agggugacccggaagcaggaggga

SEQ ID NO: 226164 - RNA, 18 nt, Artificial Sequence
  Synthetic
cauuuaguggaggaggga

SEQ ID NO: 226165 - RNA, 19 nt, Artificial Sequence
  Synthetic
ucauuuaguggaggaggga

SEQ ID NO: 226166 - RNA, 20 nt, Artificial Sequence
  Synthetic
gucauuuaguggaggaggga

SEQ ID NO: 226167 - RNA, 21 nt, Artificial Sequence
  Synthetic
ugucauuuaguggaggaggga

SEQ ID NO: 226168 - RNA, 22 nt, Artificial Sequence
  Synthetic
uugucauuuaguggaggaggga

SEQ ID NO: 226169 - RNA, 23 nt, Artificial Sequence
  Synthetic
auugucauuuaguggaggaggga

SEQ ID NO: 226170 - RNA, 24 nt, Artificial Sequence
  Synthetic
cauugucauuuaguggaggaggga

SEQ ID NO: 226171 - RNA, 18 nt, Artificial Sequence
  Synthetic
ggagguugggcggaggga

SEQ ID NO: 226172 - RNA, 19 nt, Artificial Sequence
  Synthetic
uggagguugggcggaggga

SEQ ID NO: 226173 - RNA, 20 nt, Artificial Sequence
  Synthetic
guggagguugggcggaggga

SEQ ID NO: 226174 - RNA, 21 nt, Artificial Sequence
  Synthetic
gguggagguugggcggaggga

SEQ ID NO: 226175 - RNA, 22 nt, Artificial Sequence
  Synthetic
ggguggagguugggcggaggga

SEQ ID NO: 226176 - RNA, 23 nt, Artificial Sequence
  Synthetic
aggguggagguugggcggaggga

SEQ ID NO: 226177 - RNA, 24 nt, Artificial Sequence
  Synthetic
gaggguggagguugggcggaggga

SEQ ID NO: 226178 - RNA, 18 nt, Artificial Sequence
  Synthetic
aaggaaggaagggaggga

SEQ ID NO: 226179 - RNA, 19 nt, Artificial Sequence
  Synthetic
aaaggaaggaagggaggga

SEQ ID NO: 226180 - RNA, 20 nt, Artificial Sequence
  Synthetic
gaaaggaaggaagggaggga

SEQ ID NO: 226181 - RNA, 21 nt, Artificial Sequence
  Synthetic
agaaaggaaggaagggaggga

SEQ ID NO: 226182 - RNA, 22 nt, Artificial Sequence
  Synthetic
aagaaaggaaggaagggaggga

SEQ ID NO: 226183 - RNA, 23 nt, Artificial Sequence
  Synthetic
aaagaaaggaaggaagggaggga

SEQ ID NO: 226184 - RNA, 24 nt, Artificial Sequence
  Synthetic
caaagaaaggaaggaagggaggga

SEQ ID NO: 226185 - RNA, 18 nt, Artificial Sequence
  Synthetic
agaugagagagggaggga

SEQ ID NO: 226186 - RNA, 19 nt, Artificial Sequence
  Synthetic
cagaugagagagggaggga

SEQ ID NO: 226187 - RNA, 20 nt, Artificial Sequence
  Synthetic
acagaugagagagggaggga

SEQ ID NO: 226188 - RNA, 21 nt, Artificial Sequence
  Synthetic
cacagaugagagagggaggga

SEQ ID NO: 226189 - RNA, 22 nt, Artificial Sequence
  Synthetic
acacagaugagagagggaggga

SEQ ID NO: 226190 - RNA, 23 nt, Artificial Sequence
  Synthetic
aacacagaugagagagggaggga

SEQ ID NO: 226191 - RNA, 24 nt, Artificial Sequence
  Synthetic
caacacagaugagagagggaggga

SEQ ID NO: 226192 - RNA, 18 nt, Artificial Sequence
  Synthetic
aaggaagggagggaggga

SEQ ID NO: 226193 - RNA, 19 nt, Artificial Sequence
  Synthetic
gaaggaagggagggaggga

SEQ ID NO: 226194 - RNA, 20 nt, Artificial Sequence
  Synthetic
ggaaggaagggagggaggga

SEQ ID NO: 226195 - RNA, 21 nt, Artificial Sequence
  Synthetic
aggaaggaagggagggaggga

SEQ ID NO: 226196 - RNA, 22 nt, Artificial Sequence
  Synthetic
aaggaaggaagggagggaggga

SEQ ID NO: 226197 - RNA, 23 nt, Artificial Sequence
  Synthetic
aaaggaaggaagggagggaggga

SEQ ID NO: 226198 - RNA, 24 nt, Artificial Sequence
  Synthetic
gaaaggaaggaagggagggaggga

SEQ ID NO: 226199 - RNA, 18 nt, Artificial Sequence
  Synthetic
aagggagggagggaggga

SEQ ID NO: 226200 - RNA, 19 nt, Artificial Sequence
  Synthetic
gaagggagggagggaggga

SEQ ID NO: 226201 - RNA, 20 nt, Artificial Sequence
  Synthetic
ggaagggagggagggaggga

SEQ ID NO: 226202 - RNA, 21 nt, Artificial Sequence
  Synthetic
aggaagggagggagggaggga

SEQ ID NO: 226203 - RNA, 22 nt, Artificial Sequence
  Synthetic
aaggaagggagggagggaggga

SEQ ID NO: 226204 - RNA, 23 nt, Artificial Sequence
  Synthetic
gaaggaagggagggagggaggga

SEQ ID NO: 226205 - RNA, 24 nt, Artificial Sequence
  Synthetic
ggaaggaagggagggagggaggga

SEQ ID NO: 226206 - RNA, 21 nt, Artificial Sequence
  Synthetic
agggagggagggagggaggga

SEQ ID NO: 226207 - RNA, 22 nt, Artificial Sequence
  Synthetic
aagggagggagggagggaggga

SEQ ID NO: 226208 - RNA, 23 nt, Artificial Sequence
  Synthetic
gaagggagggagggagggaggga

SEQ ID NO: 226209 - RNA, 24 nt, Artificial Sequence
  Synthetic
ggaagggagggagggagggaggga

SEQ ID NO: 226210 - RNA, 18 nt, Artificial Sequence
  Synthetic
acggcugggagggaggga

SEQ ID NO: 226211 - RNA, 19 nt, Artificial Sequence
  Synthetic
uacggcugggagggaggga

SEQ ID NO: 226212 - RNA, 20 nt, Artificial Sequence
  Synthetic
guacggcugggagggaggga

SEQ ID NO: 226213 - RNA, 21 nt, Artificial Sequence
  Synthetic
aguacggcugggagggaggga

SEQ ID NO: 226214 - RNA, 22 nt, Artificial Sequence
  Synthetic
gaguacggcugggagggaggga

SEQ ID NO: 226215 - RNA, 23 nt, Artificial Sequence
  Synthetic
agaguacggcugggagggaggga

SEQ ID NO: 226216 - RNA, 24 nt, Artificial Sequence
  Synthetic
uagaguacggcugggagggaggga

SEQ ID NO: 226217 - RNA, 18 nt, Artificial Sequence
  Synthetic
aaaggaggaggggaggga

SEQ ID NO: 226218 - RNA, 19 nt, Artificial Sequence
  Synthetic
gaaaggaggaggggaggga

SEQ ID NO: 226219 - RNA, 20 nt, Artificial Sequence
  Synthetic
cgaaaggaggaggggaggga

SEQ ID NO: 226220 - RNA, 21 nt, Artificial Sequence
  Synthetic
ccgaaaggaggaggggaggga

SEQ ID NO: 226221 - RNA, 22 nt, Artificial Sequence
  Synthetic
uccgaaaggaggaggggaggga

SEQ ID NO: 226222 - RNA, 23 nt, Artificial Sequence
  Synthetic
cuccgaaaggaggaggggaggga

SEQ ID NO: 226223 - RNA, 24 nt, Artificial Sequence
  Synthetic
acuccgaaaggaggaggggaggga

SEQ ID NO: 226224 - RNA, 18 nt, Artificial Sequence
  Synthetic
agcuauuuaggggaggga

SEQ ID NO: 226225 - RNA, 19 nt, Artificial Sequence
  Synthetic
gagcuauuuaggggaggga

SEQ ID NO: 226226 - RNA, 20 nt, Artificial Sequence
  Synthetic
ugagcuauuuaggggaggga

SEQ ID NO: 226227 - RNA, 21 nt, Artificial Sequence
  Synthetic
uugagcuauuuaggggaggga

SEQ ID NO: 226228 - RNA, 22 nt, Artificial Sequence
  Synthetic
uuugagcuauuuaggggaggga

SEQ ID NO: 226229 - RNA, 23 nt, Artificial Sequence
  Synthetic
uuuugagcuauuuaggggaggga

SEQ ID NO: 226230 - RNA, 24 nt, Artificial Sequence
  Synthetic
guuuugagcuauuuaggggaggga

SEQ ID NO: 226231 - RNA, 18 nt, Artificial Sequence
  Synthetic
uugccauuaugggaggga

SEQ ID NO: 226232 - RNA, 19 nt, Artificial Sequence
  Synthetic
cuugccauuaugggaggga

SEQ ID NO: 226233 - RNA, 20 nt, Artificial Sequence
  Synthetic
acuugccauuaugggaggga

SEQ ID NO: 226234 - RNA, 21 nt, Artificial Sequence
  Synthetic
uacuugccauuaugggaggga

SEQ ID NO: 226235 - RNA, 22 nt, Artificial Sequence
  Synthetic
cuacuugccauuaugggaggga

SEQ ID NO: 226236 - RNA, 23 nt, Artificial Sequence
  Synthetic
ucuacuugccauuaugggaggga

SEQ ID NO: 226237 - RNA, 24 nt, Artificial Sequence
  Synthetic
aucuacuugccauuaugggaggga

SEQ ID NO: 226238 - RNA, 18 nt, Artificial Sequence
  Synthetic
gaguacggcugggaggga

SEQ ID NO: 226239 - RNA, 19 nt, Artificial Sequence
  Synthetic
agaguacggcugggaggga

SEQ ID NO: 226240 - RNA, 20 nt, Artificial Sequence
  Synthetic
uagaguacggcugggaggga

SEQ ID NO: 226241 - RNA, 21 nt, Artificial Sequence
  Synthetic
uuagaguacggcugggaggga

SEQ ID NO: 226242 - RNA, 22 nt, Artificial Sequence
  Synthetic
uuuagaguacggcugggaggga

SEQ ID NO: 226243 - RNA, 23 nt, Artificial Sequence
  Synthetic
guuuagaguacggcugggaggga

SEQ ID NO: 226244 - RNA, 24 nt, Artificial Sequence
  Synthetic
uguuuagaguacggcugggaggga

SEQ ID NO: 226245 - RNA, 18 nt, Artificial Sequence
  Synthetic
gguuugagaguggaggga

SEQ ID NO: 226246 - RNA, 19 nt, Artificial Sequence
  Synthetic
ugguuugagaguggaggga

SEQ ID NO: 226247 - RNA, 20 nt, Artificial Sequence
  Synthetic
gugguuugagaguggaggga

SEQ ID NO: 226248 - RNA, 21 nt, Artificial Sequence
  Synthetic
ggugguuugagaguggaggga

SEQ ID NO: 226249 - RNA, 22 nt, Artificial Sequence
  Synthetic
gggugguuugagaguggaggga

SEQ ID NO: 226250 - RNA, 23 nt, Artificial Sequence
  Synthetic
agggugguuugagaguggaggga

SEQ ID NO: 226251 - RNA, 24 nt, Artificial Sequence
  Synthetic
aagggugguuugagaguggaggga

SEQ ID NO: 226252 - RNA, 18 nt, Artificial Sequence
  Synthetic
gcugaggagguggaggga

SEQ ID NO: 226253 - RNA, 19 nt, Artificial Sequence
  Synthetic
ggcugaggagguggaggga

SEQ ID NO: 226254 - RNA, 20 nt, Artificial Sequence
  Synthetic
aggcugaggagguggaggga

SEQ ID NO: 226255 - RNA, 21 nt, Artificial Sequence
  Synthetic
uaggcugaggagguggaggga

SEQ ID NO: 226256 - RNA, 22 nt, Artificial Sequence
  Synthetic
guaggcugaggagguggaggga

SEQ ID NO: 226257 - RNA, 23 nt, Artificial Sequence
  Synthetic
aguaggcugaggagguggaggga

SEQ ID NO: 226258 - RNA, 24 nt, Artificial Sequence
  Synthetic
aaguaggcugaggagguggaggga

SEQ ID NO: 226259 - RNA, 18 nt, Artificial Sequence
  Synthetic
augguugggguggaggga

SEQ ID NO: 226260 - RNA, 19 nt, Artificial Sequence
  Synthetic
uaugguugggguggaggga

SEQ ID NO: 226261 - RNA, 20 nt, Artificial Sequence
  Synthetic
guaugguugggguggaggga

SEQ ID NO: 226262 - RNA, 21 nt, Artificial Sequence
  Synthetic
gguaugguugggguggaggga

SEQ ID NO: 226263 - RNA, 22 nt, Artificial Sequence
  Synthetic
agguaugguugggguggaggga

SEQ ID NO: 226264 - RNA, 23 nt, Artificial Sequence
  Synthetic
gagguaugguugggguggaggga

SEQ ID NO: 226265 - RNA, 24 nt, Artificial Sequence
  Synthetic
ugagguaugguugggguggaggga

SEQ ID NO: 226266 - RNA, 18 nt, Artificial Sequence
  Synthetic
ucccuuucuuaugaggga

SEQ ID NO: 226267 - RNA, 19 nt, Artificial Sequence
  Synthetic
uucccuuucuuaugaggga

SEQ ID NO: 226268 - RNA, 20 nt, Artificial Sequence
  Synthetic
guucccuuucuuaugaggga

SEQ ID NO: 226269 - RNA, 21 nt, Artificial Sequence
  Synthetic
uguucccuuucuuaugaggga

SEQ ID NO: 226270 - RNA, 22 nt, Artificial Sequence
  Synthetic
cuguucccuuucuuaugaggga

SEQ ID NO: 226271 - RNA, 23 nt, Artificial Sequence
  Synthetic
acuguucccuuucuuaugaggga

SEQ ID NO: 226272 - RNA, 24 nt, Artificial Sequence
  Synthetic
uacuguucccuuucuuaugaggga

SEQ ID NO: 226273 - RNA, 18 nt, Artificial Sequence
  Synthetic
aagaaagagagugaggga

SEQ ID NO: 226274 - RNA, 19 nt, Artificial Sequence
  Synthetic
gaagaaagagagugaggga

SEQ ID NO: 226275 - RNA, 20 nt, Artificial Sequence
  Synthetic
ggaagaaagagagugaggga

SEQ ID NO: 226276 - RNA, 21 nt, Artificial Sequence
  Synthetic
aggaagaaagagagugaggga

SEQ ID NO: 226277 - RNA, 22 nt, Artificial Sequence
  Synthetic
aaggaagaaagagagugaggga

SEQ ID NO: 226278 - RNA, 23 nt, Artificial Sequence
  Synthetic
uaaggaagaaagagagugaggga

SEQ ID NO: 226279 - RNA, 24 nt, Artificial Sequence
  Synthetic
guaaggaagaaagagagugaggga

SEQ ID NO: 226280 - RNA, 18 nt, Artificial Sequence
  Synthetic
cgcucugggagugaggga

SEQ ID NO: 226281 - RNA, 19 nt, Artificial Sequence
  Synthetic
acgcucugggagugaggga

SEQ ID NO: 226282 - RNA, 20 nt, Artificial Sequence
  Synthetic
uacgcucugggagugaggga

SEQ ID NO: 226283 - RNA, 21 nt, Artificial Sequence
  Synthetic
auacgcucugggagugaggga

SEQ ID NO: 226284 - RNA, 22 nt, Artificial Sequence
  Synthetic
gauacgcucugggagugaggga

SEQ ID NO: 226285 - RNA, 23 nt, Artificial Sequence
  Synthetic
ugauacgcucugggagugaggga

SEQ ID NO: 226286 - RNA, 24 nt, Artificial Sequence
  Synthetic
uugauacgcucugggagugaggga

SEQ ID NO: 226287 - RNA, 18 nt, Artificial Sequence
  Synthetic
uagagaaagagauaggga

SEQ ID NO: 226288 - RNA, 19 nt, Artificial Sequence
  Synthetic
guagagaaagagauaggga

SEQ ID NO: 226289 - RNA, 20 nt, Artificial Sequence
  Synthetic
gguagagaaagagauaggga

SEQ ID NO: 226290 - RNA, 21 nt, Artificial Sequence
  Synthetic
agguagagaaagagauaggga

SEQ ID NO: 226291 - RNA, 22 nt, Artificial Sequence
  Synthetic
gagguagagaaagagauaggga

SEQ ID NO: 226292 - RNA, 23 nt, Artificial Sequence
  Synthetic
ggagguagagaaagagauaggga

SEQ ID NO: 226293 - RNA, 24 nt, Artificial Sequence
  Synthetic
aggagguagagaaagagauaggga

SEQ ID NO: 226294 - RNA, 18 nt, Artificial Sequence
  Synthetic
agaaaaaauauauaggga

SEQ ID NO: 226295 - RNA, 19 nt, Artificial Sequence
  Synthetic
aagaaaaaauauauaggga

SEQ ID NO: 226296 - RNA, 20 nt, Artificial Sequence
  Synthetic
aaagaaaaaauauauaggga

SEQ ID NO: 226297 - RNA, 21 nt, Artificial Sequence
  Synthetic
aaaagaaaaaauauauaggga

SEQ ID NO: 226298 - RNA, 22 nt, Artificial Sequence
  Synthetic
aaaaagaaaaaauauauaggga

SEQ ID NO: 226299 - RNA, 23 nt, Artificial Sequence
  Synthetic
aaaaaagaaaaaauauauaggga

SEQ ID NO: 226300 - RNA, 24 nt, Artificial Sequence
  Synthetic
aaaaaaagaaaaaauauauaggga

SEQ ID NO: 226301 - RNA, 18 nt, Artificial Sequence
  Synthetic
gguuuacagaacuaggga

SEQ ID NO: 226302 - RNA, 19 nt, Artificial Sequence
  Synthetic
agguuuacagaacuaggga

SEQ ID NO: 226303 - RNA, 20 nt, Artificial Sequence
  Synthetic
aagguuuacagaacuaggga

SEQ ID NO: 226304 - RNA, 21 nt, Artificial Sequence
  Synthetic
aaagguuuacagaacuaggga

SEQ ID NO: 226305 - RNA, 22 nt, Artificial Sequence
  Synthetic
aaaagguuuacagaacuaggga

SEQ ID NO: 226306 - RNA, 23 nt, Artificial Sequence
  Synthetic
caaaagguuuacagaacuaggga

SEQ ID NO: 226307 - RNA, 24 nt, Artificial Sequence
  Synthetic
ucaaaagguuuacagaacuaggga

SEQ ID NO: 226308 - RNA, 18 nt, Artificial Sequence
  Synthetic
gcagcagcgggcuaggga

SEQ ID NO: 226309 - RNA, 19 nt, Artificial Sequence
  Synthetic
agcagcagcgggcuaggga

SEQ ID NO: 226310 - RNA, 20 nt, Artificial Sequence
  Synthetic
gagcagcagcgggcuaggga

SEQ ID NO: 226311 - RNA, 21 nt, Artificial Sequence
  Synthetic
ugagcagcagcgggcuaggga

SEQ ID NO: 226312 - RNA, 22 nt, Artificial Sequence
  Synthetic
gugagcagcagcgggcuaggga

SEQ ID NO: 226313 - RNA, 23 nt, Artificial Sequence
  Synthetic
ggugagcagcagcgggcuaggga

SEQ ID NO: 226314 - RNA, 24 nt, Artificial Sequence
  Synthetic
aggugagcagcagcgggcuaggga

SEQ ID NO: 226315 - RNA, 18 nt, Artificial Sequence
  Synthetic
guauucagacaguaggga

SEQ ID NO: 226316 - RNA, 19 nt, Artificial Sequence
  Synthetic
uguauucagacaguaggga

SEQ ID NO: 226317 - RNA, 20 nt, Artificial Sequence
  Synthetic
cuguauucagacaguaggga

SEQ ID NO: 226318 - RNA, 21 nt, Artificial Sequence
  Synthetic
ucuguauucagacaguaggga

SEQ ID NO: 226319 - RNA, 22 nt, Artificial Sequence
  Synthetic
cucuguauucagacaguaggga

SEQ ID NO: 226320 - RNA, 23 nt, Artificial Sequence
  Synthetic
ucucuguauucagacaguaggga

SEQ ID NO: 226321 - RNA, 24 nt, Artificial Sequence
  Synthetic
gucucuguauucagacaguaggga

SEQ ID NO: 226322 - RNA, 18 nt, Artificial Sequence
  Synthetic
uuuuacaugcaguaggga

SEQ ID NO: 226323 - RNA, 19 nt, Artificial Sequence
  Synthetic
uuuuuacaugcaguaggga

SEQ ID NO: 226324 - RNA, 20 nt, Artificial Sequence
  Synthetic
auuuuuacaugcaguaggga

SEQ ID NO: 226325 - RNA, 21 nt, Artificial Sequence
  Synthetic
cauuuuuacaugcaguaggga

SEQ ID NO: 226326 - RNA, 22 nt, Artificial Sequence
  Synthetic
ucauuuuuacaugcaguaggga

SEQ ID NO: 226327 - RNA, 23 nt, Artificial Sequence
  Synthetic
aucauuuuuacaugcaguaggga

SEQ ID NO: 226328 - RNA, 24 nt, Artificial Sequence
  Synthetic
gaucauuuuuacaugcaguaggga

SEQ ID NO: 226329 - RNA, 18 nt, Artificial Sequence
  Synthetic
uaggaaauuugguaggga

SEQ ID NO: 226330 - RNA, 19 nt, Artificial Sequence
  Synthetic
uuaggaaauuugguaggga

SEQ ID NO: 226331 - RNA, 20 nt, Artificial Sequence
  Synthetic
uuuaggaaauuugguaggga

SEQ ID NO: 226332 - RNA, 21 nt, Artificial Sequence
  Synthetic
cuuuaggaaauuugguaggga

SEQ ID NO: 226333 - RNA, 22 nt, Artificial Sequence
  Synthetic
gcuuuaggaaauuugguaggga

SEQ ID NO: 226334 - RNA, 23 nt, Artificial Sequence
  Synthetic
ggcuuuaggaaauuugguaggga

SEQ ID NO: 226335 - RNA, 24 nt, Artificial Sequence
  Synthetic
uggcuuuaggaaauuugguaggga

SEQ ID NO: 226336 - RNA, 18 nt, Artificial Sequence
  Synthetic
uuuuaagaaaguuaggga

SEQ ID NO: 226337 - RNA, 19 nt, Artificial Sequence
  Synthetic
auuuuaagaaaguuaggga

SEQ ID NO: 226338 - RNA, 20 nt, Artificial Sequence
  Synthetic
uauuuuaagaaaguuaggga

SEQ ID NO: 226339 - RNA, 21 nt, Artificial Sequence
  Synthetic
uuauuuuaagaaaguuaggga

SEQ ID NO: 226340 - RNA, 22 nt, Artificial Sequence
  Synthetic
guuauuuuaagaaaguuaggga

SEQ ID NO: 226341 - RNA, 23 nt, Artificial Sequence
  Synthetic
aguuauuuuaagaaaguuaggga

SEQ ID NO: 226342 - RNA, 24 nt, Artificial Sequence
  Synthetic
uaguuauuuuaagaaaguuaggga

SEQ ID NO: 226343 - RNA, 18 nt, Artificial Sequence
  Synthetic
uuaguuuagauuuaggga

SEQ ID NO: 226344 - RNA, 19 nt, Artificial Sequence
  Synthetic
guuaguuuagauuuaggga

SEQ ID NO: 226345 - RNA, 20 nt, Artificial Sequence
  Synthetic
uguuaguuuagauuuaggga

SEQ ID NO: 226346 - RNA, 21 nt, Artificial Sequence
  Synthetic
cuguuaguuuagauuuaggga

SEQ ID NO: 226347 - RNA, 22 nt, Artificial Sequence
  Synthetic
ccuguuaguuuagauuuaggga

SEQ ID NO: 226348 - RNA, 23 nt, Artificial Sequence
  Synthetic
cccuguuaguuuagauuuaggga

SEQ ID NO: 226349 - RNA, 24 nt, Artificial Sequence
  Synthetic
ucccuguuaguuuagauuuaggga

SEQ ID NO: 226350 - RNA, 18 nt, Artificial Sequence
  Synthetic
caaugggcaaaaacggga

SEQ ID NO: 226351 - RNA, 19 nt, Artificial Sequence
  Synthetic
ucaaugggcaaaaacggga

SEQ ID NO: 226352 - RNA, 20 nt, Artificial Sequence
  Synthetic
cucaaugggcaaaaacggga

SEQ ID NO: 226353 - RNA, 21 nt, Artificial Sequence
  Synthetic
gcucaaugggcaaaaacggga

SEQ ID NO: 226354 - RNA, 22 nt, Artificial Sequence
  Synthetic
ugcucaaugggcaaaaacggga

SEQ ID NO: 226355 - RNA, 23 nt, Artificial Sequence
  Synthetic
cugcucaaugggcaaaaacggga

SEQ ID NO: 226356 - RNA, 24 nt, Artificial Sequence
  Synthetic
ucugcucaaugggcaaaaacggga

SEQ ID NO: 226357 - RNA, 18 nt, Artificial Sequence
  Synthetic
uaagccauuuuaacggga

SEQ ID NO: 226358 - RNA, 19 nt, Artificial Sequence
  Synthetic
auaagccauuuuaacggga

SEQ ID NO: 226359 - RNA, 20 nt, Artificial Sequence
  Synthetic
uauaagccauuuuaacggga

SEQ ID NO: 226360 - RNA, 21 nt, Artificial Sequence
  Synthetic
auauaagccauuuuaacggga

SEQ ID NO: 226361 - RNA, 22 nt, Artificial Sequence
  Synthetic
gauauaagccauuuuaacggga

SEQ ID NO: 226362 - RNA, 23 nt, Artificial Sequence
  Synthetic
ggauauaagccauuuuaacggga

SEQ ID NO: 226363 - RNA, 24 nt, Artificial Sequence
  Synthetic
uggauauaagccauuuuaacggga

SEQ ID NO: 226364 - RNA, 18 nt, Artificial Sequence
  Synthetic
augaccacagagacggga

SEQ ID NO: 226365 - RNA, 19 nt, Artificial Sequence
  Synthetic
aaugaccacagagacggga

SEQ ID NO: 226366 - RNA, 20 nt, Artificial Sequence
  Synthetic
gaaugaccacagagacggga

SEQ ID NO: 226367 - RNA, 21 nt, Artificial Sequence
  Synthetic
ugaaugaccacagagacggga

SEQ ID NO: 226368 - RNA, 22 nt, Artificial Sequence
  Synthetic
uugaaugaccacagagacggga

SEQ ID NO: 226369 - RNA, 23 nt, Artificial Sequence
  Synthetic
auugaaugaccacagagacggga

SEQ ID NO: 226370 - RNA, 24 nt, Artificial Sequence
  Synthetic
aauugaaugaccacagagacggga

SEQ ID NO: 226371 - RNA, 18 nt, Artificial Sequence
  Synthetic
aacacauggacaccggga

SEQ ID NO: 226372 - RNA, 19 nt, Artificial Sequence
  Synthetic
gaacacauggacaccggga

SEQ ID NO: 226373 - RNA, 20 nt, Artificial Sequence
  Synthetic
agaacacauggacaccggga

SEQ ID NO: 226374 - RNA, 21 nt, Artificial Sequence
  Synthetic
gagaacacauggacaccggga

SEQ ID NO: 226375 - RNA, 22 nt, Artificial Sequence
  Synthetic
ugagaacacauggacaccggga

SEQ ID NO: 226376 - RNA, 23 nt, Artificial Sequence
  Synthetic
augagaacacauggacaccggga

SEQ ID NO: 226377 - RNA, 24 nt, Artificial Sequence
  Synthetic
aaugagaacacauggacaccggga

SEQ ID NO: 226378 - RNA, 18 nt, Artificial Sequence
  Synthetic
cucaucugagacccggga

SEQ ID NO: 226379 - RNA, 19 nt, Artificial Sequence
  Synthetic
ccucaucugagacccggga

SEQ ID NO: 226380 - RNA, 20 nt, Artificial Sequence
  Synthetic
uccucaucugagacccggga

SEQ ID NO: 226381 - RNA, 21 nt, Artificial Sequence
  Synthetic
auccucaucugagacccggga

SEQ ID NO: 226382 - RNA, 22 nt, Artificial Sequence
  Synthetic
cauccucaucugagacccggga

SEQ ID NO: 226383 - RNA, 23 nt, Artificial Sequence
  Synthetic
gcauccucaucugagacccggga

SEQ ID NO: 226384 - RNA, 24 nt, Artificial Sequence
  Synthetic
ggcauccucaucugagacccggga

SEQ ID NO: 226385 - RNA, 18 nt, Artificial Sequence
  Synthetic
aaagcaggaaaaagggga

SEQ ID NO: 226386 - RNA, 19 nt, Artificial Sequence
  Synthetic
gaaagcaggaaaaagggga

SEQ ID NO: 226387 - RNA, 20 nt, Artificial Sequence
  Synthetic
ggaaagcaggaaaaagggga

SEQ ID NO: 226388 - RNA, 21 nt, Artificial Sequence
  Synthetic
aggaaagcaggaaaaagggga

SEQ ID NO: 226389 - RNA, 22 nt, Artificial Sequence
  Synthetic
aaggaaagcaggaaaaagggga

SEQ ID NO: 226390 - RNA, 23 nt, Artificial Sequence
  Synthetic
gaaggaaagcaggaaaaagggga

SEQ ID NO: 226391 - RNA, 24 nt, Artificial Sequence
  Synthetic
ggaaggaaagcaggaaaaagggga

SEQ ID NO: 226392 - RNA, 18 nt, Artificial Sequence
  Synthetic
aaggaguaccaaagggga

SEQ ID NO: 226393 - RNA, 19 nt, Artificial Sequence
  Synthetic
caaggaguaccaaagggga

SEQ ID NO: 226394 - RNA, 20 nt, Artificial Sequence
  Synthetic
acaaggaguaccaaagggga

SEQ ID NO: 226395 - RNA, 21 nt, Artificial Sequence
  Synthetic
aacaaggaguaccaaagggga

SEQ ID NO: 226396 - RNA, 22 nt, Artificial Sequence
  Synthetic
aaacaaggaguaccaaagggga

SEQ ID NO: 226397 - RNA, 23 nt, Artificial Sequence
  Synthetic
gaaacaaggaguaccaaagggga

SEQ ID NO: 226398 - RNA, 24 nt, Artificial Sequence
  Synthetic
ggaaacaaggaguaccaaagggga

SEQ ID NO: 226399 - RNA, 18 nt, Artificial Sequence
  Synthetic
cagccagcccaaagggga

SEQ ID NO: 226400 - RNA, 19 nt, Artificial Sequence
  Synthetic
ucagccagcccaaagggga

SEQ ID NO: 226401 - RNA, 20 nt, Artificial Sequence
  Synthetic
uucagccagcccaaagggga

SEQ ID NO: 226402 - RNA, 21 nt, Artificial Sequence
  Synthetic
auucagccagcccaaagggga

SEQ ID NO: 226403 - RNA, 22 nt, Artificial Sequence
  Synthetic
uauucagccagcccaaagggga

SEQ ID NO: 226404 - RNA, 23 nt, Artificial Sequence
  Synthetic
auauucagccagcccaaagggga

SEQ ID NO: 226405 - RNA, 24 nt, Artificial Sequence
  Synthetic
gauauucagccagcccaaagggga

SEQ ID NO: 226406 - RNA, 18 nt, Artificial Sequence
  Synthetic
guuucagcccaaagggga

SEQ ID NO: 226407 - RNA, 19 nt, Artificial Sequence
  Synthetic
aguuucagcccaaagggga

SEQ ID NO: 226408 - RNA, 20 nt, Artificial Sequence
  Synthetic
caguuucagcccaaagggga

SEQ ID NO: 226409 - RNA, 21 nt, Artificial Sequence
  Synthetic
ucaguuucagcccaaagggga

SEQ ID NO: 226410 - RNA, 22 nt, Artificial Sequence
  Synthetic
uucaguuucagcccaaagggga

SEQ ID NO: 226411 - RNA, 23 nt, Artificial Sequence
  Synthetic
uuucaguuucagcccaaagggga

SEQ ID NO: 226412 - RNA, 24 nt, Artificial Sequence
  Synthetic
uuuucaguuucagcccaaagggga

SEQ ID NO: 226413 - RNA, 18 nt, Artificial Sequence
  Synthetic
gguggaaagcaaagggga

SEQ ID NO: 226414 - RNA, 19 nt, Artificial Sequence
  Synthetic
ugguggaaagcaaagggga

SEQ ID NO: 226415 - RNA, 20 nt, Artificial Sequence
  Synthetic
augguggaaagcaaagggga

SEQ ID NO: 226416 - RNA, 21 nt, Artificial Sequence
  Synthetic
caugguggaaagcaaagggga

SEQ ID NO: 226417 - RNA, 22 nt, Artificial Sequence
  Synthetic
ucaugguggaaagcaaagggga

SEQ ID NO: 226418 - RNA, 23 nt, Artificial Sequence
  Synthetic
aucaugguggaaagcaaagggga

SEQ ID NO: 226419 - RNA, 24 nt, Artificial Sequence
  Synthetic
aaucaugguggaaagcaaagggga

SEQ ID NO: 226420 - RNA, 18 nt, Artificial Sequence
  Synthetic
acuccccuggaaagggga

SEQ ID NO: 226421 - RNA, 19 nt, Artificial Sequence
  Synthetic
cacuccccuggaaagggga

SEQ ID NO: 226422 - RNA, 20 nt, Artificial Sequence
  Synthetic
ucacuccccuggaaagggga

SEQ ID NO: 226423 - RNA, 21 nt, Artificial Sequence
  Synthetic
uucacuccccuggaaagggga

SEQ ID NO: 226424 - RNA, 22 nt, Artificial Sequence
  Synthetic
auucacuccccuggaaagggga

SEQ ID NO: 226425 - RNA, 23 nt, Artificial Sequence
  Synthetic
cauucacuccccuggaaagggga

SEQ ID NO: 226426 - RNA, 24 nt, Artificial Sequence
  Synthetic
ccauucacuccccuggaaagggga

SEQ ID NO: 226427 - RNA, 18 nt, Artificial Sequence
  Synthetic
agguggggggcaagggga

SEQ ID NO: 226428 - RNA, 19 nt, Artificial Sequence
  Synthetic
gagguggggggcaagggga

SEQ ID NO: 226429 - RNA, 20 nt, Artificial Sequence
  Synthetic
cgagguggggggcaagggga

SEQ ID NO: 226430 - RNA, 21 nt, Artificial Sequence
  Synthetic
gcgagguggggggcaagggga

SEQ ID NO: 226431 - RNA, 22 nt, Artificial Sequence
  Synthetic
cgcgagguggggggcaagggga

SEQ ID NO: 226432 - RNA, 23 nt, Artificial Sequence
  Synthetic
ucgcgagguggggggcaagggga

SEQ ID NO: 226433 - RNA, 24 nt, Artificial Sequence
  Synthetic
gucgcgagguggggggcaagggga

SEQ ID NO: 226434 - RNA, 18 nt, Artificial Sequence
  Synthetic
gggacuaauagaagggga

SEQ ID NO: 226435 - RNA, 19 nt, Artificial Sequence
  Synthetic
agggacuaauagaagggga

SEQ ID NO: 226436 - RNA, 20 nt, Artificial Sequence
  Synthetic
uagggacuaauagaagggga

SEQ ID NO: 226437 - RNA, 21 nt, Artificial Sequence
  Synthetic
cuagggacuaauagaagggga

SEQ ID NO: 226438 - RNA, 22 nt, Artificial Sequence
  Synthetic
acuagggacuaauagaagggga

SEQ ID NO: 226439 - RNA, 23 nt, Artificial Sequence
  Synthetic
aacuagggacuaauagaagggga

SEQ ID NO: 226440 - RNA, 24 nt, Artificial Sequence
  Synthetic
aaacuagggacuaauagaagggga

SEQ ID NO: 226441 - RNA, 18 nt, Artificial Sequence
  Synthetic
aaguggagaggaagggga

SEQ ID NO: 226442 - RNA, 19 nt, Artificial Sequence
  Synthetic
caaguggagaggaagggga

SEQ ID NO: 226443 - RNA, 20 nt, Artificial Sequence
  Synthetic
ucaaguggagaggaagggga

SEQ ID NO: 226444 - RNA, 21 nt, Artificial Sequence
  Synthetic
aucaaguggagaggaagggga

SEQ ID NO: 226445 - RNA, 22 nt, Artificial Sequence
  Synthetic
aaucaaguggagaggaagggga

SEQ ID NO: 226446 - RNA, 23 nt, Artificial Sequence
  Synthetic
aaaucaaguggagaggaagggga

SEQ ID NO: 226447 - RNA, 24 nt, Artificial Sequence
  Synthetic
aaaaucaaguggagaggaagggga

SEQ ID NO: 226448 - RNA, 18 nt, Artificial Sequence
  Synthetic
aguagaauaauaagggga

SEQ ID NO: 226449 - RNA, 19 nt, Artificial Sequence
  Synthetic
aaguagaauaauaagggga

SEQ ID NO: 226450 - RNA, 20 nt, Artificial Sequence
  Synthetic
gaaguagaauaauaagggga

SEQ ID NO: 226451 - RNA, 21 nt, Artificial Sequence
  Synthetic
ugaaguagaauaauaagggga

SEQ ID NO: 226452 - RNA, 22 nt, Artificial Sequence
  Synthetic
uugaaguagaauaauaagggga

SEQ ID NO: 226453 - RNA, 23 nt, Artificial Sequence
  Synthetic
guugaaguagaauaauaagggga

SEQ ID NO: 226454 - RNA, 24 nt, Artificial Sequence
  Synthetic
aguugaaguagaauaauaagggga

SEQ ID NO: 226455 - RNA, 18 nt, Artificial Sequence
  Synthetic
guuaaaugcauaagggga

SEQ ID NO: 226456 - RNA, 19 nt, Artificial Sequence
  Synthetic
gguuaaaugcauaagggga

SEQ ID NO: 226457 - RNA, 20 nt, Artificial Sequence
  Synthetic
ugguuaaaugcauaagggga

SEQ ID NO: 226458 - RNA, 21 nt, Artificial Sequence
  Synthetic
augguuaaaugcauaagggga

SEQ ID NO: 226459 - RNA, 22 nt, Artificial Sequence
  Synthetic
aaugguuaaaugcauaagggga

SEQ ID NO: 226460 - RNA, 23 nt, Artificial Sequence
  Synthetic
gaaugguuaaaugcauaagggga

SEQ ID NO: 226461 - RNA, 24 nt, Artificial Sequence
  Synthetic
ugaaugguuaaaugcauaagggga

SEQ ID NO: 226462 - RNA, 18 nt, Artificial Sequence
  Synthetic
acaggauggauaagggga

SEQ ID NO: 226463 - RNA, 19 nt, Artificial Sequence
  Synthetic
cacaggauggauaagggga

SEQ ID NO: 226464 - RNA, 20 nt, Artificial Sequence
  Synthetic
acacaggauggauaagggga

SEQ ID NO: 226465 - RNA, 21 nt, Artificial Sequence
  Synthetic
uacacaggauggauaagggga

SEQ ID NO: 226466 - RNA, 22 nt, Artificial Sequence
  Synthetic
cuacacaggauggauaagggga

SEQ ID NO: 226467 - RNA, 23 nt, Artificial Sequence
  Synthetic
gcuacacaggauggauaagggga

SEQ ID NO: 226468 - RNA, 24 nt, Artificial Sequence
  Synthetic
ggcuacacaggauggauaagggga

SEQ ID NO: 226469 - RNA, 18 nt, Artificial Sequence
  Synthetic
uauuuacuacuaagggga

SEQ ID NO: 226470 - RNA, 19 nt, Artificial Sequence
  Synthetic
auauuuacuacuaagggga

SEQ ID NO: 226471 - RNA, 20 nt, Artificial Sequence
  Synthetic
aauauuuacuacuaagggga

SEQ ID NO: 226472 - RNA, 21 nt, Artificial Sequence
  Synthetic
aaauauuuacuacuaagggga

SEQ ID NO: 226473 - RNA, 22 nt, Artificial Sequence
  Synthetic
gaaauauuuacuacuaagggga

SEQ ID NO: 226474 - RNA, 23 nt, Artificial Sequence
  Synthetic
agaaauauuuacuacuaagggga

SEQ ID NO: 226475 - RNA, 24 nt, Artificial Sequence
  Synthetic
gagaaauauuuacuacuaagggga

SEQ ID NO: 226476 - RNA, 18 nt, Artificial Sequence
  Synthetic
guccgggacaacagggga

SEQ ID NO: 226477 - RNA, 19 nt, Artificial Sequence
  Synthetic
aguccgggacaacagggga

SEQ ID NO: 226478 - RNA, 20 nt, Artificial Sequence
  Synthetic
gaguccgggacaacagggga

SEQ ID NO: 226479 - RNA, 21 nt, Artificial Sequence
  Synthetic
ggaguccgggacaacagggga

SEQ ID NO: 226480 - RNA, 22 nt, Artificial Sequence
  Synthetic
aggaguccgggacaacagggga

SEQ ID NO: 226481 - RNA, 23 nt, Artificial Sequence
  Synthetic
aaggaguccgggacaacagggga

SEQ ID NO: 226482 - RNA, 24 nt, Artificial Sequence
  Synthetic
caaggaguccgggacaacagggga

SEQ ID NO: 226483 - RNA, 18 nt, Artificial Sequence
  Synthetic
gcuuugacucucagggga

SEQ ID NO: 226484 - RNA, 19 nt, Artificial Sequence
  Synthetic
ggcuuugacucucagggga

SEQ ID NO: 226485 - RNA, 20 nt, Artificial Sequence
  Synthetic
uggcuuugacucucagggga

SEQ ID NO: 226486 - RNA, 21 nt, Artificial Sequence
  Synthetic
cuggcuuugacucucagggga

SEQ ID NO: 226487 - RNA, 22 nt, Artificial Sequence
  Synthetic
gcuggcuuugacucucagggga

SEQ ID NO: 226488 - RNA, 23 nt, Artificial Sequence
  Synthetic
ugcuggcuuugacucucagggga

SEQ ID NO: 226489 - RNA, 24 nt, Artificial Sequence
  Synthetic
augcuggcuuugacucucagggga

SEQ ID NO: 226490 - RNA, 18 nt, Artificial Sequence
  Synthetic
ggggguggggcgagggga

SEQ ID NO: 226491 - RNA, 19 nt, Artificial Sequence
  Synthetic
gggggguggggcgagggga

SEQ ID NO: 226492 - RNA, 20 nt, Artificial Sequence
  Synthetic
cgggggguggggcgagggga

SEQ ID NO: 226493 - RNA, 21 nt, Artificial Sequence
  Synthetic
ucgggggguggggcgagggga

SEQ ID NO: 226494 - RNA, 22 nt, Artificial Sequence
  Synthetic
gucgggggguggggcgagggga

SEQ ID NO: 226495 - RNA, 23 nt, Artificial Sequence
  Synthetic
ugucgggggguggggcgagggga

SEQ ID NO: 226496 - RNA, 24 nt, Artificial Sequence
  Synthetic
cugucgggggguggggcgagggga

SEQ ID NO: 226497 - RNA, 18 nt, Artificial Sequence
  Synthetic
uccgaaaggaggagggga

SEQ ID NO: 226498 - RNA, 19 nt, Artificial Sequence
  Synthetic
cuccgaaaggaggagggga

SEQ ID NO: 226499 - RNA, 20 nt, Artificial Sequence
  Synthetic
acuccgaaaggaggagggga

SEQ ID NO: 226500 - RNA, 21 nt, Artificial Sequence
  Synthetic
cacuccgaaaggaggagggga

SEQ ID NO: 226501 - RNA, 22 nt, Artificial Sequence
  Synthetic
gcacuccgaaaggaggagggga

SEQ ID NO: 226502 - RNA, 23 nt, Artificial Sequence
  Synthetic
ggcacuccgaaaggaggagggga

SEQ ID NO: 226503 - RNA, 24 nt, Artificial Sequence
  Synthetic
aggcacuccgaaaggaggagggga

SEQ ID NO: 226504 - RNA, 18 nt, Artificial Sequence
  Synthetic
gaugggaugaugagggga

SEQ ID NO: 226505 - RNA, 19 nt, Artificial Sequence
  Synthetic
agaugggaugaugagggga

SEQ ID NO: 226506 - RNA, 20 nt, Artificial Sequence
  Synthetic
uagaugggaugaugagggga

SEQ ID NO: 226507 - RNA, 21 nt, Artificial Sequence
  Synthetic
guagaugggaugaugagggga

SEQ ID NO: 226508 - RNA, 22 nt, Artificial Sequence
  Synthetic
aguagaugggaugaugagggga

SEQ ID NO: 226509 - RNA, 23 nt, Artificial Sequence
  Synthetic
aaguagaugggaugaugagggga

SEQ ID NO: 226510 - RNA, 24 nt, Artificial Sequence
  Synthetic
uaaguagaugggaugaugagggga

SEQ ID NO: 226511 - RNA, 18 nt, Artificial Sequence
  Synthetic
uuuaaaucacugagggga

SEQ ID NO: 226512 - RNA, 19 nt, Artificial Sequence
  Synthetic
uuuuaaaucacugagggga

SEQ ID NO: 226513 - RNA, 20 nt, Artificial Sequence
  Synthetic
guuuuaaaucacugagggga

SEQ ID NO: 226514 - RNA, 21 nt, Artificial Sequence
  Synthetic
uguuuuaaaucacugagggga

SEQ ID NO: 226515 - RNA, 22 nt, Artificial Sequence
  Synthetic
uuguuuuaaaucacugagggga

SEQ ID NO: 226516 - RNA, 23 nt, Artificial Sequence
  Synthetic
cuuguuuuaaaucacugagggga

SEQ ID NO: 226517 - RNA, 24 nt, Artificial Sequence
  Synthetic
gcuuguuuuaaaucacugagggga

SEQ ID NO: 226518 - RNA, 18 nt, Artificial Sequence
  Synthetic
ugccuaacucugagggga

SEQ ID NO: 226519 - RNA, 19 nt, Artificial Sequence
  Synthetic
augccuaacucugagggga

SEQ ID NO: 226520 - RNA, 20 nt, Artificial Sequence
  Synthetic
caugccuaacucugagggga

SEQ ID NO: 226521 - RNA, 21 nt, Artificial Sequence
  Synthetic
ucaugccuaacucugagggga

SEQ ID NO: 226522 - RNA, 22 nt, Artificial Sequence
  Synthetic
gucaugccuaacucugagggga

SEQ ID NO: 226523 - RNA, 23 nt, Artificial Sequence
  Synthetic
ggucaugccuaacucugagggga

SEQ ID NO: 226524 - RNA, 24 nt, Artificial Sequence
  Synthetic
uggucaugccuaacucugagggga

SEQ ID NO: 226525 - RNA, 18 nt, Artificial Sequence
  Synthetic
aggcuccgggguagggga

SEQ ID NO: 226526 - RNA, 19 nt, Artificial Sequence
  Synthetic
gaggcuccgggguagggga

SEQ ID NO: 226527 - RNA, 20 nt, Artificial Sequence
  Synthetic
ggaggcuccgggguagggga

SEQ ID NO: 226528 - RNA, 21 nt, Artificial Sequence
  Synthetic
gggaggcuccgggguagggga

SEQ ID NO: 226529 - RNA, 22 nt, Artificial Sequence
  Synthetic
ugggaggcuccgggguagggga

SEQ ID NO: 226530 - RNA, 23 nt, Artificial Sequence
  Synthetic
cugggaggcuccgggguagggga

SEQ ID NO: 226531 - RNA, 24 nt, Artificial Sequence
  Synthetic
gcugggaggcuccgggguagggga

SEQ ID NO: 226532 - RNA, 18 nt, Artificial Sequence
  Synthetic
guaucagugauuagggga

SEQ ID NO: 226533 - RNA, 19 nt, Artificial Sequence
  Synthetic
uguaucagugauuagggga

SEQ ID NO: 226534 - RNA, 20 nt, Artificial Sequence
  Synthetic
guguaucagugauuagggga

SEQ ID NO: 226535 - RNA, 21 nt, Artificial Sequence
  Synthetic
uguguaucagugauuagggga

SEQ ID NO: 226536 - RNA, 22 nt, Artificial Sequence
  Synthetic
auguguaucagugauuagggga

SEQ ID NO: 226537 - RNA, 23 nt, Artificial Sequence
  Synthetic
gauguguaucagugauuagggga

SEQ ID NO: 226538 - RNA, 24 nt, Artificial Sequence
  Synthetic
agauguguaucagugauuagggga

SEQ ID NO: 226539 - RNA, 18 nt, Artificial Sequence
  Synthetic
uuugagcuauuuagggga

SEQ ID NO: 226540 - RNA, 19 nt, Artificial Sequence
  Synthetic
uuuugagcuauuuagggga

SEQ ID NO: 226541 - RNA, 20 nt, Artificial Sequence
  Synthetic
guuuugagcuauuuagggga

SEQ ID NO: 226542 - RNA, 21 nt, Artificial Sequence
  Synthetic
uguuuugagcuauuuagggga

SEQ ID NO: 226543 - RNA, 22 nt, Artificial Sequence
  Synthetic
auguuuugagcuauuuagggga

SEQ ID NO: 226544 - RNA, 23 nt, Artificial Sequence
  Synthetic
gauguuuugagcuauuuagggga

SEQ ID NO: 226545 - RNA, 24 nt, Artificial Sequence
  Synthetic
ugauguuuugagcuauuuagggga

SEQ ID NO: 226546 - RNA, 18 nt, Artificial Sequence
  Synthetic
gacagagcaccacgggga

SEQ ID NO: 226547 - RNA, 19 nt, Artificial Sequence
  Synthetic
ggacagagcaccacgggga

SEQ ID NO: 226548 - RNA, 20 nt, Artificial Sequence
  Synthetic
gggacagagcaccacgggga

SEQ ID NO: 226549 - RNA, 21 nt, Artificial Sequence
  Synthetic
ugggacagagcaccacgggga

SEQ ID NO: 226550 - RNA, 22 nt, Artificial Sequence
  Synthetic
cugggacagagcaccacgggga

SEQ ID NO: 226551 - RNA, 23 nt, Artificial Sequence
  Synthetic
ccugggacagagcaccacgggga

SEQ ID NO: 226552 - RNA, 24 nt, Artificial Sequence
  Synthetic
cccugggacagagcaccacgggga

SEQ ID NO: 226553 - RNA, 18 nt, Artificial Sequence
  Synthetic
uaaaauauuuagcgggga

SEQ ID NO: 226554 - RNA, 19 nt, Artificial Sequence
  Synthetic
guaaaauauuuagcgggga

SEQ ID NO: 226555 - RNA, 20 nt, Artificial Sequence
  Synthetic
aguaaaauauuuagcgggga

SEQ ID NO: 226556 - RNA, 21 nt, Artificial Sequence
  Synthetic
aaguaaaauauuuagcgggga

SEQ ID NO: 226557 - RNA, 22 nt, Artificial Sequence
  Synthetic
gaaguaaaauauuuagcgggga

SEQ ID NO: 226558 - RNA, 23 nt, Artificial Sequence
  Synthetic
ggaaguaaaauauuuagcgggga

SEQ ID NO: 226559 - RNA, 24 nt, Artificial Sequence
  Synthetic
cggaaguaaaauauuuagcgggga

SEQ ID NO: 226560 - RNA, 18 nt, Artificial Sequence
  Synthetic
aucuagcaagggcgggga

SEQ ID NO: 226561 - RNA, 19 nt, Artificial Sequence
  Synthetic
gaucuagcaagggcgggga

SEQ ID NO: 226562 - RNA, 20 nt, Artificial Sequence
  Synthetic
ugaucuagcaagggcgggga

SEQ ID NO: 226563 - RNA, 21 nt, Artificial Sequence
  Synthetic
augaucuagcaagggcgggga

SEQ ID NO: 226564 - RNA, 22 nt, Artificial Sequence
  Synthetic
aaugaucuagcaagggcgggga

SEQ ID NO: 226565 - RNA, 23 nt, Artificial Sequence
  Synthetic
aaaugaucuagcaagggcgggga

SEQ ID NO: 226566 - RNA, 24 nt, Artificial Sequence
  Synthetic
uaaaugaucuagcaagggcgggga

SEQ ID NO: 226567 - RNA, 18 nt, Artificial Sequence
  Synthetic
agaggcucuuggcgggga

SEQ ID NO: 226568 - RNA, 19 nt, Artificial Sequence
  Synthetic
aagaggcucuuggcgggga

SEQ ID NO: 226569 - RNA, 20 nt, Artificial Sequence
  Synthetic
caagaggcucuuggcgggga

SEQ ID NO: 226570 - RNA, 21 nt, Artificial Sequence
  Synthetic
acaagaggcucuuggcgggga

SEQ ID NO: 226571 - RNA, 22 nt, Artificial Sequence
  Synthetic
aacaagaggcucuuggcgggga

SEQ ID NO: 226572 - RNA, 23 nt, Artificial Sequence
  Synthetic
uaacaagaggcucuuggcgggga

SEQ ID NO: 226573 - RNA, 24 nt, Artificial Sequence
  Synthetic
uuaacaagaggcucuuggcgggga

SEQ ID NO: 226574 - RNA, 18 nt, Artificial Sequence
  Synthetic
uucaggggagaaggggga

SEQ ID NO: 226575 - RNA, 19 nt, Artificial Sequence
  Synthetic
cuucaggggagaaggggga

SEQ ID NO: 226576 - RNA, 20 nt, Artificial Sequence
  Synthetic
gcuucaggggagaaggggga

SEQ ID NO: 226577 - RNA, 21 nt, Artificial Sequence
  Synthetic
ugcuucaggggagaaggggga

SEQ ID NO: 226578 - RNA, 22 nt, Artificial Sequence
  Synthetic
cugcuucaggggagaaggggga

SEQ ID NO: 226579 - RNA, 23 nt, Artificial Sequence
  Synthetic
ccugcuucaggggagaaggggga

SEQ ID NO: 226580 - RNA, 24 nt, Artificial Sequence
  Synthetic
accugcuucaggggagaaggggga

SEQ ID NO: 226581 - RNA, 18 nt, Artificial Sequence
  Synthetic
uugaacccaggaggggga

SEQ ID NO: 226582 - RNA, 19 nt, Artificial Sequence
  Synthetic
cuugaacccaggaggggga

SEQ ID NO: 226583 - RNA, 20 nt, Artificial Sequence
  Synthetic
gcuugaacccaggaggggga

SEQ ID NO: 226584 - RNA, 21 nt, Artificial Sequence
  Synthetic
cgcuugaacccaggaggggga

SEQ ID NO: 226585 - RNA, 22 nt, Artificial Sequence
  Synthetic
ucgcuugaacccaggaggggga

SEQ ID NO: 226586 - RNA, 23 nt, Artificial Sequence
  Synthetic
aucgcuugaacccaggaggggga

SEQ ID NO: 226587 - RNA, 24 nt, Artificial Sequence
  Synthetic
aaucgcuugaacccaggaggggga

SEQ ID NO: 226588 - RNA, 18 nt, Artificial Sequence
  Synthetic
guuggucagguaggggga

SEQ ID NO: 226589 - RNA, 19 nt, Artificial Sequence
  Synthetic
gguuggucagguaggggga

SEQ ID NO: 226590 - RNA, 20 nt, Artificial Sequence
  Synthetic
ggguuggucagguaggggga

SEQ ID NO: 226591 - RNA, 21 nt, Artificial Sequence
  Synthetic
uggguuggucagguaggggga

SEQ ID NO: 226592 - RNA, 22 nt, Artificial Sequence
  Synthetic
auggguuggucagguaggggga

SEQ ID NO: 226593 - RNA, 23 nt, Artificial Sequence
  Synthetic
gauggguuggucagguaggggga

SEQ ID NO: 226594 - RNA, 24 nt, Artificial Sequence
  Synthetic
agauggguuggucagguaggggga

SEQ ID NO: 226595 - RNA, 18 nt, Artificial Sequence
  Synthetic
uaaagaaggguaggggga

SEQ ID NO: 226596 - RNA, 19 nt, Artificial Sequence
  Synthetic
auaaagaaggguaggggga

SEQ ID NO: 226597 - RNA, 20 nt, Artificial Sequence
  Synthetic
aauaaagaaggguaggggga

SEQ ID NO: 226598 - RNA, 21 nt, Artificial Sequence
  Synthetic
aaauaaagaaggguaggggga

SEQ ID NO: 226599 - RNA, 22 nt, Artificial Sequence
  Synthetic
caaauaaagaaggguaggggga

SEQ ID NO: 226600 - RNA, 23 nt, Artificial Sequence
  Synthetic
acaaauaaagaaggguaggggga

SEQ ID NO: 226601 - RNA, 24 nt, Artificial Sequence
  Synthetic
cacaaauaaagaaggguaggggga

SEQ ID NO: 226602 - RNA, 18 nt, Artificial Sequence
  Synthetic
ugugguggggucggggga

SEQ ID NO: 226603 - RNA, 19 nt, Artificial Sequence
  Synthetic
cugugguggggucggggga

SEQ ID NO: 226604 - RNA, 20 nt, Artificial Sequence
  Synthetic
acugugguggggucggggga

SEQ ID NO: 226605 - RNA, 21 nt, Artificial Sequence
  Synthetic
gacugugguggggucggggga

SEQ ID NO: 226606 - RNA, 22 nt, Artificial Sequence
  Synthetic
ggacugugguggggucggggga

SEQ ID NO: 226607 - RNA, 23 nt, Artificial Sequence
  Synthetic
gggacugugguggggucggggga

SEQ ID NO: 226608 - RNA, 24 nt, Artificial Sequence
  Synthetic
ggggacugugguggggucggggga

SEQ ID NO: 226609 - RNA, 18 nt, Artificial Sequence
  Synthetic
uguuguggggucggggga

SEQ ID NO: 226610 - RNA, 19 nt, Artificial Sequence
  Synthetic
cuguuguggggucggggga

SEQ ID NO: 226611 - RNA, 20 nt, Artificial Sequence
  Synthetic
ccuguuguggggucggggga

SEQ ID NO: 226612 - RNA, 21 nt, Artificial Sequence
  Synthetic
gccuguuguggggucggggga

SEQ ID NO: 226613 - RNA, 22 nt, Artificial Sequence
  Synthetic
ggccuguuguggggucggggga

SEQ ID NO: 226614 - RNA, 23 nt, Artificial Sequence
  Synthetic
gggccuguuguggggucggggga

SEQ ID NO: 226615 - RNA, 24 nt, Artificial Sequence
  Synthetic
agggccuguuguggggucggggga

SEQ ID NO: 226616 - RNA, 18 nt, Artificial Sequence
  Synthetic
aaagugggggagggggga

SEQ ID NO: 226617 - RNA, 19 nt, Artificial Sequence
  Synthetic
gaaagugggggagggggga

SEQ ID NO: 226618 - RNA, 20 nt, Artificial Sequence
  Synthetic
agaaagugggggagggggga

SEQ ID NO: 226619 - RNA, 21 nt, Artificial Sequence
  Synthetic
gagaaagugggggagggggga

SEQ ID NO: 226620 - RNA, 22 nt, Artificial Sequence
  Synthetic
agagaaagugggggagggggga

SEQ ID NO: 226621 - RNA, 23 nt, Artificial Sequence
  Synthetic
gagagaaagugggggagggggga

SEQ ID NO: 226622 - RNA, 24 nt, Artificial Sequence
  Synthetic
ugagagaaagugggggagggggga

SEQ ID NO: 226623 - RNA, 18 nt, Artificial Sequence
  Synthetic
auuauccaguagggggga

SEQ ID NO: 226624 - RNA, 19 nt, Artificial Sequence
  Synthetic
aauuauccaguagggggga

SEQ ID NO: 226625 - RNA, 20 nt, Artificial Sequence
  Synthetic
gaauuauccaguagggggga

SEQ ID NO: 226626 - RNA, 21 nt, Artificial Sequence
  Synthetic
agaauuauccaguagggggga

SEQ ID NO: 226627 - RNA, 22 nt, Artificial Sequence
  Synthetic
gagaauuauccaguagggggga

SEQ ID NO: 226628 - RNA, 23 nt, Artificial Sequence
  Synthetic
ggagaauuauccaguagggggga

SEQ ID NO: 226629 - RNA, 24 nt, Artificial Sequence
  Synthetic
uggagaauuauccaguagggggga

SEQ ID NO: 226630 - RNA, 18 nt, Artificial Sequence
  Synthetic
acugagaguacgggggga

SEQ ID NO: 226631 - RNA, 19 nt, Artificial Sequence
  Synthetic
uacugagaguacgggggga

SEQ ID NO: 226632 - RNA, 20 nt, Artificial Sequence
  Synthetic
auacugagaguacgggggga

SEQ ID NO: 226633 - RNA, 21 nt, Artificial Sequence
  Synthetic
aauacugagaguacgggggga

SEQ ID NO: 226634 - RNA, 22 nt, Artificial Sequence
  Synthetic
aaauacugagaguacgggggga

SEQ ID NO: 226635 - RNA, 23 nt, Artificial Sequence
  Synthetic
gaaauacugagaguacgggggga

SEQ ID NO: 226636 - RNA, 24 nt, Artificial Sequence
  Synthetic
ugaaauacugagaguacgggggga

SEQ ID NO: 226637 - RNA, 18 nt, Artificial Sequence
  Synthetic
uccacagaccugggggga

SEQ ID NO: 226638 - RNA, 19 nt, Artificial Sequence
  Synthetic
uuccacagaccugggggga

SEQ ID NO: 226639 - RNA, 20 nt, Artificial Sequence
  Synthetic
auuccacagaccugggggga

SEQ ID NO: 226640 - RNA, 21 nt, Artificial Sequence
  Synthetic
uauuccacagaccugggggga

SEQ ID NO: 226641 - RNA, 22 nt, Artificial Sequence
  Synthetic
uuauuccacagaccugggggga

SEQ ID NO: 226642 - RNA, 23 nt, Artificial Sequence
  Synthetic
auuauuccacagaccugggggga

SEQ ID NO: 226643 - RNA, 24 nt, Artificial Sequence
  Synthetic
cauuauuccacagaccugggggga

SEQ ID NO: 226644 - RNA, 18 nt, Artificial Sequence
  Synthetic
uccaacuuucugggggga

SEQ ID NO: 226645 - RNA, 19 nt, Artificial Sequence
  Synthetic
cuccaacuuucugggggga

SEQ ID NO: 226646 - RNA, 20 nt, Artificial Sequence
  Synthetic
acuccaacuuucugggggga

SEQ ID NO: 226647 - RNA, 21 nt, Artificial Sequence
  Synthetic
gacuccaacuuucugggggga

SEQ ID NO: 226648 - RNA, 22 nt, Artificial Sequence
  Synthetic
ugacuccaacuuucugggggga

SEQ ID NO: 226649 - RNA, 23 nt, Artificial Sequence
  Synthetic
gugacuccaacuuucugggggga

SEQ ID NO: 226650 - RNA, 24 nt, Artificial Sequence
  Synthetic
ugugacuccaacuuucugggggga

SEQ ID NO: 226651 - RNA, 18 nt, Artificial Sequence
  Synthetic
guguucaaggugggggga

SEQ ID NO: 226652 - RNA, 19 nt, Artificial Sequence
  Synthetic
uguguucaaggugggggga

SEQ ID NO: 226653 - RNA, 20 nt, Artificial Sequence
  Synthetic
cuguguucaaggugggggga

SEQ ID NO: 226654 - RNA, 21 nt, Artificial Sequence
  Synthetic
gcuguguucaaggugggggga

SEQ ID NO: 226655 - RNA, 22 nt, Artificial Sequence
  Synthetic
ggcuguguucaaggugggggga

SEQ ID NO: 226656 - RNA, 23 nt, Artificial Sequence
  Synthetic
uggcuguguucaaggugggggga

SEQ ID NO: 226657 - RNA, 24 nt, Artificial Sequence
  Synthetic
guggcuguguucaaggugggggga

SEQ ID NO: 226658 - RNA, 18 nt, Artificial Sequence
  Synthetic
ugucguggggugggggga

SEQ ID NO: 226659 - RNA, 19 nt, Artificial Sequence
  Synthetic
cugucguggggugggggga

SEQ ID NO: 226660 - RNA, 20 nt, Artificial Sequence
  Synthetic
ccugucguggggugggggga

SEQ ID NO: 226661 - RNA, 21 nt, Artificial Sequence
  Synthetic
gccugucguggggugggggga

SEQ ID NO: 226662 - RNA, 22 nt, Artificial Sequence
  Synthetic
ggccugucguggggugggggga

SEQ ID NO: 226663 - RNA, 23 nt, Artificial Sequence
  Synthetic
gggccugucguggggugggggga

SEQ ID NO: 226664 - RNA, 24 nt, Artificial Sequence
  Synthetic
agggccugucguggggugggggga

SEQ ID NO: 226665 - RNA, 18 nt, Artificial Sequence
  Synthetic
ugugguggggugggggga

SEQ ID NO: 226666 - RNA, 19 nt, Artificial Sequence
  Synthetic
cugugguggggugggggga

SEQ ID NO: 226667 - RNA, 20 nt, Artificial Sequence
  Synthetic
acugugguggggugggggga

SEQ ID NO: 226668 - RNA, 21 nt, Artificial Sequence
  Synthetic
gacugugguggggugggggga

SEQ ID NO: 226669 - RNA, 22 nt, Artificial Sequence
  Synthetic
ggacugugguggggugggggga

SEQ ID NO: 226670 - RNA, 23 nt, Artificial Sequence
  Synthetic
gggacugugguggggugggggga

SEQ ID NO: 226671 - RNA, 24 nt, Artificial Sequence
  Synthetic
ggggacugugguggggugggggga

SEQ ID NO: 226672 - RNA, 20 nt, Artificial Sequence
  Synthetic
acuguuguggggugggggga

SEQ ID NO: 226673 - RNA, 21 nt, Artificial Sequence
  Synthetic
gacuguuguggggugggggga

SEQ ID NO: 226674 - RNA, 22 nt, Artificial Sequence
  Synthetic
ggacuguuguggggugggggga

SEQ ID NO: 226675 - RNA, 23 nt, Artificial Sequence
  Synthetic
gggacuguuguggggugggggga

SEQ ID NO: 226676 - RNA, 24 nt, Artificial Sequence
  Synthetic
ggggacuguuguggggugggggga

SEQ ID NO: 226677 - RNA, 18 nt, Artificial Sequence
  Synthetic
acacauggagauggggga

SEQ ID NO: 226678 - RNA, 19 nt, Artificial Sequence
  Synthetic
aacacauggagauggggga

SEQ ID NO: 226679 - RNA, 20 nt, Artificial Sequence
  Synthetic
gaacacauggagauggggga

SEQ ID NO: 226680 - RNA, 21 nt, Artificial Sequence
  Synthetic
agaacacauggagauggggga

SEQ ID NO: 226681 - RNA, 22 nt, Artificial Sequence
  Synthetic
gagaacacauggagauggggga

SEQ ID NO: 226682 - RNA, 23 nt, Artificial Sequence
  Synthetic
ugagaacacauggagauggggga

SEQ ID NO: 226683 - RNA, 24 nt, Artificial Sequence
  Synthetic
augagaacacauggagauggggga

SEQ ID NO: 226684 - RNA, 18 nt, Artificial Sequence
  Synthetic
gugagagaaaguggggga

SEQ ID NO: 226685 - RNA, 19 nt, Artificial Sequence
  Synthetic
agugagagaaaguggggga

SEQ ID NO: 226686 - RNA, 20 nt, Artificial Sequence
  Synthetic
cagugagagaaaguggggga

SEQ ID NO: 226687 - RNA, 21 nt, Artificial Sequence
  Synthetic
ucagugagagaaaguggggga

SEQ ID NO: 226688 - RNA, 22 nt, Artificial Sequence
  Synthetic
aucagugagagaaaguggggga

SEQ ID NO: 226689 - RNA, 23 nt, Artificial Sequence
  Synthetic
aaucagugagagaaaguggggga

SEQ ID NO: 226690 - RNA, 24 nt, Artificial Sequence
  Synthetic
aaaucagugagagaaaguggggga

SEQ ID NO: 226691 - RNA, 18 nt, Artificial Sequence
  Synthetic
auugguauaaguggggga

SEQ ID NO: 226692 - RNA, 19 nt, Artificial Sequence
  Synthetic
uauugguauaaguggggga

SEQ ID NO: 226693 - RNA, 20 nt, Artificial Sequence
  Synthetic
guauugguauaaguggggga

SEQ ID NO: 226694 - RNA, 21 nt, Artificial Sequence
  Synthetic
aguauugguauaaguggggga

SEQ ID NO: 226695 - RNA, 22 nt, Artificial Sequence
  Synthetic
gaguauugguauaaguggggga

SEQ ID NO: 226696 - RNA, 23 nt, Artificial Sequence
  Synthetic
ggaguauugguauaaguggggga

SEQ ID NO: 226697 - RNA, 24 nt, Artificial Sequence
  Synthetic
uggaguauugguauaaguggggga

SEQ ID NO: 226698 - RNA, 18 nt, Artificial Sequence
  Synthetic
cuguugugggguggggga

SEQ ID NO: 226699 - RNA, 19 nt, Artificial Sequence
  Synthetic
acuguugugggguggggga

SEQ ID NO: 226700 - RNA, 20 nt, Artificial Sequence
  Synthetic
gacuguugugggguggggga

SEQ ID NO: 226701 - RNA, 21 nt, Artificial Sequence
  Synthetic
ggacuguugugggguggggga

SEQ ID NO: 226702 - RNA, 22 nt, Artificial Sequence
  Synthetic
gggacuguugugggguggggga

SEQ ID NO: 226703 - RNA, 23 nt, Artificial Sequence
  Synthetic
ggggacuguugugggguggggga

SEQ ID NO: 226704 - RNA, 24 nt, Artificial Sequence
  Synthetic
uggggacuguugugggguggggga

SEQ ID NO: 226705 - RNA, 18 nt, Artificial Sequence
  Synthetic
augaucuguauuggggga

SEQ ID NO: 226706 - RNA, 19 nt, Artificial Sequence
  Synthetic
aaugaucuguauuggggga

SEQ ID NO: 226707 - RNA, 20 nt, Artificial Sequence
  Synthetic
aaaugaucuguauuggggga

SEQ ID NO: 226708 - RNA, 21 nt, Artificial Sequence
  Synthetic
caaaugaucuguauuggggga

SEQ ID NO: 226709 - RNA, 22 nt, Artificial Sequence
  Synthetic
acaaaugaucuguauuggggga

SEQ ID NO: 226710 - RNA, 23 nt, Artificial Sequence
  Synthetic
uacaaaugaucuguauuggggga

SEQ ID NO: 226711 - RNA, 24 nt, Artificial Sequence
  Synthetic
auacaaaugaucuguauuggggga

SEQ ID NO: 226712 - RNA, 18 nt, Artificial Sequence
  Synthetic
cacacaccaguuggggga

SEQ ID NO: 226713 - RNA, 19 nt, Artificial Sequence
  Synthetic
ucacacaccaguuggggga

SEQ ID NO: 226714 - RNA, 20 nt, Artificial Sequence
  Synthetic
aucacacaccaguuggggga

SEQ ID NO: 226715 - RNA, 21 nt, Artificial Sequence
  Synthetic
caucacacaccaguuggggga

SEQ ID NO: 226716 - RNA, 22 nt, Artificial Sequence
  Synthetic
acaucacacaccaguuggggga

SEQ ID NO: 226717 - RNA, 23 nt, Artificial Sequence
  Synthetic
aacaucacacaccaguuggggga

SEQ ID NO: 226718 - RNA, 24 nt, Artificial Sequence
  Synthetic
gaacaucacacaccaguuggggga

SEQ ID NO: 226719 - RNA, 18 nt, Artificial Sequence
  Synthetic
aagcugaggguuggggga

SEQ ID NO: 226720 - RNA, 19 nt, Artificial Sequence
  Synthetic
gaagcugaggguuggggga

SEQ ID NO: 226721 - RNA, 20 nt, Artificial Sequence
  Synthetic
ugaagcugaggguuggggga

SEQ ID NO: 226722 - RNA, 21 nt, Artificial Sequence
  Synthetic
uugaagcugaggguuggggga

SEQ ID NO: 226723 - RNA, 22 nt, Artificial Sequence
  Synthetic
uuugaagcugaggguuggggga

SEQ ID NO: 226724 - RNA, 23 nt, Artificial Sequence
  Synthetic
guuugaagcugaggguuggggga

SEQ ID NO: 226725 - RNA, 24 nt, Artificial Sequence
  Synthetic
aguuugaagcugaggguuggggga

SEQ ID NO: 226726 - RNA, 18 nt, Artificial Sequence
  Synthetic
aaaaaaaaaaaaugggga

SEQ ID NO: 226727 - RNA, 19 nt, Artificial Sequence
  Synthetic
aaaaaaaaaaaaaugggga

SEQ ID NO: 226728 - RNA, 20 nt, Artificial Sequence
  Synthetic
aaaaaaaaaaaaaaugggga

SEQ ID NO: 226729 - RNA, 21 nt, Artificial Sequence
  Synthetic
caaaaaaaaaaaaaaugggga

SEQ ID NO: 226730 - RNA, 22 nt, Artificial Sequence
  Synthetic
acaaaaaaaaaaaaaaugggga

SEQ ID NO: 226731 - RNA, 23 nt, Artificial Sequence
  Synthetic
aacaaaaaaaaaaaaaaugggga

SEQ ID NO: 226732 - RNA, 24 nt, Artificial Sequence
  Synthetic
aaacaaaaaaaaaaaaaaugggga

SEQ ID NO: 226733 - RNA, 18 nt, Artificial Sequence
  Synthetic
guuaagcagacaugggga

SEQ ID NO: 226734 - RNA, 19 nt, Artificial Sequence
  Synthetic
uguuaagcagacaugggga

SEQ ID NO: 226735 - RNA, 20 nt, Artificial Sequence
  Synthetic
auguuaagcagacaugggga

SEQ ID NO: 226736 - RNA, 21 nt, Artificial Sequence
  Synthetic
aauguuaagcagacaugggga

SEQ ID NO: 226737 - RNA, 22 nt, Artificial Sequence
  Synthetic
aaauguuaagcagacaugggga

SEQ ID NO: 226738 - RNA, 23 nt, Artificial Sequence
  Synthetic
caaauguuaagcagacaugggga

SEQ ID NO: 226739 - RNA, 24 nt, Artificial Sequence
  Synthetic
acaaauguuaagcagacaugggga

SEQ ID NO: 226740 - RNA, 18 nt, Artificial Sequence
  Synthetic
gaacaagaucccugggga

SEQ ID NO: 226741 - RNA, 19 nt, Artificial Sequence
  Synthetic
agaacaagaucccugggga

SEQ ID NO: 226742 - RNA, 20 nt, Artificial Sequence
  Synthetic
aagaacaagaucccugggga

SEQ ID NO: 226743 - RNA, 21 nt, Artificial Sequence
  Synthetic
caagaacaagaucccugggga

SEQ ID NO: 226744 - RNA, 22 nt, Artificial Sequence
  Synthetic
gcaagaacaagaucccugggga

SEQ ID NO: 226745 - RNA, 23 nt, Artificial Sequence
  Synthetic
ggcaagaacaagaucccugggga

SEQ ID NO: 226746 - RNA, 24 nt, Artificial Sequence
  Synthetic
gggcaagaacaagaucccugggga

SEQ ID NO: 226747 - RNA, 18 nt, Artificial Sequence
  Synthetic
uguguauuggccugggga

SEQ ID NO: 226748 - RNA, 19 nt, Artificial Sequence
  Synthetic
auguguauuggccugggga

SEQ ID NO: 226749 - RNA, 20 nt, Artificial Sequence
  Synthetic
gauguguauuggccugggga

SEQ ID NO: 226750 - RNA, 21 nt, Artificial Sequence
  Synthetic
ugauguguauuggccugggga

SEQ ID NO: 226751 - RNA, 22 nt, Artificial Sequence
  Synthetic
augauguguauuggccugggga

SEQ ID NO: 226752 - RNA, 23 nt, Artificial Sequence
  Synthetic
uaugauguguauuggccugggga

SEQ ID NO: 226753 - RNA, 24 nt, Artificial Sequence
  Synthetic
auaugauguguauuggccugggga

SEQ ID NO: 226754 - RNA, 18 nt, Artificial Sequence
  Synthetic
aaucagaaucucugggga

SEQ ID NO: 226755 - RNA, 19 nt, Artificial Sequence
  Synthetic
aaaucagaaucucugggga

SEQ ID NO: 226756 - RNA, 20 nt, Artificial Sequence
  Synthetic
uaaaucagaaucucugggga

SEQ ID NO: 226757 - RNA, 21 nt, Artificial Sequence
  Synthetic
cuaaaucagaaucucugggga

SEQ ID NO: 226758 - RNA, 22 nt, Artificial Sequence
  Synthetic
acuaaaucagaaucucugggga

SEQ ID NO: 226759 - RNA, 23 nt, Artificial Sequence
  Synthetic
aacuaaaucagaaucucugggga

SEQ ID NO: 226760 - RNA, 24 nt, Artificial Sequence
  Synthetic
caacuaaaucagaaucucugggga

SEQ ID NO: 226761 - RNA, 18 nt, Artificial Sequence
  Synthetic
uaaaagcauccgugggga

SEQ ID NO: 226762 - RNA, 19 nt, Artificial Sequence
  Synthetic
cuaaaagcauccgugggga

SEQ ID NO: 226763 - RNA, 20 nt, Artificial Sequence
  Synthetic
acuaaaagcauccgugggga

SEQ ID NO: 226764 - RNA, 21 nt, Artificial Sequence
  Synthetic
aacuaaaagcauccgugggga

SEQ ID NO: 226765 - RNA, 22 nt, Artificial Sequence
  Synthetic
gaacuaaaagcauccgugggga

SEQ ID NO: 226766 - RNA, 23 nt, Artificial Sequence
  Synthetic
ugaacuaaaagcauccgugggga

SEQ ID NO: 226767 - RNA, 24 nt, Artificial Sequence
  Synthetic
cugaacuaaaagcauccgugggga

SEQ ID NO: 226768 - RNA, 18 nt, Artificial Sequence
  Synthetic
uguaagagaaggugggga

SEQ ID NO: 226769 - RNA, 19 nt, Artificial Sequence
  Synthetic
guguaagagaaggugggga

SEQ ID NO: 226770 - RNA, 20 nt, Artificial Sequence
  Synthetic
aguguaagagaaggugggga

SEQ ID NO: 226771 - RNA, 21 nt, Artificial Sequence
  Synthetic
caguguaagagaaggugggga

SEQ ID NO: 226772 - RNA, 22 nt, Artificial Sequence
  Synthetic
ccaguguaagagaaggugggga

SEQ ID NO: 226773 - RNA, 23 nt, Artificial Sequence
  Synthetic
uccaguguaagagaaggugggga

SEQ ID NO: 226774 - RNA, 24 nt, Artificial Sequence
  Synthetic
uuccaguguaagagaaggugggga

SEQ ID NO: 226775 - RNA, 18 nt, Artificial Sequence
  Synthetic
uaugaccuugugugggga

SEQ ID NO: 226776 - RNA, 19 nt, Artificial Sequence
  Synthetic
guaugaccuugugugggga

SEQ ID NO: 226777 - RNA, 20 nt, Artificial Sequence
  Synthetic
uguaugaccuugugugggga

SEQ ID NO: 226778 - RNA, 21 nt, Artificial Sequence
  Synthetic
auguaugaccuugugugggga

SEQ ID NO: 226779 - RNA, 22 nt, Artificial Sequence
  Synthetic
uauguaugaccuugugugggga

SEQ ID NO: 226780 - RNA, 23 nt, Artificial Sequence
  Synthetic
uuauguaugaccuugugugggga

SEQ ID NO: 226781 - RNA, 24 nt, Artificial Sequence
  Synthetic
uuuauguaugaccuugugugggga

SEQ ID NO: 226782 - RNA, 18 nt, Artificial Sequence
  Synthetic
uugcacacauugugggga

SEQ ID NO: 226783 - RNA, 19 nt, Artificial Sequence
  Synthetic
auugcacacauugugggga

SEQ ID NO: 226784 - RNA, 20 nt, Artificial Sequence
  Synthetic
uauugcacacauugugggga

SEQ ID NO: 226785 - RNA, 21 nt, Artificial Sequence
  Synthetic
auauugcacacauugugggga

SEQ ID NO: 226786 - RNA, 22 nt, Artificial Sequence
  Synthetic
aauauugcacacauugugggga

SEQ ID NO: 226787 - RNA, 23 nt, Artificial Sequence
  Synthetic
aaauauugcacacauugugggga

SEQ ID NO: 226788 - RNA, 24 nt, Artificial Sequence
  Synthetic
aaaauauugcacacauugugggga

SEQ ID NO: 226789 - RNA, 18 nt, Artificial Sequence
  Synthetic
ggguaugcauauugggga

SEQ ID NO: 226790 - RNA, 19 nt, Artificial Sequence
  Synthetic
gggguaugcauauugggga

SEQ ID NO: 226791 - RNA, 20 nt, Artificial Sequence
  Synthetic
agggguaugcauauugggga

SEQ ID NO: 226792 - RNA, 21 nt, Artificial Sequence
  Synthetic
aagggguaugcauauugggga

SEQ ID NO: 226793 - RNA, 22 nt, Artificial Sequence
  Synthetic
aaagggguaugcauauugggga

SEQ ID NO: 226794 - RNA, 23 nt, Artificial Sequence
  Synthetic
caaagggguaugcauauugggga

SEQ ID NO: 226795 - RNA, 24 nt, Artificial Sequence
  Synthetic
ucaaagggguaugcauauugggga

SEQ ID NO: 226796 - RNA, 18 nt, Artificial Sequence
  Synthetic
auccucguauguugggga

SEQ ID NO: 226797 - RNA, 19 nt, Artificial Sequence
  Synthetic
uauccucguauguugggga

SEQ ID NO: 226798 - RNA, 20 nt, Artificial Sequence
  Synthetic
guauccucguauguugggga

SEQ ID NO: 226799 - RNA, 21 nt, Artificial Sequence
  Synthetic
uguauccucguauguugggga

SEQ ID NO: 226800 - RNA, 22 nt, Artificial Sequence
  Synthetic
cuguauccucguauguugggga

SEQ ID NO: 226801 - RNA, 23 nt, Artificial Sequence
  Synthetic
gcuguauccucguauguugggga

SEQ ID NO: 226802 - RNA, 24 nt, Artificial Sequence
  Synthetic
ugcuguauccucguauguugggga

SEQ ID NO: 226803 - RNA, 18 nt, Artificial Sequence
  Synthetic
ugaagccguuguugggga

SEQ ID NO: 226804 - RNA, 19 nt, Artificial Sequence
  Synthetic
cugaagccguuguugggga

SEQ ID NO: 226805 - RNA, 20 nt, Artificial Sequence
  Synthetic
ccugaagccguuguugggga

SEQ ID NO: 226806 - RNA, 21 nt, Artificial Sequence
  Synthetic
accugaagccguuguugggga

SEQ ID NO: 226807 - RNA, 22 nt, Artificial Sequence
  Synthetic
gaccugaagccguuguugggga

SEQ ID NO: 226808 - RNA, 23 nt, Artificial Sequence
  Synthetic
agaccugaagccguuguugggga

SEQ ID NO: 226809 - RNA, 24 nt, Artificial Sequence
  Synthetic
uagaccugaagccguuguugggga

SEQ ID NO: 226810 - RNA, 18 nt, Artificial Sequence
  Synthetic
aucugaagcauuugggga

SEQ ID NO: 226811 - RNA, 19 nt, Artificial Sequence
  Synthetic
caucugaagcauuugggga

SEQ ID NO: 226812 - RNA, 20 nt, Artificial Sequence
  Synthetic
ccaucugaagcauuugggga

SEQ ID NO: 226813 - RNA, 21 nt, Artificial Sequence
  Synthetic
uccaucugaagcauuugggga

SEQ ID NO: 226814 - RNA, 22 nt, Artificial Sequence
  Synthetic
auccaucugaagcauuugggga

SEQ ID NO: 226815 - RNA, 23 nt, Artificial Sequence
  Synthetic
aauccaucugaagcauuugggga

SEQ ID NO: 226816 - RNA, 24 nt, Artificial Sequence
  Synthetic
uaauccaucugaagcauuugggga

SEQ ID NO: 226817 - RNA, 18 nt, Artificial Sequence
  Synthetic
aguaaacucauuugggga

SEQ ID NO: 226818 - RNA, 19 nt, Artificial Sequence
  Synthetic
aaguaaacucauuugggga

SEQ ID NO: 226819 - RNA, 20 nt, Artificial Sequence
  Synthetic
uaaguaaacucauuugggga

SEQ ID NO: 226820 - RNA, 21 nt, Artificial Sequence
  Synthetic
cuaaguaaacucauuugggga

SEQ ID NO: 226821 - RNA, 22 nt, Artificial Sequence
  Synthetic
ucuaaguaaacucauuugggga

SEQ ID NO: 226822 - RNA, 23 nt, Artificial Sequence
  Synthetic
uucuaaguaaacucauuugggga

SEQ ID NO: 226823 - RNA, 24 nt, Artificial Sequence
  Synthetic
uuucuaaguaaacucauuugggga

SEQ ID NO: 226824 - RNA, 18 nt, Artificial Sequence
  Synthetic
cauuuacauauuugggga

SEQ ID NO: 226825 - RNA, 19 nt, Artificial Sequence
  Synthetic
ccauuuacauauuugggga

SEQ ID NO: 226826 - RNA, 20 nt, Artificial Sequence
  Synthetic
uccauuuacauauuugggga

SEQ ID NO: 226827 - RNA, 21 nt, Artificial Sequence
  Synthetic
auccauuuacauauuugggga

SEQ ID NO: 226828 - RNA, 22 nt, Artificial Sequence
  Synthetic
uauccauuuacauauuugggga

SEQ ID NO: 226829 - RNA, 23 nt, Artificial Sequence
  Synthetic
uuauccauuuacauauuugggga

SEQ ID NO: 226830 - RNA, 24 nt, Artificial Sequence
  Synthetic
auuauccauuuacauauuugggga

SEQ ID NO: 226831 - RNA, 18 nt, Artificial Sequence
  Synthetic
uaagauuuucuuugggga

SEQ ID NO: 226832 - RNA, 19 nt, Artificial Sequence
  Synthetic
uuaagauuuucuuugggga

SEQ ID NO: 226833 - RNA, 20 nt, Artificial Sequence
  Synthetic
uuuaagauuuucuuugggga

SEQ ID NO: 226834 - RNA, 21 nt, Artificial Sequence
  Synthetic
auuuaagauuuucuuugggga

SEQ ID NO: 226835 - RNA, 22 nt, Artificial Sequence
  Synthetic
aauuuaagauuuucuuugggga

SEQ ID NO: 226836 - RNA, 23 nt, Artificial Sequence
  Synthetic
gaauuuaagauuuucuuugggga

SEQ ID NO: 226837 - RNA, 24 nt, Artificial Sequence
  Synthetic
ggaauuuaagauuuucuuugggga

SEQ ID NO: 226838 - RNA, 18 nt, Artificial Sequence
  Synthetic
acuuaagacaaaauggga

SEQ ID NO: 226839 - RNA, 19 nt, Artificial Sequence
  Synthetic
aacuuaagacaaaauggga

SEQ ID NO: 226840 - RNA, 20 nt, Artificial Sequence
  Synthetic
uaacuuaagacaaaauggga

SEQ ID NO: 226841 - RNA, 21 nt, Artificial Sequence
  Synthetic
auaacuuaagacaaaauggga

SEQ ID NO: 226842 - RNA, 22 nt, Artificial Sequence
  Synthetic
uauaacuuaagacaaaauggga

SEQ ID NO: 226843 - RNA, 23 nt, Artificial Sequence
  Synthetic
uuauaacuuaagacaaaauggga

SEQ ID NO: 226844 - RNA, 24 nt, Artificial Sequence
  Synthetic
guuauaacuuaagacaaaauggga

SEQ ID NO: 226845 - RNA, 18 nt, Artificial Sequence
  Synthetic
uuugaagucaaaauggga

SEQ ID NO: 226846 - RNA, 19 nt, Artificial Sequence
  Synthetic
cuuugaagucaaaauggga

SEQ ID NO: 226847 - RNA, 20 nt, Artificial Sequence
  Synthetic
gcuuugaagucaaaauggga

SEQ ID NO: 226848 - RNA, 21 nt, Artificial Sequence
  Synthetic
agcuuugaagucaaaauggga

SEQ ID NO: 226849 - RNA, 22 nt, Artificial Sequence
  Synthetic
uagcuuugaagucaaaauggga

SEQ ID NO: 226850 - RNA, 23 nt, Artificial Sequence
  Synthetic
guagcuuugaagucaaaauggga

SEQ ID NO: 226851 - RNA, 24 nt, Artificial Sequence
  Synthetic
aguagcuuugaagucaaaauggga

SEQ ID NO: 226852 - RNA, 18 nt, Artificial Sequence
  Synthetic
gaaaucuauaaaauggga

SEQ ID NO: 226853 - RNA, 19 nt, Artificial Sequence
  Synthetic
ugaaaucuauaaaauggga

SEQ ID NO: 226854 - RNA, 20 nt, Artificial Sequence
  Synthetic
uugaaaucuauaaaauggga

SEQ ID NO: 226855 - RNA, 21 nt, Artificial Sequence
  Synthetic
uuugaaaucuauaaaauggga

SEQ ID NO: 226856 - RNA, 22 nt, Artificial Sequence
  Synthetic
cuuugaaaucuauaaaauggga

SEQ ID NO: 226857 - RNA, 23 nt, Artificial Sequence
  Synthetic
ccuuugaaaucuauaaaauggga

SEQ ID NO: 226858 - RNA, 24 nt, Artificial Sequence
  Synthetic
cccuuugaaaucuauaaaauggga

SEQ ID NO: 226859 - RNA, 18 nt, Artificial Sequence
  Synthetic
uaguuauaguaaauggga

SEQ ID NO: 226860 - RNA, 19 nt, Artificial Sequence
  Synthetic
auaguuauaguaaauggga

SEQ ID NO: 226861 - RNA, 20 nt, Artificial Sequence
  Synthetic
aauaguuauaguaaauggga

SEQ ID NO: 226862 - RNA, 21 nt, Artificial Sequence
  Synthetic
caauaguuauaguaaauggga

SEQ ID NO: 226863 - RNA, 22 nt, Artificial Sequence
  Synthetic
ucaauaguuauaguaaauggga

SEQ ID NO: 226864 - RNA, 23 nt, Artificial Sequence
  Synthetic
aucaauaguuauaguaaauggga

SEQ ID NO: 226865 - RNA, 24 nt, Artificial Sequence
  Synthetic
uaucaauaguuauaguaaauggga

SEQ ID NO: 226866 - RNA, 18 nt, Artificial Sequence
  Synthetic
agcccaaagucaauggga

SEQ ID NO: 226867 - RNA, 19 nt, Artificial Sequence
  Synthetic
aagcccaaagucaauggga

SEQ ID NO: 226868 - RNA, 20 nt, Artificial Sequence
  Synthetic
caagcccaaagucaauggga

SEQ ID NO: 226869 - RNA, 21 nt, Artificial Sequence
  Synthetic
ucaagcccaaagucaauggga

SEQ ID NO: 226870 - RNA, 22 nt, Artificial Sequence
  Synthetic
gucaagcccaaagucaauggga

SEQ ID NO: 226871 - RNA, 23 nt, Artificial Sequence
  Synthetic
agucaagcccaaagucaauggga

SEQ ID NO: 226872 - RNA, 24 nt, Artificial Sequence
  Synthetic
cagucaagcccaaagucaauggga

SEQ ID NO: 226873 - RNA, 18 nt, Artificial Sequence
  Synthetic
gacagagggagaauggga

SEQ ID NO: 226874 - RNA, 19 nt, Artificial Sequence
  Synthetic
ggacagagggagaauggga

SEQ ID NO: 226875 - RNA, 20 nt, Artificial Sequence
  Synthetic
aggacagagggagaauggga

SEQ ID NO: 226876 - RNA, 21 nt, Artificial Sequence
  Synthetic
aaggacagagggagaauggga

SEQ ID NO: 226877 - RNA, 22 nt, Artificial Sequence
  Synthetic
gaaggacagagggagaauggga

SEQ ID NO: 226878 - RNA, 23 nt, Artificial Sequence
  Synthetic
ggaaggacagagggagaauggga

SEQ ID NO: 226879 - RNA, 24 nt, Artificial Sequence
  Synthetic
aggaaggacagagggagaauggga

SEQ ID NO: 226880 - RNA, 18 nt, Artificial Sequence
  Synthetic
gaguccccuauaauggga

SEQ ID NO: 226881 - RNA, 19 nt, Artificial Sequence
  Synthetic
agaguccccuauaauggga

SEQ ID NO: 226882 - RNA, 20 nt, Artificial Sequence
  Synthetic
aagaguccccuauaauggga

SEQ ID NO: 226883 - RNA, 21 nt, Artificial Sequence
  Synthetic
gaagaguccccuauaauggga

SEQ ID NO: 226884 - RNA, 22 nt, Artificial Sequence
  Synthetic
agaagaguccccuauaauggga

SEQ ID NO: 226885 - RNA, 23 nt, Artificial Sequence
  Synthetic
uagaagaguccccuauaauggga

SEQ ID NO: 226886 - RNA, 24 nt, Artificial Sequence
  Synthetic
guagaagaguccccuauaauggga

SEQ ID NO: 226887 - RNA, 18 nt, Artificial Sequence
  Synthetic
auuucugugguaauggga

SEQ ID NO: 226888 - RNA, 19 nt, Artificial Sequence
  Synthetic
aauuucugugguaauggga

SEQ ID NO: 226889 - RNA, 20 nt, Artificial Sequence
  Synthetic
uaauuucugugguaauggga

SEQ ID NO: 226890 - RNA, 21 nt, Artificial Sequence
  Synthetic
uuaauuucugugguaauggga

SEQ ID NO: 226891 - RNA, 22 nt, Artificial Sequence
  Synthetic
uuuaauuucugugguaauggga

SEQ ID NO: 226892 - RNA, 23 nt, Artificial Sequence
  Synthetic
uuuuaauuucugugguaauggga

SEQ ID NO: 226893 - RNA, 24 nt, Artificial Sequence
  Synthetic
cuuuuaauuucugugguaauggga

SEQ ID NO: 226894 - RNA, 18 nt, Artificial Sequence
  Synthetic
ggauauaguuacauggga

SEQ ID NO: 226895 - RNA, 19 nt, Artificial Sequence
  Synthetic
uggauauaguuacauggga

SEQ ID NO: 226896 - RNA, 20 nt, Artificial Sequence
  Synthetic
guggauauaguuacauggga

SEQ ID NO: 226897 - RNA, 21 nt, Artificial Sequence
  Synthetic
aguggauauaguuacauggga

SEQ ID NO: 226898 - RNA, 22 nt, Artificial Sequence
  Synthetic
uaguggauauaguuacauggga

SEQ ID NO: 226899 - RNA, 23 nt, Artificial Sequence
  Synthetic
uuaguggauauaguuacauggga

SEQ ID NO: 226900 - RNA, 24 nt, Artificial Sequence
  Synthetic
uuuaguggauauaguuacauggga

SEQ ID NO: 226901 - RNA, 18 nt, Artificial Sequence
  Synthetic
cugggucaccccauggga

SEQ ID NO: 226902 - RNA, 19 nt, Artificial Sequence
  Synthetic
ccugggucaccccauggga

SEQ ID NO: 226903 - RNA, 20 nt, Artificial Sequence
  Synthetic
uccugggucaccccauggga

SEQ ID NO: 226904 - RNA, 21 nt, Artificial Sequence
  Synthetic
guccugggucaccccauggga

SEQ ID NO: 226905 - RNA, 22 nt, Artificial Sequence
  Synthetic
gguccugggucaccccauggga

SEQ ID NO: 226906 - RNA, 23 nt, Artificial Sequence
  Synthetic
ugguccugggucaccccauggga

SEQ ID NO: 226907 - RNA, 24 nt, Artificial Sequence
  Synthetic
augguccugggucaccccauggga

SEQ ID NO: 226908 - RNA, 18 nt, Artificial Sequence
  Synthetic
gaaugccagaucauggga

SEQ ID NO: 226909 - RNA, 19 nt, Artificial Sequence
  Synthetic
ugaaugccagaucauggga

SEQ ID NO: 226910 - RNA, 20 nt, Artificial Sequence
  Synthetic
cugaaugccagaucauggga

SEQ ID NO: 226911 - RNA, 21 nt, Artificial Sequence
  Synthetic
ucugaaugccagaucauggga

SEQ ID NO: 226912 - RNA, 22 nt, Artificial Sequence
  Synthetic
uucugaaugccagaucauggga

SEQ ID NO: 226913 - RNA, 23 nt, Artificial Sequence
  Synthetic
auucugaaugccagaucauggga

SEQ ID NO: 226914 - RNA, 24 nt, Artificial Sequence
  Synthetic
gauucugaaugccagaucauggga

SEQ ID NO: 226915 - RNA, 18 nt, Artificial Sequence
  Synthetic
acagagcagaagauggga

SEQ ID NO: 226916 - RNA, 19 nt, Artificial Sequence
  Synthetic
uacagagcagaagauggga

SEQ ID NO: 226917 - RNA, 20 nt, Artificial Sequence
  Synthetic
guacagagcagaagauggga

SEQ ID NO: 226918 - RNA, 21 nt, Artificial Sequence
  Synthetic
gguacagagcagaagauggga

SEQ ID NO: 226919 - RNA, 22 nt, Artificial Sequence
  Synthetic
agguacagagcagaagauggga

SEQ ID NO: 226920 - RNA, 23 nt, Artificial Sequence
  Synthetic
gagguacagagcagaagauggga

SEQ ID NO: 226921 - RNA, 24 nt, Artificial Sequence
  Synthetic
agagguacagagcagaagauggga

SEQ ID NO: 226922 - RNA, 18 nt, Artificial Sequence
  Synthetic
ggaaugguggugauggga

SEQ ID NO: 226923 - RNA, 19 nt, Artificial Sequence
  Synthetic
aggaaugguggugauggga

SEQ ID NO: 226924 - RNA, 20 nt, Artificial Sequence
  Synthetic
gaggaaugguggugauggga

SEQ ID NO: 226925 - RNA, 21 nt, Artificial Sequence
  Synthetic
ggaggaaugguggugauggga

SEQ ID NO: 226926 - RNA, 22 nt, Artificial Sequence
  Synthetic
aggaggaaugguggugauggga

SEQ ID NO: 226927 - RNA, 23 nt, Artificial Sequence
  Synthetic
aaggaggaaugguggugauggga

SEQ ID NO: 226928 - RNA, 24 nt, Artificial Sequence
  Synthetic
gaaggaggaaugguggugauggga

SEQ ID NO: 226929 - RNA, 18 nt, Artificial Sequence
  Synthetic
cuacuugccauuauggga

SEQ ID NO: 226930 - RNA, 19 nt, Artificial Sequence
  Synthetic
ucuacuugccauuauggga

SEQ ID NO: 226931 - RNA, 20 nt, Artificial Sequence
  Synthetic
aucuacuugccauuauggga

SEQ ID NO: 226932 - RNA, 21 nt, Artificial Sequence
  Synthetic
uaucuacuugccauuauggga

SEQ ID NO: 226933 - RNA, 22 nt, Artificial Sequence
  Synthetic
auaucuacuugccauuauggga

SEQ ID NO: 226934 - RNA, 23 nt, Artificial Sequence
  Synthetic
gauaucuacuugccauuauggga

SEQ ID NO: 226935 - RNA, 24 nt, Artificial Sequence
  Synthetic
agauaucuacuugccauuauggga

SEQ ID NO: 226936 - RNA, 18 nt, Artificial Sequence
  Synthetic
uuggauauacaccuggga

SEQ ID NO: 226937 - RNA, 19 nt, Artificial Sequence
  Synthetic
guuggauauacaccuggga

SEQ ID NO: 226938 - RNA, 20 nt, Artificial Sequence
  Synthetic
uguuggauauacaccuggga

SEQ ID NO: 226939 - RNA, 21 nt, Artificial Sequence
  Synthetic
cuguuggauauacaccuggga

SEQ ID NO: 226940 - RNA, 22 nt, Artificial Sequence
  Synthetic
ucuguuggauauacaccuggga

SEQ ID NO: 226941 - RNA, 23 nt, Artificial Sequence
  Synthetic
uucuguuggauauacaccuggga

SEQ ID NO: 226942 - RNA, 24 nt, Artificial Sequence
  Synthetic
uuucuguuggauauacaccuggga

SEQ ID NO: 226943 - RNA, 18 nt, Artificial Sequence
  Synthetic
aauuucauaucccuggga

SEQ ID NO: 226944 - RNA, 19 nt, Artificial Sequence
  Synthetic
aaauuucauaucccuggga

SEQ ID NO: 226945 - RNA, 20 nt, Artificial Sequence
  Synthetic
uaaauuucauaucccuggga

SEQ ID NO: 226946 - RNA, 21 nt, Artificial Sequence
  Synthetic
cuaaauuucauaucccuggga

SEQ ID NO: 226947 - RNA, 22 nt, Artificial Sequence
  Synthetic
ucuaaauuucauaucccuggga

SEQ ID NO: 226948 - RNA, 23 nt, Artificial Sequence
  Synthetic
aucuaaauuucauaucccuggga

SEQ ID NO: 226949 - RNA, 24 nt, Artificial Sequence
  Synthetic
aaucuaaauuucauaucccuggga

SEQ ID NO: 226950 - RNA, 18 nt, Artificial Sequence
  Synthetic
acucccaucucccuggga

SEQ ID NO: 226951 - RNA, 19 nt, Artificial Sequence
  Synthetic
aacucccaucucccuggga

SEQ ID NO: 226952 - RNA, 20 nt, Artificial Sequence
  Synthetic
aaacucccaucucccuggga

SEQ ID NO: 226953 - RNA, 21 nt, Artificial Sequence
  Synthetic
aaaacucccaucucccuggga

SEQ ID NO: 226954 - RNA, 22 nt, Artificial Sequence
  Synthetic
uaaaacucccaucucccuggga

SEQ ID NO: 226955 - RNA, 23 nt, Artificial Sequence
  Synthetic
auaaaacucccaucucccuggga

SEQ ID NO: 226956 - RNA, 24 nt, Artificial Sequence
  Synthetic
gauaaaacucccaucucccuggga

SEQ ID NO: 226957 - RNA, 18 nt, Artificial Sequence
  Synthetic
ccaugauagcagcuggga

SEQ ID NO: 226958 - RNA, 19 nt, Artificial Sequence
  Synthetic
gccaugauagcagcuggga

SEQ ID NO: 226959 - RNA, 20 nt, Artificial Sequence
  Synthetic
agccaugauagcagcuggga

SEQ ID NO: 226960 - RNA, 21 nt, Artificial Sequence
  Synthetic
uagccaugauagcagcuggga

SEQ ID NO: 226961 - RNA, 22 nt, Artificial Sequence
  Synthetic
cuagccaugauagcagcuggga

SEQ ID NO: 226962 - RNA, 23 nt, Artificial Sequence
  Synthetic
gcuagccaugauagcagcuggga

SEQ ID NO: 226963 - RNA, 24 nt, Artificial Sequence
  Synthetic
ugcuagccaugauagcagcuggga

SEQ ID NO: 226964 - RNA, 18 nt, Artificial Sequence
  Synthetic
uuuagaguacggcuggga

SEQ ID NO: 226965 - RNA, 19 nt, Artificial Sequence
  Synthetic
guuuagaguacggcuggga

SEQ ID NO: 226966 - RNA, 20 nt, Artificial Sequence
  Synthetic
uguuuagaguacggcuggga

SEQ ID NO: 226967 - RNA, 21 nt, Artificial Sequence
  Synthetic
uuguuuagaguacggcuggga

SEQ ID NO: 226968 - RNA, 22 nt, Artificial Sequence
  Synthetic
uuuguuuagaguacggcuggga

SEQ ID NO: 226969 - RNA, 23 nt, Artificial Sequence
  Synthetic
cuuuguuuagaguacggcuggga

SEQ ID NO: 226970 - RNA, 24 nt, Artificial Sequence
  Synthetic
ccuuuguuuagaguacggcuggga

SEQ ID NO: 226971 - RNA, 18 nt, Artificial Sequence
  Synthetic
uuauccuagaaucuggga

SEQ ID NO: 226972 - RNA, 19 nt, Artificial Sequence
  Synthetic
cuuauccuagaaucuggga

SEQ ID NO: 226973 - RNA, 20 nt, Artificial Sequence
  Synthetic
ccuuauccuagaaucuggga

SEQ ID NO: 226974 - RNA, 21 nt, Artificial Sequence
  Synthetic
cccuuauccuagaaucuggga

SEQ ID NO: 226975 - RNA, 22 nt, Artificial Sequence
  Synthetic
ucccuuauccuagaaucuggga

SEQ ID NO: 226976 - RNA, 23 nt, Artificial Sequence
  Synthetic
uucccuuauccuagaaucuggga

SEQ ID NO: 226977 - RNA, 24 nt, Artificial Sequence
  Synthetic
uuucccuuauccuagaaucuggga

SEQ ID NO: 226978 - RNA, 18 nt, Artificial Sequence
  Synthetic
gauucaguagaucuggga

SEQ ID NO: 226979 - RNA, 19 nt, Artificial Sequence
  Synthetic
ugauucaguagaucuggga

SEQ ID NO: 226980 - RNA, 20 nt, Artificial Sequence
  Synthetic
cugauucaguagaucuggga

SEQ ID NO: 226981 - RNA, 21 nt, Artificial Sequence
  Synthetic
ucugauucaguagaucuggga

SEQ ID NO: 226982 - RNA, 22 nt, Artificial Sequence
  Synthetic
uucugauucaguagaucuggga

SEQ ID NO: 226983 - RNA, 23 nt, Artificial Sequence
  Synthetic
cuucugauucaguagaucuggga

SEQ ID NO: 226984 - RNA, 24 nt, Artificial Sequence
  Synthetic
gcuucugauucaguagaucuggga

SEQ ID NO: 226985 - RNA, 18 nt, Artificial Sequence
  Synthetic
uauugauacgcucuggga

SEQ ID NO: 226986 - RNA, 19 nt, Artificial Sequence
  Synthetic
uuauugauacgcucuggga

SEQ ID NO: 226987 - RNA, 20 nt, Artificial Sequence
  Synthetic
cuuauugauacgcucuggga

SEQ ID NO: 226988 - RNA, 21 nt, Artificial Sequence
  Synthetic
gcuuauugauacgcucuggga

SEQ ID NO: 226989 - RNA, 22 nt, Artificial Sequence
  Synthetic
ugcuuauugauacgcucuggga

SEQ ID NO: 226990 - RNA, 23 nt, Artificial Sequence
  Synthetic
augcuuauugauacgcucuggga

SEQ ID NO: 226991 - RNA, 24 nt, Artificial Sequence
  Synthetic
caugcuuauugauacgcucuggga

SEQ ID NO: 226992 - RNA, 18 nt, Artificial Sequence
  Synthetic
gugucaguuggucuggga

SEQ ID NO: 226993 - RNA, 19 nt, Artificial Sequence
  Synthetic
ugugucaguuggucuggga

SEQ ID NO: 226994 - RNA, 20 nt, Artificial Sequence
  Synthetic
cugugucaguuggucuggga

SEQ ID NO: 226995 - RNA, 21 nt, Artificial Sequence
  Synthetic
ucugugucaguuggucuggga

SEQ ID NO: 226996 - RNA, 22 nt, Artificial Sequence
  Synthetic
uucugugucaguuggucuggga

SEQ ID NO: 226997 - RNA, 23 nt, Artificial Sequence
  Synthetic
uuucugugucaguuggucuggga

SEQ ID NO: 226998 - RNA, 24 nt, Artificial Sequence
  Synthetic
guuucugugucaguuggucuggga

SEQ ID NO: 226999 - RNA, 18 nt, Artificial Sequence
  Synthetic
ugugauagaacaguggga

SEQ ID NO: 227000 - RNA, 19 nt, Artificial Sequence
  Synthetic
augugauagaacaguggga

SEQ ID NO: 227001 - RNA, 20 nt, Artificial Sequence
  Synthetic
aaugugauagaacaguggga

SEQ ID NO: 227002 - RNA, 21 nt, Artificial Sequence
  Synthetic
caaugugauagaacaguggga

SEQ ID NO: 227003 - RNA, 22 nt, Artificial Sequence
  Synthetic
acaaugugauagaacaguggga

SEQ ID NO: 227004 - RNA, 23 nt, Artificial Sequence
  Synthetic
cacaaugugauagaacaguggga

SEQ ID NO: 227005 - RNA, 24 nt, Artificial Sequence
  Synthetic
acacaaugugauagaacaguggga

SEQ ID NO: 227006 - RNA, 18 nt, Artificial Sequence
  Synthetic
ugauuuuuaacaguggga

SEQ ID NO: 227007 - RNA, 19 nt, Artificial Sequence
  Synthetic
uugauuuuuaacaguggga

SEQ ID NO: 227008 - RNA, 20 nt, Artificial Sequence
  Synthetic
uuugauuuuuaacaguggga

SEQ ID NO: 227009 - RNA, 21 nt, Artificial Sequence
  Synthetic
cuuugauuuuuaacaguggga

SEQ ID NO: 227010 - RNA, 22 nt, Artificial Sequence
  Synthetic
gcuuugauuuuuaacaguggga

SEQ ID NO: 227011 - RNA, 23 nt, Artificial Sequence
  Synthetic
cgcuuugauuuuuaacaguggga

SEQ ID NO: 227012 - RNA, 24 nt, Artificial Sequence
  Synthetic
ucgcuuugauuuuuaacaguggga

SEQ ID NO: 227013 - RNA, 18 nt, Artificial Sequence
  Synthetic
gaaaugugcuuaguggga

SEQ ID NO: 227014 - RNA, 19 nt, Artificial Sequence
  Synthetic
ugaaaugugcuuaguggga

SEQ ID NO: 227015 - RNA, 20 nt, Artificial Sequence
  Synthetic
uugaaaugugcuuaguggga

SEQ ID NO: 227016 - RNA, 21 nt, Artificial Sequence
  Synthetic
cuugaaaugugcuuaguggga

SEQ ID NO: 227017 - RNA, 22 nt, Artificial Sequence
  Synthetic
acuugaaaugugcuuaguggga

SEQ ID NO: 227018 - RNA, 23 nt, Artificial Sequence
  Synthetic
aacuugaaaugugcuuaguggga

SEQ ID NO: 227019 - RNA, 24 nt, Artificial Sequence
  Synthetic
gaacuugaaaugugcuuaguggga

SEQ ID NO: 227020 - RNA, 18 nt, Artificial Sequence
  Synthetic
cuuuugaaaaagguggga

SEQ ID NO: 227021 - RNA, 19 nt, Artificial Sequence
  Synthetic
acuuuugaaaaagguggga

SEQ ID NO: 227022 - RNA, 20 nt, Artificial Sequence
  Synthetic
uacuuuugaaaaagguggga

SEQ ID NO: 227023 - RNA, 21 nt, Artificial Sequence
  Synthetic
auacuuuugaaaaagguggga

SEQ ID NO: 227024 - RNA, 22 nt, Artificial Sequence
  Synthetic
aauacuuuugaaaaagguggga

SEQ ID NO: 227025 - RNA, 23 nt, Artificial Sequence
  Synthetic
aaauacuuuugaaaaagguggga

SEQ ID NO: 227026 - RNA, 24 nt, Artificial Sequence
  Synthetic
uaaauacuuuugaaaaagguggga

SEQ ID NO: 227027 - RNA, 18 nt, Artificial Sequence
  Synthetic
ggacgcacuuagguggga

SEQ ID NO: 227028 - RNA, 19 nt, Artificial Sequence
  Synthetic
aggacgcacuuagguggga

SEQ ID NO: 227029 - RNA, 20 nt, Artificial Sequence
  Synthetic
caggacgcacuuagguggga

SEQ ID NO: 227030 - RNA, 21 nt, Artificial Sequence
  Synthetic
gcaggacgcacuuagguggga

SEQ ID NO: 227031 - RNA, 22 nt, Artificial Sequence
  Synthetic
ggcaggacgcacuuagguggga

SEQ ID NO: 227032 - RNA, 23 nt, Artificial Sequence
  Synthetic
uggcaggacgcacuuagguggga

SEQ ID NO: 227033 - RNA, 24 nt, Artificial Sequence
  Synthetic
guggcaggacgcacuuagguggga

SEQ ID NO: 227034 - RNA, 18 nt, Artificial Sequence
  Synthetic
augggguaugggguggga

SEQ ID NO: 227035 - RNA, 19 nt, Artificial Sequence
  Synthetic
aaugggguaugggguggga

SEQ ID NO: 227036 - RNA, 20 nt, Artificial Sequence
  Synthetic
gaaugggguaugggguggga

SEQ ID NO: 227037 - RNA, 21 nt, Artificial Sequence
  Synthetic
ugaaugggguaugggguggga

SEQ ID NO: 227038 - RNA, 22 nt, Artificial Sequence
  Synthetic
augaaugggguaugggguggga

SEQ ID NO: 227039 - RNA, 23 nt, Artificial Sequence
  Synthetic
gaugaaugggguaugggguggga

SEQ ID NO: 227040 - RNA, 24 nt, Artificial Sequence
  Synthetic
ugaugaaugggguaugggguggga

SEQ ID NO: 227041 - RNA, 18 nt, Artificial Sequence
  Synthetic
caaacacuccugguggga

SEQ ID NO: 227042 - RNA, 19 nt, Artificial Sequence
  Synthetic
acaaacacuccugguggga

SEQ ID NO: 227043 - RNA, 20 nt, Artificial Sequence
  Synthetic
uacaaacacuccugguggga

SEQ ID NO: 227044 - RNA, 21 nt, Artificial Sequence
  Synthetic
uuacaaacacuccugguggga

SEQ ID NO: 227045 - RNA, 22 nt, Artificial Sequence
  Synthetic
uuuacaaacacuccugguggga

SEQ ID NO: 227046 - RNA, 23 nt, Artificial Sequence
  Synthetic
auuuacaaacacuccugguggga

SEQ ID NO: 227047 - RNA, 24 nt, Artificial Sequence
  Synthetic
cauuuacaaacacuccugguggga

SEQ ID NO: 227048 - RNA, 18 nt, Artificial Sequence
  Synthetic
agaggcccaaauguggga

SEQ ID NO: 227049 - RNA, 19 nt, Artificial Sequence
  Synthetic
uagaggcccaaauguggga

SEQ ID NO: 227050 - RNA, 20 nt, Artificial Sequence
  Synthetic
guagaggcccaaauguggga

SEQ ID NO: 227051 - RNA, 21 nt, Artificial Sequence
  Synthetic
aguagaggcccaaauguggga

SEQ ID NO: 227052 - RNA, 22 nt, Artificial Sequence
  Synthetic
gaguagaggcccaaauguggga

SEQ ID NO: 227053 - RNA, 23 nt, Artificial Sequence
  Synthetic
agaguagaggcccaaauguggga

SEQ ID NO: 227054 - RNA, 24 nt, Artificial Sequence
  Synthetic
uagaguagaggcccaaauguggga

SEQ ID NO: 227055 - RNA, 18 nt, Artificial Sequence
  Synthetic
acugaauucgauguggga

SEQ ID NO: 227056 - RNA, 19 nt, Artificial Sequence
  Synthetic
aacugaauucgauguggga

SEQ ID NO: 227057 - RNA, 20 nt, Artificial Sequence
  Synthetic
aaacugaauucgauguggga

SEQ ID NO: 227058 - RNA, 21 nt, Artificial Sequence
  Synthetic
gaaacugaauucgauguggga

SEQ ID NO: 227059 - RNA, 22 nt, Artificial Sequence
  Synthetic
agaaacugaauucgauguggga

SEQ ID NO: 227060 - RNA, 23 nt, Artificial Sequence
  Synthetic
cagaaacugaauucgauguggga

SEQ ID NO: 227061 - RNA, 24 nt, Artificial Sequence
  Synthetic
ccagaaacugaauucgauguggga

SEQ ID NO: 227062 - RNA, 18 nt, Artificial Sequence
  Synthetic
gugccuuccgguguggga

SEQ ID NO: 227063 - RNA, 19 nt, Artificial Sequence
  Synthetic
ugugccuuccgguguggga

SEQ ID NO: 227064 - RNA, 20 nt, Artificial Sequence
  Synthetic
augugccuuccgguguggga

SEQ ID NO: 227065 - RNA, 21 nt, Artificial Sequence
  Synthetic
caugugccuuccgguguggga

SEQ ID NO: 227066 - RNA, 22 nt, Artificial Sequence
  Synthetic
acaugugccuuccgguguggga

SEQ ID NO: 227067 - RNA, 23 nt, Artificial Sequence
  Synthetic
gacaugugccuuccgguguggga

SEQ ID NO: 227068 - RNA, 24 nt, Artificial Sequence
  Synthetic
agacaugugccuuccgguguggga

SEQ ID NO: 227069 - RNA, 18 nt, Artificial Sequence
  Synthetic
uuggauguguguguggga

SEQ ID NO: 227070 - RNA, 19 nt, Artificial Sequence
  Synthetic
guuggauguguguguggga

SEQ ID NO: 227071 - RNA, 20 nt, Artificial Sequence
  Synthetic
uguuggauguguguguggga

SEQ ID NO: 227072 - RNA, 21 nt, Artificial Sequence
  Synthetic
guguuggauguguguguggga

SEQ ID NO: 227073 - RNA, 22 nt, Artificial Sequence
  Synthetic
gguguuggauguguguguggga

SEQ ID NO: 227074 - RNA, 23 nt, Artificial Sequence
  Synthetic
ugguguuggauguguguguggga

SEQ ID NO: 227075 - RNA, 24 nt, Artificial Sequence
  Synthetic
uugguguuggauguguguguggga

SEQ ID NO: 227076 - RNA, 18 nt, Artificial Sequence
  Synthetic
ccagauaauagauuggga

SEQ ID NO: 227077 - RNA, 19 nt, Artificial Sequence
  Synthetic
accagauaauagauuggga

SEQ ID NO: 227078 - RNA, 20 nt, Artificial Sequence
  Synthetic
uaccagauaauagauuggga

SEQ ID NO: 227079 - RNA, 21 nt, Artificial Sequence
  Synthetic
uuaccagauaauagauuggga

SEQ ID NO: 227080 - RNA, 22 nt, Artificial Sequence
  Synthetic
guuaccagauaauagauuggga

SEQ ID NO: 227081 - RNA, 23 nt, Artificial Sequence
  Synthetic
aguuaccagauaauagauuggga

SEQ ID NO: 227082 - RNA, 24 nt, Artificial Sequence
  Synthetic
aaguuaccagauaauagauuggga

SEQ ID NO: 227083 - RNA, 18 nt, Artificial Sequence
  Synthetic
uuauucaauaacuuggga

SEQ ID NO: 227084 - RNA, 19 nt, Artificial Sequence
  Synthetic
uuuauucaauaacuuggga

SEQ ID NO: 227085 - RNA, 20 nt, Artificial Sequence
  Synthetic
uuuuauucaauaacuuggga

SEQ ID NO: 227086 - RNA, 21 nt, Artificial Sequence
  Synthetic
uuuuuauucaauaacuuggga

SEQ ID NO: 227087 - RNA, 22 nt, Artificial Sequence
  Synthetic
auuuuuauucaauaacuuggga

SEQ ID NO: 227088 - RNA, 23 nt, Artificial Sequence
  Synthetic
gauuuuuauucaauaacuuggga

SEQ ID NO: 227089 - RNA, 24 nt, Artificial Sequence
  Synthetic
ugauuuuuauucaauaacuuggga

SEQ ID NO: 227090 - RNA, 18 nt, Artificial Sequence
  Synthetic
gucugcugacacuuggga

SEQ ID NO: 227091 - RNA, 19 nt, Artificial Sequence
  Synthetic
ggucugcugacacuuggga

SEQ ID NO: 227092 - RNA, 20 nt, Artificial Sequence
  Synthetic
uggucugcugacacuuggga

SEQ ID NO: 227093 - RNA, 21 nt, Artificial Sequence
  Synthetic
guggucugcugacacuuggga

SEQ ID NO: 227094 - RNA, 22 nt, Artificial Sequence
  Synthetic
aguggucugcugacacuuggga

SEQ ID NO: 227095 - RNA, 23 nt, Artificial Sequence
  Synthetic
caguggucugcugacacuuggga

SEQ ID NO: 227096 - RNA, 24 nt, Artificial Sequence
  Synthetic
acaguggucugcugacacuuggga

SEQ ID NO: 227097 - RNA, 18 nt, Artificial Sequence
  Synthetic
aauuuuaaauacuuggga

SEQ ID NO: 227098 - RNA, 19 nt, Artificial Sequence
  Synthetic
caauuuuaaauacuuggga

SEQ ID NO: 227099 - RNA, 20 nt, Artificial Sequence
  Synthetic
ucaauuuuaaauacuuggga

SEQ ID NO: 227100 - RNA, 21 nt, Artificial Sequence
  Synthetic
aucaauuuuaaauacuuggga

SEQ ID NO: 227101 - RNA, 22 nt, Artificial Sequence
  Synthetic
uaucaauuuuaaauacuuggga

SEQ ID NO: 227102 - RNA, 23 nt, Artificial Sequence
  Synthetic
guaucaauuuuaaauacuuggga

SEQ ID NO: 227103 - RNA, 24 nt, Artificial Sequence
  Synthetic
aguaucaauuuuaaauacuuggga

SEQ ID NO: 227104 - RNA, 18 nt, Artificial Sequence
  Synthetic
uuaaaagcaugcuuggga

SEQ ID NO: 227105 - RNA, 19 nt, Artificial Sequence
  Synthetic
uuuaaaagcaugcuuggga

SEQ ID NO: 227106 - RNA, 20 nt, Artificial Sequence
  Synthetic
auuuaaaagcaugcuuggga

SEQ ID NO: 227107 - RNA, 21 nt, Artificial Sequence
  Synthetic
aauuuaaaagcaugcuuggga

SEQ ID NO: 227108 - RNA, 22 nt, Artificial Sequence
  Synthetic
aaauuuaaaagcaugcuuggga

SEQ ID NO: 227109 - RNA, 23 nt, Artificial Sequence
  Synthetic
aaaauuuaaaagcaugcuuggga

SEQ ID NO: 227110 - RNA, 24 nt, Artificial Sequence
  Synthetic
aaaaauuuaaaagcaugcuuggga

SEQ ID NO: 227111 - RNA, 18 nt, Artificial Sequence
  Synthetic
auuuuggaggucuuggga

SEQ ID NO: 227112 - RNA, 19 nt, Artificial Sequence
  Synthetic
gauuuuggaggucuuggga

SEQ ID NO: 227113 - RNA, 20 nt, Artificial Sequence
  Synthetic
ugauuuuggaggucuuggga

SEQ ID NO: 227114 - RNA, 21 nt, Artificial Sequence
  Synthetic
gugauuuuggaggucuuggga

SEQ ID NO: 227115 - RNA, 22 nt, Artificial Sequence
  Synthetic
ggugauuuuggaggucuuggga

SEQ ID NO: 227116 - RNA, 23 nt, Artificial Sequence
  Synthetic
uggugauuuuggaggucuuggga

SEQ ID NO: 227117 - RNA, 24 nt, Artificial Sequence
  Synthetic
auggugauuuuggaggucuuggga

SEQ ID NO: 227118 - RNA, 18 nt, Artificial Sequence
  Synthetic
aauuuucuggucuuggga

SEQ ID NO: 227119 - RNA, 19 nt, Artificial Sequence
  Synthetic
aaauuuucuggucuuggga

SEQ ID NO: 227120 - RNA, 20 nt, Artificial Sequence
  Synthetic
uaaauuuucuggucuuggga

SEQ ID NO: 227121 - RNA, 21 nt, Artificial Sequence
  Synthetic
auaaauuuucuggucuuggga

SEQ ID NO: 227122 - RNA, 22 nt, Artificial Sequence
  Synthetic
aauaaauuuucuggucuuggga

SEQ ID NO: 227123 - RNA, 23 nt, Artificial Sequence
  Synthetic
uaauaaauuuucuggucuuggga

SEQ ID NO: 227124 - RNA, 24 nt, Artificial Sequence
  Synthetic
uuaauaaauuuucuggucuuggga

SEQ ID NO: 227125 - RNA, 18 nt, Artificial Sequence
  Synthetic
cucugcucauucuuggga

SEQ ID NO: 227126 - RNA, 19 nt, Artificial Sequence
  Synthetic
ucucugcucauucuuggga

SEQ ID NO: 227127 - RNA, 20 nt, Artificial Sequence
  Synthetic
aucucugcucauucuuggga

SEQ ID NO: 227128 - RNA, 21 nt, Artificial Sequence
  Synthetic
uaucucugcucauucuuggga

SEQ ID NO: 227129 - RNA, 22 nt, Artificial Sequence
  Synthetic
cuaucucugcucauucuuggga

SEQ ID NO: 227130 - RNA, 23 nt, Artificial Sequence
  Synthetic
gcuaucucugcucauucuuggga

SEQ ID NO: 227131 - RNA, 24 nt, Artificial Sequence
  Synthetic
ggcuaucucugcucauucuuggga

SEQ ID NO: 227132 - RNA, 18 nt, Artificial Sequence
  Synthetic
caccagaauaaguuggga

SEQ ID NO: 227133 - RNA, 19 nt, Artificial Sequence
  Synthetic
acaccagaauaaguuggga

SEQ ID NO: 227134 - RNA, 20 nt, Artificial Sequence
  Synthetic
aacaccagaauaaguuggga

SEQ ID NO: 227135 - RNA, 21 nt, Artificial Sequence
  Synthetic
uaacaccagaauaaguuggga

SEQ ID NO: 227136 - RNA, 22 nt, Artificial Sequence
  Synthetic
auaacaccagaauaaguuggga

SEQ ID NO: 227137 - RNA, 23 nt, Artificial Sequence
  Synthetic
aauaacaccagaauaaguuggga

SEQ ID NO: 227138 - RNA, 24 nt, Artificial Sequence
  Synthetic
caauaacaccagaauaaguuggga

SEQ ID NO: 227139 - RNA, 18 nt, Artificial Sequence
  Synthetic
gugcucaggaauuuggga

SEQ ID NO: 227140 - RNA, 19 nt, Artificial Sequence
  Synthetic
ugugcucaggaauuuggga

SEQ ID NO: 227141 - RNA, 20 nt, Artificial Sequence
  Synthetic
gugugcucaggaauuuggga

SEQ ID NO: 227142 - RNA, 21 nt, Artificial Sequence
  Synthetic
ugugugcucaggaauuuggga

SEQ ID NO: 227143 - RNA, 22 nt, Artificial Sequence
  Synthetic
augugugcucaggaauuuggga

SEQ ID NO: 227144 - RNA, 23 nt, Artificial Sequence
  Synthetic
uaugugugcucaggaauuuggga

SEQ ID NO: 227145 - RNA, 24 nt, Artificial Sequence
  Synthetic
auaugugugcucaggaauuuggga

SEQ ID NO: 227146 - RNA, 18 nt, Artificial Sequence
  Synthetic
aaacagacuuauuuggga

SEQ ID NO: 227147 - RNA, 19 nt, Artificial Sequence
  Synthetic
gaaacagacuuauuuggga

SEQ ID NO: 227148 - RNA, 20 nt, Artificial Sequence
  Synthetic
ugaaacagacuuauuuggga

SEQ ID NO: 227149 - RNA, 21 nt, Artificial Sequence
  Synthetic
augaaacagacuuauuuggga

SEQ ID NO: 227150 - RNA, 22 nt, Artificial Sequence
  Synthetic
gaugaaacagacuuauuuggga

SEQ ID NO: 227151 - RNA, 23 nt, Artificial Sequence
  Synthetic
agaugaaacagacuuauuuggga

SEQ ID NO: 227152 - RNA, 24 nt, Artificial Sequence
  Synthetic
aagaugaaacagacuuauuuggga

SEQ ID NO: 227153 - RNA, 18 nt, Artificial Sequence
  Synthetic
guuuuuuaaaguuuggga

SEQ ID NO: 227154 - RNA, 19 nt, Artificial Sequence
  Synthetic
uguuuuuuaaaguuuggga

SEQ ID NO: 227155 - RNA, 20 nt, Artificial Sequence
  Synthetic
auguuuuuuaaaguuuggga

SEQ ID NO: 227156 - RNA, 21 nt, Artificial Sequence
  Synthetic
aauguuuuuuaaaguuuggga

SEQ ID NO: 227157 - RNA, 22 nt, Artificial Sequence
  Synthetic
aaauguuuuuuaaaguuuggga

SEQ ID NO: 227158 - RNA, 23 nt, Artificial Sequence
  Synthetic
aaaauguuuuuuaaaguuuggga

SEQ ID NO: 227159 - RNA, 24 nt, Artificial Sequence
  Synthetic
caaaauguuuuuuaaaguuuggga

SEQ ID NO: 227160 - RNA, 18 nt, Artificial Sequence
  Synthetic
uuuaccauaaguuuggga

SEQ ID NO: 227161 - RNA, 19 nt, Artificial Sequence
  Synthetic
uuuuaccauaaguuuggga

SEQ ID NO: 227162 - RNA, 20 nt, Artificial Sequence
  Synthetic
auuuuaccauaaguuuggga

SEQ ID NO: 227163 - RNA, 21 nt, Artificial Sequence
  Synthetic
aauuuuaccauaaguuuggga

SEQ ID NO: 227164 - RNA, 22 nt, Artificial Sequence
  Synthetic
aaauuuuaccauaaguuuggga

SEQ ID NO: 227165 - RNA, 23 nt, Artificial Sequence
  Synthetic
uaaauuuuaccauaaguuuggga

SEQ ID NO: 227166 - RNA, 24 nt, Artificial Sequence
  Synthetic
uuaaauuuuaccauaaguuuggga

SEQ ID NO: 227167 - RNA, 18 nt, Artificial Sequence
  Synthetic
uuugugguugguuuggga

SEQ ID NO: 227168 - RNA, 19 nt, Artificial Sequence
  Synthetic
cuuugugguugguuuggga

SEQ ID NO: 227169 - RNA, 20 nt, Artificial Sequence
  Synthetic
gcuuugugguugguuuggga

SEQ ID NO: 227170 - RNA, 21 nt, Artificial Sequence
  Synthetic
agcuuugugguugguuuggga

SEQ ID NO: 227171 - RNA, 22 nt, Artificial Sequence
  Synthetic
uagcuuugugguugguuuggga

SEQ ID NO: 227172 - RNA, 23 nt, Artificial Sequence
  Synthetic
uuagcuuugugguugguuuggga

SEQ ID NO: 227173 - RNA, 24 nt, Artificial Sequence
  Synthetic
guuagcuuugugguugguuuggga

SEQ ID NO: 227174 - RNA, 18 nt, Artificial Sequence
  Synthetic
agacaaaaaauuuuggga

SEQ ID NO: 227175 - RNA, 19 nt, Artificial Sequence
  Synthetic
cagacaaaaaauuuuggga

SEQ ID NO: 227176 - RNA, 20 nt, Artificial Sequence
  Synthetic
acagacaaaaaauuuuggga

SEQ ID NO: 227177 - RNA, 21 nt, Artificial Sequence
  Synthetic
gacagacaaaaaauuuuggga

SEQ ID NO: 227178 - RNA, 22 nt, Artificial Sequence
  Synthetic
ggacagacaaaaaauuuuggga

SEQ ID NO: 227179 - RNA, 23 nt, Artificial Sequence
  Synthetic
uggacagacaaaaaauuuuggga

SEQ ID NO: 227180 - RNA, 24 nt, Artificial Sequence
  Synthetic
uuggacagacaaaaaauuuuggga

SEQ ID NO: 227181 - RNA, 18 nt, Artificial Sequence
  Synthetic
ggaaaguauguuuuggga

SEQ ID NO: 227182 - RNA, 19 nt, Artificial Sequence
  Synthetic
uggaaaguauguuuuggga

SEQ ID NO: 227183 - RNA, 20 nt, Artificial Sequence
  Synthetic
cuggaaaguauguuuuggga

SEQ ID NO: 227184 - RNA, 21 nt, Artificial Sequence
  Synthetic
acuggaaaguauguuuuggga

SEQ ID NO: 227185 - RNA, 22 nt, Artificial Sequence
  Synthetic
uacuggaaaguauguuuuggga

SEQ ID NO: 227186 - RNA, 23 nt, Artificial Sequence
  Synthetic
auacuggaaaguauguuuuggga

SEQ ID NO: 227187 - RNA, 24 nt, Artificial Sequence
  Synthetic
gauacuggaaaguauguuuuggga

SEQ ID NO: 227188 - RNA, 18 nt, Artificial Sequence
  Synthetic
ucaagaagauuuuuggga

SEQ ID NO: 227189 - RNA, 19 nt, Artificial Sequence
  Synthetic
uucaagaagauuuuuggga

SEQ ID NO: 227190 - RNA, 20 nt, Artificial Sequence
  Synthetic
cuucaagaagauuuuuggga

SEQ ID NO: 227191 - RNA, 21 nt, Artificial Sequence
  Synthetic
ccuucaagaagauuuuuggga

SEQ ID NO: 227192 - RNA, 22 nt, Artificial Sequence
  Synthetic
uccuucaagaagauuuuuggga

SEQ ID NO: 227193 - RNA, 23 nt, Artificial Sequence
  Synthetic
guccuucaagaagauuuuuggga

SEQ ID NO: 227194 - RNA, 24 nt, Artificial Sequence
  Synthetic
uguccuucaagaagauuuuuggga

SEQ ID NO: 227195 - RNA, 18 nt, Artificial Sequence
  Synthetic
uggcccuacaaaaaugga

SEQ ID NO: 227196 - RNA, 19 nt, Artificial Sequence
  Synthetic
auggcccuacaaaaaugga

SEQ ID NO: 227197 - RNA, 20 nt, Artificial Sequence
  Synthetic
aauggcccuacaaaaaugga

SEQ ID NO: 227198 - RNA, 21 nt, Artificial Sequence
  Synthetic
aaauggcccuacaaaaaugga

SEQ ID NO: 227199 - RNA, 22 nt, Artificial Sequence
  Synthetic
aaaauggcccuacaaaaaugga

SEQ ID NO: 227200 - RNA, 23 nt, Artificial Sequence
  Synthetic
aaaaauggcccuacaaaaaugga

SEQ ID NO: 227201 - RNA, 24 nt, Artificial Sequence
  Synthetic
caaaaauggcccuacaaaaaugga

SEQ ID NO: 227202 - RNA, 18 nt, Artificial Sequence
  Synthetic
aagaaaaagaaaaaugga

SEQ ID NO: 227203 - RNA, 19 nt, Artificial Sequence
  Synthetic
caagaaaaagaaaaaugga

SEQ ID NO: 227204 - RNA, 20 nt, Artificial Sequence
  Synthetic
ucaagaaaaagaaaaaugga

SEQ ID NO: 227205 - RNA, 21 nt, Artificial Sequence
  Synthetic
uucaagaaaaagaaaaaugga

SEQ ID NO: 227206 - RNA, 22 nt, Artificial Sequence
  Synthetic
guucaagaaaaagaaaaaugga

SEQ ID NO: 227207 - RNA, 23 nt, Artificial Sequence
  Synthetic
aguucaagaaaaagaaaaaugga

SEQ ID NO: 227208 - RNA, 24 nt, Artificial Sequence
  Synthetic
uaguucaagaaaaagaaaaaugga

SEQ ID NO: 227209 - RNA, 18 nt, Artificial Sequence
  Synthetic
cagauuuugaaaaaugga

SEQ ID NO: 227210 - RNA, 19 nt, Artificial Sequence
  Synthetic
gcagauuuugaaaaaugga

SEQ ID NO: 227211 - RNA, 20 nt, Artificial Sequence
  Synthetic
agcagauuuugaaaaaugga

SEQ ID NO: 227212 - RNA, 21 nt, Artificial Sequence
  Synthetic
gagcagauuuugaaaaaugga

SEQ ID NO: 227213 - RNA, 22 nt, Artificial Sequence
  Synthetic
agagcagauuuugaaaaaugga

SEQ ID NO: 227214 - RNA, 23 nt, Artificial Sequence
  Synthetic
aagagcagauuuugaaaaaugga

SEQ ID NO: 227215 - RNA, 24 nt, Artificial Sequence
  Synthetic
aaagagcagauuuugaaaaaugga

SEQ ID NO: 227216 - RNA, 18 nt, Artificial Sequence
  Synthetic
auucagcaauaaaaugga

SEQ ID NO: 227217 - RNA, 19 nt, Artificial Sequence
  Synthetic
uauucagcaauaaaaugga

SEQ ID NO: 227218 - RNA, 20 nt, Artificial Sequence
  Synthetic
cuauucagcaauaaaaugga

SEQ ID NO: 227219 - RNA, 21 nt, Artificial Sequence
  Synthetic
acuauucagcaauaaaaugga

SEQ ID NO: 227220 - RNA, 22 nt, Artificial Sequence
  Synthetic
uacuauucagcaauaaaaugga

SEQ ID NO: 227221 - RNA, 23 nt, Artificial Sequence
  Synthetic
auacuauucagcaauaaaaugga

SEQ ID NO: 227222 - RNA, 24 nt, Artificial Sequence
  Synthetic
aauacuauucagcaauaaaaugga

SEQ ID NO: 227223 - RNA, 18 nt, Artificial Sequence
  Synthetic
uauaugaucuaaaaugga

SEQ ID NO: 227224 - RNA, 19 nt, Artificial Sequence
  Synthetic
auauaugaucuaaaaugga

SEQ ID NO: 227225 - RNA, 20 nt, Artificial Sequence
  Synthetic
aauauaugaucuaaaaugga

SEQ ID NO: 227226 - RNA, 21 nt, Artificial Sequence
  Synthetic
aaauauaugaucuaaaaugga

SEQ ID NO: 227227 - RNA, 22 nt, Artificial Sequence
  Synthetic
aaaauauaugaucuaaaaugga

SEQ ID NO: 227228 - RNA, 23 nt, Artificial Sequence
  Synthetic
caaaauauaugaucuaaaaugga

SEQ ID NO: 227229 - RNA, 24 nt, Artificial Sequence
  Synthetic
ucaaaauauaugaucuaaaaugga

SEQ ID NO: 227230 - RNA, 18 nt, Artificial Sequence
  Synthetic
uaccaagcagcaaaugga

SEQ ID NO: 227231 - RNA, 19 nt, Artificial Sequence
  Synthetic
uuaccaagcagcaaaugga

SEQ ID NO: 227232 - RNA, 20 nt, Artificial Sequence
  Synthetic
uuuaccaagcagcaaaugga

SEQ ID NO: 227233 - RNA, 21 nt, Artificial Sequence
  Synthetic
auuuaccaagcagcaaaugga

SEQ ID NO: 227234 - RNA, 22 nt, Artificial Sequence
  Synthetic
uauuuaccaagcagcaaaugga

SEQ ID NO: 227235 - RNA, 23 nt, Artificial Sequence
  Synthetic
auauuuaccaagcagcaaaugga

SEQ ID NO: 227236 - RNA, 24 nt, Artificial Sequence
  Synthetic
aauauuuaccaagcagcaaaugga

SEQ ID NO: 227237 - RNA, 18 nt, Artificial Sequence
  Synthetic
aaggaggaaauaaaugga

SEQ ID NO: 227238 - RNA, 19 nt, Artificial Sequence
  Synthetic
caaggaggaaauaaaugga

SEQ ID NO: 227239 - RNA, 20 nt, Artificial Sequence
  Synthetic
acaaggaggaaauaaaugga

SEQ ID NO: 227240 - RNA, 21 nt, Artificial Sequence
  Synthetic
aacaaggaggaaauaaaugga

SEQ ID NO: 227241 - RNA, 22 nt, Artificial Sequence
  Synthetic
aaacaaggaggaaauaaaugga

SEQ ID NO: 227242 - RNA, 23 nt, Artificial Sequence
  Synthetic
gaaacaaggaggaaauaaaugga

SEQ ID NO: 227243 - RNA, 24 nt, Artificial Sequence
  Synthetic
agaaacaaggaggaaauaaaugga

SEQ ID NO: 227244 - RNA, 18 nt, Artificial Sequence
  Synthetic
ggggaaauucuaaaugga

SEQ ID NO: 227245 - RNA, 19 nt, Artificial Sequence
  Synthetic
uggggaaauucuaaaugga

SEQ ID NO: 227246 - RNA, 20 nt, Artificial Sequence
  Synthetic
cuggggaaauucuaaaugga

SEQ ID NO: 227247 - RNA, 21 nt, Artificial Sequence
  Synthetic
acuggggaaauucuaaaugga

SEQ ID NO: 227248 - RNA, 22 nt, Artificial Sequence
  Synthetic
cacuggggaaauucuaaaugga

SEQ ID NO: 227249 - RNA, 23 nt, Artificial Sequence
  Synthetic
ccacuggggaaauucuaaaugga

SEQ ID NO: 227250 - RNA, 24 nt, Artificial Sequence
  Synthetic
cccacuggggaaauucuaaaugga

SEQ ID NO: 227251 - RNA, 18 nt, Artificial Sequence
  Synthetic
caaaucuaaguaaaugga

SEQ ID NO: 227252 - RNA, 19 nt, Artificial Sequence
  Synthetic
gcaaaucuaaguaaaugga

SEQ ID NO: 227253 - RNA, 20 nt, Artificial Sequence
  Synthetic
ugcaaaucuaaguaaaugga

SEQ ID NO: 227254 - RNA, 21 nt, Artificial Sequence
  Synthetic
uugcaaaucuaaguaaaugga

SEQ ID NO: 227255 - RNA, 22 nt, Artificial Sequence
  Synthetic
uuugcaaaucuaaguaaaugga

SEQ ID NO: 227256 - RNA, 23 nt, Artificial Sequence
  Synthetic
cuuugcaaaucuaaguaaaugga

SEQ ID NO: 227257 - RNA, 24 nt, Artificial Sequence
  Synthetic
ucuuugcaaaucuaaguaaaugga

SEQ ID NO: 227258 - RNA, 18 nt, Artificial Sequence
  Synthetic
aagaagcccguaaaugga

SEQ ID NO: 227259 - RNA, 19 nt, Artificial Sequence
  Synthetic
gaagaagcccguaaaugga

SEQ ID NO: 227260 - RNA, 20 nt, Artificial Sequence
  Synthetic
ggaagaagcccguaaaugga

SEQ ID NO: 227261 - RNA, 21 nt, Artificial Sequence
  Synthetic
uggaagaagcccguaaaugga

SEQ ID NO: 227262 - RNA, 22 nt, Artificial Sequence
  Synthetic
uuggaagaagcccguaaaugga

SEQ ID NO: 227263 - RNA, 23 nt, Artificial Sequence
  Synthetic
uuuggaagaagcccguaaaugga

SEQ ID NO: 227264 - RNA, 24 nt, Artificial Sequence
  Synthetic
cuuuggaagaagcccguaaaugga

SEQ ID NO: 227265 - RNA, 18 nt, Artificial Sequence
  Synthetic
ccuccaucacacaaugga

SEQ ID NO: 227266 - RNA, 19 nt, Artificial Sequence
  Synthetic
gccuccaucacacaaugga

SEQ ID NO: 227267 - RNA, 20 nt, Artificial Sequence
  Synthetic
agccuccaucacacaaugga

SEQ ID NO: 227268 - RNA, 21 nt, Artificial Sequence
  Synthetic
gagccuccaucacacaaugga

SEQ ID NO: 227269 - RNA, 22 nt, Artificial Sequence
  Synthetic
ggagccuccaucacacaaugga

SEQ ID NO: 227270 - RNA, 23 nt, Artificial Sequence
  Synthetic
gggagccuccaucacacaaugga

SEQ ID NO: 227271 - RNA, 24 nt, Artificial Sequence
  Synthetic
ugggagccuccaucacacaaugga

SEQ ID NO: 227272 - RNA, 18 nt, Artificial Sequence
  Synthetic
uucguuugaaucaaugga

SEQ ID NO: 227273 - RNA, 19 nt, Artificial Sequence
  Synthetic
uuucguuugaaucaaugga

SEQ ID NO: 227274 - RNA, 20 nt, Artificial Sequence
  Synthetic
cuuucguuugaaucaaugga

SEQ ID NO: 227275 - RNA, 21 nt, Artificial Sequence
  Synthetic
ucuuucguuugaaucaaugga

SEQ ID NO: 227276 - RNA, 22 nt, Artificial Sequence
  Synthetic
gucuuucguuugaaucaaugga

SEQ ID NO: 227277 - RNA, 23 nt, Artificial Sequence
  Synthetic
ugucuuucguuugaaucaaugga

SEQ ID NO: 227278 - RNA, 24 nt, Artificial Sequence
  Synthetic
gugucuuucguuugaaucaaugga

SEQ ID NO: 227279 - RNA, 18 nt, Artificial Sequence
  Synthetic
gagccuggaaagaaugga

SEQ ID NO: 227280 - RNA, 19 nt, Artificial Sequence
  Synthetic
ggagccuggaaagaaugga

SEQ ID NO: 227281 - RNA, 20 nt, Artificial Sequence
  Synthetic
aggagccuggaaagaaugga

SEQ ID NO: 227282 - RNA, 21 nt, Artificial Sequence
  Synthetic
gaggagccuggaaagaaugga

SEQ ID NO: 227283 - RNA, 22 nt, Artificial Sequence
  Synthetic
ggaggagccuggaaagaaugga

SEQ ID NO: 227284 - RNA, 23 nt, Artificial Sequence
  Synthetic
uggaggagccuggaaagaaugga

SEQ ID NO: 227285 - RNA, 24 nt, Artificial Sequence
  Synthetic
guggaggagccuggaaagaaugga

SEQ ID NO: 227286 - RNA, 18 nt, Artificial Sequence
  Synthetic
agaucccuggggaaugga

SEQ ID NO: 227287 - RNA, 19 nt, Artificial Sequence
  Synthetic
aagaucccuggggaaugga

SEQ ID NO: 227288 - RNA, 20 nt, Artificial Sequence
  Synthetic
caagaucccuggggaaugga

SEQ ID NO: 227289 - RNA, 21 nt, Artificial Sequence
  Synthetic
acaagaucccuggggaaugga

SEQ ID NO: 227290 - RNA, 22 nt, Artificial Sequence
  Synthetic
aacaagaucccuggggaaugga

SEQ ID NO: 227291 - RNA, 23 nt, Artificial Sequence
  Synthetic
gaacaagaucccuggggaaugga

SEQ ID NO: 227292 - RNA, 24 nt, Artificial Sequence
  Synthetic
agaacaagaucccuggggaaugga

SEQ ID NO: 227293 - RNA, 18 nt, Artificial Sequence
  Synthetic
ccauaugaguggaaugga

SEQ ID NO: 227294 - RNA, 19 nt, Artificial Sequence
  Synthetic
uccauaugaguggaaugga

SEQ ID NO: 227295 - RNA, 20 nt, Artificial Sequence
  Synthetic
auccauaugaguggaaugga

SEQ ID NO: 227296 - RNA, 21 nt, Artificial Sequence
  Synthetic
aauccauaugaguggaaugga

SEQ ID NO: 227297 - RNA, 22 nt, Artificial Sequence
  Synthetic
gaauccauaugaguggaaugga

SEQ ID NO: 227298 - RNA, 23 nt, Artificial Sequence
  Synthetic
agaauccauaugaguggaaugga

SEQ ID NO: 227299 - RNA, 24 nt, Artificial Sequence
  Synthetic
gagaauccauaugaguggaaugga

SEQ ID NO: 227300 - RNA, 18 nt, Artificial Sequence
  Synthetic
ucuugcuugaugaaugga

SEQ ID NO: 227301 - RNA, 19 nt, Artificial Sequence
  Synthetic
cucuugcuugaugaaugga

SEQ ID NO: 227302 - RNA, 20 nt, Artificial Sequence
  Synthetic
ucucuugcuugaugaaugga

SEQ ID NO: 227303 - RNA, 21 nt, Artificial Sequence
  Synthetic
uucucuugcuugaugaaugga

SEQ ID NO: 227304 - RNA, 22 nt, Artificial Sequence
  Synthetic
guucucuugcuugaugaaugga

SEQ ID NO: 227305 - RNA, 23 nt, Artificial Sequence
  Synthetic
uguucucuugcuugaugaaugga

SEQ ID NO: 227306 - RNA, 24 nt, Artificial Sequence
  Synthetic
cuguucucuugcuugaugaaugga

SEQ ID NO: 227307 - RNA, 18 nt, Artificial Sequence
  Synthetic
ggagaguaacugaaugga

SEQ ID NO: 227308 - RNA, 19 nt, Artificial Sequence
  Synthetic
aggagaguaacugaaugga

SEQ ID NO: 227309 - RNA, 20 nt, Artificial Sequence
  Synthetic
aaggagaguaacugaaugga

SEQ ID NO: 227310 - RNA, 21 nt, Artificial Sequence
  Synthetic
aaaggagaguaacugaaugga

SEQ ID NO: 227311 - RNA, 22 nt, Artificial Sequence
  Synthetic
caaaggagaguaacugaaugga

SEQ ID NO: 227312 - RNA, 23 nt, Artificial Sequence
  Synthetic
acaaaggagaguaacugaaugga

SEQ ID NO: 227313 - RNA, 24 nt, Artificial Sequence
  Synthetic
uacaaaggagaguaacugaaugga

SEQ ID NO: 227314 - RNA, 18 nt, Artificial Sequence
  Synthetic
ugauuuuaagauaaugga

SEQ ID NO: 227315 - RNA, 19 nt, Artificial Sequence
  Synthetic
cugauuuuaagauaaugga

SEQ ID NO: 227316 - RNA, 20 nt, Artificial Sequence
  Synthetic
ucugauuuuaagauaaugga

SEQ ID NO: 227317 - RNA, 21 nt, Artificial Sequence
  Synthetic
gucugauuuuaagauaaugga

SEQ ID NO: 227318 - RNA, 22 nt, Artificial Sequence
  Synthetic
agucugauuuuaagauaaugga

SEQ ID NO: 227319 - RNA, 23 nt, Artificial Sequence
  Synthetic
aagucugauuuuaagauaaugga

SEQ ID NO: 227320 - RNA, 24 nt, Artificial Sequence
  Synthetic
caagucugauuuuaagauaaugga

SEQ ID NO: 227321 - RNA, 18 nt, Artificial Sequence
  Synthetic
auuuaucuuuauaaugga

SEQ ID NO: 227322 - RNA, 19 nt, Artificial Sequence
  Synthetic
aauuuaucuuuauaaugga

SEQ ID NO: 227323 - RNA, 20 nt, Artificial Sequence
  Synthetic
uaauuuaucuuuauaaugga

SEQ ID NO: 227324 - RNA, 21 nt, Artificial Sequence
  Synthetic
cuaauuuaucuuuauaaugga

SEQ ID NO: 227325 - RNA, 22 nt, Artificial Sequence
  Synthetic
ucuaauuuaucuuuauaaugga

SEQ ID NO: 227326 - RNA, 23 nt, Artificial Sequence
  Synthetic
uucuaauuuaucuuuauaaugga

SEQ ID NO: 227327 - RNA, 24 nt, Artificial Sequence
  Synthetic
auucuaauuuaucuuuauaaugga

SEQ ID NO: 227328 - RNA, 18 nt, Artificial Sequence
  Synthetic
caauaaaaauguaaugga

SEQ ID NO: 227329 - RNA, 19 nt, Artificial Sequence
  Synthetic
ucaauaaaaauguaaugga

SEQ ID NO: 227330 - RNA, 20 nt, Artificial Sequence
  Synthetic
aucaauaaaaauguaaugga

SEQ ID NO: 227331 - RNA, 21 nt, Artificial Sequence
  Synthetic
gaucaauaaaaauguaaugga

SEQ ID NO: 227332 - RNA, 22 nt, Artificial Sequence
  Synthetic
ugaucaauaaaaauguaaugga

SEQ ID NO: 227333 - RNA, 23 nt, Artificial Sequence
  Synthetic
gugaucaauaaaaauguaaugga

SEQ ID NO: 227334 - RNA, 24 nt, Artificial Sequence
  Synthetic
ugugaucaauaaaaauguaaugga

SEQ ID NO: 227335 - RNA, 18 nt, Artificial Sequence
  Synthetic
ggcagcccaauuaaugga

SEQ ID NO: 227336 - RNA, 19 nt, Artificial Sequence
  Synthetic
gggcagcccaauuaaugga

SEQ ID NO: 227337 - RNA, 20 nt, Artificial Sequence
  Synthetic
ugggcagcccaauuaaugga

SEQ ID NO: 227338 - RNA, 21 nt, Artificial Sequence
  Synthetic
augggcagcccaauuaaugga

SEQ ID NO: 227339 - RNA, 22 nt, Artificial Sequence
  Synthetic
caugggcagcccaauuaaugga

SEQ ID NO: 227340 - RNA, 23 nt, Artificial Sequence
  Synthetic
ucaugggcagcccaauuaaugga

SEQ ID NO: 227341 - RNA, 24 nt, Artificial Sequence
  Synthetic
uucaugggcagcccaauuaaugga

SEQ ID NO: 227342 - RNA, 18 nt, Artificial Sequence
  Synthetic
acauuccauguuaaugga

SEQ ID NO: 227343 - RNA, 19 nt, Artificial Sequence
  Synthetic
aacauuccauguuaaugga

SEQ ID NO: 227344 - RNA, 20 nt, Artificial Sequence
  Synthetic
aaacauuccauguuaaugga

SEQ ID NO: 227345 - RNA, 21 nt, Artificial Sequence
  Synthetic
gaaacauuccauguuaaugga

SEQ ID NO: 227346 - RNA, 22 nt, Artificial Sequence
  Synthetic
agaaacauuccauguuaaugga

SEQ ID NO: 227347 - RNA, 23 nt, Artificial Sequence
  Synthetic
gagaaacauuccauguuaaugga

SEQ ID NO: 227348 - RNA, 24 nt, Artificial Sequence
  Synthetic
ggagaaacauuccauguuaaugga

SEQ ID NO: 227349 - RNA, 18 nt, Artificial Sequence
  Synthetic
ugcuuuguauuuaaugga

SEQ ID NO: 227350 - RNA, 19 nt, Artificial Sequence
  Synthetic
uugcuuuguauuuaaugga

SEQ ID NO: 227351 - RNA, 20 nt, Artificial Sequence
  Synthetic
cuugcuuuguauuuaaugga

SEQ ID NO: 227352 - RNA, 21 nt, Artificial Sequence
  Synthetic
acuugcuuuguauuuaaugga

SEQ ID NO: 227353 - RNA, 22 nt, Artificial Sequence
  Synthetic
cacuugcuuuguauuuaaugga

SEQ ID NO: 227354 - RNA, 23 nt, Artificial Sequence
  Synthetic
ucacuugcuuuguauuuaaugga

SEQ ID NO: 227355 - RNA, 24 nt, Artificial Sequence
  Synthetic
gucacuugcuuuguauuuaaugga

SEQ ID NO: 227356 - RNA, 18 nt, Artificial Sequence
  Synthetic
ggaaucacuaaacaugga

SEQ ID NO: 227357 - RNA, 19 nt, Artificial Sequence
  Synthetic
aggaaucacuaaacaugga

SEQ ID NO: 227358 - RNA, 20 nt, Artificial Sequence
  Synthetic
aaggaaucacuaaacaugga

SEQ ID NO: 227359 - RNA, 21 nt, Artificial Sequence
  Synthetic
gaaggaaucacuaaacaugga

SEQ ID NO: 227360 - RNA, 22 nt, Artificial Sequence
  Synthetic
ugaaggaaucacuaaacaugga

SEQ ID NO: 227361 - RNA, 23 nt, Artificial Sequence
  Synthetic
cugaaggaaucacuaaacaugga

SEQ ID NO: 227362 - RNA, 24 nt, Artificial Sequence
  Synthetic
ccugaaggaaucacuaaacaugga

SEQ ID NO: 227363 - RNA, 18 nt, Artificial Sequence
  Synthetic
cucaaacuagcacaugga

SEQ ID NO: 227364 - RNA, 19 nt, Artificial Sequence
  Synthetic
ucucaaacuagcacaugga

SEQ ID NO: 227365 - RNA, 20 nt, Artificial Sequence
  Synthetic
cucucaaacuagcacaugga

SEQ ID NO: 227366 - RNA, 21 nt, Artificial Sequence
  Synthetic
ccucucaaacuagcacaugga

SEQ ID NO: 227367 - RNA, 22 nt, Artificial Sequence
  Synthetic
gccucucaaacuagcacaugga

SEQ ID NO: 227368 - RNA, 23 nt, Artificial Sequence
  Synthetic
ugccucucaaacuagcacaugga

SEQ ID NO: 227369 - RNA, 24 nt, Artificial Sequence
  Synthetic
uugccucucaaacuagcacaugga

SEQ ID NO: 227370 - RNA, 18 nt, Artificial Sequence
  Synthetic
guguaagauucacaugga

SEQ ID NO: 227371 - RNA, 19 nt, Artificial Sequence
  Synthetic
aguguaagauucacaugga

SEQ ID NO: 227372 - RNA, 20 nt, Artificial Sequence
  Synthetic
aaguguaagauucacaugga

SEQ ID NO: 227373 - RNA, 21 nt, Artificial Sequence
  Synthetic
gaaguguaagauucacaugga

SEQ ID NO: 227374 - RNA, 22 nt, Artificial Sequence
  Synthetic
ugaaguguaagauucacaugga

SEQ ID NO: 227375 - RNA, 23 nt, Artificial Sequence
  Synthetic
uugaaguguaagauucacaugga

SEQ ID NO: 227376 - RNA, 24 nt, Artificial Sequence
  Synthetic
cuugaaguguaagauucacaugga

SEQ ID NO: 227377 - RNA, 18 nt, Artificial Sequence
  Synthetic
ccuuugcagcgacaugga

SEQ ID NO: 227378 - RNA, 19 nt, Artificial Sequence
  Synthetic
uccuuugcagcgacaugga

SEQ ID NO: 227379 - RNA, 20 nt, Artificial Sequence
  Synthetic
guccuuugcagcgacaugga

SEQ ID NO: 227380 - RNA, 21 nt, Artificial Sequence
  Synthetic
uguccuuugcagcgacaugga

SEQ ID NO: 227381 - RNA, 22 nt, Artificial Sequence
  Synthetic
auguccuuugcagcgacaugga

SEQ ID NO: 227382 - RNA, 23 nt, Artificial Sequence
  Synthetic
cauguccuuugcagcgacaugga

SEQ ID NO: 227383 - RNA, 24 nt, Artificial Sequence
  Synthetic
ucauguccuuugcagcgacaugga

SEQ ID NO: 227384 - RNA, 18 nt, Artificial Sequence
  Synthetic
ccuuuugacccgcaugga

SEQ ID NO: 227385 - RNA, 19 nt, Artificial Sequence
  Synthetic
uccuuuugacccgcaugga

SEQ ID NO: 227386 - RNA, 20 nt, Artificial Sequence
  Synthetic
uuccuuuugacccgcaugga

SEQ ID NO: 227387 - RNA, 21 nt, Artificial Sequence
  Synthetic
uuuccuuuugacccgcaugga

SEQ ID NO: 227388 - RNA, 22 nt, Artificial Sequence
  Synthetic
auuuccuuuugacccgcaugga

SEQ ID NO: 227389 - RNA, 23 nt, Artificial Sequence
  Synthetic
aauuuccuuuugacccgcaugga

SEQ ID NO: 227390 - RNA, 24 nt, Artificial Sequence
  Synthetic
uaauuuccuuuugacccgcaugga

SEQ ID NO: 227391 - RNA, 18 nt, Artificial Sequence
  Synthetic
acccucucaaggcaugga

SEQ ID NO: 227392 - RNA, 19 nt, Artificial Sequence
  Synthetic
uacccucucaaggcaugga

SEQ ID NO: 227393 - RNA, 20 nt, Artificial Sequence
  Synthetic
uuacccucucaaggcaugga

SEQ ID NO: 227394 - RNA, 21 nt, Artificial Sequence
  Synthetic
cuuacccucucaaggcaugga

SEQ ID NO: 227395 - RNA, 22 nt, Artificial Sequence
  Synthetic
ucuuacccucucaaggcaugga

SEQ ID NO: 227396 - RNA, 23 nt, Artificial Sequence
  Synthetic
aucuuacccucucaaggcaugga

SEQ ID NO: 227397 - RNA, 24 nt, Artificial Sequence
  Synthetic
aaucuuacccucucaaggcaugga

SEQ ID NO: 227398 - RNA, 18 nt, Artificial Sequence
  Synthetic
gcguguuggaugcaugga

SEQ ID NO: 227399 - RNA, 19 nt, Artificial Sequence
  Synthetic
agcguguuggaugcaugga

SEQ ID NO: 227400 - RNA, 20 nt, Artificial Sequence
  Synthetic
aagcguguuggaugcaugga

SEQ ID NO: 227401 - RNA, 21 nt, Artificial Sequence
  Synthetic
uaagcguguuggaugcaugga

SEQ ID NO: 227402 - RNA, 22 nt, Artificial Sequence
  Synthetic
guaagcguguuggaugcaugga

SEQ ID NO: 227403 - RNA, 23 nt, Artificial Sequence
  Synthetic
gguaagcguguuggaugcaugga

SEQ ID NO: 227404 - RNA, 24 nt, Artificial Sequence
  Synthetic
ugguaagcguguuggaugcaugga

SEQ ID NO: 227405 - RNA, 18 nt, Artificial Sequence
  Synthetic
aacacauggacucaugga

SEQ ID NO: 227406 - RNA, 19 nt, Artificial Sequence
  Synthetic
gaacacauggacucaugga

SEQ ID NO: 227407 - RNA, 20 nt, Artificial Sequence
  Synthetic
agaacacauggacucaugga

SEQ ID NO: 227408 - RNA, 21 nt, Artificial Sequence
  Synthetic
gagaacacauggacucaugga

SEQ ID NO: 227409 - RNA, 22 nt, Artificial Sequence
  Synthetic
ugagaacacauggacucaugga

SEQ ID NO: 227410 - RNA, 23 nt, Artificial Sequence
  Synthetic
augagaacacauggacucaugga

SEQ ID NO: 227411 - RNA, 24 nt, Artificial Sequence
  Synthetic
aaugagaacacauggacucaugga

SEQ ID NO: 227412 - RNA, 18 nt, Artificial Sequence
  Synthetic
acauuccaugcucaugga

SEQ ID NO: 227413 - RNA, 19 nt, Artificial Sequence
  Synthetic
aacauuccaugcucaugga

SEQ ID NO: 227414 - RNA, 20 nt, Artificial Sequence
  Synthetic
gaacauuccaugcucaugga

SEQ ID NO: 227415 - RNA, 18 nt, Artificial Sequence
  Synthetic
gcauuaagaaaagaugga

SEQ ID NO: 227416 - RNA, 19 nt, Artificial Sequence
  Synthetic
ugcauuaagaaaagaugga

SEQ ID NO: 227417 - RNA, 20 nt, Artificial Sequence
  Synthetic
augcauuaagaaaagaugga

SEQ ID NO: 227418 - RNA, 21 nt, Artificial Sequence
  Synthetic
aaugcauuaagaaaagaugga

SEQ ID NO: 227419 - RNA, 22 nt, Artificial Sequence
  Synthetic
aaaugcauuaagaaaagaugga

SEQ ID NO: 227420 - RNA, 23 nt, Artificial Sequence
  Synthetic
caaaugcauuaagaaaagaugga

SEQ ID NO: 227421 - RNA, 24 nt, Artificial Sequence
  Synthetic
acaaaugcauuaagaaaagaugga

SEQ ID NO: 227422 - RNA, 18 nt, Artificial Sequence
  Synthetic
gaccaagacuuagaugga

SEQ ID NO: 227423 - RNA, 19 nt, Artificial Sequence
  Synthetic
ggaccaagacuuagaugga

SEQ ID NO: 227424 - RNA, 20 nt, Artificial Sequence
  Synthetic
aggaccaagacuuagaugga

SEQ ID NO: 227425 - RNA, 21 nt, Artificial Sequence
  Synthetic
caggaccaagacuuagaugga

SEQ ID NO: 227426 - RNA, 22 nt, Artificial Sequence
  Synthetic
gcaggaccaagacuuagaugga

SEQ ID NO: 227427 - RNA, 23 nt, Artificial Sequence
  Synthetic
ggcaggaccaagacuuagaugga

SEQ ID NO: 227428 - RNA, 24 nt, Artificial Sequence
  Synthetic
aggcaggaccaagacuuagaugga

SEQ ID NO: 227429 - RNA, 18 nt, Artificial Sequence
  Synthetic
uccaaccugggcgaugga

SEQ ID NO: 227430 - RNA, 19 nt, Artificial Sequence
  Synthetic
cuccaaccugggcgaugga

SEQ ID NO: 227431 - RNA, 20 nt, Artificial Sequence
  Synthetic
gcuccaaccugggcgaugga

SEQ ID NO: 227432 - RNA, 21 nt, Artificial Sequence
  Synthetic
cgcuccaaccugggcgaugga

SEQ ID NO: 227433 - RNA, 22 nt, Artificial Sequence
  Synthetic
gcgcuccaaccugggcgaugga

SEQ ID NO: 227434 - RNA, 23 nt, Artificial Sequence
  Synthetic
ugcgcuccaaccugggcgaugga

SEQ ID NO: 227435 - RNA, 24 nt, Artificial Sequence
  Synthetic
cugcgcuccaaccugggcgaugga

SEQ ID NO: 227436 - RNA, 18 nt, Artificial Sequence
  Synthetic
uuggaaaagaucgaugga

SEQ ID NO: 227437 - RNA, 19 nt, Artificial Sequence
  Synthetic
guuggaaaagaucgaugga

SEQ ID NO: 227438 - RNA, 20 nt, Artificial Sequence
  Synthetic
aguuggaaaagaucgaugga

SEQ ID NO: 227439 - RNA, 21 nt, Artificial Sequence
  Synthetic
gaguuggaaaagaucgaugga

SEQ ID NO: 227440 - RNA, 22 nt, Artificial Sequence
  Synthetic
ugaguuggaaaagaucgaugga

SEQ ID NO: 227441 - RNA, 23 nt, Artificial Sequence
  Synthetic
cugaguuggaaaagaucgaugga

SEQ ID NO: 227442 - RNA, 24 nt, Artificial Sequence
  Synthetic
gcugaguuggaaaagaucgaugga

SEQ ID NO: 227443 - RNA, 18 nt, Artificial Sequence
  Synthetic
cagcgacaggaggaugga

SEQ ID NO: 227444 - RNA, 19 nt, Artificial Sequence
  Synthetic
acagcgacaggaggaugga

SEQ ID NO: 227445 - RNA, 20 nt, Artificial Sequence
  Synthetic
gacagcgacaggaggaugga

SEQ ID NO: 227446 - RNA, 21 nt, Artificial Sequence
  Synthetic
agacagcgacaggaggaugga

SEQ ID NO: 227447 - RNA, 22 nt, Artificial Sequence
  Synthetic
gagacagcgacaggaggaugga

SEQ ID NO: 227448 - RNA, 23 nt, Artificial Sequence
  Synthetic
ggagacagcgacaggaggaugga

SEQ ID NO: 227449 - RNA, 24 nt, Artificial Sequence
  Synthetic
aggagacagcgacaggaggaugga

SEQ ID NO: 227450 - RNA, 18 nt, Artificial Sequence
  Synthetic
gauugauugauggaugga

SEQ ID NO: 227451 - RNA, 19 nt, Artificial Sequence
  Synthetic
ugauugauugauggaugga

SEQ ID NO: 227452 - RNA, 20 nt, Artificial Sequence
  Synthetic
augauugauugauggaugga

SEQ ID NO: 227453 - RNA, 21 nt, Artificial Sequence
  Synthetic
uaugauugauugauggaugga

SEQ ID NO: 227454 - RNA, 22 nt, Artificial Sequence
  Synthetic
auaugauugauugauggaugga

SEQ ID NO: 227455 - RNA, 23 nt, Artificial Sequence
  Synthetic
aauaugauugauugauggaugga

SEQ ID NO: 227456 - RNA, 24 nt, Artificial Sequence
  Synthetic
aaauaugauugauugauggaugga

SEQ ID NO: 227457 - RNA, 18 nt, Artificial Sequence
  Synthetic
cuuuugaacuaugaugga

SEQ ID NO: 227458 - RNA, 19 nt, Artificial Sequence
  Synthetic
ccuuuugaacuaugaugga

SEQ ID NO: 227459 - RNA, 20 nt, Artificial Sequence
  Synthetic
accuuuugaacuaugaugga

SEQ ID NO: 227460 - RNA, 21 nt, Artificial Sequence
  Synthetic
caccuuuugaacuaugaugga

SEQ ID NO: 227461 - RNA, 22 nt, Artificial Sequence
  Synthetic
ucaccuuuugaacuaugaugga

SEQ ID NO: 227462 - RNA, 23 nt, Artificial Sequence
  Synthetic
gucaccuuuugaacuaugaugga

SEQ ID NO: 227463 - RNA, 24 nt, Artificial Sequence
  Synthetic
ugucaccuuuugaacuaugaugga

SEQ ID NO: 227464 - RNA, 18 nt, Artificial Sequence
  Synthetic
ggaagcacuaaauaugga

SEQ ID NO: 227465 - RNA, 19 nt, Artificial Sequence
  Synthetic
aggaagcacuaaauaugga

SEQ ID NO: 227466 - RNA, 20 nt, Artificial Sequence
  Synthetic
aaggaagcacuaaauaugga

SEQ ID NO: 227467 - RNA, 21 nt, Artificial Sequence
  Synthetic
gaaggaagcacuaaauaugga

SEQ ID NO: 227468 - RNA, 22 nt, Artificial Sequence
  Synthetic
ugaaggaagcacuaaauaugga

SEQ ID NO: 227469 - RNA, 23 nt, Artificial Sequence
  Synthetic
augaaggaagcacuaaauaugga

SEQ ID NO: 227470 - RNA, 24 nt, Artificial Sequence
  Synthetic
aaugaaggaagcacuaaauaugga

SEQ ID NO: 227471 - RNA, 18 nt, Artificial Sequence
  Synthetic
ugucugcuuaacuaugga

SEQ ID NO: 227472 - RNA, 19 nt, Artificial Sequence
  Synthetic
cugucugcuuaacuaugga

SEQ ID NO: 227473 - RNA, 20 nt, Artificial Sequence
  Synthetic
ucugucugcuuaacuaugga

SEQ ID NO: 227474 - RNA, 21 nt, Artificial Sequence
  Synthetic
uucugucugcuuaacuaugga

SEQ ID NO: 227475 - RNA, 22 nt, Artificial Sequence
  Synthetic
uuucugucugcuuaacuaugga

SEQ ID NO: 227476 - RNA, 23 nt, Artificial Sequence
  Synthetic
uuuucugucugcuuaacuaugga

SEQ ID NO: 227477 - RNA, 24 nt, Artificial Sequence
  Synthetic
auuuucugucugcuuaacuaugga

SEQ ID NO: 227478 - RNA, 18 nt, Artificial Sequence
  Synthetic
uaagauacugaguaugga

SEQ ID NO: 227479 - RNA, 19 nt, Artificial Sequence
  Synthetic
guaagauacugaguaugga

SEQ ID NO: 227480 - RNA, 20 nt, Artificial Sequence
  Synthetic
uguaagauacugaguaugga

SEQ ID NO: 227481 - RNA, 21 nt, Artificial Sequence
  Synthetic
uuguaagauacugaguaugga

SEQ ID NO: 227482 - RNA, 22 nt, Artificial Sequence
  Synthetic
uuuguaagauacugaguaugga

SEQ ID NO: 227483 - RNA, 23 nt, Artificial Sequence
  Synthetic
auuuguaagauacugaguaugga

SEQ ID NO: 227484 - RNA, 24 nt, Artificial Sequence
  Synthetic
cauuuguaagauacugaguaugga

SEQ ID NO: 227485 - RNA, 18 nt, Artificial Sequence
  Synthetic
aaauaaaucauguaugga

SEQ ID NO: 227486 - RNA, 19 nt, Artificial Sequence
  Synthetic
uaaauaaaucauguaugga

SEQ ID NO: 227487 - RNA, 20 nt, Artificial Sequence
  Synthetic
cuaaauaaaucauguaugga

SEQ ID NO: 227488 - RNA, 21 nt, Artificial Sequence
  Synthetic
ucuaaauaaaucauguaugga

SEQ ID NO: 227489 - RNA, 22 nt, Artificial Sequence
  Synthetic
gucuaaauaaaucauguaugga

SEQ ID NO: 227490 - RNA, 23 nt, Artificial Sequence
  Synthetic
ugucuaaauaaaucauguaugga

SEQ ID NO: 227491 - RNA, 24 nt, Artificial Sequence
  Synthetic
uugucuaaauaaaucauguaugga

SEQ ID NO: 227492 - RNA, 18 nt, Artificial Sequence
  Synthetic
cagacuuuuauguaugga

SEQ ID NO: 227493 - RNA, 19 nt, Artificial Sequence
  Synthetic
acagacuuuuauguaugga

SEQ ID NO: 227494 - RNA, 20 nt, Artificial Sequence
  Synthetic
uacagacuuuuauguaugga

SEQ ID NO: 227495 - RNA, 21 nt, Artificial Sequence
  Synthetic
auacagacuuuuauguaugga

SEQ ID NO: 227496 - RNA, 22 nt, Artificial Sequence
  Synthetic
gauacagacuuuuauguaugga

SEQ ID NO: 227497 - RNA, 23 nt, Artificial Sequence
  Synthetic
agauacagacuuuuauguaugga

SEQ ID NO: 227498 - RNA, 24 nt, Artificial Sequence
  Synthetic
aagauacagacuuuuauguaugga

SEQ ID NO: 227499 - RNA, 18 nt, Artificial Sequence
  Synthetic
aaacaguuucuguaugga

SEQ ID NO: 227500 - RNA, 19 nt, Artificial Sequence
  Synthetic
caaacaguuucuguaugga

SEQ ID NO: 227501 - RNA, 20 nt, Artificial Sequence
  Synthetic
gcaaacaguuucuguaugga

SEQ ID NO: 227502 - RNA, 21 nt, Artificial Sequence
  Synthetic
agcaaacaguuucuguaugga

SEQ ID NO: 227503 - RNA, 22 nt, Artificial Sequence
  Synthetic
uagcaaacaguuucuguaugga

SEQ ID NO: 227504 - RNA, 23 nt, Artificial Sequence
  Synthetic
uuagcaaacaguuucuguaugga

SEQ ID NO: 227505 - RNA, 24 nt, Artificial Sequence
  Synthetic
uuuagcaaacaguuucuguaugga

SEQ ID NO: 227506 - RNA, 18 nt, Artificial Sequence
  Synthetic
ugguugguguuguaugga

SEQ ID NO: 227507 - RNA, 19 nt, Artificial Sequence
  Synthetic
cugguugguguuguaugga

SEQ ID NO: 227508 - RNA, 20 nt, Artificial Sequence
  Synthetic
ccugguugguguuguaugga

SEQ ID NO: 227509 - RNA, 21 nt, Artificial Sequence
  Synthetic
accugguugguguuguaugga

SEQ ID NO: 227510 - RNA, 22 nt, Artificial Sequence
  Synthetic
gaccugguugguguuguaugga

SEQ ID NO: 227511 - RNA, 23 nt, Artificial Sequence
  Synthetic
agaccugguugguguuguaugga

SEQ ID NO: 227512 - RNA, 24 nt, Artificial Sequence
  Synthetic
gagaccugguugguguuguaugga

SEQ ID NO: 227513 - RNA, 18 nt, Artificial Sequence
  Synthetic
aaugggauggauuaugga

SEQ ID NO: 227514 - RNA, 19 nt, Artificial Sequence
  Synthetic
aaaugggauggauuaugga

SEQ ID NO: 227515 - RNA, 20 nt, Artificial Sequence
  Synthetic
caaaugggauggauuaugga

SEQ ID NO: 227516 - RNA, 21 nt, Artificial Sequence
  Synthetic
acaaaugggauggauuaugga

SEQ ID NO: 227517 - RNA, 22 nt, Artificial Sequence
  Synthetic
aacaaaugggauggauuaugga

SEQ ID NO: 227518 - RNA, 23 nt, Artificial Sequence
  Synthetic
gaacaaaugggauggauuaugga

SEQ ID NO: 227519 - RNA, 24 nt, Artificial Sequence
  Synthetic
agaacaaaugggauggauuaugga

SEQ ID NO: 227520 - RNA, 18 nt, Artificial Sequence
  Synthetic
uaaacuacauuuuaugga

SEQ ID NO: 227521 - RNA, 19 nt, Artificial Sequence
  Synthetic
uuaaacuacauuuuaugga

SEQ ID NO: 227522 - RNA, 20 nt, Artificial Sequence
  Synthetic
uuuaaacuacauuuuaugga

SEQ ID NO: 227523 - RNA, 21 nt, Artificial Sequence
  Synthetic
guuuaaacuacauuuuaugga

SEQ ID NO: 227524 - RNA, 22 nt, Artificial Sequence
  Synthetic
gguuuaaacuacauuuuaugga

SEQ ID NO: 227525 - RNA, 23 nt, Artificial Sequence
  Synthetic
agguuuaaacuacauuuuaugga

SEQ ID NO: 227526 - RNA, 24 nt, Artificial Sequence
  Synthetic
aagguuuaaacuacauuuuaugga

SEQ ID NO: 227527 - RNA, 18 nt, Artificial Sequence
  Synthetic
uuauagccaaaaacugga

SEQ ID NO: 227528 - RNA, 19 nt, Artificial Sequence
  Synthetic
auuauagccaaaaacugga

SEQ ID NO: 227529 - RNA, 20 nt, Artificial Sequence
  Synthetic
cauuauagccaaaaacugga

SEQ ID NO: 227530 - RNA, 21 nt, Artificial Sequence
  Synthetic
ucauuauagccaaaaacugga

SEQ ID NO: 227531 - RNA, 22 nt, Artificial Sequence
  Synthetic
uucauuauagccaaaaacugga

SEQ ID NO: 227532 - RNA, 23 nt, Artificial Sequence
  Synthetic
auucauuauagccaaaaacugga

SEQ ID NO: 227533 - RNA, 24 nt, Artificial Sequence
  Synthetic
uauucauuauagccaaaaacugga

SEQ ID NO: 227534 - RNA, 18 nt, Artificial Sequence
  Synthetic
caagggaacaaaacugga

SEQ ID NO: 227535 - RNA, 19 nt, Artificial Sequence
  Synthetic
gcaagggaacaaaacugga

SEQ ID NO: 227536 - RNA, 20 nt, Artificial Sequence
  Synthetic
agcaagggaacaaaacugga

SEQ ID NO: 227537 - RNA, 21 nt, Artificial Sequence
  Synthetic
cagcaagggaacaaaacugga

SEQ ID NO: 227538 - RNA, 22 nt, Artificial Sequence
  Synthetic
ccagcaagggaacaaaacugga

SEQ ID NO: 227539 - RNA, 23 nt, Artificial Sequence
  Synthetic
uccagcaagggaacaaaacugga

SEQ ID NO: 227540 - RNA, 24 nt, Artificial Sequence
  Synthetic
cuccagcaagggaacaaaacugga

SEQ ID NO: 227541 - RNA, 18 nt, Artificial Sequence
  Synthetic
auggucuagucaacugga

SEQ ID NO: 227542 - RNA, 19 nt, Artificial Sequence
  Synthetic
cauggucuagucaacugga

SEQ ID NO: 227543 - RNA, 20 nt, Artificial Sequence
  Synthetic
ucauggucuagucaacugga

SEQ ID NO: 227544 - RNA, 21 nt, Artificial Sequence
  Synthetic
cucauggucuagucaacugga

SEQ ID NO: 227545 - RNA, 22 nt, Artificial Sequence
  Synthetic
ucucauggucuagucaacugga

SEQ ID NO: 227546 - RNA, 23 nt, Artificial Sequence
  Synthetic
aucucauggucuagucaacugga

SEQ ID NO: 227547 - RNA, 24 nt, Artificial Sequence
  Synthetic
gaucucauggucuagucaacugga

SEQ ID NO: 227548 - RNA, 18 nt, Artificial Sequence
  Synthetic
aaagaaauuauaacugga

SEQ ID NO: 227549 - RNA, 19 nt, Artificial Sequence
  Synthetic
aaaagaaauuauaacugga

SEQ ID NO: 227550 - RNA, 20 nt, Artificial Sequence
  Synthetic
caaaagaaauuauaacugga

SEQ ID NO: 227551 - RNA, 21 nt, Artificial Sequence
  Synthetic
gcaaaagaaauuauaacugga

SEQ ID NO: 227552 - RNA, 22 nt, Artificial Sequence
  Synthetic
agcaaaagaaauuauaacugga

SEQ ID NO: 227553 - RNA, 23 nt, Artificial Sequence
  Synthetic
cagcaaaagaaauuauaacugga

SEQ ID NO: 227554 - RNA, 24 nt, Artificial Sequence
  Synthetic
ccagcaaaagaaauuauaacugga

SEQ ID NO: 227555 - RNA, 18 nt, Artificial Sequence
  Synthetic
aucaccauucuaacugga

SEQ ID NO: 227556 - RNA, 19 nt, Artificial Sequence
  Synthetic
gaucaccauucuaacugga

SEQ ID NO: 227557 - RNA, 20 nt, Artificial Sequence
  Synthetic
ugaucaccauucuaacugga

SEQ ID NO: 227558 - RNA, 21 nt, Artificial Sequence
  Synthetic
augaucaccauucuaacugga

SEQ ID NO: 227559 - RNA, 22 nt, Artificial Sequence
  Synthetic
aaugaucaccauucuaacugga

SEQ ID NO: 227560 - RNA, 23 nt, Artificial Sequence
  Synthetic
uaaugaucaccauucuaacugga

SEQ ID NO: 227561 - RNA, 24 nt, Artificial Sequence
  Synthetic
uuaaugaucaccauucuaacugga

SEQ ID NO: 227562 - RNA, 18 nt, Artificial Sequence
  Synthetic
auagccauucuaacugga

SEQ ID NO: 227563 - RNA, 19 nt, Artificial Sequence
  Synthetic
aauagccauucuaacugga

SEQ ID NO: 227564 - RNA, 20 nt, Artificial Sequence
  Synthetic
uaauagccauucuaacugga

SEQ ID NO: 227565 - RNA, 21 nt, Artificial Sequence
  Synthetic
auaauagccauucuaacugga

SEQ ID NO: 227566 - RNA, 22 nt, Artificial Sequence
  Synthetic
gauaauagccauucuaacugga

SEQ ID NO: 227567 - RNA, 23 nt, Artificial Sequence
  Synthetic
ugauaauagccauucuaacugga

SEQ ID NO: 227568 - RNA, 24 nt, Artificial Sequence
  Synthetic
uugauaauagccauucuaacugga

SEQ ID NO: 227569 - RNA, 18 nt, Artificial Sequence
  Synthetic
uguuaaaagaucacugga

SEQ ID NO: 227570 - RNA, 19 nt, Artificial Sequence
  Synthetic
cuguuaaaagaucacugga

SEQ ID NO: 227571 - RNA, 20 nt, Artificial Sequence
  Synthetic
acuguuaaaagaucacugga

SEQ ID NO: 227572 - RNA, 21 nt, Artificial Sequence
  Synthetic
cacuguuaaaagaucacugga

SEQ ID NO: 227573 - RNA, 22 nt, Artificial Sequence
  Synthetic
gcacuguuaaaagaucacugga

SEQ ID NO: 227574 - RNA, 23 nt, Artificial Sequence
  Synthetic
ggcacuguuaaaagaucacugga

SEQ ID NO: 227575 - RNA, 24 nt, Artificial Sequence
  Synthetic
aggcacuguuaaaagaucacugga

SEQ ID NO: 227576 - RNA, 18 nt, Artificial Sequence
  Synthetic
uuacacaaaaagacugga

SEQ ID NO: 227577 - RNA, 19 nt, Artificial Sequence
  Synthetic
auuacacaaaaagacugga

SEQ ID NO: 227578 - RNA, 20 nt, Artificial Sequence
  Synthetic
gauuacacaaaaagacugga

SEQ ID NO: 227579 - RNA, 21 nt, Artificial Sequence
  Synthetic
ugauuacacaaaaagacugga

SEQ ID NO: 227580 - RNA, 22 nt, Artificial Sequence
  Synthetic
cugauuacacaaaaagacugga

SEQ ID NO: 227581 - RNA, 23 nt, Artificial Sequence
  Synthetic
ccugauuacacaaaaagacugga

SEQ ID NO: 227582 - RNA, 24 nt, Artificial Sequence
  Synthetic
accugauuacacaaaaagacugga

SEQ ID NO: 227583 - RNA, 18 nt, Artificial Sequence
  Synthetic
caacaaugauagacugga

SEQ ID NO: 227584 - RNA, 19 nt, Artificial Sequence
  Synthetic
ccaacaaugauagacugga

SEQ ID NO: 227585 - RNA, 20 nt, Artificial Sequence
  Synthetic
uccaacaaugauagacugga

SEQ ID NO: 227586 - RNA, 21 nt, Artificial Sequence
  Synthetic
guccaacaaugauagacugga

SEQ ID NO: 227587 - RNA, 22 nt, Artificial Sequence
  Synthetic
uguccaacaaugauagacugga

SEQ ID NO: 227588 - RNA, 23 nt, Artificial Sequence
  Synthetic
auguccaacaaugauagacugga

SEQ ID NO: 227589 - RNA, 24 nt, Artificial Sequence
  Synthetic
aauguccaacaaugauagacugga

SEQ ID NO: 227590 - RNA, 18 nt, Artificial Sequence
  Synthetic
uuagaguuuuguacugga

SEQ ID NO: 227591 - RNA, 19 nt, Artificial Sequence
  Synthetic
cuuagaguuuuguacugga

SEQ ID NO: 227592 - RNA, 20 nt, Artificial Sequence
  Synthetic
ccuuagaguuuuguacugga

SEQ ID NO: 227593 - RNA, 21 nt, Artificial Sequence
  Synthetic
uccuuagaguuuuguacugga

SEQ ID NO: 227594 - RNA, 22 nt, Artificial Sequence
  Synthetic
uuccuuagaguuuuguacugga

SEQ ID NO: 227595 - RNA, 23 nt, Artificial Sequence
  Synthetic
auuccuuagaguuuuguacugga

SEQ ID NO: 227596 - RNA, 24 nt, Artificial Sequence
  Synthetic
aauuccuuagaguuuuguacugga

SEQ ID NO: 227597 - RNA, 18 nt, Artificial Sequence
  Synthetic
uuaauuauuauuacugga

SEQ ID NO: 227598 - RNA, 19 nt, Artificial Sequence
  Synthetic
uuuaauuauuauuacugga

SEQ ID NO: 227599 - RNA, 20 nt, Artificial Sequence
  Synthetic
uuuuaauuauuauuacugga

SEQ ID NO: 227600 - RNA, 21 nt, Artificial Sequence
  Synthetic
uuuuuaauuauuauuacugga

SEQ ID NO: 227601 - RNA, 22 nt, Artificial Sequence
  Synthetic
auuuuuaauuauuauuacugga

SEQ ID NO: 227602 - RNA, 23 nt, Artificial Sequence
  Synthetic
cauuuuuaauuauuauuacugga

SEQ ID NO: 227603 - RNA, 24 nt, Artificial Sequence
  Synthetic
gcauuuuuaauuauuauuacugga

SEQ ID NO: 227604 - RNA, 18 nt, Artificial Sequence
  Synthetic
augagccaggaaccugga

SEQ ID NO: 227605 - RNA, 19 nt, Artificial Sequence
  Synthetic
uaugagccaggaaccugga

SEQ ID NO: 227606 - RNA, 20 nt, Artificial Sequence
  Synthetic
uuaugagccaggaaccugga

SEQ ID NO: 227607 - RNA, 21 nt, Artificial Sequence
  Synthetic
guuaugagccaggaaccugga

SEQ ID NO: 227608 - RNA, 22 nt, Artificial Sequence
  Synthetic
uguuaugagccaggaaccugga

SEQ ID NO: 227609 - RNA, 23 nt, Artificial Sequence
  Synthetic
guguuaugagccaggaaccugga

SEQ ID NO: 227610 - RNA, 24 nt, Artificial Sequence
  Synthetic
gguguuaugagccaggaaccugga

SEQ ID NO: 227611 - RNA, 18 nt, Artificial Sequence
  Synthetic
cgugaaacugaaccugga

SEQ ID NO: 227612 - RNA, 19 nt, Artificial Sequence
  Synthetic
acgugaaacugaaccugga

SEQ ID NO: 227613 - RNA, 20 nt, Artificial Sequence
  Synthetic
uacgugaaacugaaccugga

SEQ ID NO: 227614 - RNA, 21 nt, Artificial Sequence
  Synthetic
uuacgugaaacugaaccugga

SEQ ID NO: 227615 - RNA, 22 nt, Artificial Sequence
  Synthetic
cuuacgugaaacugaaccugga

SEQ ID NO: 227616 - RNA, 23 nt, Artificial Sequence
  Synthetic
ucuuacgugaaacugaaccugga

SEQ ID NO: 227617 - RNA, 24 nt, Artificial Sequence
  Synthetic
aucuuacgugaaacugaaccugga

SEQ ID NO: 227618 - RNA, 18 nt, Artificial Sequence
  Synthetic
acauauuugcuaccugga

SEQ ID NO: 227619 - RNA, 19 nt, Artificial Sequence
  Synthetic
aacauauuugcuaccugga

SEQ ID NO: 227620 - RNA, 20 nt, Artificial Sequence
  Synthetic
gaacauauuugcuaccugga

SEQ ID NO: 227621 - RNA, 21 nt, Artificial Sequence
  Synthetic
ugaacauauuugcuaccugga

SEQ ID NO: 227622 - RNA, 22 nt, Artificial Sequence
  Synthetic
uugaacauauuugcuaccugga

SEQ ID NO: 227623 - RNA, 23 nt, Artificial Sequence
  Synthetic
auugaacauauuugcuaccugga

SEQ ID NO: 227624 - RNA, 24 nt, Artificial Sequence
  Synthetic
aauugaacauauuugcuaccugga

SEQ ID NO: 227625 - RNA, 18 nt, Artificial Sequence
  Synthetic
accauucacuccccugga

SEQ ID NO: 227626 - RNA, 19 nt, Artificial Sequence
  Synthetic
aaccauucacuccccugga

SEQ ID NO: 227627 - RNA, 20 nt, Artificial Sequence
  Synthetic
gaaccauucacuccccugga

SEQ ID NO: 227628 - RNA, 21 nt, Artificial Sequence
  Synthetic
agaaccauucacuccccugga

SEQ ID NO: 227629 - RNA, 22 nt, Artificial Sequence
  Synthetic
uagaaccauucacuccccugga

SEQ ID NO: 227630 - RNA, 23 nt, Artificial Sequence
  Synthetic
auagaaccauucacuccccugga

SEQ ID NO: 227631 - RNA, 24 nt, Artificial Sequence
  Synthetic
gauagaaccauucacuccccugga

SEQ ID NO: 227632 - RNA, 18 nt, Artificial Sequence
  Synthetic
caggaacuagggccugga

SEQ ID NO: 227633 - RNA, 19 nt, Artificial Sequence
  Synthetic
ccaggaacuagggccugga

SEQ ID NO: 227634 - RNA, 20 nt, Artificial Sequence
  Synthetic
uccaggaacuagggccugga

SEQ ID NO: 227635 - RNA, 21 nt, Artificial Sequence
  Synthetic
auccaggaacuagggccugga

SEQ ID NO: 227636 - RNA, 22 nt, Artificial Sequence
  Synthetic
uauccaggaacuagggccugga

SEQ ID NO: 227637 - RNA, 23 nt, Artificial Sequence
  Synthetic
cuauccaggaacuagggccugga

SEQ ID NO: 227638 - RNA, 24 nt, Artificial Sequence
  Synthetic
gcuauccaggaacuagggccugga

SEQ ID NO: 227639 - RNA, 18 nt, Artificial Sequence
  Synthetic
ugagagaguuugccugga

SEQ ID NO: 227640 - RNA, 19 nt, Artificial Sequence
  Synthetic
augagagaguuugccugga

SEQ ID NO: 227641 - RNA, 20 nt, Artificial Sequence
  Synthetic
gaugagagaguuugccugga

SEQ ID NO: 227642 - RNA, 21 nt, Artificial Sequence
  Synthetic
ggaugagagaguuugccugga

SEQ ID NO: 227643 - RNA, 22 nt, Artificial Sequence
  Synthetic
aggaugagagaguuugccugga

SEQ ID NO: 227644 - RNA, 23 nt, Artificial Sequence
  Synthetic
caggaugagagaguuugccugga

SEQ ID NO: 227645 - RNA, 24 nt, Artificial Sequence
  Synthetic
ucaggaugagagaguuugccugga

SEQ ID NO: 227646 - RNA, 18 nt, Artificial Sequence
  Synthetic
uuagccaucaauccugga

SEQ ID NO: 227647 - RNA, 19 nt, Artificial Sequence
  Synthetic
cuuagccaucaauccugga

SEQ ID NO: 227648 - RNA, 20 nt, Artificial Sequence
  Synthetic
ucuuagccaucaauccugga

SEQ ID NO: 227649 - RNA, 21 nt, Artificial Sequence
  Synthetic
uucuuagccaucaauccugga

SEQ ID NO: 227650 - RNA, 22 nt, Artificial Sequence
  Synthetic
cuucuuagccaucaauccugga

SEQ ID NO: 227651 - RNA, 23 nt, Artificial Sequence
  Synthetic
ucuucuuagccaucaauccugga

SEQ ID NO: 227652 - RNA, 24 nt, Artificial Sequence
  Synthetic
cucuucuuagccaucaauccugga

SEQ ID NO: 227653 - RNA, 18 nt, Artificial Sequence
  Synthetic
uccaaggagaguccugga

SEQ ID NO: 227654 - RNA, 19 nt, Artificial Sequence
  Synthetic
cuccaaggagaguccugga

SEQ ID NO: 227655 - RNA, 20 nt, Artificial Sequence
  Synthetic
ucuccaaggagaguccugga

SEQ ID NO: 227656 - RNA, 21 nt, Artificial Sequence
  Synthetic
cucuccaaggagaguccugga

SEQ ID NO: 227657 - RNA, 22 nt, Artificial Sequence
  Synthetic
ccucuccaaggagaguccugga

SEQ ID NO: 227658 - RNA, 23 nt, Artificial Sequence
  Synthetic
uccucuccaaggagaguccugga

SEQ ID NO: 227659 - RNA, 24 nt, Artificial Sequence
  Synthetic
auccucuccaaggagaguccugga

SEQ ID NO: 227660 - RNA, 18 nt, Artificial Sequence
  Synthetic
aagcagaaggaagcugga

SEQ ID NO: 227661 - RNA, 19 nt, Artificial Sequence
  Synthetic
aaagcagaaggaagcugga

SEQ ID NO: 227662 - RNA, 20 nt, Artificial Sequence
  Synthetic
aaaagcagaaggaagcugga

SEQ ID NO: 227663 - RNA, 21 nt, Artificial Sequence
  Synthetic
gaaaagcagaaggaagcugga

SEQ ID NO: 227664 - RNA, 22 nt, Artificial Sequence
  Synthetic
ugaaaagcagaaggaagcugga

SEQ ID NO: 227665 - RNA, 23 nt, Artificial Sequence
  Synthetic
uugaaaagcagaaggaagcugga

SEQ ID NO: 227666 - RNA, 24 nt, Artificial Sequence
  Synthetic
uuugaaaagcagaaggaagcugga

SEQ ID NO: 227667 - RNA, 18 nt, Artificial Sequence
  Synthetic
uauggaacaccagcugga

SEQ ID NO: 227668 - RNA, 19 nt, Artificial Sequence
  Synthetic
auauggaacaccagcugga

SEQ ID NO: 227669 - RNA, 20 nt, Artificial Sequence
  Synthetic
aauauggaacaccagcugga

SEQ ID NO: 227670 - RNA, 21 nt, Artificial Sequence
  Synthetic
aaauauggaacaccagcugga

SEQ ID NO: 227671 - RNA, 22 nt, Artificial Sequence
  Synthetic
aaaauauggaacaccagcugga

SEQ ID NO: 227672 - RNA, 23 nt, Artificial Sequence
  Synthetic
gaaaauauggaacaccagcugga

SEQ ID NO: 227673 - RNA, 24 nt, Artificial Sequence
  Synthetic
ugaaaauauggaacaccagcugga

SEQ ID NO: 227674 - RNA, 18 nt, Artificial Sequence
  Synthetic
ggauuuccgccagcugga

SEQ ID NO: 227675 - RNA, 19 nt, Artificial Sequence
  Synthetic
aggauuuccgccagcugga

SEQ ID NO: 227676 - RNA, 20 nt, Artificial Sequence
  Synthetic
aaggauuuccgccagcugga

SEQ ID NO: 227677 - RNA, 21 nt, Artificial Sequence
  Synthetic
aaaggauuuccgccagcugga

SEQ ID NO: 227678 - RNA, 22 nt, Artificial Sequence
  Synthetic
gaaaggauuuccgccagcugga

SEQ ID NO: 227679 - RNA, 23 nt, Artificial Sequence
  Synthetic
ggaaaggauuuccgccagcugga

SEQ ID NO: 227680 - RNA, 24 nt, Artificial Sequence
  Synthetic
gggaaaggauuuccgccagcugga

SEQ ID NO: 227681 - RNA, 18 nt, Artificial Sequence
  Synthetic
cugccucugggagcugga

SEQ ID NO: 227682 - RNA, 19 nt, Artificial Sequence
  Synthetic
gcugccucugggagcugga

SEQ ID NO: 227683 - RNA, 20 nt, Artificial Sequence
  Synthetic
ggcugccucugggagcugga

SEQ ID NO: 227684 - RNA, 21 nt, Artificial Sequence
  Synthetic
aggcugccucugggagcugga

SEQ ID NO: 227685 - RNA, 22 nt, Artificial Sequence
  Synthetic
caggcugccucugggagcugga

SEQ ID NO: 227686 - RNA, 23 nt, Artificial Sequence
  Synthetic
acaggcugccucugggagcugga

SEQ ID NO: 227687 - RNA, 24 nt, Artificial Sequence
  Synthetic
uacaggcugccucugggagcugga

SEQ ID NO: 227688 - RNA, 18 nt, Artificial Sequence
  Synthetic
auccuaaauugagcugga

SEQ ID NO: 227689 - RNA, 19 nt, Artificial Sequence
  Synthetic
aauccuaaauugagcugga

SEQ ID NO: 227690 - RNA, 20 nt, Artificial Sequence
  Synthetic
uaauccuaaauugagcugga

SEQ ID NO: 227691 - RNA, 21 nt, Artificial Sequence
  Synthetic
guaauccuaaauugagcugga

SEQ ID NO: 227692 - RNA, 22 nt, Artificial Sequence
  Synthetic
aguaauccuaaauugagcugga

SEQ ID NO: 227693 - RNA, 23 nt, Artificial Sequence
  Synthetic
uaguaauccuaaauugagcugga

SEQ ID NO: 227694 - RNA, 24 nt, Artificial Sequence
  Synthetic
guaguaauccuaaauugagcugga

SEQ ID NO: 227695 - RNA, 18 nt, Artificial Sequence
  Synthetic
ucugucacccaggcugga

SEQ ID NO: 227696 - RNA, 19 nt, Artificial Sequence
  Synthetic
cucugucacccaggcugga

SEQ ID NO: 227697 - RNA, 20 nt, Artificial Sequence
  Synthetic
gcucugucacccaggcugga

SEQ ID NO: 227698 - RNA, 21 nt, Artificial Sequence
  Synthetic
ugcucugucacccaggcugga

SEQ ID NO: 227699 - RNA, 22 nt, Artificial Sequence
  Synthetic
uugcucugucacccaggcugga

SEQ ID NO: 227700 - RNA, 23 nt, Artificial Sequence
  Synthetic
cuugcucugucacccaggcugga

SEQ ID NO: 227701 - RNA, 24 nt, Artificial Sequence
  Synthetic
ucuugcucugucacccaggcugga

SEQ ID NO: 227702 - RNA, 18 nt, Artificial Sequence
  Synthetic
ucuuucgcccaggcugga

SEQ ID NO: 227703 - RNA, 19 nt, Artificial Sequence
  Synthetic
cucuuucgcccaggcugga

SEQ ID NO: 227704 - RNA, 20 nt, Artificial Sequence
  Synthetic
gcucuuucgcccaggcugga

SEQ ID NO: 227705 - RNA, 21 nt, Artificial Sequence
  Synthetic
cgcucuuucgcccaggcugga

SEQ ID NO: 227706 - RNA, 22 nt, Artificial Sequence
  Synthetic
ucgcucuuucgcccaggcugga

SEQ ID NO: 227707 - RNA, 23 nt, Artificial Sequence
  Synthetic
uucgcucuuucgcccaggcugga

SEQ ID NO: 227708 - RNA, 24 nt, Artificial Sequence
  Synthetic
uuucgcucuuucgcccaggcugga

SEQ ID NO: 227709 - RNA, 18 nt, Artificial Sequence
  Synthetic
ccaaguggaaaugcugga

SEQ ID NO: 227710 - RNA, 19 nt, Artificial Sequence
  Synthetic
uccaaguggaaaugcugga

SEQ ID NO: 227711 - RNA, 20 nt, Artificial Sequence
  Synthetic
auccaaguggaaaugcugga

SEQ ID NO: 227712 - RNA, 21 nt, Artificial Sequence
  Synthetic
uauccaaguggaaaugcugga

SEQ ID NO: 227713 - RNA, 22 nt, Artificial Sequence
  Synthetic
auauccaaguggaaaugcugga

SEQ ID NO: 227714 - RNA, 23 nt, Artificial Sequence
  Synthetic
gauauccaaguggaaaugcugga

SEQ ID NO: 227715 - RNA, 24 nt, Artificial Sequence
  Synthetic
agauauccaaguggaaaugcugga

SEQ ID NO: 227716 - RNA, 18 nt, Artificial Sequence
  Synthetic
uucugugugaaugcugga

SEQ ID NO: 227717 - RNA, 19 nt, Artificial Sequence
  Synthetic
uuucugugugaaugcugga

SEQ ID NO: 227718 - RNA, 20 nt, Artificial Sequence
  Synthetic
auuucugugugaaugcugga

SEQ ID NO: 227719 - RNA, 21 nt, Artificial Sequence
  Synthetic
cauuucugugugaaugcugga

SEQ ID NO: 227720 - RNA, 22 nt, Artificial Sequence
  Synthetic
acauuucugugugaaugcugga

SEQ ID NO: 227721 - RNA, 23 nt, Artificial Sequence
  Synthetic
cacauuucugugugaaugcugga

SEQ ID NO: 227722 - RNA, 24 nt, Artificial Sequence
  Synthetic
acacauuucugugugaaugcugga

SEQ ID NO: 227723 - RNA, 18 nt, Artificial Sequence
  Synthetic
uacauuguuuaugcugga

SEQ ID NO: 227724 - RNA, 19 nt, Artificial Sequence
  Synthetic
auacauuguuuaugcugga

SEQ ID NO: 227725 - RNA, 20 nt, Artificial Sequence
  Synthetic
aauacauuguuuaugcugga

SEQ ID NO: 227726 - RNA, 21 nt, Artificial Sequence
  Synthetic
uaauacauuguuuaugcugga

SEQ ID NO: 227727 - RNA, 22 nt, Artificial Sequence
  Synthetic
cuaauacauuguuuaugcugga

SEQ ID NO: 227728 - RNA, 23 nt, Artificial Sequence
  Synthetic
ucuaauacauuguuuaugcugga

SEQ ID NO: 227729 - RNA, 24 nt, Artificial Sequence
  Synthetic
uucuaauacauuguuuaugcugga

SEQ ID NO: 227730 - RNA, 18 nt, Artificial Sequence
  Synthetic
cugcuaggaagugcugga

SEQ ID NO: 227731 - RNA, 19 nt, Artificial Sequence
  Synthetic
acugcuaggaagugcugga

SEQ ID NO: 227732 - RNA, 20 nt, Artificial Sequence
  Synthetic
cacugcuaggaagugcugga

SEQ ID NO: 227733 - RNA, 21 nt, Artificial Sequence
  Synthetic
gcacugcuaggaagugcugga

SEQ ID NO: 227734 - RNA, 22 nt, Artificial Sequence
  Synthetic
ggcacugcuaggaagugcugga

SEQ ID NO: 227735 - RNA, 23 nt, Artificial Sequence
  Synthetic
aggcacugcuaggaagugcugga

SEQ ID NO: 227736 - RNA, 24 nt, Artificial Sequence
  Synthetic
caggcacugcuaggaagugcugga

SEQ ID NO: 227737 - RNA, 18 nt, Artificial Sequence
  Synthetic
uaaaacuuaaaaucugga

SEQ ID NO: 227738 - RNA, 19 nt, Artificial Sequence
  Synthetic
auaaaacuuaaaaucugga

SEQ ID NO: 227739 - RNA, 20 nt, Artificial Sequence
  Synthetic
uauaaaacuuaaaaucugga

SEQ ID NO: 227740 - RNA, 21 nt, Artificial Sequence
  Synthetic
uuauaaaacuuaaaaucugga

SEQ ID NO: 227741 - RNA, 22 nt, Artificial Sequence
  Synthetic
auuauaaaacuuaaaaucugga

SEQ ID NO: 227742 - RNA, 23 nt, Artificial Sequence
  Synthetic
aauuauaaaacuuaaaaucugga

SEQ ID NO: 227743 - RNA, 24 nt, Artificial Sequence
  Synthetic
uaauuauaaaacuuaaaaucugga

SEQ ID NO: 227744 - RNA, 18 nt, Artificial Sequence
  Synthetic
aaauaaaguacaucugga

SEQ ID NO: 227745 - RNA, 19 nt, Artificial Sequence
  Synthetic
gaaauaaaguacaucugga

SEQ ID NO: 227746 - RNA, 20 nt, Artificial Sequence
  Synthetic
ggaaauaaaguacaucugga

SEQ ID NO: 227747 - RNA, 21 nt, Artificial Sequence
  Synthetic
aggaaauaaaguacaucugga

SEQ ID NO: 227748 - RNA, 22 nt, Artificial Sequence
  Synthetic
aaggaaauaaaguacaucugga

SEQ ID NO: 227749 - RNA, 23 nt, Artificial Sequence
  Synthetic
aaaggaaauaaaguacaucugga

SEQ ID NO: 227750 - RNA, 24 nt, Artificial Sequence
  Synthetic
gaaaggaaauaaaguacaucugga

SEQ ID NO: 227751 - RNA, 18 nt, Artificial Sequence
  Synthetic
uguuucuucaccucugga

SEQ ID NO: 227752 - RNA, 19 nt, Artificial Sequence
  Synthetic
cuguuucuucaccucugga

SEQ ID NO: 227753 - RNA, 20 nt, Artificial Sequence
  Synthetic
ccuguuucuucaccucugga

SEQ ID NO: 227754 - RNA, 21 nt, Artificial Sequence
  Synthetic
gccuguuucuucaccucugga

SEQ ID NO: 227755 - RNA, 22 nt, Artificial Sequence
  Synthetic
ggccuguuucuucaccucugga

SEQ ID NO: 227756 - RNA, 23 nt, Artificial Sequence
  Synthetic
gggccuguuucuucaccucugga

SEQ ID NO: 227757 - RNA, 24 nt, Artificial Sequence
  Synthetic
ugggccuguuucuucaccucugga

SEQ ID NO: 227758 - RNA, 18 nt, Artificial Sequence
  Synthetic
uuguuuggcuccucugga

SEQ ID NO: 227759 - RNA, 19 nt, Artificial Sequence
  Synthetic
uuuguuuggcuccucugga

SEQ ID NO: 227760 - RNA, 20 nt, Artificial Sequence
  Synthetic
auuuguuuggcuccucugga

SEQ ID NO: 227761 - RNA, 21 nt, Artificial Sequence
  Synthetic
aauuuguuuggcuccucugga

SEQ ID NO: 227762 - RNA, 22 nt, Artificial Sequence
  Synthetic
caauuuguuuggcuccucugga

SEQ ID NO: 227763 - RNA, 23 nt, Artificial Sequence
  Synthetic
ccaauuuguuuggcuccucugga

SEQ ID NO: 227764 - RNA, 24 nt, Artificial Sequence
  Synthetic
gccaauuuguuuggcuccucugga

SEQ ID NO: 227765 - RNA, 18 nt, Artificial Sequence
  Synthetic
gaagaaaagaggucugga

SEQ ID NO: 227766 - RNA, 19 nt, Artificial Sequence
  Synthetic
ggaagaaaagaggucugga

SEQ ID NO: 227767 - RNA, 20 nt, Artificial Sequence
  Synthetic
uggaagaaaagaggucugga

SEQ ID NO: 227768 - RNA, 21 nt, Artificial Sequence
  Synthetic
uuggaagaaaagaggucugga

SEQ ID NO: 227769 - RNA, 22 nt, Artificial Sequence
  Synthetic
uuuggaagaaaagaggucugga

SEQ ID NO: 227770 - RNA, 23 nt, Artificial Sequence
  Synthetic
guuuggaagaaaagaggucugga

SEQ ID NO: 227771 - RNA, 24 nt, Artificial Sequence
  Synthetic
gguuuggaagaaaagaggucugga

SEQ ID NO: 227772 - RNA, 18 nt, Artificial Sequence
  Synthetic
aggcaaacagggucugga

SEQ ID NO: 227773 - RNA, 19 nt, Artificial Sequence
  Synthetic
caggcaaacagggucugga

SEQ ID NO: 227774 - RNA, 20 nt, Artificial Sequence
  Synthetic
ucaggcaaacagggucugga

SEQ ID NO: 227775 - RNA, 21 nt, Artificial Sequence
  Synthetic
cucaggcaaacagggucugga

SEQ ID NO: 227776 - RNA, 22 nt, Artificial Sequence
  Synthetic
acucaggcaaacagggucugga

SEQ ID NO: 227777 - RNA, 23 nt, Artificial Sequence
  Synthetic
uacucaggcaaacagggucugga

SEQ ID NO: 227778 - RNA, 24 nt, Artificial Sequence
  Synthetic
auacucaggcaaacagggucugga

SEQ ID NO: 227779 - RNA, 18 nt, Artificial Sequence
  Synthetic
augucuuaguggucugga

SEQ ID NO: 227780 - RNA, 19 nt, Artificial Sequence
  Synthetic
aaugucuuaguggucugga

SEQ ID NO: 227781 - RNA, 20 nt, Artificial Sequence
  Synthetic
gaaugucuuaguggucugga

SEQ ID NO: 227782 - RNA, 21 nt, Artificial Sequence
  Synthetic
agaaugucuuaguggucugga

SEQ ID NO: 227783 - RNA, 22 nt, Artificial Sequence
  Synthetic
gagaaugucuuaguggucugga

SEQ ID NO: 227784 - RNA, 23 nt, Artificial Sequence
  Synthetic
ggagaaugucuuaguggucugga

SEQ ID NO: 227785 - RNA, 24 nt, Artificial Sequence
  Synthetic
uggagaaugucuuaguggucugga

SEQ ID NO: 227786 - RNA, 18 nt, Artificial Sequence
  Synthetic
ugauuaaguuggucugga

SEQ ID NO: 227787 - RNA, 19 nt, Artificial Sequence
  Synthetic
cugauuaaguuggucugga

SEQ ID NO: 227788 - RNA, 20 nt, Artificial Sequence
  Synthetic
acugauuaaguuggucugga

SEQ ID NO: 227789 - RNA, 21 nt, Artificial Sequence
  Synthetic
uacugauuaaguuggucugga

SEQ ID NO: 227790 - RNA, 22 nt, Artificial Sequence
  Synthetic
auacugauuaaguuggucugga

SEQ ID NO: 227791 - RNA, 23 nt, Artificial Sequence
  Synthetic
aauacugauuaaguuggucugga

SEQ ID NO: 227792 - RNA, 24 nt, Artificial Sequence
  Synthetic
aaauacugauuaaguuggucugga

SEQ ID NO: 227793 - RNA, 18 nt, Artificial Sequence
  Synthetic
uggacuucauauucugga

SEQ ID NO: 227794 - RNA, 19 nt, Artificial Sequence
  Synthetic
guggacuucauauucugga

SEQ ID NO: 227795 - RNA, 20 nt, Artificial Sequence
  Synthetic
aguggacuucauauucugga

SEQ ID NO: 227796 - RNA, 21 nt, Artificial Sequence
  Synthetic
uaguggacuucauauucugga

SEQ ID NO: 227797 - RNA, 22 nt, Artificial Sequence
  Synthetic
uuaguggacuucauauucugga

SEQ ID NO: 227798 - RNA, 23 nt, Artificial Sequence
  Synthetic
auuaguggacuucauauucugga

SEQ ID NO: 227799 - RNA, 24 nt, Artificial Sequence
  Synthetic
aauuaguggacuucauauucugga

SEQ ID NO: 227800 - RNA, 18 nt, Artificial Sequence
  Synthetic
auauucauuaguucugga

SEQ ID NO: 227801 - RNA, 19 nt, Artificial Sequence
  Synthetic
cauauucauuaguucugga

SEQ ID NO: 227802 - RNA, 20 nt, Artificial Sequence
  Synthetic
acauauucauuaguucugga

SEQ ID NO: 227803 - RNA, 21 nt, Artificial Sequence
  Synthetic
uacauauucauuaguucugga

SEQ ID NO: 227804 - RNA, 22 nt, Artificial Sequence
  Synthetic
cuacauauucauuaguucugga

SEQ ID NO: 227805 - RNA, 23 nt, Artificial Sequence
  Synthetic
acuacauauucauuaguucugga

SEQ ID NO: 227806 - RNA, 24 nt, Artificial Sequence
  Synthetic
cacuacauauucauuaguucugga

SEQ ID NO: 227807 - RNA, 18 nt, Artificial Sequence
  Synthetic
uauacuuaagaaagugga

SEQ ID NO: 227808 - RNA, 19 nt, Artificial Sequence
  Synthetic
cuauacuuaagaaagugga

SEQ ID NO: 227809 - RNA, 20 nt, Artificial Sequence
  Synthetic
ucuauacuuaagaaagugga

SEQ ID NO: 227810 - RNA, 21 nt, Artificial Sequence
  Synthetic
uucuauacuuaagaaagugga

SEQ ID NO: 227811 - RNA, 22 nt, Artificial Sequence
  Synthetic
auucuauacuuaagaaagugga

SEQ ID NO: 227812 - RNA, 23 nt, Artificial Sequence
  Synthetic
gauucuauacuuaagaaagugga

SEQ ID NO: 227813 - RNA, 24 nt, Artificial Sequence
  Synthetic
ugauucuauacuuaagaaagugga

SEQ ID NO: 227814 - RNA, 18 nt, Artificial Sequence
  Synthetic
aagaggaaaacaagugga

SEQ ID NO: 227815 - RNA, 19 nt, Artificial Sequence
  Synthetic
aaagaggaaaacaagugga

SEQ ID NO: 227816 - RNA, 20 nt, Artificial Sequence
  Synthetic
caaagaggaaaacaagugga

SEQ ID NO: 227817 - RNA, 21 nt, Artificial Sequence
  Synthetic
acaaagaggaaaacaagugga

SEQ ID NO: 227818 - RNA, 22 nt, Artificial Sequence
  Synthetic
aacaaagaggaaaacaagugga

SEQ ID NO: 227819 - RNA, 23 nt, Artificial Sequence
  Synthetic
gaacaaagaggaaaacaagugga

SEQ ID NO: 227820 - RNA, 24 nt, Artificial Sequence
  Synthetic
agaacaaagaggaaaacaagugga

SEQ ID NO: 227821 - RNA, 18 nt, Artificial Sequence
  Synthetic
ggguggaacacaagugga

SEQ ID NO: 227822 - RNA, 19 nt, Artificial Sequence
  Synthetic
aggguggaacacaagugga

SEQ ID NO: 227823 - RNA, 20 nt, Artificial Sequence
  Synthetic
gaggguggaacacaagugga

SEQ ID NO: 227824 - RNA, 21 nt, Artificial Sequence
  Synthetic
ggaggguggaacacaagugga

SEQ ID NO: 227825 - RNA, 22 nt, Artificial Sequence
  Synthetic
uggaggguggaacacaagugga

SEQ ID NO: 227826 - RNA, 23 nt, Artificial Sequence
  Synthetic
cuggaggguggaacacaagugga

SEQ ID NO: 227827 - RNA, 24 nt, Artificial Sequence
  Synthetic
acuggaggguggaacacaagugga

SEQ ID NO: 227828 - RNA, 18 nt, Artificial Sequence
  Synthetic
gccauggaugcaagugga

SEQ ID NO: 227829 - RNA, 19 nt, Artificial Sequence
  Synthetic
ggccauggaugcaagugga

SEQ ID NO: 227830 - RNA, 20 nt, Artificial Sequence
  Synthetic
aggccauggaugcaagugga

SEQ ID NO: 227831 - RNA, 21 nt, Artificial Sequence
  Synthetic
aaggccauggaugcaagugga

SEQ ID NO: 227832 - RNA, 22 nt, Artificial Sequence
  Synthetic
caaggccauggaugcaagugga

SEQ ID NO: 227833 - RNA, 23 nt, Artificial Sequence
  Synthetic
gcaaggccauggaugcaagugga

SEQ ID NO: 227834 - RNA, 24 nt, Artificial Sequence
  Synthetic
agcaaggccauggaugcaagugga

SEQ ID NO: 227835 - RNA, 18 nt, Artificial Sequence
  Synthetic
cacguaaaaucaagugga

SEQ ID NO: 227836 - RNA, 19 nt, Artificial Sequence
  Synthetic
gcacguaaaaucaagugga

SEQ ID NO: 227837 - RNA, 20 nt, Artificial Sequence
  Synthetic
ggcacguaaaaucaagugga

SEQ ID NO: 227838 - RNA, 21 nt, Artificial Sequence
  Synthetic
gggcacguaaaaucaagugga

SEQ ID NO: 227839 - RNA, 22 nt, Artificial Sequence
  Synthetic
ugggcacguaaaaucaagugga

SEQ ID NO: 227840 - RNA, 23 nt, Artificial Sequence
  Synthetic
gugggcacguaaaaucaagugga

SEQ ID NO: 227841 - RNA, 24 nt, Artificial Sequence
  Synthetic
ggugggcacguaaaaucaagugga

SEQ ID NO: 227842 - RNA, 18 nt, Artificial Sequence
  Synthetic
gacaaguagucaagugga

SEQ ID NO: 227843 - RNA, 19 nt, Artificial Sequence
  Synthetic
ugacaaguagucaagugga

SEQ ID NO: 227844 - RNA, 20 nt, Artificial Sequence
  Synthetic
augacaaguagucaagugga

SEQ ID NO: 227845 - RNA, 21 nt, Artificial Sequence
  Synthetic
aaugacaaguagucaagugga

SEQ ID NO: 227846 - RNA, 22 nt, Artificial Sequence
  Synthetic
aaaugacaaguagucaagugga

SEQ ID NO: 227847 - RNA, 23 nt, Artificial Sequence
  Synthetic
gaaaugacaaguagucaagugga

SEQ ID NO: 227848 - RNA, 24 nt, Artificial Sequence
  Synthetic
agaaaugacaaguagucaagugga

SEQ ID NO: 227849 - RNA, 18 nt, Artificial Sequence
  Synthetic
cuuuuauucagaagugga

SEQ ID NO: 227850 - RNA, 19 nt, Artificial Sequence
  Synthetic
acuuuuauucagaagugga

SEQ ID NO: 227851 - RNA, 20 nt, Artificial Sequence
  Synthetic
cacuuuuauucagaagugga

SEQ ID NO: 227852 - RNA, 21 nt, Artificial Sequence
  Synthetic
ucacuuuuauucagaagugga

SEQ ID NO: 227853 - RNA, 22 nt, Artificial Sequence
  Synthetic
uucacuuuuauucagaagugga

SEQ ID NO: 227854 - RNA, 23 nt, Artificial Sequence
  Synthetic
cuucacuuuuauucagaagugga

SEQ ID NO: 227855 - RNA, 24 nt, Artificial Sequence
  Synthetic
ucuucacuuuuauucagaagugga

SEQ ID NO: 227856 - RNA, 18 nt, Artificial Sequence
  Synthetic
auuguaccaggaagugga

SEQ ID NO: 227857 - RNA, 19 nt, Artificial Sequence
  Synthetic
aauuguaccaggaagugga

SEQ ID NO: 227858 - RNA, 20 nt, Artificial Sequence
  Synthetic
aaauuguaccaggaagugga

SEQ ID NO: 227859 - RNA, 21 nt, Artificial Sequence
  Synthetic
gaaauuguaccaggaagugga

SEQ ID NO: 227860 - RNA, 22 nt, Artificial Sequence
  Synthetic
agaaauuguaccaggaagugga

SEQ ID NO: 227861 - RNA, 23 nt, Artificial Sequence
  Synthetic
aagaaauuguaccaggaagugga

SEQ ID NO: 227862 - RNA, 24 nt, Artificial Sequence
  Synthetic
aaagaaauuguaccaggaagugga

SEQ ID NO: 227863 - RNA, 18 nt, Artificial Sequence
  Synthetic
acuagagaagacagugga

SEQ ID NO: 227864 - RNA, 19 nt, Artificial Sequence
  Synthetic
uacuagagaagacagugga

SEQ ID NO: 227865 - RNA, 20 nt, Artificial Sequence
  Synthetic
guacuagagaagacagugga

SEQ ID NO: 227866 - RNA, 21 nt, Artificial Sequence
  Synthetic
uguacuagagaagacagugga

SEQ ID NO: 227867 - RNA, 22 nt, Artificial Sequence
  Synthetic
cuguacuagagaagacagugga

SEQ ID NO: 227868 - RNA, 23 nt, Artificial Sequence
  Synthetic
ccuguacuagagaagacagugga

SEQ ID NO: 227869 - RNA, 24 nt, Artificial Sequence
  Synthetic
accuguacuagagaagacagugga

SEQ ID NO: 227870 - RNA, 18 nt, Artificial Sequence
  Synthetic
gacucuuccuacagugga

SEQ ID NO: 227871 - RNA, 19 nt, Artificial Sequence
  Synthetic
agacucuuccuacagugga

SEQ ID NO: 227872 - RNA, 20 nt, Artificial Sequence
  Synthetic
uagacucuuccuacagugga

SEQ ID NO: 227873 - RNA, 21 nt, Artificial Sequence
  Synthetic
guagacucuuccuacagugga

SEQ ID NO: 227874 - RNA, 22 nt, Artificial Sequence
  Synthetic
aguagacucuuccuacagugga

SEQ ID NO: 227875 - RNA, 23 nt, Artificial Sequence
  Synthetic
aaguagacucuuccuacagugga

SEQ ID NO: 227876 - RNA, 24 nt, Artificial Sequence
  Synthetic
aaaguagacucuuccuacagugga

SEQ ID NO: 227877 - RNA, 18 nt, Artificial Sequence
  Synthetic
cauuauuaaaagagugga

SEQ ID NO: 227878 - RNA, 19 nt, Artificial Sequence
  Synthetic
acauuauuaaaagagugga

SEQ ID NO: 227879 - RNA, 20 nt, Artificial Sequence
  Synthetic
uacauuauuaaaagagugga

SEQ ID NO: 227880 - RNA, 21 nt, Artificial Sequence
  Synthetic
auacauuauuaaaagagugga

SEQ ID NO: 227881 - RNA, 22 nt, Artificial Sequence
  Synthetic
cauacauuauuaaaagagugga

SEQ ID NO: 227882 - RNA, 23 nt, Artificial Sequence
  Synthetic
acauacauuauuaaaagagugga

SEQ ID NO: 227883 - RNA, 24 nt, Artificial Sequence
  Synthetic
uacauacauuauuaaaagagugga

SEQ ID NO: 227884 - RNA, 18 nt, Artificial Sequence
  Synthetic
aagcguggucagagugga

SEQ ID NO: 227885 - RNA, 19 nt, Artificial Sequence
  Synthetic
aaagcguggucagagugga

SEQ ID NO: 227886 - RNA, 20 nt, Artificial Sequence
  Synthetic
gaaagcguggucagagugga

SEQ ID NO: 227887 - RNA, 21 nt, Artificial Sequence
  Synthetic
ugaaagcguggucagagugga

SEQ ID NO: 227888 - RNA, 22 nt, Artificial Sequence
  Synthetic
uugaaagcguggucagagugga

SEQ ID NO: 227889 - RNA, 23 nt, Artificial Sequence
  Synthetic
cuugaaagcguggucagagugga

SEQ ID NO: 227890 - RNA, 24 nt, Artificial Sequence
  Synthetic
ucuugaaagcguggucagagugga

SEQ ID NO: 227891 - RNA, 18 nt, Artificial Sequence
  Synthetic
gggugguuugagagugga

SEQ ID NO: 227892 - RNA, 19 nt, Artificial Sequence
  Synthetic
agggugguuugagagugga

SEQ ID NO: 227893 - RNA, 20 nt, Artificial Sequence
  Synthetic
aagggugguuugagagugga

SEQ ID NO: 227894 - RNA, 21 nt, Artificial Sequence
  Synthetic
gaagggugguuugagagugga

SEQ ID NO: 227895 - RNA, 22 nt, Artificial Sequence
  Synthetic
ggaagggugguuugagagugga

SEQ ID NO: 227896 - RNA, 23 nt, Artificial Sequence
  Synthetic
uggaagggugguuugagagugga

SEQ ID NO: 227897 - RNA, 24 nt, Artificial Sequence
  Synthetic
guggaagggugguuugagagugga

SEQ ID NO: 227898 - RNA, 18 nt, Artificial Sequence
  Synthetic
ugaagaauauggagugga

SEQ ID NO: 227899 - RNA, 19 nt, Artificial Sequence
  Synthetic
uugaagaauauggagugga

SEQ ID NO: 227900 - RNA, 20 nt, Artificial Sequence
  Synthetic
auugaagaauauggagugga

SEQ ID NO: 227901 - RNA, 21 nt, Artificial Sequence
  Synthetic
gauugaagaauauggagugga

SEQ ID NO: 227902 - RNA, 22 nt, Artificial Sequence
  Synthetic
ugauugaagaauauggagugga

SEQ ID NO: 227903 - RNA, 23 nt, Artificial Sequence
  Synthetic
gugauugaagaauauggagugga

SEQ ID NO: 227904 - RNA, 24 nt, Artificial Sequence
  Synthetic
ggugauugaagaauauggagugga

SEQ ID NO: 227905 - RNA, 18 nt, Artificial Sequence
  Synthetic
agaauccauaugagugga

SEQ ID NO: 227906 - RNA, 19 nt, Artificial Sequence
  Synthetic
gagaauccauaugagugga

SEQ ID NO: 227907 - RNA, 20 nt, Artificial Sequence
  Synthetic
ugagaauccauaugagugga

SEQ ID NO: 227908 - RNA, 21 nt, Artificial Sequence
  Synthetic
gugagaauccauaugagugga

SEQ ID NO: 227909 - RNA, 22 nt, Artificial Sequence
  Synthetic
ugugagaauccauaugagugga

SEQ ID NO: 227910 - RNA, 23 nt, Artificial Sequence
  Synthetic
augugagaauccauaugagugga

SEQ ID NO: 227911 - RNA, 24 nt, Artificial Sequence
  Synthetic
caugugagaauccauaugagugga

SEQ ID NO: 227912 - RNA, 18 nt, Artificial Sequence
  Synthetic
ggguuggaauugagugga

SEQ ID NO: 227913 - RNA, 19 nt, Artificial Sequence
  Synthetic
aggguuggaauugagugga

SEQ ID NO: 227914 - RNA, 20 nt, Artificial Sequence
  Synthetic
gaggguuggaauugagugga

SEQ ID NO: 227915 - RNA, 21 nt, Artificial Sequence
  Synthetic
ugaggguuggaauugagugga

SEQ ID NO: 227916 - RNA, 22 nt, Artificial Sequence
  Synthetic
gugaggguuggaauugagugga

SEQ ID NO: 227917 - RNA, 23 nt, Artificial Sequence
  Synthetic
ggugaggguuggaauugagugga

SEQ ID NO: 227918 - RNA, 24 nt, Artificial Sequence
  Synthetic
gggugaggguuggaauugagugga

SEQ ID NO: 227919 - RNA, 18 nt, Artificial Sequence
  Synthetic
aacaccaaguauagugga

SEQ ID NO: 227920 - RNA, 19 nt, Artificial Sequence
  Synthetic
gaacaccaaguauagugga

SEQ ID NO: 227921 - RNA, 20 nt, Artificial Sequence
  Synthetic
agaacaccaaguauagugga

SEQ ID NO: 227922 - RNA, 21 nt, Artificial Sequence
  Synthetic
gagaacaccaaguauagugga

SEQ ID NO: 227923 - RNA, 22 nt, Artificial Sequence
  Synthetic
agagaacaccaaguauagugga

SEQ ID NO: 227924 - RNA, 23 nt, Artificial Sequence
  Synthetic
cagagaacaccaaguauagugga

SEQ ID NO: 227925 - RNA, 24 nt, Artificial Sequence
  Synthetic
ucagagaacaccaaguauagugga

SEQ ID NO: 227926 - RNA, 18 nt, Artificial Sequence
  Synthetic
agugugcggucuagugga

SEQ ID NO: 227927 - RNA, 19 nt, Artificial Sequence
  Synthetic
cagugugcggucuagugga

SEQ ID NO: 227928 - RNA, 20 nt, Artificial Sequence
  Synthetic
ccagugugcggucuagugga

SEQ ID NO: 227929 - RNA, 21 nt, Artificial Sequence
  Synthetic
cccagugugcggucuagugga

SEQ ID NO: 227930 - RNA, 22 nt, Artificial Sequence
  Synthetic
ucccagugugcggucuagugga

SEQ ID NO: 227931 - RNA, 23 nt, Artificial Sequence
  Synthetic
aucccagugugcggucuagugga

SEQ ID NO: 227932 - RNA, 24 nt, Artificial Sequence
  Synthetic
caucccagugugcggucuagugga

SEQ ID NO: 227933 - RNA, 18 nt, Artificial Sequence
  Synthetic
aagcuuccacaacgugga

SEQ ID NO: 227934 - RNA, 19 nt, Artificial Sequence
  Synthetic
aaagcuuccacaacgugga

SEQ ID NO: 227935 - RNA, 20 nt, Artificial Sequence
  Synthetic
caaagcuuccacaacgugga

SEQ ID NO: 227936 - RNA, 21 nt, Artificial Sequence
  Synthetic
acaaagcuuccacaacgugga

SEQ ID NO: 227937 - RNA, 22 nt, Artificial Sequence
  Synthetic
aacaaagcuuccacaacgugga

SEQ ID NO: 227938 - RNA, 23 nt, Artificial Sequence
  Synthetic
gaacaaagcuuccacaacgugga

SEQ ID NO: 227939 - RNA, 24 nt, Artificial Sequence
  Synthetic
agaacaaagcuuccacaacgugga

SEQ ID NO: 227940 - RNA, 18 nt, Artificial Sequence
  Synthetic
aggagggagaaaggugga

SEQ ID NO: 227941 - RNA, 19 nt, Artificial Sequence
  Synthetic
caggagggagaaaggugga

SEQ ID NO: 227942 - RNA, 20 nt, Artificial Sequence
  Synthetic
acaggagggagaaaggugga

SEQ ID NO: 227943 - RNA, 21 nt, Artificial Sequence
  Synthetic
gacaggagggagaaaggugga

SEQ ID NO: 227944 - RNA, 22 nt, Artificial Sequence
  Synthetic
agacaggagggagaaaggugga

SEQ ID NO: 227945 - RNA, 23 nt, Artificial Sequence
  Synthetic
gagacaggagggagaaaggugga

SEQ ID NO: 227946 - RNA, 24 nt, Artificial Sequence
  Synthetic
ggagacaggagggagaaaggugga

SEQ ID NO: 227947 - RNA, 18 nt, Artificial Sequence
  Synthetic
ugggcaccagaaggugga

SEQ ID NO: 227948 - RNA, 19 nt, Artificial Sequence
  Synthetic
augggcaccagaaggugga

SEQ ID NO: 227949 - RNA, 20 nt, Artificial Sequence
  Synthetic
uaugggcaccagaaggugga

SEQ ID NO: 227950 - RNA, 21 nt, Artificial Sequence
  Synthetic
auaugggcaccagaaggugga

SEQ ID NO: 227951 - RNA, 22 nt, Artificial Sequence
  Synthetic
aauaugggcaccagaaggugga

SEQ ID NO: 227952 - RNA, 23 nt, Artificial Sequence
  Synthetic
aaauaugggcaccagaaggugga

SEQ ID NO: 227953 - RNA, 24 nt, Artificial Sequence
  Synthetic
aaaauaugggcaccagaaggugga

SEQ ID NO: 227954 - RNA, 18 nt, Artificial Sequence
  Synthetic
cacauggggucaggugga

SEQ ID NO: 227955 - RNA, 19 nt, Artificial Sequence
  Synthetic
acacauggggucaggugga

SEQ ID NO: 227956 - RNA, 20 nt, Artificial Sequence
  Synthetic
gacacauggggucaggugga

SEQ ID NO: 227957 - RNA, 21 nt, Artificial Sequence
  Synthetic
agacacauggggucaggugga

SEQ ID NO: 227958 - RNA, 22 nt, Artificial Sequence
  Synthetic
uagacacauggggucaggugga

SEQ ID NO: 227959 - RNA, 23 nt, Artificial Sequence
  Synthetic
guagacacauggggucaggugga

SEQ ID NO: 227960 - RNA, 24 nt, Artificial Sequence
  Synthetic
gguagacacauggggucaggugga

SEQ ID NO: 227961 - RNA, 18 nt, Artificial Sequence
  Synthetic
agggagagaggaggugga

SEQ ID NO: 227962 - RNA, 19 nt, Artificial Sequence
  Synthetic
gagggagagaggaggugga

SEQ ID NO: 227963 - RNA, 20 nt, Artificial Sequence
  Synthetic
ggagggagagaggaggugga

SEQ ID NO: 227964 - RNA, 21 nt, Artificial Sequence
  Synthetic
gggagggagagaggaggugga

SEQ ID NO: 227965 - RNA, 22 nt, Artificial Sequence
  Synthetic
ugggagggagagaggaggugga

SEQ ID NO: 227966 - RNA, 23 nt, Artificial Sequence
  Synthetic
augggagggagagaggaggugga

SEQ ID NO: 227967 - RNA, 24 nt, Artificial Sequence
  Synthetic
uaugggagggagagaggaggugga

SEQ ID NO: 227968 - RNA, 18 nt, Artificial Sequence
  Synthetic
guaggcugaggaggugga

SEQ ID NO: 227969 - RNA, 19 nt, Artificial Sequence
  Synthetic
aguaggcugaggaggugga

SEQ ID NO: 227970 - RNA, 20 nt, Artificial Sequence
  Synthetic
aaguaggcugaggaggugga

SEQ ID NO: 227971 - RNA, 21 nt, Artificial Sequence
  Synthetic
uaaguaggcugaggaggugga

SEQ ID NO: 227972 - RNA, 22 nt, Artificial Sequence
  Synthetic
uuaaguaggcugaggaggugga

SEQ ID NO: 227973 - RNA, 23 nt, Artificial Sequence
  Synthetic
guuaaguaggcugaggaggugga

SEQ ID NO: 227974 - RNA, 24 nt, Artificial Sequence
  Synthetic
cguuaaguaggcugaggaggugga

SEQ ID NO: 227975 - RNA, 18 nt, Artificial Sequence
  Synthetic
agaggcuugggaggugga

SEQ ID NO: 227976 - RNA, 19 nt, Artificial Sequence
  Synthetic
cagaggcuugggaggugga

SEQ ID NO: 227977 - RNA, 20 nt, Artificial Sequence
  Synthetic
acagaggcuugggaggugga

SEQ ID NO: 227978 - RNA, 21 nt, Artificial Sequence
  Synthetic
aacagaggcuugggaggugga

SEQ ID NO: 227979 - RNA, 22 nt, Artificial Sequence
  Synthetic
uaacagaggcuugggaggugga

SEQ ID NO: 227980 - RNA, 23 nt, Artificial Sequence
  Synthetic
uuaacagaggcuugggaggugga

SEQ ID NO: 227981 - RNA, 24 nt, Artificial Sequence
  Synthetic
guuaacagaggcuugggaggugga

SEQ ID NO: 227982 - RNA, 18 nt, Artificial Sequence
  Synthetic
guaugugugugaggugga

SEQ ID NO: 227983 - RNA, 19 nt, Artificial Sequence
  Synthetic
aguaugugugugaggugga

SEQ ID NO: 227984 - RNA, 20 nt, Artificial Sequence
  Synthetic
aaguaugugugugaggugga

SEQ ID NO: 227985 - RNA, 21 nt, Artificial Sequence
  Synthetic
uaaguaugugugugaggugga

SEQ ID NO: 227986 - RNA, 22 nt, Artificial Sequence
  Synthetic
auaaguaugugugugaggugga

SEQ ID NO: 227987 - RNA, 23 nt, Artificial Sequence
  Synthetic
uauaaguaugugugugaggugga

SEQ ID NO: 227988 - RNA, 24 nt, Artificial Sequence
  Synthetic
guauaaguaugugugugaggugga

SEQ ID NO: 227989 - RNA, 18 nt, Artificial Sequence
  Synthetic
gcaccuugagagggugga

SEQ ID NO: 227990 - RNA, 19 nt, Artificial Sequence
  Synthetic
ugcaccuugagagggugga

SEQ ID NO: 227991 - RNA, 20 nt, Artificial Sequence
  Synthetic
augcaccuugagagggugga

SEQ ID NO: 227992 - RNA, 21 nt, Artificial Sequence
  Synthetic
uaugcaccuugagagggugga

SEQ ID NO: 227993 - RNA, 22 nt, Artificial Sequence
  Synthetic
uuaugcaccuugagagggugga

SEQ ID NO: 227994 - RNA, 23 nt, Artificial Sequence
  Synthetic
guuaugcaccuugagagggugga

SEQ ID NO: 227995 - RNA, 24 nt, Artificial Sequence
  Synthetic
aguuaugcaccuugagagggugga

SEQ ID NO: 227996 - RNA, 18 nt, Artificial Sequence
  Synthetic
ggguuugcuuguggugga

SEQ ID NO: 227997 - RNA, 19 nt, Artificial Sequence
  Synthetic
aggguuugcuuguggugga

SEQ ID NO: 227998 - RNA, 20 nt, Artificial Sequence
  Synthetic
uaggguuugcuuguggugga

SEQ ID NO: 227999 - RNA, 21 nt, Artificial Sequence
  Synthetic
uuaggguuugcuuguggugga

SEQ ID NO: 228000 - RNA, 22 nt, Artificial Sequence
  Synthetic
cuuaggguuugcuuguggugga

SEQ ID NO: 228001 - RNA, 23 nt, Artificial Sequence
  Synthetic
acuuaggguuugcuuguggugga

SEQ ID NO: 228002 - RNA, 24 nt, Artificial Sequence
  Synthetic
cacuuaggguuugcuuguggugga

SEQ ID NO: 228003 - RNA, 18 nt, Artificial Sequence
  Synthetic
gaccuuaugacaugugga

SEQ ID NO: 228004 - RNA, 19 nt, Artificial Sequence
  Synthetic
agaccuuaugacaugugga

SEQ ID NO: 228005 - RNA, 20 nt, Artificial Sequence
  Synthetic
gagaccuuaugacaugugga

SEQ ID NO: 228006 - RNA, 21 nt, Artificial Sequence
  Synthetic
agagaccuuaugacaugugga

SEQ ID NO: 228007 - RNA, 22 nt, Artificial Sequence
  Synthetic
aagagaccuuaugacaugugga

SEQ ID NO: 228008 - RNA, 23 nt, Artificial Sequence
  Synthetic
gaagagaccuuaugacaugugga

SEQ ID NO: 228009 - RNA, 24 nt, Artificial Sequence
  Synthetic
ggaagagaccuuaugacaugugga

SEQ ID NO: 228010 - RNA, 18 nt, Artificial Sequence
  Synthetic
aagagaggcaacugugga

SEQ ID NO: 228011 - RNA, 19 nt, Artificial Sequence
  Synthetic
gaagagaggcaacugugga

SEQ ID NO: 228012 - RNA, 20 nt, Artificial Sequence
  Synthetic
agaagagaggcaacugugga

SEQ ID NO: 228013 - RNA, 21 nt, Artificial Sequence
  Synthetic
cagaagagaggcaacugugga

SEQ ID NO: 228014 - RNA, 22 nt, Artificial Sequence
  Synthetic
acagaagagaggcaacugugga

SEQ ID NO: 228015 - RNA, 23 nt, Artificial Sequence
  Synthetic
aacagaagagaggcaacugugga

SEQ ID NO: 228016 - RNA, 24 nt, Artificial Sequence
  Synthetic
aaacagaagagaggcaacugugga

SEQ ID NO: 228017 - RNA, 18 nt, Artificial Sequence
  Synthetic
ugaaaccuccucugugga

SEQ ID NO: 228018 - RNA, 19 nt, Artificial Sequence
  Synthetic
augaaaccuccucugugga

SEQ ID NO: 228019 - RNA, 20 nt, Artificial Sequence
  Synthetic
uaugaaaccuccucugugga

SEQ ID NO: 228020 - RNA, 21 nt, Artificial Sequence
  Synthetic
auaugaaaccuccucugugga

SEQ ID NO: 228021 - RNA, 22 nt, Artificial Sequence
  Synthetic
uauaugaaaccuccucugugga

SEQ ID NO: 228022 - RNA, 23 nt, Artificial Sequence
  Synthetic
auauaugaaaccuccucugugga

SEQ ID NO: 228023 - RNA, 24 nt, Artificial Sequence
  Synthetic
uauauaugaaaccuccucugugga

SEQ ID NO: 228024 - RNA, 18 nt, Artificial Sequence
  Synthetic
uuuaugagugggugugga

SEQ ID NO: 228025 - RNA, 19 nt, Artificial Sequence
  Synthetic
guuuaugagugggugugga

SEQ ID NO: 228026 - RNA, 20 nt, Artificial Sequence
  Synthetic
uguuuaugagugggugugga

SEQ ID NO: 228027 - RNA, 21 nt, Artificial Sequence
  Synthetic
auguuuaugagugggugugga

SEQ ID NO: 228028 - RNA, 22 nt, Artificial Sequence
  Synthetic
aauguuuaugagugggugugga

SEQ ID NO: 228029 - RNA, 23 nt, Artificial Sequence
  Synthetic
uaauguuuaugagugggugugga

SEQ ID NO: 228030 - RNA, 24 nt, Artificial Sequence
  Synthetic
uuaauguuuaugagugggugugga

SEQ ID NO: 228031 - RNA, 18 nt, Artificial Sequence
  Synthetic
augcagacugugugugga

SEQ ID NO: 228032 - RNA, 19 nt, Artificial Sequence
  Synthetic
aaugcagacugugugugga

SEQ ID NO: 228033 - RNA, 20 nt, Artificial Sequence
  Synthetic
uaaugcagacugugugugga

SEQ ID NO: 228034 - RNA, 21 nt, Artificial Sequence
  Synthetic
guaaugcagacugugugugga

SEQ ID NO: 228035 - RNA, 22 nt, Artificial Sequence
  Synthetic
gguaaugcagacugugugugga

SEQ ID NO: 228036 - RNA, 23 nt, Artificial Sequence
  Synthetic
agguaaugcagacugugugugga

SEQ ID NO: 228037 - RNA, 24 nt, Artificial Sequence
  Synthetic
cagguaaugcagacugugugugga

SEQ ID NO: 228038 - RNA, 18 nt, Artificial Sequence
  Synthetic
cugaacccacauugugga

SEQ ID NO: 228039 - RNA, 19 nt, Artificial Sequence
  Synthetic
gcugaacccacauugugga

SEQ ID NO: 228040 - RNA, 20 nt, Artificial Sequence
  Synthetic
agcugaacccacauugugga

SEQ ID NO: 228041 - RNA, 21 nt, Artificial Sequence
  Synthetic
gagcugaacccacauugugga

SEQ ID NO: 228042 - RNA, 22 nt, Artificial Sequence
  Synthetic
agagcugaacccacauugugga

SEQ ID NO: 228043 - RNA, 23 nt, Artificial Sequence
  Synthetic
aagagcugaacccacauugugga

SEQ ID NO: 228044 - RNA, 24 nt, Artificial Sequence
  Synthetic
aaagagcugaacccacauugugga

SEQ ID NO: 228045 - RNA, 18 nt, Artificial Sequence
  Synthetic
auuaagucccauugugga

SEQ ID NO: 228046 - RNA, 19 nt, Artificial Sequence
  Synthetic
aauuaagucccauugugga

SEQ ID NO: 228047 - RNA, 20 nt, Artificial Sequence
  Synthetic
aaauuaagucccauugugga

SEQ ID NO: 228048 - RNA, 21 nt, Artificial Sequence
  Synthetic
gaaauuaagucccauugugga

SEQ ID NO: 228049 - RNA, 22 nt, Artificial Sequence
  Synthetic
agaaauuaagucccauugugga

SEQ ID NO: 228050 - RNA, 23 nt, Artificial Sequence
  Synthetic
cagaaauuaagucccauugugga

SEQ ID NO: 228051 - RNA, 24 nt, Artificial Sequence
  Synthetic
gcagaaauuaagucccauugugga

SEQ ID NO: 228052 - RNA, 18 nt, Artificial Sequence
  Synthetic
cccagaaaaacuugugga

SEQ ID NO: 228053 - RNA, 19 nt, Artificial Sequence
  Synthetic
ucccagaaaaacuugugga

SEQ ID NO: 228054 - RNA, 20 nt, Artificial Sequence
  Synthetic
aucccagaaaaacuugugga

SEQ ID NO: 228055 - RNA, 21 nt, Artificial Sequence
  Synthetic
gaucccagaaaaacuugugga

SEQ ID NO: 228056 - RNA, 22 nt, Artificial Sequence
  Synthetic
ggaucccagaaaaacuugugga

SEQ ID NO: 228057 - RNA, 23 nt, Artificial Sequence
  Synthetic
aggaucccagaaaaacuugugga

SEQ ID NO: 228058 - RNA, 24 nt, Artificial Sequence
  Synthetic
caggaucccagaaaaacuugugga

SEQ ID NO: 228059 - RNA, 18 nt, Artificial Sequence
  Synthetic
uaauggugcguuugugga

SEQ ID NO: 228060 - RNA, 19 nt, Artificial Sequence
  Synthetic
uuaauggugcguuugugga

SEQ ID NO: 228061 - RNA, 20 nt, Artificial Sequence
  Synthetic
uuuaauggugcguuugugga

SEQ ID NO: 228062 - RNA, 21 nt, Artificial Sequence
  Synthetic
guuuaauggugcguuugugga

SEQ ID NO: 228063 - RNA, 22 nt, Artificial Sequence
  Synthetic
gguuuaauggugcguuugugga

SEQ ID NO: 228064 - RNA, 23 nt, Artificial Sequence
  Synthetic
agguuuaauggugcguuugugga

SEQ ID NO: 228065 - RNA, 24 nt, Artificial Sequence
  Synthetic
cagguuuaauggugcguuugugga

SEQ ID NO: 228066 - RNA, 18 nt, Artificial Sequence
  Synthetic
gugggcaagaaaauugga

SEQ ID NO: 228067 - RNA, 19 nt, Artificial Sequence
  Synthetic
agugggcaagaaaauugga

SEQ ID NO: 228068 - RNA, 20 nt, Artificial Sequence
  Synthetic
aagugggcaagaaaauugga

SEQ ID NO: 228069 - RNA, 21 nt, Artificial Sequence
  Synthetic
aaagugggcaagaaaauugga

SEQ ID NO: 228070 - RNA, 22 nt, Artificial Sequence
  Synthetic
aaaagugggcaagaaaauugga

SEQ ID NO: 228071 - RNA, 23 nt, Artificial Sequence
  Synthetic
aaaaagugggcaagaaaauugga

SEQ ID NO: 228072 - RNA, 24 nt, Artificial Sequence
  Synthetic
caaaaagugggcaagaaaauugga

SEQ ID NO: 228073 - RNA, 18 nt, Artificial Sequence
  Synthetic
uuaaaaagguaaauugga

SEQ ID NO: 228074 - RNA, 19 nt, Artificial Sequence
  Synthetic
uuuaaaaagguaaauugga

SEQ ID NO: 228075 - RNA, 20 nt, Artificial Sequence
  Synthetic
auuuaaaaagguaaauugga

SEQ ID NO: 228076 - RNA, 21 nt, Artificial Sequence
  Synthetic
cauuuaaaaagguaaauugga

SEQ ID NO: 228077 - RNA, 22 nt, Artificial Sequence
  Synthetic
ucauuuaaaaagguaaauugga

SEQ ID NO: 228078 - RNA, 23 nt, Artificial Sequence
  Synthetic
uucauuuaaaaagguaaauugga

SEQ ID NO: 228079 - RNA, 24 nt, Artificial Sequence
  Synthetic
cuucauuuaaaaagguaaauugga

SEQ ID NO: 228080 - RNA, 18 nt, Artificial Sequence
  Synthetic
uccuaaauuuaaauugga

SEQ ID NO: 228081 - RNA, 19 nt, Artificial Sequence
  Synthetic
guccuaaauuuaaauugga

SEQ ID NO: 228082 - RNA, 20 nt, Artificial Sequence
  Synthetic
gguccuaaauuuaaauugga

SEQ ID NO: 228083 - RNA, 21 nt, Artificial Sequence
  Synthetic
agguccuaaauuuaaauugga

SEQ ID NO: 228084 - RNA, 22 nt, Artificial Sequence
  Synthetic
gagguccuaaauuuaaauugga

SEQ ID NO: 228085 - RNA, 23 nt, Artificial Sequence
  Synthetic
agagguccuaaauuuaaauugga

SEQ ID NO: 228086 - RNA, 24 nt, Artificial Sequence
  Synthetic
cagagguccuaaauuuaaauugga

SEQ ID NO: 228087 - RNA, 18 nt, Artificial Sequence
  Synthetic
gauaccauugcaauugga

SEQ ID NO: 228088 - RNA, 19 nt, Artificial Sequence
  Synthetic
ggauaccauugcaauugga

SEQ ID NO: 228089 - RNA, 20 nt, Artificial Sequence
  Synthetic
uggauaccauugcaauugga

SEQ ID NO: 228090 - RNA, 21 nt, Artificial Sequence
  Synthetic
auggauaccauugcaauugga

SEQ ID NO: 228091 - RNA, 22 nt, Artificial Sequence
  Synthetic
cauggauaccauugcaauugga

SEQ ID NO: 228092 - RNA, 23 nt, Artificial Sequence
  Synthetic
ccauggauaccauugcaauugga

SEQ ID NO: 228093 - RNA, 24 nt, Artificial Sequence
  Synthetic
accauggauaccauugcaauugga

SEQ ID NO: 228094 - RNA, 18 nt, Artificial Sequence
  Synthetic
auugaaugcagaauugga

SEQ ID NO: 228095 - RNA, 19 nt, Artificial Sequence
  Synthetic
cauugaaugcagaauugga

SEQ ID NO: 228096 - RNA, 20 nt, Artificial Sequence
  Synthetic
ucauugaaugcagaauugga

SEQ ID NO: 228097 - RNA, 21 nt, Artificial Sequence
  Synthetic
gucauugaaugcagaauugga

SEQ ID NO: 228098 - RNA, 22 nt, Artificial Sequence
  Synthetic
cgucauugaaugcagaauugga

SEQ ID NO: 228099 - RNA, 23 nt, Artificial Sequence
  Synthetic
acgucauugaaugcagaauugga

SEQ ID NO: 228100 - RNA, 24 nt, Artificial Sequence
  Synthetic
gacgucauugaaugcagaauugga

SEQ ID NO: 228101 - RNA, 18 nt, Artificial Sequence
  Synthetic
acacaaucuugcauugga

SEQ ID NO: 228102 - RNA, 19 nt, Artificial Sequence
  Synthetic
uacacaaucuugcauugga

SEQ ID NO: 228103 - RNA, 20 nt, Artificial Sequence
  Synthetic
guacacaaucuugcauugga

SEQ ID NO: 228104 - RNA, 21 nt, Artificial Sequence
  Synthetic
gguacacaaucuugcauugga

SEQ ID NO: 228105 - RNA, 22 nt, Artificial Sequence
  Synthetic
ugguacacaaucuugcauugga

SEQ ID NO: 228106 - RNA, 23 nt, Artificial Sequence
  Synthetic
cugguacacaaucuugcauugga

SEQ ID NO: 228107 - RNA, 24 nt, Artificial Sequence
  Synthetic
ccugguacacaaucuugcauugga

SEQ ID NO: 228108 - RNA, 18 nt, Artificial Sequence
  Synthetic
guaacuuggaagauugga

SEQ ID NO: 228109 - RNA, 19 nt, Artificial Sequence
  Synthetic
uguaacuuggaagauugga

SEQ ID NO: 228110 - RNA, 20 nt, Artificial Sequence
  Synthetic
cuguaacuuggaagauugga

SEQ ID NO: 228111 - RNA, 21 nt, Artificial Sequence
  Synthetic
gcuguaacuuggaagauugga

SEQ ID NO: 228112 - RNA, 22 nt, Artificial Sequence
  Synthetic
ugcuguaacuuggaagauugga

SEQ ID NO: 228113 - RNA, 23 nt, Artificial Sequence
  Synthetic
cugcuguaacuuggaagauugga

SEQ ID NO: 228114 - RNA, 24 nt, Artificial Sequence
  Synthetic
acugcuguaacuuggaagauugga

SEQ ID NO: 228115 - RNA, 18 nt, Artificial Sequence
  Synthetic
ggugggggugagauugga

SEQ ID NO: 228116 - RNA, 19 nt, Artificial Sequence
  Synthetic
gggugggggugagauugga

SEQ ID NO: 228117 - RNA, 20 nt, Artificial Sequence
  Synthetic
ggggugggggugagauugga

SEQ ID NO: 228118 - RNA, 21 nt, Artificial Sequence
  Synthetic
uggggugggggugagauugga

SEQ ID NO: 228119 - RNA, 22 nt, Artificial Sequence
  Synthetic
guggggugggggugagauugga

SEQ ID NO: 228120 - RNA, 23 nt, Artificial Sequence
  Synthetic
aguggggugggggugagauugga

SEQ ID NO: 228121 - RNA, 24 nt, Artificial Sequence
  Synthetic
caguggggugggggugagauugga

SEQ ID NO: 228122 - RNA, 18 nt, Artificial Sequence
  Synthetic
cuuagaagcaggauugga

SEQ ID NO: 228123 - RNA, 19 nt, Artificial Sequence
  Synthetic
gcuuagaagcaggauugga

SEQ ID NO: 228124 - RNA, 20 nt, Artificial Sequence
  Synthetic
ggcuuagaagcaggauugga

SEQ ID NO: 228125 - RNA, 21 nt, Artificial Sequence
  Synthetic
gggcuuagaagcaggauugga

SEQ ID NO: 228126 - RNA, 22 nt, Artificial Sequence
  Synthetic
agggcuuagaagcaggauugga

SEQ ID NO: 228127 - RNA, 23 nt, Artificial Sequence
  Synthetic
gagggcuuagaagcaggauugga

SEQ ID NO: 228128 - RNA, 24 nt, Artificial Sequence
  Synthetic
agagggcuuagaagcaggauugga

SEQ ID NO: 228129 - RNA, 18 nt, Artificial Sequence
  Synthetic
uuuucauacauuauugga

SEQ ID NO: 228130 - RNA, 19 nt, Artificial Sequence
  Synthetic
auuuucauacauuauugga

SEQ ID NO: 228131 - RNA, 20 nt, Artificial Sequence
  Synthetic
gauuuucauacauuauugga

SEQ ID NO: 228132 - RNA, 21 nt, Artificial Sequence
  Synthetic
agauuuucauacauuauugga

SEQ ID NO: 228133 - RNA, 22 nt, Artificial Sequence
  Synthetic
cagauuuucauacauuauugga

SEQ ID NO: 228134 - RNA, 23 nt, Artificial Sequence
  Synthetic
acagauuuucauacauuauugga

SEQ ID NO: 228135 - RNA, 24 nt, Artificial Sequence
  Synthetic
gacagauuuucauacauuauugga

SEQ ID NO: 228136 - RNA, 18 nt, Artificial Sequence
  Synthetic
ugaauggggauuauugga

SEQ ID NO: 228137 - RNA, 19 nt, Artificial Sequence
  Synthetic
uugaauggggauuauugga

SEQ ID NO: 228138 - RNA, 20 nt, Artificial Sequence
  Synthetic
cuugaauggggauuauugga

SEQ ID NO: 228139 - RNA, 21 nt, Artificial Sequence
  Synthetic
acuugaauggggauuauugga

SEQ ID NO: 228140 - RNA, 22 nt, Artificial Sequence
  Synthetic
uacuugaauggggauuauugga

SEQ ID NO: 228141 - RNA, 23 nt, Artificial Sequence
  Synthetic
uuacuugaauggggauuauugga

SEQ ID NO: 228142 - RNA, 24 nt, Artificial Sequence
  Synthetic
guuacuugaauggggauuauugga

SEQ ID NO: 228143 - RNA, 18 nt, Artificial Sequence
  Synthetic
gugaucaaaaaacuugga

SEQ ID NO: 228144 - RNA, 19 nt, Artificial Sequence
  Synthetic
ggugaucaaaaaacuugga

SEQ ID NO: 228145 - RNA, 20 nt, Artificial Sequence
  Synthetic
aggugaucaaaaaacuugga

SEQ ID NO: 228146 - RNA, 21 nt, Artificial Sequence
  Synthetic
aaggugaucaaaaaacuugga

SEQ ID NO: 228147 - RNA, 22 nt, Artificial Sequence
  Synthetic
aaaggugaucaaaaaacuugga

SEQ ID NO: 228148 - RNA, 23 nt, Artificial Sequence
  Synthetic
uaaaggugaucaaaaaacuugga

SEQ ID NO: 228149 - RNA, 24 nt, Artificial Sequence
  Synthetic
uuaaaggugaucaaaaaacuugga

SEQ ID NO: 228150 - RNA, 18 nt, Artificial Sequence
  Synthetic
aagacacuggagcuugga

SEQ ID NO: 228151 - RNA, 19 nt, Artificial Sequence
  Synthetic
gaagacacuggagcuugga

SEQ ID NO: 228152 - RNA, 20 nt, Artificial Sequence
  Synthetic
ggaagacacuggagcuugga

SEQ ID NO: 228153 - RNA, 21 nt, Artificial Sequence
  Synthetic
gggaagacacuggagcuugga

SEQ ID NO: 228154 - RNA, 22 nt, Artificial Sequence
  Synthetic
ggggaagacacuggagcuugga

SEQ ID NO: 228155 - RNA, 23 nt, Artificial Sequence
  Synthetic
uggggaagacacuggagcuugga

SEQ ID NO: 228156 - RNA, 24 nt, Artificial Sequence
  Synthetic
auggggaagacacuggagcuugga

SEQ ID NO: 228157 - RNA, 18 nt, Artificial Sequence
  Synthetic
gugguauaauagcuugga

SEQ ID NO: 228158 - RNA, 19 nt, Artificial Sequence
  Synthetic
ugugguauaauagcuugga

SEQ ID NO: 228159 - RNA, 20 nt, Artificial Sequence
  Synthetic
gugugguauaauagcuugga

SEQ ID NO: 228160 - RNA, 21 nt, Artificial Sequence
  Synthetic
cgugugguauaauagcuugga

SEQ ID NO: 228161 - RNA, 22 nt, Artificial Sequence
  Synthetic
ccgugugguauaauagcuugga

SEQ ID NO: 228162 - RNA, 23 nt, Artificial Sequence
  Synthetic
uccgugugguauaauagcuugga

SEQ ID NO: 228163 - RNA, 24 nt, Artificial Sequence
  Synthetic
uuccgugugguauaauagcuugga

SEQ ID NO: 228164 - RNA, 18 nt, Artificial Sequence
  Synthetic
gagcuucacagucuugga

SEQ ID NO: 228165 - RNA, 19 nt, Artificial Sequence
  Synthetic
agagcuucacagucuugga

SEQ ID NO: 228166 - RNA, 20 nt, Artificial Sequence
  Synthetic
aagagcuucacagucuugga

SEQ ID NO: 228167 - RNA, 21 nt, Artificial Sequence
  Synthetic
gaagagcuucacagucuugga

SEQ ID NO: 228168 - RNA, 22 nt, Artificial Sequence
  Synthetic
ugaagagcuucacagucuugga

SEQ ID NO: 228169 - RNA, 23 nt, Artificial Sequence
  Synthetic
uugaagagcuucacagucuugga

SEQ ID NO: 228170 - RNA, 24 nt, Artificial Sequence
  Synthetic
uuugaagagcuucacagucuugga

SEQ ID NO: 228171 - RNA, 18 nt, Artificial Sequence
  Synthetic
aaaacaaaaauucuugga

SEQ ID NO: 228172 - RNA, 19 nt, Artificial Sequence
  Synthetic
aaaaacaaaaauucuugga

SEQ ID NO: 228173 - RNA, 20 nt, Artificial Sequence
  Synthetic
uaaaaacaaaaauucuugga

SEQ ID NO: 228174 - RNA, 21 nt, Artificial Sequence
  Synthetic
guaaaaacaaaaauucuugga

SEQ ID NO: 228175 - RNA, 22 nt, Artificial Sequence
  Synthetic
uguaaaaacaaaaauucuugga

SEQ ID NO: 228176 - RNA, 23 nt, Artificial Sequence
  Synthetic
auguaaaaacaaaaauucuugga

SEQ ID NO: 228177 - RNA, 24 nt, Artificial Sequence
  Synthetic
aauguaaaaacaaaaauucuugga

SEQ ID NO: 228178 - RNA, 18 nt, Artificial Sequence
  Synthetic
acacuacugcuucuugga

SEQ ID NO: 228179 - RNA, 19 nt, Artificial Sequence
  Synthetic
uacacuacugcuucuugga

SEQ ID NO: 228180 - RNA, 20 nt, Artificial Sequence
  Synthetic
uuacacuacugcuucuugga

SEQ ID NO: 228181 - RNA, 21 nt, Artificial Sequence
  Synthetic
auuacacuacugcuucuugga

SEQ ID NO: 228182 - RNA, 22 nt, Artificial Sequence
  Synthetic
aauuacacuacugcuucuugga

SEQ ID NO: 228183 - RNA, 23 nt, Artificial Sequence
  Synthetic
aaauuacacuacugcuucuugga

SEQ ID NO: 228184 - RNA, 24 nt, Artificial Sequence
  Synthetic
aaaauuacacuacugcuucuugga

SEQ ID NO: 228185 - RNA, 18 nt, Artificial Sequence
  Synthetic
uuccauuucuuucuugga

SEQ ID NO: 228186 - RNA, 19 nt, Artificial Sequence
  Synthetic
uuuccauuucuuucuugga

SEQ ID NO: 228187 - RNA, 20 nt, Artificial Sequence
  Synthetic
uuuuccauuucuuucuugga

SEQ ID NO: 228188 - RNA, 21 nt, Artificial Sequence
  Synthetic
auuuuccauuucuuucuugga

SEQ ID NO: 228189 - RNA, 22 nt, Artificial Sequence
  Synthetic
aauuuuccauuucuuucuugga

SEQ ID NO: 228190 - RNA, 23 nt, Artificial Sequence
  Synthetic
uaauuuuccauuucuuucuugga

SEQ ID NO: 228191 - RNA, 24 nt, Artificial Sequence
  Synthetic
uuaauuuuccauuucuuucuugga

SEQ ID NO: 228192 - RNA, 18 nt, Artificial Sequence
  Synthetic
ucaaauuuuucaguugga

SEQ ID NO: 228193 - RNA, 19 nt, Artificial Sequence
  Synthetic
uucaaauuuuucaguugga

SEQ ID NO: 228194 - RNA, 20 nt, Artificial Sequence
  Synthetic
auucaaauuuuucaguugga

SEQ ID NO: 228195 - RNA, 21 nt, Artificial Sequence
  Synthetic
gauucaaauuuuucaguugga

SEQ ID NO: 228196 - RNA, 22 nt, Artificial Sequence
  Synthetic
agauucaaauuuuucaguugga

SEQ ID NO: 228197 - RNA, 23 nt, Artificial Sequence
  Synthetic
uagauucaaauuuuucaguugga

SEQ ID NO: 228198 - RNA, 24 nt, Artificial Sequence
  Synthetic
auagauucaaauuuuucaguugga

SEQ ID NO: 228199 - RNA, 18 nt, Artificial Sequence
  Synthetic
guauuacaggagguugga

SEQ ID NO: 228200 - RNA, 19 nt, Artificial Sequence
  Synthetic
aguauuacaggagguugga

SEQ ID NO: 228201 - RNA, 20 nt, Artificial Sequence
  Synthetic
gaguauuacaggagguugga

SEQ ID NO: 228202 - RNA, 21 nt, Artificial Sequence
  Synthetic
ggaguauuacaggagguugga

SEQ ID NO: 228203 - RNA, 22 nt, Artificial Sequence
  Synthetic
uggaguauuacaggagguugga

SEQ ID NO: 228204 - RNA, 23 nt, Artificial Sequence
  Synthetic
auggaguauuacaggagguugga

SEQ ID NO: 228205 - RNA, 24 nt, Artificial Sequence
  Synthetic
aauggaguauuacaggagguugga

SEQ ID NO: 228206 - RNA, 18 nt, Artificial Sequence
  Synthetic
ggcagcagugagguugga

SEQ ID NO: 228207 - RNA, 19 nt, Artificial Sequence
  Synthetic
gggcagcagugagguugga

SEQ ID NO: 228208 - RNA, 20 nt, Artificial Sequence
  Synthetic
agggcagcagugagguugga

SEQ ID NO: 228209 - RNA, 21 nt, Artificial Sequence
  Synthetic
gagggcagcagugagguugga

SEQ ID NO: 228210 - RNA, 22 nt, Artificial Sequence
  Synthetic
ugagggcagcagugagguugga

SEQ ID NO: 228211 - RNA, 23 nt, Artificial Sequence
  Synthetic
cugagggcagcagugagguugga

SEQ ID NO: 228212 - RNA, 24 nt, Artificial Sequence
  Synthetic
gcugagggcagcagugagguugga

SEQ ID NO: 228213 - RNA, 18 nt, Artificial Sequence
  Synthetic
guagaaggugagguugga

SEQ ID NO: 228214 - RNA, 19 nt, Artificial Sequence
  Synthetic
aguagaaggugagguugga

SEQ ID NO: 228215 - RNA, 20 nt, Artificial Sequence
  Synthetic
aaguagaaggugagguugga

SEQ ID NO: 228216 - RNA, 21 nt, Artificial Sequence
  Synthetic
aaaguagaaggugagguugga

SEQ ID NO: 228217 - RNA, 22 nt, Artificial Sequence
  Synthetic
uaaaguagaaggugagguugga

SEQ ID NO: 228218 - RNA, 23 nt, Artificial Sequence
  Synthetic
auaaaguagaaggugagguugga

SEQ ID NO: 228219 - RNA, 24 nt, Artificial Sequence
  Synthetic
cauaaaguagaaggugagguugga

SEQ ID NO: 228220 - RNA, 18 nt, Artificial Sequence
  Synthetic
guugggccugggguugga

SEQ ID NO: 228221 - RNA, 19 nt, Artificial Sequence
  Synthetic
uguugggccugggguugga

SEQ ID NO: 228222 - RNA, 20 nt, Artificial Sequence
  Synthetic
guguugggccugggguugga

SEQ ID NO: 228223 - RNA, 21 nt, Artificial Sequence
  Synthetic
gguguugggccugggguugga

SEQ ID NO: 228224 - RNA, 22 nt, Artificial Sequence
  Synthetic
ugguguugggccugggguugga

SEQ ID NO: 228225 - RNA, 23 nt, Artificial Sequence
  Synthetic
gugguguugggccugggguugga

SEQ ID NO: 228226 - RNA, 24 nt, Artificial Sequence
  Synthetic
ugugguguugggccugggguugga

SEQ ID NO: 228227 - RNA, 18 nt, Artificial Sequence
  Synthetic
uauuaugaggugguugga

SEQ ID NO: 228228 - RNA, 19 nt, Artificial Sequence
  Synthetic
uuauuaugaggugguugga

SEQ ID NO: 228229 - RNA, 20 nt, Artificial Sequence
  Synthetic
uuuauuaugaggugguugga

SEQ ID NO: 228230 - RNA, 21 nt, Artificial Sequence
  Synthetic
uuuuauuaugaggugguugga

SEQ ID NO: 228231 - RNA, 22 nt, Artificial Sequence
  Synthetic
guuuuauuaugaggugguugga

SEQ ID NO: 228232 - RNA, 23 nt, Artificial Sequence
  Synthetic
gguuuuauuaugaggugguugga

SEQ ID NO: 228233 - RNA, 24 nt, Artificial Sequence
  Synthetic
ugguuuuauuaugaggugguugga

SEQ ID NO: 228234 - RNA, 18 nt, Artificial Sequence
  Synthetic
gcccaauaucauguugga

SEQ ID NO: 228235 - RNA, 19 nt, Artificial Sequence
  Synthetic
ugcccaauaucauguugga

SEQ ID NO: 228236 - RNA, 20 nt, Artificial Sequence
  Synthetic
cugcccaauaucauguugga

SEQ ID NO: 228237 - RNA, 21 nt, Artificial Sequence
  Synthetic
ccugcccaauaucauguugga

SEQ ID NO: 228238 - RNA, 22 nt, Artificial Sequence
  Synthetic
gccugcccaauaucauguugga

SEQ ID NO: 228239 - RNA, 23 nt, Artificial Sequence
  Synthetic
ugccugcccaauaucauguugga

SEQ ID NO: 228240 - RNA, 24 nt, Artificial Sequence
  Synthetic
gugccugcccaauaucauguugga

SEQ ID NO: 228241 - RNA, 18 nt, Artificial Sequence
  Synthetic
gggauaugagauguugga

SEQ ID NO: 228242 - RNA, 19 nt, Artificial Sequence
  Synthetic
agggauaugagauguugga

SEQ ID NO: 228243 - RNA, 20 nt, Artificial Sequence
  Synthetic
cagggauaugagauguugga

SEQ ID NO: 228244 - RNA, 21 nt, Artificial Sequence
  Synthetic
acagggauaugagauguugga

SEQ ID NO: 228245 - RNA, 22 nt, Artificial Sequence
  Synthetic
gacagggauaugagauguugga

SEQ ID NO: 228246 - RNA, 23 nt, Artificial Sequence
  Synthetic
ggacagggauaugagauguugga

SEQ ID NO: 228247 - RNA, 24 nt, Artificial Sequence
  Synthetic
gggacagggauaugagauguugga

SEQ ID NO: 228248 - RNA, 18 nt, Artificial Sequence
  Synthetic
gauaccuaucaauuugga

SEQ ID NO: 228249 - RNA, 19 nt, Artificial Sequence
  Synthetic
ggauaccuaucaauuugga

SEQ ID NO: 228250 - RNA, 20 nt, Artificial Sequence
  Synthetic
uggauaccuaucaauuugga

SEQ ID NO: 228251 - RNA, 21 nt, Artificial Sequence
  Synthetic
auggauaccuaucaauuugga

SEQ ID NO: 228252 - RNA, 22 nt, Artificial Sequence
  Synthetic
aauggauaccuaucaauuugga

SEQ ID NO: 228253 - RNA, 23 nt, Artificial Sequence
  Synthetic
uaauggauaccuaucaauuugga

SEQ ID NO: 228254 - RNA, 24 nt, Artificial Sequence
  Synthetic
cuaauggauaccuaucaauuugga

SEQ ID NO: 228255 - RNA, 18 nt, Artificial Sequence
  Synthetic
aguaaaauagaauuugga

SEQ ID NO: 228256 - RNA, 19 nt, Artificial Sequence
  Synthetic
caguaaaauagaauuugga

SEQ ID NO: 228257 - RNA, 20 nt, Artificial Sequence
  Synthetic
ucaguaaaauagaauuugga

SEQ ID NO: 228258 - RNA, 21 nt, Artificial Sequence
  Synthetic
aucaguaaaauagaauuugga

SEQ ID NO: 228259 - RNA, 22 nt, Artificial Sequence
  Synthetic
gaucaguaaaauagaauuugga

SEQ ID NO: 228260 - RNA, 23 nt, Artificial Sequence
  Synthetic
ggaucaguaaaauagaauuugga

SEQ ID NO: 228261 - RNA, 24 nt, Artificial Sequence
  Synthetic
aggaucaguaaaauagaauuugga

SEQ ID NO: 228262 - RNA, 18 nt, Artificial Sequence
  Synthetic
auggaucuuacauuugga

SEQ ID NO: 228263 - RNA, 19 nt, Artificial Sequence
  Synthetic
uauggaucuuacauuugga

SEQ ID NO: 228264 - RNA, 20 nt, Artificial Sequence
  Synthetic
uuauggaucuuacauuugga

SEQ ID NO: 228265 - RNA, 21 nt, Artificial Sequence
  Synthetic
uuuauggaucuuacauuugga

SEQ ID NO: 228266 - RNA, 22 nt, Artificial Sequence
  Synthetic
cuuuauggaucuuacauuugga

SEQ ID NO: 228267 - RNA, 23 nt, Artificial Sequence
  Synthetic
ucuuuauggaucuuacauuugga

SEQ ID NO: 228268 - RNA, 24 nt, Artificial Sequence
  Synthetic
gucuuuauggaucuuacauuugga

SEQ ID NO: 228269 - RNA, 18 nt, Artificial Sequence
  Synthetic
uucaacaugagauuugga

SEQ ID NO: 228270 - RNA, 19 nt, Artificial Sequence
  Synthetic
uuucaacaugagauuugga

SEQ ID NO: 228271 - RNA, 20 nt, Artificial Sequence
  Synthetic
auuucaacaugagauuugga

SEQ ID NO: 228272 - RNA, 21 nt, Artificial Sequence
  Synthetic
aauuucaacaugagauuugga

SEQ ID NO: 228273 - RNA, 22 nt, Artificial Sequence
  Synthetic
aaauuucaacaugagauuugga

SEQ ID NO: 228274 - RNA, 23 nt, Artificial Sequence
  Synthetic
caaauuucaacaugagauuugga

SEQ ID NO: 228275 - RNA, 24 nt, Artificial Sequence
  Synthetic
ucaaauuucaacaugagauuugga

SEQ ID NO: 228276 - RNA, 18 nt, Artificial Sequence
  Synthetic
uucaagaugagauuugga

SEQ ID NO: 228277 - RNA, 19 nt, Artificial Sequence
  Synthetic
auucaagaugagauuugga

SEQ ID NO: 228278 - RNA, 20 nt, Artificial Sequence
  Synthetic
aauucaagaugagauuugga

SEQ ID NO: 228279 - RNA, 21 nt, Artificial Sequence
  Synthetic
caauucaagaugagauuugga

SEQ ID NO: 228280 - RNA, 22 nt, Artificial Sequence
  Synthetic
acaauucaagaugagauuugga

SEQ ID NO: 228281 - RNA, 23 nt, Artificial Sequence
  Synthetic
uacaauucaagaugagauuugga

SEQ ID NO: 228282 - RNA, 24 nt, Artificial Sequence
  Synthetic
cuacaauucaagaugagauuugga

SEQ ID NO: 228283 - RNA, 18 nt, Artificial Sequence
  Synthetic
uggcuccuuuuauuugga

SEQ ID NO: 228284 - RNA, 19 nt, Artificial Sequence
  Synthetic
cuggcuccuuuuauuugga

SEQ ID NO: 228285 - RNA, 20 nt, Artificial Sequence
  Synthetic
acuggcuccuuuuauuugga

SEQ ID NO: 228286 - RNA, 21 nt, Artificial Sequence
  Synthetic
uacuggcuccuuuuauuugga

SEQ ID NO: 228287 - RNA, 22 nt, Artificial Sequence
  Synthetic
auacuggcuccuuuuauuugga

SEQ ID NO: 228288 - RNA, 23 nt, Artificial Sequence
  Synthetic
cauacuggcuccuuuuauuugga

SEQ ID NO: 228289 - RNA, 24 nt, Artificial Sequence
  Synthetic
ucauacuggcuccuuuuauuugga

SEQ ID NO: 228290 - RNA, 18 nt, Artificial Sequence
  Synthetic
aaguguuuacccuuugga

SEQ ID NO: 228291 - RNA, 19 nt, Artificial Sequence
  Synthetic
uaaguguuuacccuuugga

SEQ ID NO: 228292 - RNA, 20 nt, Artificial Sequence
  Synthetic
uuaaguguuuacccuuugga

SEQ ID NO: 228293 - RNA, 21 nt, Artificial Sequence
  Synthetic
uuuaaguguuuacccuuugga

SEQ ID NO: 228294 - RNA, 22 nt, Artificial Sequence
  Synthetic
cuuuaaguguuuacccuuugga

SEQ ID NO: 228295 - RNA, 23 nt, Artificial Sequence
  Synthetic
gcuuuaaguguuuacccuuugga

SEQ ID NO: 228296 - RNA, 24 nt, Artificial Sequence
  Synthetic
ugcuuuaaguguuuacccuuugga

SEQ ID NO: 228297 - RNA, 18 nt, Artificial Sequence
  Synthetic
acuagacagcccuuugga

SEQ ID NO: 228298 - RNA, 19 nt, Artificial Sequence
  Synthetic
uacuagacagcccuuugga

SEQ ID NO: 228299 - RNA, 20 nt, Artificial Sequence
  Synthetic
guacuagacagcccuuugga

SEQ ID NO: 228300 - RNA, 21 nt, Artificial Sequence
  Synthetic
aguacuagacagcccuuugga

SEQ ID NO: 228301 - RNA, 22 nt, Artificial Sequence
  Synthetic
aaguacuagacagcccuuugga

SEQ ID NO: 228302 - RNA, 23 nt, Artificial Sequence
  Synthetic
uaaguacuagacagcccuuugga

SEQ ID NO: 228303 - RNA, 24 nt, Artificial Sequence
  Synthetic
uuaaguacuagacagcccuuugga

SEQ ID NO: 228304 - RNA, 18 nt, Artificial Sequence
  Synthetic
auaguucaugccuuugga

SEQ ID NO: 228305 - RNA, 19 nt, Artificial Sequence
  Synthetic
aauaguucaugccuuugga

SEQ ID NO: 228306 - RNA, 20 nt, Artificial Sequence
  Synthetic
aaauaguucaugccuuugga

SEQ ID NO: 228307 - RNA, 21 nt, Artificial Sequence
  Synthetic
gaaauaguucaugccuuugga

SEQ ID NO: 228308 - RNA, 22 nt, Artificial Sequence
  Synthetic
agaaauaguucaugccuuugga

SEQ ID NO: 228309 - RNA, 23 nt, Artificial Sequence
  Synthetic
uagaaauaguucaugccuuugga

SEQ ID NO: 228310 - RNA, 24 nt, Artificial Sequence
  Synthetic
uuagaaauaguucaugccuuugga

SEQ ID NO: 228311 - RNA, 18 nt, Artificial Sequence
  Synthetic
ccuguaauuaaguuugga

SEQ ID NO: 228312 - RNA, 19 nt, Artificial Sequence
  Synthetic
uccuguaauuaaguuugga

SEQ ID NO: 228313 - RNA, 20 nt, Artificial Sequence
  Synthetic
uuccuguaauuaaguuugga

SEQ ID NO: 228314 - RNA, 21 nt, Artificial Sequence
  Synthetic
cuuccuguaauuaaguuugga

SEQ ID NO: 228315 - RNA, 22 nt, Artificial Sequence
  Synthetic
ucuuccuguaauuaaguuugga

SEQ ID NO: 228316 - RNA, 23 nt, Artificial Sequence
  Synthetic
cucuuccuguaauuaaguuugga

SEQ ID NO: 228317 - RNA, 24 nt, Artificial Sequence
  Synthetic
ucucuuccuguaauuaaguuugga

SEQ ID NO: 228318 - RNA, 18 nt, Artificial Sequence
  Synthetic
ucaacauaggaguuugga

SEQ ID NO: 228319 - RNA, 19 nt, Artificial Sequence
  Synthetic
aucaacauaggaguuugga

SEQ ID NO: 228320 - RNA, 20 nt, Artificial Sequence
  Synthetic
aaucaacauaggaguuugga

SEQ ID NO: 228321 - RNA, 21 nt, Artificial Sequence
  Synthetic
aaaucaacauaggaguuugga

SEQ ID NO: 228322 - RNA, 22 nt, Artificial Sequence
  Synthetic
gaaaucaacauaggaguuugga

SEQ ID NO: 228323 - RNA, 23 nt, Artificial Sequence
  Synthetic
ugaaaucaacauaggaguuugga

SEQ ID NO: 228324 - RNA, 24 nt, Artificial Sequence
  Synthetic
cugaaaucaacauaggaguuugga

SEQ ID NO: 228325 - RNA, 18 nt, Artificial Sequence
  Synthetic
cuaguuuuguaguuugga

SEQ ID NO: 228326 - RNA, 19 nt, Artificial Sequence
  Synthetic
ccuaguuuuguaguuugga

SEQ ID NO: 228327 - RNA, 20 nt, Artificial Sequence
  Synthetic
accuaguuuuguaguuugga

SEQ ID NO: 228328 - RNA, 21 nt, Artificial Sequence
  Synthetic
uaccuaguuuuguaguuugga

SEQ ID NO: 228329 - RNA, 22 nt, Artificial Sequence
  Synthetic
cuaccuaguuuuguaguuugga

SEQ ID NO: 228330 - RNA, 23 nt, Artificial Sequence
  Synthetic
gcuaccuaguuuuguaguuugga

SEQ ID NO: 228331 - RNA, 24 nt, Artificial Sequence
  Synthetic
ggcuaccuaguuuuguaguuugga

SEQ ID NO: 228332 - RNA, 18 nt, Artificial Sequence
  Synthetic
agaaacgucaauuuugga

SEQ ID NO: 228333 - RNA, 19 nt, Artificial Sequence
  Synthetic
aagaaacgucaauuuugga

SEQ ID NO: 228334 - RNA, 20 nt, Artificial Sequence
  Synthetic
uaagaaacgucaauuuugga

SEQ ID NO: 228335 - RNA, 21 nt, Artificial Sequence
  Synthetic
uuaagaaacgucaauuuugga

SEQ ID NO: 228336 - RNA, 22 nt, Artificial Sequence
  Synthetic
auuaagaaacgucaauuuugga

SEQ ID NO: 228337 - RNA, 23 nt, Artificial Sequence
  Synthetic
uauuaagaaacgucaauuuugga

SEQ ID NO: 228338 - RNA, 24 nt, Artificial Sequence
  Synthetic
auauuaagaaacgucaauuuugga

SEQ ID NO: 228339 - RNA, 18 nt, Artificial Sequence
  Synthetic
caugcuaugcauuuugga

SEQ ID NO: 228340 - RNA, 19 nt, Artificial Sequence
  Synthetic
ucaugcuaugcauuuugga

SEQ ID NO: 228341 - RNA, 20 nt, Artificial Sequence
  Synthetic
aucaugcuaugcauuuugga

SEQ ID NO: 228342 - RNA, 21 nt, Artificial Sequence
  Synthetic
gaucaugcuaugcauuuugga

SEQ ID NO: 228343 - RNA, 22 nt, Artificial Sequence
  Synthetic
ggaucaugcuaugcauuuugga

SEQ ID NO: 228344 - RNA, 23 nt, Artificial Sequence
  Synthetic
gggaucaugcuaugcauuuugga

SEQ ID NO: 228345 - RNA, 24 nt, Artificial Sequence
  Synthetic
agggaucaugcuaugcauuuugga

SEQ ID NO: 228346 - RNA, 18 nt, Artificial Sequence
  Synthetic
aaagagagagcuuuugga

SEQ ID NO: 228347 - RNA, 19 nt, Artificial Sequence
  Synthetic
caaagagagagcuuuugga

SEQ ID NO: 228348 - RNA, 20 nt, Artificial Sequence
  Synthetic
ucaaagagagagcuuuugga

SEQ ID NO: 228349 - RNA, 21 nt, Artificial Sequence
  Synthetic
gucaaagagagagcuuuugga

SEQ ID NO: 228350 - RNA, 22 nt, Artificial Sequence
  Synthetic
agucaaagagagagcuuuugga

SEQ ID NO: 228351 - RNA, 23 nt, Artificial Sequence
  Synthetic
cagucaaagagagagcuuuugga

SEQ ID NO: 228352 - RNA, 24 nt, Artificial Sequence
  Synthetic
gcagucaaagagagagcuuuugga

SEQ ID NO: 228353 - RNA, 18 nt, Artificial Sequence
  Synthetic
uguugauucucuuuugga

SEQ ID NO: 228354 - RNA, 19 nt, Artificial Sequence
  Synthetic
uuguugauucucuuuugga

SEQ ID NO: 228355 - RNA, 20 nt, Artificial Sequence
  Synthetic
auuguugauucucuuuugga

SEQ ID NO: 228356 - RNA, 21 nt, Artificial Sequence
  Synthetic
aauuguugauucucuuuugga

SEQ ID NO: 228357 - RNA, 22 nt, Artificial Sequence
  Synthetic
aaauuguugauucucuuuugga

SEQ ID NO: 228358 - RNA, 23 nt, Artificial Sequence
  Synthetic
uaaauuguugauucucuuuugga

SEQ ID NO: 228359 - RNA, 24 nt, Artificial Sequence
  Synthetic
guaaauuguugauucucuuuugga

SEQ ID NO: 228360 - RNA, 18 nt, Artificial Sequence
  Synthetic
cugggaaugucuuuugga

SEQ ID NO: 228361 - RNA, 19 nt, Artificial Sequence
  Synthetic
acugggaaugucuuuugga

SEQ ID NO: 228362 - RNA, 20 nt, Artificial Sequence
  Synthetic
uacugggaaugucuuuugga

SEQ ID NO: 228363 - RNA, 21 nt, Artificial Sequence
  Synthetic
uuacugggaaugucuuuugga

SEQ ID NO: 228364 - RNA, 22 nt, Artificial Sequence
  Synthetic
uuuacugggaaugucuuuugga

SEQ ID NO: 228365 - RNA, 23 nt, Artificial Sequence
  Synthetic
cuuuacugggaaugucuuuugga

SEQ ID NO: 228366 - RNA, 24 nt, Artificial Sequence
  Synthetic
acuuuacugggaaugucuuuugga

SEQ ID NO: 228367 - RNA, 18 nt, Artificial Sequence
  Synthetic
uucaacaucaguuuugga

SEQ ID NO: 228368 - RNA, 19 nt, Artificial Sequence
  Synthetic
uuucaacaucaguuuugga

SEQ ID NO: 228369 - RNA, 20 nt, Artificial Sequence
  Synthetic
auuucaacaucaguuuugga

SEQ ID NO: 228370 - RNA, 21 nt, Artificial Sequence
  Synthetic
aauuucaacaucaguuuugga

SEQ ID NO: 228371 - RNA, 22 nt, Artificial Sequence
  Synthetic
aaauuucaacaucaguuuugga

SEQ ID NO: 228372 - RNA, 23 nt, Artificial Sequence
  Synthetic
uaaauuucaacaucaguuuugga

SEQ ID NO: 228373 - RNA, 24 nt, Artificial Sequence
  Synthetic
uuaaauuucaacaucaguuuugga

SEQ ID NO: 228374 - RNA, 18 nt, Artificial Sequence
  Synthetic
agucuuucugguuuugga

SEQ ID NO: 228375 - RNA, 19 nt, Artificial Sequence
  Synthetic
cagucuuucugguuuugga

SEQ ID NO: 228376 - RNA, 20 nt, Artificial Sequence
  Synthetic
ucagucuuucugguuuugga

SEQ ID NO: 228377 - RNA, 21 nt, Artificial Sequence
  Synthetic
gucagucuuucugguuuugga

SEQ ID NO: 228378 - RNA, 22 nt, Artificial Sequence
  Synthetic
agucagucuuucugguuuugga

SEQ ID NO: 228379 - RNA, 23 nt, Artificial Sequence
  Synthetic
uagucagucuuucugguuuugga

SEQ ID NO: 228380 - RNA, 24 nt, Artificial Sequence
  Synthetic
cuagucagucuuucugguuuugga

SEQ ID NO: 228381 - RNA, 18 nt, Artificial Sequence
  Synthetic
uuuuuuaauauuuuugga

SEQ ID NO: 228382 - RNA, 19 nt, Artificial Sequence
  Synthetic
guuuuuuaauauuuuugga

SEQ ID NO: 228383 - RNA, 20 nt, Artificial Sequence
  Synthetic
uguuuuuuaauauuuuugga

SEQ ID NO: 228384 - RNA, 21 nt, Artificial Sequence
  Synthetic
guguuuuuuaauauuuuugga

SEQ ID NO: 228385 - RNA, 22 nt, Artificial Sequence
  Synthetic
uguguuuuuuaauauuuuugga

SEQ ID NO: 228386 - RNA, 23 nt, Artificial Sequence
  Synthetic
uuguguuuuuuaauauuuuugga

SEQ ID NO: 228387 - RNA, 24 nt, Artificial Sequence
  Synthetic
cuuguguuuuuuaauauuuuugga

SEQ ID NO: 228388 - RNA, 18 nt, Artificial Sequence
  Synthetic
ugugagggcaaaaaauga

SEQ ID NO: 228389 - RNA, 19 nt, Artificial Sequence
  Synthetic
augugagggcaaaaaauga

SEQ ID NO: 228390 - RNA, 20 nt, Artificial Sequence
  Synthetic
gaugugagggcaaaaaauga

SEQ ID NO: 228391 - RNA, 21 nt, Artificial Sequence
  Synthetic
ggaugugagggcaaaaaauga

SEQ ID NO: 228392 - RNA, 22 nt, Artificial Sequence
  Synthetic
uggaugugagggcaaaaaauga

SEQ ID NO: 228393 - RNA, 23 nt, Artificial Sequence
  Synthetic
auggaugugagggcaaaaaauga

SEQ ID NO: 228394 - RNA, 24 nt, Artificial Sequence
  Synthetic
uauggaugugagggcaaaaaauga

SEQ ID NO: 228395 - RNA, 18 nt, Artificial Sequence
  Synthetic
agaagaaagaaaaaauga

SEQ ID NO: 228396 - RNA, 19 nt, Artificial Sequence
  Synthetic
aagaagaaagaaaaaauga

SEQ ID NO: 228397 - RNA, 20 nt, Artificial Sequence
  Synthetic
gaagaagaaagaaaaaauga

SEQ ID NO: 228398 - RNA, 21 nt, Artificial Sequence
  Synthetic
agaagaagaaagaaaaaauga

SEQ ID NO: 228399 - RNA, 22 nt, Artificial Sequence
  Synthetic
aagaagaagaaagaaaaaauga

SEQ ID NO: 228400 - RNA, 23 nt, Artificial Sequence
  Synthetic
gaagaagaagaaagaaaaaauga

SEQ ID NO: 228401 - RNA, 24 nt, Artificial Sequence
  Synthetic
ugaagaagaagaaagaaaaaauga

SEQ ID NO: 228402 - RNA, 18 nt, Artificial Sequence
  Synthetic
accuguuaccaaaaauga

SEQ ID NO: 228403 - RNA, 19 nt, Artificial Sequence
  Synthetic
aaccuguuaccaaaaauga

SEQ ID NO: 228404 - RNA, 20 nt, Artificial Sequence
  Synthetic
uaaccuguuaccaaaaauga

SEQ ID NO: 228405 - RNA, 21 nt, Artificial Sequence
  Synthetic
auaaccuguuaccaaaaauga

SEQ ID NO: 228406 - RNA, 22 nt, Artificial Sequence
  Synthetic
aauaaccuguuaccaaaaauga

SEQ ID NO: 228407 - RNA, 23 nt, Artificial Sequence
  Synthetic
uaauaaccuguuaccaaaaauga

SEQ ID NO: 228408 - RNA, 24 nt, Artificial Sequence
  Synthetic
uuaauaaccuguuaccaaaaauga

SEQ ID NO: 228409 - RNA, 18 nt, Artificial Sequence
  Synthetic
agaaauuagccaaaauga

SEQ ID NO: 228410 - RNA, 19 nt, Artificial Sequence
  Synthetic
gagaaauuagccaaaauga

SEQ ID NO: 228411 - RNA, 20 nt, Artificial Sequence
  Synthetic
ggagaaauuagccaaaauga

SEQ ID NO: 228412 - RNA, 21 nt, Artificial Sequence
  Synthetic
gggagaaauuagccaaaauga

SEQ ID NO: 228413 - RNA, 22 nt, Artificial Sequence
  Synthetic
ugggagaaauuagccaaaauga

SEQ ID NO: 228414 - RNA, 23 nt, Artificial Sequence
  Synthetic
augggagaaauuagccaaaauga

SEQ ID NO: 228415 - RNA, 24 nt, Artificial Sequence
  Synthetic
aaugggagaaauuagccaaaauga

SEQ ID NO: 228416 - RNA, 18 nt, Artificial Sequence
  Synthetic
accagauauucaaaauga

SEQ ID NO: 228417 - RNA, 19 nt, Artificial Sequence
  Synthetic
uaccagauauucaaaauga

SEQ ID NO: 228418 - RNA, 20 nt, Artificial Sequence
  Synthetic
uuaccagauauucaaaauga

SEQ ID NO: 228419 - RNA, 21 nt, Artificial Sequence
  Synthetic
uuuaccagauauucaaaauga

SEQ ID NO: 228420 - RNA, 22 nt, Artificial Sequence
  Synthetic
uuuuaccagauauucaaaauga

SEQ ID NO: 228421 - RNA, 23 nt, Artificial Sequence
  Synthetic
auuuuaccagauauucaaaauga

SEQ ID NO: 228422 - RNA, 24 nt, Artificial Sequence
  Synthetic
aauuuuaccagauauucaaaauga

SEQ ID NO: 228423 - RNA, 18 nt, Artificial Sequence
  Synthetic
aaucauggcagaaaauga

SEQ ID NO: 228424 - RNA, 19 nt, Artificial Sequence
  Synthetic
aaaucauggcagaaaauga

SEQ ID NO: 228425 - RNA, 20 nt, Artificial Sequence
  Synthetic
aaaaucauggcagaaaauga

SEQ ID NO: 228426 - RNA, 21 nt, Artificial Sequence
  Synthetic
uaaaaucauggcagaaaauga

SEQ ID NO: 228427 - RNA, 22 nt, Artificial Sequence
  Synthetic
uuaaaaucauggcagaaaauga

SEQ ID NO: 228428 - RNA, 23 nt, Artificial Sequence
  Synthetic
cuuaaaaucauggcagaaaauga

SEQ ID NO: 228429 - RNA, 24 nt, Artificial Sequence
  Synthetic
acuuaaaaucauggcagaaaauga

SEQ ID NO: 228430 - RNA, 18 nt, Artificial Sequence
  Synthetic
guuuuaaucagaaaauga

SEQ ID NO: 228431 - RNA, 19 nt, Artificial Sequence
  Synthetic
aguuuuaaucagaaaauga

SEQ ID NO: 228432 - RNA, 20 nt, Artificial Sequence
  Synthetic
uaguuuuaaucagaaaauga

SEQ ID NO: 228433 - RNA, 21 nt, Artificial Sequence
  Synthetic
auaguuuuaaucagaaaauga

SEQ ID NO: 228434 - RNA, 22 nt, Artificial Sequence
  Synthetic
aauaguuuuaaucagaaaauga

SEQ ID NO: 228435 - RNA, 23 nt, Artificial Sequence
  Synthetic
aaauaguuuuaaucagaaaauga

SEQ ID NO: 228436 - RNA, 24 nt, Artificial Sequence
  Synthetic
aaaauaguuuuaaucagaaaauga

SEQ ID NO: 228437 - RNA, 18 nt, Artificial Sequence
  Synthetic
agaaaaaugagaaaauga

SEQ ID NO: 228438 - RNA, 19 nt, Artificial Sequence
  Synthetic
aagaaaaaugagaaaauga

SEQ ID NO: 228439 - RNA, 20 nt, Artificial Sequence
  Synthetic
gaagaaaaaugagaaaauga

SEQ ID NO: 228440 - RNA, 21 nt, Artificial Sequence
  Synthetic
ugaagaaaaaugagaaaauga

SEQ ID NO: 228441 - RNA, 22 nt, Artificial Sequence
  Synthetic
augaagaaaaaugagaaaauga

SEQ ID NO: 228442 - RNA, 23 nt, Artificial Sequence
  Synthetic
caugaagaaaaaugagaaaauga

SEQ ID NO: 228443 - RNA, 24 nt, Artificial Sequence
  Synthetic
acaugaagaaaaaugagaaaauga

SEQ ID NO: 228444 - RNA, 18 nt, Artificial Sequence
  Synthetic
cuagacuugagaaaauga

SEQ ID NO: 228445 - RNA, 19 nt, Artificial Sequence
  Synthetic
acuagacuugagaaaauga

SEQ ID NO: 228446 - RNA, 20 nt, Artificial Sequence
  Synthetic
aacuagacuugagaaaauga

SEQ ID NO: 228447 - RNA, 21 nt, Artificial Sequence
  Synthetic
gaacuagacuugagaaaauga

SEQ ID NO: 228448 - RNA, 22 nt, Artificial Sequence
  Synthetic
agaacuagacuugagaaaauga

SEQ ID NO: 228449 - RNA, 23 nt, Artificial Sequence
  Synthetic
aagaacuagacuugagaaaauga

SEQ ID NO: 228450 - RNA, 24 nt, Artificial Sequence
  Synthetic
gaagaacuagacuugagaaaauga

SEQ ID NO: 228451 - RNA, 18 nt, Artificial Sequence
  Synthetic
cuaaucauaggaaaauga

SEQ ID NO: 228452 - RNA, 19 nt, Artificial Sequence
  Synthetic
ucuaaucauaggaaaauga

SEQ ID NO: 228453 - RNA, 20 nt, Artificial Sequence
  Synthetic
gucuaaucauaggaaaauga

SEQ ID NO: 228454 - RNA, 21 nt, Artificial Sequence
  Synthetic
ugucuaaucauaggaaaauga

SEQ ID NO: 228455 - RNA, 22 nt, Artificial Sequence
  Synthetic
uugucuaaucauaggaaaauga

SEQ ID NO: 228456 - RNA, 23 nt, Artificial Sequence
  Synthetic
guugucuaaucauaggaaaauga

SEQ ID NO: 228457 - RNA, 24 nt, Artificial Sequence
  Synthetic
aguugucuaaucauaggaaaauga

SEQ ID NO: 228458 - RNA, 18 nt, Artificial Sequence
  Synthetic
ucauuuaccugaaaauga

SEQ ID NO: 228459 - RNA, 19 nt, Artificial Sequence
  Synthetic
gucauuuaccugaaaauga

SEQ ID NO: 228460 - RNA, 20 nt, Artificial Sequence
  Synthetic
ggucauuuaccugaaaauga

SEQ ID NO: 228461 - RNA, 21 nt, Artificial Sequence
  Synthetic
aggucauuuaccugaaaauga

SEQ ID NO: 228462 - RNA, 22 nt, Artificial Sequence
  Synthetic
aaggucauuuaccugaaaauga

SEQ ID NO: 228463 - RNA, 23 nt, Artificial Sequence
  Synthetic
gaaggucauuuaccugaaaauga

SEQ ID NO: 228464 - RNA, 24 nt, Artificial Sequence
  Synthetic
ugaaggucauuuaccugaaaauga

SEQ ID NO: 228465 - RNA, 18 nt, Artificial Sequence
  Synthetic
uuauuagaaauaaaauga

SEQ ID NO: 228466 - RNA, 19 nt, Artificial Sequence
  Synthetic
guuauuagaaauaaaauga

SEQ ID NO: 228467 - RNA, 20 nt, Artificial Sequence
  Synthetic
aguuauuagaaauaaaauga

SEQ ID NO: 228468 - RNA, 21 nt, Artificial Sequence
  Synthetic
caguuauuagaaauaaaauga

SEQ ID NO: 228469 - RNA, 22 nt, Artificial Sequence
  Synthetic
ccaguuauuagaaauaaaauga

SEQ ID NO: 228470 - RNA, 23 nt, Artificial Sequence
  Synthetic
accaguuauuagaaauaaaauga

SEQ ID NO: 228471 - RNA, 24 nt, Artificial Sequence
  Synthetic
uaccaguuauuagaaauaaaauga

SEQ ID NO: 228472 - RNA, 18 nt, Artificial Sequence
  Synthetic
augaaacaccuaaaauga

SEQ ID NO: 228473 - RNA, 19 nt, Artificial Sequence
  Synthetic
gaugaaacaccuaaaauga

SEQ ID NO: 228474 - RNA, 20 nt, Artificial Sequence
  Synthetic
agaugaaacaccuaaaauga

SEQ ID NO: 228475 - RNA, 21 nt, Artificial Sequence
  Synthetic
uagaugaaacaccuaaaauga

SEQ ID NO: 228476 - RNA, 22 nt, Artificial Sequence
  Synthetic
uuagaugaaacaccuaaaauga

SEQ ID NO: 228477 - RNA, 23 nt, Artificial Sequence
  Synthetic
uuuagaugaaacaccuaaaauga

SEQ ID NO: 228478 - RNA, 24 nt, Artificial Sequence
  Synthetic
cuuuagaugaaacaccuaaaauga

SEQ ID NO: 228479 - RNA, 18 nt, Artificial Sequence
  Synthetic
gagcaauaaaacaaauga

SEQ ID NO: 228480 - RNA, 19 nt, Artificial Sequence
  Synthetic
ggagcaauaaaacaaauga

SEQ ID NO: 228481 - RNA, 20 nt, Artificial Sequence
  Synthetic
gggagcaauaaaacaaauga

SEQ ID NO: 228482 - RNA, 21 nt, Artificial Sequence
  Synthetic
agggagcaauaaaacaaauga

SEQ ID NO: 228483 - RNA, 22 nt, Artificial Sequence
  Synthetic
aagggagcaauaaaacaaauga

SEQ ID NO: 228484 - RNA, 23 nt, Artificial Sequence
  Synthetic
aaagggagcaauaaaacaaauga

SEQ ID NO: 228485 - RNA, 24 nt, Artificial Sequence
  Synthetic
gaaagggagcaauaaaacaaauga

SEQ ID NO: 228486 - RNA, 18 nt, Artificial Sequence
  Synthetic
aaaugcagaaacaaauga

SEQ ID NO: 228487 - RNA, 19 nt, Artificial Sequence
  Synthetic
uaaaugcagaaacaaauga

SEQ ID NO: 228488 - RNA, 20 nt, Artificial Sequence
  Synthetic
guaaaugcagaaacaaauga

SEQ ID NO: 228489 - RNA, 21 nt, Artificial Sequence
  Synthetic
gguaaaugcagaaacaaauga

SEQ ID NO: 228490 - RNA, 22 nt, Artificial Sequence
  Synthetic
ggguaaaugcagaaacaaauga

SEQ ID NO: 228491 - RNA, 23 nt, Artificial Sequence
  Synthetic
cggguaaaugcagaaacaaauga

SEQ ID NO: 228492 - RNA, 24 nt, Artificial Sequence
  Synthetic
ccggguaaaugcagaaacaaauga

SEQ ID NO: 228493 - RNA, 18 nt, Artificial Sequence
  Synthetic
cccuuauucaacaaauga

SEQ ID NO: 228494 - RNA, 19 nt, Artificial Sequence
  Synthetic
ucccuuauucaacaaauga

SEQ ID NO: 228495 - RNA, 20 nt, Artificial Sequence
  Synthetic
uucccuuauucaacaaauga

SEQ ID NO: 228496 - RNA, 21 nt, Artificial Sequence
  Synthetic
uuucccuuauucaacaaauga

SEQ ID NO: 228497 - RNA, 22 nt, Artificial Sequence
  Synthetic
guuucccuuauucaacaaauga

SEQ ID NO: 228498 - RNA, 23 nt, Artificial Sequence
  Synthetic
aguuucccuuauucaacaaauga

SEQ ID NO: 228499 - RNA, 24 nt, Artificial Sequence
  Synthetic
uaguuucccuuauucaacaaauga

SEQ ID NO: 228500 - RNA, 18 nt, Artificial Sequence
  Synthetic
aguugaugagacaaauga

SEQ ID NO: 228501 - RNA, 19 nt, Artificial Sequence
  Synthetic
uaguugaugagacaaauga

SEQ ID NO: 228502 - RNA, 20 nt, Artificial Sequence
  Synthetic
cuaguugaugagacaaauga

SEQ ID NO: 228503 - RNA, 21 nt, Artificial Sequence
  Synthetic
gcuaguugaugagacaaauga

SEQ ID NO: 228504 - RNA, 22 nt, Artificial Sequence
  Synthetic
agcuaguugaugagacaaauga

SEQ ID NO: 228505 - RNA, 23 nt, Artificial Sequence
  Synthetic
aagcuaguugaugagacaaauga

SEQ ID NO: 228506 - RNA, 24 nt, Artificial Sequence
  Synthetic
aaagcuaguugaugagacaaauga

SEQ ID NO: 228507 - RNA, 18 nt, Artificial Sequence
  Synthetic
uugaaguuggacaaauga

SEQ ID NO: 228508 - RNA, 19 nt, Artificial Sequence
  Synthetic
auugaaguuggacaaauga

SEQ ID NO: 228509 - RNA, 20 nt, Artificial Sequence
  Synthetic
uauugaaguuggacaaauga

SEQ ID NO: 228510 - RNA, 21 nt, Artificial Sequence
  Synthetic
cuauugaaguuggacaaauga

SEQ ID NO: 228511 - RNA, 22 nt, Artificial Sequence
  Synthetic
ucuauugaaguuggacaaauga

SEQ ID NO: 228512 - RNA, 23 nt, Artificial Sequence
  Synthetic
aucuauugaaguuggacaaauga

SEQ ID NO: 228513 - RNA, 24 nt, Artificial Sequence
  Synthetic
uaucuauugaaguuggacaaauga

SEQ ID NO: 228514 - RNA, 18 nt, Artificial Sequence
  Synthetic
gauugaauauacaaauga

SEQ ID NO: 228515 - RNA, 19 nt, Artificial Sequence
  Synthetic
agauugaauauacaaauga

SEQ ID NO: 228516 - RNA, 20 nt, Artificial Sequence
  Synthetic
aagauugaauauacaaauga

SEQ ID NO: 228517 - RNA, 21 nt, Artificial Sequence
  Synthetic
caagauugaauauacaaauga

SEQ ID NO: 228518 - RNA, 22 nt, Artificial Sequence
  Synthetic
ucaagauugaauauacaaauga

SEQ ID NO: 228519 - RNA, 23 nt, Artificial Sequence
  Synthetic
uucaagauugaauauacaaauga

SEQ ID NO: 228520 - RNA, 24 nt, Artificial Sequence
  Synthetic
auucaagauugaauauacaaauga

SEQ ID NO: 228521 - RNA, 18 nt, Artificial Sequence
  Synthetic
aauucugucugcaaauga

SEQ ID NO: 228522 - RNA, 19 nt, Artificial Sequence
  Synthetic
aaauucugucugcaaauga

SEQ ID NO: 228523 - RNA, 20 nt, Artificial Sequence
  Synthetic
uaaauucugucugcaaauga

SEQ ID NO: 228524 - RNA, 21 nt, Artificial Sequence
  Synthetic
uuaaauucugucugcaaauga

SEQ ID NO: 228525 - RNA, 22 nt, Artificial Sequence
  Synthetic
uuuaaauucugucugcaaauga

SEQ ID NO: 228526 - RNA, 23 nt, Artificial Sequence
  Synthetic
uuuuaaauucugucugcaaauga

SEQ ID NO: 228527 - RNA, 24 nt, Artificial Sequence
  Synthetic
cuuuuaaauucugucugcaaauga

SEQ ID NO: 228528 - RNA, 18 nt, Artificial Sequence
  Synthetic
uuuucaaagaucaaauga

SEQ ID NO: 228529 - RNA, 19 nt, Artificial Sequence
  Synthetic
cuuuucaaagaucaaauga

SEQ ID NO: 228530 - RNA, 20 nt, Artificial Sequence
  Synthetic
gcuuuucaaagaucaaauga

SEQ ID NO: 228531 - RNA, 21 nt, Artificial Sequence
  Synthetic
ugcuuuucaaagaucaaauga

SEQ ID NO: 228532 - RNA, 22 nt, Artificial Sequence
  Synthetic
cugcuuuucaaagaucaaauga

SEQ ID NO: 228533 - RNA, 23 nt, Artificial Sequence
  Synthetic
ucugcuuuucaaagaucaaauga

SEQ ID NO: 228534 - RNA, 24 nt, Artificial Sequence
  Synthetic
gucugcuuuucaaagaucaaauga

SEQ ID NO: 228535 - RNA, 18 nt, Artificial Sequence
  Synthetic
acauaaucuaucaaauga

SEQ ID NO: 228536 - RNA, 19 nt, Artificial Sequence
  Synthetic
gacauaaucuaucaaauga

SEQ ID NO: 228537 - RNA, 20 nt, Artificial Sequence
  Synthetic
ugacauaaucuaucaaauga

SEQ ID NO: 228538 - RNA, 21 nt, Artificial Sequence
  Synthetic
uugacauaaucuaucaaauga

SEQ ID NO: 228539 - RNA, 22 nt, Artificial Sequence
  Synthetic
uuugacauaaucuaucaaauga

SEQ ID NO: 228540 - RNA, 23 nt, Artificial Sequence
  Synthetic
uuuugacauaaucuaucaaauga

SEQ ID NO: 228541 - RNA, 24 nt, Artificial Sequence
  Synthetic
uuuuugacauaaucuaucaaauga

SEQ ID NO: 228542 - RNA, 18 nt, Artificial Sequence
  Synthetic
caacccauugucaaauga

SEQ ID NO: 228543 - RNA, 19 nt, Artificial Sequence
  Synthetic
acaacccauugucaaauga

SEQ ID NO: 228544 - RNA, 20 nt, Artificial Sequence
  Synthetic
cacaacccauugucaaauga

SEQ ID NO: 228545 - RNA, 21 nt, Artificial Sequence
  Synthetic
ccacaacccauugucaaauga

SEQ ID NO: 228546 - RNA, 22 nt, Artificial Sequence
  Synthetic
gccacaacccauugucaaauga

SEQ ID NO: 228547 - RNA, 23 nt, Artificial Sequence
  Synthetic
ugccacaacccauugucaaauga

SEQ ID NO: 228548 - RNA, 24 nt, Artificial Sequence
  Synthetic
augccacaacccauugucaaauga

SEQ ID NO: 228549 - RNA, 18 nt, Artificial Sequence
  Synthetic
uccaaggaaaagaaauga

SEQ ID NO: 228550 - RNA, 19 nt, Artificial Sequence
  Synthetic
uuccaaggaaaagaaauga

SEQ ID NO: 228551 - RNA, 20 nt, Artificial Sequence
  Synthetic
uuuccaaggaaaagaaauga

SEQ ID NO: 228552 - RNA, 21 nt, Artificial Sequence
  Synthetic
guuuccaaggaaaagaaauga

SEQ ID NO: 228553 - RNA, 22 nt, Artificial Sequence
  Synthetic
gguuuccaaggaaaagaaauga

SEQ ID NO: 228554 - RNA, 23 nt, Artificial Sequence
  Synthetic
ugguuuccaaggaaaagaaauga

SEQ ID NO: 228555 - RNA, 24 nt, Artificial Sequence
  Synthetic
gugguuuccaaggaaaagaaauga

SEQ ID NO: 228556 - RNA, 18 nt, Artificial Sequence
  Synthetic
uacacauaaaagaaauga

SEQ ID NO: 228557 - RNA, 19 nt, Artificial Sequence
  Synthetic
uuacacauaaaagaaauga

SEQ ID NO: 228558 - RNA, 20 nt, Artificial Sequence
  Synthetic
cuuacacauaaaagaaauga

SEQ ID NO: 228559 - RNA, 21 nt, Artificial Sequence
  Synthetic
ucuuacacauaaaagaaauga

SEQ ID NO: 228560 - RNA, 22 nt, Artificial Sequence
  Synthetic
uucuuacacauaaaagaaauga

SEQ ID NO: 228561 - RNA, 23 nt, Artificial Sequence
  Synthetic
guucuuacacauaaaagaaauga

SEQ ID NO: 228562 - RNA, 24 nt, Artificial Sequence
  Synthetic
aguucuuacacauaaaagaaauga

SEQ ID NO: 228563 - RNA, 18 nt, Artificial Sequence
  Synthetic
acuuuagagcagaaauga

SEQ ID NO: 228564 - RNA, 19 nt, Artificial Sequence
  Synthetic
aacuuuagagcagaaauga

SEQ ID NO: 228565 - RNA, 20 nt, Artificial Sequence
  Synthetic
aaacuuuagagcagaaauga

SEQ ID NO: 228566 - RNA, 21 nt, Artificial Sequence
  Synthetic
aaaacuuuagagcagaaauga

SEQ ID NO: 228567 - RNA, 22 nt, Artificial Sequence
  Synthetic
aaaaacuuuagagcagaaauga

SEQ ID NO: 228568 - RNA, 23 nt, Artificial Sequence
  Synthetic
uaaaaacuuuagagcagaaauga

SEQ ID NO: 228569 - RNA, 24 nt, Artificial Sequence
  Synthetic
uuaaaaacuuuagagcagaaauga

SEQ ID NO: 228570 - RNA, 18 nt, Artificial Sequence
  Synthetic
ggcccacugcagaaauga

SEQ ID NO: 228571 - RNA, 19 nt, Artificial Sequence
  Synthetic
uggcccacugcagaaauga

SEQ ID NO: 228572 - RNA, 20 nt, Artificial Sequence
  Synthetic
uuggcccacugcagaaauga

SEQ ID NO: 228573 - RNA, 21 nt, Artificial Sequence
  Synthetic
auuggcccacugcagaaauga

SEQ ID NO: 228574 - RNA, 22 nt, Artificial Sequence
  Synthetic
cauuggcccacugcagaaauga

SEQ ID NO: 228575 - RNA, 23 nt, Artificial Sequence
  Synthetic
ucauuggcccacugcagaaauga

SEQ ID NO: 228576 - RNA, 24 nt, Artificial Sequence
  Synthetic
uucauuggcccacugcagaaauga

SEQ ID NO: 228577 - RNA, 18 nt, Artificial Sequence
  Synthetic
agauauguagagaaauga

SEQ ID NO: 228578 - RNA, 19 nt, Artificial Sequence
  Synthetic
cagauauguagagaaauga

SEQ ID NO: 228579 - RNA, 20 nt, Artificial Sequence
  Synthetic
acagauauguagagaaauga

SEQ ID NO: 228580 - RNA, 21 nt, Artificial Sequence
  Synthetic
uacagauauguagagaaauga

SEQ ID NO: 228581 - RNA, 22 nt, Artificial Sequence
  Synthetic
auacagauauguagagaaauga

SEQ ID NO: 228582 - RNA, 23 nt, Artificial Sequence
  Synthetic
aauacagauauguagagaaauga

SEQ ID NO: 228583 - RNA, 24 nt, Artificial Sequence
  Synthetic
aaauacagauauguagagaaauga

SEQ ID NO: 228584 - RNA, 18 nt, Artificial Sequence
  Synthetic
gaaugagaauagaaauga

SEQ ID NO: 228585 - RNA, 19 nt, Artificial Sequence
  Synthetic
ggaaugagaauagaaauga

SEQ ID NO: 228586 - RNA, 20 nt, Artificial Sequence
  Synthetic
aggaaugagaauagaaauga

SEQ ID NO: 228587 - RNA, 21 nt, Artificial Sequence
  Synthetic
caggaaugagaauagaaauga

SEQ ID NO: 228588 - RNA, 22 nt, Artificial Sequence
  Synthetic
ccaggaaugagaauagaaauga

SEQ ID NO: 228589 - RNA, 23 nt, Artificial Sequence
  Synthetic
cccaggaaugagaauagaaauga

SEQ ID NO: 228590 - RNA, 24 nt, Artificial Sequence
  Synthetic
ucccaggaaugagaauagaaauga

SEQ ID NO: 228591 - RNA, 18 nt, Artificial Sequence
  Synthetic
uuuuuaagauagaaauga

SEQ ID NO: 228592 - RNA, 19 nt, Artificial Sequence
  Synthetic
auuuuuaagauagaaauga

SEQ ID NO: 228593 - RNA, 20 nt, Artificial Sequence
  Synthetic
uauuuuuaagauagaaauga

SEQ ID NO: 228594 - RNA, 21 nt, Artificial Sequence
  Synthetic
auauuuuuaagauagaaauga

SEQ ID NO: 228595 - RNA, 22 nt, Artificial Sequence
  Synthetic
cauauuuuuaagauagaaauga

SEQ ID NO: 228596 - RNA, 23 nt, Artificial Sequence
  Synthetic
ccauauuuuuaagauagaaauga

SEQ ID NO: 228597 - RNA, 24 nt, Artificial Sequence
  Synthetic
uccauauuuuuaagauagaaauga

SEQ ID NO: 228598 - RNA, 18 nt, Artificial Sequence
  Synthetic
cacugcucaaggaaauga

SEQ ID NO: 228599 - RNA, 19 nt, Artificial Sequence
  Synthetic
ccacugcucaaggaaauga

SEQ ID NO: 228600 - RNA, 20 nt, Artificial Sequence
  Synthetic
accacugcucaaggaaauga

SEQ ID NO: 228601 - RNA, 21 nt, Artificial Sequence
  Synthetic
aaccacugcucaaggaaauga

SEQ ID NO: 228602 - RNA, 22 nt, Artificial Sequence
  Synthetic
aaaccacugcucaaggaaauga

SEQ ID NO: 228603 - RNA, 23 nt, Artificial Sequence
  Synthetic
caaaccacugcucaaggaaauga

SEQ ID NO: 228604 - RNA, 24 nt, Artificial Sequence
  Synthetic
acaaaccacugcucaaggaaauga

SEQ ID NO: 228605 - RNA, 18 nt, Artificial Sequence
  Synthetic
ggugaugucuggaaauga

SEQ ID NO: 228606 - RNA, 19 nt, Artificial Sequence
  Synthetic
gggugaugucuggaaauga

SEQ ID NO: 228607 - RNA, 20 nt, Artificial Sequence
  Synthetic
agggugaugucuggaaauga

SEQ ID NO: 228608 - RNA, 21 nt, Artificial Sequence
  Synthetic
aagggugaugucuggaaauga

SEQ ID NO: 228609 - RNA, 22 nt, Artificial Sequence
  Synthetic
gaagggugaugucuggaaauga

SEQ ID NO: 228610 - RNA, 23 nt, Artificial Sequence
  Synthetic
ggaagggugaugucuggaaauga

SEQ ID NO: 228611 - RNA, 24 nt, Artificial Sequence
  Synthetic
aggaagggugaugucuggaaauga

SEQ ID NO: 228612 - RNA, 18 nt, Artificial Sequence
  Synthetic
ugguuuuuguggaaauga

SEQ ID NO: 228613 - RNA, 19 nt, Artificial Sequence
  Synthetic
gugguuuuuguggaaauga

SEQ ID NO: 228614 - RNA, 20 nt, Artificial Sequence
  Synthetic
agugguuuuuguggaaauga

SEQ ID NO: 228615 - RNA, 21 nt, Artificial Sequence
  Synthetic
gagugguuuuuguggaaauga

SEQ ID NO: 228616 - RNA, 22 nt, Artificial Sequence
  Synthetic
ggagugguuuuuguggaaauga

SEQ ID NO: 228617 - RNA, 23 nt, Artificial Sequence
  Synthetic
aggagugguuuuuguggaaauga

SEQ ID NO: 228618 - RNA, 24 nt, Artificial Sequence
  Synthetic
gaggagugguuuuuguggaaauga

SEQ ID NO: 228619 - RNA, 18 nt, Artificial Sequence
  Synthetic
uauaguucuuggaaauga

SEQ ID NO: 228620 - RNA, 19 nt, Artificial Sequence
  Synthetic
guauaguucuuggaaauga

SEQ ID NO: 228621 - RNA, 20 nt, Artificial Sequence
  Synthetic
uguauaguucuuggaaauga

SEQ ID NO: 228622 - RNA, 21 nt, Artificial Sequence
  Synthetic
auguauaguucuuggaaauga

SEQ ID NO: 228623 - RNA, 22 nt, Artificial Sequence
  Synthetic
aauguauaguucuuggaaauga

SEQ ID NO: 228624 - RNA, 23 nt, Artificial Sequence
  Synthetic
uaauguauaguucuuggaaauga

SEQ ID NO: 228625 - RNA, 24 nt, Artificial Sequence
  Synthetic
auaauguauaguucuuggaaauga

SEQ ID NO: 228626 - RNA, 18 nt, Artificial Sequence
  Synthetic
aucaucuuuaugaaauga

SEQ ID NO: 228627 - RNA, 19 nt, Artificial Sequence
  Synthetic
aaucaucuuuaugaaauga

SEQ ID NO: 228628 - RNA, 20 nt, Artificial Sequence
  Synthetic
gaaucaucuuuaugaaauga

SEQ ID NO: 228629 - RNA, 21 nt, Artificial Sequence
  Synthetic
ugaaucaucuuuaugaaauga

SEQ ID NO: 228630 - RNA, 22 nt, Artificial Sequence
  Synthetic
cugaaucaucuuuaugaaauga

SEQ ID NO: 228631 - RNA, 23 nt, Artificial Sequence
  Synthetic
ucugaaucaucuuuaugaaauga

SEQ ID NO: 228632 - RNA, 24 nt, Artificial Sequence
  Synthetic
uucugaaucaucuuuaugaaauga

SEQ ID NO: 228633 - RNA, 18 nt, Artificial Sequence
  Synthetic
ucaccaagguugaaauga

SEQ ID NO: 228634 - RNA, 19 nt, Artificial Sequence
  Synthetic
uucaccaagguugaaauga

SEQ ID NO: 228635 - RNA, 20 nt, Artificial Sequence
  Synthetic
auucaccaagguugaaauga

SEQ ID NO: 228636 - RNA, 21 nt, Artificial Sequence
  Synthetic
gauucaccaagguugaaauga

SEQ ID NO: 228637 - RNA, 22 nt, Artificial Sequence
  Synthetic
ggauucaccaagguugaaauga

SEQ ID NO: 228638 - RNA, 23 nt, Artificial Sequence
  Synthetic
cggauucaccaagguugaaauga

SEQ ID NO: 228639 - RNA, 24 nt, Artificial Sequence
  Synthetic
ucggauucaccaagguugaaauga

SEQ ID NO: 228640 - RNA, 18 nt, Artificial Sequence
  Synthetic
gacagaaggaauaaauga

SEQ ID NO: 228641 - RNA, 19 nt, Artificial Sequence
  Synthetic
ggacagaaggaauaaauga

SEQ ID NO: 228642 - RNA, 20 nt, Artificial Sequence
  Synthetic
gggacagaaggaauaaauga

SEQ ID NO: 228643 - RNA, 21 nt, Artificial Sequence
  Synthetic
ugggacagaaggaauaaauga

SEQ ID NO: 228644 - RNA, 22 nt, Artificial Sequence
  Synthetic
augggacagaaggaauaaauga

SEQ ID NO: 228645 - RNA, 23 nt, Artificial Sequence
  Synthetic
aaugggacagaaggaauaaauga

SEQ ID NO: 228646 - RNA, 24 nt, Artificial Sequence
  Synthetic
aaaugggacagaaggaauaaauga

SEQ ID NO: 228647 - RNA, 18 nt, Artificial Sequence
  Synthetic
cuauuaaugaauaaauga

SEQ ID NO: 228648 - RNA, 19 nt, Artificial Sequence
  Synthetic
gcuauuaaugaauaaauga

SEQ ID NO: 228649 - RNA, 20 nt, Artificial Sequence
  Synthetic
agcuauuaaugaauaaauga

SEQ ID NO: 228650 - RNA, 21 nt, Artificial Sequence
  Synthetic
gagcuauuaaugaauaaauga

SEQ ID NO: 228651 - RNA, 22 nt, Artificial Sequence
  Synthetic
ggagcuauuaaugaauaaauga

SEQ ID NO: 228652 - RNA, 23 nt, Artificial Sequence
  Synthetic
aggagcuauuaaugaauaaauga

SEQ ID NO: 228653 - RNA, 24 nt, Artificial Sequence
  Synthetic
gaggagcuauuaaugaauaaauga

SEQ ID NO: 228654 - RNA, 18 nt, Artificial Sequence
  Synthetic
caaugagauaauaaauga

SEQ ID NO: 228655 - RNA, 19 nt, Artificial Sequence
  Synthetic
acaaugagauaauaaauga

SEQ ID NO: 228656 - RNA, 20 nt, Artificial Sequence
  Synthetic
gacaaugagauaauaaauga

SEQ ID NO: 228657 - RNA, 21 nt, Artificial Sequence
  Synthetic
ggacaaugagauaauaaauga

SEQ ID NO: 228658 - RNA, 22 nt, Artificial Sequence
  Synthetic
gggacaaugagauaauaaauga

SEQ ID NO: 228659 - RNA, 23 nt, Artificial Sequence
  Synthetic
ugggacaaugagauaauaaauga

SEQ ID NO: 228660 - RNA, 24 nt, Artificial Sequence
  Synthetic
gugggacaaugagauaauaaauga

SEQ ID NO: 228661 - RNA, 18 nt, Artificial Sequence
  Synthetic
auagugaggcauaaauga

SEQ ID NO: 228662 - RNA, 19 nt, Artificial Sequence
  Synthetic
aauagugaggcauaaauga

SEQ ID NO: 228663 - RNA, 20 nt, Artificial Sequence
  Synthetic
uaauagugaggcauaaauga

SEQ ID NO: 228664 - RNA, 21 nt, Artificial Sequence
  Synthetic
uuaauagugaggcauaaauga

SEQ ID NO: 228665 - RNA, 22 nt, Artificial Sequence
  Synthetic
cuuaauagugaggcauaaauga

SEQ ID NO: 228666 - RNA, 23 nt, Artificial Sequence
  Synthetic
ccuuaauagugaggcauaaauga

SEQ ID NO: 228667 - RNA, 24 nt, Artificial Sequence
  Synthetic
uccuuaauagugaggcauaaauga

SEQ ID NO: 228668 - RNA, 18 nt, Artificial Sequence
  Synthetic
ggaguauacacuaaauga

SEQ ID NO: 228669 - RNA, 19 nt, Artificial Sequence
  Synthetic
gggaguauacacuaaauga

SEQ ID NO: 228670 - RNA, 20 nt, Artificial Sequence
  Synthetic
ugggaguauacacuaaauga

SEQ ID NO: 228671 - RNA, 21 nt, Artificial Sequence
  Synthetic
augggaguauacacuaaauga

SEQ ID NO: 228672 - RNA, 22 nt, Artificial Sequence
  Synthetic
uaugggaguauacacuaaauga

SEQ ID NO: 228673 - RNA, 23 nt, Artificial Sequence
  Synthetic
uuaugggaguauacacuaaauga

SEQ ID NO: 228674 - RNA, 24 nt, Artificial Sequence
  Synthetic
guuaugggaguauacacuaaauga

SEQ ID NO: 228675 - RNA, 18 nt, Artificial Sequence
  Synthetic
uccuuauuaaguaaauga

SEQ ID NO: 228676 - RNA, 19 nt, Artificial Sequence
  Synthetic
guccuuauuaaguaaauga

SEQ ID NO: 228677 - RNA, 20 nt, Artificial Sequence
  Synthetic
uguccuuauuaaguaaauga

SEQ ID NO: 228678 - RNA, 21 nt, Artificial Sequence
  Synthetic
uuguccuuauuaaguaaauga

SEQ ID NO: 228679 - RNA, 22 nt, Artificial Sequence
  Synthetic
auuguccuuauuaaguaaauga

SEQ ID NO: 228680 - RNA, 23 nt, Artificial Sequence
  Synthetic
uauuguccuuauuaaguaaauga

SEQ ID NO: 228681 - RNA, 24 nt, Artificial Sequence
  Synthetic
auauuguccuuauuaaguaaauga

SEQ ID NO: 228682 - RNA, 18 nt, Artificial Sequence
  Synthetic
gaaucacugaguaaauga

SEQ ID NO: 228683 - RNA, 19 nt, Artificial Sequence
  Synthetic
agaaucacugaguaaauga

SEQ ID NO: 228684 - RNA, 20 nt, Artificial Sequence
  Synthetic
aagaaucacugaguaaauga

SEQ ID NO: 228685 - RNA, 21 nt, Artificial Sequence
  Synthetic
uaagaaucacugaguaaauga

SEQ ID NO: 228686 - RNA, 22 nt, Artificial Sequence
  Synthetic
auaagaaucacugaguaaauga

SEQ ID NO: 228687 - RNA, 23 nt, Artificial Sequence
  Synthetic
cauaagaaucacugaguaaauga

SEQ ID NO: 228688 - RNA, 24 nt, Artificial Sequence
  Synthetic
acauaagaaucacugaguaaauga

SEQ ID NO: 228689 - RNA, 18 nt, Artificial Sequence
  Synthetic
uaaaauuugaguaaauga

SEQ ID NO: 228690 - RNA, 19 nt, Artificial Sequence
  Synthetic
cuaaaauuugaguaaauga

SEQ ID NO: 228691 - RNA, 20 nt, Artificial Sequence
  Synthetic
ucuaaaauuugaguaaauga

SEQ ID NO: 228692 - RNA, 21 nt, Artificial Sequence
  Synthetic
uucuaaaauuugaguaaauga

SEQ ID NO: 228693 - RNA, 22 nt, Artificial Sequence
  Synthetic
guucuaaaauuugaguaaauga

SEQ ID NO: 228694 - RNA, 23 nt, Artificial Sequence
  Synthetic
uguucuaaaauuugaguaaauga

SEQ ID NO: 228695 - RNA, 24 nt, Artificial Sequence
  Synthetic
guguucuaaaauuugaguaaauga

SEQ ID NO: 228696 - RNA, 18 nt, Artificial Sequence
  Synthetic
aacauaaaauguaaauga

SEQ ID NO: 228697 - RNA, 19 nt, Artificial Sequence
  Synthetic
uaacauaaaauguaaauga

SEQ ID NO: 228698 - RNA, 20 nt, Artificial Sequence
  Synthetic
uuaacauaaaauguaaauga

SEQ ID NO: 228699 - RNA, 21 nt, Artificial Sequence
  Synthetic
uuuaacauaaaauguaaauga

SEQ ID NO: 228700 - RNA, 22 nt, Artificial Sequence
  Synthetic
auuuaacauaaaauguaaauga

SEQ ID NO: 228701 - RNA, 23 nt, Artificial Sequence
  Synthetic
aauuuaacauaaaauguaaauga

SEQ ID NO: 228702 - RNA, 24 nt, Artificial Sequence
  Synthetic
uaauuuaacauaaaauguaaauga

SEQ ID NO: 228703 - RNA, 18 nt, Artificial Sequence
  Synthetic
ugaaauaaaauuaaauga

SEQ ID NO: 228704 - RNA, 19 nt, Artificial Sequence
  Synthetic
gugaaauaaaauuaaauga

SEQ ID NO: 228705 - RNA, 20 nt, Artificial Sequence
  Synthetic
ggugaaauaaaauuaaauga

SEQ ID NO: 228706 - RNA, 21 nt, Artificial Sequence
  Synthetic
uggugaaauaaaauuaaauga

SEQ ID NO: 228707 - RNA, 22 nt, Artificial Sequence
  Synthetic
uuggugaaauaaaauuaaauga

SEQ ID NO: 228708 - RNA, 23 nt, Artificial Sequence
  Synthetic
uuuggugaaauaaaauuaaauga

SEQ ID NO: 228709 - RNA, 24 nt, Artificial Sequence
  Synthetic
auuuggugaaauaaaauuaaauga

SEQ ID NO: 228710 - RNA, 18 nt, Artificial Sequence
  Synthetic
cauguuauaauuaaauga

SEQ ID NO: 228711 - RNA, 19 nt, Artificial Sequence
  Synthetic
ccauguuauaauuaaauga

SEQ ID NO: 228712 - RNA, 20 nt, Artificial Sequence
  Synthetic
accauguuauaauuaaauga

SEQ ID NO: 228713 - RNA, 21 nt, Artificial Sequence
  Synthetic
gaccauguuauaauuaaauga

SEQ ID NO: 228714 - RNA, 22 nt, Artificial Sequence
  Synthetic
agaccauguuauaauuaaauga

SEQ ID NO: 228715 - RNA, 23 nt, Artificial Sequence
  Synthetic
cagaccauguuauaauuaaauga

SEQ ID NO: 228716 - RNA, 24 nt, Artificial Sequence
  Synthetic
acagaccauguuauaauuaaauga

SEQ ID NO: 228717 - RNA, 18 nt, Artificial Sequence
  Synthetic
auauauaagauuaaauga

SEQ ID NO: 228718 - RNA, 19 nt, Artificial Sequence
  Synthetic
aauauauaagauuaaauga

SEQ ID NO: 228719 - RNA, 20 nt, Artificial Sequence
  Synthetic
aaauauauaagauuaaauga

SEQ ID NO: 228720 - RNA, 21 nt, Artificial Sequence
  Synthetic
uaaauauauaagauuaaauga

SEQ ID NO: 228721 - RNA, 22 nt, Artificial Sequence
  Synthetic
auaaauauauaagauuaaauga

SEQ ID NO: 228722 - RNA, 23 nt, Artificial Sequence
  Synthetic
uauaaauauauaagauuaaauga

SEQ ID NO: 228723 - RNA, 24 nt, Artificial Sequence
  Synthetic
auauaaauauauaagauuaaauga

SEQ ID NO: 228724 - RNA, 18 nt, Artificial Sequence
  Synthetic
caacaguuuuuuaaauga

SEQ ID NO: 228725 - RNA, 19 nt, Artificial Sequence
  Synthetic
ucaacaguuuuuuaaauga

SEQ ID NO: 228726 - RNA, 20 nt, Artificial Sequence
  Synthetic
uucaacaguuuuuuaaauga

SEQ ID NO: 228727 - RNA, 21 nt, Artificial Sequence
  Synthetic
auucaacaguuuuuuaaauga

SEQ ID NO: 228728 - RNA, 22 nt, Artificial Sequence
  Synthetic
aauucaacaguuuuuuaaauga

SEQ ID NO: 228729 - RNA, 23 nt, Artificial Sequence
  Synthetic
caauucaacaguuuuuuaaauga

SEQ ID NO: 228730 - RNA, 24 nt, Artificial Sequence
  Synthetic
ccaauucaacaguuuuuuaaauga

SEQ ID NO: 228731 - RNA, 18 nt, Artificial Sequence
  Synthetic
uauuuucaaaaacaauga

SEQ ID NO: 228732 - RNA, 19 nt, Artificial Sequence
  Synthetic
auauuuucaaaaacaauga

SEQ ID NO: 228733 - RNA, 20 nt, Artificial Sequence
  Synthetic
aauauuuucaaaaacaauga

SEQ ID NO: 228734 - RNA, 21 nt, Artificial Sequence
  Synthetic
uaauauuuucaaaaacaauga

SEQ ID NO: 228735 - RNA, 22 nt, Artificial Sequence
  Synthetic
auaauauuuucaaaaacaauga

SEQ ID NO: 228736 - RNA, 23 nt, Artificial Sequence
  Synthetic
aauaauauuuucaaaaacaauga

SEQ ID NO: 228737 - RNA, 24 nt, Artificial Sequence
  Synthetic
gaauaauauuuucaaaaacaauga

SEQ ID NO: 228738 - RNA, 18 nt, Artificial Sequence
  Synthetic
gauuaaaaauaacaauga

SEQ ID NO: 228739 - RNA, 19 nt, Artificial Sequence
  Synthetic
agauuaaaaauaacaauga

SEQ ID NO: 228740 - RNA, 20 nt, Artificial Sequence
  Synthetic
aagauuaaaaauaacaauga

SEQ ID NO: 228741 - RNA, 21 nt, Artificial Sequence
  Synthetic
aaagauuaaaaauaacaauga

SEQ ID NO: 228742 - RNA, 22 nt, Artificial Sequence
  Synthetic
caaagauuaaaaauaacaauga

SEQ ID NO: 228743 - RNA, 23 nt, Artificial Sequence
  Synthetic
ucaaagauuaaaaauaacaauga

SEQ ID NO: 228744 - RNA, 24 nt, Artificial Sequence
  Synthetic
cucaaagauuaaaaauaacaauga

SEQ ID NO: 228745 - RNA, 18 nt, Artificial Sequence
  Synthetic
aucccuaaauaacaauga

SEQ ID NO: 228746 - RNA, 19 nt, Artificial Sequence
  Synthetic
caucccuaaauaacaauga

SEQ ID NO: 228747 - RNA, 20 nt, Artificial Sequence
  Synthetic
ucaucccuaaauaacaauga

SEQ ID NO: 228748 - RNA, 21 nt, Artificial Sequence
  Synthetic
uucaucccuaaauaacaauga

SEQ ID NO: 228749 - RNA, 22 nt, Artificial Sequence
  Synthetic
cuucaucccuaaauaacaauga

SEQ ID NO: 228750 - RNA, 23 nt, Artificial Sequence
  Synthetic
ccuucaucccuaaauaacaauga

SEQ ID NO: 228751 - RNA, 24 nt, Artificial Sequence
  Synthetic
gccuucaucccuaaauaacaauga

SEQ ID NO: 228752 - RNA, 18 nt, Artificial Sequence
  Synthetic
cacugguuuucacaauga

SEQ ID NO: 228753 - RNA, 19 nt, Artificial Sequence
  Synthetic
acacugguuuucacaauga

SEQ ID NO: 228754 - RNA, 20 nt, Artificial Sequence
  Synthetic
cacacugguuuucacaauga

SEQ ID NO: 228755 - RNA, 21 nt, Artificial Sequence
  Synthetic
ccacacugguuuucacaauga

SEQ ID NO: 228756 - RNA, 22 nt, Artificial Sequence
  Synthetic
uccacacugguuuucacaauga

SEQ ID NO: 228757 - RNA, 23 nt, Artificial Sequence
  Synthetic
cuccacacugguuuucacaauga

SEQ ID NO: 228758 - RNA, 24 nt, Artificial Sequence
  Synthetic
ucuccacacugguuuucacaauga

SEQ ID NO: 228759 - RNA, 18 nt, Artificial Sequence
  Synthetic
uuucaaaaauuccaauga

SEQ ID NO: 228760 - RNA, 19 nt, Artificial Sequence
  Synthetic
uuuucaaaaauuccaauga

SEQ ID NO: 228761 - RNA, 20 nt, Artificial Sequence
  Synthetic
uuuuucaaaaauuccaauga

SEQ ID NO: 228762 - RNA, 21 nt, Artificial Sequence
  Synthetic
auuuuucaaaaauuccaauga

SEQ ID NO: 228763 - RNA, 22 nt, Artificial Sequence
  Synthetic
cauuuuucaaaaauuccaauga

SEQ ID NO: 228764 - RNA, 23 nt, Artificial Sequence
  Synthetic
ucauuuuucaaaaauuccaauga

SEQ ID NO: 228765 - RNA, 24 nt, Artificial Sequence
  Synthetic
aucauuuuucaaaaauuccaauga

SEQ ID NO: 228766 - RNA, 18 nt, Artificial Sequence
  Synthetic
cugguuuuagagcaauga

SEQ ID NO: 228767 - RNA, 19 nt, Artificial Sequence
  Synthetic
ccugguuuuagagcaauga

SEQ ID NO: 228768 - RNA, 20 nt, Artificial Sequence
  Synthetic
accugguuuuagagcaauga

SEQ ID NO: 228769 - RNA, 21 nt, Artificial Sequence
  Synthetic
uaccugguuuuagagcaauga

SEQ ID NO: 228770 - RNA, 22 nt, Artificial Sequence
  Synthetic
guaccugguuuuagagcaauga

SEQ ID NO: 228771 - RNA, 23 nt, Artificial Sequence
  Synthetic
gguaccugguuuuagagcaauga

SEQ ID NO: 228772 - RNA, 24 nt, Artificial Sequence
  Synthetic
ugguaccugguuuuagagcaauga

SEQ ID NO: 228773 - RNA, 18 nt, Artificial Sequence
  Synthetic
aguagcacaaggcaauga

SEQ ID NO: 228774 - RNA, 19 nt, Artificial Sequence
  Synthetic
gaguagcacaaggcaauga

SEQ ID NO: 228775 - RNA, 20 nt, Artificial Sequence
  Synthetic
agaguagcacaaggcaauga

SEQ ID NO: 228776 - RNA, 21 nt, Artificial Sequence
  Synthetic
cagaguagcacaaggcaauga

SEQ ID NO: 228777 - RNA, 22 nt, Artificial Sequence
  Synthetic
acagaguagcacaaggcaauga

SEQ ID NO: 228778 - RNA, 23 nt, Artificial Sequence
  Synthetic
gacagaguagcacaaggcaauga

SEQ ID NO: 228779 - RNA, 24 nt, Artificial Sequence
  Synthetic
ugacagaguagcacaaggcaauga

SEQ ID NO: 228780 - RNA, 18 nt, Artificial Sequence
  Synthetic
cauugccuuaugcaauga

SEQ ID NO: 228781 - RNA, 19 nt, Artificial Sequence
  Synthetic
gcauugccuuaugcaauga

SEQ ID NO: 228782 - RNA, 20 nt, Artificial Sequence
  Synthetic
agcauugccuuaugcaauga

SEQ ID NO: 228783 - RNA, 21 nt, Artificial Sequence
  Synthetic
cagcauugccuuaugcaauga

SEQ ID NO: 228784 - RNA, 22 nt, Artificial Sequence
  Synthetic
gcagcauugccuuaugcaauga

SEQ ID NO: 228785 - RNA, 23 nt, Artificial Sequence
  Synthetic
agcagcauugccuuaugcaauga

SEQ ID NO: 228786 - RNA, 24 nt, Artificial Sequence
  Synthetic
aagcagcauugccuuaugcaauga

SEQ ID NO: 228787 - RNA, 18 nt, Artificial Sequence
  Synthetic
guccagggacaucaauga

SEQ ID NO: 228788 - RNA, 19 nt, Artificial Sequence
  Synthetic
aguccagggacaucaauga

SEQ ID NO: 228789 - RNA, 20 nt, Artificial Sequence
  Synthetic
uaguccagggacaucaauga

SEQ ID NO: 228790 - RNA, 21 nt, Artificial Sequence
  Synthetic
uuaguccagggacaucaauga

SEQ ID NO: 228791 - RNA, 22 nt, Artificial Sequence
  Synthetic
uuuaguccagggacaucaauga

SEQ ID NO: 228792 - RNA, 23 nt, Artificial Sequence
  Synthetic
uuuuaguccagggacaucaauga

SEQ ID NO: 228793 - RNA, 24 nt, Artificial Sequence
  Synthetic
uuuuuaguccagggacaucaauga

SEQ ID NO: 228794 - RNA, 18 nt, Artificial Sequence
  Synthetic
gcacucuuaucucaauga

SEQ ID NO: 228795 - RNA, 19 nt, Artificial Sequence
  Synthetic
agcacucuuaucucaauga

SEQ ID NO: 228796 - RNA, 20 nt, Artificial Sequence
  Synthetic
aagcacucuuaucucaauga

SEQ ID NO: 228797 - RNA, 21 nt, Artificial Sequence
  Synthetic
aaagcacucuuaucucaauga

SEQ ID NO: 228798 - RNA, 22 nt, Artificial Sequence
  Synthetic
caaagcacucuuaucucaauga

SEQ ID NO: 228799 - RNA, 23 nt, Artificial Sequence
  Synthetic
acaaagcacucuuaucucaauga

SEQ ID NO: 228800 - RNA, 24 nt, Artificial Sequence
  Synthetic
aacaaagcacucuuaucucaauga

SEQ ID NO: 228801 - RNA, 18 nt, Artificial Sequence
  Synthetic
gcagccaagcaagaauga

SEQ ID NO: 228802 - RNA, 19 nt, Artificial Sequence
  Synthetic
ggcagccaagcaagaauga

SEQ ID NO: 228803 - RNA, 20 nt, Artificial Sequence
  Synthetic
uggcagccaagcaagaauga

SEQ ID NO: 228804 - RNA, 21 nt, Artificial Sequence
  Synthetic
cuggcagccaagcaagaauga

SEQ ID NO: 228805 - RNA, 22 nt, Artificial Sequence
  Synthetic
acuggcagccaagcaagaauga

SEQ ID NO: 228806 - RNA, 23 nt, Artificial Sequence
  Synthetic
gacuggcagccaagcaagaauga

SEQ ID NO: 228807 - RNA, 24 nt, Artificial Sequence
  Synthetic
ggacuggcagccaagcaagaauga

SEQ ID NO: 228808 - RNA, 18 nt, Artificial Sequence
  Synthetic
ugcacagaauaagaauga

SEQ ID NO: 228809 - RNA, 19 nt, Artificial Sequence
  Synthetic
augcacagaauaagaauga

SEQ ID NO: 228810 - RNA, 20 nt, Artificial Sequence
  Synthetic
aaugcacagaauaagaauga

SEQ ID NO: 228811 - RNA, 21 nt, Artificial Sequence
  Synthetic
aaaugcacagaauaagaauga

SEQ ID NO: 228812 - RNA, 22 nt, Artificial Sequence
  Synthetic
caaaugcacagaauaagaauga

SEQ ID NO: 228813 - RNA, 23 nt, Artificial Sequence
  Synthetic
ucaaaugcacagaauaagaauga

SEQ ID NO: 228814 - RNA, 24 nt, Artificial Sequence
  Synthetic
cucaaaugcacagaauaagaauga

SEQ ID NO: 228815 - RNA, 18 nt, Artificial Sequence
  Synthetic
agaccuauuacagaauga

SEQ ID NO: 228816 - RNA, 19 nt, Artificial Sequence
  Synthetic
aagaccuauuacagaauga

SEQ ID NO: 228817 - RNA, 20 nt, Artificial Sequence
  Synthetic
aaagaccuauuacagaauga

SEQ ID NO: 228818 - RNA, 21 nt, Artificial Sequence
  Synthetic
aaaagaccuauuacagaauga

SEQ ID NO: 228819 - RNA, 22 nt, Artificial Sequence
  Synthetic
caaaagaccuauuacagaauga

SEQ ID NO: 228820 - RNA, 23 nt, Artificial Sequence
  Synthetic
acaaaagaccuauuacagaauga

SEQ ID NO: 228821 - RNA, 24 nt, Artificial Sequence
  Synthetic
aacaaaagaccuauuacagaauga

SEQ ID NO: 228822 - RNA, 18 nt, Artificial Sequence
  Synthetic
gcccuccagccagaauga

SEQ ID NO: 228823 - RNA, 19 nt, Artificial Sequence
  Synthetic
ugcccuccagccagaauga

SEQ ID NO: 228824 - RNA, 20 nt, Artificial Sequence
  Synthetic
gugcccuccagccagaauga

SEQ ID NO: 228825 - RNA, 21 nt, Artificial Sequence
  Synthetic
agugcccuccagccagaauga

SEQ ID NO: 228826 - RNA, 22 nt, Artificial Sequence
  Synthetic
cagugcccuccagccagaauga

SEQ ID NO: 228827 - RNA, 23 nt, Artificial Sequence
  Synthetic
ccagugcccuccagccagaauga

SEQ ID NO: 228828 - RNA, 24 nt, Artificial Sequence
  Synthetic
uccagugcccuccagccagaauga

SEQ ID NO: 228829 - RNA, 18 nt, Artificial Sequence
  Synthetic
uaagaucaugcagaauga

SEQ ID NO: 228830 - RNA, 19 nt, Artificial Sequence
  Synthetic
cuaagaucaugcagaauga

SEQ ID NO: 228831 - RNA, 20 nt, Artificial Sequence
  Synthetic
ccuaagaucaugcagaauga

SEQ ID NO: 228832 - RNA, 21 nt, Artificial Sequence
  Synthetic
cccuaagaucaugcagaauga

SEQ ID NO: 228833 - RNA, 22 nt, Artificial Sequence
  Synthetic
ccccuaagaucaugcagaauga

SEQ ID NO: 228834 - RNA, 23 nt, Artificial Sequence
  Synthetic
cccccuaagaucaugcagaauga

SEQ ID NO: 228835 - RNA, 24 nt, Artificial Sequence
  Synthetic
ucccccuaagaucaugcagaauga

SEQ ID NO: 228836 - RNA, 18 nt, Artificial Sequence
  Synthetic
guuacuuggagagaauga

SEQ ID NO: 228837 - RNA, 19 nt, Artificial Sequence
  Synthetic
uguuacuuggagagaauga

SEQ ID NO: 228838 - RNA, 20 nt, Artificial Sequence
  Synthetic
uuguuacuuggagagaauga

SEQ ID NO: 228839 - RNA, 21 nt, Artificial Sequence
  Synthetic
uuuguuacuuggagagaauga

SEQ ID NO: 228840 - RNA, 22 nt, Artificial Sequence
  Synthetic
uuuuguuacuuggagagaauga

SEQ ID NO: 228841 - RNA, 23 nt, Artificial Sequence
  Synthetic
cuuuuguuacuuggagagaauga

SEQ ID NO: 228842 - RNA, 24 nt, Artificial Sequence
  Synthetic
ccuuuuguuacuuggagagaauga

SEQ ID NO: 228843 - RNA, 18 nt, Artificial Sequence
  Synthetic
auuuucaaaggagaauga

SEQ ID NO: 228844 - RNA, 19 nt, Artificial Sequence
  Synthetic
gauuuucaaaggagaauga

SEQ ID NO: 228845 - RNA, 20 nt, Artificial Sequence
  Synthetic
ggauuuucaaaggagaauga

SEQ ID NO: 228846 - RNA, 21 nt, Artificial Sequence
  Synthetic
uggauuuucaaaggagaauga

SEQ ID NO: 228847 - RNA, 22 nt, Artificial Sequence
  Synthetic
uuggauuuucaaaggagaauga

SEQ ID NO: 228848 - RNA, 23 nt, Artificial Sequence
  Synthetic
cuuggauuuucaaaggagaauga

SEQ ID NO: 228849 - RNA, 24 nt, Artificial Sequence
  Synthetic
ccuuggauuuucaaaggagaauga

SEQ ID NO: 228850 - RNA, 18 nt, Artificial Sequence
  Synthetic
aaacucauaauagaauga

SEQ ID NO: 228851 - RNA, 19 nt, Artificial Sequence
  Synthetic
aaaacucauaauagaauga

SEQ ID NO: 228852 - RNA, 20 nt, Artificial Sequence
  Synthetic
aaaaacucauaauagaauga

SEQ ID NO: 228853 - RNA, 21 nt, Artificial Sequence
  Synthetic
gaaaaacucauaauagaauga

SEQ ID NO: 228854 - RNA, 22 nt, Artificial Sequence
  Synthetic
ugaaaaacucauaauagaauga

SEQ ID NO: 228855 - RNA, 23 nt, Artificial Sequence
  Synthetic
cugaaaaacucauaauagaauga

SEQ ID NO: 228856 - RNA, 24 nt, Artificial Sequence
  Synthetic
ucugaaaaacucauaauagaauga

SEQ ID NO: 228857 - RNA, 18 nt, Artificial Sequence
  Synthetic
ucaguauuuguagaauga

SEQ ID NO: 228858 - RNA, 19 nt, Artificial Sequence
  Synthetic
cucaguauuuguagaauga

SEQ ID NO: 228859 - RNA, 20 nt, Artificial Sequence
  Synthetic
ccucaguauuuguagaauga

SEQ ID NO: 228860 - RNA, 21 nt, Artificial Sequence
  Synthetic
cccucaguauuuguagaauga

SEQ ID NO: 228861 - RNA, 22 nt, Artificial Sequence
  Synthetic
ucccucaguauuuguagaauga

SEQ ID NO: 228862 - RNA, 23 nt, Artificial Sequence
  Synthetic
cucccucaguauuuguagaauga

SEQ ID NO: 228863 - RNA, 24 nt, Artificial Sequence
  Synthetic
ucucccucaguauuuguagaauga

SEQ ID NO: 228864 - RNA, 18 nt, Artificial Sequence
  Synthetic
uauauccugaaggaauga

SEQ ID NO: 228865 - RNA, 19 nt, Artificial Sequence
  Synthetic
auauauccugaaggaauga

SEQ ID NO: 228866 - RNA, 20 nt, Artificial Sequence
  Synthetic
uauauauccugaaggaauga

SEQ ID NO: 228867 - RNA, 21 nt, Artificial Sequence
  Synthetic
auauauauccugaaggaauga

SEQ ID NO: 228868 - RNA, 22 nt, Artificial Sequence
  Synthetic
cauauauauccugaaggaauga

SEQ ID NO: 228869 - RNA, 23 nt, Artificial Sequence
  Synthetic
gcauauauauccugaaggaauga

SEQ ID NO: 228870 - RNA, 24 nt, Artificial Sequence
  Synthetic
ggcauauauauccugaaggaauga

SEQ ID NO: 228871 - RNA, 18 nt, Artificial Sequence
  Synthetic
gcuccuccauaggaauga

SEQ ID NO: 228872 - RNA, 19 nt, Artificial Sequence
  Synthetic
ggcuccuccauaggaauga

SEQ ID NO: 228873 - RNA, 20 nt, Artificial Sequence
  Synthetic
uggcuccuccauaggaauga

SEQ ID NO: 228874 - RNA, 21 nt, Artificial Sequence
  Synthetic
cuggcuccuccauaggaauga

SEQ ID NO: 228875 - RNA, 22 nt, Artificial Sequence
  Synthetic
acuggcuccuccauaggaauga

SEQ ID NO: 228876 - RNA, 23 nt, Artificial Sequence
  Synthetic
gacuggcuccuccauaggaauga

SEQ ID NO: 228877 - RNA, 24 nt, Artificial Sequence
  Synthetic
ggacuggcuccuccauaggaauga

SEQ ID NO: 228878 - RNA, 18 nt, Artificial Sequence
  Synthetic
ggaugaugaggggaauga

SEQ ID NO: 228879 - RNA, 19 nt, Artificial Sequence
  Synthetic
gggaugaugaggggaauga

SEQ ID NO: 228880 - RNA, 20 nt, Artificial Sequence
  Synthetic
ugggaugaugaggggaauga

SEQ ID NO: 228881 - RNA, 21 nt, Artificial Sequence
  Synthetic
augggaugaugaggggaauga

SEQ ID NO: 228882 - RNA, 22 nt, Artificial Sequence
  Synthetic
gaugggaugaugaggggaauga

SEQ ID NO: 228883 - RNA, 23 nt, Artificial Sequence
  Synthetic
agaugggaugaugaggggaauga

SEQ ID NO: 228884 - RNA, 24 nt, Artificial Sequence
  Synthetic
uagaugggaugaugaggggaauga

SEQ ID NO: 228885 - RNA, 18 nt, Artificial Sequence
  Synthetic
gguagagcaugggaauga

SEQ ID NO: 228886 - RNA, 19 nt, Artificial Sequence
  Synthetic
ugguagagcaugggaauga

SEQ ID NO: 228887 - RNA, 20 nt, Artificial Sequence
  Synthetic
augguagagcaugggaauga

SEQ ID NO: 228888 - RNA, 21 nt, Artificial Sequence
  Synthetic
uaugguagagcaugggaauga

SEQ ID NO: 228889 - RNA, 22 nt, Artificial Sequence
  Synthetic
uuaugguagagcaugggaauga

SEQ ID NO: 228890 - RNA, 23 nt, Artificial Sequence
  Synthetic
cuuaugguagagcaugggaauga

SEQ ID NO: 228891 - RNA, 24 nt, Artificial Sequence
  Synthetic
ucuuaugguagagcaugggaauga

SEQ ID NO: 228892 - RNA, 18 nt, Artificial Sequence
  Synthetic
cccauuaccugggaauga

SEQ ID NO: 228893 - RNA, 19 nt, Artificial Sequence
  Synthetic
ccccauuaccugggaauga

SEQ ID NO: 228894 - RNA, 20 nt, Artificial Sequence
  Synthetic
uccccauuaccugggaauga

SEQ ID NO: 228895 - RNA, 21 nt, Artificial Sequence
  Synthetic
auccccauuaccugggaauga

SEQ ID NO: 228896 - RNA, 22 nt, Artificial Sequence
  Synthetic
aauccccauuaccugggaauga

SEQ ID NO: 228897 - RNA, 23 nt, Artificial Sequence
  Synthetic
gaauccccauuaccugggaauga

SEQ ID NO: 228898 - RNA, 24 nt, Artificial Sequence
  Synthetic
ugaauccccauuaccugggaauga

SEQ ID NO: 228899 - RNA, 18 nt, Artificial Sequence
  Synthetic
cuugagaggguggaauga

SEQ ID NO: 228900 - RNA, 19 nt, Artificial Sequence
  Synthetic
ccuugagaggguggaauga

SEQ ID NO: 228901 - RNA, 20 nt, Artificial Sequence
  Synthetic
accuugagaggguggaauga

SEQ ID NO: 228902 - RNA, 21 nt, Artificial Sequence
  Synthetic
caccuugagaggguggaauga

SEQ ID NO: 228903 - RNA, 22 nt, Artificial Sequence
  Synthetic
gcaccuugagaggguggaauga

SEQ ID NO: 228904 - RNA, 23 nt, Artificial Sequence
  Synthetic
ugcaccuugagaggguggaauga

SEQ ID NO: 228905 - RNA, 24 nt, Artificial Sequence
  Synthetic
augcaccuugagaggguggaauga

SEQ ID NO: 228906 - RNA, 18 nt, Artificial Sequence
  Synthetic
uauuuguagaaugaauga

SEQ ID NO: 228907 - RNA, 19 nt, Artificial Sequence
  Synthetic
guauuuguagaaugaauga

SEQ ID NO: 228908 - RNA, 20 nt, Artificial Sequence
  Synthetic
aguauuuguagaaugaauga

SEQ ID NO: 228909 - RNA, 21 nt, Artificial Sequence
  Synthetic
caguauuuguagaaugaauga

SEQ ID NO: 228910 - RNA, 22 nt, Artificial Sequence
  Synthetic
ucaguauuuguagaaugaauga

SEQ ID NO: 228911 - RNA, 23 nt, Artificial Sequence
  Synthetic
cucaguauuuguagaaugaauga

SEQ ID NO: 228912 - RNA, 24 nt, Artificial Sequence
  Synthetic
ccucaguauuuguagaaugaauga

SEQ ID NO: 228913 - RNA, 18 nt, Artificial Sequence
  Synthetic
gagauuaaaauugaauga

SEQ ID NO: 228914 - RNA, 19 nt, Artificial Sequence
  Synthetic
agagauuaaaauugaauga

SEQ ID NO: 228915 - RNA, 20 nt, Artificial Sequence
  Synthetic
uagagauuaaaauugaauga

SEQ ID NO: 228916 - RNA, 21 nt, Artificial Sequence
  Synthetic
auagagauuaaaauugaauga

SEQ ID NO: 228917 - RNA, 22 nt, Artificial Sequence
  Synthetic
gauagagauuaaaauugaauga

SEQ ID NO: 228918 - RNA, 23 nt, Artificial Sequence
  Synthetic
ugauagagauuaaaauugaauga

SEQ ID NO: 228919 - RNA, 24 nt, Artificial Sequence
  Synthetic
augauagagauuaaaauugaauga

SEQ ID NO: 228920 - RNA, 18 nt, Artificial Sequence
  Synthetic
cucauugcuuuugaauga

SEQ ID NO: 228921 - RNA, 19 nt, Artificial Sequence
  Synthetic
ucucauugcuuuugaauga

SEQ ID NO: 228922 - RNA, 20 nt, Artificial Sequence
  Synthetic
aucucauugcuuuugaauga

SEQ ID NO: 228923 - RNA, 21 nt, Artificial Sequence
  Synthetic
caucucauugcuuuugaauga

SEQ ID NO: 228924 - RNA, 22 nt, Artificial Sequence
  Synthetic
acaucucauugcuuuugaauga

SEQ ID NO: 228925 - RNA, 23 nt, Artificial Sequence
  Synthetic
cacaucucauugcuuuugaauga

SEQ ID NO: 228926 - RNA, 24 nt, Artificial Sequence
  Synthetic
ccacaucucauugcuuuugaauga

SEQ ID NO: 228927 - RNA, 18 nt, Artificial Sequence
  Synthetic
uacaccccucaauaauga

SEQ ID NO: 228928 - RNA, 19 nt, Artificial Sequence
  Synthetic
uuacaccccucaauaauga

SEQ ID NO: 228929 - RNA, 20 nt, Artificial Sequence
  Synthetic
cuuacaccccucaauaauga

SEQ ID NO: 228930 - RNA, 21 nt, Artificial Sequence
  Synthetic
ucuuacaccccucaauaauga

SEQ ID NO: 228931 - RNA, 22 nt, Artificial Sequence
  Synthetic
uucuuacaccccucaauaauga

SEQ ID NO: 228932 - RNA, 23 nt, Artificial Sequence
  Synthetic
uuucuuacaccccucaauaauga

SEQ ID NO: 228933 - RNA, 24 nt, Artificial Sequence
  Synthetic
auuucuuacaccccucaauaauga

SEQ ID NO: 228934 - RNA, 18 nt, Artificial Sequence
  Synthetic
aaaaauuacagauaauga

SEQ ID NO: 228935 - RNA, 19 nt, Artificial Sequence
  Synthetic
caaaaauuacagauaauga

SEQ ID NO: 228936 - RNA, 20 nt, Artificial Sequence
  Synthetic
ucaaaaauuacagauaauga

SEQ ID NO: 228937 - RNA, 21 nt, Artificial Sequence
  Synthetic
gucaaaaauuacagauaauga

SEQ ID NO: 228938 - RNA, 22 nt, Artificial Sequence
  Synthetic
agucaaaaauuacagauaauga

SEQ ID NO: 228939 - RNA, 23 nt, Artificial Sequence
  Synthetic
aagucaaaaauuacagauaauga

SEQ ID NO: 228940 - RNA, 24 nt, Artificial Sequence
  Synthetic
aaagucaaaaauuacagauaauga

SEQ ID NO: 228941 - RNA, 18 nt, Artificial Sequence
  Synthetic
gagaaaaagugauaauga

SEQ ID NO: 228942 - RNA, 19 nt, Artificial Sequence
  Synthetic
agagaaaaagugauaauga

SEQ ID NO: 228943 - RNA, 20 nt, Artificial Sequence
  Synthetic
uagagaaaaagugauaauga

SEQ ID NO: 228944 - RNA, 21 nt, Artificial Sequence
  Synthetic
cuagagaaaaagugauaauga

SEQ ID NO: 228945 - RNA, 22 nt, Artificial Sequence
  Synthetic
ucuagagaaaaagugauaauga

SEQ ID NO: 228946 - RNA, 23 nt, Artificial Sequence
  Synthetic
gucuagagaaaaagugauaauga

SEQ ID NO: 228947 - RNA, 24 nt, Artificial Sequence
  Synthetic
ugucuagagaaaaagugauaauga

SEQ ID NO: 228948 - RNA, 18 nt, Artificial Sequence
  Synthetic
cagagcuaaauauaauga

SEQ ID NO: 228949 - RNA, 19 nt, Artificial Sequence
  Synthetic
acagagcuaaauauaauga

SEQ ID NO: 228950 - RNA, 20 nt, Artificial Sequence
  Synthetic
aacagagcuaaauauaauga

SEQ ID NO: 228951 - RNA, 21 nt, Artificial Sequence
  Synthetic
uaacagagcuaaauauaauga

SEQ ID NO: 228952 - RNA, 22 nt, Artificial Sequence
  Synthetic
guaacagagcuaaauauaauga

SEQ ID NO: 228953 - RNA, 23 nt, Artificial Sequence
  Synthetic
uguaacagagcuaaauauaauga

SEQ ID NO: 228954 - RNA, 24 nt, Artificial Sequence
  Synthetic
cuguaacagagcuaaauauaauga

SEQ ID NO: 228955 - RNA, 18 nt, Artificial Sequence
  Synthetic
ggaaauuaaauauaauga

SEQ ID NO: 228956 - RNA, 19 nt, Artificial Sequence
  Synthetic
aggaaauuaaauauaauga

SEQ ID NO: 228957 - RNA, 20 nt, Artificial Sequence
  Synthetic
gaggaaauuaaauauaauga

SEQ ID NO: 228958 - RNA, 21 nt, Artificial Sequence
  Synthetic
agaggaaauuaaauauaauga

SEQ ID NO: 228959 - RNA, 22 nt, Artificial Sequence
  Synthetic
aagaggaaauuaaauauaauga

SEQ ID NO: 228960 - RNA, 23 nt, Artificial Sequence
  Synthetic
aaagaggaaauuaaauauaauga

SEQ ID NO: 228961 - RNA, 24 nt, Artificial Sequence
  Synthetic
caaagaggaaauuaaauauaauga

SEQ ID NO: 228962 - RNA, 18 nt, Artificial Sequence
  Synthetic
ggaggggaccacuaauga

SEQ ID NO: 228963 - RNA, 19 nt, Artificial Sequence
  Synthetic
aggaggggaccacuaauga

SEQ ID NO: 228964 - RNA, 20 nt, Artificial Sequence
  Synthetic
caggaggggaccacuaauga

SEQ ID NO: 228965 - RNA, 21 nt, Artificial Sequence
  Synthetic
ccaggaggggaccacuaauga

SEQ ID NO: 228966 - RNA, 22 nt, Artificial Sequence
  Synthetic
cccaggaggggaccacuaauga

SEQ ID NO: 228967 - RNA, 23 nt, Artificial Sequence
  Synthetic
gcccaggaggggaccacuaauga

SEQ ID NO: 228968 - RNA, 24 nt, Artificial Sequence
  Synthetic
ugcccaggaggggaccacuaauga

SEQ ID NO: 228969 - RNA, 18 nt, Artificial Sequence
  Synthetic
uaagcugguugcuaauga

SEQ ID NO: 228970 - RNA, 19 nt, Artificial Sequence
  Synthetic
cuaagcugguugcuaauga

SEQ ID NO: 228971 - RNA, 20 nt, Artificial Sequence
  Synthetic
ucuaagcugguugcuaauga

SEQ ID NO: 228972 - RNA, 21 nt, Artificial Sequence
  Synthetic
aucuaagcugguugcuaauga

SEQ ID NO: 228973 - RNA, 22 nt, Artificial Sequence
  Synthetic
gaucuaagcugguugcuaauga

SEQ ID NO: 228974 - RNA, 23 nt, Artificial Sequence
  Synthetic
ggaucuaagcugguugcuaauga

SEQ ID NO: 228975 - RNA, 24 nt, Artificial Sequence
  Synthetic
gggaucuaagcugguugcuaauga

SEQ ID NO: 228976 - RNA, 18 nt, Artificial Sequence
  Synthetic
uacaagagcuucuaauga

SEQ ID NO: 228977 - RNA, 19 nt, Artificial Sequence
  Synthetic
uuacaagagcuucuaauga

SEQ ID NO: 228978 - RNA, 20 nt, Artificial Sequence
  Synthetic
cuuacaagagcuucuaauga

SEQ ID NO: 228979 - RNA, 21 nt, Artificial Sequence
  Synthetic
ccuuacaagagcuucuaauga

SEQ ID NO: 228980 - RNA, 22 nt, Artificial Sequence
  Synthetic
gccuuacaagagcuucuaauga

SEQ ID NO: 228981 - RNA, 23 nt, Artificial Sequence
  Synthetic
ugccuuacaagagcuucuaauga

SEQ ID NO: 228982 - RNA, 24 nt, Artificial Sequence
  Synthetic
cugccuuacaagagcuucuaauga

SEQ ID NO: 228983 - RNA, 18 nt, Artificial Sequence
  Synthetic
guacaugucuucuaauga

SEQ ID NO: 228984 - RNA, 19 nt, Artificial Sequence
  Synthetic
uguacaugucuucuaauga

SEQ ID NO: 228985 - RNA, 20 nt, Artificial Sequence
  Synthetic
uuguacaugucuucuaauga

SEQ ID NO: 228986 - RNA, 21 nt, Artificial Sequence
  Synthetic
uuuguacaugucuucuaauga

SEQ ID NO: 228987 - RNA, 22 nt, Artificial Sequence
  Synthetic
uuuuguacaugucuucuaauga

SEQ ID NO: 228988 - RNA, 23 nt, Artificial Sequence
  Synthetic
uuuuuguacaugucuucuaauga

SEQ ID NO: 228989 - RNA, 24 nt, Artificial Sequence
  Synthetic
auuuuuguacaugucuucuaauga

SEQ ID NO: 228990 - RNA, 18 nt, Artificial Sequence
  Synthetic
uguuugccaaaguaauga

SEQ ID NO: 228991 - RNA, 19 nt, Artificial Sequence
  Synthetic
uuguuugccaaaguaauga

SEQ ID NO: 228992 - RNA, 20 nt, Artificial Sequence
  Synthetic
guuguuugccaaaguaauga

SEQ ID NO: 228993 - RNA, 21 nt, Artificial Sequence
  Synthetic
cguuguuugccaaaguaauga

SEQ ID NO: 228994 - RNA, 22 nt, Artificial Sequence
  Synthetic
acguuguuugccaaaguaauga

SEQ ID NO: 228995 - RNA, 23 nt, Artificial Sequence
  Synthetic
gacguuguuugccaaaguaauga

SEQ ID NO: 228996 - RNA, 24 nt, Artificial Sequence
  Synthetic
agacguuguuugccaaaguaauga

SEQ ID NO: 228997 - RNA, 18 nt, Artificial Sequence
  Synthetic
uuuuccuugucuuaauga

SEQ ID NO: 228998 - RNA, 19 nt, Artificial Sequence
  Synthetic
uuuuuccuugucuuaauga

SEQ ID NO: 228999 - RNA, 20 nt, Artificial Sequence
  Synthetic
uuuuuuccuugucuuaauga

SEQ ID NO: 229000 - RNA, 21 nt, Artificial Sequence
  Synthetic
cuuuuuuccuugucuuaauga

SEQ ID NO: 229001 - RNA, 22 nt, Artificial Sequence
  Synthetic
gcuuuuuuccuugucuuaauga

SEQ ID NO: 229002 - RNA, 23 nt, Artificial Sequence
  Synthetic
ggcuuuuuuccuugucuuaauga

SEQ ID NO: 229003 - RNA, 24 nt, Artificial Sequence
  Synthetic
aggcuuuuuuccuugucuuaauga

SEQ ID NO: 229004 - RNA, 18 nt, Artificial Sequence
  Synthetic
gaagagaagaguuaauga

SEQ ID NO: 229005 - RNA, 19 nt, Artificial Sequence
  Synthetic
ggaagagaagaguuaauga

SEQ ID NO: 229006 - RNA, 20 nt, Artificial Sequence
  Synthetic
uggaagagaagaguuaauga

SEQ ID NO: 229007 - RNA, 21 nt, Artificial Sequence
  Synthetic
auggaagagaagaguuaauga

SEQ ID NO: 229008 - RNA, 22 nt, Artificial Sequence
  Synthetic
gauggaagagaagaguuaauga

SEQ ID NO: 229009 - RNA, 23 nt, Artificial Sequence
  Synthetic
ugauggaagagaagaguuaauga

SEQ ID NO: 229010 - RNA, 24 nt, Artificial Sequence
  Synthetic
gugauggaagagaagaguuaauga

SEQ ID NO: 229011 - RNA, 18 nt, Artificial Sequence
  Synthetic
cacuuaauuaguuaauga

SEQ ID NO: 229012 - RNA, 19 nt, Artificial Sequence
  Synthetic
gcacuuaauuaguuaauga

SEQ ID NO: 229013 - RNA, 20 nt, Artificial Sequence
  Synthetic
ggcacuuaauuaguuaauga

SEQ ID NO: 229014 - RNA, 21 nt, Artificial Sequence
  Synthetic
uggcacuuaauuaguuaauga

SEQ ID NO: 229015 - RNA, 22 nt, Artificial Sequence
  Synthetic
uuggcacuuaauuaguuaauga

SEQ ID NO: 229016 - RNA, 23 nt, Artificial Sequence
  Synthetic
uuuggcacuuaauuaguuaauga

SEQ ID NO: 229017 - RNA, 24 nt, Artificial Sequence
  Synthetic
auuuggcacuuaauuaguuaauga

SEQ ID NO: 229018 - RNA, 18 nt, Artificial Sequence
  Synthetic
accuuaaaauuuuaauga

SEQ ID NO: 229019 - RNA, 19 nt, Artificial Sequence
  Synthetic
aaccuuaaaauuuuaauga

SEQ ID NO: 229020 - RNA, 20 nt, Artificial Sequence
  Synthetic
caaccuuaaaauuuuaauga

SEQ ID NO: 229021 - RNA, 21 nt, Artificial Sequence
  Synthetic
ucaaccuuaaaauuuuaauga

SEQ ID NO: 229022 - RNA, 22 nt, Artificial Sequence
  Synthetic
uucaaccuuaaaauuuuaauga

SEQ ID NO: 229023 - RNA, 23 nt, Artificial Sequence
  Synthetic
auucaaccuuaaaauuuuaauga

SEQ ID NO: 229024 - RNA, 24 nt, Artificial Sequence
  Synthetic
uauucaaccuuaaaauuuuaauga

SEQ ID NO: 229025 - RNA, 18 nt, Artificial Sequence
  Synthetic
aaauuuauuuuuuaauga

SEQ ID NO: 229026 - RNA, 19 nt, Artificial Sequence
  Synthetic
uaaauuuauuuuuuaauga

SEQ ID NO: 229027 - RNA, 20 nt, Artificial Sequence
  Synthetic
auaaauuuauuuuuuaauga

SEQ ID NO: 229028 - RNA, 21 nt, Artificial Sequence
  Synthetic
cauaaauuuauuuuuuaauga

SEQ ID NO: 229029 - RNA, 22 nt, Artificial Sequence
  Synthetic
gcauaaauuuauuuuuuaauga

SEQ ID NO: 229030 - RNA, 23 nt, Artificial Sequence
  Synthetic
ggcauaaauuuauuuuuuaauga

SEQ ID NO: 229031 - RNA, 24 nt, Artificial Sequence
  Synthetic
aggcauaaauuuauuuuuuaauga

SEQ ID NO: 229032 - RNA, 18 nt, Artificial Sequence
  Synthetic
caaaaaaaggaaacauga

SEQ ID NO: 229033 - RNA, 19 nt, Artificial Sequence
  Synthetic
acaaaaaaaggaaacauga

SEQ ID NO: 229034 - RNA, 20 nt, Artificial Sequence
  Synthetic
aacaaaaaaaggaaacauga

SEQ ID NO: 229035 - RNA, 21 nt, Artificial Sequence
  Synthetic
caacaaaaaaaggaaacauga

SEQ ID NO: 229036 - RNA, 22 nt, Artificial Sequence
  Synthetic
acaacaaaaaaaggaaacauga

SEQ ID NO: 229037 - RNA, 23 nt, Artificial Sequence
  Synthetic
aacaacaaaaaaaggaaacauga

SEQ ID NO: 229038 - RNA, 24 nt, Artificial Sequence
  Synthetic
caacaacaaaaaaaggaaacauga

SEQ ID NO: 229039 - RNA, 18 nt, Artificial Sequence
  Synthetic
gugccgcaguaaacauga

SEQ ID NO: 229040 - RNA, 19 nt, Artificial Sequence
  Synthetic
agugccgcaguaaacauga

SEQ ID NO: 229041 - RNA, 20 nt, Artificial Sequence
  Synthetic
uagugccgcaguaaacauga

SEQ ID NO: 229042 - RNA, 21 nt, Artificial Sequence
  Synthetic
auagugccgcaguaaacauga

SEQ ID NO: 229043 - RNA, 22 nt, Artificial Sequence
  Synthetic
aauagugccgcaguaaacauga

SEQ ID NO: 229044 - RNA, 23 nt, Artificial Sequence
  Synthetic
aaauagugccgcaguaaacauga

SEQ ID NO: 229045 - RNA, 24 nt, Artificial Sequence
  Synthetic
caaauagugccgcaguaaacauga

SEQ ID NO: 229046 - RNA, 18 nt, Artificial Sequence
  Synthetic
aacagucacccaacauga

SEQ ID NO: 229047 - RNA, 19 nt, Artificial Sequence
  Synthetic
gaacagucacccaacauga

SEQ ID NO: 229048 - RNA, 20 nt, Artificial Sequence
  Synthetic
agaacagucacccaacauga

SEQ ID NO: 229049 - RNA, 21 nt, Artificial Sequence
  Synthetic
aagaacagucacccaacauga

SEQ ID NO: 229050 - RNA, 22 nt, Artificial Sequence
  Synthetic
aaagaacagucacccaacauga

SEQ ID NO: 229051 - RNA, 23 nt, Artificial Sequence
  Synthetic
aaaagaacagucacccaacauga

SEQ ID NO: 229052 - RNA, 24 nt, Artificial Sequence
  Synthetic
uaaaagaacagucacccaacauga

SEQ ID NO: 229053 - RNA, 18 nt, Artificial Sequence
  Synthetic
aauaaaacaucaacauga

SEQ ID NO: 229054 - RNA, 19 nt, Artificial Sequence
  Synthetic
aaauaaaacaucaacauga

SEQ ID NO: 229055 - RNA, 20 nt, Artificial Sequence
  Synthetic
aaaauaaaacaucaacauga

SEQ ID NO: 229056 - RNA, 21 nt, Artificial Sequence
  Synthetic
gaaaauaaaacaucaacauga

SEQ ID NO: 229057 - RNA, 22 nt, Artificial Sequence
  Synthetic
ugaaaauaaaacaucaacauga

SEQ ID NO: 229058 - RNA, 23 nt, Artificial Sequence
  Synthetic
augaaaauaaaacaucaacauga

SEQ ID NO: 229059 - RNA, 24 nt, Artificial Sequence
  Synthetic
aaugaaaauaaaacaucaacauga

SEQ ID NO: 229060 - RNA, 18 nt, Artificial Sequence
  Synthetic
aaagggaagagaacauga

SEQ ID NO: 229061 - RNA, 19 nt, Artificial Sequence
  Synthetic
aaaagggaagagaacauga

SEQ ID NO: 229062 - RNA, 20 nt, Artificial Sequence
  Synthetic
aaaaagggaagagaacauga

SEQ ID NO: 229063 - RNA, 21 nt, Artificial Sequence
  Synthetic
uaaaaagggaagagaacauga

SEQ ID NO: 229064 - RNA, 22 nt, Artificial Sequence
  Synthetic
auaaaaagggaagagaacauga

SEQ ID NO: 229065 - RNA, 23 nt, Artificial Sequence
  Synthetic
uauaaaaagggaagagaacauga

SEQ ID NO: 229066 - RNA, 24 nt, Artificial Sequence
  Synthetic
uuauaaaaagggaagagaacauga

SEQ ID NO: 229067 - RNA, 18 nt, Artificial Sequence
  Synthetic
auaugcacuguaacauga

SEQ ID NO: 229068 - RNA, 19 nt, Artificial Sequence
  Synthetic
gauaugcacuguaacauga

SEQ ID NO: 229069 - RNA, 20 nt, Artificial Sequence
  Synthetic
ugauaugcacuguaacauga

SEQ ID NO: 229070 - RNA, 21 nt, Artificial Sequence
  Synthetic
cugauaugcacuguaacauga

SEQ ID NO: 229071 - RNA, 22 nt, Artificial Sequence
  Synthetic
acugauaugcacuguaacauga

SEQ ID NO: 229072 - RNA, 23 nt, Artificial Sequence
  Synthetic
uacugauaugcacuguaacauga

SEQ ID NO: 229073 - RNA, 24 nt, Artificial Sequence
  Synthetic
auacugauaugcacuguaacauga

SEQ ID NO: 229074 - RNA, 18 nt, Artificial Sequence
  Synthetic
agguaaagacacacauga

SEQ ID NO: 229075 - RNA, 19 nt, Artificial Sequence
  Synthetic
gagguaaagacacacauga

SEQ ID NO: 229076 - RNA, 20 nt, Artificial Sequence
  Synthetic
agagguaaagacacacauga

SEQ ID NO: 229077 - RNA, 21 nt, Artificial Sequence
  Synthetic
uagagguaaagacacacauga

SEQ ID NO: 229078 - RNA, 22 nt, Artificial Sequence
  Synthetic
guagagguaaagacacacauga

SEQ ID NO: 229079 - RNA, 23 nt, Artificial Sequence
  Synthetic
aguagagguaaagacacacauga

SEQ ID NO: 229080 - RNA, 24 nt, Artificial Sequence
  Synthetic
aaguagagguaaagacacacauga

SEQ ID NO: 229081 - RNA, 18 nt, Artificial Sequence
  Synthetic
auggagaugaagacauga

SEQ ID NO: 229082 - RNA, 19 nt, Artificial Sequence
  Synthetic
aauggagaugaagacauga

SEQ ID NO: 229083 - RNA, 20 nt, Artificial Sequence
  Synthetic
gaauggagaugaagacauga

SEQ ID NO: 229084 - RNA, 21 nt, Artificial Sequence
  Synthetic
ggaauggagaugaagacauga

SEQ ID NO: 229085 - RNA, 22 nt, Artificial Sequence
  Synthetic
aggaauggagaugaagacauga

SEQ ID NO: 229086 - RNA, 23 nt, Artificial Sequence
  Synthetic
aaggaauggagaugaagacauga

SEQ ID NO: 229087 - RNA, 24 nt, Artificial Sequence
  Synthetic
uaaggaauggagaugaagacauga

SEQ ID NO: 229088 - RNA, 18 nt, Artificial Sequence
  Synthetic
aacagaaaaaugacauga

SEQ ID NO: 229089 - RNA, 19 nt, Artificial Sequence
  Synthetic
aaacagaaaaaugacauga

SEQ ID NO: 229090 - RNA, 20 nt, Artificial Sequence
  Synthetic
gaaacagaaaaaugacauga

SEQ ID NO: 229091 - RNA, 21 nt, Artificial Sequence
  Synthetic
ugaaacagaaaaaugacauga

SEQ ID NO: 229092 - RNA, 22 nt, Artificial Sequence
  Synthetic
cugaaacagaaaaaugacauga

SEQ ID NO: 229093 - RNA, 23 nt, Artificial Sequence
  Synthetic
ccugaaacagaaaaaugacauga

SEQ ID NO: 229094 - RNA, 24 nt, Artificial Sequence
  Synthetic
uccugaaacagaaaaaugacauga

SEQ ID NO: 229095 - RNA, 18 nt, Artificial Sequence
  Synthetic
acuuuaauacauacauga

SEQ ID NO: 229096 - RNA, 19 nt, Artificial Sequence
  Synthetic
aacuuuaauacauacauga

SEQ ID NO: 229097 - RNA, 20 nt, Artificial Sequence
  Synthetic
aaacuuuaauacauacauga

SEQ ID NO: 229098 - RNA, 21 nt, Artificial Sequence
  Synthetic
uaaacuuuaauacauacauga

SEQ ID NO: 229099 - RNA, 22 nt, Artificial Sequence
  Synthetic
auaaacuuuaauacauacauga

SEQ ID NO: 229100 - RNA, 23 nt, Artificial Sequence
  Synthetic
cauaaacuuuaauacauacauga

SEQ ID NO: 229101 - RNA, 24 nt, Artificial Sequence
  Synthetic
ucauaaacuuuaauacauacauga

SEQ ID NO: 229102 - RNA, 18 nt, Artificial Sequence
  Synthetic
uccaaauuuuauacauga

SEQ ID NO: 229103 - RNA, 19 nt, Artificial Sequence
  Synthetic
uuccaaauuuuauacauga

SEQ ID NO: 229104 - RNA, 20 nt, Artificial Sequence
  Synthetic
uuuccaaauuuuauacauga

SEQ ID NO: 229105 - RNA, 21 nt, Artificial Sequence
  Synthetic
auuuccaaauuuuauacauga

SEQ ID NO: 229106 - RNA, 22 nt, Artificial Sequence
  Synthetic
cauuuccaaauuuuauacauga

SEQ ID NO: 229107 - RNA, 23 nt, Artificial Sequence
  Synthetic
ucauuuccaaauuuuauacauga

SEQ ID NO: 229108 - RNA, 24 nt, Artificial Sequence
  Synthetic
cucauuuccaaauuuuauacauga

SEQ ID NO: 229109 - RNA, 18 nt, Artificial Sequence
  Synthetic
guuuauaaggcuacauga

SEQ ID NO: 229110 - RNA, 19 nt, Artificial Sequence
  Synthetic
cguuuauaaggcuacauga

SEQ ID NO: 229111 - RNA, 20 nt, Artificial Sequence
  Synthetic
acguuuauaaggcuacauga

SEQ ID NO: 229112 - RNA, 21 nt, Artificial Sequence
  Synthetic
gacguuuauaaggcuacauga

SEQ ID NO: 229113 - RNA, 22 nt, Artificial Sequence
  Synthetic
agacguuuauaaggcuacauga

SEQ ID NO: 229114 - RNA, 23 nt, Artificial Sequence
  Synthetic
gagacguuuauaaggcuacauga

SEQ ID NO: 229115 - RNA, 24 nt, Artificial Sequence
  Synthetic
ggagacguuuauaaggcuacauga

SEQ ID NO: 229116 - RNA, 18 nt, Artificial Sequence
  Synthetic
caggcaagcuguacauga

SEQ ID NO: 229117 - RNA, 19 nt, Artificial Sequence
  Synthetic
ccaggcaagcuguacauga

SEQ ID NO: 229118 - RNA, 20 nt, Artificial Sequence
  Synthetic
gccaggcaagcuguacauga

SEQ ID NO: 229119 - RNA, 21 nt, Artificial Sequence
  Synthetic
cgccaggcaagcuguacauga

SEQ ID NO: 229120 - RNA, 22 nt, Artificial Sequence
  Synthetic
gcgccaggcaagcuguacauga

SEQ ID NO: 229121 - RNA, 23 nt, Artificial Sequence
  Synthetic
agcgccaggcaagcuguacauga

SEQ ID NO: 229122 - RNA, 24 nt, Artificial Sequence
  Synthetic
cagcgccaggcaagcuguacauga

SEQ ID NO: 229123 - RNA, 18 nt, Artificial Sequence
  Synthetic
aauuuuccuuguacauga

SEQ ID NO: 229124 - RNA, 19 nt, Artificial Sequence
  Synthetic
caauuuuccuuguacauga

SEQ ID NO: 229125 - RNA, 20 nt, Artificial Sequence
  Synthetic
ccaauuuuccuuguacauga

SEQ ID NO: 229126 - RNA, 21 nt, Artificial Sequence
  Synthetic
accaauuuuccuuguacauga

SEQ ID NO: 229127 - RNA, 22 nt, Artificial Sequence
  Synthetic
uaccaauuuuccuuguacauga

SEQ ID NO: 229128 - RNA, 23 nt, Artificial Sequence
  Synthetic
uuaccaauuuuccuuguacauga

SEQ ID NO: 229129 - RNA, 24 nt, Artificial Sequence
  Synthetic
cuuaccaauuuuccuuguacauga

SEQ ID NO: 229130 - RNA, 18 nt, Artificial Sequence
  Synthetic
gccucuguuaaaccauga

SEQ ID NO: 229131 - RNA, 19 nt, Artificial Sequence
  Synthetic
ugccucuguuaaaccauga

SEQ ID NO: 229132 - RNA, 20 nt, Artificial Sequence
  Synthetic
augccucuguuaaaccauga

SEQ ID NO: 229133 - RNA, 21 nt, Artificial Sequence
  Synthetic
gaugccucuguuaaaccauga

SEQ ID NO: 229134 - RNA, 22 nt, Artificial Sequence
  Synthetic
ugaugccucuguuaaaccauga

SEQ ID NO: 229135 - RNA, 23 nt, Artificial Sequence
  Synthetic
uugaugccucuguuaaaccauga

SEQ ID NO: 229136 - RNA, 24 nt, Artificial Sequence
  Synthetic
guugaugccucuguuaaaccauga

SEQ ID NO: 229137 - RNA, 18 nt, Artificial Sequence
  Synthetic
gggauuacauaaccauga

SEQ ID NO: 229138 - RNA, 19 nt, Artificial Sequence
  Synthetic
ugggauuacauaaccauga

SEQ ID NO: 229139 - RNA, 20 nt, Artificial Sequence
  Synthetic
augggauuacauaaccauga

SEQ ID NO: 229140 - RNA, 21 nt, Artificial Sequence
  Synthetic
uaugggauuacauaaccauga

SEQ ID NO: 229141 - RNA, 22 nt, Artificial Sequence
  Synthetic
uuaugggauuacauaaccauga

SEQ ID NO: 229142 - RNA, 23 nt, Artificial Sequence
  Synthetic
cuuaugggauuacauaaccauga

SEQ ID NO: 229143 - RNA, 24 nt, Artificial Sequence
  Synthetic
ucuuaugggauuacauaaccauga

SEQ ID NO: 229144 - RNA, 18 nt, Artificial Sequence
  Synthetic
aaaagcugaacaccauga

SEQ ID NO: 229145 - RNA, 19 nt, Artificial Sequence
  Synthetic
gaaaagcugaacaccauga

SEQ ID NO: 229146 - RNA, 20 nt, Artificial Sequence
  Synthetic
ggaaaagcugaacaccauga

SEQ ID NO: 229147 - RNA, 21 nt, Artificial Sequence
  Synthetic
aggaaaagcugaacaccauga

SEQ ID NO: 229148 - RNA, 22 nt, Artificial Sequence
  Synthetic
aaggaaaagcugaacaccauga

SEQ ID NO: 229149 - RNA, 23 nt, Artificial Sequence
  Synthetic
aaaggaaaagcugaacaccauga

SEQ ID NO: 229150 - RNA, 24 nt, Artificial Sequence
  Synthetic
caaaggaaaagcugaacaccauga

SEQ ID NO: 229151 - RNA, 18 nt, Artificial Sequence
  Synthetic
augauguaagcaccauga

SEQ ID NO: 229152 - RNA, 19 nt, Artificial Sequence
  Synthetic
uaugauguaagcaccauga

SEQ ID NO: 229153 - RNA, 20 nt, Artificial Sequence
  Synthetic
uuaugauguaagcaccauga

SEQ ID NO: 229154 - RNA, 21 nt, Artificial Sequence
  Synthetic
auuaugauguaagcaccauga

SEQ ID NO: 229155 - RNA, 22 nt, Artificial Sequence
  Synthetic
aauuaugauguaagcaccauga

SEQ ID NO: 229156 - RNA, 23 nt, Artificial Sequence
  Synthetic
caauuaugauguaagcaccauga

SEQ ID NO: 229157 - RNA, 24 nt, Artificial Sequence
  Synthetic
gcaauuaugauguaagcaccauga

SEQ ID NO: 229158 - RNA, 18 nt, Artificial Sequence
  Synthetic
uauuauuuuucaccauga

SEQ ID NO: 229159 - RNA, 19 nt, Artificial Sequence
  Synthetic
uuauuauuuuucaccauga

SEQ ID NO: 229160 - RNA, 20 nt, Artificial Sequence
  Synthetic
auuauuauuuuucaccauga

SEQ ID NO: 229161 - RNA, 21 nt, Artificial Sequence
  Synthetic
uauuauuauuuuucaccauga

SEQ ID NO: 229162 - RNA, 22 nt, Artificial Sequence
  Synthetic
uuauuauuauuuuucaccauga

SEQ ID NO: 229163 - RNA, 23 nt, Artificial Sequence
  Synthetic
auuauuauuauuuuucaccauga

SEQ ID NO: 229164 - RNA, 24 nt, Artificial Sequence
  Synthetic
cauuauuauuauuuuucaccauga

SEQ ID NO: 229165 - RNA, 18 nt, Artificial Sequence
  Synthetic
gccuuuguaauaccauga

SEQ ID NO: 229166 - RNA, 19 nt, Artificial Sequence
  Synthetic
agccuuuguaauaccauga

SEQ ID NO: 229167 - RNA, 20 nt, Artificial Sequence
  Synthetic
cagccuuuguaauaccauga

SEQ ID NO: 229168 - RNA, 21 nt, Artificial Sequence
  Synthetic
gcagccuuuguaauaccauga

SEQ ID NO: 229169 - RNA, 22 nt, Artificial Sequence
  Synthetic
ugcagccuuuguaauaccauga

SEQ ID NO: 229170 - RNA, 23 nt, Artificial Sequence
  Synthetic
cugcagccuuuguaauaccauga

SEQ ID NO: 229171 - RNA, 24 nt, Artificial Sequence
  Synthetic
gcugcagccuuuguaauaccauga

SEQ ID NO: 229172 - RNA, 18 nt, Artificial Sequence
  Synthetic
guguaaugaguaccauga

SEQ ID NO: 229173 - RNA, 19 nt, Artificial Sequence
  Synthetic
aguguaaugaguaccauga

SEQ ID NO: 229174 - RNA, 20 nt, Artificial Sequence
  Synthetic
caguguaaugaguaccauga

SEQ ID NO: 229175 - RNA, 21 nt, Artificial Sequence
  Synthetic
gcaguguaaugaguaccauga

SEQ ID NO: 229176 - RNA, 22 nt, Artificial Sequence
  Synthetic
ugcaguguaaugaguaccauga

SEQ ID NO: 229177 - RNA, 23 nt, Artificial Sequence
  Synthetic
augcaguguaaugaguaccauga

SEQ ID NO: 229178 - RNA, 24 nt, Artificial Sequence
  Synthetic
caugcaguguaaugaguaccauga

SEQ ID NO: 229179 - RNA, 18 nt, Artificial Sequence
  Synthetic
auacgguauuuaccauga

SEQ ID NO: 229180 - RNA, 19 nt, Artificial Sequence
  Synthetic
cauacgguauuuaccauga

SEQ ID NO: 229181 - RNA, 20 nt, Artificial Sequence
  Synthetic
gcauacgguauuuaccauga

SEQ ID NO: 229182 - RNA, 21 nt, Artificial Sequence
  Synthetic
ugcauacgguauuuaccauga

SEQ ID NO: 229183 - RNA, 22 nt, Artificial Sequence
  Synthetic
cugcauacgguauuuaccauga

SEQ ID NO: 229184 - RNA, 23 nt, Artificial Sequence
  Synthetic
gcugcauacgguauuuaccauga

SEQ ID NO: 229185 - RNA, 24 nt, Artificial Sequence
  Synthetic
agcugcauacgguauuuaccauga

SEQ ID NO: 229186 - RNA, 18 nt, Artificial Sequence
  Synthetic
uguacugacuacccauga

SEQ ID NO: 229187 - RNA, 19 nt, Artificial Sequence
  Synthetic
auguacugacuacccauga

SEQ ID NO: 229188 - RNA, 20 nt, Artificial Sequence
  Synthetic
cauguacugacuacccauga

SEQ ID NO: 229189 - RNA, 21 nt, Artificial Sequence
  Synthetic
acauguacugacuacccauga

SEQ ID NO: 229190 - RNA, 22 nt, Artificial Sequence
  Synthetic
aacauguacugacuacccauga

SEQ ID NO: 229191 - RNA, 23 nt, Artificial Sequence
  Synthetic
uaacauguacugacuacccauga

SEQ ID NO: 229192 - RNA, 24 nt, Artificial Sequence
  Synthetic
uuaacauguacugacuacccauga

SEQ ID NO: 229193 - RNA, 18 nt, Artificial Sequence
  Synthetic
cuuucauucuucccauga

SEQ ID NO: 229194 - RNA, 19 nt, Artificial Sequence
  Synthetic
ucuuucauucuucccauga

SEQ ID NO: 229195 - RNA, 20 nt, Artificial Sequence
  Synthetic
aucuuucauucuucccauga

SEQ ID NO: 229196 - RNA, 21 nt, Artificial Sequence
  Synthetic
caucuuucauucuucccauga

SEQ ID NO: 229197 - RNA, 22 nt, Artificial Sequence
  Synthetic
ucaucuuucauucuucccauga

SEQ ID NO: 229198 - RNA, 23 nt, Artificial Sequence
  Synthetic
gucaucuuucauucuucccauga

SEQ ID NO: 229199 - RNA, 24 nt, Artificial Sequence
  Synthetic
ugucaucuuucauucuucccauga

SEQ ID NO: 229200 - RNA, 18 nt, Artificial Sequence
  Synthetic
uaagaaauaucuccauga

SEQ ID NO: 229201 - RNA, 19 nt, Artificial Sequence
  Synthetic
auaagaaauaucuccauga

SEQ ID NO: 229202 - RNA, 20 nt, Artificial Sequence
  Synthetic
uauaagaaauaucuccauga

SEQ ID NO: 229203 - RNA, 21 nt, Artificial Sequence
  Synthetic
auauaagaaauaucuccauga

SEQ ID NO: 229204 - RNA, 22 nt, Artificial Sequence
  Synthetic
uauauaagaaauaucuccauga

SEQ ID NO: 229205 - RNA, 23 nt, Artificial Sequence
  Synthetic
auauauaagaaauaucuccauga

SEQ ID NO: 229206 - RNA, 24 nt, Artificial Sequence
  Synthetic
gauauauaagaaauaucuccauga

SEQ ID NO: 229207 - RNA, 18 nt, Artificial Sequence
  Synthetic
ucucaucuaauuccauga

SEQ ID NO: 229208 - RNA, 19 nt, Artificial Sequence
  Synthetic
uucucaucuaauuccauga

SEQ ID NO: 229209 - RNA, 20 nt, Artificial Sequence
  Synthetic
cuucucaucuaauuccauga

SEQ ID NO: 229210 - RNA, 21 nt, Artificial Sequence
  Synthetic
ucuucucaucuaauuccauga

SEQ ID NO: 229211 - RNA, 22 nt, Artificial Sequence
  Synthetic
cucuucucaucuaauuccauga

SEQ ID NO: 229212 - RNA, 23 nt, Artificial Sequence
  Synthetic
ccucuucucaucuaauuccauga

SEQ ID NO: 229213 - RNA, 24 nt, Artificial Sequence
  Synthetic
accucuucucaucuaauuccauga

SEQ ID NO: 229214 - RNA, 18 nt, Artificial Sequence
  Synthetic
ugugucaugauuccauga

SEQ ID NO: 229215 - RNA, 19 nt, Artificial Sequence
  Synthetic
uugugucaugauuccauga

SEQ ID NO: 229216 - RNA, 20 nt, Artificial Sequence
  Synthetic
guugugucaugauuccauga

SEQ ID NO: 229217 - RNA, 21 nt, Artificial Sequence
  Synthetic
uguugugucaugauuccauga

SEQ ID NO: 229218 - RNA, 22 nt, Artificial Sequence
  Synthetic
uuguugugucaugauuccauga

SEQ ID NO: 229219 - RNA, 23 nt, Artificial Sequence
  Synthetic
cuuguugugucaugauuccauga

SEQ ID NO: 229220 - RNA, 24 nt, Artificial Sequence
  Synthetic
ucuuguugugucaugauuccauga

SEQ ID NO: 229221 - RNA, 18 nt, Artificial Sequence
  Synthetic
uaugucagcaaagcauga

SEQ ID NO: 229222 - RNA, 19 nt, Artificial Sequence
  Synthetic
auaugucagcaaagcauga

SEQ ID NO: 229223 - RNA, 20 nt, Artificial Sequence
  Synthetic
cauaugucagcaaagcauga

SEQ ID NO: 229224 - RNA, 21 nt, Artificial Sequence
  Synthetic
gcauaugucagcaaagcauga

SEQ ID NO: 229225 - RNA, 22 nt, Artificial Sequence
  Synthetic
ugcauaugucagcaaagcauga

SEQ ID NO: 229226 - RNA, 23 nt, Artificial Sequence
  Synthetic
gugcauaugucagcaaagcauga

SEQ ID NO: 229227 - RNA, 24 nt, Artificial Sequence
  Synthetic
agugcauaugucagcaaagcauga

SEQ ID NO: 229228 - RNA, 18 nt, Artificial Sequence
  Synthetic
caguacguucaggcauga

SEQ ID NO: 229229 - RNA, 19 nt, Artificial Sequence
  Synthetic
gcaguacguucaggcauga

SEQ ID NO: 229230 - RNA, 20 nt, Artificial Sequence
  Synthetic
ugcaguacguucaggcauga

SEQ ID NO: 229231 - RNA, 21 nt, Artificial Sequence
  Synthetic
uugcaguacguucaggcauga

SEQ ID NO: 229232 - RNA, 22 nt, Artificial Sequence
  Synthetic
auugcaguacguucaggcauga

SEQ ID NO: 229233 - RNA, 23 nt, Artificial Sequence
  Synthetic
gauugcaguacguucaggcauga

SEQ ID NO: 229234 - RNA, 24 nt, Artificial Sequence
  Synthetic
agauugcaguacguucaggcauga

SEQ ID NO: 229235 - RNA, 18 nt, Artificial Sequence
  Synthetic
gacuguaguauggcauga

SEQ ID NO: 229236 - RNA, 19 nt, Artificial Sequence
  Synthetic
agacuguaguauggcauga

SEQ ID NO: 229237 - RNA, 20 nt, Artificial Sequence
  Synthetic
uagacuguaguauggcauga

SEQ ID NO: 229238 - RNA, 21 nt, Artificial Sequence
  Synthetic
auagacuguaguauggcauga

SEQ ID NO: 229239 - RNA, 22 nt, Artificial Sequence
  Synthetic
aauagacuguaguauggcauga

SEQ ID NO: 229240 - RNA, 23 nt, Artificial Sequence
  Synthetic
uaauagacuguaguauggcauga

SEQ ID NO: 229241 - RNA, 24 nt, Artificial Sequence
  Synthetic
guaauagacuguaguauggcauga

SEQ ID NO: 229242 - RNA, 18 nt, Artificial Sequence
  Synthetic
cagagagccaaaucauga

SEQ ID NO: 229243 - RNA, 19 nt, Artificial Sequence
  Synthetic
acagagagccaaaucauga

SEQ ID NO: 229244 - RNA, 20 nt, Artificial Sequence
  Synthetic
aacagagagccaaaucauga

SEQ ID NO: 229245 - RNA, 21 nt, Artificial Sequence
  Synthetic
aaacagagagccaaaucauga

SEQ ID NO: 229246 - RNA, 22 nt, Artificial Sequence
  Synthetic
caaacagagagccaaaucauga

SEQ ID NO: 229247 - RNA, 23 nt, Artificial Sequence
  Synthetic
acaaacagagagccaaaucauga

SEQ ID NO: 229248 - RNA, 24 nt, Artificial Sequence
  Synthetic
gacaaacagagagccaaaucauga

SEQ ID NO: 229249 - RNA, 18 nt, Artificial Sequence
  Synthetic
gugucaauucaaucauga

SEQ ID NO: 229250 - RNA, 19 nt, Artificial Sequence
  Synthetic
ggugucaauucaaucauga

SEQ ID NO: 229251 - RNA, 20 nt, Artificial Sequence
  Synthetic
uggugucaauucaaucauga

SEQ ID NO: 229252 - RNA, 21 nt, Artificial Sequence
  Synthetic
uuggugucaauucaaucauga

SEQ ID NO: 229253 - RNA, 22 nt, Artificial Sequence
  Synthetic
uuuggugucaauucaaucauga

SEQ ID NO: 229254 - RNA, 23 nt, Artificial Sequence
  Synthetic
auuuggugucaauucaaucauga

SEQ ID NO: 229255 - RNA, 24 nt, Artificial Sequence
  Synthetic
cauuuggugucaauucaaucauga

SEQ ID NO: 229256 - RNA, 18 nt, Artificial Sequence
  Synthetic
guauagguaccaucauga

SEQ ID NO: 229257 - RNA, 19 nt, Artificial Sequence
  Synthetic
gguauagguaccaucauga

SEQ ID NO: 229258 - RNA, 20 nt, Artificial Sequence
  Synthetic
agguauagguaccaucauga

SEQ ID NO: 229259 - RNA, 21 nt, Artificial Sequence
  Synthetic
gagguauagguaccaucauga

SEQ ID NO: 229260 - RNA, 22 nt, Artificial Sequence
  Synthetic
agagguauagguaccaucauga

SEQ ID NO: 229261 - RNA, 23 nt, Artificial Sequence
  Synthetic
uagagguauagguaccaucauga

SEQ ID NO: 229262 - RNA, 24 nt, Artificial Sequence
  Synthetic
cuagagguauagguaccaucauga

SEQ ID NO: 229263 - RNA, 18 nt, Artificial Sequence
  Synthetic
aaucugggaggaucauga

SEQ ID NO: 229264 - RNA, 19 nt, Artificial Sequence
  Synthetic
aaaucugggaggaucauga

SEQ ID NO: 229265 - RNA, 20 nt, Artificial Sequence
  Synthetic
aaaaucugggaggaucauga

SEQ ID NO: 229266 - RNA, 21 nt, Artificial Sequence
  Synthetic
caaaaucugggaggaucauga

SEQ ID NO: 229267 - RNA, 22 nt, Artificial Sequence
  Synthetic
ucaaaaucugggaggaucauga

SEQ ID NO: 229268 - RNA, 23 nt, Artificial Sequence
  Synthetic
gucaaaaucugggaggaucauga

SEQ ID NO: 229269 - RNA, 24 nt, Artificial Sequence
  Synthetic
ugucaaaaucugggaggaucauga

SEQ ID NO: 229270 - RNA, 18 nt, Artificial Sequence
  Synthetic
cauauuauucucucauga

SEQ ID NO: 229271 - RNA, 19 nt, Artificial Sequence
  Synthetic
gcauauuauucucucauga

SEQ ID NO: 229272 - RNA, 20 nt, Artificial Sequence
  Synthetic
ggcauauuauucucucauga

SEQ ID NO: 229273 - RNA, 21 nt, Artificial Sequence
  Synthetic
uggcauauuauucucucauga

SEQ ID NO: 229274 - RNA, 22 nt, Artificial Sequence
  Synthetic
auggcauauuauucucucauga

SEQ ID NO: 229275 - RNA, 23 nt, Artificial Sequence
  Synthetic
uauggcauauuauucucucauga

SEQ ID NO: 229276 - RNA, 24 nt, Artificial Sequence
  Synthetic
auauggcauauuauucucucauga

SEQ ID NO: 229277 - RNA, 18 nt, Artificial Sequence
  Synthetic
ugcaacuucaagucauga

SEQ ID NO: 229278 - RNA, 19 nt, Artificial Sequence
  Synthetic
gugcaacuucaagucauga

SEQ ID NO: 229279 - RNA, 20 nt, Artificial Sequence
  Synthetic
agugcaacuucaagucauga

SEQ ID NO: 229280 - RNA, 21 nt, Artificial Sequence
  Synthetic
gagugcaacuucaagucauga

SEQ ID NO: 229281 - RNA, 22 nt, Artificial Sequence
  Synthetic
agagugcaacuucaagucauga

SEQ ID NO: 229282 - RNA, 23 nt, Artificial Sequence
  Synthetic
aagagugcaacuucaagucauga

SEQ ID NO: 229283 - RNA, 24 nt, Artificial Sequence
  Synthetic
aaagagugcaacuucaagucauga

SEQ ID NO: 229284 - RNA, 18 nt, Artificial Sequence
  Synthetic
caugaagaaaauucauga

SEQ ID NO: 229285 - RNA, 19 nt, Artificial Sequence
  Synthetic
ccaugaagaaaauucauga

SEQ ID NO: 229286 - RNA, 20 nt, Artificial Sequence
  Synthetic
gccaugaagaaaauucauga

SEQ ID NO: 229287 - RNA, 21 nt, Artificial Sequence
  Synthetic
ugccaugaagaaaauucauga

SEQ ID NO: 229288 - RNA, 22 nt, Artificial Sequence
  Synthetic
augccaugaagaaaauucauga

SEQ ID NO: 229289 - RNA, 23 nt, Artificial Sequence
  Synthetic
gaugccaugaagaaaauucauga

SEQ ID NO: 229290 - RNA, 24 nt, Artificial Sequence
  Synthetic
agaugccaugaagaaaauucauga

SEQ ID NO: 229291 - RNA, 18 nt, Artificial Sequence
  Synthetic
uaaucagacauuucauga

SEQ ID NO: 229292 - RNA, 19 nt, Artificial Sequence
  Synthetic
guaaucagacauuucauga

SEQ ID NO: 229293 - RNA, 20 nt, Artificial Sequence
  Synthetic
aguaaucagacauuucauga

SEQ ID NO: 229294 - RNA, 21 nt, Artificial Sequence
  Synthetic
uaguaaucagacauuucauga

SEQ ID NO: 229295 - RNA, 22 nt, Artificial Sequence
  Synthetic
guaguaaucagacauuucauga

SEQ ID NO: 229296 - RNA, 23 nt, Artificial Sequence
  Synthetic
gguaguaaucagacauuucauga

SEQ ID NO: 229297 - RNA, 24 nt, Artificial Sequence
  Synthetic
ugguaguaaucagacauuucauga

SEQ ID NO: 229298 - RNA, 18 nt, Artificial Sequence
  Synthetic
caugaaugacuuucauga

SEQ ID NO: 229299 - RNA, 19 nt, Artificial Sequence
  Synthetic
gcaugaaugacuuucauga

SEQ ID NO: 229300 - RNA, 20 nt, Artificial Sequence
  Synthetic
agcaugaaugacuuucauga

SEQ ID NO: 229301 - RNA, 21 nt, Artificial Sequence
  Synthetic
aagcaugaaugacuuucauga

SEQ ID NO: 229302 - RNA, 22 nt, Artificial Sequence
  Synthetic
gaagcaugaaugacuuucauga

SEQ ID NO: 229303 - RNA, 23 nt, Artificial Sequence
  Synthetic
agaagcaugaaugacuuucauga

SEQ ID NO: 229304 - RNA, 24 nt, Artificial Sequence
  Synthetic
aagaagcaugaaugacuuucauga

SEQ ID NO: 229305 - RNA, 18 nt, Artificial Sequence
  Synthetic
uuuuacauguuuucauga

SEQ ID NO: 229306 - RNA, 19 nt, Artificial Sequence
  Synthetic
guuuuacauguuuucauga

SEQ ID NO: 229307 - RNA, 20 nt, Artificial Sequence
  Synthetic
uguuuuacauguuuucauga

SEQ ID NO: 229308 - RNA, 21 nt, Artificial Sequence
  Synthetic
auguuuuacauguuuucauga

SEQ ID NO: 229309 - RNA, 22 nt, Artificial Sequence
  Synthetic
aauguuuuacauguuuucauga

SEQ ID NO: 229310 - RNA, 23 nt, Artificial Sequence
  Synthetic
aaauguuuuacauguuuucauga

SEQ ID NO: 229311 - RNA, 24 nt, Artificial Sequence
  Synthetic
gaaauguuuuacauguuuucauga

SEQ ID NO: 229312 - RNA, 18 nt, Artificial Sequence
  Synthetic
gcauugacuuuuucauga

SEQ ID NO: 229313 - RNA, 19 nt, Artificial Sequence
  Synthetic
ugcauugacuuuuucauga

SEQ ID NO: 229314 - RNA, 20 nt, Artificial Sequence
  Synthetic
uugcauugacuuuuucauga

SEQ ID NO: 229315 - RNA, 21 nt, Artificial Sequence
  Synthetic
auugcauugacuuuuucauga

SEQ ID NO: 229316 - RNA, 22 nt, Artificial Sequence
  Synthetic
uauugcauugacuuuuucauga

SEQ ID NO: 229317 - RNA, 23 nt, Artificial Sequence
  Synthetic
auauugcauugacuuuuucauga

SEQ ID NO: 229318 - RNA, 24 nt, Artificial Sequence
  Synthetic
cauauugcauugacuuuuucauga

SEQ ID NO: 229319 - RNA, 18 nt, Artificial Sequence
  Synthetic
guuguuguuuaaagauga

SEQ ID NO: 229320 - RNA, 19 nt, Artificial Sequence
  Synthetic
uguuguuguuuaaagauga

SEQ ID NO: 229321 - RNA, 20 nt, Artificial Sequence
  Synthetic
uuguuguuguuuaaagauga

SEQ ID NO: 229322 - RNA, 21 nt, Artificial Sequence
  Synthetic
guuguuguuguuuaaagauga

SEQ ID NO: 229323 - RNA, 22 nt, Artificial Sequence
  Synthetic
uguuguuguuguuuaaagauga

SEQ ID NO: 229324 - RNA, 23 nt, Artificial Sequence
  Synthetic
uuguuguuguuguuuaaagauga

SEQ ID NO: 229325 - RNA, 24 nt, Artificial Sequence
  Synthetic
guuguuguuguuguuuaaagauga

SEQ ID NO: 229326 - RNA, 18 nt, Artificial Sequence
  Synthetic
agacaacccacaagauga

SEQ ID NO: 229327 - RNA, 19 nt, Artificial Sequence
  Synthetic
cagacaacccacaagauga

SEQ ID NO: 229328 - RNA, 20 nt, Artificial Sequence
  Synthetic
acagacaacccacaagauga

SEQ ID NO: 229329 - RNA, 21 nt, Artificial Sequence
  Synthetic
aacagacaacccacaagauga

SEQ ID NO: 229330 - RNA, 22 nt, Artificial Sequence
  Synthetic
aaacagacaacccacaagauga

SEQ ID NO: 229331 - RNA, 23 nt, Artificial Sequence
  Synthetic
uaaacagacaacccacaagauga

SEQ ID NO: 229332 - RNA, 24 nt, Artificial Sequence
  Synthetic
guaaacagacaacccacaagauga

SEQ ID NO: 229333 - RNA, 18 nt, Artificial Sequence
  Synthetic
augauaaugacaagauga

SEQ ID NO: 229334 - RNA, 19 nt, Artificial Sequence
  Synthetic
uaugauaaugacaagauga

SEQ ID NO: 229335 - RNA, 20 nt, Artificial Sequence
  Synthetic
guaugauaaugacaagauga

SEQ ID NO: 229336 - RNA, 21 nt, Artificial Sequence
  Synthetic
gguaugauaaugacaagauga

SEQ ID NO: 229337 - RNA, 22 nt, Artificial Sequence
  Synthetic
ugguaugauaaugacaagauga

SEQ ID NO: 229338 - RNA, 23 nt, Artificial Sequence
  Synthetic
gugguaugauaaugacaagauga

SEQ ID NO: 229339 - RNA, 24 nt, Artificial Sequence
  Synthetic
ugugguaugauaaugacaagauga

SEQ ID NO: 229340 - RNA, 18 nt, Artificial Sequence
  Synthetic
agagccuaaccaagauga

SEQ ID NO: 229341 - RNA, 19 nt, Artificial Sequence
  Synthetic
cagagccuaaccaagauga

SEQ ID NO: 229342 - RNA, 20 nt, Artificial Sequence
  Synthetic
acagagccuaaccaagauga

SEQ ID NO: 229343 - RNA, 21 nt, Artificial Sequence
  Synthetic
cacagagccuaaccaagauga

SEQ ID NO: 229344 - RNA, 22 nt, Artificial Sequence
  Synthetic
ccacagagccuaaccaagauga

SEQ ID NO: 229345 - RNA, 23 nt, Artificial Sequence
  Synthetic
cccacagagccuaaccaagauga

SEQ ID NO: 229346 - RNA, 24 nt, Artificial Sequence
  Synthetic
ccccacagagccuaaccaagauga

SEQ ID NO: 229347 - RNA, 18 nt, Artificial Sequence
  Synthetic
uggagggcuagaagauga

SEQ ID NO: 229348 - RNA, 19 nt, Artificial Sequence
  Synthetic
uuggagggcuagaagauga

SEQ ID NO: 229349 - RNA, 20 nt, Artificial Sequence
  Synthetic
uuuggagggcuagaagauga

SEQ ID NO: 229350 - RNA, 21 nt, Artificial Sequence
  Synthetic
guuuggagggcuagaagauga

SEQ ID NO: 229351 - RNA, 22 nt, Artificial Sequence
  Synthetic
aguuuggagggcuagaagauga

SEQ ID NO: 229352 - RNA, 23 nt, Artificial Sequence
  Synthetic
caguuuggagggcuagaagauga

SEQ ID NO: 229353 - RNA, 24 nt, Artificial Sequence
  Synthetic
acaguuuggagggcuagaagauga

SEQ ID NO: 229354 - RNA, 18 nt, Artificial Sequence
  Synthetic
augcuuaaaggaagauga

SEQ ID NO: 229355 - RNA, 19 nt, Artificial Sequence
  Synthetic
aaugcuuaaaggaagauga

SEQ ID NO: 229356 - RNA, 20 nt, Artificial Sequence
  Synthetic
aaaugcuuaaaggaagauga

SEQ ID NO: 229357 - RNA, 21 nt, Artificial Sequence
  Synthetic
gaaaugcuuaaaggaagauga

SEQ ID NO: 229358 - RNA, 22 nt, Artificial Sequence
  Synthetic
agaaaugcuuaaaggaagauga

SEQ ID NO: 229359 - RNA, 23 nt, Artificial Sequence
  Synthetic
cagaaaugcuuaaaggaagauga

SEQ ID NO: 229360 - RNA, 24 nt, Artificial Sequence
  Synthetic
ccagaaaugcuuaaaggaagauga

SEQ ID NO: 229361 - RNA, 18 nt, Artificial Sequence
  Synthetic
cuagagagacuaagauga

SEQ ID NO: 229362 - RNA, 19 nt, Artificial Sequence
  Synthetic
ucuagagagacuaagauga

SEQ ID NO: 229363 - RNA, 20 nt, Artificial Sequence
  Synthetic
aucuagagagacuaagauga

SEQ ID NO: 229364 - RNA, 21 nt, Artificial Sequence
  Synthetic
aaucuagagagacuaagauga

SEQ ID NO: 229365 - RNA, 22 nt, Artificial Sequence
  Synthetic
aaaucuagagagacuaagauga

SEQ ID NO: 229366 - RNA, 23 nt, Artificial Sequence
  Synthetic
uaaaucuagagagacuaagauga

SEQ ID NO: 229367 - RNA, 24 nt, Artificial Sequence
  Synthetic
uuaaaucuagagagacuaagauga

SEQ ID NO: 229368 - RNA, 18 nt, Artificial Sequence
  Synthetic
acagggcaacacagauga

SEQ ID NO: 229369 - RNA, 19 nt, Artificial Sequence
  Synthetic
cacagggcaacacagauga

SEQ ID NO: 229370 - RNA, 20 nt, Artificial Sequence
  Synthetic
gcacagggcaacacagauga

SEQ ID NO: 229371 - RNA, 21 nt, Artificial Sequence
  Synthetic
agcacagggcaacacagauga

SEQ ID NO: 229372 - RNA, 22 nt, Artificial Sequence
  Synthetic
uagcacagggcaacacagauga

SEQ ID NO: 229373 - RNA, 23 nt, Artificial Sequence
  Synthetic
uuagcacagggcaacacagauga

SEQ ID NO: 229374 - RNA, 24 nt, Artificial Sequence
  Synthetic
uuuagcacagggcaacacagauga

SEQ ID NO: 229375 - RNA, 18 nt, Artificial Sequence
  Synthetic
aaaugugucuucagauga

SEQ ID NO: 229376 - RNA, 19 nt, Artificial Sequence
  Synthetic
caaaugugucuucagauga

SEQ ID NO: 229377 - RNA, 20 nt, Artificial Sequence
  Synthetic
ccaaaugugucuucagauga

SEQ ID NO: 229378 - RNA, 21 nt, Artificial Sequence
  Synthetic
cccaaaugugucuucagauga

SEQ ID NO: 229379 - RNA, 22 nt, Artificial Sequence
  Synthetic
acccaaaugugucuucagauga

SEQ ID NO: 229380 - RNA, 23 nt, Artificial Sequence
  Synthetic
cacccaaaugugucuucagauga

SEQ ID NO: 229381 - RNA, 24 nt, Artificial Sequence
  Synthetic
ucacccaaaugugucuucagauga

SEQ ID NO: 229382 - RNA, 18 nt, Artificial Sequence
  Synthetic
aacuuaaguuucagauga

SEQ ID NO: 229383 - RNA, 19 nt, Artificial Sequence
  Synthetic
uaacuuaaguuucagauga

SEQ ID NO: 229384 - RNA, 20 nt, Artificial Sequence
  Synthetic
auaacuuaaguuucagauga

SEQ ID NO: 229385 - RNA, 21 nt, Artificial Sequence
  Synthetic
gauaacuuaaguuucagauga

SEQ ID NO: 229386 - RNA, 22 nt, Artificial Sequence
  Synthetic
ugauaacuuaaguuucagauga

SEQ ID NO: 229387 - RNA, 23 nt, Artificial Sequence
  Synthetic
gugauaacuuaaguuucagauga

SEQ ID NO: 229388 - RNA, 24 nt, Artificial Sequence
  Synthetic
ugugauaacuuaaguuucagauga

SEQ ID NO: 229389 - RNA, 18 nt, Artificial Sequence
  Synthetic
ucagggaaaaagagauga

SEQ ID NO: 229390 - RNA, 19 nt, Artificial Sequence
  Synthetic
cucagggaaaaagagauga

SEQ ID NO: 229391 - RNA, 20 nt, Artificial Sequence
  Synthetic
acucagggaaaaagagauga

SEQ ID NO: 229392 - RNA, 21 nt, Artificial Sequence
  Synthetic
uacucagggaaaaagagauga

SEQ ID NO: 229393 - RNA, 22 nt, Artificial Sequence
  Synthetic
auacucagggaaaaagagauga

SEQ ID NO: 229394 - RNA, 23 nt, Artificial Sequence
  Synthetic
gauacucagggaaaaagagauga

SEQ ID NO: 229395 - RNA, 24 nt, Artificial Sequence
  Synthetic
ugauacucagggaaaaagagauga

SEQ ID NO: 229396 - RNA, 18 nt, Artificial Sequence
  Synthetic
uaccugagcaagagauga

SEQ ID NO: 229397 - RNA, 19 nt, Artificial Sequence
  Synthetic
guaccugagcaagagauga

SEQ ID NO: 229398 - RNA, 20 nt, Artificial Sequence
  Synthetic
aguaccugagcaagagauga

SEQ ID NO: 229399 - RNA, 21 nt, Artificial Sequence
  Synthetic
uaguaccugagcaagagauga

SEQ ID NO: 229400 - RNA, 22 nt, Artificial Sequence
  Synthetic
uuaguaccugagcaagagauga

SEQ ID NO: 229401 - RNA, 23 nt, Artificial Sequence
  Synthetic
uuuaguaccugagcaagagauga

SEQ ID NO: 229402 - RNA, 24 nt, Artificial Sequence
  Synthetic
uuuuaguaccugagcaagagauga

SEQ ID NO: 229403 - RNA, 18 nt, Artificial Sequence
  Synthetic
accugagcccagagauga

SEQ ID NO: 229404 - RNA, 19 nt, Artificial Sequence
  Synthetic
uaccugagcccagagauga

SEQ ID NO: 229405 - RNA, 20 nt, Artificial Sequence
  Synthetic
cuaccugagcccagagauga

SEQ ID NO: 229406 - RNA, 21 nt, Artificial Sequence
  Synthetic
ccuaccugagcccagagauga

SEQ ID NO: 229407 - RNA, 22 nt, Artificial Sequence
  Synthetic
gccuaccugagcccagagauga

SEQ ID NO: 229408 - RNA, 23 nt, Artificial Sequence
  Synthetic
agccuaccugagcccagagauga

SEQ ID NO: 229409 - RNA, 24 nt, Artificial Sequence
  Synthetic
cagccuaccugagcccagagauga

SEQ ID NO: 229410 - RNA, 18 nt, Artificial Sequence
  Synthetic
uagaaaagauagagauga

SEQ ID NO: 229411 - RNA, 19 nt, Artificial Sequence
  Synthetic
cuagaaaagauagagauga

SEQ ID NO: 229412 - RNA, 20 nt, Artificial Sequence
  Synthetic
ucuagaaaagauagagauga

SEQ ID NO: 229413 - RNA, 21 nt, Artificial Sequence
  Synthetic
aucuagaaaagauagagauga

SEQ ID NO: 229414 - RNA, 22 nt, Artificial Sequence
  Synthetic
uaucuagaaaagauagagauga

SEQ ID NO: 229415 - RNA, 23 nt, Artificial Sequence
  Synthetic
auaucuagaaaagauagagauga

SEQ ID NO: 229416 - RNA, 24 nt, Artificial Sequence
  Synthetic
gauaucuagaaaagauagagauga

SEQ ID NO: 229417 - RNA, 18 nt, Artificial Sequence
  Synthetic
guaagugccaggagauga

SEQ ID NO: 229418 - RNA, 19 nt, Artificial Sequence
  Synthetic
gguaagugccaggagauga

SEQ ID NO: 229419 - RNA, 20 nt, Artificial Sequence
  Synthetic
agguaagugccaggagauga

SEQ ID NO: 229420 - RNA, 21 nt, Artificial Sequence
  Synthetic
gagguaagugccaggagauga

SEQ ID NO: 229421 - RNA, 22 nt, Artificial Sequence
  Synthetic
agagguaagugccaggagauga

SEQ ID NO: 229422 - RNA, 23 nt, Artificial Sequence
  Synthetic
gagagguaagugccaggagauga

SEQ ID NO: 229423 - RNA, 24 nt, Artificial Sequence
  Synthetic
ggagagguaagugccaggagauga

SEQ ID NO: 229424 - RNA, 18 nt, Artificial Sequence
  Synthetic
uaaaucugugguagauga

SEQ ID NO: 229425 - RNA, 19 nt, Artificial Sequence
  Synthetic
guaaaucugugguagauga

SEQ ID NO: 229426 - RNA, 20 nt, Artificial Sequence
  Synthetic
aguaaaucugugguagauga

SEQ ID NO: 229427 - RNA, 21 nt, Artificial Sequence
  Synthetic
caguaaaucugugguagauga

SEQ ID NO: 229428 - RNA, 22 nt, Artificial Sequence
  Synthetic
ucaguaaaucugugguagauga

SEQ ID NO: 229429 - RNA, 23 nt, Artificial Sequence
  Synthetic
cucaguaaaucugugguagauga

SEQ ID NO: 229430 - RNA, 24 nt, Artificial Sequence
  Synthetic
gcucaguaaaucugugguagauga

SEQ ID NO: 229431 - RNA, 18 nt, Artificial Sequence
  Synthetic
ucuagcccaauuagauga

SEQ ID NO: 229432 - RNA, 19 nt, Artificial Sequence
  Synthetic
aucuagcccaauuagauga

SEQ ID NO: 229433 - RNA, 20 nt, Artificial Sequence
  Synthetic
gaucuagcccaauuagauga

SEQ ID NO: 229434 - RNA, 21 nt, Artificial Sequence
  Synthetic
agaucuagcccaauuagauga

SEQ ID NO: 229435 - RNA, 22 nt, Artificial Sequence
  Synthetic
gagaucuagcccaauuagauga

SEQ ID NO: 229436 - RNA, 23 nt, Artificial Sequence
  Synthetic
agagaucuagcccaauuagauga

SEQ ID NO: 229437 - RNA, 24 nt, Artificial Sequence
  Synthetic
uagagaucuagcccaauuagauga

SEQ ID NO: 229438 - RNA, 18 nt, Artificial Sequence
  Synthetic
acuuccuaugcucgauga

SEQ ID NO: 229439 - RNA, 19 nt, Artificial Sequence
  Synthetic
gacuuccuaugcucgauga

SEQ ID NO: 229440 - RNA, 20 nt, Artificial Sequence
  Synthetic
ugacuuccuaugcucgauga

SEQ ID NO: 229441 - RNA, 21 nt, Artificial Sequence
  Synthetic
uugacuuccuaugcucgauga

SEQ ID NO: 229442 - RNA, 22 nt, Artificial Sequence
  Synthetic
auugacuuccuaugcucgauga

SEQ ID NO: 229443 - RNA, 23 nt, Artificial Sequence
  Synthetic
uauugacuuccuaugcucgauga

SEQ ID NO: 229444 - RNA, 24 nt, Artificial Sequence
  Synthetic
auauugacuuccuaugcucgauga

SEQ ID NO: 229445 - RNA, 18 nt, Artificial Sequence
  Synthetic
cucuagggcugucgauga

SEQ ID NO: 229446 - RNA, 19 nt, Artificial Sequence
  Synthetic
ucucuagggcugucgauga

SEQ ID NO: 229447 - RNA, 20 nt, Artificial Sequence
  Synthetic
uucucuagggcugucgauga

SEQ ID NO: 229448 - RNA, 21 nt, Artificial Sequence
  Synthetic
cuucucuagggcugucgauga

SEQ ID NO: 229449 - RNA, 22 nt, Artificial Sequence
  Synthetic
acuucucuagggcugucgauga

SEQ ID NO: 229450 - RNA, 23 nt, Artificial Sequence
  Synthetic
aacuucucuagggcugucgauga

SEQ ID NO: 229451 - RNA, 24 nt, Artificial Sequence
  Synthetic
uaacuucucuagggcugucgauga

SEQ ID NO: 229452 - RNA, 18 nt, Artificial Sequence
  Synthetic
aaaacaaaaugaggauga

SEQ ID NO: 229453 - RNA, 19 nt, Artificial Sequence
  Synthetic
caaaacaaaaugaggauga

SEQ ID NO: 229454 - RNA, 20 nt, Artificial Sequence
  Synthetic
acaaaacaaaaugaggauga

SEQ ID NO: 229455 - RNA, 21 nt, Artificial Sequence
  Synthetic
aacaaaacaaaaugaggauga

SEQ ID NO: 229456 - RNA, 22 nt, Artificial Sequence
  Synthetic
aaacaaaacaaaaugaggauga

SEQ ID NO: 229457 - RNA, 23 nt, Artificial Sequence
  Synthetic
aaaacaaaacaaaaugaggauga

SEQ ID NO: 229458 - RNA, 24 nt, Artificial Sequence
  Synthetic
aaaaacaaaacaaaaugaggauga

SEQ ID NO: 229459 - RNA, 18 nt, Artificial Sequence
  Synthetic
aaaagcaaaauaggauga

SEQ ID NO: 229460 - RNA, 19 nt, Artificial Sequence
  Synthetic
gaaaagcaaaauaggauga

SEQ ID NO: 229461 - RNA, 20 nt, Artificial Sequence
  Synthetic
agaaaagcaaaauaggauga

SEQ ID NO: 229462 - RNA, 21 nt, Artificial Sequence
  Synthetic
aagaaaagcaaaauaggauga

SEQ ID NO: 229463 - RNA, 22 nt, Artificial Sequence
  Synthetic
gaagaaaagcaaaauaggauga

SEQ ID NO: 229464 - RNA, 23 nt, Artificial Sequence
  Synthetic
agaagaaaagcaaaauaggauga

SEQ ID NO: 229465 - RNA, 24 nt, Artificial Sequence
  Synthetic
gagaagaaaagcaaaauaggauga

SEQ ID NO: 229466 - RNA, 18 nt, Artificial Sequence
  Synthetic
uauagaauuaggggauga

SEQ ID NO: 229467 - RNA, 19 nt, Artificial Sequence
  Synthetic
uuauagaauuaggggauga

SEQ ID NO: 229468 - RNA, 20 nt, Artificial Sequence
  Synthetic
cuuauagaauuaggggauga

SEQ ID NO: 229469 - RNA, 21 nt, Artificial Sequence
  Synthetic
ucuuauagaauuaggggauga

SEQ ID NO: 229470 - RNA, 22 nt, Artificial Sequence
  Synthetic
uucuuauagaauuaggggauga

SEQ ID NO: 229471 - RNA, 23 nt, Artificial Sequence
  Synthetic
uuucuuauagaauuaggggauga

SEQ ID NO: 229472 - RNA, 24 nt, Artificial Sequence
  Synthetic
uuuucuuauagaauuaggggauga

SEQ ID NO: 229473 - RNA, 18 nt, Artificial Sequence
  Synthetic
aggaaggaaaauggauga

SEQ ID NO: 229474 - RNA, 19 nt, Artificial Sequence
  Synthetic
caggaaggaaaauggauga

SEQ ID NO: 229475 - RNA, 20 nt, Artificial Sequence
  Synthetic
ucaggaaggaaaauggauga

SEQ ID NO: 229476 - RNA, 21 nt, Artificial Sequence
  Synthetic
uucaggaaggaaaauggauga

SEQ ID NO: 229477 - RNA, 22 nt, Artificial Sequence
  Synthetic
auucaggaaggaaaauggauga

SEQ ID NO: 229478 - RNA, 23 nt, Artificial Sequence
  Synthetic
uauucaggaaggaaaauggauga

SEQ ID NO: 229479 - RNA, 24 nt, Artificial Sequence
  Synthetic
uuauucaggaaggaaaauggauga

SEQ ID NO: 229480 - RNA, 18 nt, Artificial Sequence
  Synthetic
cagcagaucaauggauga

SEQ ID NO: 229481 - RNA, 19 nt, Artificial Sequence
  Synthetic
ucagcagaucaauggauga

SEQ ID NO: 229482 - RNA, 20 nt, Artificial Sequence
  Synthetic
aucagcagaucaauggauga

SEQ ID NO: 229483 - RNA, 21 nt, Artificial Sequence
  Synthetic
caucagcagaucaauggauga

SEQ ID NO: 229484 - RNA, 22 nt, Artificial Sequence
  Synthetic
gcaucagcagaucaauggauga

SEQ ID NO: 229485 - RNA, 23 nt, Artificial Sequence
  Synthetic
ggcaucagcagaucaauggauga

SEQ ID NO: 229486 - RNA, 24 nt, Artificial Sequence
  Synthetic
aggcaucagcagaucaauggauga

SEQ ID NO: 229487 - RNA, 18 nt, Artificial Sequence
  Synthetic
gcacuucagccuggauga

SEQ ID NO: 229488 - RNA, 19 nt, Artificial Sequence
  Synthetic
ugcacuucagccuggauga

SEQ ID NO: 229489 - RNA, 20 nt, Artificial Sequence
  Synthetic
cugcacuucagccuggauga

SEQ ID NO: 229490 - RNA, 21 nt, Artificial Sequence
  Synthetic
acugcacuucagccuggauga

SEQ ID NO: 229491 - RNA, 22 nt, Artificial Sequence
  Synthetic
cacugcacuucagccuggauga

SEQ ID NO: 229492 - RNA, 23 nt, Artificial Sequence
  Synthetic
ccacugcacuucagccuggauga

SEQ ID NO: 229493 - RNA, 24 nt, Artificial Sequence
  Synthetic
gccacugcacuucagccuggauga

SEQ ID NO: 229494 - RNA, 18 nt, Artificial Sequence
  Synthetic
uucugcuuaaguggauga

SEQ ID NO: 229495 - RNA, 19 nt, Artificial Sequence
  Synthetic
uuucugcuuaaguggauga

SEQ ID NO: 229496 - RNA, 20 nt, Artificial Sequence
  Synthetic
auuucugcuuaaguggauga

SEQ ID NO: 229497 - RNA, 21 nt, Artificial Sequence
  Synthetic
aauuucugcuuaaguggauga

SEQ ID NO: 229498 - RNA, 22 nt, Artificial Sequence
  Synthetic
caauuucugcuuaaguggauga

SEQ ID NO: 229499 - RNA, 23 nt, Artificial Sequence
  Synthetic
acaauuucugcuuaaguggauga

SEQ ID NO: 229500 - RNA, 24 nt, Artificial Sequence
  Synthetic
aacaauuucugcuuaaguggauga

SEQ ID NO: 229501 - RNA, 18 nt, Artificial Sequence
  Synthetic
uguuuuggucaaugauga

SEQ ID NO: 229502 - RNA, 19 nt, Artificial Sequence
  Synthetic
uuguuuuggucaaugauga

SEQ ID NO: 229503 - RNA, 20 nt, Artificial Sequence
  Synthetic
cuuguuuuggucaaugauga

SEQ ID NO: 229504 - RNA, 21 nt, Artificial Sequence
  Synthetic
ucuuguuuuggucaaugauga

SEQ ID NO: 229505 - RNA, 22 nt, Artificial Sequence
  Synthetic
gucuuguuuuggucaaugauga

SEQ ID NO: 229506 - RNA, 23 nt, Artificial Sequence
  Synthetic
ugucuuguuuuggucaaugauga

SEQ ID NO: 229507 - RNA, 24 nt, Artificial Sequence
  Synthetic
augucuuguuuuggucaaugauga

SEQ ID NO: 229508 - RNA, 18 nt, Artificial Sequence
  Synthetic
aaguagaugggaugauga

SEQ ID NO: 229509 - RNA, 19 nt, Artificial Sequence
  Synthetic
uaaguagaugggaugauga

SEQ ID NO: 229510 - RNA, 20 nt, Artificial Sequence
  Synthetic
uuaaguagaugggaugauga

SEQ ID NO: 229511 - RNA, 21 nt, Artificial Sequence
  Synthetic
guuaaguagaugggaugauga

SEQ ID NO: 229512 - RNA, 22 nt, Artificial Sequence
  Synthetic
cguuaaguagaugggaugauga

SEQ ID NO: 229513 - RNA, 23 nt, Artificial Sequence
  Synthetic
ucguuaaguagaugggaugauga

SEQ ID NO: 229514 - RNA, 24 nt, Artificial Sequence
  Synthetic
gucguuaaguagaugggaugauga

SEQ ID NO: 229515 - RNA, 18 nt, Artificial Sequence
  Synthetic
uggggucugaacugauga

SEQ ID NO: 229516 - RNA, 19 nt, Artificial Sequence
  Synthetic
uuggggucugaacugauga

SEQ ID NO: 229517 - RNA, 20 nt, Artificial Sequence
  Synthetic
uuuggggucugaacugauga

SEQ ID NO: 229518 - RNA, 21 nt, Artificial Sequence
  Synthetic
cuuuggggucugaacugauga

SEQ ID NO: 229519 - RNA, 22 nt, Artificial Sequence
  Synthetic
gcuuuggggucugaacugauga

SEQ ID NO: 229520 - RNA, 23 nt, Artificial Sequence
  Synthetic
ugcuuuggggucugaacugauga

SEQ ID NO: 229521 - RNA, 24 nt, Artificial Sequence
  Synthetic
gugcuuuggggucugaacugauga

SEQ ID NO: 229522 - RNA, 18 nt, Artificial Sequence
  Synthetic
gggguuugauccugauga

SEQ ID NO: 229523 - RNA, 19 nt, Artificial Sequence
  Synthetic
ugggguuugauccugauga

SEQ ID NO: 229524 - RNA, 20 nt, Artificial Sequence
  Synthetic
cugggguuugauccugauga

SEQ ID NO: 229525 - RNA, 21 nt, Artificial Sequence
  Synthetic
acugggguuugauccugauga

SEQ ID NO: 229526 - RNA, 22 nt, Artificial Sequence
  Synthetic
cacugggguuugauccugauga

SEQ ID NO: 229527 - RNA, 23 nt, Artificial Sequence
  Synthetic
ccacugggguuugauccugauga

SEQ ID NO: 229528 - RNA, 24 nt, Artificial Sequence
  Synthetic
gccacugggguuugauccugauga

SEQ ID NO: 229529 - RNA, 18 nt, Artificial Sequence
  Synthetic
gcuccugagugcugauga

SEQ ID NO: 229530 - RNA, 19 nt, Artificial Sequence
  Synthetic
cgcuccugagugcugauga

SEQ ID NO: 229531 - RNA, 20 nt, Artificial Sequence
  Synthetic
ucgcuccugagugcugauga

SEQ ID NO: 229532 - RNA, 21 nt, Artificial Sequence
  Synthetic
aucgcuccugagugcugauga

SEQ ID NO: 229533 - RNA, 22 nt, Artificial Sequence
  Synthetic
caucgcuccugagugcugauga

SEQ ID NO: 229534 - RNA, 23 nt, Artificial Sequence
  Synthetic
ucaucgcuccugagugcugauga

SEQ ID NO: 229535 - RNA, 24 nt, Artificial Sequence
  Synthetic
aucaucgcuccugagugcugauga

SEQ ID NO: 229536 - RNA, 18 nt, Artificial Sequence
  Synthetic
uaccagguuugcugauga

SEQ ID NO: 229537 - RNA, 19 nt, Artificial Sequence
  Synthetic
cuaccagguuugcugauga

SEQ ID NO: 229538 - RNA, 20 nt, Artificial Sequence
  Synthetic
acuaccagguuugcugauga

SEQ ID NO: 229539 - RNA, 21 nt, Artificial Sequence
  Synthetic
cacuaccagguuugcugauga

SEQ ID NO: 229540 - RNA, 22 nt, Artificial Sequence
  Synthetic
gcacuaccagguuugcugauga

SEQ ID NO: 229541 - RNA, 23 nt, Artificial Sequence
  Synthetic
agcacuaccagguuugcugauga

SEQ ID NO: 229542 - RNA, 24 nt, Artificial Sequence
  Synthetic
uagcacuaccagguuugcugauga

SEQ ID NO: 229543 - RNA, 18 nt, Artificial Sequence
  Synthetic
caaugccaccagugauga

SEQ ID NO: 229544 - RNA, 19 nt, Artificial Sequence
  Synthetic
gcaaugccaccagugauga

SEQ ID NO: 229545 - RNA, 20 nt, Artificial Sequence
  Synthetic
ugcaaugccaccagugauga

SEQ ID NO: 229546 - RNA, 21 nt, Artificial Sequence
  Synthetic
uugcaaugccaccagugauga

SEQ ID NO: 229547 - RNA, 22 nt, Artificial Sequence
  Synthetic
uuugcaaugccaccagugauga

SEQ ID NO: 229548 - RNA, 23 nt, Artificial Sequence
  Synthetic
uuuugcaaugccaccagugauga

SEQ ID NO: 229549 - RNA, 24 nt, Artificial Sequence
  Synthetic
auuuugcaaugccaccagugauga

SEQ ID NO: 229550 - RNA, 18 nt, Artificial Sequence
  Synthetic
uacagaauucagugauga

SEQ ID NO: 229551 - RNA, 19 nt, Artificial Sequence
  Synthetic
cuacagaauucagugauga

SEQ ID NO: 229552 - RNA, 20 nt, Artificial Sequence
  Synthetic
ucuacagaauucagugauga

SEQ ID NO: 229553 - RNA, 21 nt, Artificial Sequence
  Synthetic
aucuacagaauucagugauga

SEQ ID NO: 229554 - RNA, 22 nt, Artificial Sequence
  Synthetic
aaucuacagaauucagugauga

SEQ ID NO: 229555 - RNA, 23 nt, Artificial Sequence
  Synthetic
aaaucuacagaauucagugauga

SEQ ID NO: 229556 - RNA, 24 nt, Artificial Sequence
  Synthetic
aaaaucuacagaauucagugauga

SEQ ID NO: 229557 - RNA, 18 nt, Artificial Sequence
  Synthetic
agaugacaauagugauga

SEQ ID NO: 229558 - RNA, 19 nt, Artificial Sequence
  Synthetic
aagaugacaauagugauga

SEQ ID NO: 229559 - RNA, 20 nt, Artificial Sequence
  Synthetic
aaagaugacaauagugauga

SEQ ID NO: 229560 - RNA, 21 nt, Artificial Sequence
  Synthetic
aaaagaugacaauagugauga

SEQ ID NO: 229561 - RNA, 22 nt, Artificial Sequence
  Synthetic
gaaaagaugacaauagugauga

SEQ ID NO: 229562 - RNA, 23 nt, Artificial Sequence
  Synthetic
ugaaaagaugacaauagugauga

SEQ ID NO: 229563 - RNA, 24 nt, Artificial Sequence
  Synthetic
augaaaagaugacaauagugauga

SEQ ID NO: 229564 - RNA, 18 nt, Artificial Sequence
  Synthetic
aaacgaugauggugauga

SEQ ID NO: 229565 - RNA, 19 nt, Artificial Sequence
  Synthetic
gaaacgaugauggugauga

SEQ ID NO: 229566 - RNA, 20 nt, Artificial Sequence
  Synthetic
agaaacgaugauggugauga

SEQ ID NO: 229567 - RNA, 21 nt, Artificial Sequence
  Synthetic
aagaaacgaugauggugauga

SEQ ID NO: 229568 - RNA, 22 nt, Artificial Sequence
  Synthetic
gaagaaacgaugauggugauga

SEQ ID NO: 229569 - RNA, 23 nt, Artificial Sequence
  Synthetic
ugaagaaacgaugauggugauga

SEQ ID NO: 229570 - RNA, 24 nt, Artificial Sequence
  Synthetic
gugaagaaacgaugauggugauga

SEQ ID NO: 229571 - RNA, 18 nt, Artificial Sequence
  Synthetic
gucuguuaucugugauga

SEQ ID NO: 229572 - RNA, 19 nt, Artificial Sequence
  Synthetic
ugucuguuaucugugauga

SEQ ID NO: 229573 - RNA, 20 nt, Artificial Sequence
  Synthetic
gugucuguuaucugugauga

SEQ ID NO: 229574 - RNA, 21 nt, Artificial Sequence
  Synthetic
agugucuguuaucugugauga

SEQ ID NO: 229575 - RNA, 22 nt, Artificial Sequence
  Synthetic
uagugucuguuaucugugauga

SEQ ID NO: 229576 - RNA, 23 nt, Artificial Sequence
  Synthetic
uuagugucuguuaucugugauga

SEQ ID NO: 229577 - RNA, 24 nt, Artificial Sequence
  Synthetic
cuuagugucuguuaucugugauga

SEQ ID NO: 229578 - RNA, 18 nt, Artificial Sequence
  Synthetic
uauuucaggaauugauga

SEQ ID NO: 229579 - RNA, 19 nt, Artificial Sequence
  Synthetic
guauuucaggaauugauga

SEQ ID NO: 229580 - RNA, 20 nt, Artificial Sequence
  Synthetic
gguauuucaggaauugauga

SEQ ID NO: 229581 - RNA, 21 nt, Artificial Sequence
  Synthetic
ggguauuucaggaauugauga

SEQ ID NO: 229582 - RNA, 22 nt, Artificial Sequence
  Synthetic
aggguauuucaggaauugauga

SEQ ID NO: 229583 - RNA, 23 nt, Artificial Sequence
  Synthetic
aaggguauuucaggaauugauga

SEQ ID NO: 229584 - RNA, 24 nt, Artificial Sequence
  Synthetic
gaaggguauuucaggaauugauga

SEQ ID NO: 229585 - RNA, 18 nt, Artificial Sequence
  Synthetic
aauuuauugaauugauga

SEQ ID NO: 229586 - RNA, 19 nt, Artificial Sequence
  Synthetic
aaauuuauugaauugauga

SEQ ID NO: 229587 - RNA, 20 nt, Artificial Sequence
  Synthetic
gaaauuuauugaauugauga

SEQ ID NO: 229588 - RNA, 21 nt, Artificial Sequence
  Synthetic
agaaauuuauugaauugauga

SEQ ID NO: 229589 - RNA, 22 nt, Artificial Sequence
  Synthetic
gagaaauuuauugaauugauga

SEQ ID NO: 229590 - RNA, 23 nt, Artificial Sequence
  Synthetic
agagaaauuuauugaauugauga

SEQ ID NO: 229591 - RNA, 24 nt, Artificial Sequence
  Synthetic
aagagaaauuuauugaauugauga

SEQ ID NO: 229592 - RNA, 18 nt, Artificial Sequence
  Synthetic
gaugauuuucuuugauga

SEQ ID NO: 229593 - RNA, 19 nt, Artificial Sequence
  Synthetic
ugaugauuuucuuugauga

SEQ ID NO: 229594 - RNA, 20 nt, Artificial Sequence
  Synthetic
uugaugauuuucuuugauga

SEQ ID NO: 229595 - RNA, 21 nt, Artificial Sequence
  Synthetic
guugaugauuuucuuugauga

SEQ ID NO: 229596 - RNA, 22 nt, Artificial Sequence
  Synthetic
uguugaugauuuucuuugauga

SEQ ID NO: 229597 - RNA, 23 nt, Artificial Sequence
  Synthetic
uuguugaugauuuucuuugauga

SEQ ID NO: 229598 - RNA, 24 nt, Artificial Sequence
  Synthetic
uuuguugaugauuuucuuugauga

SEQ ID NO: 229599 - RNA, 18 nt, Artificial Sequence
  Synthetic
aagcuauuuaaaauauga

SEQ ID NO: 229600 - RNA, 19 nt, Artificial Sequence
  Synthetic
caagcuauuuaaaauauga

SEQ ID NO: 229601 - RNA, 20 nt, Artificial Sequence
  Synthetic
ucaagcuauuuaaaauauga

SEQ ID NO: 229602 - RNA, 21 nt, Artificial Sequence
  Synthetic
aucaagcuauuuaaaauauga

SEQ ID NO: 229603 - RNA, 22 nt, Artificial Sequence
  Synthetic
caucaagcuauuuaaaauauga

SEQ ID NO: 229604 - RNA, 23 nt, Artificial Sequence
  Synthetic
ucaucaagcuauuuaaaauauga

SEQ ID NO: 229605 - RNA, 24 nt, Artificial Sequence
  Synthetic
cucaucaagcuauuuaaaauauga

SEQ ID NO: 229606 - RNA, 18 nt, Artificial Sequence
  Synthetic
aguuggugggaaauauga

SEQ ID NO: 229607 - RNA, 19 nt, Artificial Sequence
  Synthetic
aaguuggugggaaauauga

SEQ ID NO: 229608 - RNA, 20 nt, Artificial Sequence
  Synthetic
aaaguuggugggaaauauga

SEQ ID NO: 229609 - RNA, 21 nt, Artificial Sequence
  Synthetic
caaaguuggugggaaauauga

SEQ ID NO: 229610 - RNA, 22 nt, Artificial Sequence
  Synthetic
acaaaguuggugggaaauauga

SEQ ID NO: 229611 - RNA, 23 nt, Artificial Sequence
  Synthetic
cacaaaguuggugggaaauauga

SEQ ID NO: 229612 - RNA, 24 nt, Artificial Sequence
  Synthetic
ccacaaaguuggugggaaauauga

SEQ ID NO: 229613 - RNA, 18 nt, Artificial Sequence
  Synthetic
uuguugcaugaaauauga

SEQ ID NO: 229614 - RNA, 19 nt, Artificial Sequence
  Synthetic
auuguugcaugaaauauga

SEQ ID NO: 229615 - RNA, 20 nt, Artificial Sequence
  Synthetic
aauuguugcaugaaauauga

SEQ ID NO: 229616 - RNA, 21 nt, Artificial Sequence
  Synthetic
aaauuguugcaugaaauauga

SEQ ID NO: 229617 - RNA, 22 nt, Artificial Sequence
  Synthetic
aaaauuguugcaugaaauauga

SEQ ID NO: 229618 - RNA, 23 nt, Artificial Sequence
  Synthetic
caaaauuguugcaugaaauauga

SEQ ID NO: 229619 - RNA, 24 nt, Artificial Sequence
  Synthetic
acaaaauuguugcaugaaauauga

SEQ ID NO: 229620 - RNA, 18 nt, Artificial Sequence
  Synthetic
cuguguaaaacaauauga

SEQ ID NO: 229621 - RNA, 19 nt, Artificial Sequence
  Synthetic
ccuguguaaaacaauauga

SEQ ID NO: 229622 - RNA, 20 nt, Artificial Sequence
  Synthetic
cccuguguaaaacaauauga

SEQ ID NO: 229623 - RNA, 21 nt, Artificial Sequence
  Synthetic
ccccuguguaaaacaauauga

SEQ ID NO: 229624 - RNA, 22 nt, Artificial Sequence
  Synthetic
uccccuguguaaaacaauauga

SEQ ID NO: 229625 - RNA, 23 nt, Artificial Sequence
  Synthetic
guccccuguguaaaacaauauga

SEQ ID NO: 229626 - RNA, 24 nt, Artificial Sequence
  Synthetic
uguccccuguguaaaacaauauga

SEQ ID NO: 229627 - RNA, 18 nt, Artificial Sequence
  Synthetic
gauaguugauuaauauga

SEQ ID NO: 229628 - RNA, 19 nt, Artificial Sequence
  Synthetic
agauaguugauuaauauga

SEQ ID NO: 229629 - RNA, 20 nt, Artificial Sequence
  Synthetic
aagauaguugauuaauauga

SEQ ID NO: 229630 - RNA, 21 nt, Artificial Sequence
  Synthetic
aaagauaguugauuaauauga

SEQ ID NO: 229631 - RNA, 22 nt, Artificial Sequence
  Synthetic
gaaagauaguugauuaauauga

SEQ ID NO: 229632 - RNA, 23 nt, Artificial Sequence
  Synthetic
ugaaagauaguugauuaauauga

SEQ ID NO: 229633 - RNA, 24 nt, Artificial Sequence
  Synthetic
uugaaagauaguugauuaauauga

SEQ ID NO: 229634 - RNA, 18 nt, Artificial Sequence
  Synthetic
uaaaacuucaacauauga

SEQ ID NO: 229635 - RNA, 19 nt, Artificial Sequence
  Synthetic
uuaaaacuucaacauauga

SEQ ID NO: 229636 - RNA, 20 nt, Artificial Sequence
  Synthetic
guuaaaacuucaacauauga

SEQ ID NO: 229637 - RNA, 21 nt, Artificial Sequence
  Synthetic
gguuaaaacuucaacauauga

SEQ ID NO: 229638 - RNA, 22 nt, Artificial Sequence
  Synthetic
ggguuaaaacuucaacauauga

SEQ ID NO: 229639 - RNA, 23 nt, Artificial Sequence
  Synthetic
gggguuaaaacuucaacauauga

SEQ ID NO: 229640 - RNA, 24 nt, Artificial Sequence
  Synthetic
agggguuaaaacuucaacauauga

SEQ ID NO: 229641 - RNA, 18 nt, Artificial Sequence
  Synthetic
aggucucugcacauauga

SEQ ID NO: 229642 - RNA, 19 nt, Artificial Sequence
  Synthetic
caggucucugcacauauga

SEQ ID NO: 229643 - RNA, 20 nt, Artificial Sequence
  Synthetic
acaggucucugcacauauga

SEQ ID NO: 229644 - RNA, 21 nt, Artificial Sequence
  Synthetic
cacaggucucugcacauauga

SEQ ID NO: 229645 - RNA, 22 nt, Artificial Sequence
  Synthetic
acacaggucucugcacauauga

SEQ ID NO: 229646 - RNA, 23 nt, Artificial Sequence
  Synthetic
aacacaggucucugcacauauga

SEQ ID NO: 229647 - RNA, 24 nt, Artificial Sequence
  Synthetic
aaacacaggucucugcacauauga

SEQ ID NO: 229648 - RNA, 18 nt, Artificial Sequence
  Synthetic
augugagaauccauauga

SEQ ID NO: 229649 - RNA, 19 nt, Artificial Sequence
  Synthetic
caugugagaauccauauga

SEQ ID NO: 229650 - RNA, 20 nt, Artificial Sequence
  Synthetic
ccaugugagaauccauauga

SEQ ID NO: 229651 - RNA, 21 nt, Artificial Sequence
  Synthetic
cccaugugagaauccauauga

SEQ ID NO: 229652 - RNA, 22 nt, Artificial Sequence
  Synthetic
acccaugugagaauccauauga

SEQ ID NO: 229653 - RNA, 23 nt, Artificial Sequence
  Synthetic
aacccaugugagaauccauauga

SEQ ID NO: 229654 - RNA, 24 nt, Artificial Sequence
  Synthetic
aaacccaugugagaauccauauga

SEQ ID NO: 229655 - RNA, 18 nt, Artificial Sequence
  Synthetic
gggaaccuguagauauga

SEQ ID NO: 229656 - RNA, 19 nt, Artificial Sequence
  Synthetic
agggaaccuguagauauga

SEQ ID NO: 229657 - RNA, 20 nt, Artificial Sequence
  Synthetic
gagggaaccuguagauauga

SEQ ID NO: 229658 - RNA, 21 nt, Artificial Sequence
  Synthetic
ggagggaaccuguagauauga

SEQ ID NO: 229659 - RNA, 22 nt, Artificial Sequence
  Synthetic
aggagggaaccuguagauauga

SEQ ID NO: 229660 - RNA, 23 nt, Artificial Sequence
  Synthetic
uaggagggaaccuguagauauga

SEQ ID NO: 229661 - RNA, 24 nt, Artificial Sequence
  Synthetic
uuaggagggaaccuguagauauga

SEQ ID NO: 229662 - RNA, 18 nt, Artificial Sequence
  Synthetic
gcacuuccagggauauga

SEQ ID NO: 229663 - RNA, 19 nt, Artificial Sequence
  Synthetic
ggcacuuccagggauauga

SEQ ID NO: 229664 - RNA, 20 nt, Artificial Sequence
  Synthetic
aggcacuuccagggauauga

SEQ ID NO: 229665 - RNA, 21 nt, Artificial Sequence
  Synthetic
uaggcacuuccagggauauga

SEQ ID NO: 229666 - RNA, 22 nt, Artificial Sequence
  Synthetic
uuaggcacuuccagggauauga

SEQ ID NO: 229667 - RNA, 23 nt, Artificial Sequence
  Synthetic
guuaggcacuuccagggauauga

SEQ ID NO: 229668 - RNA, 24 nt, Artificial Sequence
  Synthetic
uguuaggcacuuccagggauauga

SEQ ID NO: 229669 - RNA, 18 nt, Artificial Sequence
  Synthetic
cauuaauucaugauauga

SEQ ID NO: 229670 - RNA, 19 nt, Artificial Sequence
  Synthetic
ucauuaauucaugauauga

SEQ ID NO: 229671 - RNA, 20 nt, Artificial Sequence
  Synthetic
uucauuaauucaugauauga

SEQ ID NO: 229672 - RNA, 21 nt, Artificial Sequence
  Synthetic
auucauuaauucaugauauga

SEQ ID NO: 229673 - RNA, 22 nt, Artificial Sequence
  Synthetic
cauucauuaauucaugauauga

SEQ ID NO: 229674 - RNA, 23 nt, Artificial Sequence
  Synthetic
ucauucauuaauucaugauauga

SEQ ID NO: 229675 - RNA, 24 nt, Artificial Sequence
  Synthetic
cucauucauuaauucaugauauga

SEQ ID NO: 229676 - RNA, 18 nt, Artificial Sequence
  Synthetic
auuucccauuauauauga

SEQ ID NO: 229677 - RNA, 19 nt, Artificial Sequence
  Synthetic
cauuucccauuauauauga

SEQ ID NO: 229678 - RNA, 20 nt, Artificial Sequence
  Synthetic
ucauuucccauuauauauga

SEQ ID NO: 229679 - RNA, 21 nt, Artificial Sequence
  Synthetic
uucauuucccauuauauauga

SEQ ID NO: 229680 - RNA, 22 nt, Artificial Sequence
  Synthetic
cuucauuucccauuauauauga

SEQ ID NO: 229681 - RNA, 23 nt, Artificial Sequence
  Synthetic
acuucauuucccauuauauauga

SEQ ID NO: 229682 - RNA, 24 nt, Artificial Sequence
  Synthetic
cacuucauuucccauuauauauga

SEQ ID NO: 229683 - RNA, 18 nt, Artificial Sequence
  Synthetic
gaaagaaguuauauauga

SEQ ID NO: 229684 - RNA, 19 nt, Artificial Sequence
  Synthetic
ggaaagaaguuauauauga

SEQ ID NO: 229685 - RNA, 20 nt, Artificial Sequence
  Synthetic
aggaaagaaguuauauauga

SEQ ID NO: 229686 - RNA, 21 nt, Artificial Sequence
  Synthetic
gaggaaagaaguuauauauga

SEQ ID NO: 229687 - RNA, 22 nt, Artificial Sequence
  Synthetic
agaggaaagaaguuauauauga

SEQ ID NO: 229688 - RNA, 23 nt, Artificial Sequence
  Synthetic
aagaggaaagaaguuauauauga

SEQ ID NO: 229689 - RNA, 24 nt, Artificial Sequence
  Synthetic
aaagaggaaagaaguuauauauga

SEQ ID NO: 229690 - RNA, 18 nt, Artificial Sequence
  Synthetic
uuguucuucaguauauga

SEQ ID NO: 229691 - RNA, 19 nt, Artificial Sequence
  Synthetic
cuuguucuucaguauauga

SEQ ID NO: 229692 - RNA, 20 nt, Artificial Sequence
  Synthetic
ucuuguucuucaguauauga

SEQ ID NO: 229693 - RNA, 21 nt, Artificial Sequence
  Synthetic
uucuuguucuucaguauauga

SEQ ID NO: 229694 - RNA, 22 nt, Artificial Sequence
  Synthetic
auucuuguucuucaguauauga

SEQ ID NO: 229695 - RNA, 23 nt, Artificial Sequence
  Synthetic
gauucuuguucuucaguauauga

SEQ ID NO: 229696 - RNA, 24 nt, Artificial Sequence
  Synthetic
ugauucuuguucuucaguauauga

SEQ ID NO: 229697 - RNA, 18 nt, Artificial Sequence
  Synthetic
uguaaccaaaaacuauga

SEQ ID NO: 229698 - RNA, 19 nt, Artificial Sequence
  Synthetic
uuguaaccaaaaacuauga

SEQ ID NO: 229699 - RNA, 20 nt, Artificial Sequence
  Synthetic
auuguaaccaaaaacuauga

SEQ ID NO: 229700 - RNA, 21 nt, Artificial Sequence
  Synthetic
uauuguaaccaaaaacuauga

SEQ ID NO: 229701 - RNA, 22 nt, Artificial Sequence
  Synthetic
uuauuguaaccaaaaacuauga

SEQ ID NO: 229702 - RNA, 23 nt, Artificial Sequence
  Synthetic
guuauuguaaccaaaaacuauga

SEQ ID NO: 229703 - RNA, 24 nt, Artificial Sequence
  Synthetic
uguuauuguaaccaaaaacuauga

SEQ ID NO: 229704 - RNA, 18 nt, Artificial Sequence
  Synthetic
ucaccuuuugaacuauga

SEQ ID NO: 229705 - RNA, 19 nt, Artificial Sequence
  Synthetic
gucaccuuuugaacuauga

SEQ ID NO: 229706 - RNA, 20 nt, Artificial Sequence
  Synthetic
ugucaccuuuugaacuauga

SEQ ID NO: 229707 - RNA, 21 nt, Artificial Sequence
  Synthetic
cugucaccuuuugaacuauga

SEQ ID NO: 229708 - RNA, 22 nt, Artificial Sequence
  Synthetic
ccugucaccuuuugaacuauga

SEQ ID NO: 229709 - RNA, 23 nt, Artificial Sequence
  Synthetic
cccugucaccuuuugaacuauga

SEQ ID NO: 229710 - RNA, 24 nt, Artificial Sequence
  Synthetic
ucccugucaccuuuugaacuauga

SEQ ID NO: 229711 - RNA, 18 nt, Artificial Sequence
  Synthetic
aaaauaauaacacuauga

SEQ ID NO: 229712 - RNA, 19 nt, Artificial Sequence
  Synthetic
gaaaauaauaacacuauga

SEQ ID NO: 229713 - RNA, 20 nt, Artificial Sequence
  Synthetic
agaaaauaauaacacuauga

SEQ ID NO: 229714 - RNA, 21 nt, Artificial Sequence
  Synthetic
aagaaaauaauaacacuauga

SEQ ID NO: 229715 - RNA, 22 nt, Artificial Sequence
  Synthetic
gaagaaaauaauaacacuauga

SEQ ID NO: 229716 - RNA, 23 nt, Artificial Sequence
  Synthetic
ggaagaaaauaauaacacuauga

SEQ ID NO: 229717 - RNA, 24 nt, Artificial Sequence
  Synthetic
aggaagaaaauaauaacacuauga

SEQ ID NO: 229718 - RNA, 18 nt, Artificial Sequence
  Synthetic
uuauuuuuuagacuauga

SEQ ID NO: 229719 - RNA, 19 nt, Artificial Sequence
  Synthetic
uuuauuuuuuagacuauga

SEQ ID NO: 229720 - RNA, 20 nt, Artificial Sequence
  Synthetic
cuuuauuuuuuagacuauga

SEQ ID NO: 229721 - RNA, 21 nt, Artificial Sequence
  Synthetic
ccuuuauuuuuuagacuauga

SEQ ID NO: 229722 - RNA, 22 nt, Artificial Sequence
  Synthetic
accuuuauuuuuuagacuauga

SEQ ID NO: 229723 - RNA, 23 nt, Artificial Sequence
  Synthetic
aaccuuuauuuuuuagacuauga

SEQ ID NO: 229724 - RNA, 24 nt, Artificial Sequence
  Synthetic
caaccuuuauuuuuuagacuauga

SEQ ID NO: 229725 - RNA, 18 nt, Artificial Sequence
  Synthetic
aggccucugguccuauga

SEQ ID NO: 229726 - RNA, 19 nt, Artificial Sequence
  Synthetic
uaggccucugguccuauga

SEQ ID NO: 229727 - RNA, 20 nt, Artificial Sequence
  Synthetic
cuaggccucugguccuauga

SEQ ID NO: 229728 - RNA, 21 nt, Artificial Sequence
  Synthetic
ccuaggccucugguccuauga

SEQ ID NO: 229729 - RNA, 22 nt, Artificial Sequence
  Synthetic
uccuaggccucugguccuauga

SEQ ID NO: 229730 - RNA, 23 nt, Artificial Sequence
  Synthetic
uuccuaggccucugguccuauga

SEQ ID NO: 229731 - RNA, 24 nt, Artificial Sequence
  Synthetic
cuuccuaggccucugguccuauga

SEQ ID NO: 229732 - RNA, 18 nt, Artificial Sequence
  Synthetic
ccgcaguaggugcuauga

SEQ ID NO: 229733 - RNA, 19 nt, Artificial Sequence
  Synthetic
gccgcaguaggugcuauga

SEQ ID NO: 229734 - RNA, 20 nt, Artificial Sequence
  Synthetic
agccgcaguaggugcuauga

SEQ ID NO: 229735 - RNA, 21 nt, Artificial Sequence
  Synthetic
aagccgcaguaggugcuauga

SEQ ID NO: 229736 - RNA, 22 nt, Artificial Sequence
  Synthetic
caagccgcaguaggugcuauga

SEQ ID NO: 229737 - RNA, 23 nt, Artificial Sequence
  Synthetic
acaagccgcaguaggugcuauga

SEQ ID NO: 229738 - RNA, 24 nt, Artificial Sequence
  Synthetic
uacaagccgcaguaggugcuauga

SEQ ID NO: 229739 - RNA, 18 nt, Artificial Sequence
  Synthetic
auauccauucaucuauga

SEQ ID NO: 229740 - RNA, 19 nt, Artificial Sequence
  Synthetic
cauauccauucaucuauga

SEQ ID NO: 229741 - RNA, 20 nt, Artificial Sequence
  Synthetic
ucauauccauucaucuauga

SEQ ID NO: 229742 - RNA, 21 nt, Artificial Sequence
  Synthetic
uucauauccauucaucuauga

SEQ ID NO: 229743 - RNA, 22 nt, Artificial Sequence
  Synthetic
auucauauccauucaucuauga

SEQ ID NO: 229744 - RNA, 23 nt, Artificial Sequence
  Synthetic
gauucauauccauucaucuauga

SEQ ID NO: 229745 - RNA, 24 nt, Artificial Sequence
  Synthetic
agauucauauccauucaucuauga

SEQ ID NO: 229746 - RNA, 18 nt, Artificial Sequence
  Synthetic
acauuucaaagucuauga

SEQ ID NO: 229747 - RNA, 19 nt, Artificial Sequence
  Synthetic
cacauuucaaagucuauga

SEQ ID NO: 229748 - RNA, 20 nt, Artificial Sequence
  Synthetic
acacauuucaaagucuauga

SEQ ID NO: 229749 - RNA, 21 nt, Artificial Sequence
  Synthetic
uacacauuucaaagucuauga

SEQ ID NO: 229750 - RNA, 22 nt, Artificial Sequence
  Synthetic
cuacacauuucaaagucuauga

SEQ ID NO: 229751 - RNA, 23 nt, Artificial Sequence
  Synthetic
acuacacauuucaaagucuauga

SEQ ID NO: 229752 - RNA, 24 nt, Artificial Sequence
  Synthetic
aacuacacauuucaaagucuauga

SEQ ID NO: 229753 - RNA, 18 nt, Artificial Sequence
  Synthetic
uggucaugcagucuauga

SEQ ID NO: 229754 - RNA, 19 nt, Artificial Sequence
  Synthetic
uuggucaugcagucuauga

SEQ ID NO: 229755 - RNA, 20 nt, Artificial Sequence
  Synthetic
cuuggucaugcagucuauga

SEQ ID NO: 229756 - RNA, 21 nt, Artificial Sequence
  Synthetic
ucuuggucaugcagucuauga

SEQ ID NO: 229757 - RNA, 22 nt, Artificial Sequence
  Synthetic
aucuuggucaugcagucuauga

SEQ ID NO: 229758 - RNA, 23 nt, Artificial Sequence
  Synthetic
aaucuuggucaugcagucuauga

SEQ ID NO: 229759 - RNA, 24 nt, Artificial Sequence
  Synthetic
gaaucuuggucaugcagucuauga

SEQ ID NO: 229760 - RNA, 18 nt, Artificial Sequence
  Synthetic
aaggccaguugucuauga

SEQ ID NO: 229761 - RNA, 19 nt, Artificial Sequence
  Synthetic
uaaggccaguugucuauga

SEQ ID NO: 229762 - RNA, 20 nt, Artificial Sequence
  Synthetic
guaaggccaguugucuauga

SEQ ID NO: 229763 - RNA, 21 nt, Artificial Sequence
  Synthetic
aguaaggccaguugucuauga

SEQ ID NO: 229764 - RNA, 22 nt, Artificial Sequence
  Synthetic
aaguaaggccaguugucuauga

SEQ ID NO: 229765 - RNA, 23 nt, Artificial Sequence
  Synthetic
aaaguaaggccaguugucuauga

SEQ ID NO: 229766 - RNA, 24 nt, Artificial Sequence
  Synthetic
aaaaguaaggccaguugucuauga

SEQ ID NO: 229767 - RNA, 18 nt, Artificial Sequence
  Synthetic
aguagauguccaguauga

SEQ ID NO: 229768 - RNA, 19 nt, Artificial Sequence
  Synthetic
aaguagauguccaguauga

SEQ ID NO: 229769 - RNA, 20 nt, Artificial Sequence
  Synthetic
aaaguagauguccaguauga

SEQ ID NO: 229770 - RNA, 21 nt, Artificial Sequence
  Synthetic
aaaaguagauguccaguauga

SEQ ID NO: 229771 - RNA, 22 nt, Artificial Sequence
  Synthetic
gaaaaguagauguccaguauga

SEQ ID NO: 229772 - RNA, 23 nt, Artificial Sequence
  Synthetic
ggaaaaguagauguccaguauga

SEQ ID NO: 229773 - RNA, 24 nt, Artificial Sequence
  Synthetic
aggaaaaguagauguccaguauga

SEQ ID NO: 229774 - RNA, 18 nt, Artificial Sequence
  Synthetic
aguauagaaagcguauga

SEQ ID NO: 229775 - RNA, 19 nt, Artificial Sequence
  Synthetic
aaguauagaaagcguauga

SEQ ID NO: 229776 - RNA, 20 nt, Artificial Sequence
  Synthetic
gaaguauagaaagcguauga

SEQ ID NO: 229777 - RNA, 21 nt, Artificial Sequence
  Synthetic
agaaguauagaaagcguauga

SEQ ID NO: 229778 - RNA, 22 nt, Artificial Sequence
  Synthetic
aagaaguauagaaagcguauga

SEQ ID NO: 229779 - RNA, 23 nt, Artificial Sequence
  Synthetic
caagaaguauagaaagcguauga

SEQ ID NO: 229780 - RNA, 24 nt, Artificial Sequence
  Synthetic
ucaagaaguauagaaagcguauga

SEQ ID NO: 229781 - RNA, 18 nt, Artificial Sequence
  Synthetic
uacagaacaauuguauga

SEQ ID NO: 229782 - RNA, 19 nt, Artificial Sequence
  Synthetic
guacagaacaauuguauga

SEQ ID NO: 229783 - RNA, 20 nt, Artificial Sequence
  Synthetic
gguacagaacaauuguauga

SEQ ID NO: 229784 - RNA, 21 nt, Artificial Sequence
  Synthetic
ggguacagaacaauuguauga

SEQ ID NO: 229785 - RNA, 22 nt, Artificial Sequence
  Synthetic
uggguacagaacaauuguauga

SEQ ID NO: 229786 - RNA, 23 nt, Artificial Sequence
  Synthetic
uuggguacagaacaauuguauga

SEQ ID NO: 229787 - RNA, 24 nt, Artificial Sequence
  Synthetic
uuuggguacagaacaauuguauga

SEQ ID NO: 229788 - RNA, 18 nt, Artificial Sequence
  Synthetic
uacaauucagaauuauga

SEQ ID NO: 229789 - RNA, 19 nt, Artificial Sequence
  Synthetic
guacaauucagaauuauga

SEQ ID NO: 229790 - RNA, 20 nt, Artificial Sequence
  Synthetic
uguacaauucagaauuauga

SEQ ID NO: 229791 - RNA, 21 nt, Artificial Sequence
  Synthetic
auguacaauucagaauuauga

SEQ ID NO: 229792 - RNA, 22 nt, Artificial Sequence
  Synthetic
uauguacaauucagaauuauga

SEQ ID NO: 229793 - RNA, 23 nt, Artificial Sequence
  Synthetic
cuauguacaauucagaauuauga

SEQ ID NO: 229794 - RNA, 24 nt, Artificial Sequence
  Synthetic
gcuauguacaauucagaauuauga

SEQ ID NO: 229795 - RNA, 18 nt, Artificial Sequence
  Synthetic
uaaacucagagauuauga

SEQ ID NO: 229796 - RNA, 19 nt, Artificial Sequence
  Synthetic
auaaacucagagauuauga

SEQ ID NO: 229797 - RNA, 20 nt, Artificial Sequence
  Synthetic
gauaaacucagagauuauga

SEQ ID NO: 229798 - RNA, 21 nt, Artificial Sequence
  Synthetic
ugauaaacucagagauuauga

SEQ ID NO: 229799 - RNA, 22 nt, Artificial Sequence
  Synthetic
uugauaaacucagagauuauga

SEQ ID NO: 229800 - RNA, 23 nt, Artificial Sequence
  Synthetic
guugauaaacucagagauuauga

SEQ ID NO: 229801 - RNA, 24 nt, Artificial Sequence
  Synthetic
uguugauaaacucagagauuauga

SEQ ID NO: 229802 - RNA, 18 nt, Artificial Sequence
  Synthetic
augcgauugggauuauga

SEQ ID NO: 229803 - RNA, 19 nt, Artificial Sequence
  Synthetic
aaugcgauugggauuauga

SEQ ID NO: 229804 - RNA, 20 nt, Artificial Sequence
  Synthetic
aaaugcgauugggauuauga

SEQ ID NO: 229805 - RNA, 21 nt, Artificial Sequence
  Synthetic
aaaaugcgauugggauuauga

SEQ ID NO: 229806 - RNA, 22 nt, Artificial Sequence
  Synthetic
aaaaaugcgauugggauuauga

SEQ ID NO: 229807 - RNA, 23 nt, Artificial Sequence
  Synthetic
aaaaaaugcgauugggauuauga

SEQ ID NO: 229808 - RNA, 24 nt, Artificial Sequence
  Synthetic
uaaaaaaugcgauugggauuauga

SEQ ID NO: 229809 - RNA, 18 nt, Artificial Sequence
  Synthetic
uuuaucucccacuuauga

SEQ ID NO: 229810 - RNA, 19 nt, Artificial Sequence
  Synthetic
guuuaucucccacuuauga

SEQ ID NO: 229811 - RNA, 20 nt, Artificial Sequence
  Synthetic
uguuuaucucccacuuauga

SEQ ID NO: 229812 - RNA, 21 nt, Artificial Sequence
  Synthetic
uuguuuaucucccacuuauga

SEQ ID NO: 229813 - RNA, 22 nt, Artificial Sequence
  Synthetic
auuguuuaucucccacuuauga

SEQ ID NO: 229814 - RNA, 23 nt, Artificial Sequence
  Synthetic
cauuguuuaucucccacuuauga

SEQ ID NO: 229815 - RNA, 24 nt, Artificial Sequence
  Synthetic
ucauuguuuaucucccacuuauga

SEQ ID NO: 229816 - RNA, 18 nt, Artificial Sequence
  Synthetic
aacaaugccuccuuauga

SEQ ID NO: 229817 - RNA, 19 nt, Artificial Sequence
  Synthetic
uaacaaugccuccuuauga

SEQ ID NO: 229818 - RNA, 20 nt, Artificial Sequence
  Synthetic
uuaacaaugccuccuuauga

SEQ ID NO: 229819 - RNA, 21 nt, Artificial Sequence
  Synthetic
cuuaacaaugccuccuuauga

SEQ ID NO: 229820 - RNA, 22 nt, Artificial Sequence
  Synthetic
ccuuaacaaugccuccuuauga

SEQ ID NO: 229821 - RNA, 23 nt, Artificial Sequence
  Synthetic
accuuaacaaugccuccuuauga

SEQ ID NO: 229822 - RNA, 24 nt, Artificial Sequence
  Synthetic
aaccuuaacaaugccuccuuauga

SEQ ID NO: 229823 - RNA, 18 nt, Artificial Sequence
  Synthetic
aaauuucucaucuuauga

SEQ ID NO: 229824 - RNA, 19 nt, Artificial Sequence
  Synthetic
caaauuucucaucuuauga

SEQ ID NO: 229825 - RNA, 20 nt, Artificial Sequence
  Synthetic
gcaaauuucucaucuuauga

SEQ ID NO: 229826 - RNA, 21 nt, Artificial Sequence
  Synthetic
ugcaaauuucucaucuuauga

SEQ ID NO: 229827 - RNA, 22 nt, Artificial Sequence
  Synthetic
gugcaaauuucucaucuuauga

SEQ ID NO: 229828 - RNA, 23 nt, Artificial Sequence
  Synthetic
agugcaaauuucucaucuuauga

SEQ ID NO: 229829 - RNA, 24 nt, Artificial Sequence
  Synthetic
uagugcaaauuucucaucuuauga

SEQ ID NO: 229830 - RNA, 18 nt, Artificial Sequence
  Synthetic
cuguucccuuucuuauga

SEQ ID NO: 229831 - RNA, 19 nt, Artificial Sequence
  Synthetic
acuguucccuuucuuauga

SEQ ID NO: 229832 - RNA, 20 nt, Artificial Sequence
  Synthetic
uacuguucccuuucuuauga

SEQ ID NO: 229833 - RNA, 21 nt, Artificial Sequence
  Synthetic
uuacuguucccuuucuuauga

SEQ ID NO: 229834 - RNA, 22 nt, Artificial Sequence
  Synthetic
uuuacuguucccuuucuuauga

SEQ ID NO: 229835 - RNA, 23 nt, Artificial Sequence
  Synthetic
uuuuacuguucccuuucuuauga

SEQ ID NO: 229836 - RNA, 24 nt, Artificial Sequence
  Synthetic
cuuuuacuguucccuuucuuauga

SEQ ID NO: 229837 - RNA, 18 nt, Artificial Sequence
  Synthetic
cuuugaaggaaguuauga

SEQ ID NO: 229838 - RNA, 19 nt, Artificial Sequence
  Synthetic
acuuugaaggaaguuauga

SEQ ID NO: 229839 - RNA, 20 nt, Artificial Sequence
  Synthetic
uacuuugaaggaaguuauga

SEQ ID NO: 229840 - RNA, 21 nt, Artificial Sequence
  Synthetic
auacuuugaaggaaguuauga

SEQ ID NO: 229841 - RNA, 22 nt, Artificial Sequence
  Synthetic
aauacuuugaaggaaguuauga

SEQ ID NO: 229842 - RNA, 23 nt, Artificial Sequence
  Synthetic
uaauacuuugaaggaaguuauga

SEQ ID NO: 229843 - RNA, 24 nt, Artificial Sequence
  Synthetic
auaauacuuugaaggaaguuauga

SEQ ID NO: 229844 - RNA, 18 nt, Artificial Sequence
  Synthetic
uaaguaaguaaguuauga

SEQ ID NO: 229845 - RNA, 19 nt, Artificial Sequence
  Synthetic
auaaguaaguaaguuauga

SEQ ID NO: 229846 - RNA, 20 nt, Artificial Sequence
  Synthetic
uauaaguaaguaaguuauga

SEQ ID NO: 229847 - RNA, 21 nt, Artificial Sequence
  Synthetic
uuauaaguaaguaaguuauga

SEQ ID NO: 229848 - RNA, 22 nt, Artificial Sequence
  Synthetic
cuuauaaguaaguaaguuauga

SEQ ID NO: 229849 - RNA, 23 nt, Artificial Sequence
  Synthetic
ccuuauaaguaaguaaguuauga

SEQ ID NO: 229850 - RNA, 24 nt, Artificial Sequence
  Synthetic
uccuuauaaguaaguaaguuauga

SEQ ID NO: 229851 - RNA, 18 nt, Artificial Sequence
  Synthetic
guaaucauuuaguuauga

SEQ ID NO: 229852 - RNA, 19 nt, Artificial Sequence
  Synthetic
uguaaucauuuaguuauga

SEQ ID NO: 229853 - RNA, 20 nt, Artificial Sequence
  Synthetic
guguaaucauuuaguuauga

SEQ ID NO: 229854 - RNA, 21 nt, Artificial Sequence
  Synthetic
aguguaaucauuuaguuauga

SEQ ID NO: 229855 - RNA, 22 nt, Artificial Sequence
  Synthetic
aaguguaaucauuuaguuauga

SEQ ID NO: 229856 - RNA, 23 nt, Artificial Sequence
  Synthetic
aaaguguaaucauuuaguuauga

SEQ ID NO: 229857 - RNA, 24 nt, Artificial Sequence
  Synthetic
caaaguguaaucauuuaguuauga

SEQ ID NO: 229858 - RNA, 18 nt, Artificial Sequence
  Synthetic
cauuacgccugguuauga

SEQ ID NO: 229859 - RNA, 19 nt, Artificial Sequence
  Synthetic
ucauuacgccugguuauga

SEQ ID NO: 229860 - RNA, 20 nt, Artificial Sequence
  Synthetic
gucauuacgccugguuauga

SEQ ID NO: 229861 - RNA, 21 nt, Artificial Sequence
  Synthetic
agucauuacgccugguuauga

SEQ ID NO: 229862 - RNA, 22 nt, Artificial Sequence
  Synthetic
aagucauuacgccugguuauga

SEQ ID NO: 229863 - RNA, 23 nt, Artificial Sequence
  Synthetic
gaagucauuacgccugguuauga

SEQ ID NO: 229864 - RNA, 24 nt, Artificial Sequence
  Synthetic
agaagucauuacgccugguuauga

SEQ ID NO: 229865 - RNA, 18 nt, Artificial Sequence
  Synthetic
auaucaaaauauuuauga

SEQ ID NO: 229866 - RNA, 19 nt, Artificial Sequence
  Synthetic
aauaucaaaauauuuauga

SEQ ID NO: 229867 - RNA, 20 nt, Artificial Sequence
  Synthetic
caauaucaaaauauuuauga

SEQ ID NO: 229868 - RNA, 21 nt, Artificial Sequence
  Synthetic
ucaauaucaaaauauuuauga

SEQ ID NO: 229869 - RNA, 22 nt, Artificial Sequence
  Synthetic
uucaauaucaaaauauuuauga

SEQ ID NO: 229870 - RNA, 23 nt, Artificial Sequence
  Synthetic
uuucaauaucaaaauauuuauga

SEQ ID NO: 229871 - RNA, 24 nt, Artificial Sequence
  Synthetic
auuucaauaucaaaauauuuauga

SEQ ID NO: 229872 - RNA, 18 nt, Artificial Sequence
  Synthetic
ccucagucucuuuuauga

SEQ ID NO: 229873 - RNA, 19 nt, Artificial Sequence
  Synthetic
gccucagucucuuuuauga

SEQ ID NO: 229874 - RNA, 20 nt, Artificial Sequence
  Synthetic
ugccucagucucuuuuauga

SEQ ID NO: 229875 - RNA, 21 nt, Artificial Sequence
  Synthetic
cugccucagucucuuuuauga

SEQ ID NO: 229876 - RNA, 22 nt, Artificial Sequence
  Synthetic
ucugccucagucucuuuuauga

SEQ ID NO: 229877 - RNA, 23 nt, Artificial Sequence
  Synthetic
uucugccucagucucuuuuauga

SEQ ID NO: 229878 - RNA, 24 nt, Artificial Sequence
  Synthetic
uuucugccucagucucuuuuauga

SEQ ID NO: 229879 - RNA, 18 nt, Artificial Sequence
  Synthetic
aggugauguguuuuauga

SEQ ID NO: 229880 - RNA, 19 nt, Artificial Sequence
  Synthetic
uaggugauguguuuuauga

SEQ ID NO: 229881 - RNA, 20 nt, Artificial Sequence
  Synthetic
cuaggugauguguuuuauga

SEQ ID NO: 229882 - RNA, 21 nt, Artificial Sequence
  Synthetic
acuaggugauguguuuuauga

SEQ ID NO: 229883 - RNA, 22 nt, Artificial Sequence
  Synthetic
aacuaggugauguguuuuauga

SEQ ID NO: 229884 - RNA, 23 nt, Artificial Sequence
  Synthetic
aaacuaggugauguguuuuauga

SEQ ID NO: 229885 - RNA, 24 nt, Artificial Sequence
  Synthetic
aaaacuaggugauguguuuuauga

SEQ ID NO: 229886 - RNA, 18 nt, Artificial Sequence
  Synthetic
aaagucaaauuuuuauga

SEQ ID NO: 229887 - RNA, 19 nt, Artificial Sequence
  Synthetic
aaaagucaaauuuuuauga

SEQ ID NO: 229888 - RNA, 20 nt, Artificial Sequence
  Synthetic
aaaaagucaaauuuuuauga

SEQ ID NO: 229889 - RNA, 21 nt, Artificial Sequence
  Synthetic
uaaaaagucaaauuuuuauga

SEQ ID NO: 229890 - RNA, 22 nt, Artificial Sequence
  Synthetic
auaaaaagucaaauuuuuauga

SEQ ID NO: 229891 - RNA, 23 nt, Artificial Sequence
  Synthetic
aauaaaaagucaaauuuuuauga

SEQ ID NO: 229892 - RNA, 24 nt, Artificial Sequence
  Synthetic
gaauaaaaagucaaauuuuuauga

SEQ ID NO: 229893 - RNA, 18 nt, Artificial Sequence
  Synthetic
acagaaagcaaaaacuga

SEQ ID NO: 229894 - RNA, 19 nt, Artificial Sequence
  Synthetic
uacagaaagcaaaaacuga

SEQ ID NO: 229895 - RNA, 20 nt, Artificial Sequence
  Synthetic
auacagaaagcaaaaacuga

SEQ ID NO: 229896 - RNA, 21 nt, Artificial Sequence
  Synthetic
aauacagaaagcaaaaacuga

SEQ ID NO: 229897 - RNA, 22 nt, Artificial Sequence
  Synthetic
aaauacagaaagcaaaaacuga

SEQ ID NO: 229898 - RNA, 23 nt, Artificial Sequence
  Synthetic
gaaauacagaaagcaaaaacuga

SEQ ID NO: 229899 - RNA, 24 nt, Artificial Sequence
  Synthetic
ggaaauacagaaagcaaaaacuga

SEQ ID NO: 229900 - RNA, 18 nt, Artificial Sequence
  Synthetic
gcuuauuauaaaaacuga

SEQ ID NO: 229901 - RNA, 19 nt, Artificial Sequence
  Synthetic
ugcuuauuauaaaaacuga

SEQ ID NO: 229902 - RNA, 20 nt, Artificial Sequence
  Synthetic
augcuuauuauaaaaacuga

SEQ ID NO: 229903 - RNA, 21 nt, Artificial Sequence
  Synthetic
aaugcuuauuauaaaaacuga

SEQ ID NO: 229904 - RNA, 22 nt, Artificial Sequence
  Synthetic
uaaugcuuauuauaaaaacuga

SEQ ID NO: 229905 - RNA, 23 nt, Artificial Sequence
  Synthetic
auaaugcuuauuauaaaaacuga

SEQ ID NO: 229906 - RNA, 24 nt, Artificial Sequence
  Synthetic
aauaaugcuuauuauaaaaacuga

SEQ ID NO: 229907 - RNA, 18 nt, Artificial Sequence
  Synthetic
uugggcucacaaaacuga

SEQ ID NO: 229908 - RNA, 19 nt, Artificial Sequence
  Synthetic
uuugggcucacaaaacuga

SEQ ID NO: 229909 - RNA, 20 nt, Artificial Sequence
  Synthetic
cuuugggcucacaaaacuga

SEQ ID NO: 229910 - RNA, 21 nt, Artificial Sequence
  Synthetic
ucuuugggcucacaaaacuga

SEQ ID NO: 229911 - RNA, 22 nt, Artificial Sequence
  Synthetic
uucuuugggcucacaaaacuga

SEQ ID NO: 229912 - RNA, 23 nt, Artificial Sequence
  Synthetic
uuucuuugggcucacaaaacuga

SEQ ID NO: 229913 - RNA, 24 nt, Artificial Sequence
  Synthetic
auuucuuugggcucacaaaacuga

SEQ ID NO: 229914 - RNA, 18 nt, Artificial Sequence
  Synthetic
aauugcccugaaaacuga

SEQ ID NO: 229915 - RNA, 19 nt, Artificial Sequence
  Synthetic
gaauugcccugaaaacuga

SEQ ID NO: 229916 - RNA, 20 nt, Artificial Sequence
  Synthetic
agaauugcccugaaaacuga

SEQ ID NO: 229917 - RNA, 21 nt, Artificial Sequence
  Synthetic
aagaauugcccugaaaacuga

SEQ ID NO: 229918 - RNA, 22 nt, Artificial Sequence
  Synthetic
caagaauugcccugaaaacuga

SEQ ID NO: 229919 - RNA, 23 nt, Artificial Sequence
  Synthetic
acaagaauugcccugaaaacuga

SEQ ID NO: 229920 - RNA, 24 nt, Artificial Sequence
  Synthetic
uacaagaauugcccugaaaacuga

SEQ ID NO: 229921 - RNA, 18 nt, Artificial Sequence
  Synthetic
ugaaagcaguaaaacuga

SEQ ID NO: 229922 - RNA, 19 nt, Artificial Sequence
  Synthetic
uugaaagcaguaaaacuga

SEQ ID NO: 229923 - RNA, 20 nt, Artificial Sequence
  Synthetic
auugaaagcaguaaaacuga

SEQ ID NO: 229924 - RNA, 21 nt, Artificial Sequence
  Synthetic
uauugaaagcaguaaaacuga

SEQ ID NO: 229925 - RNA, 22 nt, Artificial Sequence
  Synthetic
auauugaaagcaguaaaacuga

SEQ ID NO: 229926 - RNA, 23 nt, Artificial Sequence
  Synthetic
uauauugaaagcaguaaaacuga

SEQ ID NO: 229927 - RNA, 24 nt, Artificial Sequence
  Synthetic
auauauugaaagcaguaaaacuga

SEQ ID NO: 229928 - RNA, 18 nt, Artificial Sequence
  Synthetic
cuucuuucaaacaacuga

SEQ ID NO: 229929 - RNA, 19 nt, Artificial Sequence
  Synthetic
ucuucuuucaaacaacuga

SEQ ID NO: 229930 - RNA, 20 nt, Artificial Sequence
  Synthetic
cucuucuuucaaacaacuga

SEQ ID NO: 229931 - RNA, 21 nt, Artificial Sequence
  Synthetic
gcucuucuuucaaacaacuga

SEQ ID NO: 229932 - RNA, 22 nt, Artificial Sequence
  Synthetic
ugcucuucuuucaaacaacuga

SEQ ID NO: 229933 - RNA, 23 nt, Artificial Sequence
  Synthetic
cugcucuucuuucaaacaacuga

SEQ ID NO: 229934 - RNA, 24 nt, Artificial Sequence
  Synthetic
acugcucuucuuucaaacaacuga

SEQ ID NO: 229935 - RNA, 18 nt, Artificial Sequence
  Synthetic
uuauuuucuuacaacuga

SEQ ID NO: 229936 - RNA, 19 nt, Artificial Sequence
  Synthetic
auuauuuucuuacaacuga

SEQ ID NO: 229937 - RNA, 20 nt, Artificial Sequence
  Synthetic
cauuauuuucuuacaacuga

SEQ ID NO: 229938 - RNA, 21 nt, Artificial Sequence
  Synthetic
gcauuauuuucuuacaacuga

SEQ ID NO: 229939 - RNA, 22 nt, Artificial Sequence
  Synthetic
agcauuauuuucuuacaacuga

SEQ ID NO: 229940 - RNA, 23 nt, Artificial Sequence
  Synthetic
aagcauuauuuucuuacaacuga

SEQ ID NO: 229941 - RNA, 24 nt, Artificial Sequence
  Synthetic
aaagcauuauuuucuuacaacuga

SEQ ID NO: 229942 - RNA, 18 nt, Artificial Sequence
  Synthetic
uuguaacaagucaacuga

SEQ ID NO: 229943 - RNA, 19 nt, Artificial Sequence
  Synthetic
guuguaacaagucaacuga

SEQ ID NO: 229944 - RNA, 20 nt, Artificial Sequence
  Synthetic
gguuguaacaagucaacuga

SEQ ID NO: 229945 - RNA, 21 nt, Artificial Sequence
  Synthetic
cgguuguaacaagucaacuga

SEQ ID NO: 229946 - RNA, 22 nt, Artificial Sequence
  Synthetic
acgguuguaacaagucaacuga

SEQ ID NO: 229947 - RNA, 23 nt, Artificial Sequence
  Synthetic
gacgguuguaacaagucaacuga

SEQ ID NO: 229948 - RNA, 24 nt, Artificial Sequence
  Synthetic
ugacgguuguaacaagucaacuga

SEQ ID NO: 229949 - RNA, 18 nt, Artificial Sequence
  Synthetic
aaacuaugccagaacuga

SEQ ID NO: 229950 - RNA, 19 nt, Artificial Sequence
  Synthetic
caaacuaugccagaacuga

SEQ ID NO: 229951 - RNA, 20 nt, Artificial Sequence
  Synthetic
ccaaacuaugccagaacuga

SEQ ID NO: 229952 - RNA, 21 nt, Artificial Sequence
  Synthetic
uccaaacuaugccagaacuga

SEQ ID NO: 229953 - RNA, 22 nt, Artificial Sequence
  Synthetic
auccaaacuaugccagaacuga

SEQ ID NO: 229954 - RNA, 23 nt, Artificial Sequence
  Synthetic
cauccaaacuaugccagaacuga

SEQ ID NO: 229955 - RNA, 24 nt, Artificial Sequence
  Synthetic
ucauccaaacuaugccagaacuga

SEQ ID NO: 229956 - RNA, 18 nt, Artificial Sequence
  Synthetic
cgaucagagcagaacuga

SEQ ID NO: 229957 - RNA, 19 nt, Artificial Sequence
  Synthetic
acgaucagagcagaacuga

SEQ ID NO: 229958 - RNA, 20 nt, Artificial Sequence
  Synthetic
uacgaucagagcagaacuga

SEQ ID NO: 229959 - RNA, 21 nt, Artificial Sequence
  Synthetic
cuacgaucagagcagaacuga

SEQ ID NO: 229960 - RNA, 22 nt, Artificial Sequence
  Synthetic
acuacgaucagagcagaacuga

SEQ ID NO: 229961 - RNA, 23 nt, Artificial Sequence
  Synthetic
aacuacgaucagagcagaacuga

SEQ ID NO: 229962 - RNA, 24 nt, Artificial Sequence
  Synthetic
uaacuacgaucagagcagaacuga

SEQ ID NO: 229963 - RNA, 18 nt, Artificial Sequence
  Synthetic
uaagaaaaauggaacuga

SEQ ID NO: 229964 - RNA, 19 nt, Artificial Sequence
  Synthetic
auaagaaaaauggaacuga

SEQ ID NO: 229965 - RNA, 20 nt, Artificial Sequence
  Synthetic
aauaagaaaaauggaacuga

SEQ ID NO: 229966 - RNA, 21 nt, Artificial Sequence
  Synthetic
caauaagaaaaauggaacuga

SEQ ID NO: 229967 - RNA, 22 nt, Artificial Sequence
  Synthetic
acaauaagaaaaauggaacuga

SEQ ID NO: 229968 - RNA, 23 nt, Artificial Sequence
  Synthetic
aacaauaagaaaaauggaacuga

SEQ ID NO: 229969 - RNA, 24 nt, Artificial Sequence
  Synthetic
caacaauaagaaaaauggaacuga

SEQ ID NO: 229970 - RNA, 18 nt, Artificial Sequence
  Synthetic
uuccuacuaaugaacuga

SEQ ID NO: 229971 - RNA, 19 nt, Artificial Sequence
  Synthetic
uuuccuacuaaugaacuga

SEQ ID NO: 229972 - RNA, 20 nt, Artificial Sequence
  Synthetic
auuuccuacuaaugaacuga

SEQ ID NO: 229973 - RNA, 21 nt, Artificial Sequence
  Synthetic
gauuuccuacuaaugaacuga

SEQ ID NO: 229974 - RNA, 22 nt, Artificial Sequence
  Synthetic
ggauuuccuacuaaugaacuga

SEQ ID NO: 229975 - RNA, 23 nt, Artificial Sequence
  Synthetic
gggauuuccuacuaaugaacuga

SEQ ID NO: 229976 - RNA, 24 nt, Artificial Sequence
  Synthetic
ugggauuuccuacuaaugaacuga

SEQ ID NO: 229977 - RNA, 18 nt, Artificial Sequence
  Synthetic
aaaaacugacugaacuga

SEQ ID NO: 229978 - RNA, 19 nt, Artificial Sequence
  Synthetic
caaaaacugacugaacuga

SEQ ID NO: 229979 - RNA, 20 nt, Artificial Sequence
  Synthetic
gcaaaaacugacugaacuga

SEQ ID NO: 229980 - RNA, 21 nt, Artificial Sequence
  Synthetic
agcaaaaacugacugaacuga

SEQ ID NO: 229981 - RNA, 22 nt, Artificial Sequence
  Synthetic
aagcaaaaacugacugaacuga

SEQ ID NO: 229982 - RNA, 23 nt, Artificial Sequence
  Synthetic
aaagcaaaaacugacugaacuga

SEQ ID NO: 229983 - RNA, 24 nt, Artificial Sequence
  Synthetic
gaaagcaaaaacugacugaacuga

SEQ ID NO: 229984 - RNA, 18 nt, Artificial Sequence
  Synthetic
acaaaggagaguaacuga

SEQ ID NO: 229985 - RNA, 19 nt, Artificial Sequence
  Synthetic
uacaaaggagaguaacuga

SEQ ID NO: 229986 - RNA, 20 nt, Artificial Sequence
  Synthetic
auacaaaggagaguaacuga

SEQ ID NO: 229987 - RNA, 21 nt, Artificial Sequence
  Synthetic
aauacaaaggagaguaacuga

SEQ ID NO: 229988 - RNA, 22 nt, Artificial Sequence
  Synthetic
aaauacaaaggagaguaacuga

SEQ ID NO: 229989 - RNA, 23 nt, Artificial Sequence
  Synthetic
gaaauacaaaggagaguaacuga

SEQ ID NO: 229990 - RNA, 24 nt, Artificial Sequence
  Synthetic
ggaaauacaaaggagaguaacuga

SEQ ID NO: 229991 - RNA, 18 nt, Artificial Sequence
  Synthetic
acaggcccugguaacuga

SEQ ID NO: 229992 - RNA, 19 nt, Artificial Sequence
  Synthetic
aacaggcccugguaacuga

SEQ ID NO: 229993 - RNA, 20 nt, Artificial Sequence
  Synthetic
caacaggcccugguaacuga

SEQ ID NO: 229994 - RNA, 21 nt, Artificial Sequence
  Synthetic
acaacaggcccugguaacuga

SEQ ID NO: 229995 - RNA, 22 nt, Artificial Sequence
  Synthetic
aacaacaggcccugguaacuga

SEQ ID NO: 229996 - RNA, 23 nt, Artificial Sequence
  Synthetic
aaacaacaggcccugguaacuga

SEQ ID NO: 229997 - RNA, 24 nt, Artificial Sequence
  Synthetic
gaaacaacaggcccugguaacuga

SEQ ID NO: 229998 - RNA, 18 nt, Artificial Sequence
  Synthetic
auauauuugaaacacuga

SEQ ID NO: 229999 - RNA, 19 nt, Artificial Sequence
  Synthetic
aauauauuugaaacacuga

SEQ ID NO: 230000 - RNA, 20 nt, Artificial Sequence
  Synthetic
aaauauauuugaaacacuga

SEQ ID NO: 230001 - RNA, 21 nt, Artificial Sequence
  Synthetic
aaaauauauuugaaacacuga

SEQ ID NO: 230002 - RNA, 22 nt, Artificial Sequence
  Synthetic
uaaaauauauuugaaacacuga

SEQ ID NO: 230003 - RNA, 23 nt, Artificial Sequence
  Synthetic
uuaaaauauauuugaaacacuga

SEQ ID NO: 230004 - RNA, 24 nt, Artificial Sequence
  Synthetic
auuaaaauauauuugaaacacuga

SEQ ID NO: 230005 - RNA, 18 nt, Artificial Sequence
  Synthetic
aaguaagggaaccacuga

SEQ ID NO: 230006 - RNA, 19 nt, Artificial Sequence
  Synthetic
gaaguaagggaaccacuga

SEQ ID NO: 230007 - RNA, 20 nt, Artificial Sequence
  Synthetic
agaaguaagggaaccacuga

SEQ ID NO: 230008 - RNA, 21 nt, Artificial Sequence
  Synthetic
aagaaguaagggaaccacuga

SEQ ID NO: 230009 - RNA, 22 nt, Artificial Sequence
  Synthetic
aaagaaguaagggaaccacuga

SEQ ID NO: 230010 - RNA, 23 nt, Artificial Sequence
  Synthetic
gaaagaaguaagggaaccacuga

SEQ ID NO: 230011 - RNA, 24 nt, Artificial Sequence
  Synthetic
agaaagaaguaagggaaccacuga

SEQ ID NO: 230012 - RNA, 18 nt, Artificial Sequence
  Synthetic
accgguaccagccacuga

SEQ ID NO: 230013 - RNA, 19 nt, Artificial Sequence
  Synthetic
aaccgguaccagccacuga

SEQ ID NO: 230014 - RNA, 20 nt, Artificial Sequence
  Synthetic
aaaccgguaccagccacuga

SEQ ID NO: 230015 - RNA, 21 nt, Artificial Sequence
  Synthetic
aaaaccgguaccagccacuga

SEQ ID NO: 230016 - RNA, 22 nt, Artificial Sequence
  Synthetic
aaaaaccgguaccagccacuga

SEQ ID NO: 230017 - RNA, 23 nt, Artificial Sequence
  Synthetic
gaaaaaccgguaccagccacuga

SEQ ID NO: 230018 - RNA, 24 nt, Artificial Sequence
  Synthetic
ggaaaaaccgguaccagccacuga

SEQ ID NO: 230019 - RNA, 18 nt, Artificial Sequence
  Synthetic
uauaggccaggccacuga

SEQ ID NO: 230020 - RNA, 19 nt, Artificial Sequence
  Synthetic
auauaggccaggccacuga

SEQ ID NO: 230021 - RNA, 20 nt, Artificial Sequence
  Synthetic
cauauaggccaggccacuga

SEQ ID NO: 230022 - RNA, 21 nt, Artificial Sequence
  Synthetic
gcauauaggccaggccacuga

SEQ ID NO: 230023 - RNA, 22 nt, Artificial Sequence
  Synthetic
agcauauaggccaggccacuga

SEQ ID NO: 230024 - RNA, 23 nt, Artificial Sequence
  Synthetic
uagcauauaggccaggccacuga

SEQ ID NO: 230025 - RNA, 24 nt, Artificial Sequence
  Synthetic
auagcauauaggccaggccacuga

SEQ ID NO: 230026 - RNA, 18 nt, Artificial Sequence
  Synthetic
auuuccaaauuccacuga

SEQ ID NO: 230027 - RNA, 19 nt, Artificial Sequence
  Synthetic
uauuuccaaauuccacuga

SEQ ID NO: 230028 - RNA, 20 nt, Artificial Sequence
  Synthetic
guauuuccaaauuccacuga

SEQ ID NO: 230029 - RNA, 21 nt, Artificial Sequence
  Synthetic
cguauuuccaaauuccacuga

SEQ ID NO: 230030 - RNA, 22 nt, Artificial Sequence
  Synthetic
ucguauuuccaaauuccacuga

SEQ ID NO: 230031 - RNA, 23 nt, Artificial Sequence
  Synthetic
uucguauuuccaaauuccacuga

SEQ ID NO: 230032 - RNA, 24 nt, Artificial Sequence
  Synthetic
guucguauuuccaaauuccacuga

SEQ ID NO: 230033 - RNA, 18 nt, Artificial Sequence
  Synthetic
uccgugcacaggcacuga

SEQ ID NO: 230034 - RNA, 19 nt, Artificial Sequence
  Synthetic
cuccgugcacaggcacuga

SEQ ID NO: 230035 - RNA, 20 nt, Artificial Sequence
  Synthetic
ccuccgugcacaggcacuga

SEQ ID NO: 230036 - RNA, 21 nt, Artificial Sequence
  Synthetic
cccuccgugcacaggcacuga

SEQ ID NO: 230037 - RNA, 22 nt, Artificial Sequence
  Synthetic
ucccuccgugcacaggcacuga

SEQ ID NO: 230038 - RNA, 23 nt, Artificial Sequence
  Synthetic
uucccuccgugcacaggcacuga

SEQ ID NO: 230039 - RNA, 24 nt, Artificial Sequence
  Synthetic
auucccuccgugcacaggcacuga

SEQ ID NO: 230040 - RNA, 18 nt, Artificial Sequence
  Synthetic
ggaguuucaaaucacuga

SEQ ID NO: 230041 - RNA, 19 nt, Artificial Sequence
  Synthetic
uggaguuucaaaucacuga

SEQ ID NO: 230042 - RNA, 20 nt, Artificial Sequence
  Synthetic
cuggaguuucaaaucacuga

SEQ ID NO: 230043 - RNA, 21 nt, Artificial Sequence
  Synthetic
acuggaguuucaaaucacuga

SEQ ID NO: 230044 - RNA, 22 nt, Artificial Sequence
  Synthetic
cacuggaguuucaaaucacuga

SEQ ID NO: 230045 - RNA, 23 nt, Artificial Sequence
  Synthetic
gcacuggaguuucaaaucacuga

SEQ ID NO: 230046 - RNA, 24 nt, Artificial Sequence
  Synthetic
ugcacuggaguuucaaaucacuga

SEQ ID NO: 230047 - RNA, 18 nt, Artificial Sequence
  Synthetic
cuuguuuuaaaucacuga

SEQ ID NO: 230048 - RNA, 19 nt, Artificial Sequence
  Synthetic
gcuuguuuuaaaucacuga

SEQ ID NO: 230049 - RNA, 20 nt, Artificial Sequence
  Synthetic
agcuuguuuuaaaucacuga

SEQ ID NO: 230050 - RNA, 21 nt, Artificial Sequence
  Synthetic
cagcuuguuuuaaaucacuga

SEQ ID NO: 230051 - RNA, 22 nt, Artificial Sequence
  Synthetic
gcagcuuguuuuaaaucacuga

SEQ ID NO: 230052 - RNA, 23 nt, Artificial Sequence
  Synthetic
ugcagcuuguuuuaaaucacuga

SEQ ID NO: 230053 - RNA, 24 nt, Artificial Sequence
  Synthetic
cugcagcuuguuuuaaaucacuga

SEQ ID NO: 230054 - RNA, 18 nt, Artificial Sequence
  Synthetic
uauuacagucaucacuga

SEQ ID NO: 230055 - RNA, 19 nt, Artificial Sequence
  Synthetic
auauuacagucaucacuga

SEQ ID NO: 230056 - RNA, 20 nt, Artificial Sequence
  Synthetic
aauauuacagucaucacuga

SEQ ID NO: 230057 - RNA, 21 nt, Artificial Sequence
  Synthetic
aaauauuacagucaucacuga

SEQ ID NO: 230058 - RNA, 22 nt, Artificial Sequence
  Synthetic
aaaauauuacagucaucacuga

SEQ ID NO: 230059 - RNA, 23 nt, Artificial Sequence
  Synthetic
caaaauauuacagucaucacuga

SEQ ID NO: 230060 - RNA, 24 nt, Artificial Sequence
  Synthetic
ccaaaauauuacagucaucacuga

SEQ ID NO: 230061 - RNA, 18 nt, Artificial Sequence
  Synthetic
accuucaucagucacuga

SEQ ID NO: 230062 - RNA, 19 nt, Artificial Sequence
  Synthetic
caccuucaucagucacuga

SEQ ID NO: 230063 - RNA, 20 nt, Artificial Sequence
  Synthetic
ucaccuucaucagucacuga

SEQ ID NO: 230064 - RNA, 21 nt, Artificial Sequence
  Synthetic
uucaccuucaucagucacuga

SEQ ID NO: 230065 - RNA, 22 nt, Artificial Sequence
  Synthetic
uuucaccuucaucagucacuga

SEQ ID NO: 230066 - RNA, 23 nt, Artificial Sequence
  Synthetic
cuuucaccuucaucagucacuga

SEQ ID NO: 230067 - RNA, 24 nt, Artificial Sequence
  Synthetic
acuuucaccuucaucagucacuga

SEQ ID NO: 230068 - RNA, 18 nt, Artificial Sequence
  Synthetic
acauccaguaaagacuga

SEQ ID NO: 230069 - RNA, 19 nt, Artificial Sequence
  Synthetic
aacauccaguaaagacuga

SEQ ID NO: 230070 - RNA, 20 nt, Artificial Sequence
  Synthetic
aaacauccaguaaagacuga

SEQ ID NO: 230071 - RNA, 21 nt, Artificial Sequence
  Synthetic
aaaacauccaguaaagacuga

SEQ ID NO: 230072 - RNA, 22 nt, Artificial Sequence
  Synthetic
uaaaacauccaguaaagacuga

SEQ ID NO: 230073 - RNA, 23 nt, Artificial Sequence
  Synthetic
auaaaacauccaguaaagacuga

SEQ ID NO: 230074 - RNA, 24 nt, Artificial Sequence
  Synthetic
uauaaaacauccaguaaagacuga

SEQ ID NO: 230075 - RNA, 18 nt, Artificial Sequence
  Synthetic
agacaagcuacagacuga

SEQ ID NO: 230076 - RNA, 19 nt, Artificial Sequence
  Synthetic
aagacaagcuacagacuga

SEQ ID NO: 230077 - RNA, 20 nt, Artificial Sequence
  Synthetic
aaagacaagcuacagacuga

SEQ ID NO: 230078 - RNA, 21 nt, Artificial Sequence
  Synthetic
aaaagacaagcuacagacuga

SEQ ID NO: 230079 - RNA, 22 nt, Artificial Sequence
  Synthetic
gaaaagacaagcuacagacuga

SEQ ID NO: 230080 - RNA, 23 nt, Artificial Sequence
  Synthetic
ugaaaagacaagcuacagacuga

SEQ ID NO: 230081 - RNA, 24 nt, Artificial Sequence
  Synthetic
augaaaagacaagcuacagacuga

SEQ ID NO: 230082 - RNA, 18 nt, Artificial Sequence
  Synthetic
uaggaagguuuagacuga

SEQ ID NO: 230083 - RNA, 19 nt, Artificial Sequence
  Synthetic
uuaggaagguuuagacuga

SEQ ID NO: 230084 - RNA, 20 nt, Artificial Sequence
  Synthetic
uuuaggaagguuuagacuga

SEQ ID NO: 230085 - RNA, 21 nt, Artificial Sequence
  Synthetic
auuuaggaagguuuagacuga

SEQ ID NO: 230086 - RNA, 22 nt, Artificial Sequence
  Synthetic
uauuuaggaagguuuagacuga

SEQ ID NO: 230087 - RNA, 23 nt, Artificial Sequence
  Synthetic
cuauuuaggaagguuuagacuga

SEQ ID NO: 230088 - RNA, 24 nt, Artificial Sequence
  Synthetic
gcuauuuaggaagguuuagacuga

SEQ ID NO: 230089 - RNA, 18 nt, Artificial Sequence
  Synthetic
ccuaucuauagggacuga

SEQ ID NO: 230090 - RNA, 19 nt, Artificial Sequence
  Synthetic
uccuaucuauagggacuga

SEQ ID NO: 230091 - RNA, 20 nt, Artificial Sequence
  Synthetic
uuccuaucuauagggacuga

SEQ ID NO: 230092 - RNA, 21 nt, Artificial Sequence
  Synthetic
auuccuaucuauagggacuga

SEQ ID NO: 230093 - RNA, 22 nt, Artificial Sequence
  Synthetic
aauuccuaucuauagggacuga

SEQ ID NO: 230094 - RNA, 23 nt, Artificial Sequence
  Synthetic
caauuccuaucuauagggacuga

SEQ ID NO: 230095 - RNA, 24 nt, Artificial Sequence
  Synthetic
ccaauuccuaucuauagggacuga

SEQ ID NO: 230096 - RNA, 18 nt, Artificial Sequence
  Synthetic
agaugagauaaugacuga

SEQ ID NO: 230097 - RNA, 19 nt, Artificial Sequence
  Synthetic
uagaugagauaaugacuga

SEQ ID NO: 230098 - RNA, 20 nt, Artificial Sequence
  Synthetic
auagaugagauaaugacuga

SEQ ID NO: 230099 - RNA, 21 nt, Artificial Sequence
  Synthetic
cauagaugagauaaugacuga

SEQ ID NO: 230100 - RNA, 22 nt, Artificial Sequence
  Synthetic
ucauagaugagauaaugacuga

SEQ ID NO: 230101 - RNA, 23 nt, Artificial Sequence
  Synthetic
uucauagaugagauaaugacuga

SEQ ID NO: 230102 - RNA, 24 nt, Artificial Sequence
  Synthetic
uuucauagaugagauaaugacuga

SEQ ID NO: 230103 - RNA, 18 nt, Artificial Sequence
  Synthetic
auugaaauuuuugacuga

SEQ ID NO: 230104 - RNA, 19 nt, Artificial Sequence
  Synthetic
aauugaaauuuuugacuga

SEQ ID NO: 230105 - RNA, 20 nt, Artificial Sequence
  Synthetic
uaauugaaauuuuugacuga

SEQ ID NO: 230106 - RNA, 21 nt, Artificial Sequence
  Synthetic
cuaauugaaauuuuugacuga

SEQ ID NO: 230107 - RNA, 22 nt, Artificial Sequence
  Synthetic
ucuaauugaaauuuuugacuga

SEQ ID NO: 230108 - RNA, 23 nt, Artificial Sequence
  Synthetic
uucuaauugaaauuuuugacuga

SEQ ID NO: 230109 - RNA, 24 nt, Artificial Sequence
  Synthetic
uuucuaauugaaauuuuugacuga

SEQ ID NO: 230110 - RNA, 18 nt, Artificial Sequence
  Synthetic
aguacaucucaauacuga

SEQ ID NO: 230111 - RNA, 19 nt, Artificial Sequence
  Synthetic
uaguacaucucaauacuga

SEQ ID NO: 230112 - RNA, 20 nt, Artificial Sequence
  Synthetic
uuaguacaucucaauacuga

SEQ ID NO: 230113 - RNA, 21 nt, Artificial Sequence
  Synthetic
guuaguacaucucaauacuga

SEQ ID NO: 230114 - RNA, 22 nt, Artificial Sequence
  Synthetic
aguuaguacaucucaauacuga

SEQ ID NO: 230115 - RNA, 23 nt, Artificial Sequence
  Synthetic
gaguuaguacaucucaauacuga

SEQ ID NO: 230116 - RNA, 24 nt, Artificial Sequence
  Synthetic
ggaguuaguacaucucaauacuga

SEQ ID NO: 230117 - RNA, 18 nt, Artificial Sequence
  Synthetic
cagccaauaucauacuga

SEQ ID NO: 230118 - RNA, 19 nt, Artificial Sequence
  Synthetic
acagccaauaucauacuga

SEQ ID NO: 230119 - RNA, 20 nt, Artificial Sequence
  Synthetic
cacagccaauaucauacuga

SEQ ID NO: 230120 - RNA, 18 nt, Artificial Sequence
  Synthetic
cagccauuaucauacuga

SEQ ID NO: 230121 - RNA, 19 nt, Artificial Sequence
  Synthetic
acagccauuaucauacuga

SEQ ID NO: 230122 - RNA, 20 nt, Artificial Sequence
  Synthetic
cacagccauuaucauacuga

SEQ ID NO: 230123 - RNA, 21 nt, Artificial Sequence
  Synthetic
ccacagccauuaucauacuga

SEQ ID NO: 230124 - RNA, 22 nt, Artificial Sequence
  Synthetic
cccacagccauuaucauacuga

SEQ ID NO: 230125 - RNA, 23 nt, Artificial Sequence
  Synthetic
acccacagccauuaucauacuga

SEQ ID NO: 230126 - RNA, 24 nt, Artificial Sequence
  Synthetic
aacccacagccauuaucauacuga

SEQ ID NO: 230127 - RNA, 18 nt, Artificial Sequence
  Synthetic
cgguuggguagauacuga

SEQ ID NO: 230128 - RNA, 19 nt, Artificial Sequence
  Synthetic
acgguuggguagauacuga

SEQ ID NO: 230129 - RNA, 20 nt, Artificial Sequence
  Synthetic
gacgguuggguagauacuga

SEQ ID NO: 230130 - RNA, 21 nt, Artificial Sequence
  Synthetic
ugacgguuggguagauacuga

SEQ ID NO: 230131 - RNA, 22 nt, Artificial Sequence
  Synthetic
uugacgguuggguagauacuga

SEQ ID NO: 230132 - RNA, 23 nt, Artificial Sequence
  Synthetic
auugacgguuggguagauacuga

SEQ ID NO: 230133 - RNA, 24 nt, Artificial Sequence
  Synthetic
aauugacgguuggguagauacuga

SEQ ID NO: 230134 - RNA, 18 nt, Artificial Sequence
  Synthetic
guuauuuuaggauacuga

SEQ ID NO: 230135 - RNA, 19 nt, Artificial Sequence
  Synthetic
aguuauuuuaggauacuga

SEQ ID NO: 230136 - RNA, 20 nt, Artificial Sequence
  Synthetic
uaguuauuuuaggauacuga

SEQ ID NO: 230137 - RNA, 21 nt, Artificial Sequence
  Synthetic
uuaguuauuuuaggauacuga

SEQ ID NO: 230138 - RNA, 22 nt, Artificial Sequence
  Synthetic
auuaguuauuuuaggauacuga

SEQ ID NO: 230139 - RNA, 23 nt, Artificial Sequence
  Synthetic
aauuaguuauuuuaggauacuga

SEQ ID NO: 230140 - RNA, 24 nt, Artificial Sequence
  Synthetic
aaauuaguuauuuuaggauacuga

SEQ ID NO: 230141 - RNA, 18 nt, Artificial Sequence
  Synthetic
uaacagugacaguacuga

SEQ ID NO: 230142 - RNA, 19 nt, Artificial Sequence
  Synthetic
cuaacagugacaguacuga

SEQ ID NO: 230143 - RNA, 20 nt, Artificial Sequence
  Synthetic
ucuaacagugacaguacuga

SEQ ID NO: 230144 - RNA, 21 nt, Artificial Sequence
  Synthetic
cucuaacagugacaguacuga

SEQ ID NO: 230145 - RNA, 22 nt, Artificial Sequence
  Synthetic
acucuaacagugacaguacuga

SEQ ID NO: 230146 - RNA, 23 nt, Artificial Sequence
  Synthetic
cacucuaacagugacaguacuga

SEQ ID NO: 230147 - RNA, 24 nt, Artificial Sequence
  Synthetic
acacucuaacagugacaguacuga

SEQ ID NO: 230148 - RNA, 18 nt, Artificial Sequence
  Synthetic
cuagaaaagcaguacuga

SEQ ID NO: 230149 - RNA, 19 nt, Artificial Sequence
  Synthetic
ccuagaaaagcaguacuga

SEQ ID NO: 230150 - RNA, 20 nt, Artificial Sequence
  Synthetic
accuagaaaagcaguacuga

SEQ ID NO: 230151 - RNA, 21 nt, Artificial Sequence
  Synthetic
gaccuagaaaagcaguacuga

SEQ ID NO: 230152 - RNA, 22 nt, Artificial Sequence
  Synthetic
ugaccuagaaaagcaguacuga

SEQ ID NO: 230153 - RNA, 23 nt, Artificial Sequence
  Synthetic
augaccuagaaaagcaguacuga

SEQ ID NO: 230154 - RNA, 24 nt, Artificial Sequence
  Synthetic
caugaccuagaaaagcaguacuga

SEQ ID NO: 230155 - RNA, 18 nt, Artificial Sequence
  Synthetic
caauaaauuagguacuga

SEQ ID NO: 230156 - RNA, 19 nt, Artificial Sequence
  Synthetic
ucaauaaauuagguacuga

SEQ ID NO: 230157 - RNA, 20 nt, Artificial Sequence
  Synthetic
cucaauaaauuagguacuga

SEQ ID NO: 230158 - RNA, 21 nt, Artificial Sequence
  Synthetic
ucucaauaaauuagguacuga

SEQ ID NO: 230159 - RNA, 22 nt, Artificial Sequence
  Synthetic
cucucaauaaauuagguacuga

SEQ ID NO: 230160 - RNA, 23 nt, Artificial Sequence
  Synthetic
acucucaauaaauuagguacuga

SEQ ID NO: 230161 - RNA, 24 nt, Artificial Sequence
  Synthetic
aacucucaauaaauuagguacuga

SEQ ID NO: 230162 - RNA, 18 nt, Artificial Sequence
  Synthetic
uuuucucugcgguacuga

SEQ ID NO: 230163 - RNA, 19 nt, Artificial Sequence
  Synthetic
uuuuucucugcgguacuga

SEQ ID NO: 230164 - RNA, 20 nt, Artificial Sequence
  Synthetic
cuuuuucucugcgguacuga

SEQ ID NO: 230165 - RNA, 21 nt, Artificial Sequence
  Synthetic
ucuuuuucucugcgguacuga

SEQ ID NO: 230166 - RNA, 22 nt, Artificial Sequence
  Synthetic
aucuuuuucucugcgguacuga

SEQ ID NO: 230167 - RNA, 23 nt, Artificial Sequence
  Synthetic
uaucuuuuucucugcgguacuga

SEQ ID NO: 230168 - RNA, 24 nt, Artificial Sequence
  Synthetic
guaucuuuuucucugcgguacuga

SEQ ID NO: 230169 - RNA, 18 nt, Artificial Sequence
  Synthetic
ccuagaauuguguacuga

SEQ ID NO: 230170 - RNA, 19 nt, Artificial Sequence
  Synthetic
accuagaauuguguacuga

SEQ ID NO: 230171 - RNA, 20 nt, Artificial Sequence
  Synthetic
aaccuagaauuguguacuga

SEQ ID NO: 230172 - RNA, 21 nt, Artificial Sequence
  Synthetic
gaaccuagaauuguguacuga

SEQ ID NO: 230173 - RNA, 22 nt, Artificial Sequence
  Synthetic
ggaaccuagaauuguguacuga

SEQ ID NO: 230174 - RNA, 23 nt, Artificial Sequence
  Synthetic
aggaaccuagaauuguguacuga

SEQ ID NO: 230175 - RNA, 24 nt, Artificial Sequence
  Synthetic
uaggaaccuagaauuguguacuga

SEQ ID NO: 230176 - RNA, 18 nt, Artificial Sequence
  Synthetic
gggcaauaugcuuacuga

SEQ ID NO: 230177 - RNA, 19 nt, Artificial Sequence
  Synthetic
ggggcaauaugcuuacuga

SEQ ID NO: 230178 - RNA, 20 nt, Artificial Sequence
  Synthetic
aggggcaauaugcuuacuga

SEQ ID NO: 230179 - RNA, 21 nt, Artificial Sequence
  Synthetic
gaggggcaauaugcuuacuga

SEQ ID NO: 230180 - RNA, 22 nt, Artificial Sequence
  Synthetic
ugaggggcaauaugcuuacuga

SEQ ID NO: 230181 - RNA, 23 nt, Artificial Sequence
  Synthetic
cugaggggcaauaugcuuacuga

SEQ ID NO: 230182 - RNA, 24 nt, Artificial Sequence
  Synthetic
ucugaggggcaauaugcuuacuga

SEQ ID NO: 230183 - RNA, 18 nt, Artificial Sequence
  Synthetic
uggccacuguuuuacuga

SEQ ID NO: 230184 - RNA, 19 nt, Artificial Sequence
  Synthetic
auggccacuguuuuacuga

SEQ ID NO: 230185 - RNA, 20 nt, Artificial Sequence
  Synthetic
cauggccacuguuuuacuga

SEQ ID NO: 230186 - RNA, 21 nt, Artificial Sequence
  Synthetic
ccauggccacuguuuuacuga

SEQ ID NO: 230187 - RNA, 22 nt, Artificial Sequence
  Synthetic
uccauggccacuguuuuacuga

SEQ ID NO: 230188 - RNA, 23 nt, Artificial Sequence
  Synthetic
uuccauggccacuguuuuacuga

SEQ ID NO: 230189 - RNA, 24 nt, Artificial Sequence
  Synthetic
auuccauggccacuguuuuacuga

SEQ ID NO: 230190 - RNA, 18 nt, Artificial Sequence
  Synthetic
ucaauggaucaaaccuga

SEQ ID NO: 230191 - RNA, 19 nt, Artificial Sequence
  Synthetic
gucaauggaucaaaccuga

SEQ ID NO: 230192 - RNA, 20 nt, Artificial Sequence
  Synthetic
ugucaauggaucaaaccuga

SEQ ID NO: 230193 - RNA, 21 nt, Artificial Sequence
  Synthetic
augucaauggaucaaaccuga

SEQ ID NO: 230194 - RNA, 22 nt, Artificial Sequence
  Synthetic
aaugucaauggaucaaaccuga

SEQ ID NO: 230195 - RNA, 23 nt, Artificial Sequence
  Synthetic
gaaugucaauggaucaaaccuga

SEQ ID NO: 230196 - RNA, 24 nt, Artificial Sequence
  Synthetic
agaaugucaauggaucaaaccuga

SEQ ID NO: 230197 - RNA, 18 nt, Artificial Sequence
  Synthetic
uuguagaaguaaaccuga

SEQ ID NO: 230198 - RNA, 19 nt, Artificial Sequence
  Synthetic
cuuguagaaguaaaccuga

SEQ ID NO: 230199 - RNA, 20 nt, Artificial Sequence
  Synthetic
gcuuguagaaguaaaccuga

SEQ ID NO: 230200 - RNA, 21 nt, Artificial Sequence
  Synthetic
ggcuuguagaaguaaaccuga

SEQ ID NO: 230201 - RNA, 22 nt, Artificial Sequence
  Synthetic
aggcuuguagaaguaaaccuga

SEQ ID NO: 230202 - RNA, 23 nt, Artificial Sequence
  Synthetic
gaggcuuguagaaguaaaccuga

SEQ ID NO: 230203 - RNA, 24 nt, Artificial Sequence
  Synthetic
ggaggcuuguagaaguaaaccuga

SEQ ID NO: 230204 - RNA, 18 nt, Artificial Sequence
  Synthetic
ggaacauaaaugaccuga

SEQ ID NO: 230205 - RNA, 19 nt, Artificial Sequence
  Synthetic
aggaacauaaaugaccuga

SEQ ID NO: 230206 - RNA, 20 nt, Artificial Sequence
  Synthetic
gaggaacauaaaugaccuga

SEQ ID NO: 230207 - RNA, 21 nt, Artificial Sequence
  Synthetic
agaggaacauaaaugaccuga

SEQ ID NO: 230208 - RNA, 22 nt, Artificial Sequence
  Synthetic
gagaggaacauaaaugaccuga

SEQ ID NO: 230209 - RNA, 23 nt, Artificial Sequence
  Synthetic
agagaggaacauaaaugaccuga

SEQ ID NO: 230210 - RNA, 24 nt, Artificial Sequence
  Synthetic
uagagaggaacauaaaugaccuga

SEQ ID NO: 230211 - RNA, 18 nt, Artificial Sequence
  Synthetic
cuuucauccaugaccuga

SEQ ID NO: 230212 - RNA, 19 nt, Artificial Sequence
  Synthetic
ucuuucauccaugaccuga

SEQ ID NO: 230213 - RNA, 20 nt, Artificial Sequence
  Synthetic
aucuuucauccaugaccuga

SEQ ID NO: 230214 - RNA, 21 nt, Artificial Sequence
  Synthetic
caucuuucauccaugaccuga

SEQ ID NO: 230215 - RNA, 22 nt, Artificial Sequence
  Synthetic
ucaucuuucauccaugaccuga

SEQ ID NO: 230216 - RNA, 23 nt, Artificial Sequence
  Synthetic
uucaucuuucauccaugaccuga

SEQ ID NO: 230217 - RNA, 24 nt, Artificial Sequence
  Synthetic
auucaucuuucauccaugaccuga

SEQ ID NO: 230218 - RNA, 18 nt, Artificial Sequence
  Synthetic
cagacaauacauaccuga

SEQ ID NO: 230219 - RNA, 19 nt, Artificial Sequence
  Synthetic
gcagacaauacauaccuga

SEQ ID NO: 230220 - RNA, 20 nt, Artificial Sequence
  Synthetic
agcagacaauacauaccuga

SEQ ID NO: 230221 - RNA, 21 nt, Artificial Sequence
  Synthetic
aagcagacaauacauaccuga

SEQ ID NO: 230222 - RNA, 22 nt, Artificial Sequence
  Synthetic
aaagcagacaauacauaccuga

SEQ ID NO: 230223 - RNA, 23 nt, Artificial Sequence
  Synthetic
gaaagcagacaauacauaccuga

SEQ ID NO: 230224 - RNA, 24 nt, Artificial Sequence
  Synthetic
ugaaagcagacaauacauaccuga

SEQ ID NO: 230225 - RNA, 18 nt, Artificial Sequence
  Synthetic
gaagcugagaaacccuga

SEQ ID NO: 230226 - RNA, 19 nt, Artificial Sequence
  Synthetic
ugaagcugagaaacccuga

SEQ ID NO: 230227 - RNA, 20 nt, Artificial Sequence
  Synthetic
cugaagcugagaaacccuga

SEQ ID NO: 230228 - RNA, 21 nt, Artificial Sequence
  Synthetic
gcugaagcugagaaacccuga

SEQ ID NO: 230229 - RNA, 22 nt, Artificial Sequence
  Synthetic
ggcugaagcugagaaacccuga

SEQ ID NO: 230230 - RNA, 23 nt, Artificial Sequence
  Synthetic
gggcugaagcugagaaacccuga

SEQ ID NO: 230231 - RNA, 24 nt, Artificial Sequence
  Synthetic
agggcugaagcugagaaacccuga

SEQ ID NO: 230232 - RNA, 18 nt, Artificial Sequence
  Synthetic
uggagcaggacccccuga

SEQ ID NO: 230233 - RNA, 19 nt, Artificial Sequence
  Synthetic
auggagcaggacccccuga

SEQ ID NO: 230234 - RNA, 20 nt, Artificial Sequence
  Synthetic
uauggagcaggacccccuga

SEQ ID NO: 230235 - RNA, 21 nt, Artificial Sequence
  Synthetic
auauggagcaggacccccuga

SEQ ID NO: 230236 - RNA, 22 nt, Artificial Sequence
  Synthetic
gauauggagcaggacccccuga

SEQ ID NO: 230237 - RNA, 23 nt, Artificial Sequence
  Synthetic
agauauggagcaggacccccuga

SEQ ID NO: 230238 - RNA, 24 nt, Artificial Sequence
  Synthetic
gagauauggagcaggacccccuga

SEQ ID NO: 230239 - RNA, 18 nt, Artificial Sequence
  Synthetic
caagguaugcuccccuga

SEQ ID NO: 230240 - RNA, 19 nt, Artificial Sequence
  Synthetic
ucaagguaugcuccccuga

SEQ ID NO: 230241 - RNA, 20 nt, Artificial Sequence
  Synthetic
aucaagguaugcuccccuga

SEQ ID NO: 230242 - RNA, 21 nt, Artificial Sequence
  Synthetic
uaucaagguaugcuccccuga

SEQ ID NO: 230243 - RNA, 22 nt, Artificial Sequence
  Synthetic
uuaucaagguaugcuccccuga

SEQ ID NO: 230244 - RNA, 23 nt, Artificial Sequence
  Synthetic
auuaucaagguaugcuccccuga

SEQ ID NO: 230245 - RNA, 24 nt, Artificial Sequence
  Synthetic
uauuaucaagguaugcuccccuga

SEQ ID NO: 230246 - RNA, 18 nt, Artificial Sequence
  Synthetic
aggaugaugacgcccuga

SEQ ID NO: 230247 - RNA, 19 nt, Artificial Sequence
  Synthetic
uaggaugaugacgcccuga

SEQ ID NO: 230248 - RNA, 20 nt, Artificial Sequence
  Synthetic
uuaggaugaugacgcccuga

SEQ ID NO: 230249 - RNA, 21 nt, Artificial Sequence
  Synthetic
auuaggaugaugacgcccuga

SEQ ID NO: 230250 - RNA, 22 nt, Artificial Sequence
  Synthetic
aauuaggaugaugacgcccuga

SEQ ID NO: 230251 - RNA, 23 nt, Artificial Sequence
  Synthetic
caauuaggaugaugacgcccuga

SEQ ID NO: 230252 - RNA, 24 nt, Artificial Sequence
  Synthetic
ccaauuaggaugaugacgcccuga

SEQ ID NO: 230253 - RNA, 18 nt, Artificial Sequence
  Synthetic
agcucaggcagucccuga

SEQ ID NO: 230254 - RNA, 19 nt, Artificial Sequence
  Synthetic
cagcucaggcagucccuga

SEQ ID NO: 230255 - RNA, 20 nt, Artificial Sequence
  Synthetic
gcagcucaggcagucccuga

SEQ ID NO: 230256 - RNA, 21 nt, Artificial Sequence
  Synthetic
ugcagcucaggcagucccuga

SEQ ID NO: 230257 - RNA, 22 nt, Artificial Sequence
  Synthetic
cugcagcucaggcagucccuga

SEQ ID NO: 230258 - RNA, 23 nt, Artificial Sequence
  Synthetic
ucugcagcucaggcagucccuga

SEQ ID NO: 230259 - RNA, 24 nt, Artificial Sequence
  Synthetic
cucugcagcucaggcagucccuga

SEQ ID NO: 230260 - RNA, 18 nt, Artificial Sequence
  Synthetic
cuuccaugcugucccuga

SEQ ID NO: 230261 - RNA, 19 nt, Artificial Sequence
  Synthetic
ucuuccaugcugucccuga

SEQ ID NO: 230262 - RNA, 20 nt, Artificial Sequence
  Synthetic
cucuuccaugcugucccuga

SEQ ID NO: 230263 - RNA, 21 nt, Artificial Sequence
  Synthetic
ccucuuccaugcugucccuga

SEQ ID NO: 230264 - RNA, 22 nt, Artificial Sequence
  Synthetic
gccucuuccaugcugucccuga

SEQ ID NO: 230265 - RNA, 23 nt, Artificial Sequence
  Synthetic
cgccucuuccaugcugucccuga

SEQ ID NO: 230266 - RNA, 24 nt, Artificial Sequence
  Synthetic
acgccucuuccaugcugucccuga

SEQ ID NO: 230267 - RNA, 18 nt, Artificial Sequence
  Synthetic
cuuguuaguuuagccuga

SEQ ID NO: 230268 - RNA, 19 nt, Artificial Sequence
  Synthetic
ucuuguuaguuuagccuga

SEQ ID NO: 230269 - RNA, 20 nt, Artificial Sequence
  Synthetic
uucuuguuaguuuagccuga

SEQ ID NO: 230270 - RNA, 21 nt, Artificial Sequence
  Synthetic
cuucuuguuaguuuagccuga

SEQ ID NO: 230271 - RNA, 22 nt, Artificial Sequence
  Synthetic
ucuucuuguuaguuuagccuga

SEQ ID NO: 230272 - RNA, 23 nt, Artificial Sequence
  Synthetic
aucuucuuguuaguuuagccuga

SEQ ID NO: 230273 - RNA, 24 nt, Artificial Sequence
  Synthetic
uaucuucuuguuaguuuagccuga

SEQ ID NO: 230274 - RNA, 18 nt, Artificial Sequence
  Synthetic
aagaacacagacgccuga

SEQ ID NO: 230275 - RNA, 19 nt, Artificial Sequence
  Synthetic
aaagaacacagacgccuga

SEQ ID NO: 230276 - RNA, 20 nt, Artificial Sequence
  Synthetic
caaagaacacagacgccuga

SEQ ID NO: 230277 - RNA, 21 nt, Artificial Sequence
  Synthetic
acaaagaacacagacgccuga

SEQ ID NO: 230278 - RNA, 22 nt, Artificial Sequence
  Synthetic
cacaaagaacacagacgccuga

SEQ ID NO: 230279 - RNA, 23 nt, Artificial Sequence
  Synthetic
acacaaagaacacagacgccuga

SEQ ID NO: 230280 - RNA, 24 nt, Artificial Sequence
  Synthetic
gacacaaagaacacagacgccuga

SEQ ID NO: 230281 - RNA, 18 nt, Artificial Sequence
  Synthetic
gggcugauaagggccuga

SEQ ID NO: 230282 - RNA, 19 nt, Artificial Sequence
  Synthetic
agggcugauaagggccuga

SEQ ID NO: 230283 - RNA, 20 nt, Artificial Sequence
  Synthetic
aagggcugauaagggccuga

SEQ ID NO: 230284 - RNA, 21 nt, Artificial Sequence
  Synthetic
aaagggcugauaagggccuga

SEQ ID NO: 230285 - RNA, 22 nt, Artificial Sequence
  Synthetic
aaaagggcugauaagggccuga

SEQ ID NO: 230286 - RNA, 23 nt, Artificial Sequence
  Synthetic
caaaagggcugauaagggccuga

SEQ ID NO: 230287 - RNA, 24 nt, Artificial Sequence
  Synthetic
acaaaagggcugauaagggccuga

SEQ ID NO: 230288 - RNA, 18 nt, Artificial Sequence
  Synthetic
guagcugaugaauccuga

SEQ ID NO: 230289 - RNA, 19 nt, Artificial Sequence
  Synthetic
aguagcugaugaauccuga

SEQ ID NO: 230290 - RNA, 20 nt, Artificial Sequence
  Synthetic
uaguagcugaugaauccuga

SEQ ID NO: 230291 - RNA, 21 nt, Artificial Sequence
  Synthetic
uuaguagcugaugaauccuga

SEQ ID NO: 230292 - RNA, 22 nt, Artificial Sequence
  Synthetic
guuaguagcugaugaauccuga

SEQ ID NO: 230293 - RNA, 23 nt, Artificial Sequence
  Synthetic
aguuaguagcugaugaauccuga

SEQ ID NO: 230294 - RNA, 24 nt, Artificial Sequence
  Synthetic
uaguuaguagcugaugaauccuga

SEQ ID NO: 230295 - RNA, 18 nt, Artificial Sequence
  Synthetic
uaucauuaaacauccuga

SEQ ID NO: 230296 - RNA, 19 nt, Artificial Sequence
  Synthetic
auaucauuaaacauccuga

SEQ ID NO: 230297 - RNA, 20 nt, Artificial Sequence
  Synthetic
uauaucauuaaacauccuga

SEQ ID NO: 230298 - RNA, 21 nt, Artificial Sequence
  Synthetic
auauaucauuaaacauccuga

SEQ ID NO: 230299 - RNA, 22 nt, Artificial Sequence
  Synthetic
uauauaucauuaaacauccuga

SEQ ID NO: 230300 - RNA, 23 nt, Artificial Sequence
  Synthetic
auauauaucauuaaacauccuga

SEQ ID NO: 230301 - RNA, 24 nt, Artificial Sequence
  Synthetic
aauauauaucauuaaacauccuga

SEQ ID NO: 230302 - RNA, 18 nt, Artificial Sequence
  Synthetic
uuucccccauuauccuga

SEQ ID NO: 230303 - RNA, 19 nt, Artificial Sequence
  Synthetic
uuuucccccauuauccuga

SEQ ID NO: 230304 - RNA, 20 nt, Artificial Sequence
  Synthetic
auuuucccccauuauccuga

SEQ ID NO: 230305 - RNA, 21 nt, Artificial Sequence
  Synthetic
cauuuucccccauuauccuga

SEQ ID NO: 230306 - RNA, 22 nt, Artificial Sequence
  Synthetic
gcauuuucccccauuauccuga

SEQ ID NO: 230307 - RNA, 23 nt, Artificial Sequence
  Synthetic
agcauuuucccccauuauccuga

SEQ ID NO: 230308 - RNA, 24 nt, Artificial Sequence
  Synthetic
aagcauuuucccccauuauccuga

SEQ ID NO: 230309 - RNA, 18 nt, Artificial Sequence
  Synthetic
ucaauaauuuuauccuga

SEQ ID NO: 230310 - RNA, 19 nt, Artificial Sequence
  Synthetic
uucaauaauuuuauccuga

SEQ ID NO: 230311 - RNA, 20 nt, Artificial Sequence
  Synthetic
cuucaauaauuuuauccuga

SEQ ID NO: 230312 - RNA, 21 nt, Artificial Sequence
  Synthetic
ucuucaauaauuuuauccuga

SEQ ID NO: 230313 - RNA, 22 nt, Artificial Sequence
  Synthetic
cucuucaauaauuuuauccuga

SEQ ID NO: 230314 - RNA, 23 nt, Artificial Sequence
  Synthetic
acucuucaauaauuuuauccuga

SEQ ID NO: 230315 - RNA, 24 nt, Artificial Sequence
  Synthetic
uacucuucaauaauuuuauccuga

SEQ ID NO: 230316 - RNA, 18 nt, Artificial Sequence
  Synthetic
gacccccgugccuccuga

SEQ ID NO: 230317 - RNA, 19 nt, Artificial Sequence
  Synthetic
ugacccccgugccuccuga

SEQ ID NO: 230318 - RNA, 20 nt, Artificial Sequence
  Synthetic
cugacccccgugccuccuga

SEQ ID NO: 230319 - RNA, 21 nt, Artificial Sequence
  Synthetic
ccugacccccgugccuccuga

SEQ ID NO: 230320 - RNA, 22 nt, Artificial Sequence
  Synthetic
uccugacccccgugccuccuga

SEQ ID NO: 230321 - RNA, 23 nt, Artificial Sequence
  Synthetic
guccugacccccgugccuccuga

SEQ ID NO: 230322 - RNA, 24 nt, Artificial Sequence
  Synthetic
gguccugacccccgugccuccuga

SEQ ID NO: 230323 - RNA, 18 nt, Artificial Sequence
  Synthetic
augguguucagguccuga

SEQ ID NO: 230324 - RNA, 19 nt, Artificial Sequence
  Synthetic
uaugguguucagguccuga

SEQ ID NO: 230325 - RNA, 20 nt, Artificial Sequence
  Synthetic
cuaugguguucagguccuga

SEQ ID NO: 230326 - RNA, 21 nt, Artificial Sequence
  Synthetic
ucuaugguguucagguccuga

SEQ ID NO: 230327 - RNA, 22 nt, Artificial Sequence
  Synthetic
uucuaugguguucagguccuga

SEQ ID NO: 230328 - RNA, 23 nt, Artificial Sequence
  Synthetic
cuucuaugguguucagguccuga

SEQ ID NO: 230329 - RNA, 24 nt, Artificial Sequence
  Synthetic
ucuucuaugguguucagguccuga

SEQ ID NO: 230330 - RNA, 18 nt, Artificial Sequence
  Synthetic
guuacuuuaaauuccuga

SEQ ID NO: 230331 - RNA, 19 nt, Artificial Sequence
  Synthetic
uguuacuuuaaauuccuga

SEQ ID NO: 230332 - RNA, 20 nt, Artificial Sequence
  Synthetic
guguuacuuuaaauuccuga

SEQ ID NO: 230333 - RNA, 21 nt, Artificial Sequence
  Synthetic
aguguuacuuuaaauuccuga

SEQ ID NO: 230334 - RNA, 22 nt, Artificial Sequence
  Synthetic
uaguguuacuuuaaauuccuga

SEQ ID NO: 230335 - RNA, 23 nt, Artificial Sequence
  Synthetic
cuaguguuacuuuaaauuccuga

SEQ ID NO: 230336 - RNA, 24 nt, Artificial Sequence
  Synthetic
ucuaguguuacuuuaaauuccuga

SEQ ID NO: 230337 - RNA, 18 nt, Artificial Sequence
  Synthetic
cguuauuuuuauuccuga

SEQ ID NO: 230338 - RNA, 19 nt, Artificial Sequence
  Synthetic
acguuauuuuuauuccuga

SEQ ID NO: 230339 - RNA, 20 nt, Artificial Sequence
  Synthetic
cacguuauuuuuauuccuga

SEQ ID NO: 230340 - RNA, 21 nt, Artificial Sequence
  Synthetic
ccacguuauuuuuauuccuga

SEQ ID NO: 230341 - RNA, 22 nt, Artificial Sequence
  Synthetic
uccacguuauuuuuauuccuga

SEQ ID NO: 230342 - RNA, 23 nt, Artificial Sequence
  Synthetic
uuccacguuauuuuuauuccuga

SEQ ID NO: 230343 - RNA, 24 nt, Artificial Sequence
  Synthetic
uuuccacguuauuuuuauuccuga

SEQ ID NO: 230344 - RNA, 18 nt, Artificial Sequence
  Synthetic
uccuccugaaaaagcuga

SEQ ID NO: 230345 - RNA, 19 nt, Artificial Sequence
  Synthetic
auccuccugaaaaagcuga

SEQ ID NO: 230346 - RNA, 20 nt, Artificial Sequence
  Synthetic
cauccuccugaaaaagcuga

SEQ ID NO: 230347 - RNA, 21 nt, Artificial Sequence
  Synthetic
ucauccuccugaaaaagcuga

SEQ ID NO: 230348 - RNA, 22 nt, Artificial Sequence
  Synthetic
uucauccuccugaaaaagcuga

SEQ ID NO: 230349 - RNA, 23 nt, Artificial Sequence
  Synthetic
uuucauccuccugaaaaagcuga

SEQ ID NO: 230350 - RNA, 24 nt, Artificial Sequence
  Synthetic
cuuucauccuccugaaaaagcuga

SEQ ID NO: 230351 - RNA, 18 nt, Artificial Sequence
  Synthetic
uauuuagcaccaagcuga

SEQ ID NO: 230352 - RNA, 19 nt, Artificial Sequence
  Synthetic
uuauuuagcaccaagcuga

SEQ ID NO: 230353 - RNA, 20 nt, Artificial Sequence
  Synthetic
auuauuuagcaccaagcuga

SEQ ID NO: 230354 - RNA, 21 nt, Artificial Sequence
  Synthetic
uauuauuuagcaccaagcuga

SEQ ID NO: 230355 - RNA, 22 nt, Artificial Sequence
  Synthetic
uuauuauuuagcaccaagcuga

SEQ ID NO: 230356 - RNA, 23 nt, Artificial Sequence
  Synthetic
auuauuauuuagcaccaagcuga

SEQ ID NO: 230357 - RNA, 24 nt, Artificial Sequence
  Synthetic
uauuauuauuuagcaccaagcuga

SEQ ID NO: 230358 - RNA, 18 nt, Artificial Sequence
  Synthetic
uucugagacucaagcuga

SEQ ID NO: 230359 - RNA, 19 nt, Artificial Sequence
  Synthetic
cuucugagacucaagcuga

SEQ ID NO: 230360 - RNA, 20 nt, Artificial Sequence
  Synthetic
ucuucugagacucaagcuga

SEQ ID NO: 230361 - RNA, 21 nt, Artificial Sequence
  Synthetic
uucuucugagacucaagcuga

SEQ ID NO: 230362 - RNA, 22 nt, Artificial Sequence
  Synthetic
uuucuucugagacucaagcuga

SEQ ID NO: 230363 - RNA, 23 nt, Artificial Sequence
  Synthetic
uuuucuucugagacucaagcuga

SEQ ID NO: 230364 - RNA, 24 nt, Artificial Sequence
  Synthetic
auuuucuucugagacucaagcuga

SEQ ID NO: 230365 - RNA, 18 nt, Artificial Sequence
  Synthetic
acuucuuugauaagcuga

SEQ ID NO: 230366 - RNA, 19 nt, Artificial Sequence
  Synthetic
cacuucuuugauaagcuga

SEQ ID NO: 230367 - RNA, 20 nt, Artificial Sequence
  Synthetic
ucacuucuuugauaagcuga

SEQ ID NO: 230368 - RNA, 21 nt, Artificial Sequence
  Synthetic
aucacuucuuugauaagcuga

SEQ ID NO: 230369 - RNA, 22 nt, Artificial Sequence
  Synthetic
uaucacuucuuugauaagcuga

SEQ ID NO: 230370 - RNA, 23 nt, Artificial Sequence
  Synthetic
cuaucacuucuuugauaagcuga

SEQ ID NO: 230371 - RNA, 24 nt, Artificial Sequence
  Synthetic
acuaucacuucuuugauaagcuga

SEQ ID NO: 230372 - RNA, 18 nt, Artificial Sequence
  Synthetic
ugacaguauuuaagcuga

SEQ ID NO: 230373 - RNA, 19 nt, Artificial Sequence
  Synthetic
cugacaguauuuaagcuga

SEQ ID NO: 230374 - RNA, 20 nt, Artificial Sequence
  Synthetic
acugacaguauuuaagcuga

SEQ ID NO: 230375 - RNA, 21 nt, Artificial Sequence
  Synthetic
uacugacaguauuuaagcuga

SEQ ID NO: 230376 - RNA, 22 nt, Artificial Sequence
  Synthetic
guacugacaguauuuaagcuga

SEQ ID NO: 230377 - RNA, 23 nt, Artificial Sequence
  Synthetic
uguacugacaguauuuaagcuga

SEQ ID NO: 230378 - RNA, 24 nt, Artificial Sequence
  Synthetic
auguacugacaguauuuaagcuga

SEQ ID NO: 230379 - RNA, 18 nt, Artificial Sequence
  Synthetic
cuugaggagcacagcuga

SEQ ID NO: 230380 - RNA, 19 nt, Artificial Sequence
  Synthetic
ucuugaggagcacagcuga

SEQ ID NO: 230381 - RNA, 20 nt, Artificial Sequence
  Synthetic
aucuugaggagcacagcuga

SEQ ID NO: 230382 - RNA, 21 nt, Artificial Sequence
  Synthetic
caucuugaggagcacagcuga

SEQ ID NO: 230383 - RNA, 22 nt, Artificial Sequence
  Synthetic
gcaucuugaggagcacagcuga

SEQ ID NO: 230384 - RNA, 23 nt, Artificial Sequence
  Synthetic
agcaucuugaggagcacagcuga

SEQ ID NO: 230385 - RNA, 24 nt, Artificial Sequence
  Synthetic
gagcaucuugaggagcacagcuga

SEQ ID NO: 230386 - RNA, 18 nt, Artificial Sequence
  Synthetic
cucagucugcacagcuga

SEQ ID NO: 230387 - RNA, 19 nt, Artificial Sequence
  Synthetic
gcucagucugcacagcuga

SEQ ID NO: 230388 - RNA, 20 nt, Artificial Sequence
  Synthetic
ugcucagucugcacagcuga

SEQ ID NO: 230389 - RNA, 21 nt, Artificial Sequence
  Synthetic
augcucagucugcacagcuga

SEQ ID NO: 230390 - RNA, 22 nt, Artificial Sequence
  Synthetic
aaugcucagucugcacagcuga

SEQ ID NO: 230391 - RNA, 23 nt, Artificial Sequence
  Synthetic
aaaugcucagucugcacagcuga

SEQ ID NO: 230392 - RNA, 24 nt, Artificial Sequence
  Synthetic
aaaaugcucagucugcacagcuga

SEQ ID NO: 230393 - RNA, 18 nt, Artificial Sequence
  Synthetic
auauggaacacuagcuga

SEQ ID NO: 230394 - RNA, 19 nt, Artificial Sequence
  Synthetic
uauauggaacacuagcuga

SEQ ID NO: 230395 - RNA, 20 nt, Artificial Sequence
  Synthetic
uuauauggaacacuagcuga

SEQ ID NO: 230396 - RNA, 21 nt, Artificial Sequence
  Synthetic
auuauauggaacacuagcuga

SEQ ID NO: 230397 - RNA, 22 nt, Artificial Sequence
  Synthetic
cauuauauggaacacuagcuga

SEQ ID NO: 230398 - RNA, 23 nt, Artificial Sequence
  Synthetic
ccauuauauggaacacuagcuga

SEQ ID NO: 230399 - RNA, 24 nt, Artificial Sequence
  Synthetic
accauuauauggaacacuagcuga

SEQ ID NO: 230400 - RNA, 18 nt, Artificial Sequence
  Synthetic
uguugaaggacuagcuga

SEQ ID NO: 230401 - RNA, 19 nt, Artificial Sequence
  Synthetic
uuguugaaggacuagcuga

SEQ ID NO: 230402 - RNA, 20 nt, Artificial Sequence
  Synthetic
guuguugaaggacuagcuga

SEQ ID NO: 230403 - RNA, 21 nt, Artificial Sequence
  Synthetic
uguuguugaaggacuagcuga

SEQ ID NO: 230404 - RNA, 22 nt, Artificial Sequence
  Synthetic
cuguuguugaaggacuagcuga

SEQ ID NO: 230405 - RNA, 23 nt, Artificial Sequence
  Synthetic
ucuguuguugaaggacuagcuga

SEQ ID NO: 230406 - RNA, 24 nt, Artificial Sequence
  Synthetic
uucuguuguugaaggacuagcuga

SEQ ID NO: 230407 - RNA, 18 nt, Artificial Sequence
  Synthetic
augaugauuucuagcuga

SEQ ID NO: 230408 - RNA, 19 nt, Artificial Sequence
  Synthetic
caugaugauuucuagcuga

SEQ ID NO: 230409 - RNA, 20 nt, Artificial Sequence
  Synthetic
ucaugaugauuucuagcuga

SEQ ID NO: 230410 - RNA, 21 nt, Artificial Sequence
  Synthetic
cucaugaugauuucuagcuga

SEQ ID NO: 230411 - RNA, 22 nt, Artificial Sequence
  Synthetic
ccucaugaugauuucuagcuga

SEQ ID NO: 230412 - RNA, 23 nt, Artificial Sequence
  Synthetic
cccucaugaugauuucuagcuga

SEQ ID NO: 230413 - RNA, 24 nt, Artificial Sequence
  Synthetic
gcccucaugaugauuucuagcuga

SEQ ID NO: 230414 - RNA, 18 nt, Artificial Sequence
  Synthetic
ucaacguauauuagcuga

SEQ ID NO: 230415 - RNA, 19 nt, Artificial Sequence
  Synthetic
cucaacguauauuagcuga

SEQ ID NO: 230416 - RNA, 20 nt, Artificial Sequence
  Synthetic
acucaacguauauuagcuga

SEQ ID NO: 230417 - RNA, 21 nt, Artificial Sequence
  Synthetic
cacucaacguauauuagcuga

SEQ ID NO: 230418 - RNA, 22 nt, Artificial Sequence
  Synthetic
gcacucaacguauauuagcuga

SEQ ID NO: 230419 - RNA, 23 nt, Artificial Sequence
  Synthetic
ggcacucaacguauauuagcuga

SEQ ID NO: 230420 - RNA, 24 nt, Artificial Sequence
  Synthetic
aggcacucaacguauauuagcuga

SEQ ID NO: 230421 - RNA, 18 nt, Artificial Sequence
  Synthetic
ucaaguguuaaaggcuga

SEQ ID NO: 230422 - RNA, 19 nt, Artificial Sequence
  Synthetic
gucaaguguuaaaggcuga

SEQ ID NO: 230423 - RNA, 20 nt, Artificial Sequence
  Synthetic
agucaaguguuaaaggcuga

SEQ ID NO: 230424 - RNA, 21 nt, Artificial Sequence
  Synthetic
gagucaaguguuaaaggcuga

SEQ ID NO: 230425 - RNA, 22 nt, Artificial Sequence
  Synthetic
ugagucaaguguuaaaggcuga

SEQ ID NO: 230426 - RNA, 23 nt, Artificial Sequence
  Synthetic
uugagucaaguguuaaaggcuga

SEQ ID NO: 230427 - RNA, 24 nt, Artificial Sequence
  Synthetic
uuugagucaaguguuaaaggcuga

SEQ ID NO: 230428 - RNA, 18 nt, Artificial Sequence
  Synthetic
augcucuuggaaggcuga

SEQ ID NO: 230429 - RNA, 19 nt, Artificial Sequence
  Synthetic
caugcucuuggaaggcuga

SEQ ID NO: 230430 - RNA, 20 nt, Artificial Sequence
  Synthetic
acaugcucuuggaaggcuga

SEQ ID NO: 230431 - RNA, 21 nt, Artificial Sequence
  Synthetic
uacaugcucuuggaaggcuga

SEQ ID NO: 230432 - RNA, 22 nt, Artificial Sequence
  Synthetic
auacaugcucuuggaaggcuga

SEQ ID NO: 230433 - RNA, 23 nt, Artificial Sequence
  Synthetic
uauacaugcucuuggaaggcuga

SEQ ID NO: 230434 - RNA, 24 nt, Artificial Sequence
  Synthetic
auauacaugcucuuggaaggcuga

SEQ ID NO: 230435 - RNA, 18 nt, Artificial Sequence
  Synthetic
acagucgcuggaggcuga

SEQ ID NO: 230436 - RNA, 19 nt, Artificial Sequence
  Synthetic
uacagucgcuggaggcuga

SEQ ID NO: 230437 - RNA, 20 nt, Artificial Sequence
  Synthetic
cuacagucgcuggaggcuga

SEQ ID NO: 230438 - RNA, 21 nt, Artificial Sequence
  Synthetic
ccuacagucgcuggaggcuga

SEQ ID NO: 230439 - RNA, 22 nt, Artificial Sequence
  Synthetic
accuacagucgcuggaggcuga

SEQ ID NO: 230440 - RNA, 23 nt, Artificial Sequence
  Synthetic
caccuacagucgcuggaggcuga

SEQ ID NO: 230441 - RNA, 24 nt, Artificial Sequence
  Synthetic
ccaccuacagucgcuggaggcuga

SEQ ID NO: 230442 - RNA, 18 nt, Artificial Sequence
  Synthetic
uaaccaucccagggcuga

SEQ ID NO: 230443 - RNA, 19 nt, Artificial Sequence
  Synthetic
cuaaccaucccagggcuga

SEQ ID NO: 230444 - RNA, 20 nt, Artificial Sequence
  Synthetic
ccuaaccaucccagggcuga

SEQ ID NO: 230445 - RNA, 21 nt, Artificial Sequence
  Synthetic
gccuaaccaucccagggcuga

SEQ ID NO: 230446 - RNA, 22 nt, Artificial Sequence
  Synthetic
ugccuaaccaucccagggcuga

SEQ ID NO: 230447 - RNA, 23 nt, Artificial Sequence
  Synthetic
cugccuaaccaucccagggcuga

SEQ ID NO: 230448 - RNA, 24 nt, Artificial Sequence
  Synthetic
gcugccuaaccaucccagggcuga

SEQ ID NO: 230449 - RNA, 18 nt, Artificial Sequence
  Synthetic
auuccauaggcuggcuga

SEQ ID NO: 230450 - RNA, 19 nt, Artificial Sequence
  Synthetic
cauuccauaggcuggcuga

SEQ ID NO: 230451 - RNA, 20 nt, Artificial Sequence
  Synthetic
ucauuccauaggcuggcuga

SEQ ID NO: 230452 - RNA, 21 nt, Artificial Sequence
  Synthetic
gucauuccauaggcuggcuga

SEQ ID NO: 230453 - RNA, 22 nt, Artificial Sequence
  Synthetic
ggucauuccauaggcuggcuga

SEQ ID NO: 230454 - RNA, 23 nt, Artificial Sequence
  Synthetic
gggucauuccauaggcuggcuga

SEQ ID NO: 230455 - RNA, 24 nt, Artificial Sequence
  Synthetic
ggggucauuccauaggcuggcuga

SEQ ID NO: 230456 - RNA, 18 nt, Artificial Sequence
  Synthetic
cugagauucaaaugcuga

SEQ ID NO: 230457 - RNA, 19 nt, Artificial Sequence
  Synthetic
gcugagauucaaaugcuga

SEQ ID NO: 230458 - RNA, 20 nt, Artificial Sequence
  Synthetic
ugcugagauucaaaugcuga

SEQ ID NO: 230459 - RNA, 21 nt, Artificial Sequence
  Synthetic
cugcugagauucaaaugcuga

SEQ ID NO: 230460 - RNA, 22 nt, Artificial Sequence
  Synthetic
acugcugagauucaaaugcuga

SEQ ID NO: 230461 - RNA, 23 nt, Artificial Sequence
  Synthetic
cacugcugagauucaaaugcuga

SEQ ID NO: 230462 - RNA, 24 nt, Artificial Sequence
  Synthetic
acacugcugagauucaaaugcuga

SEQ ID NO: 230463 - RNA, 18 nt, Artificial Sequence
  Synthetic
aacacucuagaaugcuga

SEQ ID NO: 230464 - RNA, 19 nt, Artificial Sequence
  Synthetic
aaacacucuagaaugcuga

SEQ ID NO: 230465 - RNA, 20 nt, Artificial Sequence
  Synthetic
aaaacacucuagaaugcuga

SEQ ID NO: 230466 - RNA, 21 nt, Artificial Sequence
  Synthetic
aaaaacacucuagaaugcuga

SEQ ID NO: 230467 - RNA, 22 nt, Artificial Sequence
  Synthetic
aaaaaacacucuagaaugcuga

SEQ ID NO: 230468 - RNA, 23 nt, Artificial Sequence
  Synthetic
uaaaaaacacucuagaaugcuga

SEQ ID NO: 230469 - RNA, 24 nt, Artificial Sequence
  Synthetic
auaaaaaacacucuagaaugcuga

SEQ ID NO: 230470 - RNA, 18 nt, Artificial Sequence
  Synthetic
gcuuguggugaaugcuga

SEQ ID NO: 230471 - RNA, 19 nt, Artificial Sequence
  Synthetic
agcuuguggugaaugcuga

SEQ ID NO: 230472 - RNA, 20 nt, Artificial Sequence
  Synthetic
cagcuuguggugaaugcuga

SEQ ID NO: 230473 - RNA, 21 nt, Artificial Sequence
  Synthetic
ucagcuuguggugaaugcuga

SEQ ID NO: 230474 - RNA, 22 nt, Artificial Sequence
  Synthetic
aucagcuuguggugaaugcuga

SEQ ID NO: 230475 - RNA, 23 nt, Artificial Sequence
  Synthetic
caucagcuuguggugaaugcuga

SEQ ID NO: 230476 - RNA, 24 nt, Artificial Sequence
  Synthetic
ccaucagcuuguggugaaugcuga

SEQ ID NO: 230477 - RNA, 18 nt, Artificial Sequence
  Synthetic
ugcacccucacaugcuga

SEQ ID NO: 230478 - RNA, 19 nt, Artificial Sequence
  Synthetic
cugcacccucacaugcuga

SEQ ID NO: 230479 - RNA, 20 nt, Artificial Sequence
  Synthetic
acugcacccucacaugcuga

SEQ ID NO: 230480 - RNA, 21 nt, Artificial Sequence
  Synthetic
cacugcacccucacaugcuga

SEQ ID NO: 230481 - RNA, 22 nt, Artificial Sequence
  Synthetic
ucacugcacccucacaugcuga

SEQ ID NO: 230482 - RNA, 23 nt, Artificial Sequence
  Synthetic
cucacugcacccucacaugcuga

SEQ ID NO: 230483 - RNA, 24 nt, Artificial Sequence
  Synthetic
ucucacugcacccucacaugcuga

SEQ ID NO: 230484 - RNA, 18 nt, Artificial Sequence
  Synthetic
gugagaagaugaugcuga

SEQ ID NO: 230485 - RNA, 19 nt, Artificial Sequence
  Synthetic
ugugagaagaugaugcuga

SEQ ID NO: 230486 - RNA, 20 nt, Artificial Sequence
  Synthetic
gugugagaagaugaugcuga

SEQ ID NO: 230487 - RNA, 21 nt, Artificial Sequence
  Synthetic
agugugagaagaugaugcuga

SEQ ID NO: 230488 - RNA, 22 nt, Artificial Sequence
  Synthetic
aagugugagaagaugaugcuga

SEQ ID NO: 230489 - RNA, 23 nt, Artificial Sequence
  Synthetic
uaagugugagaagaugaugcuga

SEQ ID NO: 230490 - RNA, 24 nt, Artificial Sequence
  Synthetic
cuaagugugagaagaugaugcuga

SEQ ID NO: 230491 - RNA, 18 nt, Artificial Sequence
  Synthetic
auaacuuuuauaugcuga

SEQ ID NO: 230492 - RNA, 19 nt, Artificial Sequence
  Synthetic
gauaacuuuuauaugcuga

SEQ ID NO: 230493 - RNA, 20 nt, Artificial Sequence
  Synthetic
ggauaacuuuuauaugcuga

SEQ ID NO: 230494 - RNA, 21 nt, Artificial Sequence
  Synthetic
uggauaacuuuuauaugcuga

SEQ ID NO: 230495 - RNA, 22 nt, Artificial Sequence
  Synthetic
cuggauaacuuuuauaugcuga

SEQ ID NO: 230496 - RNA, 23 nt, Artificial Sequence
  Synthetic
acuggauaacuuuuauaugcuga

SEQ ID NO: 230497 - RNA, 24 nt, Artificial Sequence
  Synthetic
aacuggauaacuuuuauaugcuga

SEQ ID NO: 230498 - RNA, 18 nt, Artificial Sequence
  Synthetic
uccccaaaccuaugcuga

SEQ ID NO: 230499 - RNA, 19 nt, Artificial Sequence
  Synthetic
uuccccaaaccuaugcuga

SEQ ID NO: 230500 - RNA, 20 nt, Artificial Sequence
  Synthetic
uuuccccaaaccuaugcuga

SEQ ID NO: 230501 - RNA, 21 nt, Artificial Sequence
  Synthetic
cuuuccccaaaccuaugcuga

SEQ ID NO: 230502 - RNA, 22 nt, Artificial Sequence
  Synthetic
ucuuuccccaaaccuaugcuga

SEQ ID NO: 230503 - RNA, 23 nt, Artificial Sequence
  Synthetic
uucuuuccccaaaccuaugcuga

SEQ ID NO: 230504 - RNA, 24 nt, Artificial Sequence
  Synthetic
auucuuuccccaaaccuaugcuga

SEQ ID NO: 230505 - RNA, 18 nt, Artificial Sequence
  Synthetic
acuacaaaacacugcuga

SEQ ID NO: 230506 - RNA, 19 nt, Artificial Sequence
  Synthetic
aacuacaaaacacugcuga

SEQ ID NO: 230507 - RNA, 20 nt, Artificial Sequence
  Synthetic
uaacuacaaaacacugcuga

SEQ ID NO: 230508 - RNA, 21 nt, Artificial Sequence
  Synthetic
cuaacuacaaaacacugcuga

SEQ ID NO: 230509 - RNA, 22 nt, Artificial Sequence
  Synthetic
gcuaacuacaaaacacugcuga

SEQ ID NO: 230510 - RNA, 23 nt, Artificial Sequence
  Synthetic
ggcuaacuacaaaacacugcuga

SEQ ID NO: 230511 - RNA, 24 nt, Artificial Sequence
  Synthetic
gggcuaacuacaaaacacugcuga

SEQ ID NO: 230512 - RNA, 18 nt, Artificial Sequence
  Synthetic
aucccuucucccugcuga

SEQ ID NO: 230513 - RNA, 19 nt, Artificial Sequence
  Synthetic
uaucccuucucccugcuga

SEQ ID NO: 230514 - RNA, 20 nt, Artificial Sequence
  Synthetic
auaucccuucucccugcuga

SEQ ID NO: 230515 - RNA, 21 nt, Artificial Sequence
  Synthetic
cauaucccuucucccugcuga

SEQ ID NO: 230516 - RNA, 22 nt, Artificial Sequence
  Synthetic
gcauaucccuucucccugcuga

SEQ ID NO: 230517 - RNA, 23 nt, Artificial Sequence
  Synthetic
agcauaucccuucucccugcuga

SEQ ID NO: 230518 - RNA, 24 nt, Artificial Sequence
  Synthetic
aagcauaucccuucucccugcuga

SEQ ID NO: 230519 - RNA, 18 nt, Artificial Sequence
  Synthetic
augaaauaaugcugcuga

SEQ ID NO: 230520 - RNA, 19 nt, Artificial Sequence
  Synthetic
uaugaaauaaugcugcuga

SEQ ID NO: 230521 - RNA, 20 nt, Artificial Sequence
  Synthetic
uuaugaaauaaugcugcuga

SEQ ID NO: 230522 - RNA, 21 nt, Artificial Sequence
  Synthetic
uuuaugaaauaaugcugcuga

SEQ ID NO: 230523 - RNA, 22 nt, Artificial Sequence
  Synthetic
uuuuaugaaauaaugcugcuga

SEQ ID NO: 230524 - RNA, 23 nt, Artificial Sequence
  Synthetic
guuuuaugaaauaaugcugcuga

SEQ ID NO: 230525 - RNA, 24 nt, Artificial Sequence
  Synthetic
uguuuuaugaaauaaugcugcuga

SEQ ID NO: 230526 - RNA, 18 nt, Artificial Sequence
  Synthetic
acaucgcugugcugcuga

SEQ ID NO: 230527 - RNA, 19 nt, Artificial Sequence
  Synthetic
uacaucgcugugcugcuga

SEQ ID NO: 230528 - RNA, 20 nt, Artificial Sequence
  Synthetic
guacaucgcugugcugcuga

SEQ ID NO: 230529 - RNA, 21 nt, Artificial Sequence
  Synthetic
uguacaucgcugugcugcuga

SEQ ID NO: 230530 - RNA, 22 nt, Artificial Sequence
  Synthetic
uuguacaucgcugugcugcuga

SEQ ID NO: 230531 - RNA, 23 nt, Artificial Sequence
  Synthetic
auuguacaucgcugugcugcuga

SEQ ID NO: 230532 - RNA, 24 nt, Artificial Sequence
  Synthetic
uauuguacaucgcugugcugcuga

SEQ ID NO: 230533 - RNA, 18 nt, Artificial Sequence
  Synthetic
uuacucaaagucugcuga

SEQ ID NO: 230534 - RNA, 19 nt, Artificial Sequence
  Synthetic
uuuacucaaagucugcuga

SEQ ID NO: 230535 - RNA, 20 nt, Artificial Sequence
  Synthetic
cuuuacucaaagucugcuga

SEQ ID NO: 230536 - RNA, 21 nt, Artificial Sequence
  Synthetic
gcuuuacucaaagucugcuga

SEQ ID NO: 230537 - RNA, 22 nt, Artificial Sequence
  Synthetic
ugcuuuacucaaagucugcuga

SEQ ID NO: 230538 - RNA, 23 nt, Artificial Sequence
  Synthetic
cugcuuuacucaaagucugcuga

SEQ ID NO: 230539 - RNA, 24 nt, Artificial Sequence
  Synthetic
ucugcuuuacucaaagucugcuga

SEQ ID NO: 230540 - RNA, 18 nt, Artificial Sequence
  Synthetic
gaagugccugucugcuga

SEQ ID NO: 230541 - RNA, 19 nt, Artificial Sequence
  Synthetic
agaagugccugucugcuga

SEQ ID NO: 230542 - RNA, 20 nt, Artificial Sequence
  Synthetic
aagaagugccugucugcuga

SEQ ID NO: 230543 - RNA, 21 nt, Artificial Sequence
  Synthetic
aaagaagugccugucugcuga

SEQ ID NO: 230544 - RNA, 22 nt, Artificial Sequence
  Synthetic
caaagaagugccugucugcuga

SEQ ID NO: 230545 - RNA, 23 nt, Artificial Sequence
  Synthetic
ucaaagaagugccugucugcuga

SEQ ID NO: 230546 - RNA, 24 nt, Artificial Sequence
  Synthetic
gucaaagaagugccugucugcuga

SEQ ID NO: 230547 - RNA, 18 nt, Artificial Sequence
  Synthetic
cagagcaacaagugcuga

SEQ ID NO: 230548 - RNA, 19 nt, Artificial Sequence
  Synthetic
gcagagcaacaagugcuga

SEQ ID NO: 230549 - RNA, 20 nt, Artificial Sequence
  Synthetic
ggcagagcaacaagugcuga

SEQ ID NO: 230550 - RNA, 21 nt, Artificial Sequence
  Synthetic
aggcagagcaacaagugcuga

SEQ ID NO: 230551 - RNA, 22 nt, Artificial Sequence
  Synthetic
aaggcagagcaacaagugcuga

SEQ ID NO: 230552 - RNA, 23 nt, Artificial Sequence
  Synthetic
caaggcagagcaacaagugcuga

SEQ ID NO: 230553 - RNA, 24 nt, Artificial Sequence
  Synthetic
gcaaggcagagcaacaagugcuga

SEQ ID NO: 230554 - RNA, 18 nt, Artificial Sequence
  Synthetic
acuguaauacauugcuga

SEQ ID NO: 230555 - RNA, 19 nt, Artificial Sequence
  Synthetic
aacuguaauacauugcuga

SEQ ID NO: 230556 - RNA, 20 nt, Artificial Sequence
  Synthetic
aaacuguaauacauugcuga

SEQ ID NO: 230557 - RNA, 21 nt, Artificial Sequence
  Synthetic
aaaacuguaauacauugcuga

SEQ ID NO: 230558 - RNA, 22 nt, Artificial Sequence
  Synthetic
gaaaacuguaauacauugcuga

SEQ ID NO: 230559 - RNA, 23 nt, Artificial Sequence
  Synthetic
ugaaaacuguaauacauugcuga

SEQ ID NO: 230560 - RNA, 24 nt, Artificial Sequence
  Synthetic
cugaaaacuguaauacauugcuga

SEQ ID NO: 230561 - RNA, 18 nt, Artificial Sequence
  Synthetic
ugcucucuacauugcuga

SEQ ID NO: 230562 - RNA, 19 nt, Artificial Sequence
  Synthetic
gugcucucuacauugcuga

SEQ ID NO: 230563 - RNA, 20 nt, Artificial Sequence
  Synthetic
agugcucucuacauugcuga

SEQ ID NO: 230564 - RNA, 21 nt, Artificial Sequence
  Synthetic
gagugcucucuacauugcuga

SEQ ID NO: 230565 - RNA, 22 nt, Artificial Sequence
  Synthetic
agagugcucucuacauugcuga

SEQ ID NO: 230566 - RNA, 23 nt, Artificial Sequence
  Synthetic
cagagugcucucuacauugcuga

SEQ ID NO: 230567 - RNA, 24 nt, Artificial Sequence
  Synthetic
acagagugcucucuacauugcuga

SEQ ID NO: 230568 - RNA, 18 nt, Artificial Sequence
  Synthetic
cacccuagaacuugcuga

SEQ ID NO: 230569 - RNA, 19 nt, Artificial Sequence
  Synthetic
ucacccuagaacuugcuga

SEQ ID NO: 230570 - RNA, 20 nt, Artificial Sequence
  Synthetic
aucacccuagaacuugcuga

SEQ ID NO: 230571 - RNA, 21 nt, Artificial Sequence
  Synthetic
aaucacccuagaacuugcuga

SEQ ID NO: 230572 - RNA, 22 nt, Artificial Sequence
  Synthetic
aaaucacccuagaacuugcuga

SEQ ID NO: 230573 - RNA, 23 nt, Artificial Sequence
  Synthetic
caaaucacccuagaacuugcuga

SEQ ID NO: 230574 - RNA, 24 nt, Artificial Sequence
  Synthetic
acaaaucacccuagaacuugcuga

SEQ ID NO: 230575 - RNA, 18 nt, Artificial Sequence
  Synthetic
aauuaagcuaguugcuga

SEQ ID NO: 230576 - RNA, 19 nt, Artificial Sequence
  Synthetic
gaauuaagcuaguugcuga

SEQ ID NO: 230577 - RNA, 20 nt, Artificial Sequence
  Synthetic
agaauuaagcuaguugcuga

SEQ ID NO: 230578 - RNA, 21 nt, Artificial Sequence
  Synthetic
aagaauuaagcuaguugcuga

SEQ ID NO: 230579 - RNA, 22 nt, Artificial Sequence
  Synthetic
caagaauuaagcuaguugcuga

SEQ ID NO: 230580 - RNA, 23 nt, Artificial Sequence
  Synthetic
ucaagaauuaagcuaguugcuga

SEQ ID NO: 230581 - RNA, 24 nt, Artificial Sequence
  Synthetic
uucaagaauuaagcuaguugcuga

SEQ ID NO: 230582 - RNA, 18 nt, Artificial Sequence
  Synthetic
ggauacuauuguugcuga

SEQ ID NO: 230583 - RNA, 19 nt, Artificial Sequence
  Synthetic
gggauacuauuguugcuga

SEQ ID NO: 230584 - RNA, 20 nt, Artificial Sequence
  Synthetic
ggggauacuauuguugcuga

SEQ ID NO: 230585 - RNA, 21 nt, Artificial Sequence
  Synthetic
aggggauacuauuguugcuga

SEQ ID NO: 230586 - RNA, 22 nt, Artificial Sequence
  Synthetic
caggggauacuauuguugcuga

SEQ ID NO: 230587 - RNA, 23 nt, Artificial Sequence
  Synthetic
ccaggggauacuauuguugcuga

SEQ ID NO: 230588 - RNA, 24 nt, Artificial Sequence
  Synthetic
cccaggggauacuauuguugcuga

SEQ ID NO: 230589 - RNA, 18 nt, Artificial Sequence
  Synthetic
ucuuaaucuuuuugcuga

SEQ ID NO: 230590 - RNA, 19 nt, Artificial Sequence
  Synthetic
gucuuaaucuuuuugcuga

SEQ ID NO: 230591 - RNA, 20 nt, Artificial Sequence
  Synthetic
agucuuaaucuuuuugcuga

SEQ ID NO: 230592 - RNA, 21 nt, Artificial Sequence
  Synthetic
gagucuuaaucuuuuugcuga

SEQ ID NO: 230593 - RNA, 22 nt, Artificial Sequence
  Synthetic
ugagucuuaaucuuuuugcuga

SEQ ID NO: 230594 - RNA, 23 nt, Artificial Sequence
  Synthetic
augagucuuaaucuuuuugcuga

SEQ ID NO: 230595 - RNA, 24 nt, Artificial Sequence
  Synthetic
aaugagucuuaaucuuuuugcuga

SEQ ID NO: 230596 - RNA, 18 nt, Artificial Sequence
  Synthetic
agagagaagcaaaucuga

SEQ ID NO: 230597 - RNA, 19 nt, Artificial Sequence
  Synthetic
cagagagaagcaaaucuga

SEQ ID NO: 230598 - RNA, 20 nt, Artificial Sequence
  Synthetic
ucagagagaagcaaaucuga

SEQ ID NO: 230599 - RNA, 21 nt, Artificial Sequence
  Synthetic
uucagagagaagcaaaucuga

SEQ ID NO: 230600 - RNA, 22 nt, Artificial Sequence
  Synthetic
guucagagagaagcaaaucuga

SEQ ID NO: 230601 - RNA, 23 nt, Artificial Sequence
  Synthetic
gguucagagagaagcaaaucuga

SEQ ID NO: 230602 - RNA, 24 nt, Artificial Sequence
  Synthetic
ugguucagagagaagcaaaucuga

SEQ ID NO: 230603 - RNA, 18 nt, Artificial Sequence
  Synthetic
ucuaaggucagaaucuga

SEQ ID NO: 230604 - RNA, 19 nt, Artificial Sequence
  Synthetic
uucuaaggucagaaucuga

SEQ ID NO: 230605 - RNA, 20 nt, Artificial Sequence
  Synthetic
auucuaaggucagaaucuga

SEQ ID NO: 230606 - RNA, 21 nt, Artificial Sequence
  Synthetic
gauucuaaggucagaaucuga

SEQ ID NO: 230607 - RNA, 22 nt, Artificial Sequence
  Synthetic
ugauucuaaggucagaaucuga

SEQ ID NO: 230608 - RNA, 23 nt, Artificial Sequence
  Synthetic
uugauucuaaggucagaaucuga

SEQ ID NO: 230609 - RNA, 24 nt, Artificial Sequence
  Synthetic
auugauucuaaggucagaaucuga

SEQ ID NO: 230610 - RNA, 18 nt, Artificial Sequence
  Synthetic
gguagugugagaaucuga

SEQ ID NO: 230611 - RNA, 19 nt, Artificial Sequence
  Synthetic
ugguagugugagaaucuga

SEQ ID NO: 230612 - RNA, 20 nt, Artificial Sequence
  Synthetic
gugguagugugagaaucuga

SEQ ID NO: 230613 - RNA, 21 nt, Artificial Sequence
  Synthetic
ugugguagugugagaaucuga

SEQ ID NO: 230614 - RNA, 22 nt, Artificial Sequence
  Synthetic
gugugguagugugagaaucuga

SEQ ID NO: 230615 - RNA, 23 nt, Artificial Sequence
  Synthetic
agugugguagugugagaaucuga

SEQ ID NO: 230616 - RNA, 24 nt, Artificial Sequence
  Synthetic
cagugugguagugugagaaucuga

SEQ ID NO: 230617 - RNA, 18 nt, Artificial Sequence
  Synthetic
uaaaauacuggaaucuga

SEQ ID NO: 230618 - RNA, 19 nt, Artificial Sequence
  Synthetic
auaaaauacuggaaucuga

SEQ ID NO: 230619 - RNA, 20 nt, Artificial Sequence
  Synthetic
uauaaaauacuggaaucuga

SEQ ID NO: 230620 - RNA, 21 nt, Artificial Sequence
  Synthetic
auauaaaauacuggaaucuga

SEQ ID NO: 230621 - RNA, 22 nt, Artificial Sequence
  Synthetic
cauauaaaauacuggaaucuga

SEQ ID NO: 230622 - RNA, 23 nt, Artificial Sequence
  Synthetic
acauauaaaauacuggaaucuga

SEQ ID NO: 230623 - RNA, 24 nt, Artificial Sequence
  Synthetic
uacauauaaaauacuggaaucuga

SEQ ID NO: 230624 - RNA, 18 nt, Artificial Sequence
  Synthetic
cuuuagcuuuuaaucuga

SEQ ID NO: 230625 - RNA, 19 nt, Artificial Sequence
  Synthetic
acuuuagcuuuuaaucuga

SEQ ID NO: 230626 - RNA, 20 nt, Artificial Sequence
  Synthetic
gacuuuagcuuuuaaucuga

SEQ ID NO: 230627 - RNA, 21 nt, Artificial Sequence
  Synthetic
ggacuuuagcuuuuaaucuga

SEQ ID NO: 230628 - RNA, 22 nt, Artificial Sequence
  Synthetic
uggacuuuagcuuuuaaucuga

SEQ ID NO: 230629 - RNA, 23 nt, Artificial Sequence
  Synthetic
guggacuuuagcuuuuaaucuga

SEQ ID NO: 230630 - RNA, 24 nt, Artificial Sequence
  Synthetic
uguggacuuuagcuuuuaaucuga

SEQ ID NO: 230631 - RNA, 18 nt, Artificial Sequence
  Synthetic
uccaaacaaaauaucuga

SEQ ID NO: 230632 - RNA, 19 nt, Artificial Sequence
  Synthetic
auccaaacaaaauaucuga

SEQ ID NO: 230633 - RNA, 20 nt, Artificial Sequence
  Synthetic
aauccaaacaaaauaucuga

SEQ ID NO: 230634 - RNA, 21 nt, Artificial Sequence
  Synthetic
aaauccaaacaaaauaucuga

SEQ ID NO: 230635 - RNA, 22 nt, Artificial Sequence
  Synthetic
gaaauccaaacaaaauaucuga

SEQ ID NO: 230636 - RNA, 23 nt, Artificial Sequence
  Synthetic
agaaauccaaacaaaauaucuga

SEQ ID NO: 230637 - RNA, 24 nt, Artificial Sequence
  Synthetic
uagaaauccaaacaaaauaucuga

SEQ ID NO: 230638 - RNA, 18 nt, Artificial Sequence
  Synthetic
aaggcaguagguaucuga

SEQ ID NO: 230639 - RNA, 19 nt, Artificial Sequence
  Synthetic
gaaggcaguagguaucuga

SEQ ID NO: 230640 - RNA, 20 nt, Artificial Sequence
  Synthetic
ugaaggcaguagguaucuga

SEQ ID NO: 230641 - RNA, 21 nt, Artificial Sequence
  Synthetic
cugaaggcaguagguaucuga

SEQ ID NO: 230642 - RNA, 22 nt, Artificial Sequence
  Synthetic
gcugaaggcaguagguaucuga

SEQ ID NO: 230643 - RNA, 23 nt, Artificial Sequence
  Synthetic
ggcugaaggcaguagguaucuga

SEQ ID NO: 230644 - RNA, 24 nt, Artificial Sequence
  Synthetic
uggcugaaggcaguagguaucuga

SEQ ID NO: 230645 - RNA, 18 nt, Artificial Sequence
  Synthetic
uauagauauuuuaucuga

SEQ ID NO: 230646 - RNA, 19 nt, Artificial Sequence
  Synthetic
cuauagauauuuuaucuga

SEQ ID NO: 230647 - RNA, 20 nt, Artificial Sequence
  Synthetic
ucuauagauauuuuaucuga

SEQ ID NO: 230648 - RNA, 21 nt, Artificial Sequence
  Synthetic
cucuauagauauuuuaucuga

SEQ ID NO: 230649 - RNA, 22 nt, Artificial Sequence
  Synthetic
ccucuauagauauuuuaucuga

SEQ ID NO: 230650 - RNA, 23 nt, Artificial Sequence
  Synthetic
cccucuauagauauuuuaucuga

SEQ ID NO: 230651 - RNA, 24 nt, Artificial Sequence
  Synthetic
acccucuauagauauuuuaucuga

SEQ ID NO: 230652 - RNA, 18 nt, Artificial Sequence
  Synthetic
ggucaugccuaacucuga

SEQ ID NO: 230653 - RNA, 19 nt, Artificial Sequence
  Synthetic
uggucaugccuaacucuga

SEQ ID NO: 230654 - RNA, 20 nt, Artificial Sequence
  Synthetic
guggucaugccuaacucuga

SEQ ID NO: 230655 - RNA, 21 nt, Artificial Sequence
  Synthetic
cguggucaugccuaacucuga

SEQ ID NO: 230656 - RNA, 22 nt, Artificial Sequence
  Synthetic
acguggucaugccuaacucuga

SEQ ID NO: 230657 - RNA, 23 nt, Artificial Sequence
  Synthetic
cacguggucaugccuaacucuga

SEQ ID NO: 230658 - RNA, 24 nt, Artificial Sequence
  Synthetic
ucacguggucaugccuaacucuga

SEQ ID NO: 230659 - RNA, 18 nt, Artificial Sequence
  Synthetic
gagaaauugcgccucuga

SEQ ID NO: 230660 - RNA, 19 nt, Artificial Sequence
  Synthetic
ggagaaauugcgccucuga

SEQ ID NO: 230661 - RNA, 20 nt, Artificial Sequence
  Synthetic
aggagaaauugcgccucuga

SEQ ID NO: 230662 - RNA, 21 nt, Artificial Sequence
  Synthetic
gaggagaaauugcgccucuga

SEQ ID NO: 230663 - RNA, 22 nt, Artificial Sequence
  Synthetic
cgaggagaaauugcgccucuga

SEQ ID NO: 230664 - RNA, 23 nt, Artificial Sequence
  Synthetic
ucgaggagaaauugcgccucuga

SEQ ID NO: 230665 - RNA, 24 nt, Artificial Sequence
  Synthetic
uucgaggagaaauugcgccucuga

SEQ ID NO: 230666 - RNA, 18 nt, Artificial Sequence
  Synthetic
uucucuacuaagcucuga

SEQ ID NO: 230667 - RNA, 19 nt, Artificial Sequence
  Synthetic
cuucucuacuaagcucuga

SEQ ID NO: 230668 - RNA, 20 nt, Artificial Sequence
  Synthetic
ucuucucuacuaagcucuga

SEQ ID NO: 230669 - RNA, 21 nt, Artificial Sequence
  Synthetic
aucuucucuacuaagcucuga

SEQ ID NO: 230670 - RNA, 22 nt, Artificial Sequence
  Synthetic
uaucuucucuacuaagcucuga

SEQ ID NO: 230671 - RNA, 23 nt, Artificial Sequence
  Synthetic
cuaucuucucuacuaagcucuga

SEQ ID NO: 230672 - RNA, 24 nt, Artificial Sequence
  Synthetic
ucuaucuucucuacuaagcucuga

SEQ ID NO: 230673 - RNA, 18 nt, Artificial Sequence
  Synthetic
gugagcuuucagcucuga

SEQ ID NO: 230674 - RNA, 19 nt, Artificial Sequence
  Synthetic
ggugagcuuucagcucuga

SEQ ID NO: 230675 - RNA, 20 nt, Artificial Sequence
  Synthetic
aggugagcuuucagcucuga

SEQ ID NO: 230676 - RNA, 21 nt, Artificial Sequence
  Synthetic
aaggugagcuuucagcucuga

SEQ ID NO: 230677 - RNA, 22 nt, Artificial Sequence
  Synthetic
uaaggugagcuuucagcucuga

SEQ ID NO: 230678 - RNA, 23 nt, Artificial Sequence
  Synthetic
guaaggugagcuuucagcucuga

SEQ ID NO: 230679 - RNA, 24 nt, Artificial Sequence
  Synthetic
uguaaggugagcuuucagcucuga

SEQ ID NO: 230680 - RNA, 18 nt, Artificial Sequence
  Synthetic
agaagaucugagcucuga

SEQ ID NO: 230681 - RNA, 19 nt, Artificial Sequence
  Synthetic
uagaagaucugagcucuga

SEQ ID NO: 230682 - RNA, 20 nt, Artificial Sequence
  Synthetic
uuagaagaucugagcucuga

SEQ ID NO: 230683 - RNA, 21 nt, Artificial Sequence
  Synthetic
guuagaagaucugagcucuga

SEQ ID NO: 230684 - RNA, 22 nt, Artificial Sequence
  Synthetic
aguuagaagaucugagcucuga

SEQ ID NO: 230685 - RNA, 23 nt, Artificial Sequence
  Synthetic
aaguuagaagaucugagcucuga

SEQ ID NO: 230686 - RNA, 24 nt, Artificial Sequence
  Synthetic
gaaguuagaagaucugagcucuga

SEQ ID NO: 230687 - RNA, 18 nt, Artificial Sequence
  Synthetic
ucuaccagcuagcucuga

SEQ ID NO: 230688 - RNA, 19 nt, Artificial Sequence
  Synthetic
gucuaccagcuagcucuga

SEQ ID NO: 230689 - RNA, 20 nt, Artificial Sequence
  Synthetic
agucuaccagcuagcucuga

SEQ ID NO: 230690 - RNA, 21 nt, Artificial Sequence
  Synthetic
aagucuaccagcuagcucuga

SEQ ID NO: 230691 - RNA, 22 nt, Artificial Sequence
  Synthetic
caagucuaccagcuagcucuga

SEQ ID NO: 230692 - RNA, 23 nt, Artificial Sequence
  Synthetic
acaagucuaccagcuagcucuga

SEQ ID NO: 230693 - RNA, 24 nt, Artificial Sequence
  Synthetic
aacaagucuaccagcuagcucuga

SEQ ID NO: 230694 - RNA, 18 nt, Artificial Sequence
  Synthetic
auugaaaauaugcucuga

SEQ ID NO: 230695 - RNA, 19 nt, Artificial Sequence
  Synthetic
aauugaaaauaugcucuga

SEQ ID NO: 230696 - RNA, 20 nt, Artificial Sequence
  Synthetic
aaauugaaaauaugcucuga

SEQ ID NO: 230697 - RNA, 21 nt, Artificial Sequence
  Synthetic
uaaauugaaaauaugcucuga

SEQ ID NO: 230698 - RNA, 22 nt, Artificial Sequence
  Synthetic
uuaaauugaaaauaugcucuga

SEQ ID NO: 230699 - RNA, 23 nt, Artificial Sequence
  Synthetic
guuaaauugaaaauaugcucuga

SEQ ID NO: 230700 - RNA, 24 nt, Artificial Sequence
  Synthetic
aguuaaauugaaaauaugcucuga

SEQ ID NO: 230701 - RNA, 18 nt, Artificial Sequence
  Synthetic
guaguuuaucugcucuga

SEQ ID NO: 230702 - RNA, 19 nt, Artificial Sequence
  Synthetic
gguaguuuaucugcucuga

SEQ ID NO: 230703 - RNA, 20 nt, Artificial Sequence
  Synthetic
ggguaguuuaucugcucuga

SEQ ID NO: 230704 - RNA, 21 nt, Artificial Sequence
  Synthetic
uggguaguuuaucugcucuga

SEQ ID NO: 230705 - RNA, 22 nt, Artificial Sequence
  Synthetic
uuggguaguuuaucugcucuga

SEQ ID NO: 230706 - RNA, 23 nt, Artificial Sequence
  Synthetic
auuggguaguuuaucugcucuga

SEQ ID NO: 230707 - RNA, 24 nt, Artificial Sequence
  Synthetic
cauuggguaguuuaucugcucuga

SEQ ID NO: 230708 - RNA, 18 nt, Artificial Sequence
  Synthetic
gacacuccauugcucuga

SEQ ID NO: 230709 - RNA, 19 nt, Artificial Sequence
  Synthetic
ggacacuccauugcucuga

SEQ ID NO: 230710 - RNA, 20 nt, Artificial Sequence
  Synthetic
aggacacuccauugcucuga

SEQ ID NO: 230711 - RNA, 21 nt, Artificial Sequence
  Synthetic
aaggacacuccauugcucuga

SEQ ID NO: 230712 - RNA, 22 nt, Artificial Sequence
  Synthetic
gaaggacacuccauugcucuga

SEQ ID NO: 230713 - RNA, 23 nt, Artificial Sequence
  Synthetic
ugaaggacacuccauugcucuga

SEQ ID NO: 230714 - RNA, 24 nt, Artificial Sequence
  Synthetic
cugaaggacacuccauugcucuga

SEQ ID NO: 230715 - RNA, 18 nt, Artificial Sequence
  Synthetic
ugggcagggcaucucuga

SEQ ID NO: 230716 - RNA, 19 nt, Artificial Sequence
  Synthetic
cugggcagggcaucucuga

SEQ ID NO: 230717 - RNA, 20 nt, Artificial Sequence
  Synthetic
ucugggcagggcaucucuga

SEQ ID NO: 230718 - RNA, 21 nt, Artificial Sequence
  Synthetic
cucugggcagggcaucucuga

SEQ ID NO: 230719 - RNA, 22 nt, Artificial Sequence
  Synthetic
ucucugggcagggcaucucuga

SEQ ID NO: 230720 - RNA, 23 nt, Artificial Sequence
  Synthetic
cucucugggcagggcaucucuga

SEQ ID NO: 230721 - RNA, 24 nt, Artificial Sequence
  Synthetic
ucucucugggcagggcaucucuga

SEQ ID NO: 230722 - RNA, 18 nt, Artificial Sequence
  Synthetic
aacauggaagaucucuga

SEQ ID NO: 230723 - RNA, 19 nt, Artificial Sequence
  Synthetic
gaacauggaagaucucuga

SEQ ID NO: 230724 - RNA, 20 nt, Artificial Sequence
  Synthetic
agaacauggaagaucucuga

SEQ ID NO: 230725 - RNA, 21 nt, Artificial Sequence
  Synthetic
uagaacauggaagaucucuga

SEQ ID NO: 230726 - RNA, 22 nt, Artificial Sequence
  Synthetic
uuagaacauggaagaucucuga

SEQ ID NO: 230727 - RNA, 23 nt, Artificial Sequence
  Synthetic
uuuagaacauggaagaucucuga

SEQ ID NO: 230728 - RNA, 24 nt, Artificial Sequence
  Synthetic
auuuagaacauggaagaucucuga

SEQ ID NO: 230729 - RNA, 18 nt, Artificial Sequence
  Synthetic
acauauuggucucucuga

SEQ ID NO: 230730 - RNA, 19 nt, Artificial Sequence
  Synthetic
cacauauuggucucucuga

SEQ ID NO: 230731 - RNA, 20 nt, Artificial Sequence
  Synthetic
gcacauauuggucucucuga

SEQ ID NO: 230732 - RNA, 21 nt, Artificial Sequence
  Synthetic
ugcacauauuggucucucuga

SEQ ID NO: 230733 - RNA, 22 nt, Artificial Sequence
  Synthetic
uugcacauauuggucucucuga

SEQ ID NO: 230734 - RNA, 23 nt, Artificial Sequence
  Synthetic
auugcacauauuggucucucuga

SEQ ID NO: 230735 - RNA, 24 nt, Artificial Sequence
  Synthetic
cauugcacauauuggucucucuga

SEQ ID NO: 230736 - RNA, 18 nt, Artificial Sequence
  Synthetic
gugacaccagaagucuga

SEQ ID NO: 230737 - RNA, 19 nt, Artificial Sequence
  Synthetic
ugugacaccagaagucuga

SEQ ID NO: 230738 - RNA, 20 nt, Artificial Sequence
  Synthetic
augugacaccagaagucuga

SEQ ID NO: 230739 - RNA, 21 nt, Artificial Sequence
  Synthetic
aaugugacaccagaagucuga

SEQ ID NO: 230740 - RNA, 22 nt, Artificial Sequence
  Synthetic
aaaugugacaccagaagucuga

SEQ ID NO: 230741 - RNA, 23 nt, Artificial Sequence
  Synthetic
caaaugugacaccagaagucuga

SEQ ID NO: 230742 - RNA, 24 nt, Artificial Sequence
  Synthetic
ccaaaugugacaccagaagucuga

SEQ ID NO: 230743 - RNA, 18 nt, Artificial Sequence
  Synthetic
gcagguuuaugagucuga

SEQ ID NO: 230744 - RNA, 19 nt, Artificial Sequence
  Synthetic
agcagguuuaugagucuga

SEQ ID NO: 230745 - RNA, 20 nt, Artificial Sequence
  Synthetic
aagcagguuuaugagucuga

SEQ ID NO: 230746 - RNA, 21 nt, Artificial Sequence
  Synthetic
aaagcagguuuaugagucuga

SEQ ID NO: 230747 - RNA, 22 nt, Artificial Sequence
  Synthetic
uaaagcagguuuaugagucuga

SEQ ID NO: 230748 - RNA, 23 nt, Artificial Sequence
  Synthetic
auaaagcagguuuaugagucuga

SEQ ID NO: 230749 - RNA, 24 nt, Artificial Sequence
  Synthetic
aauaaagcagguuuaugagucuga

SEQ ID NO: 230750 - RNA, 18 nt, Artificial Sequence
  Synthetic
gaagggcacauagucuga

SEQ ID NO: 230751 - RNA, 19 nt, Artificial Sequence
  Synthetic
cgaagggcacauagucuga

SEQ ID NO: 230752 - RNA, 20 nt, Artificial Sequence
  Synthetic
gcgaagggcacauagucuga

SEQ ID NO: 230753 - RNA, 21 nt, Artificial Sequence
  Synthetic
ugcgaagggcacauagucuga

SEQ ID NO: 230754 - RNA, 22 nt, Artificial Sequence
  Synthetic
uugcgaagggcacauagucuga

SEQ ID NO: 230755 - RNA, 23 nt, Artificial Sequence
  Synthetic
cuugcgaagggcacauagucuga

SEQ ID NO: 230756 - RNA, 24 nt, Artificial Sequence
  Synthetic
ccuugcgaagggcacauagucuga

SEQ ID NO: 230757 - RNA, 18 nt, Artificial Sequence
  Synthetic
ucuagagcaacugucuga

SEQ ID NO: 230758 - RNA, 19 nt, Artificial Sequence
  Synthetic
cucuagagcaacugucuga

SEQ ID NO: 230759 - RNA, 20 nt, Artificial Sequence
  Synthetic
ucucuagagcaacugucuga

SEQ ID NO: 230760 - RNA, 21 nt, Artificial Sequence
  Synthetic
uucucuagagcaacugucuga

SEQ ID NO: 230761 - RNA, 22 nt, Artificial Sequence
  Synthetic
cuucucuagagcaacugucuga

SEQ ID NO: 230762 - RNA, 23 nt, Artificial Sequence
  Synthetic
ccuucucuagagcaacugucuga

SEQ ID NO: 230763 - RNA, 24 nt, Artificial Sequence
  Synthetic
uccuucucuagagcaacugucuga

SEQ ID NO: 230764 - RNA, 18 nt, Artificial Sequence
  Synthetic
ugggaguuagaauucuga

SEQ ID NO: 230765 - RNA, 19 nt, Artificial Sequence
  Synthetic
uugggaguuagaauucuga

SEQ ID NO: 230766 - RNA, 20 nt, Artificial Sequence
  Synthetic
uuugggaguuagaauucuga

SEQ ID NO: 230767 - RNA, 21 nt, Artificial Sequence
  Synthetic
uuuugggaguuagaauucuga

SEQ ID NO: 230768 - RNA, 22 nt, Artificial Sequence
  Synthetic
uuuuugggaguuagaauucuga

SEQ ID NO: 230769 - RNA, 23 nt, Artificial Sequence
  Synthetic
cuuuuugggaguuagaauucuga

SEQ ID NO: 230770 - RNA, 24 nt, Artificial Sequence
  Synthetic
gcuuuuugggaguuagaauucuga

SEQ ID NO: 230771 - RNA, 18 nt, Artificial Sequence
  Synthetic
uauuuacaugaauucuga

SEQ ID NO: 230772 - RNA, 19 nt, Artificial Sequence
  Synthetic
auauuuacaugaauucuga

SEQ ID NO: 230773 - RNA, 20 nt, Artificial Sequence
  Synthetic
gauauuuacaugaauucuga

SEQ ID NO: 230774 - RNA, 21 nt, Artificial Sequence
  Synthetic
ggauauuuacaugaauucuga

SEQ ID NO: 230775 - RNA, 22 nt, Artificial Sequence
  Synthetic
aggauauuuacaugaauucuga

SEQ ID NO: 230776 - RNA, 23 nt, Artificial Sequence
  Synthetic
caggauauuuacaugaauucuga

SEQ ID NO: 230777 - RNA, 24 nt, Artificial Sequence
  Synthetic
ccaggauauuuacaugaauucuga

SEQ ID NO: 230778 - RNA, 18 nt, Artificial Sequence
  Synthetic
aaagcauauacauucuga

SEQ ID NO: 230779 - RNA, 19 nt, Artificial Sequence
  Synthetic
uaaagcauauacauucuga

SEQ ID NO: 230780 - RNA, 20 nt, Artificial Sequence
  Synthetic
auaaagcauauacauucuga

SEQ ID NO: 230781 - RNA, 21 nt, Artificial Sequence
  Synthetic
uauaaagcauauacauucuga

SEQ ID NO: 230782 - RNA, 22 nt, Artificial Sequence
  Synthetic
auauaaagcauauacauucuga

SEQ ID NO: 230783 - RNA, 23 nt, Artificial Sequence
  Synthetic
aauauaaagcauauacauucuga

SEQ ID NO: 230784 - RNA, 24 nt, Artificial Sequence
  Synthetic
uaauauaaagcauauacauucuga

SEQ ID NO: 230785 - RNA, 18 nt, Artificial Sequence
  Synthetic
guuuuaugagcauucuga

SEQ ID NO: 230786 - RNA, 19 nt, Artificial Sequence
  Synthetic
uguuuuaugagcauucuga

SEQ ID NO: 230787 - RNA, 20 nt, Artificial Sequence
  Synthetic
uuguuuuaugagcauucuga

SEQ ID NO: 230788 - RNA, 21 nt, Artificial Sequence
  Synthetic
uuuguuuuaugagcauucuga

SEQ ID NO: 230789 - RNA, 22 nt, Artificial Sequence
  Synthetic
uuuuguuuuaugagcauucuga

SEQ ID NO: 230790 - RNA, 23 nt, Artificial Sequence
  Synthetic
auuuuguuuuaugagcauucuga

SEQ ID NO: 230791 - RNA, 24 nt, Artificial Sequence
  Synthetic
gauuuuguuuuaugagcauucuga

SEQ ID NO: 230792 - RNA, 18 nt, Artificial Sequence
  Synthetic
aaucucaugagauucuga

SEQ ID NO: 230793 - RNA, 19 nt, Artificial Sequence
  Synthetic
gaaucucaugagauucuga

SEQ ID NO: 230794 - RNA, 20 nt, Artificial Sequence
  Synthetic
ugaaucucaugagauucuga

SEQ ID NO: 230795 - RNA, 21 nt, Artificial Sequence
  Synthetic
augaaucucaugagauucuga

SEQ ID NO: 230796 - RNA, 22 nt, Artificial Sequence
  Synthetic
gaugaaucucaugagauucuga

SEQ ID NO: 230797 - RNA, 23 nt, Artificial Sequence
  Synthetic
ugaugaaucucaugagauucuga

SEQ ID NO: 230798 - RNA, 24 nt, Artificial Sequence
  Synthetic
augaugaaucucaugagauucuga

SEQ ID NO: 230799 - RNA, 18 nt, Artificial Sequence
  Synthetic
ucccaagcugaguucuga

SEQ ID NO: 230800 - RNA, 19 nt, Artificial Sequence
  Synthetic
cucccaagcugaguucuga

SEQ ID NO: 230801 - RNA, 20 nt, Artificial Sequence
  Synthetic
ccucccaagcugaguucuga

SEQ ID NO: 230802 - RNA, 21 nt, Artificial Sequence
  Synthetic
accucccaagcugaguucuga

SEQ ID NO: 230803 - RNA, 22 nt, Artificial Sequence
  Synthetic
caccucccaagcugaguucuga

SEQ ID NO: 230804 - RNA, 23 nt, Artificial Sequence
  Synthetic
ucaccucccaagcugaguucuga

SEQ ID NO: 230805 - RNA, 24 nt, Artificial Sequence
  Synthetic
cucaccucccaagcugaguucuga

SEQ ID NO: 230806 - RNA, 18 nt, Artificial Sequence
  Synthetic
aaaguaacuugguucuga

SEQ ID NO: 230807 - RNA, 19 nt, Artificial Sequence
  Synthetic
aaaaguaacuugguucuga

SEQ ID NO: 230808 - RNA, 20 nt, Artificial Sequence
  Synthetic
gaaaaguaacuugguucuga

SEQ ID NO: 230809 - RNA, 21 nt, Artificial Sequence
  Synthetic
ugaaaaguaacuugguucuga

SEQ ID NO: 230810 - RNA, 22 nt, Artificial Sequence
  Synthetic
uugaaaaguaacuugguucuga

SEQ ID NO: 230811 - RNA, 23 nt, Artificial Sequence
  Synthetic
guugaaaaguaacuugguucuga

SEQ ID NO: 230812 - RNA, 24 nt, Artificial Sequence
  Synthetic
aguugaaaaguaacuugguucuga

SEQ ID NO: 230813 - RNA, 18 nt, Artificial Sequence
  Synthetic
aagaucaaagauuucuga

SEQ ID NO: 230814 - RNA, 19 nt, Artificial Sequence
  Synthetic
uaagaucaaagauuucuga

SEQ ID NO: 230815 - RNA, 20 nt, Artificial Sequence
  Synthetic
auaagaucaaagauuucuga

SEQ ID NO: 230816 - RNA, 21 nt, Artificial Sequence
  Synthetic
aauaagaucaaagauuucuga

SEQ ID NO: 230817 - RNA, 22 nt, Artificial Sequence
  Synthetic
aaauaagaucaaagauuucuga

SEQ ID NO: 230818 - RNA, 23 nt, Artificial Sequence
  Synthetic
caaauaagaucaaagauuucuga

SEQ ID NO: 230819 - RNA, 24 nt, Artificial Sequence
  Synthetic
gcaaauaagaucaaagauuucuga

SEQ ID NO: 230820 - RNA, 18 nt, Artificial Sequence
  Synthetic
acauuguucuauuucuga

SEQ ID NO: 230821 - RNA, 19 nt, Artificial Sequence
  Synthetic
cacauuguucuauuucuga

SEQ ID NO: 230822 - RNA, 20 nt, Artificial Sequence
  Synthetic
ucacauuguucuauuucuga

SEQ ID NO: 230823 - RNA, 21 nt, Artificial Sequence
  Synthetic
uucacauuguucuauuucuga

SEQ ID NO: 230824 - RNA, 22 nt, Artificial Sequence
  Synthetic
guucacauuguucuauuucuga

SEQ ID NO: 230825 - RNA, 23 nt, Artificial Sequence
  Synthetic
uguucacauuguucuauuucuga

SEQ ID NO: 230826 - RNA, 24 nt, Artificial Sequence
  Synthetic
uuguucacauuguucuauuucuga

SEQ ID NO: 230827 - RNA, 18 nt, Artificial Sequence
  Synthetic
gccaugucuacuuucuga

SEQ ID NO: 230828 - RNA, 19 nt, Artificial Sequence
  Synthetic
ugccaugucuacuuucuga

SEQ ID NO: 230829 - RNA, 20 nt, Artificial Sequence
  Synthetic
uugccaugucuacuuucuga

SEQ ID NO: 230830 - RNA, 21 nt, Artificial Sequence
  Synthetic
uuugccaugucuacuuucuga

SEQ ID NO: 230831 - RNA, 22 nt, Artificial Sequence
  Synthetic
guuugccaugucuacuuucuga

SEQ ID NO: 230832 - RNA, 23 nt, Artificial Sequence
  Synthetic
aguuugccaugucuacuuucuga

SEQ ID NO: 230833 - RNA, 24 nt, Artificial Sequence
  Synthetic
aaguuugccaugucuacuuucuga

SEQ ID NO: 230834 - RNA, 18 nt, Artificial Sequence
  Synthetic
aaccccaucaaaaaguga

SEQ ID NO: 230835 - RNA, 19 nt, Artificial Sequence
  Synthetic
caaccccaucaaaaaguga

SEQ ID NO: 230836 - RNA, 20 nt, Artificial Sequence
  Synthetic
acaaccccaucaaaaaguga

SEQ ID NO: 230837 - RNA, 21 nt, Artificial Sequence
  Synthetic
aacaaccccaucaaaaaguga

SEQ ID NO: 230838 - RNA, 22 nt, Artificial Sequence
  Synthetic
aaacaaccccaucaaaaaguga

SEQ ID NO: 230839 - RNA, 23 nt, Artificial Sequence
  Synthetic
caaacaaccccaucaaaaaguga

SEQ ID NO: 230840 - RNA, 24 nt, Artificial Sequence
  Synthetic
acaaacaaccccaucaaaaaguga

SEQ ID NO: 230841 - RNA, 18 nt, Artificial Sequence
  Synthetic
gccagagagaaaaaguga

SEQ ID NO: 230842 - RNA, 19 nt, Artificial Sequence
  Synthetic
ugccagagagaaaaaguga

SEQ ID NO: 230843 - RNA, 20 nt, Artificial Sequence
  Synthetic
augccagagagaaaaaguga

SEQ ID NO: 230844 - RNA, 21 nt, Artificial Sequence
  Synthetic
caugccagagagaaaaaguga

SEQ ID NO: 230845 - RNA, 22 nt, Artificial Sequence
  Synthetic
acaugccagagagaaaaaguga

SEQ ID NO: 230846 - RNA, 23 nt, Artificial Sequence
  Synthetic
gacaugccagagagaaaaaguga

SEQ ID NO: 230847 - RNA, 24 nt, Artificial Sequence
  Synthetic
ggacaugccagagagaaaaaguga

SEQ ID NO: 230848 - RNA, 18 nt, Artificial Sequence
  Synthetic
aagauagggaaaaaguga

SEQ ID NO: 230849 - RNA, 19 nt, Artificial Sequence
  Synthetic
caagauagggaaaaaguga

SEQ ID NO: 230850 - RNA, 20 nt, Artificial Sequence
  Synthetic
acaagauagggaaaaaguga

SEQ ID NO: 230851 - RNA, 21 nt, Artificial Sequence
  Synthetic
aacaagauagggaaaaaguga

SEQ ID NO: 230852 - RNA, 22 nt, Artificial Sequence
  Synthetic
uaacaagauagggaaaaaguga

SEQ ID NO: 230853 - RNA, 23 nt, Artificial Sequence
  Synthetic
cuaacaagauagggaaaaaguga

SEQ ID NO: 230854 - RNA, 24 nt, Artificial Sequence
  Synthetic
acuaacaagauagggaaaaaguga

SEQ ID NO: 230855 - RNA, 18 nt, Artificial Sequence
  Synthetic
aaguagaaacaaaaguga

SEQ ID NO: 230856 - RNA, 19 nt, Artificial Sequence
  Synthetic
uaaguagaaacaaaaguga

SEQ ID NO: 230857 - RNA, 20 nt, Artificial Sequence
  Synthetic
uuaaguagaaacaaaaguga

SEQ ID NO: 230858 - RNA, 21 nt, Artificial Sequence
  Synthetic
auuaaguagaaacaaaaguga

SEQ ID NO: 230859 - RNA, 22 nt, Artificial Sequence
  Synthetic
aauuaaguagaaacaaaaguga

SEQ ID NO: 230860 - RNA, 23 nt, Artificial Sequence
  Synthetic
gaauuaaguagaaacaaaaguga

SEQ ID NO: 230861 - RNA, 24 nt, Artificial Sequence
  Synthetic
ggaauuaaguagaaacaaaaguga

SEQ ID NO: 230862 - RNA, 18 nt, Artificial Sequence
  Synthetic
aaaauccacuaaaaguga

SEQ ID NO: 230863 - RNA, 19 nt, Artificial Sequence
  Synthetic
aaaaauccacuaaaaguga

SEQ ID NO: 230864 - RNA, 20 nt, Artificial Sequence
  Synthetic
uaaaaauccacuaaaaguga

SEQ ID NO: 230865 - RNA, 21 nt, Artificial Sequence
  Synthetic
auaaaaauccacuaaaaguga

SEQ ID NO: 230866 - RNA, 22 nt, Artificial Sequence
  Synthetic
uauaaaaauccacuaaaaguga

SEQ ID NO: 230867 - RNA, 23 nt, Artificial Sequence
  Synthetic
uuauaaaaauccacuaaaaguga

SEQ ID NO: 230868 - RNA, 24 nt, Artificial Sequence
  Synthetic
auuauaaaaauccacuaaaaguga

SEQ ID NO: 230869 - RNA, 18 nt, Artificial Sequence
  Synthetic
uacagugaguaaaaguga

SEQ ID NO: 230870 - RNA, 19 nt, Artificial Sequence
  Synthetic
uuacagugaguaaaaguga

SEQ ID NO: 230871 - RNA, 20 nt, Artificial Sequence
  Synthetic
auuacagugaguaaaaguga

SEQ ID NO: 230872 - RNA, 21 nt, Artificial Sequence
  Synthetic
aauuacagugaguaaaaguga

SEQ ID NO: 230873 - RNA, 22 nt, Artificial Sequence
  Synthetic
gaauuacagugaguaaaaguga

SEQ ID NO: 230874 - RNA, 23 nt, Artificial Sequence
  Synthetic
ugaauuacagugaguaaaaguga

SEQ ID NO: 230875 - RNA, 24 nt, Artificial Sequence
  Synthetic
uugaauuacagugaguaaaaguga

SEQ ID NO: 230876 - RNA, 18 nt, Artificial Sequence
  Synthetic
aaguugcaaagaaaguga

SEQ ID NO: 230877 - RNA, 19 nt, Artificial Sequence
  Synthetic
gaaguugcaaagaaaguga

SEQ ID NO: 230878 - RNA, 20 nt, Artificial Sequence
  Synthetic
cgaaguugcaaagaaaguga

SEQ ID NO: 230879 - RNA, 21 nt, Artificial Sequence
  Synthetic
ccgaaguugcaaagaaaguga

SEQ ID NO: 230880 - RNA, 22 nt, Artificial Sequence
  Synthetic
uccgaaguugcaaagaaaguga

SEQ ID NO: 230881 - RNA, 23 nt, Artificial Sequence
  Synthetic
uuccgaaguugcaaagaaaguga

SEQ ID NO: 230882 - RNA, 24 nt, Artificial Sequence
  Synthetic
uuuccgaaguugcaaagaaaguga

SEQ ID NO: 230883 - RNA, 18 nt, Artificial Sequence
  Synthetic
agucauggcagaaaguga

SEQ ID NO: 230884 - RNA, 19 nt, Artificial Sequence
  Synthetic
gagucauggcagaaaguga

SEQ ID NO: 230885 - RNA, 20 nt, Artificial Sequence
  Synthetic
ggagucauggcagaaaguga

SEQ ID NO: 230886 - RNA, 21 nt, Artificial Sequence
  Synthetic
uggagucauggcagaaaguga

SEQ ID NO: 230887 - RNA, 22 nt, Artificial Sequence
  Synthetic
uuggagucauggcagaaaguga

SEQ ID NO: 230888 - RNA, 23 nt, Artificial Sequence
  Synthetic
auuggagucauggcagaaaguga

SEQ ID NO: 230889 - RNA, 24 nt, Artificial Sequence
  Synthetic
gauuggagucauggcagaaaguga

SEQ ID NO: 230890 - RNA, 18 nt, Artificial Sequence
  Synthetic
caggaggagagaaaguga

SEQ ID NO: 230891 - RNA, 19 nt, Artificial Sequence
  Synthetic
ucaggaggagagaaaguga

SEQ ID NO: 230892 - RNA, 20 nt, Artificial Sequence
  Synthetic
aucaggaggagagaaaguga

SEQ ID NO: 230893 - RNA, 21 nt, Artificial Sequence
  Synthetic
uaucaggaggagagaaaguga

SEQ ID NO: 230894 - RNA, 22 nt, Artificial Sequence
  Synthetic
guaucaggaggagagaaaguga

SEQ ID NO: 230895 - RNA, 23 nt, Artificial Sequence
  Synthetic
uguaucaggaggagagaaaguga

SEQ ID NO: 230896 - RNA, 24 nt, Artificial Sequence
  Synthetic
auguaucaggaggagagaaaguga

SEQ ID NO: 230897 - RNA, 18 nt, Artificial Sequence
  Synthetic
ugguguaccugaaaguga

SEQ ID NO: 230898 - RNA, 19 nt, Artificial Sequence
  Synthetic
uugguguaccugaaaguga

SEQ ID NO: 230899 - RNA, 20 nt, Artificial Sequence
  Synthetic
auugguguaccugaaaguga

SEQ ID NO: 230900 - RNA, 21 nt, Artificial Sequence
  Synthetic
gauugguguaccugaaaguga

SEQ ID NO: 230901 - RNA, 22 nt, Artificial Sequence
  Synthetic
ugauugguguaccugaaaguga

SEQ ID NO: 230902 - RNA, 23 nt, Artificial Sequence
  Synthetic
uugauugguguaccugaaaguga

SEQ ID NO: 230903 - RNA, 24 nt, Artificial Sequence
  Synthetic
uuugauugguguaccugaaaguga

SEQ ID NO: 230904 - RNA, 18 nt, Artificial Sequence
  Synthetic
gagggaacauuaaaguga

SEQ ID NO: 230905 - RNA, 19 nt, Artificial Sequence
  Synthetic
cgagggaacauuaaaguga

SEQ ID NO: 230906 - RNA, 20 nt, Artificial Sequence
  Synthetic
gcgagggaacauuaaaguga

SEQ ID NO: 230907 - RNA, 21 nt, Artificial Sequence
  Synthetic
ggcgagggaacauuaaaguga

SEQ ID NO: 230908 - RNA, 22 nt, Artificial Sequence
  Synthetic
aggcgagggaacauuaaaguga

SEQ ID NO: 230909 - RNA, 23 nt, Artificial Sequence
  Synthetic
aaggcgagggaacauuaaaguga

SEQ ID NO: 230910 - RNA, 24 nt, Artificial Sequence
  Synthetic
aaaggcgagggaacauuaaaguga

SEQ ID NO: 230911 - RNA, 18 nt, Artificial Sequence
  Synthetic
acaggcugucacaaguga

SEQ ID NO: 230912 - RNA, 19 nt, Artificial Sequence
  Synthetic
uacaggcugucacaaguga

SEQ ID NO: 230913 - RNA, 20 nt, Artificial Sequence
  Synthetic
cuacaggcugucacaaguga

SEQ ID NO: 230914 - RNA, 21 nt, Artificial Sequence
  Synthetic
ucuacaggcugucacaaguga

SEQ ID NO: 230915 - RNA, 22 nt, Artificial Sequence
  Synthetic
cucuacaggcugucacaaguga

SEQ ID NO: 230916 - RNA, 23 nt, Artificial Sequence
  Synthetic
ucucuacaggcugucacaaguga

SEQ ID NO: 230917 - RNA, 24 nt, Artificial Sequence
  Synthetic
uucucuacaggcugucacaaguga

SEQ ID NO: 230918 - RNA, 18 nt, Artificial Sequence
  Synthetic
uguugaaugaccaaguga

SEQ ID NO: 230919 - RNA, 19 nt, Artificial Sequence
  Synthetic
uuguugaaugaccaaguga

SEQ ID NO: 230920 - RNA, 20 nt, Artificial Sequence
  Synthetic
uuuguugaaugaccaaguga

SEQ ID NO: 230921 - RNA, 21 nt, Artificial Sequence
  Synthetic
guuuguugaaugaccaaguga

SEQ ID NO: 230922 - RNA, 22 nt, Artificial Sequence
  Synthetic
cguuuguugaaugaccaaguga

SEQ ID NO: 230923 - RNA, 23 nt, Artificial Sequence
  Synthetic
acguuuguugaaugaccaaguga

SEQ ID NO: 230924 - RNA, 24 nt, Artificial Sequence
  Synthetic
gacguuuguugaaugaccaaguga

SEQ ID NO: 230925 - RNA, 18 nt, Artificial Sequence
  Synthetic
aauuaugguggcaaguga

SEQ ID NO: 230926 - RNA, 19 nt, Artificial Sequence
  Synthetic
uaauuaugguggcaaguga

SEQ ID NO: 230927 - RNA, 20 nt, Artificial Sequence
  Synthetic
guaauuaugguggcaaguga

SEQ ID NO: 230928 - RNA, 21 nt, Artificial Sequence
  Synthetic
uguaauuaugguggcaaguga

SEQ ID NO: 230929 - RNA, 22 nt, Artificial Sequence
  Synthetic
uuguaauuaugguggcaaguga

SEQ ID NO: 230930 - RNA, 23 nt, Artificial Sequence
  Synthetic
auuguaauuaugguggcaaguga

SEQ ID NO: 230931 - RNA, 24 nt, Artificial Sequence
  Synthetic
uauuguaauuaugguggcaaguga

SEQ ID NO: 230932 - RNA, 18 nt, Artificial Sequence
  Synthetic
cuauuuauaaggaaguga

SEQ ID NO: 230933 - RNA, 19 nt, Artificial Sequence
  Synthetic
gcuauuuauaaggaaguga

SEQ ID NO: 230934 - RNA, 20 nt, Artificial Sequence
  Synthetic
ugcuauuuauaaggaaguga

SEQ ID NO: 230935 - RNA, 21 nt, Artificial Sequence
  Synthetic
uugcuauuuauaaggaaguga

SEQ ID NO: 230936 - RNA, 22 nt, Artificial Sequence
  Synthetic
guugcuauuuauaaggaaguga

SEQ ID NO: 230937 - RNA, 23 nt, Artificial Sequence
  Synthetic
uguugcuauuuauaaggaaguga

SEQ ID NO: 230938 - RNA, 24 nt, Artificial Sequence
  Synthetic
uuguugcuauuuauaaggaaguga

SEQ ID NO: 230939 - RNA, 18 nt, Artificial Sequence
  Synthetic
cuugucauacugaaguga

SEQ ID NO: 230940 - RNA, 19 nt, Artificial Sequence
  Synthetic
ucuugucauacugaaguga

SEQ ID NO: 230941 - RNA, 20 nt, Artificial Sequence
  Synthetic
uucuugucauacugaaguga

SEQ ID NO: 230942 - RNA, 21 nt, Artificial Sequence
  Synthetic
uuucuugucauacugaaguga

SEQ ID NO: 230943 - RNA, 22 nt, Artificial Sequence
  Synthetic
uuuucuugucauacugaaguga

SEQ ID NO: 230944 - RNA, 23 nt, Artificial Sequence
  Synthetic
guuuucuugucauacugaaguga

SEQ ID NO: 230945 - RNA, 24 nt, Artificial Sequence
  Synthetic
aguuuucuugucauacugaaguga

SEQ ID NO: 230946 - RNA, 18 nt, Artificial Sequence
  Synthetic
uagucguuuacuaaguga

SEQ ID NO: 230947 - RNA, 19 nt, Artificial Sequence
  Synthetic
uuagucguuuacuaaguga

SEQ ID NO: 230948 - RNA, 20 nt, Artificial Sequence
  Synthetic
guuagucguuuacuaaguga

SEQ ID NO: 230949 - RNA, 21 nt, Artificial Sequence
  Synthetic
aguuagucguuuacuaaguga

SEQ ID NO: 230950 - RNA, 22 nt, Artificial Sequence
  Synthetic
aaguuagucguuuacuaaguga

SEQ ID NO: 230951 - RNA, 23 nt, Artificial Sequence
  Synthetic
uaaguuagucguuuacuaaguga

SEQ ID NO: 230952 - RNA, 24 nt, Artificial Sequence
  Synthetic
cuaaguuagucguuuacuaaguga

SEQ ID NO: 230953 - RNA, 18 nt, Artificial Sequence
  Synthetic
gagaauggagcuaaguga

SEQ ID NO: 230954 - RNA, 19 nt, Artificial Sequence
  Synthetic
ugagaauggagcuaaguga

SEQ ID NO: 230955 - RNA, 20 nt, Artificial Sequence
  Synthetic
uugagaauggagcuaaguga

SEQ ID NO: 230956 - RNA, 21 nt, Artificial Sequence
  Synthetic
auugagaauggagcuaaguga

SEQ ID NO: 230957 - RNA, 22 nt, Artificial Sequence
  Synthetic
cauugagaauggagcuaaguga

SEQ ID NO: 230958 - RNA, 23 nt, Artificial Sequence
  Synthetic
ccauugagaauggagcuaaguga

SEQ ID NO: 230959 - RNA, 24 nt, Artificial Sequence
  Synthetic
accauugagaauggagcuaaguga

SEQ ID NO: 230960 - RNA, 18 nt, Artificial Sequence
  Synthetic
cuagagugaaguaaguga

SEQ ID NO: 230961 - RNA, 19 nt, Artificial Sequence
  Synthetic
gcuagagugaaguaaguga

SEQ ID NO: 230962 - RNA, 20 nt, Artificial Sequence
  Synthetic
ggcuagagugaaguaaguga

SEQ ID NO: 230963 - RNA, 21 nt, Artificial Sequence
  Synthetic
uggcuagagugaaguaaguga

SEQ ID NO: 230964 - RNA, 22 nt, Artificial Sequence
  Synthetic
guggcuagagugaaguaaguga

SEQ ID NO: 230965 - RNA, 23 nt, Artificial Sequence
  Synthetic
uguggcuagagugaaguaaguga

SEQ ID NO: 230966 - RNA, 24 nt, Artificial Sequence
  Synthetic
guguggcuagagugaaguaaguga

SEQ ID NO: 230967 - RNA, 18 nt, Artificial Sequence
  Synthetic
uaaugaauaaguaaguga

SEQ ID NO: 230968 - RNA, 19 nt, Artificial Sequence
  Synthetic
uuaaugaauaaguaaguga

SEQ ID NO: 230969 - RNA, 20 nt, Artificial Sequence
  Synthetic
auuaaugaauaaguaaguga

SEQ ID NO: 230970 - RNA, 21 nt, Artificial Sequence
  Synthetic
cauuaaugaauaaguaaguga

SEQ ID NO: 230971 - RNA, 22 nt, Artificial Sequence
  Synthetic
gcauuaaugaauaaguaaguga

SEQ ID NO: 230972 - RNA, 23 nt, Artificial Sequence
  Synthetic
agcauuaaugaauaaguaaguga

SEQ ID NO: 230973 - RNA, 24 nt, Artificial Sequence
  Synthetic
aagcauuaaugaauaaguaaguga

SEQ ID NO: 230974 - RNA, 18 nt, Artificial Sequence
  Synthetic
gaagcaugauguaaguga

SEQ ID NO: 230975 - RNA, 19 nt, Artificial Sequence
  Synthetic
ggaagcaugauguaaguga

SEQ ID NO: 230976 - RNA, 20 nt, Artificial Sequence
  Synthetic
aggaagcaugauguaaguga

SEQ ID NO: 230977 - RNA, 21 nt, Artificial Sequence
  Synthetic
caggaagcaugauguaaguga

SEQ ID NO: 230978 - RNA, 22 nt, Artificial Sequence
  Synthetic
ucaggaagcaugauguaaguga

SEQ ID NO: 230979 - RNA, 23 nt, Artificial Sequence
  Synthetic
cucaggaagcaugauguaaguga

SEQ ID NO: 230980 - RNA, 24 nt, Artificial Sequence
  Synthetic
ucucaggaagcaugauguaaguga

SEQ ID NO: 230981 - RNA, 18 nt, Artificial Sequence
  Synthetic
ucuuaaugcuguaaguga

SEQ ID NO: 230982 - RNA, 19 nt, Artificial Sequence
  Synthetic
cucuuaaugcuguaaguga

SEQ ID NO: 230983 - RNA, 20 nt, Artificial Sequence
  Synthetic
ucucuuaaugcuguaaguga

SEQ ID NO: 230984 - RNA, 21 nt, Artificial Sequence
  Synthetic
uucucuuaaugcuguaaguga

SEQ ID NO: 230985 - RNA, 22 nt, Artificial Sequence
  Synthetic
guucucuuaaugcuguaaguga

SEQ ID NO: 230986 - RNA, 23 nt, Artificial Sequence
  Synthetic
gguucucuuaaugcuguaaguga

SEQ ID NO: 230987 - RNA, 24 nt, Artificial Sequence
  Synthetic
ugguucucuuaaugcuguaaguga

SEQ ID NO: 230988 - RNA, 18 nt, Artificial Sequence
  Synthetic
uuaaaaaaaauuaaguga

SEQ ID NO: 230989 - RNA, 19 nt, Artificial Sequence
  Synthetic
guuaaaaaaaauuaaguga

SEQ ID NO: 230990 - RNA, 20 nt, Artificial Sequence
  Synthetic
aguuaaaaaaaauuaaguga

SEQ ID NO: 230991 - RNA, 21 nt, Artificial Sequence
  Synthetic
aaguuaaaaaaaauuaaguga

SEQ ID NO: 230992 - RNA, 22 nt, Artificial Sequence
  Synthetic
aaaguuaaaaaaaauuaaguga

SEQ ID NO: 230993 - RNA, 23 nt, Artificial Sequence
  Synthetic
aaaaguuaaaaaaaauuaaguga

SEQ ID NO: 230994 - RNA, 24 nt, Artificial Sequence
  Synthetic
uaaaaguuaaaaaaaauuaaguga

SEQ ID NO: 230995 - RNA, 18 nt, Artificial Sequence
  Synthetic
guuguauuuauuaaguga

SEQ ID NO: 230996 - RNA, 19 nt, Artificial Sequence
  Synthetic
uguuguauuuauuaaguga

SEQ ID NO: 230997 - RNA, 20 nt, Artificial Sequence
  Synthetic
uuguuguauuuauuaaguga

SEQ ID NO: 230998 - RNA, 21 nt, Artificial Sequence
  Synthetic
uuuguuguauuuauuaaguga

SEQ ID NO: 230999 - RNA, 22 nt, Artificial Sequence
  Synthetic
auuuguuguauuuauuaaguga

SEQ ID NO: 231000 - RNA, 23 nt, Artificial Sequence
  Synthetic
aauuuguuguauuuauuaaguga

SEQ ID NO: 231001 - RNA, 24 nt, Artificial Sequence
  Synthetic
aaauuuguuguauuuauuaaguga

SEQ ID NO: 231002 - RNA, 18 nt, Artificial Sequence
  Synthetic
aaaguuugauuuaaguga

SEQ ID NO: 231003 - RNA, 19 nt, Artificial Sequence
  Synthetic
caaaguuugauuuaaguga

SEQ ID NO: 231004 - RNA, 20 nt, Artificial Sequence
  Synthetic
ucaaaguuugauuuaaguga

SEQ ID NO: 231005 - RNA, 21 nt, Artificial Sequence
  Synthetic
gucaaaguuugauuuaaguga

SEQ ID NO: 231006 - RNA, 22 nt, Artificial Sequence
  Synthetic
ugucaaaguuugauuuaaguga

SEQ ID NO: 231007 - RNA, 23 nt, Artificial Sequence
  Synthetic
gugucaaaguuugauuuaaguga

SEQ ID NO: 231008 - RNA, 24 nt, Artificial Sequence
  Synthetic
ugugucaaaguuugauuuaaguga

SEQ ID NO: 231009 - RNA, 18 nt, Artificial Sequence
  Synthetic
cguagaaaaagacaguga

SEQ ID NO: 231010 - RNA, 19 nt, Artificial Sequence
  Synthetic
gcguagaaaaagacaguga

SEQ ID NO: 231011 - RNA, 20 nt, Artificial Sequence
  Synthetic
ggcguagaaaaagacaguga

SEQ ID NO: 231012 - RNA, 21 nt, Artificial Sequence
  Synthetic
aggcguagaaaaagacaguga

SEQ ID NO: 231013 - RNA, 22 nt, Artificial Sequence
  Synthetic
aaggcguagaaaaagacaguga

SEQ ID NO: 231014 - RNA, 23 nt, Artificial Sequence
  Synthetic
uaaggcguagaaaaagacaguga

SEQ ID NO: 231015 - RNA, 24 nt, Artificial Sequence
  Synthetic
cuaaggcguagaaaaagacaguga

SEQ ID NO: 231016 - RNA, 18 nt, Artificial Sequence
  Synthetic
accacagacauacaguga

SEQ ID NO: 231017 - RNA, 19 nt, Artificial Sequence
  Synthetic
uaccacagacauacaguga

SEQ ID NO: 231018 - RNA, 20 nt, Artificial Sequence
  Synthetic
cuaccacagacauacaguga

SEQ ID NO: 231019 - RNA, 21 nt, Artificial Sequence
  Synthetic
acuaccacagacauacaguga

SEQ ID NO: 231020 - RNA, 22 nt, Artificial Sequence
  Synthetic
uacuaccacagacauacaguga

SEQ ID NO: 231021 - RNA, 23 nt, Artificial Sequence
  Synthetic
cuacuaccacagacauacaguga

SEQ ID NO: 231022 - RNA, 24 nt, Artificial Sequence
  Synthetic
acuacuaccacagacauacaguga

SEQ ID NO: 231023 - RNA, 18 nt, Artificial Sequence
  Synthetic
uuuguuuuuccccaguga

SEQ ID NO: 231024 - RNA, 19 nt, Artificial Sequence
  Synthetic
auuuguuuuuccccaguga

SEQ ID NO: 231025 - RNA, 20 nt, Artificial Sequence
  Synthetic
aauuuguuuuuccccaguga

SEQ ID NO: 231026 - RNA, 21 nt, Artificial Sequence
  Synthetic
uaauuuguuuuuccccaguga

SEQ ID NO: 231027 - RNA, 22 nt, Artificial Sequence
  Synthetic
cuaauuuguuuuuccccaguga

SEQ ID NO: 231028 - RNA, 23 nt, Artificial Sequence
  Synthetic
gcuaauuuguuuuuccccaguga

SEQ ID NO: 231029 - RNA, 24 nt, Artificial Sequence
  Synthetic
ugcuaauuuguuuuuccccaguga

SEQ ID NO: 231030 - RNA, 18 nt, Artificial Sequence
  Synthetic
agguaauggugccaguga

SEQ ID NO: 231031 - RNA, 19 nt, Artificial Sequence
  Synthetic
aagguaauggugccaguga

SEQ ID NO: 231032 - RNA, 20 nt, Artificial Sequence
  Synthetic
gaagguaauggugccaguga

SEQ ID NO: 231033 - RNA, 21 nt, Artificial Sequence
  Synthetic
ggaagguaauggugccaguga

SEQ ID NO: 231034 - RNA, 22 nt, Artificial Sequence
  Synthetic
uggaagguaauggugccaguga

SEQ ID NO: 231035 - RNA, 23 nt, Artificial Sequence
  Synthetic
guggaagguaauggugccaguga

SEQ ID NO: 231036 - RNA, 24 nt, Artificial Sequence
  Synthetic
uguggaagguaauggugccaguga

SEQ ID NO: 231037 - RNA, 21 nt, Artificial Sequence
  Synthetic
aggaggcggagguugcaguga

SEQ ID NO: 231038 - RNA, 22 nt, Artificial Sequence
  Synthetic
caggaggcggagguugcaguga

SEQ ID NO: 231039 - RNA, 23 nt, Artificial Sequence
  Synthetic
ccaggaggcggagguugcaguga

SEQ ID NO: 231040 - RNA, 24 nt, Artificial Sequence
  Synthetic
cccaggaggcggagguugcaguga

SEQ ID NO: 231041 - RNA, 21 nt, Artificial Sequence
  Synthetic
gggaggcggagguugcaguga

SEQ ID NO: 231042 - RNA, 22 nt, Artificial Sequence
  Synthetic
cgggaggcggagguugcaguga

SEQ ID NO: 231043 - RNA, 23 nt, Artificial Sequence
  Synthetic
ccgggaggcggagguugcaguga

SEQ ID NO: 231044 - RNA, 24 nt, Artificial Sequence
  Synthetic
cccgggaggcggagguugcaguga

SEQ ID NO: 231045 - RNA, 18 nt, Artificial Sequence
  Synthetic
ccucaucaaaaucaguga

SEQ ID NO: 231046 - RNA, 19 nt, Artificial Sequence
  Synthetic
gccucaucaaaaucaguga

SEQ ID NO: 231047 - RNA, 20 nt, Artificial Sequence
  Synthetic
ugccucaucaaaaucaguga

SEQ ID NO: 231048 - RNA, 21 nt, Artificial Sequence
  Synthetic
uugccucaucaaaaucaguga

SEQ ID NO: 231049 - RNA, 22 nt, Artificial Sequence
  Synthetic
uuugccucaucaaaaucaguga

SEQ ID NO: 231050 - RNA, 23 nt, Artificial Sequence
  Synthetic
auuugccucaucaaaaucaguga

SEQ ID NO: 231051 - RNA, 24 nt, Artificial Sequence
  Synthetic
aauuugccucaucaaaaucaguga

SEQ ID NO: 231052 - RNA, 18 nt, Artificial Sequence
  Synthetic
cuauuugucaaucaguga

SEQ ID NO: 231053 - RNA, 19 nt, Artificial Sequence
  Synthetic
ucuauuugucaaucaguga

SEQ ID NO: 231054 - RNA, 20 nt, Artificial Sequence
  Synthetic
uucuauuugucaaucaguga

SEQ ID NO: 231055 - RNA, 21 nt, Artificial Sequence
  Synthetic
auucuauuugucaaucaguga

SEQ ID NO: 231056 - RNA, 22 nt, Artificial Sequence
  Synthetic
uauucuauuugucaaucaguga

SEQ ID NO: 231057 - RNA, 23 nt, Artificial Sequence
  Synthetic
auauucuauuugucaaucaguga

SEQ ID NO: 231058 - RNA, 24 nt, Artificial Sequence
  Synthetic
cauauucuauuugucaaucaguga

SEQ ID NO: 231059 - RNA, 18 nt, Artificial Sequence
  Synthetic
aaaugucuguaucaguga

SEQ ID NO: 231060 - RNA, 19 nt, Artificial Sequence
  Synthetic
aaaaugucuguaucaguga

SEQ ID NO: 231061 - RNA, 20 nt, Artificial Sequence
  Synthetic
uaaaaugucuguaucaguga

SEQ ID NO: 231062 - RNA, 21 nt, Artificial Sequence
  Synthetic
auaaaaugucuguaucaguga

SEQ ID NO: 231063 - RNA, 22 nt, Artificial Sequence
  Synthetic
aauaaaaugucuguaucaguga

SEQ ID NO: 231064 - RNA, 23 nt, Artificial Sequence
  Synthetic
aaauaaaaugucuguaucaguga

SEQ ID NO: 231065 - RNA, 24 nt, Artificial Sequence
  Synthetic
aaaauaaaaugucuguaucaguga

SEQ ID NO: 231066 - RNA, 18 nt, Artificial Sequence
  Synthetic
auaaguauuugucaguga

SEQ ID NO: 231067 - RNA, 19 nt, Artificial Sequence
  Synthetic
aauaaguauuugucaguga

SEQ ID NO: 231068 - RNA, 20 nt, Artificial Sequence
  Synthetic
caauaaguauuugucaguga

SEQ ID NO: 231069 - RNA, 21 nt, Artificial Sequence
  Synthetic
ucaauaaguauuugucaguga

SEQ ID NO: 231070 - RNA, 22 nt, Artificial Sequence
  Synthetic
uucaauaaguauuugucaguga

SEQ ID NO: 231071 - RNA, 23 nt, Artificial Sequence
  Synthetic
guucaauaaguauuugucaguga

SEQ ID NO: 231072 - RNA, 24 nt, Artificial Sequence
  Synthetic
uguucaauaaguauuugucaguga

SEQ ID NO: 231073 - RNA, 18 nt, Artificial Sequence
  Synthetic
aauuugauguuucaguga

SEQ ID NO: 231074 - RNA, 19 nt, Artificial Sequence
  Synthetic
caauuugauguuucaguga

SEQ ID NO: 231075 - RNA, 20 nt, Artificial Sequence
  Synthetic
acaauuugauguuucaguga

SEQ ID NO: 231076 - RNA, 21 nt, Artificial Sequence
  Synthetic
uacaauuugauguuucaguga

SEQ ID NO: 231077 - RNA, 22 nt, Artificial Sequence
  Synthetic
uuacaauuugauguuucaguga

SEQ ID NO: 231078 - RNA, 23 nt, Artificial Sequence
  Synthetic
guuacaauuugauguuucaguga

SEQ ID NO: 231079 - RNA, 24 nt, Artificial Sequence
  Synthetic
uguuacaauuugauguuucaguga

SEQ ID NO: 231080 - RNA, 18 nt, Artificial Sequence
  Synthetic
gagagagagaaagaguga

SEQ ID NO: 231081 - RNA, 19 nt, Artificial Sequence
  Synthetic
agagagagagaaagaguga

SEQ ID NO: 231082 - RNA, 20 nt, Artificial Sequence
  Synthetic
gagagagagagaaagaguga

SEQ ID NO: 231083 - RNA, 21 nt, Artificial Sequence
  Synthetic
ggagagagagagaaagaguga

SEQ ID NO: 231084 - RNA, 22 nt, Artificial Sequence
  Synthetic
aggagagagagagaaagaguga

SEQ ID NO: 231085 - RNA, 23 nt, Artificial Sequence
  Synthetic
caggagagagagagaaagaguga

SEQ ID NO: 231086 - RNA, 24 nt, Artificial Sequence
  Synthetic
gcaggagagagagagaaagaguga

SEQ ID NO: 231087 - RNA, 18 nt, Artificial Sequence
  Synthetic
aaggaagaaagagaguga

SEQ ID NO: 231088 - RNA, 19 nt, Artificial Sequence
  Synthetic
uaaggaagaaagagaguga

SEQ ID NO: 231089 - RNA, 20 nt, Artificial Sequence
  Synthetic
guaaggaagaaagagaguga

SEQ ID NO: 231090 - RNA, 21 nt, Artificial Sequence
  Synthetic
aguaaggaagaaagagaguga

SEQ ID NO: 231091 - RNA, 22 nt, Artificial Sequence
  Synthetic
aaguaaggaagaaagagaguga

SEQ ID NO: 231092 - RNA, 23 nt, Artificial Sequence
  Synthetic
gaaguaaggaagaaagagaguga

SEQ ID NO: 231093 - RNA, 24 nt, Artificial Sequence
  Synthetic
ggaaguaaggaagaaagagaguga

SEQ ID NO: 231094 - RNA, 18 nt, Artificial Sequence
  Synthetic
gagagagagagagaguga

SEQ ID NO: 231095 - RNA, 19 nt, Artificial Sequence
  Synthetic
agagagagagagagaguga

SEQ ID NO: 231096 - RNA, 20 nt, Artificial Sequence
  Synthetic
gagagagagagagagaguga

SEQ ID NO: 231097 - RNA, 21 nt, Artificial Sequence
  Synthetic
agagagagagagagagaguga

SEQ ID NO: 231098 - RNA, 22 nt, Artificial Sequence
  Synthetic
gagagagagagagagagaguga

SEQ ID NO: 231099 - RNA, 23 nt, Artificial Sequence
  Synthetic
agagagagagagagagagaguga

SEQ ID NO: 231100 - RNA, 24 nt, Artificial Sequence
  Synthetic
gagagagagagagagagagaguga

SEQ ID NO: 231101 - RNA, 18 nt, Artificial Sequence
  Synthetic
accucccucauagaguga

SEQ ID NO: 231102 - RNA, 19 nt, Artificial Sequence
  Synthetic
uaccucccucauagaguga

SEQ ID NO: 231103 - RNA, 20 nt, Artificial Sequence
  Synthetic
auaccucccucauagaguga

SEQ ID NO: 231104 - RNA, 21 nt, Artificial Sequence
  Synthetic
cauaccucccucauagaguga

SEQ ID NO: 231105 - RNA, 22 nt, Artificial Sequence
  Synthetic
ucauaccucccucauagaguga

SEQ ID NO: 231106 - RNA, 23 nt, Artificial Sequence
  Synthetic
aucauaccucccucauagaguga

SEQ ID NO: 231107 - RNA, 24 nt, Artificial Sequence
  Synthetic
uaucauaccucccucauagaguga

SEQ ID NO: 231108 - RNA, 18 nt, Artificial Sequence
  Synthetic
auuuacucuuuagaguga

SEQ ID NO: 231109 - RNA, 19 nt, Artificial Sequence
  Synthetic
uauuuacucuuuagaguga

SEQ ID NO: 231110 - RNA, 20 nt, Artificial Sequence
  Synthetic
uuauuuacucuuuagaguga

SEQ ID NO: 231111 - RNA, 21 nt, Artificial Sequence
  Synthetic
uuuauuuacucuuuagaguga

SEQ ID NO: 231112 - RNA, 22 nt, Artificial Sequence
  Synthetic
uuuuauuuacucuuuagaguga

SEQ ID NO: 231113 - RNA, 23 nt, Artificial Sequence
  Synthetic
auuuuauuuacucuuuagaguga

SEQ ID NO: 231114 - RNA, 24 nt, Artificial Sequence
  Synthetic
uauuuuauuuacucuuuagaguga

SEQ ID NO: 231115 - RNA, 18 nt, Artificial Sequence
  Synthetic
gauacgcucugggaguga

SEQ ID NO: 231116 - RNA, 19 nt, Artificial Sequence
  Synthetic
ugauacgcucugggaguga

SEQ ID NO: 231117 - RNA, 20 nt, Artificial Sequence
  Synthetic
uugauacgcucugggaguga

SEQ ID NO: 231118 - RNA, 21 nt, Artificial Sequence
  Synthetic
auugauacgcucugggaguga

SEQ ID NO: 231119 - RNA, 22 nt, Artificial Sequence
  Synthetic
uauugauacgcucugggaguga

SEQ ID NO: 231120 - RNA, 23 nt, Artificial Sequence
  Synthetic
uuauugauacgcucugggaguga

SEQ ID NO: 231121 - RNA, 24 nt, Artificial Sequence
  Synthetic
cuuauugauacgcucugggaguga

SEQ ID NO: 231122 - RNA, 18 nt, Artificial Sequence
  Synthetic
uaccaauaugaugaguga

SEQ ID NO: 231123 - RNA, 19 nt, Artificial Sequence
  Synthetic
uuaccaauaugaugaguga

SEQ ID NO: 231124 - RNA, 20 nt, Artificial Sequence
  Synthetic
auuaccaauaugaugaguga

SEQ ID NO: 231125 - RNA, 21 nt, Artificial Sequence
  Synthetic
aauuaccaauaugaugaguga

SEQ ID NO: 231126 - RNA, 22 nt, Artificial Sequence
  Synthetic
caauuaccaauaugaugaguga

SEQ ID NO: 231127 - RNA, 23 nt, Artificial Sequence
  Synthetic
gcaauuaccaauaugaugaguga

SEQ ID NO: 231128 - RNA, 24 nt, Artificial Sequence
  Synthetic
ggcaauuaccaauaugaugaguga

SEQ ID NO: 231129 - RNA, 18 nt, Artificial Sequence
  Synthetic
gcacuccagccugaguga

SEQ ID NO: 231130 - RNA, 19 nt, Artificial Sequence
  Synthetic
ugcacuccagccugaguga

SEQ ID NO: 231131 - RNA, 20 nt, Artificial Sequence
  Synthetic
cugcacuccagccugaguga

SEQ ID NO: 231132 - RNA, 21 nt, Artificial Sequence
  Synthetic
acugcacuccagccugaguga

SEQ ID NO: 231133 - RNA, 22 nt, Artificial Sequence
  Synthetic
cacugcacuccagccugaguga

SEQ ID NO: 231134 - RNA, 23 nt, Artificial Sequence
  Synthetic
ccacugcacuccagccugaguga

SEQ ID NO: 231135 - RNA, 24 nt, Artificial Sequence
  Synthetic
accacugcacuccagccugaguga

SEQ ID NO: 231136 - RNA, 18 nt, Artificial Sequence
  Synthetic
cugauaauagcugaguga

SEQ ID NO: 231137 - RNA, 19 nt, Artificial Sequence
  Synthetic
gcugauaauagcugaguga

SEQ ID NO: 231138 - RNA, 20 nt, Artificial Sequence
  Synthetic
ugcugauaauagcugaguga

SEQ ID NO: 231139 - RNA, 21 nt, Artificial Sequence
  Synthetic
uugcugauaauagcugaguga

SEQ ID NO: 231140 - RNA, 22 nt, Artificial Sequence
  Synthetic
auugcugauaauagcugaguga

SEQ ID NO: 231141 - RNA, 23 nt, Artificial Sequence
  Synthetic
aauugcugauaauagcugaguga

SEQ ID NO: 231142 - RNA, 24 nt, Artificial Sequence
  Synthetic
uaauugcugauaauagcugaguga

SEQ ID NO: 231143 - RNA, 18 nt, Artificial Sequence
  Synthetic
ccuuugcagggugaguga

SEQ ID NO: 231144 - RNA, 19 nt, Artificial Sequence
  Synthetic
uccuuugcagggugaguga

SEQ ID NO: 231145 - RNA, 20 nt, Artificial Sequence
  Synthetic
guccuuugcagggugaguga

SEQ ID NO: 231146 - RNA, 21 nt, Artificial Sequence
  Synthetic
gguccuuugcagggugaguga

SEQ ID NO: 231147 - RNA, 22 nt, Artificial Sequence
  Synthetic
ugguccuuugcagggugaguga

SEQ ID NO: 231148 - RNA, 23 nt, Artificial Sequence
  Synthetic
uugguccuuugcagggugaguga

SEQ ID NO: 231149 - RNA, 24 nt, Artificial Sequence
  Synthetic
uuugguccuuugcagggugaguga

SEQ ID NO: 231150 - RNA, 18 nt, Artificial Sequence
  Synthetic
aaggaaccugaauaguga

SEQ ID NO: 231151 - RNA, 19 nt, Artificial Sequence
  Synthetic
aaaggaaccugaauaguga

SEQ ID NO: 231152 - RNA, 20 nt, Artificial Sequence
  Synthetic
aaaaggaaccugaauaguga

SEQ ID NO: 231153 - RNA, 21 nt, Artificial Sequence
  Synthetic
gaaaaggaaccugaauaguga

SEQ ID NO: 231154 - RNA, 22 nt, Artificial Sequence
  Synthetic
ugaaaaggaaccugaauaguga

SEQ ID NO: 231155 - RNA, 23 nt, Artificial Sequence
  Synthetic
uugaaaaggaaccugaauaguga

SEQ ID NO: 231156 - RNA, 24 nt, Artificial Sequence
  Synthetic
uuugaaaaggaaccugaauaguga

SEQ ID NO: 231157 - RNA, 18 nt, Artificial Sequence
  Synthetic
agcaugcaguuauaguga

SEQ ID NO: 231158 - RNA, 19 nt, Artificial Sequence
  Synthetic
cagcaugcaguuauaguga

SEQ ID NO: 231159 - RNA, 20 nt, Artificial Sequence
  Synthetic
acagcaugcaguuauaguga

SEQ ID NO: 231160 - RNA, 21 nt, Artificial Sequence
  Synthetic
gacagcaugcaguuauaguga

SEQ ID NO: 231161 - RNA, 22 nt, Artificial Sequence
  Synthetic
ugacagcaugcaguuauaguga

SEQ ID NO: 231162 - RNA, 23 nt, Artificial Sequence
  Synthetic
uugacagcaugcaguuauaguga

SEQ ID NO: 231163 - RNA, 24 nt, Artificial Sequence
  Synthetic
cuugacagcaugcaguuauaguga

SEQ ID NO: 231164 - RNA, 18 nt, Artificial Sequence
  Synthetic
ucauacaaaugcuaguga

SEQ ID NO: 231165 - RNA, 19 nt, Artificial Sequence
  Synthetic
uucauacaaaugcuaguga

SEQ ID NO: 231166 - RNA, 20 nt, Artificial Sequence
  Synthetic
cuucauacaaaugcuaguga

SEQ ID NO: 231167 - RNA, 21 nt, Artificial Sequence
  Synthetic
acuucauacaaaugcuaguga

SEQ ID NO: 231168 - RNA, 22 nt, Artificial Sequence
  Synthetic
uacuucauacaaaugcuaguga

SEQ ID NO: 231169 - RNA, 23 nt, Artificial Sequence
  Synthetic
uuacuucauacaaaugcuaguga

SEQ ID NO: 231170 - RNA, 24 nt, Artificial Sequence
  Synthetic
uuuacuucauacaaaugcuaguga

SEQ ID NO: 231171 - RNA, 18 nt, Artificial Sequence
  Synthetic
agaaguagauuguaguga

SEQ ID NO: 231172 - RNA, 19 nt, Artificial Sequence
  Synthetic
aagaaguagauuguaguga

SEQ ID NO: 231173 - RNA, 20 nt, Artificial Sequence
  Synthetic
aaagaaguagauuguaguga

SEQ ID NO: 231174 - RNA, 21 nt, Artificial Sequence
  Synthetic
gaaagaaguagauuguaguga

SEQ ID NO: 231175 - RNA, 22 nt, Artificial Sequence
  Synthetic
ugaaagaaguagauuguaguga

SEQ ID NO: 231176 - RNA, 23 nt, Artificial Sequence
  Synthetic
gugaaagaaguagauuguaguga

SEQ ID NO: 231177 - RNA, 24 nt, Artificial Sequence
  Synthetic
ugugaaagaaguagauuguaguga

SEQ ID NO: 231178 - RNA, 18 nt, Artificial Sequence
  Synthetic
guucaucagaauuaguga

SEQ ID NO: 231179 - RNA, 19 nt, Artificial Sequence
  Synthetic
uguucaucagaauuaguga

SEQ ID NO: 231180 - RNA, 20 nt, Artificial Sequence
  Synthetic
cuguucaucagaauuaguga

SEQ ID NO: 231181 - RNA, 21 nt, Artificial Sequence
  Synthetic
gcuguucaucagaauuaguga

SEQ ID NO: 231182 - RNA, 22 nt, Artificial Sequence
  Synthetic
agcuguucaucagaauuaguga

SEQ ID NO: 231183 - RNA, 23 nt, Artificial Sequence
  Synthetic
uagcuguucaucagaauuaguga

SEQ ID NO: 231184 - RNA, 24 nt, Artificial Sequence
  Synthetic
auagcuguucaucagaauuaguga

SEQ ID NO: 231185 - RNA, 18 nt, Artificial Sequence
  Synthetic
uaccaugguuauuaguga

SEQ ID NO: 231186 - RNA, 19 nt, Artificial Sequence
  Synthetic
uuaccaugguuauuaguga

SEQ ID NO: 231187 - RNA, 20 nt, Artificial Sequence
  Synthetic
cuuaccaugguuauuaguga

SEQ ID NO: 231188 - RNA, 21 nt, Artificial Sequence
  Synthetic
ccuuaccaugguuauuaguga

SEQ ID NO: 231189 - RNA, 22 nt, Artificial Sequence
  Synthetic
accuuaccaugguuauuaguga

SEQ ID NO: 231190 - RNA, 23 nt, Artificial Sequence
  Synthetic
uaccuuaccaugguuauuaguga

SEQ ID NO: 231191 - RNA, 24 nt, Artificial Sequence
  Synthetic
uuaccuuaccaugguuauuaguga

SEQ ID NO: 231192 - RNA, 18 nt, Artificial Sequence
  Synthetic
uauguuaaggcuuaguga

SEQ ID NO: 231193 - RNA, 19 nt, Artificial Sequence
  Synthetic
uuauguuaaggcuuaguga

SEQ ID NO: 231194 - RNA, 20 nt, Artificial Sequence
  Synthetic
uuuauguuaaggcuuaguga

SEQ ID NO: 231195 - RNA, 21 nt, Artificial Sequence
  Synthetic
uuuuauguuaaggcuuaguga

SEQ ID NO: 231196 - RNA, 22 nt, Artificial Sequence
  Synthetic
auuuuauguuaaggcuuaguga

SEQ ID NO: 231197 - RNA, 23 nt, Artificial Sequence
  Synthetic
aauuuuauguuaaggcuuaguga

SEQ ID NO: 231198 - RNA, 24 nt, Artificial Sequence
  Synthetic
uaauuuuauguuaaggcuuaguga

SEQ ID NO: 231199 - RNA, 18 nt, Artificial Sequence
  Synthetic
cucuauucaaguuaguga

SEQ ID NO: 231200 - RNA, 19 nt, Artificial Sequence
  Synthetic
ucucuauucaaguuaguga

SEQ ID NO: 231201 - RNA, 20 nt, Artificial Sequence
  Synthetic
uucucuauucaaguuaguga

SEQ ID NO: 231202 - RNA, 21 nt, Artificial Sequence
  Synthetic
uuucucuauucaaguuaguga

SEQ ID NO: 231203 - RNA, 22 nt, Artificial Sequence
  Synthetic
auuucucuauucaaguuaguga

SEQ ID NO: 231204 - RNA, 23 nt, Artificial Sequence
  Synthetic
uauuucucuauucaaguuaguga

SEQ ID NO: 231205 - RNA, 24 nt, Artificial Sequence
  Synthetic
uuauuucucuauucaaguuaguga

SEQ ID NO: 231206 - RNA, 18 nt, Artificial Sequence
  Synthetic
cuucagcuuuguuaguga

SEQ ID NO: 231207 - RNA, 19 nt, Artificial Sequence
  Synthetic
ccuucagcuuuguuaguga

SEQ ID NO: 231208 - RNA, 20 nt, Artificial Sequence
  Synthetic
uccuucagcuuuguuaguga

SEQ ID NO: 231209 - RNA, 21 nt, Artificial Sequence
  Synthetic
uuccuucagcuuuguuaguga

SEQ ID NO: 231210 - RNA, 22 nt, Artificial Sequence
  Synthetic
cuuccuucagcuuuguuaguga

SEQ ID NO: 231211 - RNA, 23 nt, Artificial Sequence
  Synthetic
ucuuccuucagcuuuguuaguga

SEQ ID NO: 231212 - RNA, 24 nt, Artificial Sequence
  Synthetic
cucuuccuucagcuuuguuaguga

SEQ ID NO: 231213 - RNA, 18 nt, Artificial Sequence
  Synthetic
auguuuagauuuuaguga

SEQ ID NO: 231214 - RNA, 19 nt, Artificial Sequence
  Synthetic
gauguuuagauuuuaguga

SEQ ID NO: 231215 - RNA, 20 nt, Artificial Sequence
  Synthetic
ggauguuuagauuuuaguga

SEQ ID NO: 231216 - RNA, 21 nt, Artificial Sequence
  Synthetic
uggauguuuagauuuuaguga

SEQ ID NO: 231217 - RNA, 22 nt, Artificial Sequence
  Synthetic
auggauguuuagauuuuaguga

SEQ ID NO: 231218 - RNA, 23 nt, Artificial Sequence
  Synthetic
uauggauguuuagauuuuaguga

SEQ ID NO: 231219 - RNA, 24 nt, Artificial Sequence
  Synthetic
cuauggauguuuagauuuuaguga

SEQ ID NO: 231220 - RNA, 18 nt, Artificial Sequence
  Synthetic
cccuugaaguuuuaguga

SEQ ID NO: 231221 - RNA, 19 nt, Artificial Sequence
  Synthetic
acccuugaaguuuuaguga

SEQ ID NO: 231222 - RNA, 20 nt, Artificial Sequence
  Synthetic
cacccuugaaguuuuaguga

SEQ ID NO: 231223 - RNA, 21 nt, Artificial Sequence
  Synthetic
ucacccuugaaguuuuaguga

SEQ ID NO: 231224 - RNA, 22 nt, Artificial Sequence
  Synthetic
cucacccuugaaguuuuaguga

SEQ ID NO: 231225 - RNA, 23 nt, Artificial Sequence
  Synthetic
ucucacccuugaaguuuuaguga

SEQ ID NO: 231226 - RNA, 24 nt, Artificial Sequence
  Synthetic
uucucacccuugaaguuuuaguga

SEQ ID NO: 231227 - RNA, 18 nt, Artificial Sequence
  Synthetic
uuaauuccaguuacguga

SEQ ID NO: 231228 - RNA, 19 nt, Artificial Sequence
  Synthetic
auuaauuccaguuacguga

SEQ ID NO: 231229 - RNA, 20 nt, Artificial Sequence
  Synthetic
aauuaauuccaguuacguga

SEQ ID NO: 231230 - RNA, 21 nt, Artificial Sequence
  Synthetic
aaauuaauuccaguuacguga

SEQ ID NO: 231231 - RNA, 22 nt, Artificial Sequence
  Synthetic
uaaauuaauuccaguuacguga

SEQ ID NO: 231232 - RNA, 23 nt, Artificial Sequence
  Synthetic
auaaauuaauuccaguuacguga

SEQ ID NO: 231233 - RNA, 24 nt, Artificial Sequence
  Synthetic
aauaaauuaauuccaguuacguga

SEQ ID NO: 231234 - RNA, 18 nt, Artificial Sequence
  Synthetic
accuuaaggagcucguga

SEQ ID NO: 231235 - RNA, 19 nt, Artificial Sequence
  Synthetic
aaccuuaaggagcucguga

SEQ ID NO: 231236 - RNA, 20 nt, Artificial Sequence
  Synthetic
uaaccuuaaggagcucguga

SEQ ID NO: 231237 - RNA, 21 nt, Artificial Sequence
  Synthetic
auaaccuuaaggagcucguga

SEQ ID NO: 231238 - RNA, 22 nt, Artificial Sequence
  Synthetic
cauaaccuuaaggagcucguga

SEQ ID NO: 231239 - RNA, 23 nt, Artificial Sequence
  Synthetic
acauaaccuuaaggagcucguga

SEQ ID NO: 231240 - RNA, 24 nt, Artificial Sequence
  Synthetic
uacauaaccuuaaggagcucguga

SEQ ID NO: 231241 - RNA, 18 nt, Artificial Sequence
  Synthetic
aauuacuucaucucguga

SEQ ID NO: 231242 - RNA, 19 nt, Artificial Sequence
  Synthetic
aaauuacuucaucucguga

SEQ ID NO: 231243 - RNA, 20 nt, Artificial Sequence
  Synthetic
gaaauuacuucaucucguga

SEQ ID NO: 231244 - RNA, 21 nt, Artificial Sequence
  Synthetic
ggaaauuacuucaucucguga

SEQ ID NO: 231245 - RNA, 22 nt, Artificial Sequence
  Synthetic
aggaaauuacuucaucucguga

SEQ ID NO: 231246 - RNA, 23 nt, Artificial Sequence
  Synthetic
gaggaaauuacuucaucucguga

SEQ ID NO: 231247 - RNA, 24 nt, Artificial Sequence
  Synthetic
ugaggaaauuacuucaucucguga

SEQ ID NO: 231248 - RNA, 18 nt, Artificial Sequence
  Synthetic
cccaucaaaaugucguga

SEQ ID NO: 231249 - RNA, 19 nt, Artificial Sequence
  Synthetic
ucccaucaaaaugucguga

SEQ ID NO: 231250 - RNA, 20 nt, Artificial Sequence
  Synthetic
aucccaucaaaaugucguga

SEQ ID NO: 231251 - RNA, 21 nt, Artificial Sequence
  Synthetic
uaucccaucaaaaugucguga

SEQ ID NO: 231252 - RNA, 22 nt, Artificial Sequence
  Synthetic
cuaucccaucaaaaugucguga

SEQ ID NO: 231253 - RNA, 23 nt, Artificial Sequence
  Synthetic
ucuaucccaucaaaaugucguga

SEQ ID NO: 231254 - RNA, 24 nt, Artificial Sequence
  Synthetic
cucuaucccaucaaaaugucguga

SEQ ID NO: 231255 - RNA, 18 nt, Artificial Sequence
  Synthetic
ugaaaagagcauucguga

SEQ ID NO: 231256 - RNA, 19 nt, Artificial Sequence
  Synthetic
uugaaaagagcauucguga

SEQ ID NO: 231257 - RNA, 20 nt, Artificial Sequence
  Synthetic
guugaaaagagcauucguga

SEQ ID NO: 231258 - RNA, 21 nt, Artificial Sequence
  Synthetic
gguugaaaagagcauucguga

SEQ ID NO: 231259 - RNA, 22 nt, Artificial Sequence
  Synthetic
ggguugaaaagagcauucguga

SEQ ID NO: 231260 - RNA, 23 nt, Artificial Sequence
  Synthetic
gggguugaaaagagcauucguga

SEQ ID NO: 231261 - RNA, 24 nt, Artificial Sequence
  Synthetic
ugggguugaaaagagcauucguga

SEQ ID NO: 231262 - RNA, 18 nt, Artificial Sequence
  Synthetic
uggugcuugcauucguga

SEQ ID NO: 231263 - RNA, 19 nt, Artificial Sequence
  Synthetic
guggugcuugcauucguga

SEQ ID NO: 231264 - RNA, 20 nt, Artificial Sequence
  Synthetic
uguggugcuugcauucguga

SEQ ID NO: 231265 - RNA, 21 nt, Artificial Sequence
  Synthetic
cuguggugcuugcauucguga

SEQ ID NO: 231266 - RNA, 22 nt, Artificial Sequence
  Synthetic
gcuguggugcuugcauucguga

SEQ ID NO: 231267 - RNA, 23 nt, Artificial Sequence
  Synthetic
ggcuguggugcuugcauucguga

SEQ ID NO: 231268 - RNA, 24 nt, Artificial Sequence
  Synthetic
gggcuguggugcuugcauucguga

SEQ ID NO: 231269 - RNA, 18 nt, Artificial Sequence
  Synthetic
uauguuuuaaaaagguga

SEQ ID NO: 231270 - RNA, 19 nt, Artificial Sequence
  Synthetic
uuauguuuuaaaaagguga

SEQ ID NO: 231271 - RNA, 20 nt, Artificial Sequence
  Synthetic
guuauguuuuaaaaagguga

SEQ ID NO: 231272 - RNA, 21 nt, Artificial Sequence
  Synthetic
uguuauguuuuaaaaagguga

SEQ ID NO: 231273 - RNA, 22 nt, Artificial Sequence
  Synthetic
auguuauguuuuaaaaagguga

SEQ ID NO: 231274 - RNA, 23 nt, Artificial Sequence
  Synthetic
cauguuauguuuuaaaaagguga

SEQ ID NO: 231275 - RNA, 24 nt, Artificial Sequence
  Synthetic
ucauguuauguuuuaaaaagguga

SEQ ID NO: 231276 - RNA, 18 nt, Artificial Sequence
  Synthetic
acagauauguaaagguga

SEQ ID NO: 231277 - RNA, 19 nt, Artificial Sequence
  Synthetic
uacagauauguaaagguga

SEQ ID NO: 231278 - RNA, 20 nt, Artificial Sequence
  Synthetic
cuacagauauguaaagguga

SEQ ID NO: 231279 - RNA, 21 nt, Artificial Sequence
  Synthetic
gcuacagauauguaaagguga

SEQ ID NO: 231280 - RNA, 22 nt, Artificial Sequence
  Synthetic
ggcuacagauauguaaagguga

SEQ ID NO: 231281 - RNA, 23 nt, Artificial Sequence
  Synthetic
gggcuacagauauguaaagguga

SEQ ID NO: 231282 - RNA, 24 nt, Artificial Sequence
  Synthetic
ggggcuacagauauguaaagguga

SEQ ID NO: 231283 - RNA, 18 nt, Artificial Sequence
  Synthetic
uugucaagcagaagguga

SEQ ID NO: 231284 - RNA, 19 nt, Artificial Sequence
  Synthetic
guugucaagcagaagguga

SEQ ID NO: 231285 - RNA, 20 nt, Artificial Sequence
  Synthetic
aguugucaagcagaagguga

SEQ ID NO: 231286 - RNA, 21 nt, Artificial Sequence
  Synthetic
uaguugucaagcagaagguga

SEQ ID NO: 231287 - RNA, 22 nt, Artificial Sequence
  Synthetic
uuaguugucaagcagaagguga

SEQ ID NO: 231288 - RNA, 23 nt, Artificial Sequence
  Synthetic
uuuaguugucaagcagaagguga

SEQ ID NO: 231289 - RNA, 24 nt, Artificial Sequence
  Synthetic
uuuuaguugucaagcagaagguga

SEQ ID NO: 231290 - RNA, 18 nt, Artificial Sequence
  Synthetic
aaucauggcagaagguga

SEQ ID NO: 231291 - RNA, 19 nt, Artificial Sequence
  Synthetic
caaucauggcagaagguga

SEQ ID NO: 231292 - RNA, 20 nt, Artificial Sequence
  Synthetic
acaaucauggcagaagguga

SEQ ID NO: 231293 - RNA, 21 nt, Artificial Sequence
  Synthetic
uacaaucauggcagaagguga

SEQ ID NO: 231294 - RNA, 22 nt, Artificial Sequence
  Synthetic
uuacaaucauggcagaagguga

SEQ ID NO: 231295 - RNA, 23 nt, Artificial Sequence
  Synthetic
cuuacaaucauggcagaagguga

SEQ ID NO: 231296 - RNA, 24 nt, Artificial Sequence
  Synthetic
acuuacaaucauggcagaagguga

SEQ ID NO: 231297 - RNA, 18 nt, Artificial Sequence
  Synthetic
cagugguacauaagguga

SEQ ID NO: 231298 - RNA, 19 nt, Artificial Sequence
  Synthetic
gcagugguacauaagguga

SEQ ID NO: 231299 - RNA, 20 nt, Artificial Sequence
  Synthetic
agcagugguacauaagguga

SEQ ID NO: 231300 - RNA, 21 nt, Artificial Sequence
  Synthetic
gagcagugguacauaagguga

SEQ ID NO: 231301 - RNA, 22 nt, Artificial Sequence
  Synthetic
ggagcagugguacauaagguga

SEQ ID NO: 231302 - RNA, 23 nt, Artificial Sequence
  Synthetic
aggagcagugguacauaagguga

SEQ ID NO: 231303 - RNA, 24 nt, Artificial Sequence
  Synthetic
uaggagcagugguacauaagguga

SEQ ID NO: 231304 - RNA, 18 nt, Artificial Sequence
  Synthetic
gguucuggcauaagguga

SEQ ID NO: 231305 - RNA, 19 nt, Artificial Sequence
  Synthetic
ugguucuggcauaagguga

SEQ ID NO: 231306 - RNA, 20 nt, Artificial Sequence
  Synthetic
cugguucuggcauaagguga

SEQ ID NO: 231307 - RNA, 21 nt, Artificial Sequence
  Synthetic
ucugguucuggcauaagguga

SEQ ID NO: 231308 - RNA, 22 nt, Artificial Sequence
  Synthetic
aucugguucuggcauaagguga

SEQ ID NO: 231309 - RNA, 23 nt, Artificial Sequence
  Synthetic
caucugguucuggcauaagguga

SEQ ID NO: 231310 - RNA, 24 nt, Artificial Sequence
  Synthetic
acaucugguucuggcauaagguga

SEQ ID NO: 231311 - RNA, 18 nt, Artificial Sequence
  Synthetic
uaugaaugcaacagguga

SEQ ID NO: 231312 - RNA, 19 nt, Artificial Sequence
  Synthetic
uuaugaaugcaacagguga

SEQ ID NO: 231313 - RNA, 20 nt, Artificial Sequence
  Synthetic
auuaugaaugcaacagguga

SEQ ID NO: 231314 - RNA, 21 nt, Artificial Sequence
  Synthetic
uauuaugaaugcaacagguga

SEQ ID NO: 231315 - RNA, 22 nt, Artificial Sequence
  Synthetic
cuauuaugaaugcaacagguga

SEQ ID NO: 231316 - RNA, 23 nt, Artificial Sequence
  Synthetic
acuauuaugaaugcaacagguga

SEQ ID NO: 231317 - RNA, 24 nt, Artificial Sequence
  Synthetic
uacuauuaugaaugcaacagguga

SEQ ID NO: 231318 - RNA, 18 nt, Artificial Sequence
  Synthetic
caaaucuccagcagguga

SEQ ID NO: 231319 - RNA, 19 nt, Artificial Sequence
  Synthetic
acaaaucuccagcagguga

SEQ ID NO: 231320 - RNA, 20 nt, Artificial Sequence
  Synthetic
aacaaaucuccagcagguga

SEQ ID NO: 231321 - RNA, 21 nt, Artificial Sequence
  Synthetic
caacaaaucuccagcagguga

SEQ ID NO: 231322 - RNA, 22 nt, Artificial Sequence
  Synthetic
ccaacaaaucuccagcagguga

SEQ ID NO: 231323 - RNA, 23 nt, Artificial Sequence
  Synthetic
cccaacaaaucuccagcagguga

SEQ ID NO: 231324 - RNA, 24 nt, Artificial Sequence
  Synthetic
ucccaacaaaucuccagcagguga

SEQ ID NO: 231325 - RNA, 18 nt, Artificial Sequence
  Synthetic
cagggaccuaagagguga

SEQ ID NO: 231326 - RNA, 19 nt, Artificial Sequence
  Synthetic
ccagggaccuaagagguga

SEQ ID NO: 231327 - RNA, 20 nt, Artificial Sequence
  Synthetic
accagggaccuaagagguga

SEQ ID NO: 231328 - RNA, 21 nt, Artificial Sequence
  Synthetic
aaccagggaccuaagagguga

SEQ ID NO: 231329 - RNA, 22 nt, Artificial Sequence
  Synthetic
caaccagggaccuaagagguga

SEQ ID NO: 231330 - RNA, 23 nt, Artificial Sequence
  Synthetic
ccaaccagggaccuaagagguga

SEQ ID NO: 231331 - RNA, 24 nt, Artificial Sequence
  Synthetic
uccaaccagggaccuaagagguga

SEQ ID NO: 231332 - RNA, 18 nt, Artificial Sequence
  Synthetic
cauagguuacugagguga

SEQ ID NO: 231333 - RNA, 19 nt, Artificial Sequence
  Synthetic
acauagguuacugagguga

SEQ ID NO: 231334 - RNA, 20 nt, Artificial Sequence
  Synthetic
gacauagguuacugagguga

SEQ ID NO: 231335 - RNA, 21 nt, Artificial Sequence
  Synthetic
agacauagguuacugagguga

SEQ ID NO: 231336 - RNA, 22 nt, Artificial Sequence
  Synthetic
aagacauagguuacugagguga

SEQ ID NO: 231337 - RNA, 23 nt, Artificial Sequence
  Synthetic
uaagacauagguuacugagguga

SEQ ID NO: 231338 - RNA, 24 nt, Artificial Sequence
  Synthetic
cuaagacauagguuacugagguga

SEQ ID NO: 231339 - RNA, 18 nt, Artificial Sequence
  Synthetic
cagcacguugcuagguga

SEQ ID NO: 231340 - RNA, 19 nt, Artificial Sequence
  Synthetic
ucagcacguugcuagguga

SEQ ID NO: 231341 - RNA, 20 nt, Artificial Sequence
  Synthetic
aucagcacguugcuagguga

SEQ ID NO: 231342 - RNA, 21 nt, Artificial Sequence
  Synthetic
gaucagcacguugcuagguga

SEQ ID NO: 231343 - RNA, 22 nt, Artificial Sequence
  Synthetic
agaucagcacguugcuagguga

SEQ ID NO: 231344 - RNA, 23 nt, Artificial Sequence
  Synthetic
aagaucagcacguugcuagguga

SEQ ID NO: 231345 - RNA, 24 nt, Artificial Sequence
  Synthetic
uaagaucagcacguugcuagguga

SEQ ID NO: 231346 - RNA, 18 nt, Artificial Sequence
  Synthetic
augggagaaccacgguga

SEQ ID NO: 231347 - RNA, 19 nt, Artificial Sequence
  Synthetic
uaugggagaaccacgguga

SEQ ID NO: 231348 - RNA, 20 nt, Artificial Sequence
  Synthetic
uuaugggagaaccacgguga

SEQ ID NO: 231349 - RNA, 21 nt, Artificial Sequence
  Synthetic
guuaugggagaaccacgguga

SEQ ID NO: 231350 - RNA, 22 nt, Artificial Sequence
  Synthetic
uguuaugggagaaccacgguga

SEQ ID NO: 231351 - RNA, 23 nt, Artificial Sequence
  Synthetic
guguuaugggagaaccacgguga

SEQ ID NO: 231352 - RNA, 24 nt, Artificial Sequence
  Synthetic
aguguuaugggagaaccacgguga

SEQ ID NO: 231353 - RNA, 18 nt, Artificial Sequence
  Synthetic
guuuacuccccacgguga

SEQ ID NO: 231354 - RNA, 19 nt, Artificial Sequence
  Synthetic
uguuuacuccccacgguga

SEQ ID NO: 231355 - RNA, 20 nt, Artificial Sequence
  Synthetic
guguuuacuccccacgguga

SEQ ID NO: 231356 - RNA, 21 nt, Artificial Sequence
  Synthetic
gguguuuacuccccacgguga

SEQ ID NO: 231357 - RNA, 22 nt, Artificial Sequence
  Synthetic
agguguuuacuccccacgguga

SEQ ID NO: 231358 - RNA, 23 nt, Artificial Sequence
  Synthetic
aagguguuuacuccccacgguga

SEQ ID NO: 231359 - RNA, 24 nt, Artificial Sequence
  Synthetic
gaagguguuuacuccccacgguga

SEQ ID NO: 231360 - RNA, 18 nt, Artificial Sequence
  Synthetic
auaccgguugcacgguga

SEQ ID NO: 231361 - RNA, 19 nt, Artificial Sequence
  Synthetic
aauaccgguugcacgguga

SEQ ID NO: 231362 - RNA, 20 nt, Artificial Sequence
  Synthetic
aaauaccgguugcacgguga

SEQ ID NO: 231363 - RNA, 21 nt, Artificial Sequence
  Synthetic
uaaauaccgguugcacgguga

SEQ ID NO: 231364 - RNA, 22 nt, Artificial Sequence
  Synthetic
uuaaauaccgguugcacgguga

SEQ ID NO: 231365 - RNA, 23 nt, Artificial Sequence
  Synthetic
uuuaaauaccgguugcacgguga

SEQ ID NO: 231366 - RNA, 24 nt, Artificial Sequence
  Synthetic
uuuuaaauaccgguugcacgguga

SEQ ID NO: 231367 - RNA, 18 nt, Artificial Sequence
  Synthetic
ucagguucugaaggguga

SEQ ID NO: 231368 - RNA, 19 nt, Artificial Sequence
  Synthetic
aucagguucugaaggguga

SEQ ID NO: 231369 - RNA, 20 nt, Artificial Sequence
  Synthetic
gaucagguucugaaggguga

SEQ ID NO: 231370 - RNA, 21 nt, Artificial Sequence
  Synthetic
agaucagguucugaaggguga

SEQ ID NO: 231371 - RNA, 22 nt, Artificial Sequence
  Synthetic
aagaucagguucugaaggguga

SEQ ID NO: 231372 - RNA, 23 nt, Artificial Sequence
  Synthetic
aaagaucagguucugaaggguga

SEQ ID NO: 231373 - RNA, 24 nt, Artificial Sequence
  Synthetic
uaaagaucagguucugaaggguga

SEQ ID NO: 231374 - RNA, 18 nt, Artificial Sequence
  Synthetic
cuuuugguuacaggguga

SEQ ID NO: 231375 - RNA, 19 nt, Artificial Sequence
  Synthetic
ucuuuugguuacaggguga

SEQ ID NO: 231376 - RNA, 20 nt, Artificial Sequence
  Synthetic
gucuuuugguuacaggguga

SEQ ID NO: 231377 - RNA, 21 nt, Artificial Sequence
  Synthetic
ggucuuuugguuacaggguga

SEQ ID NO: 231378 - RNA, 22 nt, Artificial Sequence
  Synthetic
uggucuuuugguuacaggguga

SEQ ID NO: 231379 - RNA, 23 nt, Artificial Sequence
  Synthetic
auggucuuuugguuacaggguga

SEQ ID NO: 231380 - RNA, 24 nt, Artificial Sequence
  Synthetic
aauggucuuuugguuacaggguga

SEQ ID NO: 231381 - RNA, 18 nt, Artificial Sequence
  Synthetic
ugguccuuugcaggguga

SEQ ID NO: 231382 - RNA, 19 nt, Artificial Sequence
  Synthetic
uugguccuuugcaggguga

SEQ ID NO: 231383 - RNA, 20 nt, Artificial Sequence
  Synthetic
uuugguccuuugcaggguga

SEQ ID NO: 231384 - RNA, 21 nt, Artificial Sequence
  Synthetic
auuugguccuuugcaggguga

SEQ ID NO: 231385 - RNA, 22 nt, Artificial Sequence
  Synthetic
cauuugguccuuugcaggguga

SEQ ID NO: 231386 - RNA, 23 nt, Artificial Sequence
  Synthetic
acauuugguccuuugcaggguga

SEQ ID NO: 231387 - RNA, 24 nt, Artificial Sequence
  Synthetic
aacauuugguccuuugcaggguga

SEQ ID NO: 231388 - RNA, 18 nt, Artificial Sequence
  Synthetic
gaaaagaauucaggguga

SEQ ID NO: 231389 - RNA, 19 nt, Artificial Sequence
  Synthetic
ggaaaagaauucaggguga

SEQ ID NO: 231390 - RNA, 20 nt, Artificial Sequence
  Synthetic
aggaaaagaauucaggguga

SEQ ID NO: 231391 - RNA, 21 nt, Artificial Sequence
  Synthetic
aaggaaaagaauucaggguga

SEQ ID NO: 231392 - RNA, 22 nt, Artificial Sequence
  Synthetic
aaaggaaaagaauucaggguga

SEQ ID NO: 231393 - RNA, 23 nt, Artificial Sequence
  Synthetic
aaaaggaaaagaauucaggguga

SEQ ID NO: 231394 - RNA, 24 nt, Artificial Sequence
  Synthetic
aaaaaggaaaagaauucaggguga

SEQ ID NO: 231395 - RNA, 18 nt, Artificial Sequence
  Synthetic
aaggcuuugauaggguga

SEQ ID NO: 231396 - RNA, 19 nt, Artificial Sequence
  Synthetic
caaggcuuugauaggguga

SEQ ID NO: 231397 - RNA, 20 nt, Artificial Sequence
  Synthetic
acaaggcuuugauaggguga

SEQ ID NO: 231398 - RNA, 21 nt, Artificial Sequence
  Synthetic
aacaaggcuuugauaggguga

SEQ ID NO: 231399 - RNA, 22 nt, Artificial Sequence
  Synthetic
aaacaaggcuuugauaggguga

SEQ ID NO: 231400 - RNA, 23 nt, Artificial Sequence
  Synthetic
uaaacaaggcuuugauaggguga

SEQ ID NO: 231401 - RNA, 24 nt, Artificial Sequence
  Synthetic
guaaacaaggcuuugauaggguga

SEQ ID NO: 231402 - RNA, 18 nt, Artificial Sequence
  Synthetic
uaccaagcccuaggguga

SEQ ID NO: 231403 - RNA, 19 nt, Artificial Sequence
  Synthetic
guaccaagcccuaggguga

SEQ ID NO: 231404 - RNA, 20 nt, Artificial Sequence
  Synthetic
gguaccaagcccuaggguga

SEQ ID NO: 231405 - RNA, 21 nt, Artificial Sequence
  Synthetic
ugguaccaagcccuaggguga

SEQ ID NO: 231406 - RNA, 22 nt, Artificial Sequence
  Synthetic
cugguaccaagcccuaggguga

SEQ ID NO: 231407 - RNA, 23 nt, Artificial Sequence
  Synthetic
ucugguaccaagcccuaggguga

SEQ ID NO: 231408 - RNA, 24 nt, Artificial Sequence
  Synthetic
gucugguaccaagcccuaggguga

SEQ ID NO: 231409 - RNA, 18 nt, Artificial Sequence
  Synthetic
gagacaccuaggggguga

SEQ ID NO: 231410 - RNA, 19 nt, Artificial Sequence
  Synthetic
ggagacaccuaggggguga

SEQ ID NO: 231411 - RNA, 20 nt, Artificial Sequence
  Synthetic
gggagacaccuaggggguga

SEQ ID NO: 231412 - RNA, 21 nt, Artificial Sequence
  Synthetic
agggagacaccuaggggguga

SEQ ID NO: 231413 - RNA, 22 nt, Artificial Sequence
  Synthetic
gagggagacaccuaggggguga

SEQ ID NO: 231414 - RNA, 23 nt, Artificial Sequence
  Synthetic
ugagggagacaccuaggggguga

SEQ ID NO: 231415 - RNA, 24 nt, Artificial Sequence
  Synthetic
augagggagacaccuaggggguga

SEQ ID NO: 231416 - RNA, 18 nt, Artificial Sequence
  Synthetic
ggaacuauuuauggguga

SEQ ID NO: 231417 - RNA, 19 nt, Artificial Sequence
  Synthetic
uggaacuauuuauggguga

SEQ ID NO: 231418 - RNA, 20 nt, Artificial Sequence
  Synthetic
uuggaacuauuuauggguga

SEQ ID NO: 231419 - RNA, 21 nt, Artificial Sequence
  Synthetic
uuuggaacuauuuauggguga

SEQ ID NO: 231420 - RNA, 22 nt, Artificial Sequence
  Synthetic
uuuuggaacuauuuauggguga

SEQ ID NO: 231421 - RNA, 23 nt, Artificial Sequence
  Synthetic
uuuuuggaacuauuuauggguga

SEQ ID NO: 231422 - RNA, 24 nt, Artificial Sequence
  Synthetic
auuuuuggaacuauuuauggguga

SEQ ID NO: 231423 - RNA, 18 nt, Artificial Sequence
  Synthetic
gcacuccagacuggguga

SEQ ID NO: 231424 - RNA, 19 nt, Artificial Sequence
  Synthetic
ugcacuccagacuggguga

SEQ ID NO: 231425 - RNA, 20 nt, Artificial Sequence
  Synthetic
cugcacuccagacuggguga

SEQ ID NO: 231426 - RNA, 21 nt, Artificial Sequence
  Synthetic
acugcacuccagacuggguga

SEQ ID NO: 231427 - RNA, 22 nt, Artificial Sequence
  Synthetic
cacugcacuccagacuggguga

SEQ ID NO: 231428 - RNA, 23 nt, Artificial Sequence
  Synthetic
ccacugcacuccagacuggguga

SEQ ID NO: 231429 - RNA, 24 nt, Artificial Sequence
  Synthetic
gccacugcacuccagacuggguga

SEQ ID NO: 231430 - RNA, 18 nt, Artificial Sequence
  Synthetic
gaagugaugacuggguga

SEQ ID NO: 231431 - RNA, 19 nt, Artificial Sequence
  Synthetic
ugaagugaugacuggguga

SEQ ID NO: 231432 - RNA, 20 nt, Artificial Sequence
  Synthetic
augaagugaugacuggguga

SEQ ID NO: 231433 - RNA, 21 nt, Artificial Sequence
  Synthetic
uaugaagugaugacuggguga

SEQ ID NO: 231434 - RNA, 22 nt, Artificial Sequence
  Synthetic
cuaugaagugaugacuggguga

SEQ ID NO: 231435 - RNA, 23 nt, Artificial Sequence
  Synthetic
acuaugaagugaugacuggguga

SEQ ID NO: 231436 - RNA, 24 nt, Artificial Sequence
  Synthetic
aacuaugaagugaugacuggguga

SEQ ID NO: 231437 - RNA, 18 nt, Artificial Sequence
  Synthetic
gcaccccagccuggguga

SEQ ID NO: 231438 - RNA, 19 nt, Artificial Sequence
  Synthetic
ugcaccccagccuggguga

SEQ ID NO: 231439 - RNA, 20 nt, Artificial Sequence
  Synthetic
cugcaccccagccuggguga

SEQ ID NO: 231440 - RNA, 21 nt, Artificial Sequence
  Synthetic
acugcaccccagccuggguga

SEQ ID NO: 231441 - RNA, 22 nt, Artificial Sequence
  Synthetic
cacugcaccccagccuggguga

SEQ ID NO: 231442 - RNA, 23 nt, Artificial Sequence
  Synthetic
ccacugcaccccagccuggguga

SEQ ID NO: 231443 - RNA, 24 nt, Artificial Sequence
  Synthetic
gccacugcaccccagccuggguga

SEQ ID NO: 231444 - RNA, 18 nt, Artificial Sequence
  Synthetic
ccacuccagccuggguga

SEQ ID NO: 231445 - RNA, 19 nt, Artificial Sequence
  Synthetic
uccacuccagccuggguga

SEQ ID NO: 231446 - RNA, 20 nt, Artificial Sequence
  Synthetic
cuccacuccagccuggguga

SEQ ID NO: 231447 - RNA, 23 nt, Artificial Sequence
  Synthetic
acacuccacuccagccuggguga

SEQ ID NO: 231448 - RNA, 24 nt, Artificial Sequence
  Synthetic
gacacuccacuccagccuggguga

SEQ ID NO: 231449 - RNA, 18 nt, Artificial Sequence
  Synthetic
gcacuccagccuggguga

SEQ ID NO: 231450 - RNA, 19 nt, Artificial Sequence
  Synthetic
ugcacuccagccuggguga

SEQ ID NO: 231451 - RNA, 20 nt, Artificial Sequence
  Synthetic
cugcacuccagccuggguga

SEQ ID NO: 231452 - RNA, 24 nt, Artificial Sequence
  Synthetic
gccacugcacuccagccuggguga

SEQ ID NO: 231453 - RNA, 18 nt, Artificial Sequence
  Synthetic
gugcuccagccuggguga

SEQ ID NO: 231454 - RNA, 19 nt, Artificial Sequence
  Synthetic
ugugcuccagccuggguga

SEQ ID NO: 231455 - RNA, 20 nt, Artificial Sequence
  Synthetic
cugugcuccagccuggguga

SEQ ID NO: 231456 - RNA, 21 nt, Artificial Sequence
  Synthetic
acugugcuccagccuggguga

SEQ ID NO: 231457 - RNA, 22 nt, Artificial Sequence
  Synthetic
cacugugcuccagccuggguga

SEQ ID NO: 231458 - RNA, 23 nt, Artificial Sequence
  Synthetic
ccacugugcuccagccuggguga

SEQ ID NO: 231459 - RNA, 24 nt, Artificial Sequence
  Synthetic
gccacugugcuccagccuggguga

SEQ ID NO: 231460 - RNA, 18 nt, Artificial Sequence
  Synthetic
gcauuccagccuggguga

SEQ ID NO: 231461 - RNA, 19 nt, Artificial Sequence
  Synthetic
ugcauuccagccuggguga

SEQ ID NO: 231462 - RNA, 20 nt, Artificial Sequence
  Synthetic
cugcauuccagccuggguga

SEQ ID NO: 231463 - RNA, 21 nt, Artificial Sequence
  Synthetic
acugcauuccagccuggguga

SEQ ID NO: 231464 - RNA, 22 nt, Artificial Sequence
  Synthetic
cacugcauuccagccuggguga

SEQ ID NO: 231465 - RNA, 23 nt, Artificial Sequence
  Synthetic
ccacugcauuccagccuggguga

SEQ ID NO: 231466 - RNA, 24 nt, Artificial Sequence
  Synthetic
accacugcauuccagccuggguga

SEQ ID NO: 231467 - RNA, 18 nt, Artificial Sequence
  Synthetic
gcacucuagccuggguga

SEQ ID NO: 231468 - RNA, 19 nt, Artificial Sequence
  Synthetic
ugcacucuagccuggguga

SEQ ID NO: 231469 - RNA, 20 nt, Artificial Sequence
  Synthetic
cugcacucuagccuggguga

SEQ ID NO: 231470 - RNA, 21 nt, Artificial Sequence
  Synthetic
acugcacucuagccuggguga

SEQ ID NO: 231471 - RNA, 22 nt, Artificial Sequence
  Synthetic
cacugcacucuagccuggguga

SEQ ID NO: 231472 - RNA, 23 nt, Artificial Sequence
  Synthetic
ccacugcacucuagccuggguga

SEQ ID NO: 231473 - RNA, 24 nt, Artificial Sequence
  Synthetic
accacugcacucuagccuggguga

SEQ ID NO: 231474 - RNA, 18 nt, Artificial Sequence
  Synthetic
acguccagugcuggguga

SEQ ID NO: 231475 - RNA, 19 nt, Artificial Sequence
  Synthetic
cacguccagugcuggguga

SEQ ID NO: 231476 - RNA, 20 nt, Artificial Sequence
  Synthetic
gcacguccagugcuggguga

SEQ ID NO: 231477 - RNA, 21 nt, Artificial Sequence
  Synthetic
ugcacguccagugcuggguga

SEQ ID NO: 231478 - RNA, 22 nt, Artificial Sequence
  Synthetic
cugcacguccagugcuggguga

SEQ ID NO: 231479 - RNA, 23 nt, Artificial Sequence
  Synthetic
acugcacguccagugcuggguga

SEQ ID NO: 231480 - RNA, 24 nt, Artificial Sequence
  Synthetic
cacugcacguccagugcuggguga

SEQ ID NO: 231481 - RNA, 18 nt, Artificial Sequence
  Synthetic
auaucauaguuuggguga

SEQ ID NO: 231482 - RNA, 19 nt, Artificial Sequence
  Synthetic
aauaucauaguuuggguga

SEQ ID NO: 231483 - RNA, 20 nt, Artificial Sequence
  Synthetic
uaauaucauaguuuggguga

SEQ ID NO: 231484 - RNA, 21 nt, Artificial Sequence
  Synthetic
auaauaucauaguuuggguga

SEQ ID NO: 231485 - RNA, 22 nt, Artificial Sequence
  Synthetic
gauaauaucauaguuuggguga

SEQ ID NO: 231486 - RNA, 23 nt, Artificial Sequence
  Synthetic
agauaauaucauaguuuggguga

SEQ ID NO: 231487 - RNA, 24 nt, Artificial Sequence
  Synthetic
aagauaauaucauaguuuggguga

SEQ ID NO: 231488 - RNA, 18 nt, Artificial Sequence
  Synthetic
caggaguauuuuggguga

SEQ ID NO: 231489 - RNA, 19 nt, Artificial Sequence
  Synthetic
gcaggaguauuuuggguga

SEQ ID NO: 231490 - RNA, 20 nt, Artificial Sequence
  Synthetic
ggcaggaguauuuuggguga

SEQ ID NO: 231491 - RNA, 21 nt, Artificial Sequence
  Synthetic
gggcaggaguauuuuggguga

SEQ ID NO: 231492 - RNA, 22 nt, Artificial Sequence
  Synthetic
agggcaggaguauuuuggguga

SEQ ID NO: 231493 - RNA, 23 nt, Artificial Sequence
  Synthetic
gagggcaggaguauuuuggguga

SEQ ID NO: 231494 - RNA, 24 nt, Artificial Sequence
  Synthetic
ggagggcaggaguauuuuggguga

SEQ ID NO: 231495 - RNA, 18 nt, Artificial Sequence
  Synthetic
guguaugggguaugguga

SEQ ID NO: 231496 - RNA, 19 nt, Artificial Sequence
  Synthetic
uguguaugggguaugguga

SEQ ID NO: 231497 - RNA, 20 nt, Artificial Sequence
  Synthetic
uuguguaugggguaugguga

SEQ ID NO: 231498 - RNA, 21 nt, Artificial Sequence
  Synthetic
cuuguguaugggguaugguga

SEQ ID NO: 231499 - RNA, 22 nt, Artificial Sequence
  Synthetic
ccuuguguaugggguaugguga

SEQ ID NO: 231500 - RNA, 23 nt, Artificial Sequence
  Synthetic
cccuuguguaugggguaugguga

SEQ ID NO: 231501 - RNA, 24 nt, Artificial Sequence
  Synthetic
gcccuuguguaugggguaugguga

SEQ ID NO: 231502 - RNA, 18 nt, Artificial Sequence
  Synthetic
uguauuccagccugguga

SEQ ID NO: 231503 - RNA, 19 nt, Artificial Sequence
  Synthetic
cuguauuccagccugguga

SEQ ID NO: 231504 - RNA, 20 nt, Artificial Sequence
  Synthetic
acuguauuccagccugguga

SEQ ID NO: 231505 - RNA, 21 nt, Artificial Sequence
  Synthetic
cacuguauuccagccugguga

SEQ ID NO: 231506 - RNA, 22 nt, Artificial Sequence
  Synthetic
ccacuguauuccagccugguga

SEQ ID NO: 231507 - RNA, 23 nt, Artificial Sequence
  Synthetic
accacuguauuccagccugguga

SEQ ID NO: 231508 - RNA, 24 nt, Artificial Sequence
  Synthetic
caccacuguauuccagccugguga

SEQ ID NO: 231509 - RNA, 18 nt, Artificial Sequence
  Synthetic
gacuccacaaucugguga

SEQ ID NO: 231510 - RNA, 19 nt, Artificial Sequence
  Synthetic
agacuccacaaucugguga

SEQ ID NO: 231511 - RNA, 20 nt, Artificial Sequence
  Synthetic
cagacuccacaaucugguga

SEQ ID NO: 231512 - RNA, 21 nt, Artificial Sequence
  Synthetic
acagacuccacaaucugguga

SEQ ID NO: 231513 - RNA, 22 nt, Artificial Sequence
  Synthetic
cacagacuccacaaucugguga

SEQ ID NO: 231514 - RNA, 23 nt, Artificial Sequence
  Synthetic
ucacagacuccacaaucugguga

SEQ ID NO: 231515 - RNA, 24 nt, Artificial Sequence
  Synthetic
uucacagacuccacaaucugguga

SEQ ID NO: 231516 - RNA, 18 nt, Artificial Sequence
  Synthetic
acuucucaucucugguga

SEQ ID NO: 231517 - RNA, 19 nt, Artificial Sequence
  Synthetic
aacuucucaucucugguga

SEQ ID NO: 231518 - RNA, 20 nt, Artificial Sequence
  Synthetic
caacuucucaucucugguga

SEQ ID NO: 231519 - RNA, 21 nt, Artificial Sequence
  Synthetic
acaacuucucaucucugguga

SEQ ID NO: 231520 - RNA, 22 nt, Artificial Sequence
  Synthetic
gacaacuucucaucucugguga

SEQ ID NO: 231521 - RNA, 23 nt, Artificial Sequence
  Synthetic
cgacaacuucucaucucugguga

SEQ ID NO: 231522 - RNA, 24 nt, Artificial Sequence
  Synthetic
gcgacaacuucucaucucugguga

SEQ ID NO: 231523 - RNA, 18 nt, Artificial Sequence
  Synthetic
uagaaggaucagugguga

SEQ ID NO: 231524 - RNA, 19 nt, Artificial Sequence
  Synthetic
auagaaggaucagugguga

SEQ ID NO: 231525 - RNA, 20 nt, Artificial Sequence
  Synthetic
gauagaaggaucagugguga

SEQ ID NO: 231526 - RNA, 21 nt, Artificial Sequence
  Synthetic
ugauagaaggaucagugguga

SEQ ID NO: 231527 - RNA, 22 nt, Artificial Sequence
  Synthetic
uugauagaaggaucagugguga

SEQ ID NO: 231528 - RNA, 23 nt, Artificial Sequence
  Synthetic
auugauagaaggaucagugguga

SEQ ID NO: 231529 - RNA, 24 nt, Artificial Sequence
  Synthetic
uauugauagaaggaucagugguga

SEQ ID NO: 231530 - RNA, 18 nt, Artificial Sequence
  Synthetic
guugaauaggagugguga

SEQ ID NO: 231531 - RNA, 19 nt, Artificial Sequence
  Synthetic
uguugaauaggagugguga

SEQ ID NO: 231532 - RNA, 20 nt, Artificial Sequence
  Synthetic
auguugaauaggagugguga

SEQ ID NO: 231533 - RNA, 21 nt, Artificial Sequence
  Synthetic
uauguugaauaggagugguga

SEQ ID NO: 231534 - RNA, 22 nt, Artificial Sequence
  Synthetic
cuauguugaauaggagugguga

SEQ ID NO: 231535 - RNA, 23 nt, Artificial Sequence
  Synthetic
acuauguugaauaggagugguga

SEQ ID NO: 231536 - RNA, 24 nt, Artificial Sequence
  Synthetic
cacuauguugaauaggagugguga

SEQ ID NO: 231537 - RNA, 24 nt, Artificial Sequence
  Synthetic
uacuauguugaauaggagugguga

SEQ ID NO: 231538 - RNA, 18 nt, Artificial Sequence
  Synthetic
accagugucaggugguga

SEQ ID NO: 231539 - RNA, 19 nt, Artificial Sequence
  Synthetic
gaccagugucaggugguga

SEQ ID NO: 231540 - RNA, 20 nt, Artificial Sequence
  Synthetic
agaccagugucaggugguga

SEQ ID NO: 231541 - RNA, 21 nt, Artificial Sequence
  Synthetic
uagaccagugucaggugguga

SEQ ID NO: 231542 - RNA, 22 nt, Artificial Sequence
  Synthetic
auagaccagugucaggugguga

SEQ ID NO: 231543 - RNA, 23 nt, Artificial Sequence
  Synthetic
aauagaccagugucaggugguga

SEQ ID NO: 231544 - RNA, 24 nt, Artificial Sequence
  Synthetic
uaauagaccagugucaggugguga

SEQ ID NO: 231545 - RNA, 18 nt, Artificial Sequence
  Synthetic
ugacgguuagggugguga

SEQ ID NO: 231546 - RNA, 19 nt, Artificial Sequence
  Synthetic
augacgguuagggugguga

SEQ ID NO: 231547 - RNA, 20 nt, Artificial Sequence
  Synthetic
gaugacgguuagggugguga

SEQ ID NO: 231548 - RNA, 21 nt, Artificial Sequence
  Synthetic
ugaugacgguuagggugguga

SEQ ID NO: 231549 - RNA, 22 nt, Artificial Sequence
  Synthetic
augaugacgguuagggugguga

SEQ ID NO: 231550 - RNA, 23 nt, Artificial Sequence
  Synthetic
gaugaugacgguuagggugguga

SEQ ID NO: 231551 - RNA, 24 nt, Artificial Sequence
  Synthetic
ugaugaugacgguuagggugguga

SEQ ID NO: 231552 - RNA, 18 nt, Artificial Sequence
  Synthetic
aaggaggaauggugguga

SEQ ID NO: 231553 - RNA, 19 nt, Artificial Sequence
  Synthetic
gaaggaggaauggugguga

SEQ ID NO: 231554 - RNA, 20 nt, Artificial Sequence
  Synthetic
agaaggaggaauggugguga

SEQ ID NO: 231555 - RNA, 21 nt, Artificial Sequence
  Synthetic
aagaaggaggaauggugguga

SEQ ID NO: 231556 - RNA, 22 nt, Artificial Sequence
  Synthetic
gaagaaggaggaauggugguga

SEQ ID NO: 231557 - RNA, 23 nt, Artificial Sequence
  Synthetic
ggaagaaggaggaauggugguga

SEQ ID NO: 231558 - RNA, 24 nt, Artificial Sequence
  Synthetic
aggaagaaggaggaauggugguga

SEQ ID NO: 231559 - RNA, 18 nt, Artificial Sequence
  Synthetic
aggcauagguugugguga

SEQ ID NO: 231560 - RNA, 19 nt, Artificial Sequence
  Synthetic
gaggcauagguugugguga

SEQ ID NO: 231561 - RNA, 20 nt, Artificial Sequence
  Synthetic
ggaggcauagguugugguga

SEQ ID NO: 231562 - RNA, 21 nt, Artificial Sequence
  Synthetic
uggaggcauagguugugguga

SEQ ID NO: 231563 - RNA, 22 nt, Artificial Sequence
  Synthetic
cuggaggcauagguugugguga

SEQ ID NO: 231564 - RNA, 23 nt, Artificial Sequence
  Synthetic
ccuggaggcauagguugugguga

SEQ ID NO: 231565 - RNA, 24 nt, Artificial Sequence
  Synthetic
cccuggaggcauagguugugguga

SEQ ID NO: 231566 - RNA, 18 nt, Artificial Sequence
  Synthetic
uuuugaacuuugugguga

SEQ ID NO: 231567 - RNA, 19 nt, Artificial Sequence
  Synthetic
uuuuugaacuuugugguga

SEQ ID NO: 231568 - RNA, 20 nt, Artificial Sequence
  Synthetic
guuuuugaacuuugugguga

SEQ ID NO: 231569 - RNA, 21 nt, Artificial Sequence
  Synthetic
uguuuuugaacuuugugguga

SEQ ID NO: 231570 - RNA, 22 nt, Artificial Sequence
  Synthetic
uuguuuuugaacuuugugguga

SEQ ID NO: 231571 - RNA, 23 nt, Artificial Sequence
  Synthetic
uuuguuuuugaacuuugugguga

SEQ ID NO: 231572 - RNA, 24 nt, Artificial Sequence
  Synthetic
guuuguuuuugaacuuugugguga

SEQ ID NO: 231573 - RNA, 18 nt, Artificial Sequence
  Synthetic
gugaguggauuuugguga

SEQ ID NO: 231574 - RNA, 19 nt, Artificial Sequence
  Synthetic
ugugaguggauuuugguga

SEQ ID NO: 231575 - RNA, 20 nt, Artificial Sequence
  Synthetic
gugugaguggauuuugguga

SEQ ID NO: 231576 - RNA, 21 nt, Artificial Sequence
  Synthetic
agugugaguggauuuugguga

SEQ ID NO: 231577 - RNA, 22 nt, Artificial Sequence
  Synthetic
aagugugaguggauuuugguga

SEQ ID NO: 231578 - RNA, 23 nt, Artificial Sequence
  Synthetic
aaagugugaguggauuuugguga

SEQ ID NO: 231579 - RNA, 24 nt, Artificial Sequence
  Synthetic
aaaagugugaguggauuuugguga

SEQ ID NO: 231580 - RNA, 18 nt, Artificial Sequence
  Synthetic
gugcuaauuaaaauguga

SEQ ID NO: 231581 - RNA, 19 nt, Artificial Sequence
  Synthetic
ggugcuaauuaaaauguga

SEQ ID NO: 231582 - RNA, 20 nt, Artificial Sequence
  Synthetic
uggugcuaauuaaaauguga

SEQ ID NO: 231583 - RNA, 21 nt, Artificial Sequence
  Synthetic
uuggugcuaauuaaaauguga

SEQ ID NO: 231584 - RNA, 22 nt, Artificial Sequence
  Synthetic
uuuggugcuaauuaaaauguga

SEQ ID NO: 231585 - RNA, 23 nt, Artificial Sequence
  Synthetic
auuuggugcuaauuaaaauguga

SEQ ID NO: 231586 - RNA, 24 nt, Artificial Sequence
  Synthetic
aauuuggugcuaauuaaaauguga

SEQ ID NO: 231587 - RNA, 18 nt, Artificial Sequence
  Synthetic
uaauuguaggaaauguga

SEQ ID NO: 231588 - RNA, 19 nt, Artificial Sequence
  Synthetic
auaauuguaggaaauguga

SEQ ID NO: 231589 - RNA, 20 nt, Artificial Sequence
  Synthetic
uauaauuguaggaaauguga

SEQ ID NO: 231590 - RNA, 21 nt, Artificial Sequence
  Synthetic
uuauaauuguaggaaauguga

SEQ ID NO: 231591 - RNA, 22 nt, Artificial Sequence
  Synthetic
auuauaauuguaggaaauguga

SEQ ID NO: 231592 - RNA, 23 nt, Artificial Sequence
  Synthetic
aauuauaauuguaggaaauguga

SEQ ID NO: 231593 - RNA, 24 nt, Artificial Sequence
  Synthetic
aaauuauaauuguaggaaauguga

SEQ ID NO: 231594 - RNA, 18 nt, Artificial Sequence
  Synthetic
uuuuuucccuaaauguga

SEQ ID NO: 231595 - RNA, 19 nt, Artificial Sequence
  Synthetic
auuuuuucccuaaauguga

SEQ ID NO: 231596 - RNA, 20 nt, Artificial Sequence
  Synthetic
uauuuuuucccuaaauguga

SEQ ID NO: 231597 - RNA, 21 nt, Artificial Sequence
  Synthetic
auauuuuuucccuaaauguga

SEQ ID NO: 231598 - RNA, 22 nt, Artificial Sequence
  Synthetic
cauauuuuuucccuaaauguga

SEQ ID NO: 231599 - RNA, 23 nt, Artificial Sequence
  Synthetic
ccauauuuuuucccuaaauguga

SEQ ID NO: 231600 - RNA, 24 nt, Artificial Sequence
  Synthetic
cccauauuuuuucccuaaauguga

SEQ ID NO: 231601 - RNA, 18 nt, Artificial Sequence
  Synthetic
ugcagccuaacaauguga

SEQ ID NO: 231602 - RNA, 19 nt, Artificial Sequence
  Synthetic
cugcagccuaacaauguga

SEQ ID NO: 231603 - RNA, 20 nt, Artificial Sequence
  Synthetic
ucugcagccuaacaauguga

SEQ ID NO: 231604 - RNA, 21 nt, Artificial Sequence
  Synthetic
aucugcagccuaacaauguga

SEQ ID NO: 231605 - RNA, 22 nt, Artificial Sequence
  Synthetic
aaucugcagccuaacaauguga

SEQ ID NO: 231606 - RNA, 23 nt, Artificial Sequence
  Synthetic
aaaucugcagccuaacaauguga

SEQ ID NO: 231607 - RNA, 24 nt, Artificial Sequence
  Synthetic
aaaaucugcagccuaacaauguga

SEQ ID NO: 231608 - RNA, 18 nt, Artificial Sequence
  Synthetic
acacaacacacaauguga

SEQ ID NO: 231609 - RNA, 19 nt, Artificial Sequence
  Synthetic
cacacaacacacaauguga

SEQ ID NO: 231610 - RNA, 20 nt, Artificial Sequence
  Synthetic
acacacaacacacaauguga

SEQ ID NO: 231611 - RNA, 21 nt, Artificial Sequence
  Synthetic
aacacacaacacacaauguga

SEQ ID NO: 231612 - RNA, 22 nt, Artificial Sequence
  Synthetic
caacacacaacacacaauguga

SEQ ID NO: 231613 - RNA, 23 nt, Artificial Sequence
  Synthetic
acaacacacaacacacaauguga

SEQ ID NO: 231614 - RNA, 24 nt, Artificial Sequence
  Synthetic
cacaacacacaacacacaauguga

SEQ ID NO: 231615 - RNA, 18 nt, Artificial Sequence
  Synthetic
ggaucuguggcaauguga

SEQ ID NO: 231616 - RNA, 19 nt, Artificial Sequence
  Synthetic
uggaucuguggcaauguga

SEQ ID NO: 231617 - RNA, 20 nt, Artificial Sequence
  Synthetic
cuggaucuguggcaauguga

SEQ ID NO: 231618 - RNA, 21 nt, Artificial Sequence
  Synthetic
ccuggaucuguggcaauguga

SEQ ID NO: 231619 - RNA, 22 nt, Artificial Sequence
  Synthetic
accuggaucuguggcaauguga

SEQ ID NO: 231620 - RNA, 23 nt, Artificial Sequence
  Synthetic
caccuggaucuguggcaauguga

SEQ ID NO: 231621 - RNA, 24 nt, Artificial Sequence
  Synthetic
ccaccuggaucuguggcaauguga

SEQ ID NO: 231622 - RNA, 18 nt, Artificial Sequence
  Synthetic
augaccuuaagaauguga

SEQ ID NO: 231623 - RNA, 19 nt, Artificial Sequence
  Synthetic
uaugaccuuaagaauguga

SEQ ID NO: 231624 - RNA, 20 nt, Artificial Sequence
  Synthetic
uuaugaccuuaagaauguga

SEQ ID NO: 231625 - RNA, 21 nt, Artificial Sequence
  Synthetic
cuuaugaccuuaagaauguga

SEQ ID NO: 231626 - RNA, 22 nt, Artificial Sequence
  Synthetic
ccuuaugaccuuaagaauguga

SEQ ID NO: 231627 - RNA, 23 nt, Artificial Sequence
  Synthetic
uccuuaugaccuuaagaauguga

SEQ ID NO: 231628 - RNA, 24 nt, Artificial Sequence
  Synthetic
uuccuuaugaccuuaagaauguga

SEQ ID NO: 231629 - RNA, 18 nt, Artificial Sequence
  Synthetic
ccaaaauucagaauguga

SEQ ID NO: 231630 - RNA, 19 nt, Artificial Sequence
  Synthetic
uccaaaauucagaauguga

SEQ ID NO: 231631 - RNA, 20 nt, Artificial Sequence
  Synthetic
auccaaaauucagaauguga

SEQ ID NO: 231632 - RNA, 21 nt, Artificial Sequence
  Synthetic
gauccaaaauucagaauguga

SEQ ID NO: 231633 - RNA, 22 nt, Artificial Sequence
  Synthetic
agauccaaaauucagaauguga

SEQ ID NO: 231634 - RNA, 23 nt, Artificial Sequence
  Synthetic
aagauccaaaauucagaauguga

SEQ ID NO: 231635 - RNA, 24 nt, Artificial Sequence
  Synthetic
aaagauccaaaauucagaauguga

SEQ ID NO: 231636 - RNA, 18 nt, Artificial Sequence
  Synthetic
uuauagacuagaauguga

SEQ ID NO: 231637 - RNA, 19 nt, Artificial Sequence
  Synthetic
cuuauagacuagaauguga

SEQ ID NO: 231638 - RNA, 20 nt, Artificial Sequence
  Synthetic
acuuauagacuagaauguga

SEQ ID NO: 231639 - RNA, 21 nt, Artificial Sequence
  Synthetic
uacuuauagacuagaauguga

SEQ ID NO: 231640 - RNA, 22 nt, Artificial Sequence
  Synthetic
cuacuuauagacuagaauguga

SEQ ID NO: 231641 - RNA, 23 nt, Artificial Sequence
  Synthetic
gcuacuuauagacuagaauguga

SEQ ID NO: 231642 - RNA, 24 nt, Artificial Sequence
  Synthetic
ugcuacuuauagacuagaauguga

SEQ ID NO: 231643 - RNA, 18 nt, Artificial Sequence
  Synthetic
gugaccaauugaauguga

SEQ ID NO: 231644 - RNA, 19 nt, Artificial Sequence
  Synthetic
ugugaccaauugaauguga

SEQ ID NO: 231645 - RNA, 20 nt, Artificial Sequence
  Synthetic
uugugaccaauugaauguga

SEQ ID NO: 231646 - RNA, 21 nt, Artificial Sequence
  Synthetic
guugugaccaauugaauguga

SEQ ID NO: 231647 - RNA, 22 nt, Artificial Sequence
  Synthetic
aguugugaccaauugaauguga

SEQ ID NO: 231648 - RNA, 23 nt, Artificial Sequence
  Synthetic
uaguugugaccaauugaauguga

SEQ ID NO: 231649 - RNA, 24 nt, Artificial Sequence
  Synthetic
cuaguugugaccaauugaauguga

SEQ ID NO: 231650 - RNA, 18 nt, Artificial Sequence
  Synthetic
uuuguaaaauuaauguga

SEQ ID NO: 231651 - RNA, 19 nt, Artificial Sequence
  Synthetic
uuuuguaaaauuaauguga

SEQ ID NO: 231652 - RNA, 20 nt, Artificial Sequence
  Synthetic
uuuuuguaaaauuaauguga

SEQ ID NO: 231653 - RNA, 21 nt, Artificial Sequence
  Synthetic
guuuuuguaaaauuaauguga

SEQ ID NO: 231654 - RNA, 22 nt, Artificial Sequence
  Synthetic
aguuuuuguaaaauuaauguga

SEQ ID NO: 231655 - RNA, 23 nt, Artificial Sequence
  Synthetic
aaguuuuuguaaaauuaauguga

SEQ ID NO: 231656 - RNA, 24 nt, Artificial Sequence
  Synthetic
caaguuuuuguaaaauuaauguga

SEQ ID NO: 231657 - RNA, 18 nt, Artificial Sequence
  Synthetic
aggcuucagcccauguga

SEQ ID NO: 231658 - RNA, 19 nt, Artificial Sequence
  Synthetic
gaggcuucagcccauguga

SEQ ID NO: 231659 - RNA, 20 nt, Artificial Sequence
  Synthetic
ugaggcuucagcccauguga

SEQ ID NO: 231660 - RNA, 21 nt, Artificial Sequence
  Synthetic
cugaggcuucagcccauguga

SEQ ID NO: 231661 - RNA, 22 nt, Artificial Sequence
  Synthetic
acugaggcuucagcccauguga

SEQ ID NO: 231662 - RNA, 23 nt, Artificial Sequence
  Synthetic
uacugaggcuucagcccauguga

SEQ ID NO: 231663 - RNA, 24 nt, Artificial Sequence
  Synthetic
cuacugaggcuucagcccauguga

SEQ ID NO: 231664 - RNA, 18 nt, Artificial Sequence
  Synthetic
ugguaauaguagauguga

SEQ ID NO: 231665 - RNA, 19 nt, Artificial Sequence
  Synthetic
cugguaauaguagauguga

SEQ ID NO: 231666 - RNA, 20 nt, Artificial Sequence
  Synthetic
acugguaauaguagauguga

SEQ ID NO: 231667 - RNA, 21 nt, Artificial Sequence
  Synthetic
uacugguaauaguagauguga

SEQ ID NO: 231668 - RNA, 22 nt, Artificial Sequence
  Synthetic
guacugguaauaguagauguga

SEQ ID NO: 231669 - RNA, 23 nt, Artificial Sequence
  Synthetic
uguacugguaauaguagauguga

SEQ ID NO: 231670 - RNA, 24 nt, Artificial Sequence
  Synthetic
auguacugguaauaguagauguga

SEQ ID NO: 231671 - RNA, 18 nt, Artificial Sequence
  Synthetic
guggaaauaucuauguga

SEQ ID NO: 231672 - RNA, 19 nt, Artificial Sequence
  Synthetic
aguggaaauaucuauguga

SEQ ID NO: 231673 - RNA, 20 nt, Artificial Sequence
  Synthetic
uaguggaaauaucuauguga

SEQ ID NO: 231674 - RNA, 21 nt, Artificial Sequence
  Synthetic
uuaguggaaauaucuauguga

SEQ ID NO: 231675 - RNA, 22 nt, Artificial Sequence
  Synthetic
auuaguggaaauaucuauguga

SEQ ID NO: 231676 - RNA, 23 nt, Artificial Sequence
  Synthetic
uauuaguggaaauaucuauguga

SEQ ID NO: 231677 - RNA, 24 nt, Artificial Sequence
  Synthetic
uuauuaguggaaauaucuauguga

SEQ ID NO: 231678 - RNA, 18 nt, Artificial Sequence
  Synthetic
guguguguguguauguga

SEQ ID NO: 231679 - RNA, 19 nt, Artificial Sequence
  Synthetic
uguguguguguguauguga

SEQ ID NO: 231680 - RNA, 20 nt, Artificial Sequence
  Synthetic
guguguguguguguauguga

SEQ ID NO: 231681 - RNA, 21 nt, Artificial Sequence
  Synthetic
uguguguguguguguauguga

SEQ ID NO: 231682 - RNA, 22 nt, Artificial Sequence
  Synthetic
guguguguguguguguauguga

SEQ ID NO: 231683 - RNA, 23 nt, Artificial Sequence
  Synthetic
uguguguguguguguguauguga

SEQ ID NO: 231684 - RNA, 24 nt, Artificial Sequence
  Synthetic
guguguguguguguguguauguga

SEQ ID NO: 231685 - RNA, 18 nt, Artificial Sequence
  Synthetic
aguauuuaaauuauguga

SEQ ID NO: 231686 - RNA, 19 nt, Artificial Sequence
  Synthetic
uaguauuuaaauuauguga

SEQ ID NO: 231687 - RNA, 20 nt, Artificial Sequence
  Synthetic
uuaguauuuaaauuauguga

SEQ ID NO: 231688 - RNA, 21 nt, Artificial Sequence
  Synthetic
auuaguauuuaaauuauguga

SEQ ID NO: 231689 - RNA, 22 nt, Artificial Sequence
  Synthetic
cauuaguauuuaaauuauguga

SEQ ID NO: 231690 - RNA, 23 nt, Artificial Sequence
  Synthetic
gcauuaguauuuaaauuauguga

SEQ ID NO: 231691 - RNA, 24 nt, Artificial Sequence
  Synthetic
ugcauuaguauuuaaauuauguga

SEQ ID NO: 231692 - RNA, 18 nt, Artificial Sequence
  Synthetic
uaaagagugugacuguga

SEQ ID NO: 231693 - RNA, 19 nt, Artificial Sequence
  Synthetic
cuaaagagugugacuguga

SEQ ID NO: 231694 - RNA, 20 nt, Artificial Sequence
  Synthetic
ucuaaagagugugacuguga

SEQ ID NO: 231695 - RNA, 21 nt, Artificial Sequence
  Synthetic
uucuaaagagugugacuguga

SEQ ID NO: 231696 - RNA, 22 nt, Artificial Sequence
  Synthetic
cuucuaaagagugugacuguga

SEQ ID NO: 231697 - RNA, 23 nt, Artificial Sequence
  Synthetic
ccuucuaaagagugugacuguga

SEQ ID NO: 231698 - RNA, 24 nt, Artificial Sequence
  Synthetic
gccuucuaaagagugugacuguga

SEQ ID NO: 231699 - RNA, 18 nt, Artificial Sequence
  Synthetic
ugaagacagauacuguga

SEQ ID NO: 231700 - RNA, 19 nt, Artificial Sequence
  Synthetic
cugaagacagauacuguga

SEQ ID NO: 231701 - RNA, 20 nt, Artificial Sequence
  Synthetic
gcugaagacagauacuguga

SEQ ID NO: 231702 - RNA, 21 nt, Artificial Sequence
  Synthetic
agcugaagacagauacuguga

SEQ ID NO: 231703 - RNA, 22 nt, Artificial Sequence
  Synthetic
aagcugaagacagauacuguga

SEQ ID NO: 231704 - RNA, 23 nt, Artificial Sequence
  Synthetic
gaagcugaagacagauacuguga

SEQ ID NO: 231705 - RNA, 24 nt, Artificial Sequence
  Synthetic
ugaagcugaagacagauacuguga

SEQ ID NO: 231706 - RNA, 18 nt, Artificial Sequence
  Synthetic
uuuuugagauuacuguga

SEQ ID NO: 231707 - RNA, 19 nt, Artificial Sequence
  Synthetic
cuuuuugagauuacuguga

SEQ ID NO: 231708 - RNA, 20 nt, Artificial Sequence
  Synthetic
gcuuuuugagauuacuguga

SEQ ID NO: 231709 - RNA, 21 nt, Artificial Sequence
  Synthetic
ggcuuuuugagauuacuguga

SEQ ID NO: 231710 - RNA, 22 nt, Artificial Sequence
  Synthetic
aggcuuuuugagauuacuguga

SEQ ID NO: 231711 - RNA, 23 nt, Artificial Sequence
  Synthetic
aaggcuuuuugagauuacuguga

SEQ ID NO: 231712 - RNA, 24 nt, Artificial Sequence
  Synthetic
uaaggcuuuuugagauuacuguga

SEQ ID NO: 231713 - RNA, 18 nt, Artificial Sequence
  Synthetic
caagaaguuuuacuguga

SEQ ID NO: 231714 - RNA, 19 nt, Artificial Sequence
  Synthetic
ucaagaaguuuuacuguga

SEQ ID NO: 231715 - RNA, 20 nt, Artificial Sequence
  Synthetic
uucaagaaguuuuacuguga

SEQ ID NO: 231716 - RNA, 21 nt, Artificial Sequence
  Synthetic
uuucaagaaguuuuacuguga

SEQ ID NO: 231717 - RNA, 22 nt, Artificial Sequence
  Synthetic
uuuucaagaaguuuuacuguga

SEQ ID NO: 231718 - RNA, 23 nt, Artificial Sequence
  Synthetic
uuuuucaagaaguuuuacuguga

SEQ ID NO: 231719 - RNA, 24 nt, Artificial Sequence
  Synthetic
cuuuuucaagaaguuuuacuguga

SEQ ID NO: 231720 - RNA, 18 nt, Artificial Sequence
  Synthetic
caggauuaacaccuguga

SEQ ID NO: 231721 - RNA, 19 nt, Artificial Sequence
  Synthetic
ucaggauuaacaccuguga

SEQ ID NO: 231722 - RNA, 20 nt, Artificial Sequence
  Synthetic
cucaggauuaacaccuguga

SEQ ID NO: 231723 - RNA, 21 nt, Artificial Sequence
  Synthetic
ucucaggauuaacaccuguga

SEQ ID NO: 231724 - RNA, 22 nt, Artificial Sequence
  Synthetic
cucucaggauuaacaccuguga

SEQ ID NO: 231725 - RNA, 23 nt, Artificial Sequence
  Synthetic
gcucucaggauuaacaccuguga

SEQ ID NO: 231726 - RNA, 24 nt, Artificial Sequence
  Synthetic
ugcucucaggauuaacaccuguga

SEQ ID NO: 231727 - RNA, 18 nt, Artificial Sequence
  Synthetic
uucaauucccaccuguga

SEQ ID NO: 231728 - RNA, 19 nt, Artificial Sequence
  Synthetic
guucaauucccaccuguga

SEQ ID NO: 231729 - RNA, 20 nt, Artificial Sequence
  Synthetic
uguucaauucccaccuguga

SEQ ID NO: 231730 - RNA, 21 nt, Artificial Sequence
  Synthetic
uuguucaauucccaccuguga

SEQ ID NO: 231731 - RNA, 22 nt, Artificial Sequence
  Synthetic
auuguucaauucccaccuguga

SEQ ID NO: 231732 - RNA, 23 nt, Artificial Sequence
  Synthetic
cauuguucaauucccaccuguga

SEQ ID NO: 231733 - RNA, 24 nt, Artificial Sequence
  Synthetic
ucauuguucaauucccaccuguga

SEQ ID NO: 231734 - RNA, 18 nt, Artificial Sequence
  Synthetic
acugcaaaagaccuguga

SEQ ID NO: 231735 - RNA, 19 nt, Artificial Sequence
  Synthetic
cacugcaaaagaccuguga

SEQ ID NO: 231736 - RNA, 20 nt, Artificial Sequence
  Synthetic
gcacugcaaaagaccuguga

SEQ ID NO: 231737 - RNA, 21 nt, Artificial Sequence
  Synthetic
ugcacugcaaaagaccuguga

SEQ ID NO: 231738 - RNA, 22 nt, Artificial Sequence
  Synthetic
uugcacugcaaaagaccuguga

SEQ ID NO: 231739 - RNA, 23 nt, Artificial Sequence
  Synthetic
uuugcacugcaaaagaccuguga

SEQ ID NO: 231740 - RNA, 24 nt, Artificial Sequence
  Synthetic
cuuugcacugcaaaagaccuguga

SEQ ID NO: 231741 - RNA, 18 nt, Artificial Sequence
  Synthetic
uuacaguauuuccuguga

SEQ ID NO: 231742 - RNA, 19 nt, Artificial Sequence
  Synthetic
auuacaguauuuccuguga

SEQ ID NO: 231743 - RNA, 20 nt, Artificial Sequence
  Synthetic
aauuacaguauuuccuguga

SEQ ID NO: 231744 - RNA, 21 nt, Artificial Sequence
  Synthetic
aaauuacaguauuuccuguga

SEQ ID NO: 231745 - RNA, 22 nt, Artificial Sequence
  Synthetic
gaaauuacaguauuuccuguga

SEQ ID NO: 231746 - RNA, 23 nt, Artificial Sequence
  Synthetic
ggaaauuacaguauuuccuguga

SEQ ID NO: 231747 - RNA, 24 nt, Artificial Sequence
  Synthetic
gggaaauuacaguauuuccuguga

SEQ ID NO: 231748 - RNA, 18 nt, Artificial Sequence
  Synthetic
uuuugaaauuggcuguga

SEQ ID NO: 231749 - RNA, 19 nt, Artificial Sequence
  Synthetic
cuuuugaaauuggcuguga

SEQ ID NO: 231750 - RNA, 20 nt, Artificial Sequence
  Synthetic
gcuuuugaaauuggcuguga

SEQ ID NO: 231751 - RNA, 21 nt, Artificial Sequence
  Synthetic
ggcuuuugaaauuggcuguga

SEQ ID NO: 231752 - RNA, 22 nt, Artificial Sequence
  Synthetic
aggcuuuugaaauuggcuguga

SEQ ID NO: 231753 - RNA, 23 nt, Artificial Sequence
  Synthetic
uaggcuuuugaaauuggcuguga

SEQ ID NO: 231754 - RNA, 24 nt, Artificial Sequence
  Synthetic
guaggcuuuugaaauuggcuguga

SEQ ID NO: 231755 - RNA, 18 nt, Artificial Sequence
  Synthetic
gcaggcacugugcuguga

SEQ ID NO: 231756 - RNA, 19 nt, Artificial Sequence
  Synthetic
ugcaggcacugugcuguga

SEQ ID NO: 231757 - RNA, 20 nt, Artificial Sequence
  Synthetic
uugcaggcacugugcuguga

SEQ ID NO: 231758 - RNA, 21 nt, Artificial Sequence
  Synthetic
guugcaggcacugugcuguga

SEQ ID NO: 231759 - RNA, 22 nt, Artificial Sequence
  Synthetic
uguugcaggcacugugcuguga

SEQ ID NO: 231760 - RNA, 23 nt, Artificial Sequence
  Synthetic
cuguugcaggcacugugcuguga

SEQ ID NO: 231761 - RNA, 24 nt, Artificial Sequence
  Synthetic
ucuguugcaggcacugugcuguga

SEQ ID NO: 231762 - RNA, 18 nt, Artificial Sequence
  Synthetic
auauaauugaaucuguga

SEQ ID NO: 231763 - RNA, 19 nt, Artificial Sequence
  Synthetic
aauauaauugaaucuguga

SEQ ID NO: 231764 - RNA, 20 nt, Artificial Sequence
  Synthetic
aaauauaauugaaucuguga

SEQ ID NO: 231765 - RNA, 21 nt, Artificial Sequence
  Synthetic
aaaauauaauugaaucuguga

SEQ ID NO: 231766 - RNA, 22 nt, Artificial Sequence
  Synthetic
caaaauauaauugaaucuguga

SEQ ID NO: 231767 - RNA, 23 nt, Artificial Sequence
  Synthetic
gcaaaauauaauugaaucuguga

SEQ ID NO: 231768 - RNA, 24 nt, Artificial Sequence
  Synthetic
ugcaaaauauaauugaaucuguga

SEQ ID NO: 231769 - RNA, 18 nt, Artificial Sequence
  Synthetic
cugaagcuagcucuguga

SEQ ID NO: 231770 - RNA, 19 nt, Artificial Sequence
  Synthetic
ccugaagcuagcucuguga

SEQ ID NO: 231771 - RNA, 20 nt, Artificial Sequence
  Synthetic
cccugaagcuagcucuguga

SEQ ID NO: 231772 - RNA, 21 nt, Artificial Sequence
  Synthetic
gcccugaagcuagcucuguga

SEQ ID NO: 231773 - RNA, 22 nt, Artificial Sequence
  Synthetic
ugcccugaagcuagcucuguga

SEQ ID NO: 231774 - RNA, 23 nt, Artificial Sequence
  Synthetic
augcccugaagcuagcucuguga

SEQ ID NO: 231775 - RNA, 24 nt, Artificial Sequence
  Synthetic
aaugcccugaagcuagcucuguga

SEQ ID NO: 231776 - RNA, 18 nt, Artificial Sequence
  Synthetic
uuaacauuagcucuguga

SEQ ID NO: 231777 - RNA, 19 nt, Artificial Sequence
  Synthetic
guuaacauuagcucuguga

SEQ ID NO: 231778 - RNA, 20 nt, Artificial Sequence
  Synthetic
uguuaacauuagcucuguga

SEQ ID NO: 231779 - RNA, 21 nt, Artificial Sequence
  Synthetic
uuguuaacauuagcucuguga

SEQ ID NO: 231780 - RNA, 22 nt, Artificial Sequence
  Synthetic
cuuguuaacauuagcucuguga

SEQ ID NO: 231781 - RNA, 23 nt, Artificial Sequence
  Synthetic
gcuuguuaacauuagcucuguga

SEQ ID NO: 231782 - RNA, 24 nt, Artificial Sequence
  Synthetic
agcuuguuaacauuagcucuguga

SEQ ID NO: 231783 - RNA, 18 nt, Artificial Sequence
  Synthetic
agaccucugggucuguga

SEQ ID NO: 231784 - RNA, 19 nt, Artificial Sequence
  Synthetic
uagaccucugggucuguga

SEQ ID NO: 231785 - RNA, 20 nt, Artificial Sequence
  Synthetic
cuagaccucugggucuguga

SEQ ID NO: 231786 - RNA, 21 nt, Artificial Sequence
  Synthetic
ccuagaccucugggucuguga

SEQ ID NO: 231787 - RNA, 22 nt, Artificial Sequence
  Synthetic
uccuagaccucugggucuguga

SEQ ID NO: 231788 - RNA, 23 nt, Artificial Sequence
  Synthetic
cuccuagaccucugggucuguga

SEQ ID NO: 231789 - RNA, 24 nt, Artificial Sequence
  Synthetic
ccuccuagaccucugggucuguga

SEQ ID NO: 231790 - RNA, 18 nt, Artificial Sequence
  Synthetic
auuccuauccuucuguga

SEQ ID NO: 231791 - RNA, 19 nt, Artificial Sequence
  Synthetic
aauuccuauccuucuguga

SEQ ID NO: 231792 - RNA, 20 nt, Artificial Sequence
  Synthetic
caauuccuauccuucuguga

SEQ ID NO: 231793 - RNA, 21 nt, Artificial Sequence
  Synthetic
ucaauuccuauccuucuguga

SEQ ID NO: 231794 - RNA, 22 nt, Artificial Sequence
  Synthetic
cucaauuccuauccuucuguga

SEQ ID NO: 231795 - RNA, 23 nt, Artificial Sequence
  Synthetic
ccucaauuccuauccuucuguga

SEQ ID NO: 231796 - RNA, 24 nt, Artificial Sequence
  Synthetic
uccucaauuccuauccuucuguga

SEQ ID NO: 231797 - RNA, 18 nt, Artificial Sequence
  Synthetic
uugcugugcaaaguguga

SEQ ID NO: 231798 - RNA, 19 nt, Artificial Sequence
  Synthetic
cuugcugugcaaaguguga

SEQ ID NO: 231799 - RNA, 20 nt, Artificial Sequence
  Synthetic
ccuugcugugcaaaguguga

SEQ ID NO: 231800 - RNA, 21 nt, Artificial Sequence
  Synthetic
accuugcugugcaaaguguga

SEQ ID NO: 231801 - RNA, 22 nt, Artificial Sequence
  Synthetic
caccuugcugugcaaaguguga

SEQ ID NO: 231802 - RNA, 23 nt, Artificial Sequence
  Synthetic
ucaccuugcugugcaaaguguga

SEQ ID NO: 231803 - RNA, 24 nt, Artificial Sequence
  Synthetic
aucaccuugcugugcaaaguguga

SEQ ID NO: 231804 - RNA, 18 nt, Artificial Sequence
  Synthetic
aggagaagagaaguguga

SEQ ID NO: 231805 - RNA, 19 nt, Artificial Sequence
  Synthetic
gaggagaagagaaguguga

SEQ ID NO: 231806 - RNA, 20 nt, Artificial Sequence
  Synthetic
agaggagaagagaaguguga

SEQ ID NO: 231807 - RNA, 21 nt, Artificial Sequence
  Synthetic
gagaggagaagagaaguguga

SEQ ID NO: 231808 - RNA, 22 nt, Artificial Sequence
  Synthetic
agagaggagaagagaaguguga

SEQ ID NO: 231809 - RNA, 23 nt, Artificial Sequence
  Synthetic
gagagaggagaagagaaguguga

SEQ ID NO: 231810 - RNA, 24 nt, Artificial Sequence
  Synthetic
agagagaggagaagagaaguguga

SEQ ID NO: 231811 - RNA, 18 nt, Artificial Sequence
  Synthetic
gggucaggggaaguguga

SEQ ID NO: 231812 - RNA, 19 nt, Artificial Sequence
  Synthetic
ugggucaggggaaguguga

SEQ ID NO: 231813 - RNA, 20 nt, Artificial Sequence
  Synthetic
gugggucaggggaaguguga

SEQ ID NO: 231814 - RNA, 21 nt, Artificial Sequence
  Synthetic
agugggucaggggaaguguga

SEQ ID NO: 231815 - RNA, 22 nt, Artificial Sequence
  Synthetic
gagugggucaggggaaguguga

SEQ ID NO: 231816 - RNA, 23 nt, Artificial Sequence
  Synthetic
ggagugggucaggggaaguguga

SEQ ID NO: 231817 - RNA, 24 nt, Artificial Sequence
  Synthetic
aggagugggucaggggaaguguga

SEQ ID NO: 231818 - RNA, 18 nt, Artificial Sequence
  Synthetic
ccuugcuauacaguguga

SEQ ID NO: 231819 - RNA, 19 nt, Artificial Sequence
  Synthetic
accuugcuauacaguguga

SEQ ID NO: 231820 - RNA, 20 nt, Artificial Sequence
  Synthetic
aaccuugcuauacaguguga

SEQ ID NO: 231821 - RNA, 21 nt, Artificial Sequence
  Synthetic
caaccuugcuauacaguguga

SEQ ID NO: 231822 - RNA, 22 nt, Artificial Sequence
  Synthetic
ucaaccuugcuauacaguguga

SEQ ID NO: 231823 - RNA, 23 nt, Artificial Sequence
  Synthetic
gucaaccuugcuauacaguguga

SEQ ID NO: 231824 - RNA, 24 nt, Artificial Sequence
  Synthetic
ugucaaccuugcuauacaguguga

SEQ ID NO: 231825 - RNA, 18 nt, Artificial Sequence
  Synthetic
aaagaaauagacguguga

SEQ ID NO: 231826 - RNA, 19 nt, Artificial Sequence
  Synthetic
gaaagaaauagacguguga

SEQ ID NO: 231827 - RNA, 20 nt, Artificial Sequence
  Synthetic
agaaagaaauagacguguga

SEQ ID NO: 231828 - RNA, 21 nt, Artificial Sequence
  Synthetic
uagaaagaaauagacguguga

SEQ ID NO: 231829 - RNA, 22 nt, Artificial Sequence
  Synthetic
uuagaaagaaauagacguguga

SEQ ID NO: 231830 - RNA, 23 nt, Artificial Sequence
  Synthetic
cuuagaaagaaauagacguguga

SEQ ID NO: 231831 - RNA, 24 nt, Artificial Sequence
  Synthetic
acuuagaaagaaauagacguguga

SEQ ID NO: 231832 - RNA, 18 nt, Artificial Sequence
  Synthetic
ggagaguuggucguguga

SEQ ID NO: 231833 - RNA, 19 nt, Artificial Sequence
  Synthetic
uggagaguuggucguguga

SEQ ID NO: 231834 - RNA, 20 nt, Artificial Sequence
  Synthetic
cuggagaguuggucguguga

SEQ ID NO: 231835 - RNA, 21 nt, Artificial Sequence
  Synthetic
ccuggagaguuggucguguga

SEQ ID NO: 231836 - RNA, 22 nt, Artificial Sequence
  Synthetic
accuggagaguuggucguguga

SEQ ID NO: 231837 - RNA, 23 nt, Artificial Sequence
  Synthetic
uaccuggagaguuggucguguga

SEQ ID NO: 231838 - RNA, 24 nt, Artificial Sequence
  Synthetic
auaccuggagaguuggucguguga

SEQ ID NO: 231839 - RNA, 18 nt, Artificial Sequence
  Synthetic
ucuugaaaccagguguga

SEQ ID NO: 231840 - RNA, 19 nt, Artificial Sequence
  Synthetic
aucuugaaaccagguguga

SEQ ID NO: 231841 - RNA, 20 nt, Artificial Sequence
  Synthetic
aaucuugaaaccagguguga

SEQ ID NO: 231842 - RNA, 21 nt, Artificial Sequence
  Synthetic
gaaucuugaaaccagguguga

SEQ ID NO: 231843 - RNA, 22 nt, Artificial Sequence
  Synthetic
ggaaucuugaaaccagguguga

SEQ ID NO: 231844 - RNA, 23 nt, Artificial Sequence
  Synthetic
aggaaucuugaaaccagguguga

SEQ ID NO: 231845 - RNA, 24 nt, Artificial Sequence
  Synthetic
aaggaaucuugaaaccagguguga

SEQ ID NO: 231846 - RNA, 18 nt, Artificial Sequence
  Synthetic
gaauaaauuuagguguga

SEQ ID NO: 231847 - RNA, 19 nt, Artificial Sequence
  Synthetic
ggaauaaauuuagguguga

SEQ ID NO: 231848 - RNA, 20 nt, Artificial Sequence
  Synthetic
uggaauaaauuuagguguga

SEQ ID NO: 231849 - RNA, 21 nt, Artificial Sequence
  Synthetic
auggaauaaauuuagguguga

SEQ ID NO: 231850 - RNA, 22 nt, Artificial Sequence
  Synthetic
aauggaauaaauuuagguguga

SEQ ID NO: 231851 - RNA, 23 nt, Artificial Sequence
  Synthetic
uaauggaauaaauuuagguguga

SEQ ID NO: 231852 - RNA, 24 nt, Artificial Sequence
  Synthetic
auaauggaauaaauuuagguguga

SEQ ID NO: 231853 - RNA, 18 nt, Artificial Sequence
  Synthetic
auuuaugaaaauguguga

SEQ ID NO: 231854 - RNA, 19 nt, Artificial Sequence
  Synthetic
cauuuaugaaaauguguga

SEQ ID NO: 231855 - RNA, 20 nt, Artificial Sequence
  Synthetic
ucauuuaugaaaauguguga

SEQ ID NO: 231856 - RNA, 21 nt, Artificial Sequence
  Synthetic
aucauuuaugaaaauguguga

SEQ ID NO: 231857 - RNA, 22 nt, Artificial Sequence
  Synthetic
aaucauuuaugaaaauguguga

SEQ ID NO: 231858 - RNA, 23 nt, Artificial Sequence
  Synthetic
caaucauuuaugaaaauguguga

SEQ ID NO: 231859 - RNA, 24 nt, Artificial Sequence
  Synthetic
acaaucauuuaugaaaauguguga

SEQ ID NO: 231860 - RNA, 18 nt, Artificial Sequence
  Synthetic
acuauauugacuguguga

SEQ ID NO: 231861 - RNA, 19 nt, Artificial Sequence
  Synthetic
aacuauauugacuguguga

SEQ ID NO: 231862 - RNA, 20 nt, Artificial Sequence
  Synthetic
aaacuauauugacuguguga

SEQ ID NO: 231863 - RNA, 21 nt, Artificial Sequence
  Synthetic
uaaacuauauugacuguguga

SEQ ID NO: 231864 - RNA, 22 nt, Artificial Sequence
  Synthetic
cuaaacuauauugacuguguga

SEQ ID NO: 231865 - RNA, 23 nt, Artificial Sequence
  Synthetic
acuaaacuauauugacuguguga

SEQ ID NO: 231866 - RNA, 24 nt, Artificial Sequence
  Synthetic
aacuaaacuauauugacuguguga

SEQ ID NO: 231867 - RNA, 18 nt, Artificial Sequence
  Synthetic
uuaaacaaauguguguga

SEQ ID NO: 231868 - RNA, 19 nt, Artificial Sequence
  Synthetic
auuaaacaaauguguguga

SEQ ID NO: 231869 - RNA, 20 nt, Artificial Sequence
  Synthetic
cauuaaacaaauguguguga

SEQ ID NO: 231870 - RNA, 21 nt, Artificial Sequence
  Synthetic
ucauuaaacaaauguguguga

SEQ ID NO: 231871 - RNA, 22 nt, Artificial Sequence
  Synthetic
aucauuaaacaaauguguguga

SEQ ID NO: 231872 - RNA, 23 nt, Artificial Sequence
  Synthetic
aaucauuaaacaaauguguguga

SEQ ID NO: 231873 - RNA, 24 nt, Artificial Sequence
  Synthetic
uaaucauuaaacaaauguguguga

SEQ ID NO: 231874 - RNA, 18 nt, Artificial Sequence
  Synthetic
uuaccauuuauuguguga

SEQ ID NO: 231875 - RNA, 19 nt, Artificial Sequence
  Synthetic
cuuaccauuuauuguguga

SEQ ID NO: 231876 - RNA, 20 nt, Artificial Sequence
  Synthetic
gcuuaccauuuauuguguga

SEQ ID NO: 231877 - RNA, 21 nt, Artificial Sequence
  Synthetic
ugcuuaccauuuauuguguga

SEQ ID NO: 231878 - RNA, 22 nt, Artificial Sequence
  Synthetic
augcuuaccauuuauuguguga

SEQ ID NO: 231879 - RNA, 23 nt, Artificial Sequence
  Synthetic
aaugcuuaccauuuauuguguga

SEQ ID NO: 231880 - RNA, 24 nt, Artificial Sequence
  Synthetic
caaugcuuaccauuuauuguguga

SEQ ID NO: 231881 - RNA, 18 nt, Artificial Sequence
  Synthetic
ucgaagggccuauuguga

SEQ ID NO: 231882 - RNA, 19 nt, Artificial Sequence
  Synthetic
aucgaagggccuauuguga

SEQ ID NO: 231883 - RNA, 20 nt, Artificial Sequence
  Synthetic
aaucgaagggccuauuguga

SEQ ID NO: 231884 - RNA, 21 nt, Artificial Sequence
  Synthetic
uaaucgaagggccuauuguga

SEQ ID NO: 231885 - RNA, 22 nt, Artificial Sequence
  Synthetic
uuaaucgaagggccuauuguga

SEQ ID NO: 231886 - RNA, 23 nt, Artificial Sequence
  Synthetic
auuaaucgaagggccuauuguga

SEQ ID NO: 231887 - RNA, 24 nt, Artificial Sequence
  Synthetic
uauuaaucgaagggccuauuguga

SEQ ID NO: 231888 - RNA, 18 nt, Artificial Sequence
  Synthetic
aagaauguuuaguuguga

SEQ ID NO: 231889 - RNA, 19 nt, Artificial Sequence
  Synthetic
aaagaauguuuaguuguga

SEQ ID NO: 231890 - RNA, 20 nt, Artificial Sequence
  Synthetic
caaagaauguuuaguuguga

SEQ ID NO: 231891 - RNA, 21 nt, Artificial Sequence
  Synthetic
acaaagaauguuuaguuguga

SEQ ID NO: 231892 - RNA, 22 nt, Artificial Sequence
  Synthetic
gacaaagaauguuuaguuguga

SEQ ID NO: 231893 - RNA, 23 nt, Artificial Sequence
  Synthetic
agacaaagaauguuuaguuguga

SEQ ID NO: 231894 - RNA, 24 nt, Artificial Sequence
  Synthetic
aagacaaagaauguuuaguuguga

SEQ ID NO: 231895 - RNA, 18 nt, Artificial Sequence
  Synthetic
ucauuaucuaaaaauuga

SEQ ID NO: 231896 - RNA, 19 nt, Artificial Sequence
  Synthetic
uucauuaucuaaaaauuga

SEQ ID NO: 231897 - RNA, 20 nt, Artificial Sequence
  Synthetic
uuucauuaucuaaaaauuga

SEQ ID NO: 231898 - RNA, 21 nt, Artificial Sequence
  Synthetic
auuucauuaucuaaaaauuga

SEQ ID NO: 231899 - RNA, 22 nt, Artificial Sequence
  Synthetic
gauuucauuaucuaaaaauuga

SEQ ID NO: 231900 - RNA, 23 nt, Artificial Sequence
  Synthetic
agauuucauuaucuaaaaauuga

SEQ ID NO: 231901 - RNA, 24 nt, Artificial Sequence
  Synthetic
gagauuucauuaucuaaaaauuga

SEQ ID NO: 231902 - RNA, 18 nt, Artificial Sequence
  Synthetic
uuuauguuccaaaauuga

SEQ ID NO: 231903 - RNA, 19 nt, Artificial Sequence
  Synthetic
uuuuauguuccaaaauuga

SEQ ID NO: 231904 - RNA, 20 nt, Artificial Sequence
  Synthetic
guuuuauguuccaaaauuga

SEQ ID NO: 231905 - RNA, 21 nt, Artificial Sequence
  Synthetic
aguuuuauguuccaaaauuga

SEQ ID NO: 231906 - RNA, 22 nt, Artificial Sequence
  Synthetic
aaguuuuauguuccaaaauuga

SEQ ID NO: 231907 - RNA, 23 nt, Artificial Sequence
  Synthetic
gaaguuuuauguuccaaaauuga

SEQ ID NO: 231908 - RNA, 24 nt, Artificial Sequence
  Synthetic
ugaaguuuuauguuccaaaauuga

SEQ ID NO: 231909 - RNA, 18 nt, Artificial Sequence
  Synthetic
uaaggacuucaaaauuga

SEQ ID NO: 231910 - RNA, 19 nt, Artificial Sequence
  Synthetic
uuaaggacuucaaaauuga

SEQ ID NO: 231911 - RNA, 20 nt, Artificial Sequence
  Synthetic
cuuaaggacuucaaaauuga

SEQ ID NO: 231912 - RNA, 21 nt, Artificial Sequence
  Synthetic
ucuuaaggacuucaaaauuga

SEQ ID NO: 231913 - RNA, 22 nt, Artificial Sequence
  Synthetic
cucuuaaggacuucaaaauuga

SEQ ID NO: 231914 - RNA, 23 nt, Artificial Sequence
  Synthetic
ucucuuaaggacuucaaaauuga

SEQ ID NO: 231915 - RNA, 24 nt, Artificial Sequence
  Synthetic
uucucuuaaggacuucaaaauuga

SEQ ID NO: 231916 - RNA, 18 nt, Artificial Sequence
  Synthetic
guguuuaccacaaauuga

SEQ ID NO: 231917 - RNA, 19 nt, Artificial Sequence
  Synthetic
uguguuuaccacaaauuga

SEQ ID NO: 231918 - RNA, 20 nt, Artificial Sequence
  Synthetic
uuguguuuaccacaaauuga

SEQ ID NO: 231919 - RNA, 21 nt, Artificial Sequence
  Synthetic
guuguguuuaccacaaauuga

SEQ ID NO: 231920 - RNA, 22 nt, Artificial Sequence
  Synthetic
aguuguguuuaccacaaauuga

SEQ ID NO: 231921 - RNA, 23 nt, Artificial Sequence
  Synthetic
uaguuguguuuaccacaaauuga

SEQ ID NO: 231922 - RNA, 24 nt, Artificial Sequence
  Synthetic
guaguuguguuuaccacaaauuga

SEQ ID NO: 231923 - RNA, 18 nt, Artificial Sequence
  Synthetic
ugcucaauaggaaauuga

SEQ ID NO: 231924 - RNA, 19 nt, Artificial Sequence
  Synthetic
uugcucaauaggaaauuga

SEQ ID NO: 231925 - RNA, 20 nt, Artificial Sequence
  Synthetic
uuugcucaauaggaaauuga

SEQ ID NO: 231926 - RNA, 21 nt, Artificial Sequence
  Synthetic
uuuugcucaauaggaaauuga

SEQ ID NO: 231927 - RNA, 22 nt, Artificial Sequence
  Synthetic
guuuugcucaauaggaaauuga

SEQ ID NO: 231928 - RNA, 23 nt, Artificial Sequence
  Synthetic
gguuuugcucaauaggaaauuga

SEQ ID NO: 231929 - RNA, 24 nt, Artificial Sequence
  Synthetic
ugguuuugcucaauaggaaauuga

SEQ ID NO: 231930 - RNA, 18 nt, Artificial Sequence
  Synthetic
auggcaggguucaauuga

SEQ ID NO: 231931 - RNA, 19 nt, Artificial Sequence
  Synthetic
aauggcaggguucaauuga

SEQ ID NO: 231932 - RNA, 20 nt, Artificial Sequence
  Synthetic
aaauggcaggguucaauuga

SEQ ID NO: 231933 - RNA, 21 nt, Artificial Sequence
  Synthetic
caaauggcaggguucaauuga

SEQ ID NO: 231934 - RNA, 22 nt, Artificial Sequence
  Synthetic
gcaaauggcaggguucaauuga

SEQ ID NO: 231935 - RNA, 23 nt, Artificial Sequence
  Synthetic
agcaaauggcaggguucaauuga

SEQ ID NO: 231936 - RNA, 24 nt, Artificial Sequence
  Synthetic
cagcaaauggcaggguucaauuga

SEQ ID NO: 231937 - RNA, 18 nt, Artificial Sequence
  Synthetic
uagcccuggaagaauuga

SEQ ID NO: 231938 - RNA, 19 nt, Artificial Sequence
  Synthetic
auagcccuggaagaauuga

SEQ ID NO: 231939 - RNA, 20 nt, Artificial Sequence
  Synthetic
uauagcccuggaagaauuga

SEQ ID NO: 231940 - RNA, 21 nt, Artificial Sequence
  Synthetic
guauagcccuggaagaauuga

SEQ ID NO: 231941 - RNA, 22 nt, Artificial Sequence
  Synthetic
aguauagcccuggaagaauuga

SEQ ID NO: 231942 - RNA, 23 nt, Artificial Sequence
  Synthetic
uaguauagcccuggaagaauuga

SEQ ID NO: 231943 - RNA, 24 nt, Artificial Sequence
  Synthetic
guaguauagcccuggaagaauuga

SEQ ID NO: 231944 - RNA, 18 nt, Artificial Sequence
  Synthetic
uuagcagcacagaauuga

SEQ ID NO: 231945 - RNA, 19 nt, Artificial Sequence
  Synthetic
uuuagcagcacagaauuga

SEQ ID NO: 231946 - RNA, 20 nt, Artificial Sequence
  Synthetic
guuuagcagcacagaauuga

SEQ ID NO: 231947 - RNA, 21 nt, Artificial Sequence
  Synthetic
uguuuagcagcacagaauuga

SEQ ID NO: 231948 - RNA, 22 nt, Artificial Sequence
  Synthetic
uuguuuagcagcacagaauuga

SEQ ID NO: 231949 - RNA, 23 nt, Artificial Sequence
  Synthetic
uuuguuuagcagcacagaauuga

SEQ ID NO: 231950 - RNA, 24 nt, Artificial Sequence
  Synthetic
guuuguuuagcagcacagaauuga

SEQ ID NO: 231951 - RNA, 18 nt, Artificial Sequence
  Synthetic
uaacuuucagagaauuga

SEQ ID NO: 231952 - RNA, 19 nt, Artificial Sequence
  Synthetic
auaacuuucagagaauuga

SEQ ID NO: 231953 - RNA, 20 nt, Artificial Sequence
  Synthetic
uauaacuuucagagaauuga

SEQ ID NO: 231954 - RNA, 21 nt, Artificial Sequence
  Synthetic
auauaacuuucagagaauuga

SEQ ID NO: 231955 - RNA, 22 nt, Artificial Sequence
  Synthetic
uauauaacuuucagagaauuga

SEQ ID NO: 231956 - RNA, 23 nt, Artificial Sequence
  Synthetic
uuauauaacuuucagagaauuga

SEQ ID NO: 231957 - RNA, 24 nt, Artificial Sequence
  Synthetic
uuuauauaacuuucagagaauuga

SEQ ID NO: 231958 - RNA, 18 nt, Artificial Sequence
  Synthetic
uuuggaggguagaauuga

SEQ ID NO: 231959 - RNA, 19 nt, Artificial Sequence
  Synthetic
auuuggaggguagaauuga

SEQ ID NO: 231960 - RNA, 20 nt, Artificial Sequence
  Synthetic
uauuuggaggguagaauuga

SEQ ID NO: 231961 - RNA, 21 nt, Artificial Sequence
  Synthetic
auauuuggaggguagaauuga

SEQ ID NO: 231962 - RNA, 22 nt, Artificial Sequence
  Synthetic
uauauuuggaggguagaauuga

SEQ ID NO: 231963 - RNA, 23 nt, Artificial Sequence
  Synthetic
auauauuuggaggguagaauuga

SEQ ID NO: 231964 - RNA, 24 nt, Artificial Sequence
  Synthetic
gauauauuuggaggguagaauuga

SEQ ID NO: 231965 - RNA, 18 nt, Artificial Sequence
  Synthetic
augaguuugacgaauuga

SEQ ID NO: 231966 - RNA, 19 nt, Artificial Sequence
  Synthetic
aaugaguuugacgaauuga

SEQ ID NO: 231967 - RNA, 20 nt, Artificial Sequence
  Synthetic
gaaugaguuugacgaauuga

SEQ ID NO: 231968 - RNA, 21 nt, Artificial Sequence
  Synthetic
agaaugaguuugacgaauuga

SEQ ID NO: 231969 - RNA, 22 nt, Artificial Sequence
  Synthetic
gagaaugaguuugacgaauuga

SEQ ID NO: 231970 - RNA, 23 nt, Artificial Sequence
  Synthetic
ggagaaugaguuugacgaauuga

SEQ ID NO: 231971 - RNA, 24 nt, Artificial Sequence
  Synthetic
uggagaaugaguuugacgaauuga

SEQ ID NO: 231972 - RNA, 18 nt, Artificial Sequence
  Synthetic
cucuuuagcaggaauuga

SEQ ID NO: 231973 - RNA, 19 nt, Artificial Sequence
  Synthetic
gcucuuuagcaggaauuga

SEQ ID NO: 231974 - RNA, 20 nt, Artificial Sequence
  Synthetic
ugcucuuuagcaggaauuga

SEQ ID NO: 231975 - RNA, 21 nt, Artificial Sequence
  Synthetic
augcucuuuagcaggaauuga

SEQ ID NO: 231976 - RNA, 22 nt, Artificial Sequence
  Synthetic
aaugcucuuuagcaggaauuga

SEQ ID NO: 231977 - RNA, 23 nt, Artificial Sequence
  Synthetic
aaaugcucuuuagcaggaauuga

SEQ ID NO: 231978 - RNA, 24 nt, Artificial Sequence
  Synthetic
gaaaugcucuuuagcaggaauuga

SEQ ID NO: 231979 - RNA, 18 nt, Artificial Sequence
  Synthetic
ggugaggguuggaauuga

SEQ ID NO: 231980 - RNA, 19 nt, Artificial Sequence
  Synthetic
gggugaggguuggaauuga

SEQ ID NO: 231981 - RNA, 20 nt, Artificial Sequence
  Synthetic
ugggugaggguuggaauuga

SEQ ID NO: 231982 - RNA, 21 nt, Artificial Sequence
  Synthetic
cugggugaggguuggaauuga

SEQ ID NO: 231983 - RNA, 22 nt, Artificial Sequence
  Synthetic
ucugggugaggguuggaauuga

SEQ ID NO: 231984 - RNA, 23 nt, Artificial Sequence
  Synthetic
cucugggugaggguuggaauuga

SEQ ID NO: 231985 - RNA, 24 nt, Artificial Sequence
  Synthetic
ccucugggugaggguuggaauuga

SEQ ID NO: 231986 - RNA, 18 nt, Artificial Sequence
  Synthetic
aggauccagaauaauuga

SEQ ID NO: 231987 - RNA, 19 nt, Artificial Sequence
  Synthetic
caggauccagaauaauuga

SEQ ID NO: 231988 - RNA, 20 nt, Artificial Sequence
  Synthetic
ucaggauccagaauaauuga

SEQ ID NO: 231989 - RNA, 21 nt, Artificial Sequence
  Synthetic
aucaggauccagaauaauuga

SEQ ID NO: 231990 - RNA, 22 nt, Artificial Sequence
  Synthetic
caucaggauccagaauaauuga

SEQ ID NO: 231991 - RNA, 23 nt, Artificial Sequence
  Synthetic
acaucaggauccagaauaauuga

SEQ ID NO: 231992 - RNA, 24 nt, Artificial Sequence
  Synthetic
gacaucaggauccagaauaauuga

SEQ ID NO: 231993 - RNA, 18 nt, Artificial Sequence
  Synthetic
aaugauaaggauaauuga

SEQ ID NO: 231994 - RNA, 19 nt, Artificial Sequence
  Synthetic
caaugauaaggauaauuga

SEQ ID NO: 231995 - RNA, 20 nt, Artificial Sequence
  Synthetic
ccaaugauaaggauaauuga

SEQ ID NO: 231996 - RNA, 21 nt, Artificial Sequence
  Synthetic
uccaaugauaaggauaauuga

SEQ ID NO: 231997 - RNA, 22 nt, Artificial Sequence
  Synthetic
cuccaaugauaaggauaauuga

SEQ ID NO: 231998 - RNA, 23 nt, Artificial Sequence
  Synthetic
ucuccaaugauaaggauaauuga

SEQ ID NO: 231999 - RNA, 24 nt, Artificial Sequence
  Synthetic
uucuccaaugauaaggauaauuga

SEQ ID NO: 232000 - RNA, 18 nt, Artificial Sequence
  Synthetic
agacucugauauaauuga

SEQ ID NO: 232001 - RNA, 19 nt, Artificial Sequence
  Synthetic
gagacucugauauaauuga

SEQ ID NO: 232002 - RNA, 20 nt, Artificial Sequence
  Synthetic
agagacucugauauaauuga

SEQ ID NO: 232003 - RNA, 21 nt, Artificial Sequence
  Synthetic
aagagacucugauauaauuga

SEQ ID NO: 232004 - RNA, 22 nt, Artificial Sequence
  Synthetic
uaagagacucugauauaauuga

SEQ ID NO: 232005 - RNA, 23 nt, Artificial Sequence
  Synthetic
uuaagagacucugauauaauuga

SEQ ID NO: 232006 - RNA, 24 nt, Artificial Sequence
  Synthetic
uuuaagagacucugauauaauuga

SEQ ID NO: 232007 - RNA, 18 nt, Artificial Sequence
  Synthetic
uacaggagacguaauuga

SEQ ID NO: 232008 - RNA, 19 nt, Artificial Sequence
  Synthetic
auacaggagacguaauuga

SEQ ID NO: 232009 - RNA, 20 nt, Artificial Sequence
  Synthetic
aauacaggagacguaauuga

SEQ ID NO: 232010 - RNA, 21 nt, Artificial Sequence
  Synthetic
aaauacaggagacguaauuga

SEQ ID NO: 232011 - RNA, 22 nt, Artificial Sequence
  Synthetic
aaaauacaggagacguaauuga

SEQ ID NO: 232012 - RNA, 23 nt, Artificial Sequence
  Synthetic
aaaaauacaggagacguaauuga

SEQ ID NO: 232013 - RNA, 24 nt, Artificial Sequence
  Synthetic
gaaaaauacaggagacguaauuga

SEQ ID NO: 232014 - RNA, 18 nt, Artificial Sequence
  Synthetic
aacauauauuguaauuga

SEQ ID NO: 232015 - RNA, 19 nt, Artificial Sequence
  Synthetic
aaacauauauuguaauuga

SEQ ID NO: 232016 - RNA, 20 nt, Artificial Sequence
  Synthetic
aaaacauauauuguaauuga

SEQ ID NO: 232017 - RNA, 21 nt, Artificial Sequence
  Synthetic
uaaaacauauauuguaauuga

SEQ ID NO: 232018 - RNA, 22 nt, Artificial Sequence
  Synthetic
auaaaacauauauuguaauuga

SEQ ID NO: 232019 - RNA, 23 nt, Artificial Sequence
  Synthetic
cauaaaacauauauuguaauuga

SEQ ID NO: 232020 - RNA, 24 nt, Artificial Sequence
  Synthetic
ucauaaaacauauauuguaauuga

SEQ ID NO: 232021 - RNA, 18 nt, Artificial Sequence
  Synthetic
auaauuguuuguaauuga

SEQ ID NO: 232022 - RNA, 19 nt, Artificial Sequence
  Synthetic
aauaauuguuuguaauuga

SEQ ID NO: 232023 - RNA, 20 nt, Artificial Sequence
  Synthetic
caauaauuguuuguaauuga

SEQ ID NO: 232024 - RNA, 21 nt, Artificial Sequence
  Synthetic
ucaauaauuguuuguaauuga

SEQ ID NO: 232025 - RNA, 22 nt, Artificial Sequence
  Synthetic
cucaauaauuguuuguaauuga

SEQ ID NO: 232026 - RNA, 23 nt, Artificial Sequence
  Synthetic
acucaauaauuguuuguaauuga

SEQ ID NO: 232027 - RNA, 24 nt, Artificial Sequence
  Synthetic
uacucaauaauuguuuguaauuga

SEQ ID NO: 232028 - RNA, 18 nt, Artificial Sequence
  Synthetic
auugcaacuuuuaauuga

SEQ ID NO: 232029 - RNA, 19 nt, Artificial Sequence
  Synthetic
aauugcaacuuuuaauuga

SEQ ID NO: 232030 - RNA, 20 nt, Artificial Sequence
  Synthetic
uaauugcaacuuuuaauuga

SEQ ID NO: 232031 - RNA, 21 nt, Artificial Sequence
  Synthetic
guaauugcaacuuuuaauuga

SEQ ID NO: 232032 - RNA, 22 nt, Artificial Sequence
  Synthetic
uguaauugcaacuuuuaauuga

SEQ ID NO: 232033 - RNA, 23 nt, Artificial Sequence
  Synthetic
uuguaauugcaacuuuuaauuga

SEQ ID NO: 232034 - RNA, 24 nt, Artificial Sequence
  Synthetic
guuguaauugcaacuuuuaauuga

SEQ ID NO: 232035 - RNA, 18 nt, Artificial Sequence
  Synthetic
uauuuccuggaacauuga

SEQ ID NO: 232036 - RNA, 19 nt, Artificial Sequence
  Synthetic
uuauuuccuggaacauuga

SEQ ID NO: 232037 - RNA, 20 nt, Artificial Sequence
  Synthetic
auuauuuccuggaacauuga

SEQ ID NO: 232038 - RNA, 21 nt, Artificial Sequence
  Synthetic
uauuauuuccuggaacauuga

SEQ ID NO: 232039 - RNA, 22 nt, Artificial Sequence
  Synthetic
cuauuauuuccuggaacauuga

SEQ ID NO: 232040 - RNA, 23 nt, Artificial Sequence
  Synthetic
acuauuauuuccuggaacauuga

SEQ ID NO: 232041 - RNA, 24 nt, Artificial Sequence
  Synthetic
gacuauuauuuccuggaacauuga

SEQ ID NO: 232042 - RNA, 18 nt, Artificial Sequence
  Synthetic
auuucccaggaccauuga

SEQ ID NO: 232043 - RNA, 19 nt, Artificial Sequence
  Synthetic
aauuucccaggaccauuga

SEQ ID NO: 232044 - RNA, 20 nt, Artificial Sequence
  Synthetic
aaauuucccaggaccauuga

SEQ ID NO: 232045 - RNA, 21 nt, Artificial Sequence
  Synthetic
aaaauuucccaggaccauuga

SEQ ID NO: 232046 - RNA, 22 nt, Artificial Sequence
  Synthetic
uaaaauuucccaggaccauuga

SEQ ID NO: 232047 - RNA, 23 nt, Artificial Sequence
  Synthetic
cuaaaauuucccaggaccauuga

SEQ ID NO: 232048 - RNA, 24 nt, Artificial Sequence
  Synthetic
gcuaaaauuucccaggaccauuga

SEQ ID NO: 232049 - RNA, 18 nt, Artificial Sequence
  Synthetic
cugucaauugcccauuga

SEQ ID NO: 232050 - RNA, 19 nt, Artificial Sequence
  Synthetic
acugucaauugcccauuga

SEQ ID NO: 232051 - RNA, 20 nt, Artificial Sequence
  Synthetic
aacugucaauugcccauuga

SEQ ID NO: 232052 - RNA, 21 nt, Artificial Sequence
  Synthetic
aaacugucaauugcccauuga

SEQ ID NO: 232053 - RNA, 22 nt, Artificial Sequence
  Synthetic
uaaacugucaauugcccauuga

SEQ ID NO: 232054 - RNA, 23 nt, Artificial Sequence
  Synthetic
cuaaacugucaauugcccauuga

SEQ ID NO: 232055 - RNA, 24 nt, Artificial Sequence
  Synthetic
acuaaacugucaauugcccauuga

SEQ ID NO: 232056 - RNA, 18 nt, Artificial Sequence
  Synthetic
auagucauuaagcauuga

SEQ ID NO: 232057 - RNA, 19 nt, Artificial Sequence
  Synthetic
aauagucauuaagcauuga

SEQ ID NO: 232058 - RNA, 20 nt, Artificial Sequence
  Synthetic
uaauagucauuaagcauuga

SEQ ID NO: 232059 - RNA, 21 nt, Artificial Sequence
  Synthetic
auaauagucauuaagcauuga

SEQ ID NO: 232060 - RNA, 22 nt, Artificial Sequence
  Synthetic
uauaauagucauuaagcauuga

SEQ ID NO: 232061 - RNA, 23 nt, Artificial Sequence
  Synthetic
cuauaauagucauuaagcauuga

SEQ ID NO: 232062 - RNA, 24 nt, Artificial Sequence
  Synthetic
ucuauaauagucauuaagcauuga

SEQ ID NO: 232063 - RNA, 18 nt, Artificial Sequence
  Synthetic
gucccccuuagucauuga

SEQ ID NO: 232064 - RNA, 19 nt, Artificial Sequence
  Synthetic
agucccccuuagucauuga

SEQ ID NO: 232065 - RNA, 20 nt, Artificial Sequence
  Synthetic
gagucccccuuagucauuga

SEQ ID NO: 232066 - RNA, 21 nt, Artificial Sequence
  Synthetic
agagucccccuuagucauuga

SEQ ID NO: 232067 - RNA, 22 nt, Artificial Sequence
  Synthetic
uagagucccccuuagucauuga

SEQ ID NO: 232068 - RNA, 23 nt, Artificial Sequence
  Synthetic
uuagagucccccuuagucauuga

SEQ ID NO: 232069 - RNA, 24 nt, Artificial Sequence
  Synthetic
auuagagucccccuuagucauuga

SEQ ID NO: 232070 - RNA, 18 nt, Artificial Sequence
  Synthetic
acuuuuacgucagauuga

SEQ ID NO: 232071 - RNA, 19 nt, Artificial Sequence
  Synthetic
cacuuuuacgucagauuga

SEQ ID NO: 232072 - RNA, 20 nt, Artificial Sequence
  Synthetic
ccacuuuuacgucagauuga

SEQ ID NO: 232073 - RNA, 21 nt, Artificial Sequence
  Synthetic
uccacuuuuacgucagauuga

SEQ ID NO: 232074 - RNA, 22 nt, Artificial Sequence
  Synthetic
uuccacuuuuacgucagauuga

SEQ ID NO: 232075 - RNA, 23 nt, Artificial Sequence
  Synthetic
auuccacuuuuacgucagauuga

SEQ ID NO: 232076 - RNA, 24 nt, Artificial Sequence
  Synthetic
aauuccacuuuuacgucagauuga

SEQ ID NO: 232077 - RNA, 18 nt, Artificial Sequence
  Synthetic
gagagagagagagauuga

SEQ ID NO: 232078 - RNA, 19 nt, Artificial Sequence
  Synthetic
agagagagagagagauuga

SEQ ID NO: 232079 - RNA, 20 nt, Artificial Sequence
  Synthetic
gagagagagagagagauuga

SEQ ID NO: 232080 - RNA, 21 nt, Artificial Sequence
  Synthetic
agagagagagagagagauuga

SEQ ID NO: 232081 - RNA, 22 nt, Artificial Sequence
  Synthetic
gagagagagagagagagauuga

SEQ ID NO: 232082 - RNA, 23 nt, Artificial Sequence
  Synthetic
ugagagagagagagagagauuga

SEQ ID NO: 232083 - RNA, 24 nt, Artificial Sequence
  Synthetic
cugagagagagagagagagauuga

SEQ ID NO: 232084 - RNA, 18 nt, Artificial Sequence
  Synthetic
gaugggaagagggauuga

SEQ ID NO: 232085 - RNA, 19 nt, Artificial Sequence
  Synthetic
agaugggaagagggauuga

SEQ ID NO: 232086 - RNA, 20 nt, Artificial Sequence
  Synthetic
gagaugggaagagggauuga

SEQ ID NO: 232087 - RNA, 21 nt, Artificial Sequence
  Synthetic
agagaugggaagagggauuga

SEQ ID NO: 232088 - RNA, 22 nt, Artificial Sequence
  Synthetic
gagagaugggaagagggauuga

SEQ ID NO: 232089 - RNA, 23 nt, Artificial Sequence
  Synthetic
ggagagaugggaagagggauuga

SEQ ID NO: 232090 - RNA, 24 nt, Artificial Sequence
  Synthetic
gggagagaugggaagagggauuga

SEQ ID NO: 232091 - RNA, 18 nt, Artificial Sequence
  Synthetic
ccaccagugguggauuga

SEQ ID NO: 232092 - RNA, 19 nt, Artificial Sequence
  Synthetic
cccaccagugguggauuga

SEQ ID NO: 232093 - RNA, 20 nt, Artificial Sequence
  Synthetic
gcccaccagugguggauuga

SEQ ID NO: 232094 - RNA, 21 nt, Artificial Sequence
  Synthetic
ugcccaccagugguggauuga

SEQ ID NO: 232095 - RNA, 22 nt, Artificial Sequence
  Synthetic
gugcccaccagugguggauuga

SEQ ID NO: 232096 - RNA, 23 nt, Artificial Sequence
  Synthetic
ggugcccaccagugguggauuga

SEQ ID NO: 232097 - RNA, 24 nt, Artificial Sequence
  Synthetic
aggugcccaccagugguggauuga

SEQ ID NO: 232098 - RNA, 18 nt, Artificial Sequence
  Synthetic
auuuuucaguuggauuga

SEQ ID NO: 232099 - RNA, 19 nt, Artificial Sequence
  Synthetic
aauuuuucaguuggauuga

SEQ ID NO: 232100 - RNA, 20 nt, Artificial Sequence
  Synthetic
aaauuuuucaguuggauuga

SEQ ID NO: 232101 - RNA, 21 nt, Artificial Sequence
  Synthetic
caaauuuuucaguuggauuga

SEQ ID NO: 232102 - RNA, 22 nt, Artificial Sequence
  Synthetic
ucaaauuuuucaguuggauuga

SEQ ID NO: 232103 - RNA, 23 nt, Artificial Sequence
  Synthetic
uucaaauuuuucaguuggauuga

SEQ ID NO: 232104 - RNA, 24 nt, Artificial Sequence
  Synthetic
auucaaauuuuucaguuggauuga

SEQ ID NO: 232105 - RNA, 18 nt, Artificial Sequence
  Synthetic
accacuuggcaugauuga

SEQ ID NO: 232106 - RNA, 19 nt, Artificial Sequence
  Synthetic
uaccacuuggcaugauuga

SEQ ID NO: 232107 - RNA, 20 nt, Artificial Sequence
  Synthetic
uuaccacuuggcaugauuga

SEQ ID NO: 232108 - RNA, 21 nt, Artificial Sequence
  Synthetic
cuuaccacuuggcaugauuga

SEQ ID NO: 232109 - RNA, 22 nt, Artificial Sequence
  Synthetic
gcuuaccacuuggcaugauuga

SEQ ID NO: 232110 - RNA, 23 nt, Artificial Sequence
  Synthetic
ugcuuaccacuuggcaugauuga

SEQ ID NO: 232111 - RNA, 24 nt, Artificial Sequence
  Synthetic
cugcuuaccacuuggcaugauuga

SEQ ID NO: 232112 - RNA, 18 nt, Artificial Sequence
  Synthetic
aagaaaauucaugauuga

SEQ ID NO: 232113 - RNA, 19 nt, Artificial Sequence
  Synthetic
gaagaaaauucaugauuga

SEQ ID NO: 232114 - RNA, 20 nt, Artificial Sequence
  Synthetic
ugaagaaaauucaugauuga

SEQ ID NO: 232115 - RNA, 21 nt, Artificial Sequence
  Synthetic
augaagaaaauucaugauuga

SEQ ID NO: 232116 - RNA, 22 nt, Artificial Sequence
  Synthetic
caugaagaaaauucaugauuga

SEQ ID NO: 232117 - RNA, 23 nt, Artificial Sequence
  Synthetic
ccaugaagaaaauucaugauuga

SEQ ID NO: 232118 - RNA, 24 nt, Artificial Sequence
  Synthetic
gccaugaagaaaauucaugauuga

SEQ ID NO: 232119 - RNA, 18 nt, Artificial Sequence
  Synthetic
uaaauacuuacugauuga

SEQ ID NO: 232120 - RNA, 19 nt, Artificial Sequence
  Synthetic
auaaauacuuacugauuga

SEQ ID NO: 232121 - RNA, 20 nt, Artificial Sequence
  Synthetic
cauaaauacuuacugauuga

SEQ ID NO: 232122 - RNA, 21 nt, Artificial Sequence
  Synthetic
ccauaaauacuuacugauuga

SEQ ID NO: 232123 - RNA, 22 nt, Artificial Sequence
  Synthetic
gccauaaauacuuacugauuga

SEQ ID NO: 232124 - RNA, 23 nt, Artificial Sequence
  Synthetic
ugccauaaauacuuacugauuga

SEQ ID NO: 232125 - RNA, 24 nt, Artificial Sequence
  Synthetic
augccauaaauacuuacugauuga

SEQ ID NO: 232126 - RNA, 18 nt, Artificial Sequence
  Synthetic
uugaugcauagugauuga

SEQ ID NO: 232127 - RNA, 19 nt, Artificial Sequence
  Synthetic
uuugaugcauagugauuga

SEQ ID NO: 232128 - RNA, 20 nt, Artificial Sequence
  Synthetic
uuuugaugcauagugauuga

SEQ ID NO: 232129 - RNA, 21 nt, Artificial Sequence
  Synthetic
auuuugaugcauagugauuga

SEQ ID NO: 232130 - RNA, 22 nt, Artificial Sequence
  Synthetic
uauuuugaugcauagugauuga

SEQ ID NO: 232131 - RNA, 23 nt, Artificial Sequence
  Synthetic
auauuuugaugcauagugauuga

SEQ ID NO: 232132 - RNA, 24 nt, Artificial Sequence
  Synthetic
gauauuuugaugcauagugauuga

SEQ ID NO: 232133 - RNA, 18 nt, Artificial Sequence
  Synthetic
uugauuguuguugauuga

SEQ ID NO: 232134 - RNA, 19 nt, Artificial Sequence
  Synthetic
auugauuguuguugauuga

SEQ ID NO: 232135 - RNA, 20 nt, Artificial Sequence
  Synthetic
gauugauuguuguugauuga

SEQ ID NO: 232136 - RNA, 21 nt, Artificial Sequence
  Synthetic
ugauugauuguuguugauuga

SEQ ID NO: 232137 - RNA, 22 nt, Artificial Sequence
  Synthetic
uugauugauuguuguugauuga

SEQ ID NO: 232138 - RNA, 23 nt, Artificial Sequence
  Synthetic
guugauugauuguuguugauuga

SEQ ID NO: 232139 - RNA, 24 nt, Artificial Sequence
  Synthetic
gguugauugauuguuguugauuga

SEQ ID NO: 232140 - RNA, 18 nt, Artificial Sequence
  Synthetic
acaggaugacaauauuga

SEQ ID NO: 232141 - RNA, 19 nt, Artificial Sequence
  Synthetic
uacaggaugacaauauuga

SEQ ID NO: 232142 - RNA, 20 nt, Artificial Sequence
  Synthetic
uuacaggaugacaauauuga

SEQ ID NO: 232143 - RNA, 21 nt, Artificial Sequence
  Synthetic
uuuacaggaugacaauauuga

SEQ ID NO: 232144 - RNA, 22 nt, Artificial Sequence
  Synthetic
auuuacaggaugacaauauuga

SEQ ID NO: 232145 - RNA, 23 nt, Artificial Sequence
  Synthetic
cauuuacaggaugacaauauuga

SEQ ID NO: 232146 - RNA, 24 nt, Artificial Sequence
  Synthetic
acauuuacaggaugacaauauuga

SEQ ID NO: 232147 - RNA, 18 nt, Artificial Sequence
  Synthetic
uuuugugucgaauauuga

SEQ ID NO: 232148 - RNA, 19 nt, Artificial Sequence
  Synthetic
auuuugugucgaauauuga

SEQ ID NO: 232149 - RNA, 20 nt, Artificial Sequence
  Synthetic
cauuuugugucgaauauuga

SEQ ID NO: 232150 - RNA, 21 nt, Artificial Sequence
  Synthetic
ucauuuugugucgaauauuga

SEQ ID NO: 232151 - RNA, 22 nt, Artificial Sequence
  Synthetic
uucauuuugugucgaauauuga

SEQ ID NO: 232152 - RNA, 23 nt, Artificial Sequence
  Synthetic
cuucauuuugugucgaauauuga

SEQ ID NO: 232153 - RNA, 24 nt, Artificial Sequence
  Synthetic
ccuucauuuugugucgaauauuga

SEQ ID NO: 232154 - RNA, 18 nt, Artificial Sequence
  Synthetic
acuauaauaacauauuga

SEQ ID NO: 232155 - RNA, 19 nt, Artificial Sequence
  Synthetic
aacuauaauaacauauuga

SEQ ID NO: 232156 - RNA, 20 nt, Artificial Sequence
  Synthetic
gaacuauaauaacauauuga

SEQ ID NO: 232157 - RNA, 21 nt, Artificial Sequence
  Synthetic
ggaacuauaauaacauauuga

SEQ ID NO: 232158 - RNA, 22 nt, Artificial Sequence
  Synthetic
uggaacuauaauaacauauuga

SEQ ID NO: 232159 - RNA, 23 nt, Artificial Sequence
  Synthetic
guggaacuauaauaacauauuga

SEQ ID NO: 232160 - RNA, 24 nt, Artificial Sequence
  Synthetic
uguggaacuauaauaacauauuga

SEQ ID NO: 232161 - RNA, 18 nt, Artificial Sequence
  Synthetic
auaauucuugcauauuga

SEQ ID NO: 232162 - RNA, 19 nt, Artificial Sequence
  Synthetic
aauaauucuugcauauuga

SEQ ID NO: 232163 - RNA, 20 nt, Artificial Sequence
  Synthetic
uaauaauucuugcauauuga

SEQ ID NO: 232164 - RNA, 21 nt, Artificial Sequence
  Synthetic
uuaauaauucuugcauauuga

SEQ ID NO: 232165 - RNA, 22 nt, Artificial Sequence
  Synthetic
auuaauaauucuugcauauuga

SEQ ID NO: 232166 - RNA, 23 nt, Artificial Sequence
  Synthetic
gauuaauaauucuugcauauuga

SEQ ID NO: 232167 - RNA, 24 nt, Artificial Sequence
  Synthetic
ugauuaauaauucuugcauauuga

SEQ ID NO: 232168 - RNA, 18 nt, Artificial Sequence
  Synthetic
agccuuccaggauauuga

SEQ ID NO: 232169 - RNA, 19 nt, Artificial Sequence
  Synthetic
aagccuuccaggauauuga

SEQ ID NO: 232170 - RNA, 20 nt, Artificial Sequence
  Synthetic
aaagccuuccaggauauuga

SEQ ID NO: 232171 - RNA, 21 nt, Artificial Sequence
  Synthetic
uaaagccuuccaggauauuga

SEQ ID NO: 232172 - RNA, 22 nt, Artificial Sequence
  Synthetic
auaaagccuuccaggauauuga

SEQ ID NO: 232173 - RNA, 23 nt, Artificial Sequence
  Synthetic
cauaaagccuuccaggauauuga

SEQ ID NO: 232174 - RNA, 24 nt, Artificial Sequence
  Synthetic
acauaaagccuuccaggauauuga

SEQ ID NO: 232175 - RNA, 18 nt, Artificial Sequence
  Synthetic
acucuauaaauauauuga

SEQ ID NO: 232176 - RNA, 19 nt, Artificial Sequence
  Synthetic
gacucuauaaauauauuga

SEQ ID NO: 232177 - RNA, 20 nt, Artificial Sequence
  Synthetic
ugacucuauaaauauauuga

SEQ ID NO: 232178 - RNA, 21 nt, Artificial Sequence
  Synthetic
cugacucuauaaauauauuga

SEQ ID NO: 232179 - RNA, 22 nt, Artificial Sequence
  Synthetic
ccugacucuauaaauauauuga

SEQ ID NO: 232180 - RNA, 23 nt, Artificial Sequence
  Synthetic
uccugacucuauaaauauauuga

SEQ ID NO: 232181 - RNA, 24 nt, Artificial Sequence
  Synthetic
uuccugacucuauaaauauauuga

SEQ ID NO: 232182 - RNA, 18 nt, Artificial Sequence
  Synthetic
aaguuaauaauauauuga

SEQ ID NO: 232183 - RNA, 19 nt, Artificial Sequence
  Synthetic
uaaguuaauaauauauuga

SEQ ID NO: 232184 - RNA, 20 nt, Artificial Sequence
  Synthetic
cuaaguuaauaauauauuga

SEQ ID NO: 232185 - RNA, 21 nt, Artificial Sequence
  Synthetic
ucuaaguuaauaauauauuga

SEQ ID NO: 232186 - RNA, 22 nt, Artificial Sequence
  Synthetic
uucuaaguuaauaauauauuga

SEQ ID NO: 232187 - RNA, 23 nt, Artificial Sequence
  Synthetic
uuucuaaguuaauaauauauuga

SEQ ID NO: 232188 - RNA, 24 nt, Artificial Sequence
  Synthetic
auuucuaaguuaauaauauauuga

SEQ ID NO: 232189 - RNA, 18 nt, Artificial Sequence
  Synthetic
caagcaguaauauauuga

SEQ ID NO: 232190 - RNA, 19 nt, Artificial Sequence
  Synthetic
acaagcaguaauauauuga

SEQ ID NO: 232191 - RNA, 20 nt, Artificial Sequence
  Synthetic
aacaagcaguaauauauuga

SEQ ID NO: 232192 - RNA, 21 nt, Artificial Sequence
  Synthetic
caacaagcaguaauauauuga

SEQ ID NO: 232193 - RNA, 22 nt, Artificial Sequence
  Synthetic
ucaacaagcaguaauauauuga

SEQ ID NO: 232194 - RNA, 23 nt, Artificial Sequence
  Synthetic
aucaacaagcaguaauauauuga

SEQ ID NO: 232195 - RNA, 24 nt, Artificial Sequence
  Synthetic
uaucaacaagcaguaauauauuga

SEQ ID NO: 232196 - RNA, 18 nt, Artificial Sequence
  Synthetic
uucagguaauuauauuga

SEQ ID NO: 232197 - RNA, 19 nt, Artificial Sequence
  Synthetic
auucagguaauuauauuga

SEQ ID NO: 232198 - RNA, 20 nt, Artificial Sequence
  Synthetic
uauucagguaauuauauuga

SEQ ID NO: 232199 - RNA, 21 nt, Artificial Sequence
  Synthetic
guauucagguaauuauauuga

SEQ ID NO: 232200 - RNA, 22 nt, Artificial Sequence
  Synthetic
uguauucagguaauuauauuga

SEQ ID NO: 232201 - RNA, 23 nt, Artificial Sequence
  Synthetic
uuguauucagguaauuauauuga

SEQ ID NO: 232202 - RNA, 24 nt, Artificial Sequence
  Synthetic
guuguauucagguaauuauauuga

SEQ ID NO: 232203 - RNA, 18 nt, Artificial Sequence
  Synthetic
ucccucuuuuucuauuga

SEQ ID NO: 232204 - RNA, 19 nt, Artificial Sequence
  Synthetic
uucccucuuuuucuauuga

SEQ ID NO: 232205 - RNA, 20 nt, Artificial Sequence
  Synthetic
auucccucuuuuucuauuga

SEQ ID NO: 232206 - RNA, 18 nt, Artificial Sequence
  Synthetic
caauaaauuagguauuga

SEQ ID NO: 232207 - RNA, 19 nt, Artificial Sequence
  Synthetic
ucaauaaauuagguauuga

SEQ ID NO: 232208 - RNA, 20 nt, Artificial Sequence
  Synthetic
cucaauaaauuagguauuga

SEQ ID NO: 232209 - RNA, 21 nt, Artificial Sequence
  Synthetic
ucucaauaaauuagguauuga

SEQ ID NO: 232210 - RNA, 22 nt, Artificial Sequence
  Synthetic
cucucaauaaauuagguauuga

SEQ ID NO: 232211 - RNA, 23 nt, Artificial Sequence
  Synthetic
acucucaauaaauuagguauuga

SEQ ID NO: 232212 - RNA, 24 nt, Artificial Sequence
  Synthetic
aacucucaauaaauuagguauuga

SEQ ID NO: 232213 - RNA, 18 nt, Artificial Sequence
  Synthetic
cuaguugguggguauuga

SEQ ID NO: 232214 - RNA, 19 nt, Artificial Sequence
  Synthetic
ccuaguugguggguauuga

SEQ ID NO: 232215 - RNA, 20 nt, Artificial Sequence
  Synthetic
cccuaguugguggguauuga

SEQ ID NO: 232216 - RNA, 21 nt, Artificial Sequence
  Synthetic
ccccuaguugguggguauuga

SEQ ID NO: 232217 - RNA, 22 nt, Artificial Sequence
  Synthetic
uccccuaguugguggguauuga

SEQ ID NO: 232218 - RNA, 23 nt, Artificial Sequence
  Synthetic
cuccccuaguugguggguauuga

SEQ ID NO: 232219 - RNA, 24 nt, Artificial Sequence
  Synthetic
gcuccccuaguugguggguauuga

SEQ ID NO: 232220 - RNA, 18 nt, Artificial Sequence
  Synthetic
gaaaaagaaugguauuga

SEQ ID NO: 232221 - RNA, 19 nt, Artificial Sequence
  Synthetic
ggaaaaagaaugguauuga

SEQ ID NO: 232222 - RNA, 20 nt, Artificial Sequence
  Synthetic
uggaaaaagaaugguauuga

SEQ ID NO: 232223 - RNA, 21 nt, Artificial Sequence
  Synthetic
auggaaaaagaaugguauuga

SEQ ID NO: 232224 - RNA, 22 nt, Artificial Sequence
  Synthetic
uauggaaaaagaaugguauuga

SEQ ID NO: 232225 - RNA, 23 nt, Artificial Sequence
  Synthetic
auauggaaaaagaaugguauuga

SEQ ID NO: 232226 - RNA, 24 nt, Artificial Sequence
  Synthetic
uauauggaaaaagaaugguauuga

SEQ ID NO: 232227 - RNA, 18 nt, Artificial Sequence
  Synthetic
uaauauuuggguuauuga

SEQ ID NO: 232228 - RNA, 19 nt, Artificial Sequence
  Synthetic
auaauauuuggguuauuga

SEQ ID NO: 232229 - RNA, 20 nt, Artificial Sequence
  Synthetic
aauaauauuuggguuauuga

SEQ ID NO: 232230 - RNA, 21 nt, Artificial Sequence
  Synthetic
aaauaauauuuggguuauuga

SEQ ID NO: 232231 - RNA, 22 nt, Artificial Sequence
  Synthetic
gaaauaauauuuggguuauuga

SEQ ID NO: 232232 - RNA, 23 nt, Artificial Sequence
  Synthetic
ugaaauaauauuuggguuauuga

SEQ ID NO: 232233 - RNA, 24 nt, Artificial Sequence
  Synthetic
cugaaauaauauuuggguuauuga

SEQ ID NO: 232234 - RNA, 18 nt, Artificial Sequence
  Synthetic
ggacaaguucuuuauuga

SEQ ID NO: 232235 - RNA, 19 nt, Artificial Sequence
  Synthetic
gggacaaguucuuuauuga

SEQ ID NO: 232236 - RNA, 20 nt, Artificial Sequence
  Synthetic
ugggacaaguucuuuauuga

SEQ ID NO: 232237 - RNA, 21 nt, Artificial Sequence
  Synthetic
cugggacaaguucuuuauuga

SEQ ID NO: 232238 - RNA, 22 nt, Artificial Sequence
  Synthetic
gcugggacaaguucuuuauuga

SEQ ID NO: 232239 - RNA, 23 nt, Artificial Sequence
  Synthetic
ugcugggacaaguucuuuauuga

SEQ ID NO: 232240 - RNA, 24 nt, Artificial Sequence
  Synthetic
cugcugggacaaguucuuuauuga

SEQ ID NO: 232241 - RNA, 18 nt, Artificial Sequence
  Synthetic
aaagagauauuuuauuga

SEQ ID NO: 232242 - RNA, 19 nt, Artificial Sequence
  Synthetic
aaaagagauauuuuauuga

SEQ ID NO: 232243 - RNA, 20 nt, Artificial Sequence
  Synthetic
gaaaagagauauuuuauuga

SEQ ID NO: 232244 - RNA, 21 nt, Artificial Sequence
  Synthetic
ggaaaagagauauuuuauuga

SEQ ID NO: 232245 - RNA, 22 nt, Artificial Sequence
  Synthetic
aggaaaagagauauuuuauuga

SEQ ID NO: 232246 - RNA, 23 nt, Artificial Sequence
  Synthetic
aaggaaaagagauauuuuauuga

SEQ ID NO: 232247 - RNA, 24 nt, Artificial Sequence
  Synthetic
uaaggaaaagagauauuuuauuga

SEQ ID NO: 232248 - RNA, 18 nt, Artificial Sequence
  Synthetic
uauauacaaucaacuuga

SEQ ID NO: 232249 - RNA, 19 nt, Artificial Sequence
  Synthetic
guauauacaaucaacuuga

SEQ ID NO: 232250 - RNA, 20 nt, Artificial Sequence
  Synthetic
gguauauacaaucaacuuga

SEQ ID NO: 232251 - RNA, 21 nt, Artificial Sequence
  Synthetic
ugguauauacaaucaacuuga

SEQ ID NO: 232252 - RNA, 22 nt, Artificial Sequence
  Synthetic
uugguauauacaaucaacuuga

SEQ ID NO: 232253 - RNA, 23 nt, Artificial Sequence
  Synthetic
cuugguauauacaaucaacuuga

SEQ ID NO: 232254 - RNA, 24 nt, Artificial Sequence
  Synthetic
ucuugguauauacaaucaacuuga

SEQ ID NO: 232255 - RNA, 18 nt, Artificial Sequence
  Synthetic
uuuugugcaucaacuuga

SEQ ID NO: 232256 - RNA, 19 nt, Artificial Sequence
  Synthetic
auuuugugcaucaacuuga

SEQ ID NO: 232257 - RNA, 20 nt, Artificial Sequence
  Synthetic
aauuuugugcaucaacuuga

SEQ ID NO: 232258 - RNA, 21 nt, Artificial Sequence
  Synthetic
uaauuuugugcaucaacuuga

SEQ ID NO: 232259 - RNA, 22 nt, Artificial Sequence
  Synthetic
uuaauuuugugcaucaacuuga

SEQ ID NO: 232260 - RNA, 23 nt, Artificial Sequence
  Synthetic
guuaauuuugugcaucaacuuga

SEQ ID NO: 232261 - RNA, 24 nt, Artificial Sequence
  Synthetic
gguuaauuuugugcaucaacuuga

SEQ ID NO: 232262 - RNA, 18 nt, Artificial Sequence
  Synthetic
gucauccauugaacuuga

SEQ ID NO: 232263 - RNA, 19 nt, Artificial Sequence
  Synthetic
agucauccauugaacuuga

SEQ ID NO: 232264 - RNA, 20 nt, Artificial Sequence
  Synthetic
gagucauccauugaacuuga

SEQ ID NO: 232265 - RNA, 21 nt, Artificial Sequence
  Synthetic
ggagucauccauugaacuuga

SEQ ID NO: 232266 - RNA, 22 nt, Artificial Sequence
  Synthetic
uggagucauccauugaacuuga

SEQ ID NO: 232267 - RNA, 23 nt, Artificial Sequence
  Synthetic
guggagucauccauugaacuuga

SEQ ID NO: 232268 - RNA, 24 nt, Artificial Sequence
  Synthetic
gguggagucauccauugaacuuga

SEQ ID NO: 232269 - RNA, 18 nt, Artificial Sequence
  Synthetic
guggaaauuugaacuuga

SEQ ID NO: 232270 - RNA, 19 nt, Artificial Sequence
  Synthetic
uguggaaauuugaacuuga

SEQ ID NO: 232271 - RNA, 20 nt, Artificial Sequence
  Synthetic
cuguggaaauuugaacuuga

SEQ ID NO: 232272 - RNA, 21 nt, Artificial Sequence
  Synthetic
ucuguggaaauuugaacuuga

SEQ ID NO: 232273 - RNA, 22 nt, Artificial Sequence
  Synthetic
aucuguggaaauuugaacuuga

SEQ ID NO: 232274 - RNA, 23 nt, Artificial Sequence
  Synthetic
gaucuguggaaauuugaacuuga

SEQ ID NO: 232275 - RNA, 24 nt, Artificial Sequence
  Synthetic
agaucuguggaaauuugaacuuga

SEQ ID NO: 232276 - RNA, 18 nt, Artificial Sequence
  Synthetic
uuauuuccugacacuuga

SEQ ID NO: 232277 - RNA, 19 nt, Artificial Sequence
  Synthetic
cuuauuuccugacacuuga

SEQ ID NO: 232278 - RNA, 20 nt, Artificial Sequence
  Synthetic
gcuuauuuccugacacuuga

SEQ ID NO: 232279 - RNA, 21 nt, Artificial Sequence
  Synthetic
agcuuauuuccugacacuuga

SEQ ID NO: 232280 - RNA, 22 nt, Artificial Sequence
  Synthetic
uagcuuauuuccugacacuuga

SEQ ID NO: 232281 - RNA, 23 nt, Artificial Sequence
  Synthetic
uuagcuuauuuccugacacuuga

SEQ ID NO: 232282 - RNA, 24 nt, Artificial Sequence
  Synthetic
uuuagcuuauuuccugacacuuga

SEQ ID NO: 232283 - RNA, 18 nt, Artificial Sequence
  Synthetic
gcucaggaaaugacuuga

SEQ ID NO: 232284 - RNA, 19 nt, Artificial Sequence
  Synthetic
agcucaggaaaugacuuga

SEQ ID NO: 232285 - RNA, 20 nt, Artificial Sequence
  Synthetic
uagcucaggaaaugacuuga

SEQ ID NO: 232286 - RNA, 21 nt, Artificial Sequence
  Synthetic
uuagcucaggaaaugacuuga

SEQ ID NO: 232287 - RNA, 22 nt, Artificial Sequence
  Synthetic
guuagcucaggaaaugacuuga

SEQ ID NO: 232288 - RNA, 23 nt, Artificial Sequence
  Synthetic
aguuagcucaggaaaugacuuga

SEQ ID NO: 232289 - RNA, 24 nt, Artificial Sequence
  Synthetic
aaguuagcucaggaaaugacuuga

SEQ ID NO: 232290 - RNA, 18 nt, Artificial Sequence
  Synthetic
gauauaaaauguacuuga

SEQ ID NO: 232291 - RNA, 19 nt, Artificial Sequence
  Synthetic
agauauaaaauguacuuga

SEQ ID NO: 232292 - RNA, 20 nt, Artificial Sequence
  Synthetic
aagauauaaaauguacuuga

SEQ ID NO: 232293 - RNA, 21 nt, Artificial Sequence
  Synthetic
uaagauauaaaauguacuuga

SEQ ID NO: 232294 - RNA, 22 nt, Artificial Sequence
  Synthetic
auaagauauaaaauguacuuga

SEQ ID NO: 232295 - RNA, 23 nt, Artificial Sequence
  Synthetic
aauaagauauaaaauguacuuga

SEQ ID NO: 232296 - RNA, 24 nt, Artificial Sequence
  Synthetic
aaauaagauauaaaauguacuuga

SEQ ID NO: 232297 - RNA, 18 nt, Artificial Sequence
  Synthetic
agcuguuuuguuacuuga

SEQ ID NO: 232298 - RNA, 19 nt, Artificial Sequence
  Synthetic
aagcuguuuuguuacuuga

SEQ ID NO: 232299 - RNA, 20 nt, Artificial Sequence
  Synthetic
uaagcuguuuuguuacuuga

SEQ ID NO: 232300 - RNA, 21 nt, Artificial Sequence
  Synthetic
uuaagcuguuuuguuacuuga

SEQ ID NO: 232301 - RNA, 22 nt, Artificial Sequence
  Synthetic
auuaagcuguuuuguuacuuga

SEQ ID NO: 232302 - RNA, 23 nt, Artificial Sequence
  Synthetic
uauuaagcuguuuuguuacuuga

SEQ ID NO: 232303 - RNA, 24 nt, Artificial Sequence
  Synthetic
guauuaagcuguuuuguuacuuga

SEQ ID NO: 232304 - RNA, 18 nt, Artificial Sequence
  Synthetic
accaugcaaaaaccuuga

SEQ ID NO: 232305 - RNA, 19 nt, Artificial Sequence
  Synthetic
aaccaugcaaaaaccuuga

SEQ ID NO: 232306 - RNA, 20 nt, Artificial Sequence
  Synthetic
aaaccaugcaaaaaccuuga

SEQ ID NO: 232307 - RNA, 21 nt, Artificial Sequence
  Synthetic
uaaaccaugcaaaaaccuuga

SEQ ID NO: 232308 - RNA, 22 nt, Artificial Sequence
  Synthetic
guaaaccaugcaaaaaccuuga

SEQ ID NO: 232309 - RNA, 23 nt, Artificial Sequence
  Synthetic
aguaaaccaugcaaaaaccuuga

SEQ ID NO: 232310 - RNA, 24 nt, Artificial Sequence
  Synthetic
gaguaaaccaugcaaaaaccuuga

SEQ ID NO: 232311 - RNA, 18 nt, Artificial Sequence
  Synthetic
ucugaguaccaaccuuga

SEQ ID NO: 232312 - RNA, 19 nt, Artificial Sequence
  Synthetic
uucugaguaccaaccuuga

SEQ ID NO: 232313 - RNA, 20 nt, Artificial Sequence
  Synthetic
guucugaguaccaaccuuga

SEQ ID NO: 232314 - RNA, 21 nt, Artificial Sequence
  Synthetic
uguucugaguaccaaccuuga

SEQ ID NO: 232315 - RNA, 22 nt, Artificial Sequence
  Synthetic
guguucugaguaccaaccuuga

SEQ ID NO: 232316 - RNA, 23 nt, Artificial Sequence
  Synthetic
aguguucugaguaccaaccuuga

SEQ ID NO: 232317 - RNA, 24 nt, Artificial Sequence
  Synthetic
gaguguucugaguaccaaccuuga

SEQ ID NO: 232318 - RNA, 18 nt, Artificial Sequence
  Synthetic
cagcuugaauaaccuuga

SEQ ID NO: 232319 - RNA, 19 nt, Artificial Sequence
  Synthetic
acagcuugaauaaccuuga

SEQ ID NO: 232320 - RNA, 20 nt, Artificial Sequence
  Synthetic
aacagcuugaauaaccuuga

SEQ ID NO: 232321 - RNA, 21 nt, Artificial Sequence
  Synthetic
caacagcuugaauaaccuuga

SEQ ID NO: 232322 - RNA, 22 nt, Artificial Sequence
  Synthetic
acaacagcuugaauaaccuuga

SEQ ID NO: 232323 - RNA, 23 nt, Artificial Sequence
  Synthetic
gacaacagcuugaauaaccuuga

SEQ ID NO: 232324 - RNA, 24 nt, Artificial Sequence
  Synthetic
ggacaacagcuugaauaaccuuga

SEQ ID NO: 232325 - RNA, 18 nt, Artificial Sequence
  Synthetic
cccauguggaucccuuga

SEQ ID NO: 232326 - RNA, 19 nt, Artificial Sequence
  Synthetic
acccauguggaucccuuga

SEQ ID NO: 232327 - RNA, 20 nt, Artificial Sequence
  Synthetic
aacccauguggaucccuuga

SEQ ID NO: 232328 - RNA, 21 nt, Artificial Sequence
  Synthetic
uaacccauguggaucccuuga

SEQ ID NO: 232329 - RNA, 22 nt, Artificial Sequence
  Synthetic
cuaacccauguggaucccuuga

SEQ ID NO: 232330 - RNA, 23 nt, Artificial Sequence
  Synthetic
gcuaacccauguggaucccuuga

SEQ ID NO: 232331 - RNA, 24 nt, Artificial Sequence
  Synthetic
ugcuaacccauguggaucccuuga

SEQ ID NO: 232332 - RNA, 18 nt, Artificial Sequence
  Synthetic
ugcaugcacaagccuuga

SEQ ID NO: 232333 - RNA, 19 nt, Artificial Sequence
  Synthetic
cugcaugcacaagccuuga

SEQ ID NO: 232334 - RNA, 20 nt, Artificial Sequence
  Synthetic
ucugcaugcacaagccuuga

SEQ ID NO: 232335 - RNA, 21 nt, Artificial Sequence
  Synthetic
aucugcaugcacaagccuuga

SEQ ID NO: 232336 - RNA, 22 nt, Artificial Sequence
  Synthetic
gaucugcaugcacaagccuuga

SEQ ID NO: 232337 - RNA, 23 nt, Artificial Sequence
  Synthetic
agaucugcaugcacaagccuuga

SEQ ID NO: 232338 - RNA, 24 nt, Artificial Sequence
  Synthetic
aagaucugcaugcacaagccuuga

SEQ ID NO: 232339 - RNA, 18 nt, Artificial Sequence
  Synthetic
ugucuaaaggagccuuga

SEQ ID NO: 232340 - RNA, 19 nt, Artificial Sequence
  Synthetic
augucuaaaggagccuuga

SEQ ID NO: 232341 - RNA, 20 nt, Artificial Sequence
  Synthetic
aaugucuaaaggagccuuga

SEQ ID NO: 232342 - RNA, 21 nt, Artificial Sequence
  Synthetic
gaaugucuaaaggagccuuga

SEQ ID NO: 232343 - RNA, 22 nt, Artificial Sequence
  Synthetic
agaaugucuaaaggagccuuga

SEQ ID NO: 232344 - RNA, 23 nt, Artificial Sequence
  Synthetic
uagaaugucuaaaggagccuuga

SEQ ID NO: 232345 - RNA, 24 nt, Artificial Sequence
  Synthetic
cuagaaugucuaaaggagccuuga

SEQ ID NO: 232346 - RNA, 18 nt, Artificial Sequence
  Synthetic
uggagggucuugccuuga

SEQ ID NO: 232347 - RNA, 19 nt, Artificial Sequence
  Synthetic
auggagggucuugccuuga

SEQ ID NO: 232348 - RNA, 20 nt, Artificial Sequence
  Synthetic
gauggagggucuugccuuga

SEQ ID NO: 232349 - RNA, 21 nt, Artificial Sequence
  Synthetic
ugauggagggucuugccuuga

SEQ ID NO: 232350 - RNA, 22 nt, Artificial Sequence
  Synthetic
cugauggagggucuugccuuga

SEQ ID NO: 232351 - RNA, 23 nt, Artificial Sequence
  Synthetic
gcugauggagggucuugccuuga

SEQ ID NO: 232352 - RNA, 24 nt, Artificial Sequence
  Synthetic
ugcugauggagggucuugccuuga

SEQ ID NO: 232353 - RNA, 18 nt, Artificial Sequence
  Synthetic
gggcuaaaaucuccuuga

SEQ ID NO: 232354 - RNA, 19 nt, Artificial Sequence
  Synthetic
ugggcuaaaaucuccuuga

SEQ ID NO: 232355 - RNA, 20 nt, Artificial Sequence
  Synthetic
augggcuaaaaucuccuuga

SEQ ID NO: 232356 - RNA, 21 nt, Artificial Sequence
  Synthetic
gaugggcuaaaaucuccuuga

SEQ ID NO: 232357 - RNA, 22 nt, Artificial Sequence
  Synthetic
cgaugggcuaaaaucuccuuga

SEQ ID NO: 232358 - RNA, 23 nt, Artificial Sequence
  Synthetic
ccgaugggcuaaaaucuccuuga

SEQ ID NO: 232359 - RNA, 24 nt, Artificial Sequence
  Synthetic
gccgaugggcuaaaaucuccuuga

SEQ ID NO: 232360 - RNA, 18 nt, Artificial Sequence
  Synthetic
gaugaacauucuccuuga

SEQ ID NO: 232361 - RNA, 19 nt, Artificial Sequence
  Synthetic
ugaugaacauucuccuuga

SEQ ID NO: 232362 - RNA, 20 nt, Artificial Sequence
  Synthetic
cugaugaacauucuccuuga

SEQ ID NO: 232363 - RNA, 21 nt, Artificial Sequence
  Synthetic
ucugaugaacauucuccuuga

SEQ ID NO: 232364 - RNA, 22 nt, Artificial Sequence
  Synthetic
gucugaugaacauucuccuuga

SEQ ID NO: 232365 - RNA, 23 nt, Artificial Sequence
  Synthetic
agucugaugaacauucuccuuga

SEQ ID NO: 232366 - RNA, 24 nt, Artificial Sequence
  Synthetic
cagucugaugaacauucuccuuga

SEQ ID NO: 232367 - RNA, 18 nt, Artificial Sequence
  Synthetic
uggcuuucagguccuuga

SEQ ID NO: 232368 - RNA, 19 nt, Artificial Sequence
  Synthetic
auggcuuucagguccuuga

SEQ ID NO: 232369 - RNA, 20 nt, Artificial Sequence
  Synthetic
aauggcuuucagguccuuga

SEQ ID NO: 232370 - RNA, 21 nt, Artificial Sequence
  Synthetic
gaauggcuuucagguccuuga

SEQ ID NO: 232371 - RNA, 22 nt, Artificial Sequence
  Synthetic
agaauggcuuucagguccuuga

SEQ ID NO: 232372 - RNA, 23 nt, Artificial Sequence
  Synthetic
aagaauggcuuucagguccuuga

SEQ ID NO: 232373 - RNA, 24 nt, Artificial Sequence
  Synthetic
aaagaauggcuuucagguccuuga

SEQ ID NO: 232374 - RNA, 18 nt, Artificial Sequence
  Synthetic
aauauaaucuguccuuga

SEQ ID NO: 232375 - RNA, 19 nt, Artificial Sequence
  Synthetic
gaauauaaucuguccuuga

SEQ ID NO: 232376 - RNA, 20 nt, Artificial Sequence
  Synthetic
agaauauaaucuguccuuga

SEQ ID NO: 232377 - RNA, 21 nt, Artificial Sequence
  Synthetic
cagaauauaaucuguccuuga

SEQ ID NO: 232378 - RNA, 22 nt, Artificial Sequence
  Synthetic
ucagaauauaaucuguccuuga

SEQ ID NO: 232379 - RNA, 23 nt, Artificial Sequence
  Synthetic
uucagaauauaaucuguccuuga

SEQ ID NO: 232380 - RNA, 24 nt, Artificial Sequence
  Synthetic
auucagaauauaaucuguccuuga

SEQ ID NO: 232381 - RNA, 18 nt, Artificial Sequence
  Synthetic
caaacauuuauuccuuga

SEQ ID NO: 232382 - RNA, 19 nt, Artificial Sequence
  Synthetic
gcaaacauuuauuccuuga

SEQ ID NO: 232383 - RNA, 20 nt, Artificial Sequence
  Synthetic
ugcaaacauuuauuccuuga

SEQ ID NO: 232384 - RNA, 21 nt, Artificial Sequence
  Synthetic
uugcaaacauuuauuccuuga

SEQ ID NO: 232385 - RNA, 22 nt, Artificial Sequence
  Synthetic
uuugcaaacauuuauuccuuga

SEQ ID NO: 232386 - RNA, 23 nt, Artificial Sequence
  Synthetic
cuuugcaaacauuuauuccuuga

SEQ ID NO: 232387 - RNA, 24 nt, Artificial Sequence
  Synthetic
gcuuugcaaacauuuauuccuuga

SEQ ID NO: 232388 - RNA, 18 nt, Artificial Sequence
  Synthetic
cucaugcuuugagcuuga

SEQ ID NO: 232389 - RNA, 19 nt, Artificial Sequence
  Synthetic
acucaugcuuugagcuuga

SEQ ID NO: 232390 - RNA, 20 nt, Artificial Sequence
  Synthetic
uacucaugcuuugagcuuga

SEQ ID NO: 232391 - RNA, 21 nt, Artificial Sequence
  Synthetic
uuacucaugcuuugagcuuga

SEQ ID NO: 232392 - RNA, 22 nt, Artificial Sequence
  Synthetic
cuuacucaugcuuugagcuuga

SEQ ID NO: 232393 - RNA, 23 nt, Artificial Sequence
  Synthetic
acuuacucaugcuuugagcuuga

SEQ ID NO: 232394 - RNA, 24 nt, Artificial Sequence
  Synthetic
cacuuacucaugcuuugagcuuga

SEQ ID NO: 232395 - RNA, 18 nt, Artificial Sequence
  Synthetic
aagucaaugguagcuuga

SEQ ID NO: 232396 - RNA, 19 nt, Artificial Sequence
  Synthetic
aaagucaaugguagcuuga

SEQ ID NO: 232397 - RNA, 20 nt, Artificial Sequence
  Synthetic
gaaagucaaugguagcuuga

SEQ ID NO: 232398 - RNA, 24 nt, Artificial Sequence
  Synthetic
ugaagaaagucaaugguagcuuga

SEQ ID NO: 232399 - RNA, 18 nt, Artificial Sequence
  Synthetic
aaggcauugguagcuuga

SEQ ID NO: 232400 - RNA, 19 nt, Artificial Sequence
  Synthetic
aaaggcauugguagcuuga

SEQ ID NO: 232401 - RNA, 20 nt, Artificial Sequence
  Synthetic
gaaaggcauugguagcuuga

SEQ ID NO: 232402 - RNA, 18 nt, Artificial Sequence
  Synthetic
aagucauugguagcuuga

SEQ ID NO: 232403 - RNA, 19 nt, Artificial Sequence
  Synthetic
aaagucauugguagcuuga

SEQ ID NO: 232404 - RNA, 20 nt, Artificial Sequence
  Synthetic
gaaagucauugguagcuuga

SEQ ID NO: 232405 - RNA, 21 nt, Artificial Sequence
  Synthetic
agaaagucauugguagcuuga

SEQ ID NO: 232406 - RNA, 22 nt, Artificial Sequence
  Synthetic
aagaaagucauugguagcuuga

SEQ ID NO: 232407 - RNA, 23 nt, Artificial Sequence
  Synthetic
gaagaaagucauugguagcuuga

SEQ ID NO: 232408 - RNA, 24 nt, Artificial Sequence
  Synthetic
ugaagaaagucauugguagcuuga

SEQ ID NO: 232409 - RNA, 18 nt, Artificial Sequence
  Synthetic
guauaaauaugcgcuuga

SEQ ID NO: 232410 - RNA, 19 nt, Artificial Sequence
  Synthetic
gguauaaauaugcgcuuga

SEQ ID NO: 232411 - RNA, 20 nt, Artificial Sequence
  Synthetic
agguauaaauaugcgcuuga

SEQ ID NO: 232412 - RNA, 21 nt, Artificial Sequence
  Synthetic
cagguauaaauaugcgcuuga

SEQ ID NO: 232413 - RNA, 22 nt, Artificial Sequence
  Synthetic
acagguauaaauaugcgcuuga

SEQ ID NO: 232414 - RNA, 23 nt, Artificial Sequence
  Synthetic
aacagguauaaauaugcgcuuga

SEQ ID NO: 232415 - RNA, 24 nt, Artificial Sequence
  Synthetic
uaacagguauaaauaugcgcuuga

SEQ ID NO: 232416 - RNA, 18 nt, Artificial Sequence
  Synthetic
agucauaugauggcuuga

SEQ ID NO: 232417 - RNA, 19 nt, Artificial Sequence
  Synthetic
cagucauaugauggcuuga

SEQ ID NO: 232418 - RNA, 20 nt, Artificial Sequence
  Synthetic
gcagucauaugauggcuuga

SEQ ID NO: 232419 - RNA, 21 nt, Artificial Sequence
  Synthetic
ugcagucauaugauggcuuga

SEQ ID NO: 232420 - RNA, 22 nt, Artificial Sequence
  Synthetic
cugcagucauaugauggcuuga

SEQ ID NO: 232421 - RNA, 23 nt, Artificial Sequence
  Synthetic
gcugcagucauaugauggcuuga

SEQ ID NO: 232422 - RNA, 24 nt, Artificial Sequence
  Synthetic
ggcugcagucauaugauggcuuga

SEQ ID NO: 232423 - RNA, 18 nt, Artificial Sequence
  Synthetic
caacagaaaugugcuuga

SEQ ID NO: 232424 - RNA, 19 nt, Artificial Sequence
  Synthetic
gcaacagaaaugugcuuga

SEQ ID NO: 232425 - RNA, 20 nt, Artificial Sequence
  Synthetic
ggcaacagaaaugugcuuga

SEQ ID NO: 232426 - RNA, 21 nt, Artificial Sequence
  Synthetic
uggcaacagaaaugugcuuga

SEQ ID NO: 232427 - RNA, 22 nt, Artificial Sequence
  Synthetic
auggcaacagaaaugugcuuga

SEQ ID NO: 232428 - RNA, 23 nt, Artificial Sequence
  Synthetic
uauggcaacagaaaugugcuuga

SEQ ID NO: 232429 - RNA, 24 nt, Artificial Sequence
  Synthetic
cuauggcaacagaaaugugcuuga

SEQ ID NO: 232430 - RNA, 18 nt, Artificial Sequence
  Synthetic
uccacuaucauugcuuga

SEQ ID NO: 232431 - RNA, 19 nt, Artificial Sequence
  Synthetic
uuccacuaucauugcuuga

SEQ ID NO: 232432 - RNA, 20 nt, Artificial Sequence
  Synthetic
cuuccacuaucauugcuuga

SEQ ID NO: 232433 - RNA, 21 nt, Artificial Sequence
  Synthetic
acuuccacuaucauugcuuga

SEQ ID NO: 232434 - RNA, 22 nt, Artificial Sequence
  Synthetic
aacuuccacuaucauugcuuga

SEQ ID NO: 232435 - RNA, 23 nt, Artificial Sequence
  Synthetic
gaacuuccacuaucauugcuuga

SEQ ID NO: 232436 - RNA, 24 nt, Artificial Sequence
  Synthetic
agaacuuccacuaucauugcuuga

SEQ ID NO: 232437 - RNA, 18 nt, Artificial Sequence
  Synthetic
cagucauauuaaucuuga

SEQ ID NO: 232438 - RNA, 19 nt, Artificial Sequence
  Synthetic
ucagucauauuaaucuuga

SEQ ID NO: 232439 - RNA, 20 nt, Artificial Sequence
  Synthetic
cucagucauauuaaucuuga

SEQ ID NO: 232440 - RNA, 21 nt, Artificial Sequence
  Synthetic
acucagucauauuaaucuuga

SEQ ID NO: 232441 - RNA, 22 nt, Artificial Sequence
  Synthetic
aacucagucauauuaaucuuga

SEQ ID NO: 232442 - RNA, 23 nt, Artificial Sequence
  Synthetic
caacucagucauauuaaucuuga

SEQ ID NO: 232443 - RNA, 24 nt, Artificial Sequence
  Synthetic
acaacucagucauauuaaucuuga

SEQ ID NO: 232444 - RNA, 18 nt, Artificial Sequence
  Synthetic
aguauuggacacucuuga

SEQ ID NO: 232445 - RNA, 19 nt, Artificial Sequence
  Synthetic
aaguauuggacacucuuga

SEQ ID NO: 232446 - RNA, 20 nt, Artificial Sequence
  Synthetic
uaaguauuggacacucuuga

SEQ ID NO: 232447 - RNA, 21 nt, Artificial Sequence
  Synthetic
guaaguauuggacacucuuga

SEQ ID NO: 232448 - RNA, 22 nt, Artificial Sequence
  Synthetic
uguaaguauuggacacucuuga

SEQ ID NO: 232449 - RNA, 23 nt, Artificial Sequence
  Synthetic
uuguaaguauuggacacucuuga

SEQ ID NO: 232450 - RNA, 24 nt, Artificial Sequence
  Synthetic
guuguaaguauuggacacucuuga

SEQ ID NO: 232451 - RNA, 18 nt, Artificial Sequence
  Synthetic
acuaucgugcgcucuuga

SEQ ID NO: 232452 - RNA, 19 nt, Artificial Sequence
  Synthetic
cacuaucgugcgcucuuga

SEQ ID NO: 232453 - RNA, 20 nt, Artificial Sequence
  Synthetic
acacuaucgugcgcucuuga

SEQ ID NO: 232454 - RNA, 21 nt, Artificial Sequence
  Synthetic
gacacuaucgugcgcucuuga

SEQ ID NO: 232455 - RNA, 22 nt, Artificial Sequence
  Synthetic
ugacacuaucgugcgcucuuga

SEQ ID NO: 232456 - RNA, 23 nt, Artificial Sequence
  Synthetic
augacacuaucgugcgcucuuga

SEQ ID NO: 232457 - RNA, 24 nt, Artificial Sequence
  Synthetic
uaugacacuaucgugcgcucuuga

SEQ ID NO: 232458 - RNA, 18 nt, Artificial Sequence
  Synthetic
aaguuaauuugcucuuga

SEQ ID NO: 232459 - RNA, 19 nt, Artificial Sequence
  Synthetic
aaaguuaauuugcucuuga

SEQ ID NO: 232460 - RNA, 20 nt, Artificial Sequence
  Synthetic
gaaaguuaauuugcucuuga

SEQ ID NO: 232461 - RNA, 21 nt, Artificial Sequence
  Synthetic
ggaaaguuaauuugcucuuga

SEQ ID NO: 232462 - RNA, 22 nt, Artificial Sequence
  Synthetic
gggaaaguuaauuugcucuuga

SEQ ID NO: 232463 - RNA, 23 nt, Artificial Sequence
  Synthetic
agggaaaguuaauuugcucuuga

SEQ ID NO: 232464 - RNA, 24 nt, Artificial Sequence
  Synthetic
gagggaaaguuaauuugcucuuga

SEQ ID NO: 232465 - RNA, 18 nt, Artificial Sequence
  Synthetic
acacuguaucucucuuga

SEQ ID NO: 232466 - RNA, 19 nt, Artificial Sequence
  Synthetic
gacacuguaucucucuuga

SEQ ID NO: 232467 - RNA, 20 nt, Artificial Sequence
  Synthetic
agacacuguaucucucuuga

SEQ ID NO: 232468 - RNA, 21 nt, Artificial Sequence
  Synthetic
gagacacuguaucucucuuga

SEQ ID NO: 232469 - RNA, 22 nt, Artificial Sequence
  Synthetic
cgagacacuguaucucucuuga

SEQ ID NO: 232470 - RNA, 23 nt, Artificial Sequence
  Synthetic
ucgagacacuguaucucucuuga

SEQ ID NO: 232471 - RNA, 24 nt, Artificial Sequence
  Synthetic
gucgagacacuguaucucucuuga

SEQ ID NO: 232472 - RNA, 18 nt, Artificial Sequence
  Synthetic
cuaaaguugcagucuuga

SEQ ID NO: 232473 - RNA, 19 nt, Artificial Sequence
  Synthetic
ccuaaaguugcagucuuga

SEQ ID NO: 232474 - RNA, 20 nt, Artificial Sequence
  Synthetic
gccuaaaguugcagucuuga

SEQ ID NO: 232475 - RNA, 21 nt, Artificial Sequence
  Synthetic
ggccuaaaguugcagucuuga

SEQ ID NO: 232476 - RNA, 22 nt, Artificial Sequence
  Synthetic
uggccuaaaguugcagucuuga

SEQ ID NO: 232477 - RNA, 23 nt, Artificial Sequence
  Synthetic
cuggccuaaaguugcagucuuga

SEQ ID NO: 232478 - RNA, 24 nt, Artificial Sequence
  Synthetic
gcuggccuaaaguugcagucuuga

SEQ ID NO: 232479 - RNA, 18 nt, Artificial Sequence
  Synthetic
uugugaauacauucuuga

SEQ ID NO: 232480 - RNA, 19 nt, Artificial Sequence
  Synthetic
uuugugaauacauucuuga

SEQ ID NO: 232481 - RNA, 20 nt, Artificial Sequence
  Synthetic
auuugugaauacauucuuga

SEQ ID NO: 232482 - RNA, 21 nt, Artificial Sequence
  Synthetic
cauuugugaauacauucuuga

SEQ ID NO: 232483 - RNA, 22 nt, Artificial Sequence
  Synthetic
acauuugugaauacauucuuga

SEQ ID NO: 232484 - RNA, 23 nt, Artificial Sequence
  Synthetic
cacauuugugaauacauucuuga

SEQ ID NO: 232485 - RNA, 24 nt, Artificial Sequence
  Synthetic
ccacauuugugaauacauucuuga

SEQ ID NO: 232486 - RNA, 18 nt, Artificial Sequence
  Synthetic
uguacuggauauucuuga

SEQ ID NO: 232487 - RNA, 19 nt, Artificial Sequence
  Synthetic
cuguacuggauauucuuga

SEQ ID NO: 232488 - RNA, 20 nt, Artificial Sequence
  Synthetic
ucuguacuggauauucuuga

SEQ ID NO: 232489 - RNA, 21 nt, Artificial Sequence
  Synthetic
cucuguacuggauauucuuga

SEQ ID NO: 232490 - RNA, 22 nt, Artificial Sequence
  Synthetic
ccucuguacuggauauucuuga

SEQ ID NO: 232491 - RNA, 23 nt, Artificial Sequence
  Synthetic
uccucuguacuggauauucuuga

SEQ ID NO: 232492 - RNA, 24 nt, Artificial Sequence
  Synthetic
cuccucuguacuggauauucuuga

SEQ ID NO: 232493 - RNA, 18 nt, Artificial Sequence
  Synthetic
uauucauauacuucuuga

SEQ ID NO: 232494 - RNA, 19 nt, Artificial Sequence
  Synthetic
uuauucauauacuucuuga

SEQ ID NO: 232495 - RNA, 20 nt, Artificial Sequence
  Synthetic
cuuauucauauacuucuuga

SEQ ID NO: 232496 - RNA, 21 nt, Artificial Sequence
  Synthetic
ccuuauucauauacuucuuga

SEQ ID NO: 232497 - RNA, 22 nt, Artificial Sequence
  Synthetic
cccuuauucauauacuucuuga

SEQ ID NO: 232498 - RNA, 23 nt, Artificial Sequence
  Synthetic
ucccuuauucauauacuucuuga

SEQ ID NO: 232499 - RNA, 24 nt, Artificial Sequence
  Synthetic
uucccuuauucauauacuucuuga

SEQ ID NO: 232500 - RNA, 18 nt, Artificial Sequence
  Synthetic
agcauuuuaauuucuuga

SEQ ID NO: 232501 - RNA, 19 nt, Artificial Sequence
  Synthetic
aagcauuuuaauuucuuga

SEQ ID NO: 232502 - RNA, 20 nt, Artificial Sequence
  Synthetic
uaagcauuuuaauuucuuga

SEQ ID NO: 232503 - RNA, 21 nt, Artificial Sequence
  Synthetic
uuaagcauuuuaauuucuuga

SEQ ID NO: 232504 - RNA, 22 nt, Artificial Sequence
  Synthetic
cuuaagcauuuuaauuucuuga

SEQ ID NO: 232505 - RNA, 23 nt, Artificial Sequence
  Synthetic
acuuaagcauuuuaauuucuuga

SEQ ID NO: 232506 - RNA, 24 nt, Artificial Sequence
  Synthetic
cacuuaagcauuuuaauuucuuga

SEQ ID NO: 232507 - RNA, 18 nt, Artificial Sequence
  Synthetic
caguauucuauuucuuga

SEQ ID NO: 232508 - RNA, 19 nt, Artificial Sequence
  Synthetic
gcaguauucuauuucuuga

SEQ ID NO: 232509 - RNA, 20 nt, Artificial Sequence
  Synthetic
agcaguauucuauuucuuga

SEQ ID NO: 232510 - RNA, 21 nt, Artificial Sequence
  Synthetic
uagcaguauucuauuucuuga

SEQ ID NO: 232511 - RNA, 22 nt, Artificial Sequence
  Synthetic
uuagcaguauucuauuucuuga

SEQ ID NO: 232512 - RNA, 23 nt, Artificial Sequence
  Synthetic
auuagcaguauucuauuucuuga

SEQ ID NO: 232513 - RNA, 24 nt, Artificial Sequence
  Synthetic
uauuagcaguauucuauuucuuga

SEQ ID NO: 232514 - RNA, 18 nt, Artificial Sequence
  Synthetic
uugagaacaguuucuuga

SEQ ID NO: 232515 - RNA, 19 nt, Artificial Sequence
  Synthetic
cuugagaacaguuucuuga

SEQ ID NO: 232516 - RNA, 20 nt, Artificial Sequence
  Synthetic
acuugagaacaguuucuuga

SEQ ID NO: 232517 - RNA, 21 nt, Artificial Sequence
  Synthetic
aacuugagaacaguuucuuga

SEQ ID NO: 232518 - RNA, 22 nt, Artificial Sequence
  Synthetic
aaacuugagaacaguuucuuga

SEQ ID NO: 232519 - RNA, 23 nt, Artificial Sequence
  Synthetic
uaaacuugagaacaguuucuuga

SEQ ID NO: 232520 - RNA, 24 nt, Artificial Sequence
  Synthetic
auaaacuugagaacaguuucuuga

SEQ ID NO: 232521 - RNA, 18 nt, Artificial Sequence
  Synthetic
uguguuuuuguuucuuga

SEQ ID NO: 232522 - RNA, 19 nt, Artificial Sequence
  Synthetic
auguguuuuuguuucuuga

SEQ ID NO: 232523 - RNA, 20 nt, Artificial Sequence
  Synthetic
cauguguuuuuguuucuuga

SEQ ID NO: 232524 - RNA, 21 nt, Artificial Sequence
  Synthetic
acauguguuuuuguuucuuga

SEQ ID NO: 232525 - RNA, 22 nt, Artificial Sequence
  Synthetic
aacauguguuuuuguuucuuga

SEQ ID NO: 232526 - RNA, 23 nt, Artificial Sequence
  Synthetic
uaacauguguuuuuguuucuuga

SEQ ID NO: 232527 - RNA, 24 nt, Artificial Sequence
  Synthetic
auaacauguguuuuuguuucuuga

SEQ ID NO: 232528 - RNA, 18 nt, Artificial Sequence
  Synthetic
augaaaauuaaaaguuga

SEQ ID NO: 232529 - RNA, 19 nt, Artificial Sequence
  Synthetic
aaugaaaauuaaaaguuga

SEQ ID NO: 232530 - RNA, 20 nt, Artificial Sequence
  Synthetic
aaaugaaaauuaaaaguuga

SEQ ID NO: 232531 - RNA, 21 nt, Artificial Sequence
  Synthetic
uaaaugaaaauuaaaaguuga

SEQ ID NO: 232532 - RNA, 22 nt, Artificial Sequence
  Synthetic
uuaaaugaaaauuaaaaguuga

SEQ ID NO: 232533 - RNA, 23 nt, Artificial Sequence
  Synthetic
guuaaaugaaaauuaaaaguuga

SEQ ID NO: 232534 - RNA, 24 nt, Artificial Sequence
  Synthetic
uguuaaaugaaaauuaaaaguuga

SEQ ID NO: 232535 - RNA, 18 nt, Artificial Sequence
  Synthetic
gaagauaaugaaaguuga

SEQ ID NO: 232536 - RNA, 19 nt, Artificial Sequence
  Synthetic
agaagauaaugaaaguuga

SEQ ID NO: 232537 - RNA, 20 nt, Artificial Sequence
  Synthetic
aagaagauaaugaaaguuga

SEQ ID NO: 232538 - RNA, 21 nt, Artificial Sequence
  Synthetic
aaagaagauaaugaaaguuga

SEQ ID NO: 232539 - RNA, 22 nt, Artificial Sequence
  Synthetic
gaaagaagauaaugaaaguuga

SEQ ID NO: 232540 - RNA, 23 nt, Artificial Sequence
  Synthetic
ugaaagaagauaaugaaaguuga

SEQ ID NO: 232541 - RNA, 24 nt, Artificial Sequence
  Synthetic
augaaagaagauaaugaaaguuga

SEQ ID NO: 232542 - RNA, 18 nt, Artificial Sequence
  Synthetic
cugugugaauaaaguuga

SEQ ID NO: 232543 - RNA, 19 nt, Artificial Sequence
  Synthetic
acugugugaauaaaguuga

SEQ ID NO: 232544 - RNA, 20 nt, Artificial Sequence
  Synthetic
cacugugugaauaaaguuga

SEQ ID NO: 232545 - RNA, 21 nt, Artificial Sequence
  Synthetic
ucacugugugaauaaaguuga

SEQ ID NO: 232546 - RNA, 22 nt, Artificial Sequence
  Synthetic
uucacugugugaauaaaguuga

SEQ ID NO: 232547 - RNA, 23 nt, Artificial Sequence
  Synthetic
guucacugugugaauaaaguuga

SEQ ID NO: 232548 - RNA, 24 nt, Artificial Sequence
  Synthetic
uguucacugugugaauaaaguuga

SEQ ID NO: 232549 - RNA, 18 nt, Artificial Sequence
  Synthetic
auauauauaucaaguuga

SEQ ID NO: 232550 - RNA, 19 nt, Artificial Sequence
  Synthetic
uauauauauaucaaguuga

SEQ ID NO: 232551 - RNA, 20 nt, Artificial Sequence
  Synthetic
auauauauauaucaaguuga

SEQ ID NO: 232552 - RNA, 21 nt, Artificial Sequence
  Synthetic
aauauauauauaucaaguuga

SEQ ID NO: 232553 - RNA, 22 nt, Artificial Sequence
  Synthetic
aaauauauauauaucaaguuga

SEQ ID NO: 232554 - RNA, 23 nt, Artificial Sequence
  Synthetic
aaaauauauauauaucaaguuga

SEQ ID NO: 232555 - RNA, 24 nt, Artificial Sequence
  Synthetic
caaaauauauauauaucaaguuga

SEQ ID NO: 232556 - RNA, 18 nt, Artificial Sequence
  Synthetic
ucauccgauagaaguuga

SEQ ID NO: 232557 - RNA, 19 nt, Artificial Sequence
  Synthetic
aucauccgauagaaguuga

SEQ ID NO: 232558 - RNA, 20 nt, Artificial Sequence
  Synthetic
caucauccgauagaaguuga

SEQ ID NO: 232559 - RNA, 21 nt, Artificial Sequence
  Synthetic
ccaucauccgauagaaguuga

SEQ ID NO: 232560 - RNA, 22 nt, Artificial Sequence
  Synthetic
uccaucauccgauagaaguuga

SEQ ID NO: 232561 - RNA, 23 nt, Artificial Sequence
  Synthetic
auccaucauccgauagaaguuga

SEQ ID NO: 232562 - RNA, 24 nt, Artificial Sequence
  Synthetic
aauccaucauccgauagaaguuga

SEQ ID NO: 232563 - RNA, 18 nt, Artificial Sequence
  Synthetic
ggggaagaacuaaguuga

SEQ ID NO: 232564 - RNA, 19 nt, Artificial Sequence
  Synthetic
aggggaagaacuaaguuga

SEQ ID NO: 232565 - RNA, 20 nt, Artificial Sequence
  Synthetic
gaggggaagaacuaaguuga

SEQ ID NO: 232566 - RNA, 21 nt, Artificial Sequence
  Synthetic
ggaggggaagaacuaaguuga

SEQ ID NO: 232567 - RNA, 22 nt, Artificial Sequence
  Synthetic
uggaggggaagaacuaaguuga

SEQ ID NO: 232568 - RNA, 23 nt, Artificial Sequence
  Synthetic
guggaggggaagaacuaaguuga

SEQ ID NO: 232569 - RNA, 24 nt, Artificial Sequence
  Synthetic
uguggaggggaagaacuaaguuga

SEQ ID NO: 232570 - RNA, 18 nt, Artificial Sequence
  Synthetic
ggacuaagcagcaguuga

SEQ ID NO: 232571 - RNA, 19 nt, Artificial Sequence
  Synthetic
uggacuaagcagcaguuga

SEQ ID NO: 232572 - RNA, 20 nt, Artificial Sequence
  Synthetic
auggacuaagcagcaguuga

SEQ ID NO: 232573 - RNA, 21 nt, Artificial Sequence
  Synthetic
uauggacuaagcagcaguuga

SEQ ID NO: 232574 - RNA, 22 nt, Artificial Sequence
  Synthetic
uuauggacuaagcagcaguuga

SEQ ID NO: 232575 - RNA, 23 nt, Artificial Sequence
  Synthetic
uuuauggacuaagcagcaguuga

SEQ ID NO: 232576 - RNA, 24 nt, Artificial Sequence
  Synthetic
guuuauggacuaagcagcaguuga

SEQ ID NO: 232577 - RNA, 18 nt, Artificial Sequence
  Synthetic
uccucucucuucaguuga

SEQ ID NO: 232578 - RNA, 19 nt, Artificial Sequence
  Synthetic
cuccucucucuucaguuga

SEQ ID NO: 232579 - RNA, 20 nt, Artificial Sequence
  Synthetic
acuccucucucuucaguuga

SEQ ID NO: 232580 - RNA, 21 nt, Artificial Sequence
  Synthetic
cacuccucucucuucaguuga

SEQ ID NO: 232581 - RNA, 22 nt, Artificial Sequence
  Synthetic
acacuccucucucuucaguuga

SEQ ID NO: 232582 - RNA, 23 nt, Artificial Sequence
  Synthetic
aacacuccucucucuucaguuga

SEQ ID NO: 232583 - RNA, 24 nt, Artificial Sequence
  Synthetic
caacacuccucucucuucaguuga

SEQ ID NO: 232584 - RNA, 18 nt, Artificial Sequence
  Synthetic
uuuuuguugaagaguuga

SEQ ID NO: 232585 - RNA, 19 nt, Artificial Sequence
  Synthetic
uuuuuuguugaagaguuga

SEQ ID NO: 232586 - RNA, 20 nt, Artificial Sequence
  Synthetic
guuuuuuguugaagaguuga

SEQ ID NO: 232587 - RNA, 21 nt, Artificial Sequence
  Synthetic
uguuuuuuguugaagaguuga

SEQ ID NO: 232588 - RNA, 22 nt, Artificial Sequence
  Synthetic
auguuuuuuguugaagaguuga

SEQ ID NO: 232589 - RNA, 23 nt, Artificial Sequence
  Synthetic
gauguuuuuuguugaagaguuga

SEQ ID NO: 232590 - RNA, 24 nt, Artificial Sequence
  Synthetic
ugauguuuuuuguugaagaguuga

SEQ ID NO: 232591 - RNA, 18 nt, Artificial Sequence
  Synthetic
aauuaucuucagaguuga

SEQ ID NO: 232592 - RNA, 19 nt, Artificial Sequence
  Synthetic
uaauuaucuucagaguuga

SEQ ID NO: 232593 - RNA, 20 nt, Artificial Sequence
  Synthetic
uuaauuaucuucagaguuga

SEQ ID NO: 232594 - RNA, 21 nt, Artificial Sequence
  Synthetic
auuaauuaucuucagaguuga

SEQ ID NO: 232595 - RNA, 22 nt, Artificial Sequence
  Synthetic
aauuaauuaucuucagaguuga

SEQ ID NO: 232596 - RNA, 23 nt, Artificial Sequence
  Synthetic
aaauuaauuaucuucagaguuga

SEQ ID NO: 232597 - RNA, 24 nt, Artificial Sequence
  Synthetic
uaaauuaauuaucuucagaguuga

SEQ ID NO: 232598 - RNA, 18 nt, Artificial Sequence
  Synthetic
cuggugcuuuggaguuga

SEQ ID NO: 232599 - RNA, 19 nt, Artificial Sequence
  Synthetic
acuggugcuuuggaguuga

SEQ ID NO: 232600 - RNA, 20 nt, Artificial Sequence
  Synthetic
cacuggugcuuuggaguuga

SEQ ID NO: 232601 - RNA, 21 nt, Artificial Sequence
  Synthetic
acacuggugcuuuggaguuga

SEQ ID NO: 232602 - RNA, 22 nt, Artificial Sequence
  Synthetic
cacacuggugcuuuggaguuga

SEQ ID NO: 232603 - RNA, 23 nt, Artificial Sequence
  Synthetic
gcacacuggugcuuuggaguuga

SEQ ID NO: 232604 - RNA, 24 nt, Artificial Sequence
  Synthetic
agcacacuggugcuuuggaguuga

SEQ ID NO: 232605 - RNA, 18 nt, Artificial Sequence
  Synthetic
guagcauuuuggaguuga

SEQ ID NO: 232606 - RNA, 19 nt, Artificial Sequence
  Synthetic
aguagcauuuuggaguuga

SEQ ID NO: 232607 - RNA, 20 nt, Artificial Sequence
  Synthetic
aaguagcauuuuggaguuga

SEQ ID NO: 232608 - RNA, 21 nt, Artificial Sequence
  Synthetic
gaaguagcauuuuggaguuga

SEQ ID NO: 232609 - RNA, 22 nt, Artificial Sequence
  Synthetic
agaaguagcauuuuggaguuga

SEQ ID NO: 232610 - RNA, 23 nt, Artificial Sequence
  Synthetic
uagaaguagcauuuuggaguuga

SEQ ID NO: 232611 - RNA, 24 nt, Artificial Sequence
  Synthetic
auagaaguagcauuuuggaguuga

SEQ ID NO: 232612 - RNA, 18 nt, Artificial Sequence
  Synthetic
gacaacaggauuaguuga

SEQ ID NO: 232613 - RNA, 19 nt, Artificial Sequence
  Synthetic
ggacaacaggauuaguuga

SEQ ID NO: 232614 - RNA, 20 nt, Artificial Sequence
  Synthetic
uggacaacaggauuaguuga

SEQ ID NO: 232615 - RNA, 21 nt, Artificial Sequence
  Synthetic
uuggacaacaggauuaguuga

SEQ ID NO: 232616 - RNA, 22 nt, Artificial Sequence
  Synthetic
uuuggacaacaggauuaguuga

SEQ ID NO: 232617 - RNA, 23 nt, Artificial Sequence
  Synthetic
auuuggacaacaggauuaguuga

SEQ ID NO: 232618 - RNA, 24 nt, Artificial Sequence
  Synthetic
cauuuggacaacaggauuaguuga

SEQ ID NO: 232619 - RNA, 18 nt, Artificial Sequence
  Synthetic
acauuuuuuaaucguuga

SEQ ID NO: 232620 - RNA, 19 nt, Artificial Sequence
  Synthetic
uacauuuuuuaaucguuga

SEQ ID NO: 232621 - RNA, 20 nt, Artificial Sequence
  Synthetic
auacauuuuuuaaucguuga

SEQ ID NO: 232622 - RNA, 21 nt, Artificial Sequence
  Synthetic
gauacauuuuuuaaucguuga

SEQ ID NO: 232623 - RNA, 22 nt, Artificial Sequence
  Synthetic
agauacauuuuuuaaucguuga

SEQ ID NO: 232624 - RNA, 23 nt, Artificial Sequence
  Synthetic
uagauacauuuuuuaaucguuga

SEQ ID NO: 232625 - RNA, 24 nt, Artificial Sequence
  Synthetic
auagauacauuuuuuaaucguuga

SEQ ID NO: 232626 - RNA, 18 nt, Artificial Sequence
  Synthetic
uuuuuguauaaagguuga

SEQ ID NO: 232627 - RNA, 19 nt, Artificial Sequence
  Synthetic
uuuuuuguauaaagguuga

SEQ ID NO: 232628 - RNA, 20 nt, Artificial Sequence
  Synthetic
uuuuuuuguauaaagguuga

SEQ ID NO: 232629 - RNA, 21 nt, Artificial Sequence
  Synthetic
uuuuuuuuguauaaagguuga

SEQ ID NO: 232630 - RNA, 22 nt, Artificial Sequence
  Synthetic
uuuuuuuuuguauaaagguuga

SEQ ID NO: 232631 - RNA, 23 nt, Artificial Sequence
  Synthetic
uuuuuuuuuuguauaaagguuga

SEQ ID NO: 232632 - RNA, 24 nt, Artificial Sequence
  Synthetic
auuuuuuuuuuguauaaagguuga

SEQ ID NO: 232633 - RNA, 18 nt, Artificial Sequence
  Synthetic
aauacagcaacagguuga

SEQ ID NO: 232634 - RNA, 19 nt, Artificial Sequence
  Synthetic
caauacagcaacagguuga

SEQ ID NO: 232635 - RNA, 20 nt, Artificial Sequence
  Synthetic
acaauacagcaacagguuga

SEQ ID NO: 232636 - RNA, 21 nt, Artificial Sequence
  Synthetic
aacaauacagcaacagguuga

SEQ ID NO: 232637 - RNA, 22 nt, Artificial Sequence
  Synthetic
gaacaauacagcaacagguuga

SEQ ID NO: 232638 - RNA, 23 nt, Artificial Sequence
  Synthetic
ggaacaauacagcaacagguuga

SEQ ID NO: 232639 - RNA, 24 nt, Artificial Sequence
  Synthetic
uggaacaauacagcaacagguuga

SEQ ID NO: 232640 - RNA, 18 nt, Artificial Sequence
  Synthetic
cuucauguugcagguuga

SEQ ID NO: 232641 - RNA, 19 nt, Artificial Sequence
  Synthetic
ucuucauguugcagguuga

SEQ ID NO: 232642 - RNA, 20 nt, Artificial Sequence
  Synthetic
uucuucauguugcagguuga

SEQ ID NO: 232643 - RNA, 21 nt, Artificial Sequence
  Synthetic
cuucuucauguugcagguuga

SEQ ID NO: 232644 - RNA, 22 nt, Artificial Sequence
  Synthetic
acuucuucauguugcagguuga

SEQ ID NO: 232645 - RNA, 23 nt, Artificial Sequence
  Synthetic
cacuucuucauguugcagguuga

SEQ ID NO: 232646 - RNA, 24 nt, Artificial Sequence
  Synthetic
gcacuucuucauguugcagguuga

SEQ ID NO: 232647 - RNA, 18 nt, Artificial Sequence
  Synthetic
gcagguaaaagagguuga

SEQ ID NO: 232648 - RNA, 19 nt, Artificial Sequence
  Synthetic
ugcagguaaaagagguuga

SEQ ID NO: 232649 - RNA, 20 nt, Artificial Sequence
  Synthetic
gugcagguaaaagagguuga

SEQ ID NO: 232650 - RNA, 21 nt, Artificial Sequence
  Synthetic
ugugcagguaaaagagguuga

SEQ ID NO: 232651 - RNA, 22 nt, Artificial Sequence
  Synthetic
augugcagguaaaagagguuga

SEQ ID NO: 232652 - RNA, 23 nt, Artificial Sequence
  Synthetic
aaugugcagguaaaagagguuga

SEQ ID NO: 232653 - RNA, 24 nt, Artificial Sequence
  Synthetic
gaaugugcagguaaaagagguuga

SEQ ID NO: 232654 - RNA, 18 nt, Artificial Sequence
  Synthetic
uauaacuuaguagguuga

SEQ ID NO: 232655 - RNA, 19 nt, Artificial Sequence
  Synthetic
cuauaacuuaguagguuga

SEQ ID NO: 232656 - RNA, 20 nt, Artificial Sequence
  Synthetic
acuauaacuuaguagguuga

SEQ ID NO: 232657 - RNA, 21 nt, Artificial Sequence
  Synthetic
aacuauaacuuaguagguuga

SEQ ID NO: 232658 - RNA, 22 nt, Artificial Sequence
  Synthetic
uaacuauaacuuaguagguuga

SEQ ID NO: 232659 - RNA, 23 nt, Artificial Sequence
  Synthetic
auaacuauaacuuaguagguuga

SEQ ID NO: 232660 - RNA, 24 nt, Artificial Sequence
  Synthetic
gauaacuauaacuuaguagguuga

SEQ ID NO: 232661 - RNA, 18 nt, Artificial Sequence
  Synthetic
ccuccacuacaugguuga

SEQ ID NO: 232662 - RNA, 19 nt, Artificial Sequence
  Synthetic
gccuccacuacaugguuga

SEQ ID NO: 232663 - RNA, 20 nt, Artificial Sequence
  Synthetic
ugccuccacuacaugguuga

SEQ ID NO: 232664 - RNA, 21 nt, Artificial Sequence
  Synthetic
cugccuccacuacaugguuga

SEQ ID NO: 232665 - RNA, 22 nt, Artificial Sequence
  Synthetic
acugccuccacuacaugguuga

SEQ ID NO: 232666 - RNA, 23 nt, Artificial Sequence
  Synthetic
aacugccuccacuacaugguuga

SEQ ID NO: 232667 - RNA, 24 nt, Artificial Sequence
  Synthetic
uaacugccuccacuacaugguuga

SEQ ID NO: 232668 - RNA, 18 nt, Artificial Sequence
  Synthetic
gcacuccagccugguuga

SEQ ID NO: 232669 - RNA, 19 nt, Artificial Sequence
  Synthetic
ugcacuccagccugguuga

SEQ ID NO: 232670 - RNA, 20 nt, Artificial Sequence
  Synthetic
cugcacuccagccugguuga

SEQ ID NO: 232671 - RNA, 21 nt, Artificial Sequence
  Synthetic
gcugcacuccagccugguuga

SEQ ID NO: 232672 - RNA, 22 nt, Artificial Sequence
  Synthetic
cgcugcacuccagccugguuga

SEQ ID NO: 232673 - RNA, 23 nt, Artificial Sequence
  Synthetic
ccgcugcacuccagccugguuga

SEQ ID NO: 232674 - RNA, 24 nt, Artificial Sequence
  Synthetic
gccgcugcacuccagccugguuga

SEQ ID NO: 232675 - RNA, 18 nt, Artificial Sequence
  Synthetic
aguauuacaaaauguuga

SEQ ID NO: 232676 - RNA, 19 nt, Artificial Sequence
  Synthetic
caguauuacaaaauguuga

SEQ ID NO: 232677 - RNA, 20 nt, Artificial Sequence
  Synthetic
gcaguauuacaaaauguuga

SEQ ID NO: 232678 - RNA, 21 nt, Artificial Sequence
  Synthetic
agcaguauuacaaaauguuga

SEQ ID NO: 232679 - RNA, 22 nt, Artificial Sequence
  Synthetic
gagcaguauuacaaaauguuga

SEQ ID NO: 232680 - RNA, 23 nt, Artificial Sequence
  Synthetic
agagcaguauuacaaaauguuga

SEQ ID NO: 232681 - RNA, 24 nt, Artificial Sequence
  Synthetic
uagagcaguauuacaaaauguuga

SEQ ID NO: 232682 - RNA, 18 nt, Artificial Sequence
  Synthetic
uaaauacacaaauguuga

SEQ ID NO: 232683 - RNA, 19 nt, Artificial Sequence
  Synthetic
uuaaauacacaaauguuga

SEQ ID NO: 232684 - RNA, 20 nt, Artificial Sequence
  Synthetic
guuaaauacacaaauguuga

SEQ ID NO: 232685 - RNA, 21 nt, Artificial Sequence
  Synthetic
uguuaaauacacaaauguuga

SEQ ID NO: 232686 - RNA, 22 nt, Artificial Sequence
  Synthetic
auguuaaauacacaaauguuga

SEQ ID NO: 232687 - RNA, 23 nt, Artificial Sequence
  Synthetic
gauguuaaauacacaaauguuga

SEQ ID NO: 232688 - RNA, 24 nt, Artificial Sequence
  Synthetic
agauguuaaauacacaaauguuga

SEQ ID NO: 232689 - RNA, 18 nt, Artificial Sequence
  Synthetic
uuuuaggacacauguuga

SEQ ID NO: 232690 - RNA, 19 nt, Artificial Sequence
  Synthetic
cuuuuaggacacauguuga

SEQ ID NO: 232691 - RNA, 20 nt, Artificial Sequence
  Synthetic
ucuuuuaggacacauguuga

SEQ ID NO: 232692 - RNA, 21 nt, Artificial Sequence
  Synthetic
aucuuuuaggacacauguuga

SEQ ID NO: 232693 - RNA, 22 nt, Artificial Sequence
  Synthetic
caucuuuuaggacacauguuga

SEQ ID NO: 232694 - RNA, 23 nt, Artificial Sequence
  Synthetic
ucaucuuuuaggacacauguuga

SEQ ID NO: 232695 - RNA, 24 nt, Artificial Sequence
  Synthetic
gucaucuuuuaggacacauguuga

SEQ ID NO: 232696 - RNA, 18 nt, Artificial Sequence
  Synthetic
auauucuuggcauguuga

SEQ ID NO: 232697 - RNA, 19 nt, Artificial Sequence
  Synthetic
aauauucuuggcauguuga

SEQ ID NO: 232698 - RNA, 20 nt, Artificial Sequence
  Synthetic
gaauauucuuggcauguuga

SEQ ID NO: 232699 - RNA, 21 nt, Artificial Sequence
  Synthetic
ggaauauucuuggcauguuga

SEQ ID NO: 232700 - RNA, 22 nt, Artificial Sequence
  Synthetic
aggaauauucuuggcauguuga

SEQ ID NO: 232701 - RNA, 23 nt, Artificial Sequence
  Synthetic
caggaauauucuuggcauguuga

SEQ ID NO: 232702 - RNA, 24 nt, Artificial Sequence
  Synthetic
gcaggaauauucuuggcauguuga

SEQ ID NO: 232703 - RNA, 18 nt, Artificial Sequence
  Synthetic
gcuaccuaaucauguuga

SEQ ID NO: 232704 - RNA, 19 nt, Artificial Sequence
  Synthetic
agcuaccuaaucauguuga

SEQ ID NO: 232705 - RNA, 20 nt, Artificial Sequence
  Synthetic
aagcuaccuaaucauguuga

SEQ ID NO: 232706 - RNA, 21 nt, Artificial Sequence
  Synthetic
aaagcuaccuaaucauguuga

SEQ ID NO: 232707 - RNA, 22 nt, Artificial Sequence
  Synthetic
gaaagcuaccuaaucauguuga

SEQ ID NO: 232708 - RNA, 23 nt, Artificial Sequence
  Synthetic
ggaaagcuaccuaaucauguuga

SEQ ID NO: 232709 - RNA, 24 nt, Artificial Sequence
  Synthetic
uggaaagcuaccuaaucauguuga

SEQ ID NO: 232710 - RNA, 18 nt, Artificial Sequence
  Synthetic
uguaacuagcacuguuga

SEQ ID NO: 232711 - RNA, 19 nt, Artificial Sequence
  Synthetic
cuguaacuagcacuguuga

SEQ ID NO: 232712 - RNA, 20 nt, Artificial Sequence
  Synthetic
ucuguaacuagcacuguuga

SEQ ID NO: 232713 - RNA, 21 nt, Artificial Sequence
  Synthetic
gucuguaacuagcacuguuga

SEQ ID NO: 232714 - RNA, 22 nt, Artificial Sequence
  Synthetic
agucuguaacuagcacuguuga

SEQ ID NO: 232715 - RNA, 23 nt, Artificial Sequence
  Synthetic
gagucuguaacuagcacuguuga

SEQ ID NO: 232716 - RNA, 24 nt, Artificial Sequence
  Synthetic
ugagucuguaacuagcacuguuga

SEQ ID NO: 232717 - RNA, 18 nt, Artificial Sequence
  Synthetic
aauaagacucacuguuga

SEQ ID NO: 232718 - RNA, 19 nt, Artificial Sequence
  Synthetic
aaauaagacucacuguuga

SEQ ID NO: 232719 - RNA, 20 nt, Artificial Sequence
  Synthetic
aaaauaagacucacuguuga

SEQ ID NO: 232720 - RNA, 21 nt, Artificial Sequence
  Synthetic
caaaauaagacucacuguuga

SEQ ID NO: 232721 - RNA, 22 nt, Artificial Sequence
  Synthetic
acaaaauaagacucacuguuga

SEQ ID NO: 232722 - RNA, 23 nt, Artificial Sequence
  Synthetic
cacaaaauaagacucacuguuga

SEQ ID NO: 232723 - RNA, 24 nt, Artificial Sequence
  Synthetic
acacaaaauaagacucacuguuga

SEQ ID NO: 232724 - RNA, 18 nt, Artificial Sequence
  Synthetic
cuaauaggcuacuguuga

SEQ ID NO: 232725 - RNA, 19 nt, Artificial Sequence
  Synthetic
acuaauaggcuacuguuga

SEQ ID NO: 232726 - RNA, 20 nt, Artificial Sequence
  Synthetic
uacuaauaggcuacuguuga

SEQ ID NO: 232727 - RNA, 21 nt, Artificial Sequence
  Synthetic
cuacuaauaggcuacuguuga

SEQ ID NO: 232728 - RNA, 22 nt, Artificial Sequence
  Synthetic
acuacuaauaggcuacuguuga

SEQ ID NO: 232729 - RNA, 23 nt, Artificial Sequence
  Synthetic
aacuacuaauaggcuacuguuga

SEQ ID NO: 232730 - RNA, 24 nt, Artificial Sequence
  Synthetic
uaacuacuaauaggcuacuguuga

SEQ ID NO: 232731 - RNA, 18 nt, Artificial Sequence
  Synthetic
auuucuuaaugcuguuga

SEQ ID NO: 232732 - RNA, 19 nt, Artificial Sequence
  Synthetic
uauuucuuaaugcuguuga

SEQ ID NO: 232733 - RNA, 20 nt, Artificial Sequence
  Synthetic
guauuucuuaaugcuguuga

SEQ ID NO: 232734 - RNA, 21 nt, Artificial Sequence
  Synthetic
uguauuucuuaaugcuguuga

SEQ ID NO: 232735 - RNA, 22 nt, Artificial Sequence
  Synthetic
guguauuucuuaaugcuguuga

SEQ ID NO: 232736 - RNA, 23 nt, Artificial Sequence
  Synthetic
uguguauuucuuaaugcuguuga

SEQ ID NO: 232737 - RNA, 24 nt, Artificial Sequence
  Synthetic
uuguguauuucuuaaugcuguuga

SEQ ID NO: 232738 - RNA, 18 nt, Artificial Sequence
  Synthetic
auguaugcaaucuguuga

SEQ ID NO: 232739 - RNA, 19 nt, Artificial Sequence
  Synthetic
aauguaugcaaucuguuga

SEQ ID NO: 232740 - RNA, 20 nt, Artificial Sequence
  Synthetic
aaauguaugcaaucuguuga

SEQ ID NO: 232741 - RNA, 21 nt, Artificial Sequence
  Synthetic
gaaauguaugcaaucuguuga

SEQ ID NO: 232742 - RNA, 22 nt, Artificial Sequence
  Synthetic
agaaauguaugcaaucuguuga

SEQ ID NO: 232743 - RNA, 23 nt, Artificial Sequence
  Synthetic
gagaaauguaugcaaucuguuga

SEQ ID NO: 232744 - RNA, 24 nt, Artificial Sequence
  Synthetic
ugagaaauguaugcaaucuguuga

SEQ ID NO: 232745 - RNA, 18 nt, Artificial Sequence
  Synthetic
cuggaagacaucuguuga

SEQ ID NO: 232746 - RNA, 19 nt, Artificial Sequence
  Synthetic
gcuggaagacaucuguuga

SEQ ID NO: 232747 - RNA, 20 nt, Artificial Sequence
  Synthetic
agcuggaagacaucuguuga

SEQ ID NO: 232748 - RNA, 21 nt, Artificial Sequence
  Synthetic
aagcuggaagacaucuguuga

SEQ ID NO: 232749 - RNA, 22 nt, Artificial Sequence
  Synthetic
aaagcuggaagacaucuguuga

SEQ ID NO: 232750 - RNA, 23 nt, Artificial Sequence
  Synthetic
aaaagcuggaagacaucuguuga

SEQ ID NO: 232751 - RNA, 24 nt, Artificial Sequence
  Synthetic
uaaaagcuggaagacaucuguuga

SEQ ID NO: 232752 - RNA, 18 nt, Artificial Sequence
  Synthetic
uuaaagucuaucuguuga

SEQ ID NO: 232753 - RNA, 19 nt, Artificial Sequence
  Synthetic
uuuaaagucuaucuguuga

SEQ ID NO: 232754 - RNA, 20 nt, Artificial Sequence
  Synthetic
auuuaaagucuaucuguuga

SEQ ID NO: 232755 - RNA, 21 nt, Artificial Sequence
  Synthetic
cauuuaaagucuaucuguuga

SEQ ID NO: 232756 - RNA, 22 nt, Artificial Sequence
  Synthetic
gcauuuaaagucuaucuguuga

SEQ ID NO: 232757 - RNA, 23 nt, Artificial Sequence
  Synthetic
ugcauuuaaagucuaucuguuga

SEQ ID NO: 232758 - RNA, 24 nt, Artificial Sequence
  Synthetic
uugcauuuaaagucuaucuguuga

SEQ ID NO: 232759 - RNA, 18 nt, Artificial Sequence
  Synthetic
ucacagucagucuguuga

SEQ ID NO: 232760 - RNA, 19 nt, Artificial Sequence
  Synthetic
aucacagucagucuguuga

SEQ ID NO: 232761 - RNA, 20 nt, Artificial Sequence
  Synthetic
gaucacagucagucuguuga

SEQ ID NO: 232762 - RNA, 21 nt, Artificial Sequence
  Synthetic
ggaucacagucagucuguuga

SEQ ID NO: 232763 - RNA, 22 nt, Artificial Sequence
  Synthetic
aggaucacagucagucuguuga

SEQ ID NO: 232764 - RNA, 23 nt, Artificial Sequence
  Synthetic
uaggaucacagucagucuguuga

SEQ ID NO: 232765 - RNA, 24 nt, Artificial Sequence
  Synthetic
auaggaucacagucagucuguuga

SEQ ID NO: 232766 - RNA, 18 nt, Artificial Sequence
  Synthetic
aauacaaagcaguguuga

SEQ ID NO: 232767 - RNA, 19 nt, Artificial Sequence
  Synthetic
gaauacaaagcaguguuga

SEQ ID NO: 232768 - RNA, 20 nt, Artificial Sequence
  Synthetic
agaauacaaagcaguguuga

SEQ ID NO: 232769 - RNA, 21 nt, Artificial Sequence
  Synthetic
aagaauacaaagcaguguuga

SEQ ID NO: 232770 - RNA, 22 nt, Artificial Sequence
  Synthetic
gaagaauacaaagcaguguuga

SEQ ID NO: 232771 - RNA, 23 nt, Artificial Sequence
  Synthetic
ugaagaauacaaagcaguguuga

SEQ ID NO: 232772 - RNA, 24 nt, Artificial Sequence
  Synthetic
cugaagaauacaaagcaguguuga

SEQ ID NO: 232773 - RNA, 18 nt, Artificial Sequence
  Synthetic
ccuagcccucaguguuga

SEQ ID NO: 232774 - RNA, 19 nt, Artificial Sequence
  Synthetic
accuagcccucaguguuga

SEQ ID NO: 232775 - RNA, 20 nt, Artificial Sequence
  Synthetic
uaccuagcccucaguguuga

SEQ ID NO: 232776 - RNA, 21 nt, Artificial Sequence
  Synthetic
auaccuagcccucaguguuga

SEQ ID NO: 232777 - RNA, 22 nt, Artificial Sequence
  Synthetic
gauaccuagcccucaguguuga

SEQ ID NO: 232778 - RNA, 23 nt, Artificial Sequence
  Synthetic
ugauaccuagcccucaguguuga

SEQ ID NO: 232779 - RNA, 24 nt, Artificial Sequence
  Synthetic
augauaccuagcccucaguguuga

SEQ ID NO: 232780 - RNA, 18 nt, Artificial Sequence
  Synthetic
auacaaaaagaguguuga

SEQ ID NO: 232781 - RNA, 19 nt, Artificial Sequence
  Synthetic
gauacaaaaagaguguuga

SEQ ID NO: 232782 - RNA, 20 nt, Artificial Sequence
  Synthetic
agauacaaaaagaguguuga

SEQ ID NO: 232783 - RNA, 21 nt, Artificial Sequence
  Synthetic
aagauacaaaaagaguguuga

SEQ ID NO: 232784 - RNA, 22 nt, Artificial Sequence
  Synthetic
aaagauacaaaaagaguguuga

SEQ ID NO: 232785 - RNA, 23 nt, Artificial Sequence
  Synthetic
gaaagauacaaaaagaguguuga

SEQ ID NO: 232786 - RNA, 24 nt, Artificial Sequence
  Synthetic
ugaaagauacaaaaagaguguuga

SEQ ID NO: 232787 - RNA, 18 nt, Artificial Sequence
  Synthetic
auaagaaaaccguguuga

SEQ ID NO: 232788 - RNA, 19 nt, Artificial Sequence
  Synthetic
gauaagaaaaccguguuga

SEQ ID NO: 232789 - RNA, 20 nt, Artificial Sequence
  Synthetic
ugauaagaaaaccguguuga

SEQ ID NO: 232790 - RNA, 21 nt, Artificial Sequence
  Synthetic
augauaagaaaaccguguuga

SEQ ID NO: 232791 - RNA, 22 nt, Artificial Sequence
  Synthetic
gaugauaagaaaaccguguuga

SEQ ID NO: 232792 - RNA, 23 nt, Artificial Sequence
  Synthetic
ugaugauaagaaaaccguguuga

SEQ ID NO: 232793 - RNA, 24 nt, Artificial Sequence
  Synthetic
augaugauaagaaaaccguguuga

SEQ ID NO: 232794 - RNA, 18 nt, Artificial Sequence
  Synthetic
uugagcugcauguguuga

SEQ ID NO: 232795 - RNA, 19 nt, Artificial Sequence
  Synthetic
cuugagcugcauguguuga

SEQ ID NO: 232796 - RNA, 20 nt, Artificial Sequence
  Synthetic
ucuugagcugcauguguuga

SEQ ID NO: 232797 - RNA, 21 nt, Artificial Sequence
  Synthetic
uucuugagcugcauguguuga

SEQ ID NO: 232798 - RNA, 22 nt, Artificial Sequence
  Synthetic
guucuugagcugcauguguuga

SEQ ID NO: 232799 - RNA, 23 nt, Artificial Sequence
  Synthetic
aguucuugagcugcauguguuga

SEQ ID NO: 232800 - RNA, 24 nt, Artificial Sequence
  Synthetic
caguucuugagcugcauguguuga

SEQ ID NO: 232801 - RNA, 18 nt, Artificial Sequence
  Synthetic
gcuuguagucauuguuga

SEQ ID NO: 232802 - RNA, 19 nt, Artificial Sequence
  Synthetic
agcuuguagucauuguuga

SEQ ID NO: 232803 - RNA, 20 nt, Artificial Sequence
  Synthetic
cagcuuguagucauuguuga

SEQ ID NO: 232804 - RNA, 21 nt, Artificial Sequence
  Synthetic
ucagcuuguagucauuguuga

SEQ ID NO: 232805 - RNA, 22 nt, Artificial Sequence
  Synthetic
cucagcuuguagucauuguuga

SEQ ID NO: 232806 - RNA, 23 nt, Artificial Sequence
  Synthetic
ucucagcuuguagucauuguuga

SEQ ID NO: 232807 - RNA, 24 nt, Artificial Sequence
  Synthetic
cucucagcuuguagucauuguuga

SEQ ID NO: 232808 - RNA, 18 nt, Artificial Sequence
  Synthetic
ccagaaucuccuuguuga

SEQ ID NO: 232809 - RNA, 19 nt, Artificial Sequence
  Synthetic
accagaaucuccuuguuga

SEQ ID NO: 232810 - RNA, 20 nt, Artificial Sequence
  Synthetic
uaccagaaucuccuuguuga

SEQ ID NO: 232811 - RNA, 21 nt, Artificial Sequence
  Synthetic
guaccagaaucuccuuguuga

SEQ ID NO: 232812 - RNA, 22 nt, Artificial Sequence
  Synthetic
aguaccagaaucuccuuguuga

SEQ ID NO: 232813 - RNA, 23 nt, Artificial Sequence
  Synthetic
uaguaccagaaucuccuuguuga

SEQ ID NO: 232814 - RNA, 24 nt, Artificial Sequence
  Synthetic
guaguaccagaaucuccuuguuga

SEQ ID NO: 232815 - RNA, 18 nt, Artificial Sequence
  Synthetic
uuccucuucaguuguuga

SEQ ID NO: 232816 - RNA, 19 nt, Artificial Sequence
  Synthetic
uuuccucuucaguuguuga

SEQ ID NO: 232817 - RNA, 20 nt, Artificial Sequence
  Synthetic
cuuuccucuucaguuguuga

SEQ ID NO: 232818 - RNA, 21 nt, Artificial Sequence
  Synthetic
ucuuuccucuucaguuguuga

SEQ ID NO: 232819 - RNA, 22 nt, Artificial Sequence
  Synthetic
uucuuuccucuucaguuguuga

SEQ ID NO: 232820 - RNA, 23 nt, Artificial Sequence
  Synthetic
uuucuuuccucuucaguuguuga

SEQ ID NO: 232821 - RNA, 24 nt, Artificial Sequence
  Synthetic
uuuucuuuccucuucaguuguuga

SEQ ID NO: 232822 - RNA, 18 nt, Artificial Sequence
  Synthetic
ucaguaaauaguuguuga

SEQ ID NO: 232823 - RNA, 19 nt, Artificial Sequence
  Synthetic
gucaguaaauaguuguuga

SEQ ID NO: 232824 - RNA, 20 nt, Artificial Sequence
  Synthetic
agucaguaaauaguuguuga

SEQ ID NO: 232825 - RNA, 21 nt, Artificial Sequence
  Synthetic
aagucaguaaauaguuguuga

SEQ ID NO: 232826 - RNA, 22 nt, Artificial Sequence
  Synthetic
caagucaguaaauaguuguuga

SEQ ID NO: 232827 - RNA, 23 nt, Artificial Sequence
  Synthetic
acaagucaguaaauaguuguuga

SEQ ID NO: 232828 - RNA, 24 nt, Artificial Sequence
  Synthetic
aacaagucaguaaauaguuguuga

SEQ ID NO: 232829 - RNA, 18 nt, Artificial Sequence
  Synthetic
acccuagaggguuguuga

SEQ ID NO: 232830 - RNA, 19 nt, Artificial Sequence
  Synthetic
uacccuagaggguuguuga

SEQ ID NO: 232831 - RNA, 20 nt, Artificial Sequence
  Synthetic
cuacccuagaggguuguuga

SEQ ID NO: 232832 - RNA, 21 nt, Artificial Sequence
  Synthetic
ccuacccuagaggguuguuga

SEQ ID NO: 232833 - RNA, 22 nt, Artificial Sequence
  Synthetic
cccuacccuagaggguuguuga

SEQ ID NO: 232834 - RNA, 23 nt, Artificial Sequence
  Synthetic
ccccuacccuagaggguuguuga

SEQ ID NO: 232835 - RNA, 24 nt, Artificial Sequence
  Synthetic
gccccuacccuagaggguuguuga

SEQ ID NO: 232836 - RNA, 18 nt, Artificial Sequence
  Synthetic
ucgguauccauuuguuga

SEQ ID NO: 232837 - RNA, 19 nt, Artificial Sequence
  Synthetic
cucgguauccauuuguuga

SEQ ID NO: 232838 - RNA, 20 nt, Artificial Sequence
  Synthetic
gcucgguauccauuuguuga

SEQ ID NO: 232839 - RNA, 21 nt, Artificial Sequence
  Synthetic
ugcucgguauccauuuguuga

SEQ ID NO: 232840 - RNA, 22 nt, Artificial Sequence
  Synthetic
cugcucgguauccauuuguuga

SEQ ID NO: 232841 - RNA, 23 nt, Artificial Sequence
  Synthetic
ccugcucgguauccauuuguuga

SEQ ID NO: 232842 - RNA, 24 nt, Artificial Sequence
  Synthetic
gccugcucgguauccauuuguuga

SEQ ID NO: 232843 - RNA, 18 nt, Artificial Sequence
  Synthetic
gaacccaguuuuuguuga

SEQ ID NO: 232844 - RNA, 19 nt, Artificial Sequence
  Synthetic
agaacccaguuuuuguuga

SEQ ID NO: 232845 - RNA, 20 nt, Artificial Sequence
  Synthetic
cagaacccaguuuuuguuga

SEQ ID NO: 232846 - RNA, 21 nt, Artificial Sequence
  Synthetic
acagaacccaguuuuuguuga

SEQ ID NO: 232847 - RNA, 22 nt, Artificial Sequence
  Synthetic
aacagaacccaguuuuuguuga

SEQ ID NO: 232848 - RNA, 23 nt, Artificial Sequence
  Synthetic
uaacagaacccaguuuuuguuga

SEQ ID NO: 232849 - RNA, 24 nt, Artificial Sequence
  Synthetic
auaacagaacccaguuuuuguuga

SEQ ID NO: 232850 - RNA, 18 nt, Artificial Sequence
  Synthetic
uaaagcuuucaaauuuga

SEQ ID NO: 232851 - RNA, 19 nt, Artificial Sequence
  Synthetic
auaaagcuuucaaauuuga

SEQ ID NO: 232852 - RNA, 20 nt, Artificial Sequence
  Synthetic
aauaaagcuuucaaauuuga

SEQ ID NO: 232853 - RNA, 21 nt, Artificial Sequence
  Synthetic
aaauaaagcuuucaaauuuga

SEQ ID NO: 232854 - RNA, 22 nt, Artificial Sequence
  Synthetic
uaaauaaagcuuucaaauuuga

SEQ ID NO: 232855 - RNA, 23 nt, Artificial Sequence
  Synthetic
auaaauaaagcuuucaaauuuga

SEQ ID NO: 232856 - RNA, 24 nt, Artificial Sequence
  Synthetic
cauaaauaaagcuuucaaauuuga

SEQ ID NO: 232857 - RNA, 18 nt, Artificial Sequence
  Synthetic
uaauuuaauucaauuuga

SEQ ID NO: 232858 - RNA, 19 nt, Artificial Sequence
  Synthetic
guaauuuaauucaauuuga

SEQ ID NO: 232859 - RNA, 20 nt, Artificial Sequence
  Synthetic
aguaauuuaauucaauuuga

SEQ ID NO: 232860 - RNA, 21 nt, Artificial Sequence
  Synthetic
gaguaauuuaauucaauuuga

SEQ ID NO: 232861 - RNA, 22 nt, Artificial Sequence
  Synthetic
agaguaauuuaauucaauuuga

SEQ ID NO: 232862 - RNA, 23 nt, Artificial Sequence
  Synthetic
cagaguaauuuaauucaauuuga

SEQ ID NO: 232863 - RNA, 24 nt, Artificial Sequence
  Synthetic
gcagaguaauuuaauucaauuuga

SEQ ID NO: 232864 - RNA, 18 nt, Artificial Sequence
  Synthetic
uucaacauaggaauuuga

SEQ ID NO: 232865 - RNA, 19 nt, Artificial Sequence
  Synthetic
uuucaacauaggaauuuga

SEQ ID NO: 232866 - RNA, 20 nt, Artificial Sequence
  Synthetic
auuucaacauaggaauuuga

SEQ ID NO: 232867 - RNA, 21 nt, Artificial Sequence
  Synthetic
gauuucaacauaggaauuuga

SEQ ID NO: 232868 - RNA, 22 nt, Artificial Sequence
  Synthetic
ggauuucaacauaggaauuuga

SEQ ID NO: 232869 - RNA, 23 nt, Artificial Sequence
  Synthetic
aggauuucaacauaggaauuuga

SEQ ID NO: 232870 - RNA, 24 nt, Artificial Sequence
  Synthetic
uaggauuucaacauaggaauuuga

SEQ ID NO: 232871 - RNA, 18 nt, Artificial Sequence
  Synthetic
gggauuuguugaauuuga

SEQ ID NO: 232872 - RNA, 19 nt, Artificial Sequence
  Synthetic
ggggauuuguugaauuuga

SEQ ID NO: 232873 - RNA, 20 nt, Artificial Sequence
  Synthetic
gggggauuuguugaauuuga

SEQ ID NO: 232874 - RNA, 21 nt, Artificial Sequence
  Synthetic
agggggauuuguugaauuuga

SEQ ID NO: 232875 - RNA, 22 nt, Artificial Sequence
  Synthetic
gagggggauuuguugaauuuga

SEQ ID NO: 232876 - RNA, 23 nt, Artificial Sequence
  Synthetic
agagggggauuuguugaauuuga

SEQ ID NO: 232877 - RNA, 24 nt, Artificial Sequence
  Synthetic
gagagggggauuuguugaauuuga

SEQ ID NO: 232878 - RNA, 18 nt, Artificial Sequence
  Synthetic
augccuuauaacauuuga

SEQ ID NO: 232879 - RNA, 19 nt, Artificial Sequence
  Synthetic
aaugccuuauaacauuuga

SEQ ID NO: 232880 - RNA, 20 nt, Artificial Sequence
  Synthetic
aaaugccuuauaacauuuga

SEQ ID NO: 232881 - RNA, 21 nt, Artificial Sequence
  Synthetic
aaaaugccuuauaacauuuga

SEQ ID NO: 232882 - RNA, 22 nt, Artificial Sequence
  Synthetic
caaaaugccuuauaacauuuga

SEQ ID NO: 232883 - RNA, 23 nt, Artificial Sequence
  Synthetic
acaaaaugccuuauaacauuuga

SEQ ID NO: 232884 - RNA, 24 nt, Artificial Sequence
  Synthetic
cacaaaaugccuuauaacauuuga

SEQ ID NO: 232885 - RNA, 18 nt, Artificial Sequence
  Synthetic
aaaaauuauuacauuuga

SEQ ID NO: 232886 - RNA, 19 nt, Artificial Sequence
  Synthetic
gaaaaauuauuacauuuga

SEQ ID NO: 232887 - RNA, 20 nt, Artificial Sequence
  Synthetic
ugaaaaauuauuacauuuga

SEQ ID NO: 232888 - RNA, 21 nt, Artificial Sequence
  Synthetic
uugaaaaauuauuacauuuga

SEQ ID NO: 232889 - RNA, 22 nt, Artificial Sequence
  Synthetic
cuugaaaaauuauuacauuuga

SEQ ID NO: 232890 - RNA, 23 nt, Artificial Sequence
  Synthetic
ccuugaaaaauuauuacauuuga

SEQ ID NO: 232891 - RNA, 24 nt, Artificial Sequence
  Synthetic
accuugaaaaauuauuacauuuga

SEQ ID NO: 232892 - RNA, 18 nt, Artificial Sequence
  Synthetic
gguuuauaaaccauuuga

SEQ ID NO: 232893 - RNA, 19 nt, Artificial Sequence
  Synthetic
ugguuuauaaaccauuuga

SEQ ID NO: 232894 - RNA, 20 nt, Artificial Sequence
  Synthetic
cugguuuauaaaccauuuga

SEQ ID NO: 232895 - RNA, 21 nt, Artificial Sequence
  Synthetic
acugguuuauaaaccauuuga

SEQ ID NO: 232896 - RNA, 22 nt, Artificial Sequence
  Synthetic
cacugguuuauaaaccauuuga

SEQ ID NO: 232897 - RNA, 23 nt, Artificial Sequence
  Synthetic
gcacugguuuauaaaccauuuga

SEQ ID NO: 232898 - RNA, 24 nt, Artificial Sequence
  Synthetic
ggcacugguuuauaaaccauuuga

SEQ ID NO: 232899 - RNA, 18 nt, Artificial Sequence
  Synthetic
guaggucaugccauuuga

SEQ ID NO: 232900 - RNA, 19 nt, Artificial Sequence
  Synthetic
uguaggucaugccauuuga

SEQ ID NO: 232901 - RNA, 20 nt, Artificial Sequence
  Synthetic
auguaggucaugccauuuga

SEQ ID NO: 232902 - RNA, 21 nt, Artificial Sequence
  Synthetic
uauguaggucaugccauuuga

SEQ ID NO: 232903 - RNA, 22 nt, Artificial Sequence
  Synthetic
uuauguaggucaugccauuuga

SEQ ID NO: 232904 - RNA, 23 nt, Artificial Sequence
  Synthetic
guuauguaggucaugccauuuga

SEQ ID NO: 232905 - RNA, 24 nt, Artificial Sequence
  Synthetic
aguuauguaggucaugccauuuga

SEQ ID NO: 232906 - RNA, 18 nt, Artificial Sequence
  Synthetic
caacucaguuccauuuga

SEQ ID NO: 232907 - RNA, 19 nt, Artificial Sequence
  Synthetic
acaacucaguuccauuuga

SEQ ID NO: 232908 - RNA, 20 nt, Artificial Sequence
  Synthetic
aacaacucaguuccauuuga

SEQ ID NO: 232909 - RNA, 21 nt, Artificial Sequence
  Synthetic
gaacaacucaguuccauuuga

SEQ ID NO: 232910 - RNA, 22 nt, Artificial Sequence
  Synthetic
ggaacaacucaguuccauuuga

SEQ ID NO: 232911 - RNA, 23 nt, Artificial Sequence
  Synthetic
aggaacaacucaguuccauuuga

SEQ ID NO: 232912 - RNA, 24 nt, Artificial Sequence
  Synthetic
uaggaacaacucaguuccauuuga

SEQ ID NO: 232913 - RNA, 18 nt, Artificial Sequence
  Synthetic
uucugagagaauauuuga

SEQ ID NO: 232914 - RNA, 19 nt, Artificial Sequence
  Synthetic
uuucugagagaauauuuga

SEQ ID NO: 232915 - RNA, 20 nt, Artificial Sequence
  Synthetic
uuuucugagagaauauuuga

SEQ ID NO: 232916 - RNA, 21 nt, Artificial Sequence
  Synthetic
cuuuucugagagaauauuuga

SEQ ID NO: 232917 - RNA, 22 nt, Artificial Sequence
  Synthetic
ucuuuucugagagaauauuuga

SEQ ID NO: 232918 - RNA, 23 nt, Artificial Sequence
  Synthetic
uucuuuucugagagaauauuuga

SEQ ID NO: 232919 - RNA, 24 nt, Artificial Sequence
  Synthetic
uuucuuuucugagagaauauuuga

SEQ ID NO: 232920 - RNA, 18 nt, Artificial Sequence
  Synthetic
guaaaaaagcauauuuga

SEQ ID NO: 232921 - RNA, 19 nt, Artificial Sequence
  Synthetic
aguaaaaaagcauauuuga

SEQ ID NO: 232922 - RNA, 20 nt, Artificial Sequence
  Synthetic
uaguaaaaaagcauauuuga

SEQ ID NO: 232923 - RNA, 21 nt, Artificial Sequence
  Synthetic
uuaguaaaaaagcauauuuga

SEQ ID NO: 232924 - RNA, 22 nt, Artificial Sequence
  Synthetic
uuuaguaaaaaagcauauuuga

SEQ ID NO: 232925 - RNA, 23 nt, Artificial Sequence
  Synthetic
guuuaguaaaaaagcauauuuga

SEQ ID NO: 232926 - RNA, 24 nt, Artificial Sequence
  Synthetic
uguuuaguaaaaaagcauauuuga

SEQ ID NO: 232927 - RNA, 18 nt, Artificial Sequence
  Synthetic
uggugaauaauuauuuga

SEQ ID NO: 232928 - RNA, 19 nt, Artificial Sequence
  Synthetic
auggugaauaauuauuuga

SEQ ID NO: 232929 - RNA, 20 nt, Artificial Sequence
  Synthetic
uauggugaauaauuauuuga

SEQ ID NO: 232930 - RNA, 21 nt, Artificial Sequence
  Synthetic
guauggugaauaauuauuuga

SEQ ID NO: 232931 - RNA, 22 nt, Artificial Sequence
  Synthetic
gguauggugaauaauuauuuga

SEQ ID NO: 232932 - RNA, 23 nt, Artificial Sequence
  Synthetic
agguauggugaauaauuauuuga

SEQ ID NO: 232933 - RNA, 24 nt, Artificial Sequence
  Synthetic
uagguauggugaauaauuauuuga

SEQ ID NO: 232934 - RNA, 18 nt, Artificial Sequence
  Synthetic
auguauucccuuauuuga

SEQ ID NO: 232935 - RNA, 19 nt, Artificial Sequence
  Synthetic
aauguauucccuuauuuga

SEQ ID NO: 232936 - RNA, 20 nt, Artificial Sequence
  Synthetic
uaauguauucccuuauuuga

SEQ ID NO: 232937 - RNA, 21 nt, Artificial Sequence
  Synthetic
uuaauguauucccuuauuuga

SEQ ID NO: 232938 - RNA, 22 nt, Artificial Sequence
  Synthetic
cuuaauguauucccuuauuuga

SEQ ID NO: 232939 - RNA, 23 nt, Artificial Sequence
  Synthetic
ccuuaauguauucccuuauuuga

SEQ ID NO: 232940 - RNA, 24 nt, Artificial Sequence
  Synthetic
uccuuaauguauucccuuauuuga

SEQ ID NO: 232941 - RNA, 18 nt, Artificial Sequence
  Synthetic
uuaauuuaucuuauuuga

SEQ ID NO: 232942 - RNA, 19 nt, Artificial Sequence
  Synthetic
uuuaauuuaucuuauuuga

SEQ ID NO: 232943 - RNA, 20 nt, Artificial Sequence
  Synthetic
auuuaauuuaucuuauuuga

SEQ ID NO: 232944 - RNA, 21 nt, Artificial Sequence
  Synthetic
aauuuaauuuaucuuauuuga

SEQ ID NO: 232945 - RNA, 22 nt, Artificial Sequence
  Synthetic
caauuuaauuuaucuuauuuga

SEQ ID NO: 232946 - RNA, 23 nt, Artificial Sequence
  Synthetic
acaauuuaauuuaucuuauuuga

SEQ ID NO: 232947 - RNA, 24 nt, Artificial Sequence
  Synthetic
aacaauuuaauuuaucuuauuuga

SEQ ID NO: 232948 - RNA, 18 nt, Artificial Sequence
  Synthetic
ugcugauagaaacuuuga

SEQ ID NO: 232949 - RNA, 19 nt, Artificial Sequence
  Synthetic
augcugauagaaacuuuga

SEQ ID NO: 232950 - RNA, 20 nt, Artificial Sequence
  Synthetic
aaugcugauagaaacuuuga

SEQ ID NO: 232951 - RNA, 21 nt, Artificial Sequence
  Synthetic
aaaugcugauagaaacuuuga

SEQ ID NO: 232952 - RNA, 22 nt, Artificial Sequence
  Synthetic
caaaugcugauagaaacuuuga

SEQ ID NO: 232953 - RNA, 23 nt, Artificial Sequence
  Synthetic
ucaaaugcugauagaaacuuuga

SEQ ID NO: 232954 - RNA, 24 nt, Artificial Sequence
  Synthetic
uucaaaugcugauagaaacuuuga

SEQ ID NO: 232955 - RNA, 18 nt, Artificial Sequence
  Synthetic
ccaguaaauaaacuuuga

SEQ ID NO: 232956 - RNA, 19 nt, Artificial Sequence
  Synthetic
accaguaaauaaacuuuga

SEQ ID NO: 232957 - RNA, 20 nt, Artificial Sequence
  Synthetic
caccaguaaauaaacuuuga

SEQ ID NO: 232958 - RNA, 21 nt, Artificial Sequence
  Synthetic
ccaccaguaaauaaacuuuga

SEQ ID NO: 232959 - RNA, 22 nt, Artificial Sequence
  Synthetic
accaccaguaaauaaacuuuga

SEQ ID NO: 232960 - RNA, 23 nt, Artificial Sequence
  Synthetic
aaccaccaguaaauaaacuuuga

SEQ ID NO: 232961 - RNA, 24 nt, Artificial Sequence
  Synthetic
gaaccaccaguaaauaaacuuuga

SEQ ID NO: 232962 - RNA, 18 nt, Artificial Sequence
  Synthetic
cuuuugcagcaacuuuga

SEQ ID NO: 232963 - RNA, 19 nt, Artificial Sequence
  Synthetic
ucuuuugcagcaacuuuga

SEQ ID NO: 232964 - RNA, 20 nt, Artificial Sequence
  Synthetic
gucuuuugcagcaacuuuga

SEQ ID NO: 232965 - RNA, 21 nt, Artificial Sequence
  Synthetic
ugucuuuugcagcaacuuuga

SEQ ID NO: 232966 - RNA, 22 nt, Artificial Sequence
  Synthetic
augucuuuugcagcaacuuuga

SEQ ID NO: 232967 - RNA, 23 nt, Artificial Sequence
  Synthetic
aaugucuuuugcagcaacuuuga

SEQ ID NO: 232968 - RNA, 24 nt, Artificial Sequence
  Synthetic
uaaugucuuuugcagcaacuuuga

SEQ ID NO: 232969 - RNA, 18 nt, Artificial Sequence
  Synthetic
gauacauaucaacuuuga

SEQ ID NO: 232970 - RNA, 19 nt, Artificial Sequence
  Synthetic
agauacauaucaacuuuga

SEQ ID NO: 232971 - RNA, 20 nt, Artificial Sequence
  Synthetic
aagauacauaucaacuuuga

SEQ ID NO: 232972 - RNA, 21 nt, Artificial Sequence
  Synthetic
gaagauacauaucaacuuuga

SEQ ID NO: 232973 - RNA, 22 nt, Artificial Sequence
  Synthetic
agaagauacauaucaacuuuga

SEQ ID NO: 232974 - RNA, 23 nt, Artificial Sequence
  Synthetic
cagaagauacauaucaacuuuga

SEQ ID NO: 232975 - RNA, 24 nt, Artificial Sequence
  Synthetic
acagaagauacauaucaacuuuga

SEQ ID NO: 232976 - RNA, 18 nt, Artificial Sequence
  Synthetic
cuccucaucccacuuuga

SEQ ID NO: 232977 - RNA, 19 nt, Artificial Sequence
  Synthetic
ccuccucaucccacuuuga

SEQ ID NO: 232978 - RNA, 20 nt, Artificial Sequence
  Synthetic
gccuccucaucccacuuuga

SEQ ID NO: 232979 - RNA, 21 nt, Artificial Sequence
  Synthetic
agccuccucaucccacuuuga

SEQ ID NO: 232980 - RNA, 22 nt, Artificial Sequence
  Synthetic
aagccuccucaucccacuuuga

SEQ ID NO: 232981 - RNA, 23 nt, Artificial Sequence
  Synthetic
aaagccuccucaucccacuuuga

SEQ ID NO: 232982 - RNA, 24 nt, Artificial Sequence
  Synthetic
gaaagccuccucaucccacuuuga

SEQ ID NO: 232983 - RNA, 18 nt, Artificial Sequence
  Synthetic
aaaggacugagacuuuga

SEQ ID NO: 232984 - RNA, 19 nt, Artificial Sequence
  Synthetic
aaaaggacugagacuuuga

SEQ ID NO: 232985 - RNA, 20 nt, Artificial Sequence
  Synthetic
gaaaaggacugagacuuuga

SEQ ID NO: 232986 - RNA, 21 nt, Artificial Sequence
  Synthetic
agaaaaggacugagacuuuga

SEQ ID NO: 232987 - RNA, 22 nt, Artificial Sequence
  Synthetic
cagaaaaggacugagacuuuga

SEQ ID NO: 232988 - RNA, 23 nt, Artificial Sequence
  Synthetic
ucagaaaaggacugagacuuuga

SEQ ID NO: 232989 - RNA, 24 nt, Artificial Sequence
  Synthetic
cucagaaaaggacugagacuuuga

SEQ ID NO: 232990 - RNA, 18 nt, Artificial Sequence
  Synthetic
auuuagauaauacuuuga

SEQ ID NO: 232991 - RNA, 19 nt, Artificial Sequence
  Synthetic
aauuuagauaauacuuuga

SEQ ID NO: 232992 - RNA, 20 nt, Artificial Sequence
  Synthetic
aaauuuagauaauacuuuga

SEQ ID NO: 232993 - RNA, 21 nt, Artificial Sequence
  Synthetic
gaaauuuagauaauacuuuga

SEQ ID NO: 232994 - RNA, 22 nt, Artificial Sequence
  Synthetic
ggaaauuuagauaauacuuuga

SEQ ID NO: 232995 - RNA, 23 nt, Artificial Sequence
  Synthetic
aggaaauuuagauaauacuuuga

SEQ ID NO: 232996 - RNA, 24 nt, Artificial Sequence
  Synthetic
aaggaaauuuagauaauacuuuga

SEQ ID NO: 232997 - RNA, 18 nt, Artificial Sequence
  Synthetic
gguggggucuaccuuuga

SEQ ID NO: 232998 - RNA, 19 nt, Artificial Sequence
  Synthetic
agguggggucuaccuuuga

SEQ ID NO: 232999 - RNA, 20 nt, Artificial Sequence
  Synthetic
gagguggggucuaccuuuga

SEQ ID NO: 233000 - RNA, 21 nt, Artificial Sequence
  Synthetic
agagguggggucuaccuuuga

SEQ ID NO: 233001 - RNA, 22 nt, Artificial Sequence
  Synthetic
aagagguggggucuaccuuuga

SEQ ID NO: 233002 - RNA, 23 nt, Artificial Sequence
  Synthetic
aaagagguggggucuaccuuuga

SEQ ID NO: 233003 - RNA, 24 nt, Artificial Sequence
  Synthetic
aaaagagguggggucuaccuuuga

SEQ ID NO: 233004 - RNA, 18 nt, Artificial Sequence
  Synthetic
cuuugcuugccccuuuga

SEQ ID NO: 233005 - RNA, 19 nt, Artificial Sequence
  Synthetic
ccuuugcuugccccuuuga

SEQ ID NO: 233006 - RNA, 20 nt, Artificial Sequence
  Synthetic
uccuuugcuugccccuuuga

SEQ ID NO: 233007 - RNA, 21 nt, Artificial Sequence
  Synthetic
uuccuuugcuugccccuuuga

SEQ ID NO: 233008 - RNA, 22 nt, Artificial Sequence
  Synthetic
uuuccuuugcuugccccuuuga

SEQ ID NO: 233009 - RNA, 23 nt, Artificial Sequence
  Synthetic
auuuccuuugcuugccccuuuga

SEQ ID NO: 233010 - RNA, 24 nt, Artificial Sequence
  Synthetic
cauuuccuuugcuugccccuuuga

SEQ ID NO: 233011 - RNA, 18 nt, Artificial Sequence
  Synthetic
uauuaaguaagccuuuga

SEQ ID NO: 233012 - RNA, 19 nt, Artificial Sequence
  Synthetic
guauuaaguaagccuuuga

SEQ ID NO: 233013 - RNA, 20 nt, Artificial Sequence
  Synthetic
uguauuaaguaagccuuuga

SEQ ID NO: 233014 - RNA, 21 nt, Artificial Sequence
  Synthetic
guguauuaaguaagccuuuga

SEQ ID NO: 233015 - RNA, 22 nt, Artificial Sequence
  Synthetic
uguguauuaaguaagccuuuga

SEQ ID NO: 233016 - RNA, 23 nt, Artificial Sequence
  Synthetic
auguguauuaaguaagccuuuga

SEQ ID NO: 233017 - RNA, 24 nt, Artificial Sequence
  Synthetic
uauguguauuaaguaagccuuuga

SEQ ID NO: 233018 - RNA, 18 nt, Artificial Sequence
  Synthetic
cuuuuugugugccuuuga

SEQ ID NO: 233019 - RNA, 19 nt, Artificial Sequence
  Synthetic
ucuuuuugugugccuuuga

SEQ ID NO: 233020 - RNA, 20 nt, Artificial Sequence
  Synthetic
aucuuuuugugugccuuuga

SEQ ID NO: 233021 - RNA, 21 nt, Artificial Sequence
  Synthetic
uaucuuuuugugugccuuuga

SEQ ID NO: 233022 - RNA, 22 nt, Artificial Sequence
  Synthetic
cuaucuuuuugugugccuuuga

SEQ ID NO: 233023 - RNA, 23 nt, Artificial Sequence
  Synthetic
ucuaucuuuuugugugccuuuga

SEQ ID NO: 233024 - RNA, 24 nt, Artificial Sequence
  Synthetic
uucuaucuuuuugugugccuuuga

SEQ ID NO: 233025 - RNA, 18 nt, Artificial Sequence
  Synthetic
cgaguucauguccuuuga

SEQ ID NO: 233026 - RNA, 19 nt, Artificial Sequence
  Synthetic
acgaguucauguccuuuga

SEQ ID NO: 233027 - RNA, 20 nt, Artificial Sequence
  Synthetic
aacgaguucauguccuuuga

SEQ ID NO: 233028 - RNA, 21 nt, Artificial Sequence
  Synthetic
gaacgaguucauguccuuuga

SEQ ID NO: 233029 - RNA, 22 nt, Artificial Sequence
  Synthetic
agaacgaguucauguccuuuga

SEQ ID NO: 233030 - RNA, 23 nt, Artificial Sequence
  Synthetic
aagaacgaguucauguccuuuga

SEQ ID NO: 233031 - RNA, 24 nt, Artificial Sequence
  Synthetic
aaagaacgaguucauguccuuuga

SEQ ID NO: 233032 - RNA, 18 nt, Artificial Sequence
  Synthetic
aaacuagaauuccuuuga

SEQ ID NO: 233033 - RNA, 19 nt, Artificial Sequence
  Synthetic
aaaacuagaauuccuuuga

SEQ ID NO: 233034 - RNA, 20 nt, Artificial Sequence
  Synthetic
aaaaacuagaauuccuuuga

SEQ ID NO: 233035 - RNA, 21 nt, Artificial Sequence
  Synthetic
uaaaaacuagaauuccuuuga

SEQ ID NO: 233036 - RNA, 22 nt, Artificial Sequence
  Synthetic
auaaaaacuagaauuccuuuga

SEQ ID NO: 233037 - RNA, 23 nt, Artificial Sequence
  Synthetic
uauaaaaacuagaauuccuuuga

SEQ ID NO: 233038 - RNA, 24 nt, Artificial Sequence
  Synthetic
cuauaaaaacuagaauuccuuuga

SEQ ID NO: 233039 - RNA, 18 nt, Artificial Sequence
  Synthetic
guaguugagcggcuuuga

SEQ ID NO: 233040 - RNA, 19 nt, Artificial Sequence
  Synthetic
uguaguugagcggcuuuga

SEQ ID NO: 233041 - RNA, 20 nt, Artificial Sequence
  Synthetic
auguaguugagcggcuuuga

SEQ ID NO: 233042 - RNA, 21 nt, Artificial Sequence
  Synthetic
cauguaguugagcggcuuuga

SEQ ID NO: 233043 - RNA, 22 nt, Artificial Sequence
  Synthetic
ccauguaguugagcggcuuuga

SEQ ID NO: 233044 - RNA, 23 nt, Artificial Sequence
  Synthetic
uccauguaguugagcggcuuuga

SEQ ID NO: 233045 - RNA, 24 nt, Artificial Sequence
  Synthetic
uuccauguaguugagcggcuuuga

SEQ ID NO: 233046 - RNA, 18 nt, Artificial Sequence
  Synthetic
gucuugcucaugcuuuga

SEQ ID NO: 233047 - RNA, 19 nt, Artificial Sequence
  Synthetic
agucuugcucaugcuuuga

SEQ ID NO: 233048 - RNA, 20 nt, Artificial Sequence
  Synthetic
aagucuugcucaugcuuuga

SEQ ID NO: 233049 - RNA, 21 nt, Artificial Sequence
  Synthetic
uaagucuugcucaugcuuuga

SEQ ID NO: 233050 - RNA, 22 nt, Artificial Sequence
  Synthetic
auaagucuugcucaugcuuuga

SEQ ID NO: 233051 - RNA, 23 nt, Artificial Sequence
  Synthetic
aauaagucuugcucaugcuuuga

SEQ ID NO: 233052 - RNA, 24 nt, Artificial Sequence
  Synthetic
aaauaagucuugcucaugcuuuga

SEQ ID NO: 233053 - RNA, 18 nt, Artificial Sequence
  Synthetic
guguagggauaucuuuga

SEQ ID NO: 233054 - RNA, 19 nt, Artificial Sequence
  Synthetic
gguguagggauaucuuuga

SEQ ID NO: 233055 - RNA, 20 nt, Artificial Sequence
  Synthetic
ggguguagggauaucuuuga

SEQ ID NO: 233056 - RNA, 21 nt, Artificial Sequence
  Synthetic
uggguguagggauaucuuuga

SEQ ID NO: 233057 - RNA, 22 nt, Artificial Sequence
  Synthetic
guggguguagggauaucuuuga

SEQ ID NO: 233058 - RNA, 23 nt, Artificial Sequence
  Synthetic
aguggguguagggauaucuuuga

SEQ ID NO: 233059 - RNA, 24 nt, Artificial Sequence
  Synthetic
gaguggguguagggauaucuuuga

SEQ ID NO: 233060 - RNA, 18 nt, Artificial Sequence
  Synthetic
uaauuaagaugucuuuga

SEQ ID NO: 233061 - RNA, 19 nt, Artificial Sequence
  Synthetic
guaauuaagaugucuuuga

SEQ ID NO: 233062 - RNA, 20 nt, Artificial Sequence
  Synthetic
aguaauuaagaugucuuuga

SEQ ID NO: 233063 - RNA, 21 nt, Artificial Sequence
  Synthetic
aaguaauuaagaugucuuuga

SEQ ID NO: 233064 - RNA, 22 nt, Artificial Sequence
  Synthetic
aaaguaauuaagaugucuuuga

SEQ ID NO: 233065 - RNA, 23 nt, Artificial Sequence
  Synthetic
uaaaguaauuaagaugucuuuga

SEQ ID NO: 233066 - RNA, 24 nt, Artificial Sequence
  Synthetic
auaaaguaauuaagaugucuuuga

SEQ ID NO: 233067 - RNA, 18 nt, Artificial Sequence
  Synthetic
acaagagucuuucuuuga

SEQ ID NO: 233068 - RNA, 19 nt, Artificial Sequence
  Synthetic
aacaagagucuuucuuuga

SEQ ID NO: 233069 - RNA, 20 nt, Artificial Sequence
  Synthetic
gaacaagagucuuucuuuga

SEQ ID NO: 233070 - RNA, 21 nt, Artificial Sequence
  Synthetic
agaacaagagucuuucuuuga

SEQ ID NO: 233071 - RNA, 22 nt, Artificial Sequence
  Synthetic
uagaacaagagucuuucuuuga

SEQ ID NO: 233072 - RNA, 23 nt, Artificial Sequence
  Synthetic
cuagaacaagagucuuucuuuga

SEQ ID NO: 233073 - RNA, 24 nt, Artificial Sequence
  Synthetic
ucuagaacaagagucuuucuuuga

SEQ ID NO: 233074 - RNA, 18 nt, Artificial Sequence
  Synthetic
caguugauaaaaguuuga

SEQ ID NO: 233075 - RNA, 19 nt, Artificial Sequence
  Synthetic
ucaguugauaaaaguuuga

SEQ ID NO: 233076 - RNA, 20 nt, Artificial Sequence
  Synthetic
gucaguugauaaaaguuuga

SEQ ID NO: 233077 - RNA, 21 nt, Artificial Sequence
  Synthetic
ugucaguugauaaaaguuuga

SEQ ID NO: 233078 - RNA, 22 nt, Artificial Sequence
  Synthetic
augucaguugauaaaaguuuga

SEQ ID NO: 233079 - RNA, 23 nt, Artificial Sequence
  Synthetic
aaugucaguugauaaaaguuuga

SEQ ID NO: 233080 - RNA, 24 nt, Artificial Sequence
  Synthetic
uaaugucaguugauaaaaguuuga

SEQ ID NO: 233081 - RNA, 18 nt, Artificial Sequence
  Synthetic
ccuuccucagcaguuuga

SEQ ID NO: 233082 - RNA, 19 nt, Artificial Sequence
  Synthetic
accuuccucagcaguuuga

SEQ ID NO: 233083 - RNA, 20 nt, Artificial Sequence
  Synthetic
caccuuccucagcaguuuga

SEQ ID NO: 233084 - RNA, 21 nt, Artificial Sequence
  Synthetic
ucaccuuccucagcaguuuga

SEQ ID NO: 233085 - RNA, 22 nt, Artificial Sequence
  Synthetic
uucaccuuccucagcaguuuga

SEQ ID NO: 233086 - RNA, 23 nt, Artificial Sequence
  Synthetic
guucaccuuccucagcaguuuga

SEQ ID NO: 233087 - RNA, 24 nt, Artificial Sequence
  Synthetic
gguucaccuuccucagcaguuuga

SEQ ID NO: 233088 - RNA, 18 nt, Artificial Sequence
  Synthetic
auagaauguggaguuuga

SEQ ID NO: 233089 - RNA, 19 nt, Artificial Sequence
  Synthetic
gauagaauguggaguuuga

SEQ ID NO: 233090 - RNA, 20 nt, Artificial Sequence
  Synthetic
agauagaauguggaguuuga

SEQ ID NO: 233091 - RNA, 21 nt, Artificial Sequence
  Synthetic
uagauagaauguggaguuuga

SEQ ID NO: 233092 - RNA, 22 nt, Artificial Sequence
  Synthetic
auagauagaauguggaguuuga

SEQ ID NO: 233093 - RNA, 23 nt, Artificial Sequence
  Synthetic
gauagauagaauguggaguuuga

SEQ ID NO: 233094 - RNA, 24 nt, Artificial Sequence
  Synthetic
agauagauagaauguggaguuuga

SEQ ID NO: 233095 - RNA, 18 nt, Artificial Sequence
  Synthetic
aaauguuaauuaguuuga

SEQ ID NO: 233096 - RNA, 19 nt, Artificial Sequence
  Synthetic
aaaauguuaauuaguuuga

SEQ ID NO: 233097 - RNA, 20 nt, Artificial Sequence
  Synthetic
gaaaauguuaauuaguuuga

SEQ ID NO: 233098 - RNA, 21 nt, Artificial Sequence
  Synthetic
ugaaaauguuaauuaguuuga

SEQ ID NO: 233099 - RNA, 22 nt, Artificial Sequence
  Synthetic
augaaaauguuaauuaguuuga

SEQ ID NO: 233100 - RNA, 23 nt, Artificial Sequence
  Synthetic
gaugaaaauguuaauuaguuuga

SEQ ID NO: 233101 - RNA, 24 nt, Artificial Sequence
  Synthetic
agaugaaaauguuaauuaguuuga

SEQ ID NO: 233102 - RNA, 18 nt, Artificial Sequence
  Synthetic
ugaagugggaguguuuga

SEQ ID NO: 233103 - RNA, 19 nt, Artificial Sequence
  Synthetic
gugaagugggaguguuuga

SEQ ID NO: 233104 - RNA, 20 nt, Artificial Sequence
  Synthetic
agugaagugggaguguuuga

SEQ ID NO: 233105 - RNA, 21 nt, Artificial Sequence
  Synthetic
aagugaagugggaguguuuga

SEQ ID NO: 233106 - RNA, 22 nt, Artificial Sequence
  Synthetic
aaagugaagugggaguguuuga

SEQ ID NO: 233107 - RNA, 23 nt, Artificial Sequence
  Synthetic
aaaagugaagugggaguguuuga

SEQ ID NO: 233108 - RNA, 24 nt, Artificial Sequence
  Synthetic
gaaaagugaagugggaguguuuga

SEQ ID NO: 233109 - RNA, 18 nt, Artificial Sequence
  Synthetic
uauauguuuuguguuuga

SEQ ID NO: 233110 - RNA, 19 nt, Artificial Sequence
  Synthetic
auauauguuuuguguuuga

SEQ ID NO: 233111 - RNA, 20 nt, Artificial Sequence
  Synthetic
uauauauguuuuguguuuga

SEQ ID NO: 233112 - RNA, 21 nt, Artificial Sequence
  Synthetic
uuauauauguuuuguguuuga

SEQ ID NO: 233113 - RNA, 22 nt, Artificial Sequence
  Synthetic
auuauauauguuuuguguuuga

SEQ ID NO: 233114 - RNA, 23 nt, Artificial Sequence
  Synthetic
uauuauauauguuuuguguuuga

SEQ ID NO: 233115 - RNA, 24 nt, Artificial Sequence
  Synthetic
cuauuauauauguuuuguguuuga

SEQ ID NO: 233116 - RNA, 18 nt, Artificial Sequence
  Synthetic
uuuguuucuguuguuuga

SEQ ID NO: 233117 - RNA, 19 nt, Artificial Sequence
  Synthetic
guuuguuucuguuguuuga

SEQ ID NO: 233118 - RNA, 20 nt, Artificial Sequence
  Synthetic
aguuuguuucuguuguuuga

SEQ ID NO: 233119 - RNA, 21 nt, Artificial Sequence
  Synthetic
caguuuguuucuguuguuuga

SEQ ID NO: 233120 - RNA, 22 nt, Artificial Sequence
  Synthetic
acaguuuguuucuguuguuuga

SEQ ID NO: 233121 - RNA, 23 nt, Artificial Sequence
  Synthetic
uacaguuuguuucuguuguuuga

SEQ ID NO: 233122 - RNA, 24 nt, Artificial Sequence
  Synthetic
auacaguuuguuucuguuguuuga

SEQ ID NO: 233123 - RNA, 18 nt, Artificial Sequence
  Synthetic
uuuuuaagauuuguuuga

SEQ ID NO: 233124 - RNA, 19 nt, Artificial Sequence
  Synthetic
auuuuuaagauuuguuuga

SEQ ID NO: 233125 - RNA, 20 nt, Artificial Sequence
  Synthetic
aauuuuuaagauuuguuuga

SEQ ID NO: 233126 - RNA, 21 nt, Artificial Sequence
  Synthetic
uaauuuuuaagauuuguuuga

SEQ ID NO: 233127 - RNA, 22 nt, Artificial Sequence
  Synthetic
uuaauuuuuaagauuuguuuga

SEQ ID NO: 233128 - RNA, 23 nt, Artificial Sequence
  Synthetic
uuuaauuuuuaagauuuguuuga

SEQ ID NO: 233129 - RNA, 24 nt, Artificial Sequence
  Synthetic
uuuuaauuuuuaagauuuguuuga

SEQ ID NO: 233130 - RNA, 18 nt, Artificial Sequence
  Synthetic
aacaacaacaaauuuuga

SEQ ID NO: 233131 - RNA, 19 nt, Artificial Sequence
  Synthetic
aaacaacaacaaauuuuga

SEQ ID NO: 233132 - RNA, 20 nt, Artificial Sequence
  Synthetic
aaaacaacaacaaauuuuga

SEQ ID NO: 233133 - RNA, 21 nt, Artificial Sequence
  Synthetic
gaaaacaacaacaaauuuuga

SEQ ID NO: 233134 - RNA, 22 nt, Artificial Sequence
  Synthetic
ugaaaacaacaacaaauuuuga

SEQ ID NO: 233135 - RNA, 23 nt, Artificial Sequence
  Synthetic
gugaaaacaacaacaaauuuuga

SEQ ID NO: 233136 - RNA, 24 nt, Artificial Sequence
  Synthetic
ugugaaaacaacaacaaauuuuga

SEQ ID NO: 233137 - RNA, 18 nt, Artificial Sequence
  Synthetic
gauugacucaaauuuuga

SEQ ID NO: 233138 - RNA, 19 nt, Artificial Sequence
  Synthetic
agauugacucaaauuuuga

SEQ ID NO: 233139 - RNA, 20 nt, Artificial Sequence
  Synthetic
aagauugacucaaauuuuga

SEQ ID NO: 233140 - RNA, 21 nt, Artificial Sequence
  Synthetic
gaagauugacucaaauuuuga

SEQ ID NO: 233141 - RNA, 22 nt, Artificial Sequence
  Synthetic
agaagauugacucaaauuuuga

SEQ ID NO: 233142 - RNA, 23 nt, Artificial Sequence
  Synthetic
gagaagauugacucaaauuuuga

SEQ ID NO: 233143 - RNA, 24 nt, Artificial Sequence
  Synthetic
ugagaagauugacucaaauuuuga

SEQ ID NO: 233144 - RNA, 18 nt, Artificial Sequence
  Synthetic
cagccuuugaaauuuuga

SEQ ID NO: 233145 - RNA, 19 nt, Artificial Sequence
  Synthetic
acagccuuugaaauuuuga

SEQ ID NO: 233146 - RNA, 20 nt, Artificial Sequence
  Synthetic
aacagccuuugaaauuuuga

SEQ ID NO: 233147 - RNA, 21 nt, Artificial Sequence
  Synthetic
caacagccuuugaaauuuuga

SEQ ID NO: 233148 - RNA, 22 nt, Artificial Sequence
  Synthetic
acaacagccuuugaaauuuuga

SEQ ID NO: 233149 - RNA, 23 nt, Artificial Sequence
  Synthetic
gacaacagccuuugaaauuuuga

SEQ ID NO: 233150 - RNA, 24 nt, Artificial Sequence
  Synthetic
ggacaacagccuuugaaauuuuga

SEQ ID NO: 233151 - RNA, 18 nt, Artificial Sequence
  Synthetic
uaccauauuaaauuuuga

SEQ ID NO: 233152 - RNA, 19 nt, Artificial Sequence
  Synthetic
guaccauauuaaauuuuga

SEQ ID NO: 233153 - RNA, 20 nt, Artificial Sequence
  Synthetic
uguaccauauuaaauuuuga

SEQ ID NO: 233154 - RNA, 21 nt, Artificial Sequence
  Synthetic
cuguaccauauuaaauuuuga

SEQ ID NO: 233155 - RNA, 22 nt, Artificial Sequence
  Synthetic
ccuguaccauauuaaauuuuga

SEQ ID NO: 233156 - RNA, 23 nt, Artificial Sequence
  Synthetic
accuguaccauauuaaauuuuga

SEQ ID NO: 233157 - RNA, 24 nt, Artificial Sequence
  Synthetic
aaccuguaccauauuaaauuuuga

SEQ ID NO: 233158 - RNA, 18 nt, Artificial Sequence
  Synthetic
aaugcuucccaauuuuga

SEQ ID NO: 233159 - RNA, 19 nt, Artificial Sequence
  Synthetic
aaaugcuucccaauuuuga

SEQ ID NO: 233160 - RNA, 20 nt, Artificial Sequence
  Synthetic
aaaaugcuucccaauuuuga

SEQ ID NO: 233161 - RNA, 21 nt, Artificial Sequence
  Synthetic
uaaaaugcuucccaauuuuga

SEQ ID NO: 233162 - RNA, 22 nt, Artificial Sequence
  Synthetic
uuaaaaugcuucccaauuuuga

SEQ ID NO: 233163 - RNA, 23 nt, Artificial Sequence
  Synthetic
auuaaaaugcuucccaauuuuga

SEQ ID NO: 233164 - RNA, 24 nt, Artificial Sequence
  Synthetic
gauuaaaaugcuucccaauuuuga

SEQ ID NO: 233165 - RNA, 18 nt, Artificial Sequence
  Synthetic
ugguugcugcaauuuuga

SEQ ID NO: 233166 - RNA, 19 nt, Artificial Sequence
  Synthetic
augguugcugcaauuuuga

SEQ ID NO: 233167 - RNA, 20 nt, Artificial Sequence
  Synthetic
aaugguugcugcaauuuuga

SEQ ID NO: 233168 - RNA, 21 nt, Artificial Sequence
  Synthetic
aaaugguugcugcaauuuuga

SEQ ID NO: 233169 - RNA, 22 nt, Artificial Sequence
  Synthetic
gaaaugguugcugcaauuuuga

SEQ ID NO: 233170 - RNA, 23 nt, Artificial Sequence
  Synthetic
agaaaugguugcugcaauuuuga

SEQ ID NO: 233171 - RNA, 24 nt, Artificial Sequence
  Synthetic
aagaaaugguugcugcaauuuuga

SEQ ID NO: 233172 - RNA, 18 nt, Artificial Sequence
  Synthetic
ucucacuaauaauuuuga

SEQ ID NO: 233173 - RNA, 19 nt, Artificial Sequence
  Synthetic
cucucacuaauaauuuuga

SEQ ID NO: 233174 - RNA, 20 nt, Artificial Sequence
  Synthetic
gcucucacuaauaauuuuga

SEQ ID NO: 233175 - RNA, 21 nt, Artificial Sequence
  Synthetic
ugcucucacuaauaauuuuga

SEQ ID NO: 233176 - RNA, 22 nt, Artificial Sequence
  Synthetic
uugcucucacuaauaauuuuga

SEQ ID NO: 233177 - RNA, 23 nt, Artificial Sequence
  Synthetic
auugcucucacuaauaauuuuga

SEQ ID NO: 233178 - RNA, 24 nt, Artificial Sequence
  Synthetic
gauugcucucacuaauaauuuuga

SEQ ID NO: 233179 - RNA, 18 nt, Artificial Sequence
  Synthetic
ucguaaacauaauuuuga

SEQ ID NO: 233180 - RNA, 19 nt, Artificial Sequence
  Synthetic
aucguaaacauaauuuuga

SEQ ID NO: 233181 - RNA, 20 nt, Artificial Sequence
  Synthetic
uaucguaaacauaauuuuga

SEQ ID NO: 233182 - RNA, 21 nt, Artificial Sequence
  Synthetic
uuaucguaaacauaauuuuga

SEQ ID NO: 233183 - RNA, 22 nt, Artificial Sequence
  Synthetic
auuaucguaaacauaauuuuga

SEQ ID NO: 233184 - RNA, 23 nt, Artificial Sequence
  Synthetic
gauuaucguaaacauaauuuuga

SEQ ID NO: 233185 - RNA, 24 nt, Artificial Sequence
  Synthetic
ggauuaucguaaacauaauuuuga

SEQ ID NO: 233186 - RNA, 18 nt, Artificial Sequence
  Synthetic
acucuuucauaauuuuga

SEQ ID NO: 233187 - RNA, 19 nt, Artificial Sequence
  Synthetic
aacucuuucauaauuuuga

SEQ ID NO: 233188 - RNA, 20 nt, Artificial Sequence
  Synthetic
uaacucuuucauaauuuuga

SEQ ID NO: 233189 - RNA, 21 nt, Artificial Sequence
  Synthetic
uuaacucuuucauaauuuuga

SEQ ID NO: 233190 - RNA, 22 nt, Artificial Sequence
  Synthetic
uuuaacucuuucauaauuuuga

SEQ ID NO: 233191 - RNA, 23 nt, Artificial Sequence
  Synthetic
auuuaacucuuucauaauuuuga

SEQ ID NO: 233192 - RNA, 24 nt, Artificial Sequence
  Synthetic
aauuuaacucuuucauaauuuuga

SEQ ID NO: 233193 - RNA, 18 nt, Artificial Sequence
  Synthetic
auaacagguuaauuuuga

SEQ ID NO: 233194 - RNA, 19 nt, Artificial Sequence
  Synthetic
aauaacagguuaauuuuga

SEQ ID NO: 233195 - RNA, 20 nt, Artificial Sequence
  Synthetic
aaauaacagguuaauuuuga

SEQ ID NO: 233196 - RNA, 21 nt, Artificial Sequence
  Synthetic
aaaauaacagguuaauuuuga

SEQ ID NO: 233197 - RNA, 22 nt, Artificial Sequence
  Synthetic
caaaauaacagguuaauuuuga

SEQ ID NO: 233198 - RNA, 23 nt, Artificial Sequence
  Synthetic
ccaaaauaacagguuaauuuuga

SEQ ID NO: 233199 - RNA, 24 nt, Artificial Sequence
  Synthetic
gccaaaauaacagguuaauuuuga

SEQ ID NO: 233200 - RNA, 18 nt, Artificial Sequence
  Synthetic
uuccuuugcugauuuuga

SEQ ID NO: 233201 - RNA, 19 nt, Artificial Sequence
  Synthetic
uuuccuuugcugauuuuga

SEQ ID NO: 233202 - RNA, 20 nt, Artificial Sequence
  Synthetic
cuuuccuuugcugauuuuga

SEQ ID NO: 233203 - RNA, 21 nt, Artificial Sequence
  Synthetic
gcuuuccuuugcugauuuuga

SEQ ID NO: 233204 - RNA, 22 nt, Artificial Sequence
  Synthetic
cgcuuuccuuugcugauuuuga

SEQ ID NO: 233205 - RNA, 23 nt, Artificial Sequence
  Synthetic
ccgcuuuccuuugcugauuuuga

SEQ ID NO: 233206 - RNA, 24 nt, Artificial Sequence
  Synthetic
cccgcuuuccuuugcugauuuuga

SEQ ID NO: 233207 - RNA, 18 nt, Artificial Sequence
  Synthetic
uauccaaaaauauuuuga

SEQ ID NO: 233208 - RNA, 19 nt, Artificial Sequence
  Synthetic
uuauccaaaaauauuuuga

SEQ ID NO: 233209 - RNA, 20 nt, Artificial Sequence
  Synthetic
uuuauccaaaaauauuuuga

SEQ ID NO: 233210 - RNA, 21 nt, Artificial Sequence
  Synthetic
uuuuauccaaaaauauuuuga

SEQ ID NO: 233211 - RNA, 22 nt, Artificial Sequence
  Synthetic
uuuuuauccaaaaauauuuuga

SEQ ID NO: 233212 - RNA, 23 nt, Artificial Sequence
  Synthetic
auuuuuauccaaaaauauuuuga

SEQ ID NO: 233213 - RNA, 24 nt, Artificial Sequence
  Synthetic
aauuuuuauccaaaaauauuuuga

SEQ ID NO: 233214 - RNA, 18 nt, Artificial Sequence
  Synthetic
uacuuuaaugccuuuuga

SEQ ID NO: 233215 - RNA, 19 nt, Artificial Sequence
  Synthetic
guacuuuaaugccuuuuga

SEQ ID NO: 233216 - RNA, 20 nt, Artificial Sequence
  Synthetic
aguacuuuaaugccuuuuga

SEQ ID NO: 233217 - RNA, 21 nt, Artificial Sequence
  Synthetic
aaguacuuuaaugccuuuuga

SEQ ID NO: 233218 - RNA, 22 nt, Artificial Sequence
  Synthetic
uaaguacuuuaaugccuuuuga

SEQ ID NO: 233219 - RNA, 23 nt, Artificial Sequence
  Synthetic
auaaguacuuuaaugccuuuuga

SEQ ID NO: 233220 - RNA, 24 nt, Artificial Sequence
  Synthetic
aauaaguacuuuaaugccuuuuga

SEQ ID NO: 233221 - RNA, 18 nt, Artificial Sequence
  Synthetic
ccacucuaugccuuuuga

SEQ ID NO: 233222 - RNA, 19 nt, Artificial Sequence
  Synthetic
accacucuaugccuuuuga

SEQ ID NO: 233223 - RNA, 20 nt, Artificial Sequence
  Synthetic
aaccacucuaugccuuuuga

SEQ ID NO: 233224 - RNA, 21 nt, Artificial Sequence
  Synthetic
caaccacucuaugccuuuuga

SEQ ID NO: 233225 - RNA, 22 nt, Artificial Sequence
  Synthetic
ucaaccacucuaugccuuuuga

SEQ ID NO: 233226 - RNA, 23 nt, Artificial Sequence
  Synthetic
cucaaccacucuaugccuuuuga

SEQ ID NO: 233227 - RNA, 24 nt, Artificial Sequence
  Synthetic
acucaaccacucuaugccuuuuga

SEQ ID NO: 233228 - RNA, 18 nt, Artificial Sequence
  Synthetic
cagcaugccagcuuuuga

SEQ ID NO: 233229 - RNA, 19 nt, Artificial Sequence
  Synthetic
acagcaugccagcuuuuga

SEQ ID NO: 233230 - RNA, 20 nt, Artificial Sequence
  Synthetic
uacagcaugccagcuuuuga

SEQ ID NO: 233231 - RNA, 21 nt, Artificial Sequence
  Synthetic
cuacagcaugccagcuuuuga

SEQ ID NO: 233232 - RNA, 22 nt, Artificial Sequence
  Synthetic
acuacagcaugccagcuuuuga

SEQ ID NO: 233233 - RNA, 23 nt, Artificial Sequence
  Synthetic
cacuacagcaugccagcuuuuga

SEQ ID NO: 233234 - RNA, 24 nt, Artificial Sequence
  Synthetic
ccacuacagcaugccagcuuuuga

SEQ ID NO: 233235 - RNA, 18 nt, Artificial Sequence
  Synthetic
gaucuccaccucuuuuga

SEQ ID NO: 233236 - RNA, 19 nt, Artificial Sequence
  Synthetic
ugaucuccaccucuuuuga

SEQ ID NO: 233237 - RNA, 20 nt, Artificial Sequence
  Synthetic
augaucuccaccucuuuuga

SEQ ID NO: 233238 - RNA, 21 nt, Artificial Sequence
  Synthetic
gaugaucuccaccucuuuuga

SEQ ID NO: 233239 - RNA, 22 nt, Artificial Sequence
  Synthetic
ggaugaucuccaccucuuuuga

SEQ ID NO: 233240 - RNA, 23 nt, Artificial Sequence
  Synthetic
uggaugaucuccaccucuuuuga

SEQ ID NO: 233241 - RNA, 24 nt, Artificial Sequence
  Synthetic
cuggaugaucuccaccucuuuuga

SEQ ID NO: 233242 - RNA, 18 nt, Artificial Sequence
  Synthetic
auugaaugggaguuuuga

SEQ ID NO: 233243 - RNA, 19 nt, Artificial Sequence
  Synthetic
uauugaaugggaguuuuga

SEQ ID NO: 233244 - RNA, 20 nt, Artificial Sequence
  Synthetic
guauugaaugggaguuuuga

SEQ ID NO: 233245 - RNA, 21 nt, Artificial Sequence
  Synthetic
gguauugaaugggaguuuuga

SEQ ID NO: 233246 - RNA, 22 nt, Artificial Sequence
  Synthetic
ugguauugaaugggaguuuuga

SEQ ID NO: 233247 - RNA, 23 nt, Artificial Sequence
  Synthetic
augguauugaaugggaguuuuga

SEQ ID NO: 233248 - RNA, 24 nt, Artificial Sequence
  Synthetic
aaugguauugaaugggaguuuuga

SEQ ID NO: 233249 - RNA, 18 nt, Artificial Sequence
  Synthetic
guuauuggaggguuuuga

SEQ ID NO: 233250 - RNA, 19 nt, Artificial Sequence
  Synthetic
aguuauuggaggguuuuga

SEQ ID NO: 233251 - RNA, 20 nt, Artificial Sequence
  Synthetic
gaguuauuggaggguuuuga

SEQ ID NO: 233252 - RNA, 21 nt, Artificial Sequence
  Synthetic
ggaguuauuggaggguuuuga

SEQ ID NO: 233253 - RNA, 22 nt, Artificial Sequence
  Synthetic
gggaguuauuggaggguuuuga

SEQ ID NO: 233254 - RNA, 23 nt, Artificial Sequence
  Synthetic
ugggaguuauuggaggguuuuga

SEQ ID NO: 233255 - RNA, 24 nt, Artificial Sequence
  Synthetic
augggaguuauuggaggguuuuga

SEQ ID NO: 233256 - RNA, 18 nt, Artificial Sequence
  Synthetic
aauugugauguguuuuga

SEQ ID NO: 233257 - RNA, 19 nt, Artificial Sequence
  Synthetic
uaauugugauguguuuuga

SEQ ID NO: 233258 - RNA, 20 nt, Artificial Sequence
  Synthetic
uuaauugugauguguuuuga

SEQ ID NO: 233259 - RNA, 21 nt, Artificial Sequence
  Synthetic
auuaauugugauguguuuuga

SEQ ID NO: 233260 - RNA, 22 nt, Artificial Sequence
  Synthetic
gauuaauugugauguguuuuga

SEQ ID NO: 233261 - RNA, 23 nt, Artificial Sequence
  Synthetic
ugauuaauugugauguguuuuga

SEQ ID NO: 233262 - RNA, 24 nt, Artificial Sequence
  Synthetic
gugauuaauugugauguguuuuga

SEQ ID NO: 233263 - RNA, 18 nt, Artificial Sequence
  Synthetic
gcguuuuucuuguuuuga

SEQ ID NO: 233264 - RNA, 19 nt, Artificial Sequence
  Synthetic
ggcguuuuucuuguuuuga

SEQ ID NO: 233265 - RNA, 20 nt, Artificial Sequence
  Synthetic
uggcguuuuucuuguuuuga

SEQ ID NO: 233266 - RNA, 21 nt, Artificial Sequence
  Synthetic
cuggcguuuuucuuguuuuga

SEQ ID NO: 233267 - RNA, 22 nt, Artificial Sequence
  Synthetic
acuggcguuuuucuuguuuuga

SEQ ID NO: 233268 - RNA, 23 nt, Artificial Sequence
  Synthetic
aacuggcguuuuucuuguuuuga

SEQ ID NO: 233269 - RNA, 24 nt, Artificial Sequence
  Synthetic
uaacuggcguuuuucuuguuuuga

SEQ ID NO: 233270 - RNA, 18 nt, Artificial Sequence
  Synthetic
ucuaauugaaauuuuuga

SEQ ID NO: 233271 - RNA, 19 nt, Artificial Sequence
  Synthetic
uucuaauugaaauuuuuga

SEQ ID NO: 233272 - RNA, 20 nt, Artificial Sequence
  Synthetic
uuucuaauugaaauuuuuga

SEQ ID NO: 233273 - RNA, 21 nt, Artificial Sequence
  Synthetic
uuuucuaauugaaauuuuuga

SEQ ID NO: 233274 - RNA, 22 nt, Artificial Sequence
  Synthetic
uuuuucuaauugaaauuuuuga

SEQ ID NO: 233275 - RNA, 23 nt, Artificial Sequence
  Synthetic
uuuuuucuaauugaaauuuuuga

SEQ ID NO: 233276 - RNA, 24 nt, Artificial Sequence
  Synthetic
cuuuuuucuaauugaaauuuuuga

SEQ ID NO: 233277 - RNA, 18 nt, Artificial Sequence
  Synthetic
ccgauuuagcauuuuuga

SEQ ID NO: 233278 - RNA, 19 nt, Artificial Sequence
  Synthetic
cccgauuuagcauuuuuga

SEQ ID NO: 233279 - RNA, 20 nt, Artificial Sequence
  Synthetic
acccgauuuagcauuuuuga

SEQ ID NO: 233280 - RNA, 21 nt, Artificial Sequence
  Synthetic
uacccgauuuagcauuuuuga

SEQ ID NO: 233281 - RNA, 22 nt, Artificial Sequence
  Synthetic
auacccgauuuagcauuuuuga

SEQ ID NO: 233282 - RNA, 23 nt, Artificial Sequence
  Synthetic
aauacccgauuuagcauuuuuga

SEQ ID NO: 233283 - RNA, 24 nt, Artificial Sequence
  Synthetic
caauacccgauuuagcauuuuuga

SEQ ID NO: 233284 - RNA, 18 nt, Artificial Sequence
  Synthetic
acguuuguagauuuuuga

SEQ ID NO: 233285 - RNA, 19 nt, Artificial Sequence
  Synthetic
cacguuuguagauuuuuga

SEQ ID NO: 233286 - RNA, 20 nt, Artificial Sequence
  Synthetic
ucacguuuguagauuuuuga

SEQ ID NO: 233287 - RNA, 21 nt, Artificial Sequence
  Synthetic
gucacguuuguagauuuuuga

SEQ ID NO: 233288 - RNA, 22 nt, Artificial Sequence
  Synthetic
agucacguuuguagauuuuuga

SEQ ID NO: 233289 - RNA, 23 nt, Artificial Sequence
  Synthetic
cagucacguuuguagauuuuuga

SEQ ID NO: 233290 - RNA, 24 nt, Artificial Sequence
  Synthetic
gcagucacguuuguagauuuuuga

SEQ ID NO: 233291 - RNA, 18 nt, Artificial Sequence
  Synthetic
uauugcgaauauuuuuga

SEQ ID NO: 233292 - RNA, 19 nt, Artificial Sequence
  Synthetic
auauugcgaauauuuuuga

SEQ ID NO: 233293 - RNA, 20 nt, Artificial Sequence
  Synthetic
aauauugcgaauauuuuuga

SEQ ID NO: 233294 - RNA, 21 nt, Artificial Sequence
  Synthetic
uaauauugcgaauauuuuuga

SEQ ID NO: 233295 - RNA, 22 nt, Artificial Sequence
  Synthetic
auaauauugcgaauauuuuuga

SEQ ID NO: 233296 - RNA, 23 nt, Artificial Sequence
  Synthetic
uauaauauugcgaauauuuuuga

SEQ ID NO: 233297 - RNA, 24 nt, Artificial Sequence
  Synthetic
uuauaauauugcgaauauuuuuga

SEQ ID NO: 233298 - RNA, 18 nt, Artificial Sequence
  Synthetic
gaucauucuacuuuuuga

SEQ ID NO: 233299 - RNA, 19 nt, Artificial Sequence
  Synthetic
ggaucauucuacuuuuuga

SEQ ID NO: 233300 - RNA, 20 nt, Artificial Sequence
  Synthetic
uggaucauucuacuuuuuga

SEQ ID NO: 233301 - RNA, 21 nt, Artificial Sequence
  Synthetic
auggaucauucuacuuuuuga

SEQ ID NO: 233302 - RNA, 22 nt, Artificial Sequence
  Synthetic
cauggaucauucuacuuuuuga

SEQ ID NO: 233303 - RNA, 23 nt, Artificial Sequence
  Synthetic
ccauggaucauucuacuuuuuga

SEQ ID NO: 233304 - RNA, 24 nt, Artificial Sequence
  Synthetic
accauggaucauucuacuuuuuga

SEQ ID NO: 233305 - RNA, 18 nt, Artificial Sequence
  Synthetic
auuggcuaugcuuuuuga

SEQ ID NO: 233306 - RNA, 19 nt, Artificial Sequence
  Synthetic
aauuggcuaugcuuuuuga

SEQ ID NO: 233307 - RNA, 20 nt, Artificial Sequence
  Synthetic
caauuggcuaugcuuuuuga

SEQ ID NO: 233308 - RNA, 21 nt, Artificial Sequence
  Synthetic
gcaauuggcuaugcuuuuuga

SEQ ID NO: 233309 - RNA, 22 nt, Artificial Sequence
  Synthetic
agcaauuggcuaugcuuuuuga

SEQ ID NO: 233310 - RNA, 23 nt, Artificial Sequence
  Synthetic
gagcaauuggcuaugcuuuuuga

SEQ ID NO: 233311 - RNA, 24 nt, Artificial Sequence
  Synthetic
agagcaauuggcuaugcuuuuuga

SEQ ID NO: 233312 - RNA, 18 nt, Artificial Sequence
  Synthetic
uaugaauucucuuuuuga

SEQ ID NO: 233313 - RNA, 19 nt, Artificial Sequence
  Synthetic
uuaugaauucucuuuuuga

SEQ ID NO: 233314 - RNA, 20 nt, Artificial Sequence
  Synthetic
uuuaugaauucucuuuuuga

SEQ ID NO: 233315 - RNA, 21 nt, Artificial Sequence
  Synthetic
guuuaugaauucucuuuuuga

SEQ ID NO: 233316 - RNA, 22 nt, Artificial Sequence
  Synthetic
uguuuaugaauucucuuuuuga

SEQ ID NO: 233317 - RNA, 23 nt, Artificial Sequence
  Synthetic
auguuuaugaauucucuuuuuga

SEQ ID NO: 233318 - RNA, 24 nt, Artificial Sequence
  Synthetic
uauguuuaugaauucucuuuuuga

SEQ ID NO: 233319 - RNA, 18 nt, Artificial Sequence
  Synthetic
uccccugucaguuuuuga

SEQ ID NO: 233320 - RNA, 19 nt, Artificial Sequence
  Synthetic
uuccccugucaguuuuuga

SEQ ID NO: 233321 - RNA, 20 nt, Artificial Sequence
  Synthetic
uuuccccugucaguuuuuga

SEQ ID NO: 233322 - RNA, 21 nt, Artificial Sequence
  Synthetic
uuuuccccugucaguuuuuga

SEQ ID NO: 233323 - RNA, 22 nt, Artificial Sequence
  Synthetic
uuuuuccccugucaguuuuuga

SEQ ID NO: 233324 - RNA, 23 nt, Artificial Sequence
  Synthetic
uuuuuuccccugucaguuuuuga

SEQ ID NO: 233325 - RNA, 24 nt, Artificial Sequence
  Synthetic
auuuuuuccccugucaguuuuuga

SEQ ID NO: 233326 - RNA, 18 nt, Artificial Sequence
  Synthetic
cacacuggauguuuuuga

SEQ ID NO: 233327 - RNA, 19 nt, Artificial Sequence
  Synthetic
acacacuggauguuuuuga

SEQ ID NO: 233328 - RNA, 20 nt, Artificial Sequence
  Synthetic
gacacacuggauguuuuuga

SEQ ID NO: 233329 - RNA, 21 nt, Artificial Sequence
  Synthetic
ugacacacuggauguuuuuga

SEQ ID NO: 233330 - RNA, 22 nt, Artificial Sequence
  Synthetic
cugacacacuggauguuuuuga

SEQ ID NO: 233331 - RNA, 23 nt, Artificial Sequence
  Synthetic
ccugacacacuggauguuuuuga

SEQ ID NO: 233332 - RNA, 24 nt, Artificial Sequence
  Synthetic
cccugacacacuggauguuuuuga

SEQ ID NO: 233333 - RNA, 18 nt, Artificial Sequence
  Synthetic
aaaauaaauauuuuuuga

SEQ ID NO: 233334 - RNA, 19 nt, Artificial Sequence
  Synthetic
caaaauaaauauuuuuuga

SEQ ID NO: 233335 - RNA, 20 nt, Artificial Sequence
  Synthetic
ucaaaauaaauauuuuuuga

SEQ ID NO: 233336 - RNA, 21 nt, Artificial Sequence
  Synthetic
uucaaaauaaauauuuuuuga

SEQ ID NO: 233337 - RNA, 22 nt, Artificial Sequence
  Synthetic
guucaaaauaaauauuuuuuga

SEQ ID NO: 233338 - RNA, 23 nt, Artificial Sequence
  Synthetic
gguucaaaauaaauauuuuuuga

SEQ ID NO: 233339 - RNA, 24 nt, Artificial Sequence
  Synthetic
agguucaaaauaaauauuuuuuga

SEQ ID NO: 233340 - RNA, 18 nt, Artificial Sequence
  Synthetic
cuucauugacuuuuuuga

SEQ ID NO: 233341 - RNA, 19 nt, Artificial Sequence
  Synthetic
ccuucauugacuuuuuuga

SEQ ID NO: 233342 - RNA, 20 nt, Artificial Sequence
  Synthetic
accuucauugacuuuuuuga

SEQ ID NO: 233343 - RNA, 21 nt, Artificial Sequence
  Synthetic
uaccuucauugacuuuuuuga

SEQ ID NO: 233344 - RNA, 22 nt, Artificial Sequence
  Synthetic
cuaccuucauugacuuuuuuga

SEQ ID NO: 233345 - RNA, 23 nt, Artificial Sequence
  Synthetic
ccuaccuucauugacuuuuuuga

SEQ ID NO: 233346 - RNA, 24 nt, Artificial Sequence
  Synthetic
uccuaccuucauugacuuuuuuga

SEQ ID NO: 233347 - RNA, 18 nt, Artificial Sequence
  Synthetic
aguuuuuuucuuuuuuga

SEQ ID NO: 233348 - RNA, 19 nt, Artificial Sequence
  Synthetic
aaguuuuuuucuuuuuuga

SEQ ID NO: 233349 - RNA, 20 nt, Artificial Sequence
  Synthetic
gaaguuuuuuucuuuuuuga

SEQ ID NO: 233350 - RNA, 21 nt, Artificial Sequence
  Synthetic
ugaaguuuuuuucuuuuuuga

SEQ ID NO: 233351 - RNA, 22 nt, Artificial Sequence
  Synthetic
uugaaguuuuuuucuuuuuuga

SEQ ID NO: 233352 - RNA, 23 nt, Artificial Sequence
  Synthetic
uuugaaguuuuuuucuuuuuuga

SEQ ID NO: 233353 - RNA, 24 nt, Artificial Sequence
  Synthetic
auuugaaguuuuuuucuuuuuuga

SEQ ID NO: 233354 - RNA, 18 nt, Artificial Sequence
  Synthetic
uaaaaugguguuuuuuga

SEQ ID NO: 233355 - RNA, 19 nt, Artificial Sequence
  Synthetic
auaaaaugguguuuuuuga

SEQ ID NO: 233356 - RNA, 20 nt, Artificial Sequence
  Synthetic
cauaaaaugguguuuuuuga

SEQ ID NO: 233357 - RNA, 21 nt, Artificial Sequence
  Synthetic
ucauaaaaugguguuuuuuga

SEQ ID NO: 233358 - RNA, 22 nt, Artificial Sequence
  Synthetic
gucauaaaaugguguuuuuuga

SEQ ID NO: 233359 - RNA, 23 nt, Artificial Sequence
  Synthetic
ugucauaaaaugguguuuuuuga

SEQ ID NO: 233360 - RNA, 24 nt, Artificial Sequence
  Synthetic
augucauaaaaugguguuuuuuga

SEQ ID NO: 233361 - RNA, 18 nt, Artificial Sequence
  Synthetic
uuauuuauuuuuuuuuga

SEQ ID NO: 233362 - RNA, 19 nt, Artificial Sequence
  Synthetic
cuuauuuauuuuuuuuuga

SEQ ID NO: 233363 - RNA, 20 nt, Artificial Sequence
  Synthetic
acuuauuuauuuuuuuuuga

SEQ ID NO: 233364 - RNA, 21 nt, Artificial Sequence
  Synthetic
uacuuauuuauuuuuuuuuga

SEQ ID NO: 233365 - RNA, 22 nt, Artificial Sequence
  Synthetic
uuacuuauuuauuuuuuuuuga

SEQ ID NO: 233366 - RNA, 23 nt, Artificial Sequence
  Synthetic
uuuacuuauuuauuuuuuuuuga

SEQ ID NO: 233367 - RNA, 24 nt, Artificial Sequence
  Synthetic
uuuuacuuauuuauuuuuuuuuga

SEQ ID NO: 233368 - RNA, 18 nt, Artificial Sequence
  Synthetic
uuuuuuuuuuuuuuuuga

SEQ ID NO: 233369 - RNA, 19 nt, Artificial Sequence
  Synthetic
uuuuuuuuuuuuuuuuuga

SEQ ID NO: 233370 - RNA, 20 nt, Artificial Sequence
  Synthetic
uuuuuuuuuuuuuuuuuuga

SEQ ID NO: 233371 - RNA, 18 nt, Artificial Sequence
  Synthetic
auacuacaacaaaaaaua

SEQ ID NO: 233372 - RNA, 19 nt, Artificial Sequence
  Synthetic
aauacuacaacaaaaaaua

SEQ ID NO: 233373 - RNA, 20 nt, Artificial Sequence
  Synthetic
aaauacuacaacaaaaaaua

SEQ ID NO: 233374 - RNA, 21 nt, Artificial Sequence
  Synthetic
caaauacuacaacaaaaaaua

SEQ ID NO: 233375 - RNA, 22 nt, Artificial Sequence
  Synthetic
ccaaauacuacaacaaaaaaua

SEQ ID NO: 233376 - RNA, 23 nt, Artificial Sequence
  Synthetic
cccaaauacuacaacaaaaaaua

SEQ ID NO: 233377 - RNA, 24 nt, Artificial Sequence
  Synthetic
ucccaaauacuacaacaaaaaaua

SEQ ID NO: 233378 - RNA, 18 nt, Artificial Sequence
  Synthetic
ugaaguuaucaaaaaaua

SEQ ID NO: 233379 - RNA, 19 nt, Artificial Sequence
  Synthetic
cugaaguuaucaaaaaaua

SEQ ID NO: 233380 - RNA, 20 nt, Artificial Sequence
  Synthetic
ucugaaguuaucaaaaaaua

SEQ ID NO: 233381 - RNA, 21 nt, Artificial Sequence
  Synthetic
uucugaaguuaucaaaaaaua

SEQ ID NO: 233382 - RNA, 22 nt, Artificial Sequence
  Synthetic
cuucugaaguuaucaaaaaaua

SEQ ID NO: 233383 - RNA, 23 nt, Artificial Sequence
  Synthetic
ucuucugaaguuaucaaaaaaua

SEQ ID NO: 233384 - RNA, 24 nt, Artificial Sequence
  Synthetic
cucuucugaaguuaucaaaaaaua

SEQ ID NO: 233385 - RNA, 18 nt, Artificial Sequence
  Synthetic
gagucugaggaaaaaaua

SEQ ID NO: 233386 - RNA, 19 nt, Artificial Sequence
  Synthetic
agagucugaggaaaaaaua

SEQ ID NO: 233387 - RNA, 20 nt, Artificial Sequence
  Synthetic
gagagucugaggaaaaaaua

SEQ ID NO: 233388 - RNA, 21 nt, Artificial Sequence
  Synthetic
agagagucugaggaaaaaaua

SEQ ID NO: 233389 - RNA, 22 nt, Artificial Sequence
  Synthetic
gagagagucugaggaaaaaaua

SEQ ID NO: 233390 - RNA, 23 nt, Artificial Sequence
  Synthetic
agagagagucugaggaaaaaaua

SEQ ID NO: 233391 - RNA, 24 nt, Artificial Sequence
  Synthetic
aagagagagucugaggaaaaaaua

SEQ ID NO: 233392 - RNA, 18 nt, Artificial Sequence
  Synthetic
uaucuuaaugaaaaaaua

SEQ ID NO: 233393 - RNA, 19 nt, Artificial Sequence
  Synthetic
auaucuuaaugaaaaaaua

SEQ ID NO: 233394 - RNA, 20 nt, Artificial Sequence
  Synthetic
aauaucuuaaugaaaaaaua

SEQ ID NO: 233395 - RNA, 21 nt, Artificial Sequence
  Synthetic
uaauaucuuaaugaaaaaaua

SEQ ID NO: 233396 - RNA, 22 nt, Artificial Sequence
  Synthetic
auaauaucuuaaugaaaaaaua

SEQ ID NO: 233397 - RNA, 23 nt, Artificial Sequence
  Synthetic
uauaauaucuuaaugaaaaaaua

SEQ ID NO: 233398 - RNA, 24 nt, Artificial Sequence
  Synthetic
uuauaauaucuuaaugaaaaaaua

SEQ ID NO: 233399 - RNA, 18 nt, Artificial Sequence
  Synthetic
aggauauacacaaaaaua

SEQ ID NO: 233400 - RNA, 19 nt, Artificial Sequence
  Synthetic
aaggauauacacaaaaaua

SEQ ID NO: 233401 - RNA, 20 nt, Artificial Sequence
  Synthetic
aaaggauauacacaaaaaua

SEQ ID NO: 233402 - RNA, 21 nt, Artificial Sequence
  Synthetic
gaaaggauauacacaaaaaua

SEQ ID NO: 233403 - RNA, 22 nt, Artificial Sequence
  Synthetic
ggaaaggauauacacaaaaaua

SEQ ID NO: 233404 - RNA, 23 nt, Artificial Sequence
  Synthetic
aggaaaggauauacacaaaaaua

SEQ ID NO: 233405 - RNA, 24 nt, Artificial Sequence
  Synthetic
aaggaaaggauauacacaaaaaua

SEQ ID NO: 233406 - RNA, 18 nt, Artificial Sequence
  Synthetic
ugauuuuauucaaaaaua

SEQ ID NO: 233407 - RNA, 19 nt, Artificial Sequence
  Synthetic
uugauuuuauucaaaaaua

SEQ ID NO: 233408 - RNA, 20 nt, Artificial Sequence
  Synthetic
guugauuuuauucaaaaaua

SEQ ID NO: 233409 - RNA, 21 nt, Artificial Sequence
  Synthetic
uguugauuuuauucaaaaaua

SEQ ID NO: 233410 - RNA, 22 nt, Artificial Sequence
  Synthetic
auguugauuuuauucaaaaaua

SEQ ID NO: 233411 - RNA, 23 nt, Artificial Sequence
  Synthetic
uauguugauuuuauucaaaaaua

SEQ ID NO: 233412 - RNA, 24 nt, Artificial Sequence
  Synthetic
auauguugauuuuauucaaaaaua

SEQ ID NO: 233413 - RNA, 18 nt, Artificial Sequence
  Synthetic
acaaaccugagaaaaaua

SEQ ID NO: 233414 - RNA, 19 nt, Artificial Sequence
  Synthetic
aacaaaccugagaaaaaua

SEQ ID NO: 233415 - RNA, 20 nt, Artificial Sequence
  Synthetic
caacaaaccugagaaaaaua

SEQ ID NO: 233416 - RNA, 21 nt, Artificial Sequence
  Synthetic
acaacaaaccugagaaaaaua

SEQ ID NO: 233417 - RNA, 22 nt, Artificial Sequence
  Synthetic
gacaacaaaccugagaaaaaua

SEQ ID NO: 233418 - RNA, 23 nt, Artificial Sequence
  Synthetic
ugacaacaaaccugagaaaaaua

SEQ ID NO: 233419 - RNA, 24 nt, Artificial Sequence
  Synthetic
gugacaacaaaccugagaaaaaua

SEQ ID NO: 233420 - RNA, 18 nt, Artificial Sequence
  Synthetic
augucaaguagaaaaaua

SEQ ID NO: 233421 - RNA, 19 nt, Artificial Sequence
  Synthetic
uaugucaaguagaaaaaua

SEQ ID NO: 233422 - RNA, 20 nt, Artificial Sequence
  Synthetic
uuaugucaaguagaaaaaua

SEQ ID NO: 233423 - RNA, 21 nt, Artificial Sequence
  Synthetic
uuuaugucaaguagaaaaaua

SEQ ID NO: 233424 - RNA, 22 nt, Artificial Sequence
  Synthetic
uuuuaugucaaguagaaaaaua

SEQ ID NO: 233425 - RNA, 23 nt, Artificial Sequence
  Synthetic
auuuuaugucaaguagaaaaaua

SEQ ID NO: 233426 - RNA, 24 nt, Artificial Sequence
  Synthetic
uauuuuaugucaaguagaaaaaua

SEQ ID NO: 233427 - RNA, 18 nt, Artificial Sequence
  Synthetic
uggacacaaggaaaaaua

SEQ ID NO: 233428 - RNA, 19 nt, Artificial Sequence
  Synthetic
uuggacacaaggaaaaaua

SEQ ID NO: 233429 - RNA, 20 nt, Artificial Sequence
  Synthetic
auuggacacaaggaaaaaua

SEQ ID NO: 233430 - RNA, 21 nt, Artificial Sequence
  Synthetic
aauuggacacaaggaaaaaua

SEQ ID NO: 233431 - RNA, 22 nt, Artificial Sequence
  Synthetic
aaauuggacacaaggaaaaaua

SEQ ID NO: 233432 - RNA, 23 nt, Artificial Sequence
  Synthetic
uaaauuggacacaaggaaaaaua

SEQ ID NO: 233433 - RNA, 24 nt, Artificial Sequence
  Synthetic
auaaauuggacacaaggaaaaaua

SEQ ID NO: 233434 - RNA, 18 nt, Artificial Sequence
  Synthetic
auauacacaugaaaaaua

SEQ ID NO: 233435 - RNA, 19 nt, Artificial Sequence
  Synthetic
gauauacacaugaaaaaua

SEQ ID NO: 233436 - RNA, 20 nt, Artificial Sequence
  Synthetic
ggauauacacaugaaaaaua

SEQ ID NO: 233437 - RNA, 21 nt, Artificial Sequence
  Synthetic
uggauauacacaugaaaaaua

SEQ ID NO: 233438 - RNA, 22 nt, Artificial Sequence
  Synthetic
cuggauauacacaugaaaaaua

SEQ ID NO: 233439 - RNA, 23 nt, Artificial Sequence
  Synthetic
acuggauauacacaugaaaaaua

SEQ ID NO: 233440 - RNA, 24 nt, Artificial Sequence
  Synthetic
aacuggauauacacaugaaaaaua

SEQ ID NO: 233441 - RNA, 18 nt, Artificial Sequence
  Synthetic
uuuucaugaugaaaaaua

SEQ ID NO: 233442 - RNA, 19 nt, Artificial Sequence
  Synthetic
cuuuucaugaugaaaaaua

SEQ ID NO: 233443 - RNA, 20 nt, Artificial Sequence
  Synthetic
gcuuuucaugaugaaaaaua

SEQ ID NO: 233444 - RNA, 21 nt, Artificial Sequence
  Synthetic
agcuuuucaugaugaaaaaua

SEQ ID NO: 233445 - RNA, 22 nt, Artificial Sequence
  Synthetic
aagcuuuucaugaugaaaaaua

SEQ ID NO: 233446 - RNA, 23 nt, Artificial Sequence
  Synthetic
aaagcuuuucaugaugaaaaaua

SEQ ID NO: 233447 - RNA, 24 nt, Artificial Sequence
  Synthetic
aaaagcuuuucaugaugaaaaaua

SEQ ID NO: 233448 - RNA, 18 nt, Artificial Sequence
  Synthetic
uagacaaauugaaaaaua

SEQ ID NO: 233449 - RNA, 19 nt, Artificial Sequence
  Synthetic
guagacaaauugaaaaaua

SEQ ID NO: 233450 - RNA, 20 nt, Artificial Sequence
  Synthetic
uguagacaaauugaaaaaua

SEQ ID NO: 233451 - RNA, 21 nt, Artificial Sequence
  Synthetic
uuguagacaaauugaaaaaua

SEQ ID NO: 233452 - RNA, 22 nt, Artificial Sequence
  Synthetic
auuguagacaaauugaaaaaua

SEQ ID NO: 233453 - RNA, 23 nt, Artificial Sequence
  Synthetic
cauuguagacaaauugaaaaaua

SEQ ID NO: 233454 - RNA, 24 nt, Artificial Sequence
  Synthetic
acauuguagacaaauugaaaaaua

SEQ ID NO: 233455 - RNA, 18 nt, Artificial Sequence
  Synthetic
aaaaauuauugaaaaaua

SEQ ID NO: 233456 - RNA, 19 nt, Artificial Sequence
  Synthetic
caaaaauuauugaaaaaua

SEQ ID NO: 233457 - RNA, 20 nt, Artificial Sequence
  Synthetic
acaaaaauuauugaaaaaua

SEQ ID NO: 233458 - RNA, 21 nt, Artificial Sequence
  Synthetic
gacaaaaauuauugaaaaaua

SEQ ID NO: 233459 - RNA, 22 nt, Artificial Sequence
  Synthetic
ugacaaaaauuauugaaaaaua

SEQ ID NO: 233460 - RNA, 23 nt, Artificial Sequence
  Synthetic
augacaaaaauuauugaaaaaua

SEQ ID NO: 233461 - RNA, 24 nt, Artificial Sequence
  Synthetic
caugacaaaaauuauugaaaaaua

SEQ ID NO: 233462 - RNA, 18 nt, Artificial Sequence
  Synthetic
uuucaagcuugaaaaaua

SEQ ID NO: 233463 - RNA, 19 nt, Artificial Sequence
  Synthetic
cuuucaagcuugaaaaaua

SEQ ID NO: 233464 - RNA, 20 nt, Artificial Sequence
  Synthetic
ccuuucaagcuugaaaaaua

SEQ ID NO: 233465 - RNA, 21 nt, Artificial Sequence
  Synthetic
cccuuucaagcuugaaaaaua

SEQ ID NO: 233466 - RNA, 22 nt, Artificial Sequence
  Synthetic
acccuuucaagcuugaaaaaua

SEQ ID NO: 233467 - RNA, 23 nt, Artificial Sequence
  Synthetic
aacccuuucaagcuugaaaaaua

SEQ ID NO: 233468 - RNA, 24 nt, Artificial Sequence
  Synthetic
aaacccuuucaagcuugaaaaaua

SEQ ID NO: 233469 - RNA, 18 nt, Artificial Sequence
  Synthetic
uauagaauuugaaaaaua

SEQ ID NO: 233470 - RNA, 19 nt, Artificial Sequence
  Synthetic
uuauagaauuugaaaaaua

SEQ ID NO: 233471 - RNA, 20 nt, Artificial Sequence
  Synthetic
auuauagaauuugaaaaaua

SEQ ID NO: 233472 - RNA, 21 nt, Artificial Sequence
  Synthetic
cauuauagaauuugaaaaaua

SEQ ID NO: 233473 - RNA, 22 nt, Artificial Sequence
  Synthetic
ucauuauagaauuugaaaaaua

SEQ ID NO: 233474 - RNA, 23 nt, Artificial Sequence
  Synthetic
cucauuauagaauuugaaaaaua

SEQ ID NO: 233475 - RNA, 24 nt, Artificial Sequence
  Synthetic
gcucauuauagaauuugaaaaaua

SEQ ID NO: 233476 - RNA, 18 nt, Artificial Sequence
  Synthetic
acugaaaaaauaaaaaua

SEQ ID NO: 233477 - RNA, 19 nt, Artificial Sequence
  Synthetic
cacugaaaaaauaaaaaua

SEQ ID NO: 233478 - RNA, 20 nt, Artificial Sequence
  Synthetic
acacugaaaaaauaaaaaua

SEQ ID NO: 233479 - RNA, 21 nt, Artificial Sequence
  Synthetic
cacacugaaaaaauaaaaaua

SEQ ID NO: 233480 - RNA, 22 nt, Artificial Sequence
  Synthetic
gcacacugaaaaaauaaaaaua

SEQ ID NO: 233481 - RNA, 23 nt, Artificial Sequence
  Synthetic
ggcacacugaaaaaauaaaaaua

SEQ ID NO: 233482 - RNA, 24 nt, Artificial Sequence
  Synthetic
aggcacacugaaaaaauaaaaaua

SEQ ID NO: 233483 - RNA, 18 nt, Artificial Sequence
  Synthetic
aucguuucaauaaaaaua

SEQ ID NO: 233484 - RNA, 19 nt, Artificial Sequence
  Synthetic
aaucguuucaauaaaaaua

SEQ ID NO: 233485 - RNA, 20 nt, Artificial Sequence
  Synthetic
gaaucguuucaauaaaaaua

SEQ ID NO: 233486 - RNA, 21 nt, Artificial Sequence
  Synthetic
agaaucguuucaauaaaaaua

SEQ ID NO: 233487 - RNA, 22 nt, Artificial Sequence
  Synthetic
cagaaucguuucaauaaaaaua

SEQ ID NO: 233488 - RNA, 23 nt, Artificial Sequence
  Synthetic
ccagaaucguuucaauaaaaaua

SEQ ID NO: 233489 - RNA, 24 nt, Artificial Sequence
  Synthetic
cccagaaucguuucaauaaaaaua

SEQ ID NO: 233490 - RNA, 18 nt, Artificial Sequence
  Synthetic
ggguaguuaauaaaaaua

SEQ ID NO: 233491 - RNA, 19 nt, Artificial Sequence
  Synthetic
uggguaguuaauaaaaaua

SEQ ID NO: 233492 - RNA, 20 nt, Artificial Sequence
  Synthetic
uuggguaguuaauaaaaaua

SEQ ID NO: 233493 - RNA, 21 nt, Artificial Sequence
  Synthetic
uuuggguaguuaauaaaaaua

SEQ ID NO: 233494 - RNA, 22 nt, Artificial Sequence
  Synthetic
uuuuggguaguuaauaaaaaua

SEQ ID NO: 233495 - RNA, 23 nt, Artificial Sequence
  Synthetic
auuuuggguaguuaauaaaaaua

SEQ ID NO: 233496 - RNA, 24 nt, Artificial Sequence
  Synthetic
aauuuuggguaguuaauaaaaaua

SEQ ID NO: 233497 - RNA, 18 nt, Artificial Sequence
  Synthetic
guuucuuguauaaaaaua

SEQ ID NO: 233498 - RNA, 19 nt, Artificial Sequence
  Synthetic
cguuucuuguauaaaaaua

SEQ ID NO: 233499 - RNA, 20 nt, Artificial Sequence
  Synthetic
ccguuucuuguauaaaaaua

SEQ ID NO: 233500 - RNA, 21 nt, Artificial Sequence
  Synthetic
uccguuucuuguauaaaaaua

SEQ ID NO: 233501 - RNA, 22 nt, Artificial Sequence
  Synthetic
uuccguuucuuguauaaaaaua

SEQ ID NO: 233502 - RNA, 23 nt, Artificial Sequence
  Synthetic
uuuccguuucuuguauaaaaaua

SEQ ID NO: 233503 - RNA, 24 nt, Artificial Sequence
  Synthetic
uuuuccguuucuuguauaaaaaua

SEQ ID NO: 233504 - RNA, 18 nt, Artificial Sequence
  Synthetic
auaacaguuauaaaaaua

SEQ ID NO: 233505 - RNA, 19 nt, Artificial Sequence
  Synthetic
cauaacaguuauaaaaaua

SEQ ID NO: 233506 - RNA, 20 nt, Artificial Sequence
  Synthetic
ccauaacaguuauaaaaaua

SEQ ID NO: 233507 - RNA, 21 nt, Artificial Sequence
  Synthetic
accauaacaguuauaaaaaua

SEQ ID NO: 233508 - RNA, 22 nt, Artificial Sequence
  Synthetic
caccauaacaguuauaaaaaua

SEQ ID NO: 233509 - RNA, 23 nt, Artificial Sequence
  Synthetic
ucaccauaacaguuauaaaaaua

SEQ ID NO: 233510 - RNA, 24 nt, Artificial Sequence
  Synthetic
aucaccauaacaguuauaaaaaua

SEQ ID NO: 233511 - RNA, 18 nt, Artificial Sequence
  Synthetic
uuacuguaauuaaaaaua

SEQ ID NO: 233512 - RNA, 19 nt, Artificial Sequence
  Synthetic
auuacuguaauuaaaaaua

SEQ ID NO: 233513 - RNA, 20 nt, Artificial Sequence
  Synthetic
cauuacuguaauuaaaaaua

SEQ ID NO: 233514 - RNA, 21 nt, Artificial Sequence
  Synthetic
gcauuacuguaauuaaaaaua

SEQ ID NO: 233515 - RNA, 22 nt, Artificial Sequence
  Synthetic
agcauuacuguaauuaaaaaua

SEQ ID NO: 233516 - RNA, 23 nt, Artificial Sequence
  Synthetic
cagcauuacuguaauuaaaaaua

SEQ ID NO: 233517 - RNA, 24 nt, Artificial Sequence
  Synthetic
acagcauuacuguaauuaaaaaua

SEQ ID NO: 233518 - RNA, 18 nt, Artificial Sequence
  Synthetic
ugagcuccuuuaaaaaua

SEQ ID NO: 233519 - RNA, 19 nt, Artificial Sequence
  Synthetic
uugagcuccuuuaaaaaua

SEQ ID NO: 233520 - RNA, 20 nt, Artificial Sequence
  Synthetic
auugagcuccuuuaaaaaua

SEQ ID NO: 233521 - RNA, 21 nt, Artificial Sequence
  Synthetic
uauugagcuccuuuaaaaaua

SEQ ID NO: 233522 - RNA, 22 nt, Artificial Sequence
  Synthetic
auauugagcuccuuuaaaaaua

SEQ ID NO: 233523 - RNA, 23 nt, Artificial Sequence
  Synthetic
uauauugagcuccuuuaaaaaua

SEQ ID NO: 233524 - RNA, 24 nt, Artificial Sequence
  Synthetic
uuauauugagcuccuuuaaaaaua

SEQ ID NO: 233525 - RNA, 18 nt, Artificial Sequence
  Synthetic
agugaagaaaacaaaaua

SEQ ID NO: 233526 - RNA, 19 nt, Artificial Sequence
  Synthetic
gagugaagaaaacaaaaua

SEQ ID NO: 233527 - RNA, 20 nt, Artificial Sequence
  Synthetic
agagugaagaaaacaaaaua

SEQ ID NO: 233528 - RNA, 21 nt, Artificial Sequence
  Synthetic
uagagugaagaaaacaaaaua

SEQ ID NO: 233529 - RNA, 22 nt, Artificial Sequence
  Synthetic
cuagagugaagaaaacaaaaua

SEQ ID NO: 233530 - RNA, 23 nt, Artificial Sequence
  Synthetic
ccuagagugaagaaaacaaaaua

SEQ ID NO: 233531 - RNA, 24 nt, Artificial Sequence
  Synthetic
cccuagagugaagaaaacaaaaua

SEQ ID NO: 233532 - RNA, 18 nt, Artificial Sequence
  Synthetic
ggguugacaaacaaaaua

SEQ ID NO: 233533 - RNA, 19 nt, Artificial Sequence
  Synthetic
aggguugacaaacaaaaua

SEQ ID NO: 233534 - RNA, 20 nt, Artificial Sequence
  Synthetic
aaggguugacaaacaaaaua

SEQ ID NO: 233535 - RNA, 21 nt, Artificial Sequence
  Synthetic
gaaggguugacaaacaaaaua

SEQ ID NO: 233536 - RNA, 22 nt, Artificial Sequence
  Synthetic
agaaggguugacaaacaaaaua

SEQ ID NO: 233537 - RNA, 23 nt, Artificial Sequence
  Synthetic
cagaaggguugacaaacaaaaua

SEQ ID NO: 233538 - RNA, 24 nt, Artificial Sequence
  Synthetic
ucagaaggguugacaaacaaaaua

SEQ ID NO: 233539 - RNA, 18 nt, Artificial Sequence
  Synthetic
gacaagccaaccaaaaua

SEQ ID NO: 233540 - RNA, 19 nt, Artificial Sequence
  Synthetic
ugacaagccaaccaaaaua

SEQ ID NO: 233541 - RNA, 20 nt, Artificial Sequence
  Synthetic
augacaagccaaccaaaaua

SEQ ID NO: 233542 - RNA, 21 nt, Artificial Sequence
  Synthetic
aaugacaagccaaccaaaaua

SEQ ID NO: 233543 - RNA, 22 nt, Artificial Sequence
  Synthetic
aaaugacaagccaaccaaaaua

SEQ ID NO: 233544 - RNA, 23 nt, Artificial Sequence
  Synthetic
uaaaugacaagccaaccaaaaua

SEQ ID NO: 233545 - RNA, 24 nt, Artificial Sequence
  Synthetic
auaaaugacaagccaaccaaaaua

SEQ ID NO: 233546 - RNA, 18 nt, Artificial Sequence
  Synthetic
aacugauagagcaaaaua

SEQ ID NO: 233547 - RNA, 19 nt, Artificial Sequence
  Synthetic
aaacugauagagcaaaaua

SEQ ID NO: 233548 - RNA, 20 nt, Artificial Sequence
  Synthetic
aaaacugauagagcaaaaua

SEQ ID NO: 233549 - RNA, 21 nt, Artificial Sequence
  Synthetic
caaaacugauagagcaaaaua

SEQ ID NO: 233550 - RNA, 22 nt, Artificial Sequence
  Synthetic
acaaaacugauagagcaaaaua

SEQ ID NO: 233551 - RNA, 23 nt, Artificial Sequence
  Synthetic
cacaaaacugauagagcaaaaua

SEQ ID NO: 233552 - RNA, 24 nt, Artificial Sequence
  Synthetic
ucacaaaacugauagagcaaaaua

SEQ ID NO: 233553 - RNA, 18 nt, Artificial Sequence
  Synthetic
aaauuuucaaucaaaaua

SEQ ID NO: 233554 - RNA, 19 nt, Artificial Sequence
  Synthetic
uaaauuuucaaucaaaaua

SEQ ID NO: 233555 - RNA, 20 nt, Artificial Sequence
  Synthetic
auaaauuuucaaucaaaaua

SEQ ID NO: 233556 - RNA, 21 nt, Artificial Sequence
  Synthetic
cauaaauuuucaaucaaaaua

SEQ ID NO: 233557 - RNA, 22 nt, Artificial Sequence
  Synthetic
ucauaaauuuucaaucaaaaua

SEQ ID NO: 233558 - RNA, 23 nt, Artificial Sequence
  Synthetic
aucauaaauuuucaaucaaaaua

SEQ ID NO: 233559 - RNA, 24 nt, Artificial Sequence
  Synthetic
aaucauaaauuuucaaucaaaaua

SEQ ID NO: 233560 - RNA, 18 nt, Artificial Sequence
  Synthetic
ggaauuuucaucaaaaua

SEQ ID NO: 233561 - RNA, 19 nt, Artificial Sequence
  Synthetic
gggaauuuucaucaaaaua

SEQ ID NO: 233562 - RNA, 20 nt, Artificial Sequence
  Synthetic
ggggaauuuucaucaaaaua

SEQ ID NO: 233563 - RNA, 21 nt, Artificial Sequence
  Synthetic
uggggaauuuucaucaaaaua

SEQ ID NO: 233564 - RNA, 22 nt, Artificial Sequence
  Synthetic
uuggggaauuuucaucaaaaua

SEQ ID NO: 233565 - RNA, 23 nt, Artificial Sequence
  Synthetic
auuggggaauuuucaucaaaaua

SEQ ID NO: 233566 - RNA, 24 nt, Artificial Sequence
  Synthetic
aauuggggaauuuucaucaaaaua

SEQ ID NO: 233567 - RNA, 18 nt, Artificial Sequence
  Synthetic
acacauaggcucaaaaua

SEQ ID NO: 233568 - RNA, 19 nt, Artificial Sequence
  Synthetic
cacacauaggcucaaaaua

SEQ ID NO: 233569 - RNA, 20 nt, Artificial Sequence
  Synthetic
acacacauaggcucaaaaua

SEQ ID NO: 233570 - RNA, 21 nt, Artificial Sequence
  Synthetic
gacacacauaggcucaaaaua

SEQ ID NO: 233571 - RNA, 22 nt, Artificial Sequence
  Synthetic
agacacacauaggcucaaaaua

SEQ ID NO: 233572 - RNA, 23 nt, Artificial Sequence
  Synthetic
gagacacacauaggcucaaaaua

SEQ ID NO: 233573 - RNA, 24 nt, Artificial Sequence
  Synthetic
agagacacacauaggcucaaaaua

SEQ ID NO: 233574 - RNA, 18 nt, Artificial Sequence
  Synthetic
cauguaagacagaaaaua

SEQ ID NO: 233575 - RNA, 19 nt, Artificial Sequence
  Synthetic
ccauguaagacagaaaaua

SEQ ID NO: 233576 - RNA, 20 nt, Artificial Sequence
  Synthetic
gccauguaagacagaaaaua

SEQ ID NO: 233577 - RNA, 21 nt, Artificial Sequence
  Synthetic
agccauguaagacagaaaaua

SEQ ID NO: 233578 - RNA, 22 nt, Artificial Sequence
  Synthetic
aagccauguaagacagaaaaua

SEQ ID NO: 233579 - RNA, 23 nt, Artificial Sequence
  Synthetic
gaagccauguaagacagaaaaua

SEQ ID NO: 233580 - RNA, 24 nt, Artificial Sequence
  Synthetic
ugaagccauguaagacagaaaaua

SEQ ID NO: 233581 - RNA, 18 nt, Artificial Sequence
  Synthetic
cuuucuagacagaaaaua

SEQ ID NO: 233582 - RNA, 19 nt, Artificial Sequence
  Synthetic
gcuuucuagacagaaaaua

SEQ ID NO: 233583 - RNA, 20 nt, Artificial Sequence
  Synthetic
agcuuucuagacagaaaaua

SEQ ID NO: 233584 - RNA, 21 nt, Artificial Sequence
  Synthetic
aagcuuucuagacagaaaaua

SEQ ID NO: 233585 - RNA, 22 nt, Artificial Sequence
  Synthetic
caagcuuucuagacagaaaaua

SEQ ID NO: 233586 - RNA, 23 nt, Artificial Sequence
  Synthetic
acaagcuuucuagacagaaaaua

SEQ ID NO: 233587 - RNA, 24 nt, Artificial Sequence
  Synthetic
aacaagcuuucuagacagaaaaua

SEQ ID NO: 233588 - RNA, 18 nt, Artificial Sequence
  Synthetic
ugccagugagagaaaaua

SEQ ID NO: 233589 - RNA, 19 nt, Artificial Sequence
  Synthetic
gugccagugagagaaaaua

SEQ ID NO: 233590 - RNA, 20 nt, Artificial Sequence
  Synthetic
ggugccagugagagaaaaua

SEQ ID NO: 233591 - RNA, 21 nt, Artificial Sequence
  Synthetic
uggugccagugagagaaaaua

SEQ ID NO: 233592 - RNA, 22 nt, Artificial Sequence
  Synthetic
auggugccagugagagaaaaua

SEQ ID NO: 233593 - RNA, 23 nt, Artificial Sequence
  Synthetic
aauggugccagugagagaaaaua

SEQ ID NO: 233594 - RNA, 24 nt, Artificial Sequence
  Synthetic
uaauggugccagugagagaaaaua

SEQ ID NO: 233595 - RNA, 18 nt, Artificial Sequence
  Synthetic
acucagccguagaaaaua

SEQ ID NO: 233596 - RNA, 19 nt, Artificial Sequence
  Synthetic
uacucagccguagaaaaua

SEQ ID NO: 233597 - RNA, 20 nt, Artificial Sequence
  Synthetic
cuacucagccguagaaaaua

SEQ ID NO: 233598 - RNA, 21 nt, Artificial Sequence
  Synthetic
acuacucagccguagaaaaua

SEQ ID NO: 233599 - RNA, 22 nt, Artificial Sequence
  Synthetic
uacuacucagccguagaaaaua

SEQ ID NO: 233600 - RNA, 23 nt, Artificial Sequence
  Synthetic
auacuacucagccguagaaaaua

SEQ ID NO: 233601 - RNA, 24 nt, Artificial Sequence
  Synthetic
aauacuacucagccguagaaaaua

SEQ ID NO: 233602 - RNA, 18 nt, Artificial Sequence
  Synthetic
gcugagaaaccgaaaaua

SEQ ID NO: 233603 - RNA, 19 nt, Artificial Sequence
  Synthetic
cgcugagaaaccgaaaaua

SEQ ID NO: 233604 - RNA, 20 nt, Artificial Sequence
  Synthetic
gcgcugagaaaccgaaaaua

SEQ ID NO: 233605 - RNA, 21 nt, Artificial Sequence
  Synthetic
agcgcugagaaaccgaaaaua

SEQ ID NO: 233606 - RNA, 22 nt, Artificial Sequence
  Synthetic
gagcgcugagaaaccgaaaaua

SEQ ID NO: 233607 - RNA, 23 nt, Artificial Sequence
  Synthetic
agagcgcugagaaaccgaaaaua

SEQ ID NO: 233608 - RNA, 24 nt, Artificial Sequence
  Synthetic
gagagcgcugagaaaccgaaaaua

SEQ ID NO: 233609 - RNA, 18 nt, Artificial Sequence
  Synthetic
aagcauaagaggaaaaua

SEQ ID NO: 233610 - RNA, 19 nt, Artificial Sequence
  Synthetic
uaagcauaagaggaaaaua

SEQ ID NO: 233611 - RNA, 20 nt, Artificial Sequence
  Synthetic
auaagcauaagaggaaaaua

SEQ ID NO: 233612 - RNA, 21 nt, Artificial Sequence
  Synthetic
cauaagcauaagaggaaaaua

SEQ ID NO: 233613 - RNA, 22 nt, Artificial Sequence
  Synthetic
gcauaagcauaagaggaaaaua

SEQ ID NO: 233614 - RNA, 23 nt, Artificial Sequence
  Synthetic
agcauaagcauaagaggaaaaua

SEQ ID NO: 233615 - RNA, 24 nt, Artificial Sequence
  Synthetic
uagcauaagcauaagaggaaaaua

SEQ ID NO: 233616 - RNA, 18 nt, Artificial Sequence
  Synthetic
guaagggauaggaaaaua

SEQ ID NO: 233617 - RNA, 19 nt, Artificial Sequence
  Synthetic
aguaagggauaggaaaaua

SEQ ID NO: 233618 - RNA, 20 nt, Artificial Sequence
  Synthetic
uaguaagggauaggaaaaua

SEQ ID NO: 233619 - RNA, 21 nt, Artificial Sequence
  Synthetic
guaguaagggauaggaaaaua

SEQ ID NO: 233620 - RNA, 22 nt, Artificial Sequence
  Synthetic
aguaguaagggauaggaaaaua

SEQ ID NO: 233621 - RNA, 23 nt, Artificial Sequence
  Synthetic
uaguaguaagggauaggaaaaua

SEQ ID NO: 233622 - RNA, 24 nt, Artificial Sequence
  Synthetic
auaguaguaagggauaggaaaaua

SEQ ID NO: 233623 - RNA, 18 nt, Artificial Sequence
  Synthetic
aagagaauuaggaaaaua

SEQ ID NO: 233624 - RNA, 19 nt, Artificial Sequence
  Synthetic
uaagagaauuaggaaaaua

SEQ ID NO: 233625 - RNA, 20 nt, Artificial Sequence
  Synthetic
guaagagaauuaggaaaaua

SEQ ID NO: 233626 - RNA, 21 nt, Artificial Sequence
  Synthetic
gguaagagaauuaggaaaaua

SEQ ID NO: 233627 - RNA, 22 nt, Artificial Sequence
  Synthetic
agguaagagaauuaggaaaaua

SEQ ID NO: 233628 - RNA, 23 nt, Artificial Sequence
  Synthetic
gagguaagagaauuaggaaaaua

SEQ ID NO: 233629 - RNA, 24 nt, Artificial Sequence
  Synthetic
agagguaagagaauuaggaaaaua

SEQ ID NO: 233630 - RNA, 18 nt, Artificial Sequence
  Synthetic
ucugaagaaaugaaaaua

SEQ ID NO: 233631 - RNA, 19 nt, Artificial Sequence
  Synthetic
gucugaagaaaugaaaaua

SEQ ID NO: 233632 - RNA, 20 nt, Artificial Sequence
  Synthetic
agucugaagaaaugaaaaua

SEQ ID NO: 233633 - RNA, 21 nt, Artificial Sequence
  Synthetic
aagucugaagaaaugaaaaua

SEQ ID NO: 233634 - RNA, 22 nt, Artificial Sequence
  Synthetic
aaagucugaagaaaugaaaaua

SEQ ID NO: 233635 - RNA, 23 nt, Artificial Sequence
  Synthetic
aaaagucugaagaaaugaaaaua

SEQ ID NO: 233636 - RNA, 24 nt, Artificial Sequence
  Synthetic
aaaaagucugaagaaaugaaaaua

SEQ ID NO: 233637 - RNA, 18 nt, Artificial Sequence
  Synthetic
gagagcgauaugaaaaua

SEQ ID NO: 233638 - RNA, 19 nt, Artificial Sequence
  Synthetic
agagagcgauaugaaaaua

SEQ ID NO: 233639 - RNA, 20 nt, Artificial Sequence
  Synthetic
gagagagcgauaugaaaaua

SEQ ID NO: 233640 - RNA, 21 nt, Artificial Sequence
  Synthetic
agagagagcgauaugaaaaua

SEQ ID NO: 233641 - RNA, 22 nt, Artificial Sequence
  Synthetic
uagagagagcgauaugaaaaua

SEQ ID NO: 233642 - RNA, 23 nt, Artificial Sequence
  Synthetic
auagagagagcgauaugaaaaua

SEQ ID NO: 233643 - RNA, 24 nt, Artificial Sequence
  Synthetic
cauagagagagcgauaugaaaaua

SEQ ID NO: 233644 - RNA, 18 nt, Artificial Sequence
  Synthetic
gugagauauaugaaaaua

SEQ ID NO: 233645 - RNA, 19 nt, Artificial Sequence
  Synthetic
ugugagauauaugaaaaua

SEQ ID NO: 233646 - RNA, 20 nt, Artificial Sequence
  Synthetic
uugugagauauaugaaaaua

SEQ ID NO: 233647 - RNA, 21 nt, Artificial Sequence
  Synthetic
uuugugagauauaugaaaaua

SEQ ID NO: 233648 - RNA, 22 nt, Artificial Sequence
  Synthetic
guuugugagauauaugaaaaua

SEQ ID NO: 233649 - RNA, 23 nt, Artificial Sequence
  Synthetic
gguuugugagauauaugaaaaua

SEQ ID NO: 233650 - RNA, 24 nt, Artificial Sequence
  Synthetic
ggguuugugagauauaugaaaaua

SEQ ID NO: 233651 - RNA, 18 nt, Artificial Sequence
  Synthetic
ugcuuuacucugaaaaua

SEQ ID NO: 233652 - RNA, 19 nt, Artificial Sequence
  Synthetic
uugcuuuacucugaaaaua

SEQ ID NO: 233653 - RNA, 20 nt, Artificial Sequence
  Synthetic
guugcuuuacucugaaaaua

SEQ ID NO: 233654 - RNA, 21 nt, Artificial Sequence
  Synthetic
aguugcuuuacucugaaaaua

SEQ ID NO: 233655 - RNA, 22 nt, Artificial Sequence
  Synthetic
gaguugcuuuacucugaaaaua

SEQ ID NO: 233656 - RNA, 23 nt, Artificial Sequence
  Synthetic
agaguugcuuuacucugaaaaua

SEQ ID NO: 233657 - RNA, 24 nt, Artificial Sequence
  Synthetic
aagaguugcuuuacucugaaaaua

SEQ ID NO: 233658 - RNA, 18 nt, Artificial Sequence
  Synthetic
caucuuguucugaaaaua

SEQ ID NO: 233659 - RNA, 19 nt, Artificial Sequence
  Synthetic
acaucuuguucugaaaaua

SEQ ID NO: 233660 - RNA, 20 nt, Artificial Sequence
  Synthetic
aacaucuuguucugaaaaua

SEQ ID NO: 233661 - RNA, 21 nt, Artificial Sequence
  Synthetic
uaacaucuuguucugaaaaua

SEQ ID NO: 233662 - RNA, 22 nt, Artificial Sequence
  Synthetic
cuaacaucuuguucugaaaaua

SEQ ID NO: 233663 - RNA, 23 nt, Artificial Sequence
  Synthetic
ucuaacaucuuguucugaaaaua

SEQ ID NO: 233664 - RNA, 24 nt, Artificial Sequence
  Synthetic
uucuaacaucuuguucugaaaaua

SEQ ID NO: 233665 - RNA, 18 nt, Artificial Sequence
  Synthetic
aaauuugcuuugaaaaua

SEQ ID NO: 233666 - RNA, 19 nt, Artificial Sequence
  Synthetic
uaaauuugcuuugaaaaua

SEQ ID NO: 233667 - RNA, 20 nt, Artificial Sequence
  Synthetic
cuaaauuugcuuugaaaaua

SEQ ID NO: 233668 - RNA, 21 nt, Artificial Sequence
  Synthetic
ucuaaauuugcuuugaaaaua

SEQ ID NO: 233669 - RNA, 22 nt, Artificial Sequence
  Synthetic
aucuaaauuugcuuugaaaaua

SEQ ID NO: 233670 - RNA, 23 nt, Artificial Sequence
  Synthetic
aaucuaaauuugcuuugaaaaua

SEQ ID NO: 233671 - RNA, 24 nt, Artificial Sequence
  Synthetic
caaucuaaauuugcuuugaaaaua

SEQ ID NO: 233672 - RNA, 18 nt, Artificial Sequence
  Synthetic
aagaaaagaaauaaaaua

SEQ ID NO: 233673 - RNA, 19 nt, Artificial Sequence
  Synthetic
gaagaaaagaaauaaaaua

SEQ ID NO: 233674 - RNA, 20 nt, Artificial Sequence
  Synthetic
ugaagaaaagaaauaaaaua

SEQ ID NO: 233675 - RNA, 21 nt, Artificial Sequence
  Synthetic
uugaagaaaagaaauaaaaua

SEQ ID NO: 233676 - RNA, 22 nt, Artificial Sequence
  Synthetic
auugaagaaaagaaauaaaaua

SEQ ID NO: 233677 - RNA, 23 nt, Artificial Sequence
  Synthetic
aauugaagaaaagaaauaaaaua

SEQ ID NO: 233678 - RNA, 24 nt, Artificial Sequence
  Synthetic
gaauugaagaaaagaaauaaaaua

SEQ ID NO: 233679 - RNA, 18 nt, Artificial Sequence
  Synthetic
ucaagcauccauaaaaua

SEQ ID NO: 233680 - RNA, 19 nt, Artificial Sequence
  Synthetic
uucaagcauccauaaaaua

SEQ ID NO: 233681 - RNA, 20 nt, Artificial Sequence
  Synthetic
guucaagcauccauaaaaua

SEQ ID NO: 233682 - RNA, 21 nt, Artificial Sequence
  Synthetic
uguucaagcauccauaaaaua

SEQ ID NO: 233683 - RNA, 22 nt, Artificial Sequence
  Synthetic
auguucaagcauccauaaaaua

SEQ ID NO: 233684 - RNA, 23 nt, Artificial Sequence
  Synthetic
gauguucaagcauccauaaaaua

SEQ ID NO: 233685 - RNA, 24 nt, Artificial Sequence
  Synthetic
agauguucaagcauccauaaaaua

SEQ ID NO: 233686 - RNA, 18 nt, Artificial Sequence
  Synthetic
auaauauuucauaaaaua

SEQ ID NO: 233687 - RNA, 19 nt, Artificial Sequence
  Synthetic
aauaauauuucauaaaaua

SEQ ID NO: 233688 - RNA, 20 nt, Artificial Sequence
  Synthetic
uaauaauauuucauaaaaua

SEQ ID NO: 233689 - RNA, 21 nt, Artificial Sequence
  Synthetic
uuaauaauauuucauaaaaua

SEQ ID NO: 233690 - RNA, 22 nt, Artificial Sequence
  Synthetic
auuaauaauauuucauaaaaua

SEQ ID NO: 233691 - RNA, 23 nt, Artificial Sequence
  Synthetic
uauuaauaauauuucauaaaaua

SEQ ID NO: 233692 - RNA, 24 nt, Artificial Sequence
  Synthetic
uuauuaauaauauuucauaaaaua

SEQ ID NO: 233693 - RNA, 18 nt, Artificial Sequence
  Synthetic
uuauagauagauaaaaua

SEQ ID NO: 233694 - RNA, 19 nt, Artificial Sequence
  Synthetic
auuauagauagauaaaaua

SEQ ID NO: 233695 - RNA, 20 nt, Artificial Sequence
  Synthetic
gauuauagauagauaaaaua

SEQ ID NO: 233696 - RNA, 21 nt, Artificial Sequence
  Synthetic
ugauuauagauagauaaaaua

SEQ ID NO: 233697 - RNA, 22 nt, Artificial Sequence
  Synthetic
uugauuauagauagauaaaaua

SEQ ID NO: 233698 - RNA, 23 nt, Artificial Sequence
  Synthetic
cuugauuauagauagauaaaaua

SEQ ID NO: 233699 - RNA, 24 nt, Artificial Sequence
  Synthetic
ucuugauuauagauagauaaaaua

SEQ ID NO: 233700 - RNA, 18 nt, Artificial Sequence
  Synthetic
uuuagaauugauaaaaua

SEQ ID NO: 233701 - RNA, 19 nt, Artificial Sequence
  Synthetic
guuuagaauugauaaaaua

SEQ ID NO: 233702 - RNA, 20 nt, Artificial Sequence
  Synthetic
gguuuagaauugauaaaaua

SEQ ID NO: 233703 - RNA, 21 nt, Artificial Sequence
  Synthetic
ugguuuagaauugauaaaaua

SEQ ID NO: 233704 - RNA, 22 nt, Artificial Sequence
  Synthetic
cugguuuagaauugauaaaaua

SEQ ID NO: 233705 - RNA, 23 nt, Artificial Sequence
  Synthetic
ucugguuuagaauugauaaaaua

SEQ ID NO: 233706 - RNA, 24 nt, Artificial Sequence
  Synthetic
uucugguuuagaauugauaaaaua

SEQ ID NO: 233707 - RNA, 18 nt, Artificial Sequence
  Synthetic
gagaauacauauaaaaua

SEQ ID NO: 233708 - RNA, 19 nt, Artificial Sequence
  Synthetic
agagaauacauauaaaaua

SEQ ID NO: 233709 - RNA, 20 nt, Artificial Sequence
  Synthetic
cagagaauacauauaaaaua

SEQ ID NO: 233710 - RNA, 21 nt, Artificial Sequence
  Synthetic
ucagagaauacauauaaaaua

SEQ ID NO: 233711 - RNA, 22 nt, Artificial Sequence
  Synthetic
gucagagaauacauauaaaaua

SEQ ID NO: 233712 - RNA, 23 nt, Artificial Sequence
  Synthetic
ugucagagaauacauauaaaaua

SEQ ID NO: 233713 - RNA, 24 nt, Artificial Sequence
  Synthetic
uugucagagaauacauauaaaaua

SEQ ID NO: 233714 - RNA, 18 nt, Artificial Sequence
  Synthetic
ugcucccaguauaaaaua

SEQ ID NO: 233715 - RNA, 19 nt, Artificial Sequence
  Synthetic
cugcucccaguauaaaaua

SEQ ID NO: 233716 - RNA, 20 nt, Artificial Sequence
  Synthetic
acugcucccaguauaaaaua

SEQ ID NO: 233717 - RNA, 21 nt, Artificial Sequence
  Synthetic
aacugcucccaguauaaaaua

SEQ ID NO: 233718 - RNA, 22 nt, Artificial Sequence
  Synthetic
aaacugcucccaguauaaaaua

SEQ ID NO: 233719 - RNA, 23 nt, Artificial Sequence
  Synthetic
uaaacugcucccaguauaaaaua

SEQ ID NO: 233720 - RNA, 24 nt, Artificial Sequence
  Synthetic
auaaacugcucccaguauaaaaua

SEQ ID NO: 233721 - RNA, 18 nt, Artificial Sequence
  Synthetic
caaggacuuacuaaaaua

SEQ ID NO: 233722 - RNA, 19 nt, Artificial Sequence
  Synthetic
gcaaggacuuacuaaaaua

SEQ ID NO: 233723 - RNA, 20 nt, Artificial Sequence
  Synthetic
agcaaggacuuacuaaaaua

SEQ ID NO: 233724 - RNA, 21 nt, Artificial Sequence
  Synthetic
aagcaaggacuuacuaaaaua

SEQ ID NO: 233725 - RNA, 22 nt, Artificial Sequence
  Synthetic
caagcaaggacuuacuaaaaua

SEQ ID NO: 233726 - RNA, 23 nt, Artificial Sequence
  Synthetic
acaagcaaggacuuacuaaaaua

SEQ ID NO: 233727 - RNA, 24 nt, Artificial Sequence
  Synthetic
gacaagcaaggacuuacuaaaaua

SEQ ID NO: 233728 - RNA, 18 nt, Artificial Sequence
  Synthetic
aauaguauugcuaaaaua

SEQ ID NO: 233729 - RNA, 19 nt, Artificial Sequence
  Synthetic
caauaguauugcuaaaaua

SEQ ID NO: 233730 - RNA, 20 nt, Artificial Sequence
  Synthetic
gcaauaguauugcuaaaaua

SEQ ID NO: 233731 - RNA, 21 nt, Artificial Sequence
  Synthetic
ugcaauaguauugcuaaaaua

SEQ ID NO: 233732 - RNA, 22 nt, Artificial Sequence
  Synthetic
cugcaauaguauugcuaaaaua

SEQ ID NO: 233733 - RNA, 23 nt, Artificial Sequence
  Synthetic
gcugcaauaguauugcuaaaaua

SEQ ID NO: 233734 - RNA, 24 nt, Artificial Sequence
  Synthetic
ugcugcaauaguauugcuaaaaua

SEQ ID NO: 233735 - RNA, 18 nt, Artificial Sequence
  Synthetic
gaagagaacaguaaaaua

SEQ ID NO: 233736 - RNA, 19 nt, Artificial Sequence
  Synthetic
ggaagagaacaguaaaaua

SEQ ID NO: 233737 - RNA, 20 nt, Artificial Sequence
  Synthetic
uggaagagaacaguaaaaua

SEQ ID NO: 233738 - RNA, 21 nt, Artificial Sequence
  Synthetic
uuggaagagaacaguaaaaua

SEQ ID NO: 233739 - RNA, 22 nt, Artificial Sequence
  Synthetic
guuggaagagaacaguaaaaua

SEQ ID NO: 233740 - RNA, 23 nt, Artificial Sequence
  Synthetic
aguuggaagagaacaguaaaaua

SEQ ID NO: 233741 - RNA, 24 nt, Artificial Sequence
  Synthetic
aaguuggaagagaacaguaaaaua

SEQ ID NO: 233742 - RNA, 18 nt, Artificial Sequence
  Synthetic
agcuuuuacaguaaaaua

SEQ ID NO: 233743 - RNA, 19 nt, Artificial Sequence
  Synthetic
aagcuuuuacaguaaaaua

SEQ ID NO: 233744 - RNA, 20 nt, Artificial Sequence
  Synthetic
aaagcuuuuacaguaaaaua

SEQ ID NO: 233745 - RNA, 21 nt, Artificial Sequence
  Synthetic
uaaagcuuuuacaguaaaaua

SEQ ID NO: 233746 - RNA, 22 nt, Artificial Sequence
  Synthetic
auaaagcuuuuacaguaaaaua

SEQ ID NO: 233747 - RNA, 23 nt, Artificial Sequence
  Synthetic
gauaaagcuuuuacaguaaaaua

SEQ ID NO: 233748 - RNA, 24 nt, Artificial Sequence
  Synthetic
ugauaaagcuuuuacaguaaaaua

SEQ ID NO: 233749 - RNA, 18 nt, Artificial Sequence
  Synthetic
ggacugugauuuaaaaua

SEQ ID NO: 233750 - RNA, 19 nt, Artificial Sequence
  Synthetic
uggacugugauuuaaaaua

SEQ ID NO: 233751 - RNA, 20 nt, Artificial Sequence
  Synthetic
guggacugugauuuaaaaua

SEQ ID NO: 233752 - RNA, 21 nt, Artificial Sequence
  Synthetic
uguggacugugauuuaaaaua

SEQ ID NO: 233753 - RNA, 22 nt, Artificial Sequence
  Synthetic
cuguggacugugauuuaaaaua

SEQ ID NO: 233754 - RNA, 23 nt, Artificial Sequence
  Synthetic
acuguggacugugauuuaaaaua

SEQ ID NO: 233755 - RNA, 24 nt, Artificial Sequence
  Synthetic
aacuguggacugugauuuaaaaua

SEQ ID NO: 233756 - RNA, 18 nt, Artificial Sequence
  Synthetic
uaugggcucuuuaaaaua

SEQ ID NO: 233757 - RNA, 19 nt, Artificial Sequence
  Synthetic
cuaugggcucuuuaaaaua

SEQ ID NO: 233758 - RNA, 20 nt, Artificial Sequence
  Synthetic
gcuaugggcucuuuaaaaua

SEQ ID NO: 233759 - RNA, 21 nt, Artificial Sequence
  Synthetic
ggcuaugggcucuuuaaaaua

SEQ ID NO: 233760 - RNA, 22 nt, Artificial Sequence
  Synthetic
aggcuaugggcucuuuaaaaua

SEQ ID NO: 233761 - RNA, 23 nt, Artificial Sequence
  Synthetic
aaggcuaugggcucuuuaaaaua

SEQ ID NO: 233762 - RNA, 24 nt, Artificial Sequence
  Synthetic
gaaggcuaugggcucuuuaaaaua

SEQ ID NO: 233763 - RNA, 18 nt, Artificial Sequence
  Synthetic
aaauauaaguuuaaaaua

SEQ ID NO: 233764 - RNA, 19 nt, Artificial Sequence
  Synthetic
aaaauauaaguuuaaaaua

SEQ ID NO: 233765 - RNA, 20 nt, Artificial Sequence
  Synthetic
aaaaauauaaguuuaaaaua

SEQ ID NO: 233766 - RNA, 21 nt, Artificial Sequence
  Synthetic
gaaaaauauaaguuuaaaaua

SEQ ID NO: 233767 - RNA, 22 nt, Artificial Sequence
  Synthetic
ggaaaaauauaaguuuaaaaua

SEQ ID NO: 233768 - RNA, 23 nt, Artificial Sequence
  Synthetic
aggaaaaauauaaguuuaaaaua

SEQ ID NO: 233769 - RNA, 24 nt, Artificial Sequence
  Synthetic
aaggaaaaauauaaguuuaaaaua

SEQ ID NO: 233770 - RNA, 18 nt, Artificial Sequence
  Synthetic
aaguaguagaaacaaaua

SEQ ID NO: 233771 - RNA, 19 nt, Artificial Sequence
  Synthetic
caaguaguagaaacaaaua

SEQ ID NO: 233772 - RNA, 20 nt, Artificial Sequence
  Synthetic
gcaaguaguagaaacaaaua

SEQ ID NO: 233773 - RNA, 21 nt, Artificial Sequence
  Synthetic
ugcaaguaguagaaacaaaua

SEQ ID NO: 233774 - RNA, 22 nt, Artificial Sequence
  Synthetic
uugcaaguaguagaaacaaaua

SEQ ID NO: 233775 - RNA, 23 nt, Artificial Sequence
  Synthetic
auugcaaguaguagaaacaaaua

SEQ ID NO: 233776 - RNA, 24 nt, Artificial Sequence
  Synthetic
uauugcaaguaguagaaacaaaua

SEQ ID NO: 233777 - RNA, 18 nt, Artificial Sequence
  Synthetic
uaauucaauaaacaaaua

SEQ ID NO: 233778 - RNA, 19 nt, Artificial Sequence
  Synthetic
guaauucaauaaacaaaua

SEQ ID NO: 233779 - RNA, 20 nt, Artificial Sequence
  Synthetic
cguaauucaauaaacaaaua

SEQ ID NO: 233780 - RNA, 21 nt, Artificial Sequence
  Synthetic
gcguaauucaauaaacaaaua

SEQ ID NO: 233781 - RNA, 22 nt, Artificial Sequence
  Synthetic
ggcguaauucaauaaacaaaua

SEQ ID NO: 233782 - RNA, 23 nt, Artificial Sequence
  Synthetic
uggcguaauucaauaaacaaaua

SEQ ID NO: 233783 - RNA, 24 nt, Artificial Sequence
  Synthetic
auggcguaauucaauaaacaaaua

SEQ ID NO: 233784 - RNA, 18 nt, Artificial Sequence
  Synthetic
uaauacauggaacaaaua

SEQ ID NO: 233785 - RNA, 19 nt, Artificial Sequence
  Synthetic
uuaauacauggaacaaaua

SEQ ID NO: 233786 - RNA, 20 nt, Artificial Sequence
  Synthetic
auuaauacauggaacaaaua

SEQ ID NO: 233787 - RNA, 21 nt, Artificial Sequence
  Synthetic
uauuaauacauggaacaaaua

SEQ ID NO: 233788 - RNA, 22 nt, Artificial Sequence
  Synthetic
auauuaauacauggaacaaaua

SEQ ID NO: 233789 - RNA, 23 nt, Artificial Sequence
  Synthetic
aauauuaauacauggaacaaaua

SEQ ID NO: 233790 - RNA, 24 nt, Artificial Sequence
  Synthetic
aaauauuaauacauggaacaaaua

SEQ ID NO: 233791 - RNA, 18 nt, Artificial Sequence
  Synthetic
uacauacacuaacaaaua

SEQ ID NO: 233792 - RNA, 19 nt, Artificial Sequence
  Synthetic
uuacauacacuaacaaaua

SEQ ID NO: 233793 - RNA, 20 nt, Artificial Sequence
  Synthetic
guuacauacacuaacaaaua

SEQ ID NO: 233794 - RNA, 21 nt, Artificial Sequence
  Synthetic
uguuacauacacuaacaaaua

SEQ ID NO: 233795 - RNA, 22 nt, Artificial Sequence
  Synthetic
auguuacauacacuaacaaaua

SEQ ID NO: 233796 - RNA, 23 nt, Artificial Sequence
  Synthetic
cauguuacauacacuaacaaaua

SEQ ID NO: 233797 - RNA, 24 nt, Artificial Sequence
  Synthetic
ucauguuacauacacuaacaaaua

SEQ ID NO: 233798 - RNA, 18 nt, Artificial Sequence
  Synthetic
cccaggugcacacaaaua

SEQ ID NO: 233799 - RNA, 19 nt, Artificial Sequence
  Synthetic
ucccaggugcacacaaaua

SEQ ID NO: 233800 - RNA, 20 nt, Artificial Sequence
  Synthetic
aucccaggugcacacaaaua

SEQ ID NO: 233801 - RNA, 21 nt, Artificial Sequence
  Synthetic
aaucccaggugcacacaaaua

SEQ ID NO: 233802 - RNA, 22 nt, Artificial Sequence
  Synthetic
aaaucccaggugcacacaaaua

SEQ ID NO: 233803 - RNA, 23 nt, Artificial Sequence
  Synthetic
caaaucccaggugcacacaaaua

SEQ ID NO: 233804 - RNA, 24 nt, Artificial Sequence
  Synthetic
acaaaucccaggugcacacaaaua

SEQ ID NO: 233805 - RNA, 18 nt, Artificial Sequence
  Synthetic
uuuucguugucacaaaua

SEQ ID NO: 233806 - RNA, 19 nt, Artificial Sequence
  Synthetic
uuuuucguugucacaaaua

SEQ ID NO: 233807 - RNA, 20 nt, Artificial Sequence
  Synthetic
cuuuuucguugucacaaaua

SEQ ID NO: 233808 - RNA, 21 nt, Artificial Sequence
  Synthetic
ccuuuuucguugucacaaaua

SEQ ID NO: 233809 - RNA, 22 nt, Artificial Sequence
  Synthetic
accuuuuucguugucacaaaua

SEQ ID NO: 233810 - RNA, 23 nt, Artificial Sequence
  Synthetic
gaccuuuuucguugucacaaaua

SEQ ID NO: 233811 - RNA, 24 nt, Artificial Sequence
  Synthetic
agaccuuuuucguugucacaaaua

SEQ ID NO: 233812 - RNA, 18 nt, Artificial Sequence
  Synthetic
aagucacuuucacaaaua

SEQ ID NO: 233813 - RNA, 19 nt, Artificial Sequence
  Synthetic
aaagucacuuucacaaaua

SEQ ID NO: 233814 - RNA, 20 nt, Artificial Sequence
  Synthetic
uaaagucacuuucacaaaua

SEQ ID NO: 233815 - RNA, 21 nt, Artificial Sequence
  Synthetic
auaaagucacuuucacaaaua

SEQ ID NO: 233816 - RNA, 22 nt, Artificial Sequence
  Synthetic
gauaaagucacuuucacaaaua

SEQ ID NO: 233817 - RNA, 23 nt, Artificial Sequence
  Synthetic
agauaaagucacuuucacaaaua

SEQ ID NO: 233818 - RNA, 24 nt, Artificial Sequence
  Synthetic
cagauaaagucacuuucacaaaua

SEQ ID NO: 233819 - RNA, 18 nt, Artificial Sequence
  Synthetic
ccuuaaggaauacaaaua

SEQ ID NO: 233820 - RNA, 19 nt, Artificial Sequence
  Synthetic
uccuuaaggaauacaaaua

SEQ ID NO: 233821 - RNA, 20 nt, Artificial Sequence
  Synthetic
auccuuaaggaauacaaaua

SEQ ID NO: 233822 - RNA, 21 nt, Artificial Sequence
  Synthetic
cauccuuaaggaauacaaaua

SEQ ID NO: 233823 - RNA, 22 nt, Artificial Sequence
  Synthetic
gcauccuuaaggaauacaaaua

SEQ ID NO: 233824 - RNA, 23 nt, Artificial Sequence
  Synthetic
ggcauccuuaaggaauacaaaua

SEQ ID NO: 233825 - RNA, 24 nt, Artificial Sequence
  Synthetic
uggcauccuuaaggaauacaaaua

SEQ ID NO: 233826 - RNA, 18 nt, Artificial Sequence
  Synthetic
gugauugugagccaaaua

SEQ ID NO: 233827 - RNA, 19 nt, Artificial Sequence
  Synthetic
agugauugugagccaaaua

SEQ ID NO: 233828 - RNA, 20 nt, Artificial Sequence
  Synthetic
gagugauugugagccaaaua

SEQ ID NO: 233829 - RNA, 21 nt, Artificial Sequence
  Synthetic
agagugauugugagccaaaua

SEQ ID NO: 233830 - RNA, 22 nt, Artificial Sequence
  Synthetic
gagagugauugugagccaaaua

SEQ ID NO: 233831 - RNA, 23 nt, Artificial Sequence
  Synthetic
agagagugauugugagccaaaua

SEQ ID NO: 233832 - RNA, 24 nt, Artificial Sequence
  Synthetic
gagagagugauugugagccaaaua

SEQ ID NO: 233833 - RNA, 18 nt, Artificial Sequence
  Synthetic
ccaaaaacauuccaaaua

SEQ ID NO: 233834 - RNA, 19 nt, Artificial Sequence
  Synthetic
accaaaaacauuccaaaua

SEQ ID NO: 233835 - RNA, 20 nt, Artificial Sequence
  Synthetic
aaccaaaaacauuccaaaua

SEQ ID NO: 233836 - RNA, 21 nt, Artificial Sequence
  Synthetic
caaccaaaaacauuccaaaua

SEQ ID NO: 233837 - RNA, 22 nt, Artificial Sequence
  Synthetic
ccaaccaaaaacauuccaaaua

SEQ ID NO: 233838 - RNA, 23 nt, Artificial Sequence
  Synthetic
accaaccaaaaacauuccaaaua

SEQ ID NO: 233839 - RNA, 24 nt, Artificial Sequence
  Synthetic
caccaaccaaaaacauuccaaaua

SEQ ID NO: 233840 - RNA, 18 nt, Artificial Sequence
  Synthetic
uaguccucuuuccaaaua

SEQ ID NO: 233841 - RNA, 19 nt, Artificial Sequence
  Synthetic
uuaguccucuuuccaaaua

SEQ ID NO: 233842 - RNA, 20 nt, Artificial Sequence
  Synthetic
guuaguccucuuuccaaaua

SEQ ID NO: 233843 - RNA, 21 nt, Artificial Sequence
  Synthetic
aguuaguccucuuuccaaaua

SEQ ID NO: 233844 - RNA, 22 nt, Artificial Sequence
  Synthetic
aaguuaguccucuuuccaaaua

SEQ ID NO: 233845 - RNA, 23 nt, Artificial Sequence
  Synthetic
aaaguuaguccucuuuccaaaua

SEQ ID NO: 233846 - RNA, 24 nt, Artificial Sequence
  Synthetic
gaaaguuaguccucuuuccaaaua

SEQ ID NO: 233847 - RNA, 18 nt, Artificial Sequence
  Synthetic
uggaggauagagcaaaua

SEQ ID NO: 233848 - RNA, 19 nt, Artificial Sequence
  Synthetic
uuggaggauagagcaaaua

SEQ ID NO: 233849 - RNA, 20 nt, Artificial Sequence
  Synthetic
guuggaggauagagcaaaua

SEQ ID NO: 233850 - RNA, 21 nt, Artificial Sequence
  Synthetic
aguuggaggauagagcaaaua

SEQ ID NO: 233851 - RNA, 22 nt, Artificial Sequence
  Synthetic
aaguuggaggauagagcaaaua

SEQ ID NO: 233852 - RNA, 23 nt, Artificial Sequence
  Synthetic
uaaguuggaggauagagcaaaua

SEQ ID NO: 233853 - RNA, 24 nt, Artificial Sequence
  Synthetic
auaaguuggaggauagagcaaaua

SEQ ID NO: 233854 - RNA, 18 nt, Artificial Sequence
  Synthetic
ucuugggggucucaaaua

SEQ ID NO: 233855 - RNA, 19 nt, Artificial Sequence
  Synthetic
uucuugggggucucaaaua

SEQ ID NO: 233856 - RNA, 20 nt, Artificial Sequence
  Synthetic
auucuugggggucucaaaua

SEQ ID NO: 233857 - RNA, 21 nt, Artificial Sequence
  Synthetic
gauucuugggggucucaaaua

SEQ ID NO: 233858 - RNA, 22 nt, Artificial Sequence
  Synthetic
ggauucuugggggucucaaaua

SEQ ID NO: 233859 - RNA, 23 nt, Artificial Sequence
  Synthetic
uggauucuugggggucucaaaua

SEQ ID NO: 233860 - RNA, 24 nt, Artificial Sequence
  Synthetic
cuggauucuugggggucucaaaua

SEQ ID NO: 233861 - RNA, 18 nt, Artificial Sequence
  Synthetic
cccaucagaugucaaaua

SEQ ID NO: 233862 - RNA, 19 nt, Artificial Sequence
  Synthetic
ucccaucagaugucaaaua

SEQ ID NO: 233863 - RNA, 20 nt, Artificial Sequence
  Synthetic
uucccaucagaugucaaaua

SEQ ID NO: 233864 - RNA, 21 nt, Artificial Sequence
  Synthetic
cuucccaucagaugucaaaua

SEQ ID NO: 233865 - RNA, 22 nt, Artificial Sequence
  Synthetic
ucuucccaucagaugucaaaua

SEQ ID NO: 233866 - RNA, 23 nt, Artificial Sequence
  Synthetic
gucuucccaucagaugucaaaua

SEQ ID NO: 233867 - RNA, 24 nt, Artificial Sequence
  Synthetic
agucuucccaucagaugucaaaua

SEQ ID NO: 233868 - RNA, 18 nt, Artificial Sequence
  Synthetic
aaauagacaauucaaaua

SEQ ID NO: 233869 - RNA, 19 nt, Artificial Sequence
  Synthetic
uaaauagacaauucaaaua

SEQ ID NO: 233870 - RNA, 20 nt, Artificial Sequence
  Synthetic
auaaauagacaauucaaaua

SEQ ID NO: 233871 - RNA, 21 nt, Artificial Sequence
  Synthetic
uauaaauagacaauucaaaua

SEQ ID NO: 233872 - RNA, 22 nt, Artificial Sequence
  Synthetic
auauaaauagacaauucaaaua

SEQ ID NO: 233873 - RNA, 23 nt, Artificial Sequence
  Synthetic
cauauaaauagacaauucaaaua

SEQ ID NO: 233874 - RNA, 24 nt, Artificial Sequence
  Synthetic
gcauauaaauagacaauucaaaua

SEQ ID NO: 233875 - RNA, 18 nt, Artificial Sequence
  Synthetic
ccccugcacauucaaaua

SEQ ID NO: 233876 - RNA, 19 nt, Artificial Sequence
  Synthetic
accccugcacauucaaaua

SEQ ID NO: 233877 - RNA, 20 nt, Artificial Sequence
  Synthetic
uaccccugcacauucaaaua

SEQ ID NO: 233878 - RNA, 21 nt, Artificial Sequence
  Synthetic
auaccccugcacauucaaaua

SEQ ID NO: 233879 - RNA, 22 nt, Artificial Sequence
  Synthetic
cauaccccugcacauucaaaua

SEQ ID NO: 233880 - RNA, 23 nt, Artificial Sequence
  Synthetic
ucauaccccugcacauucaaaua

SEQ ID NO: 233881 - RNA, 24 nt, Artificial Sequence
  Synthetic
cucauaccccugcacauucaaaua

SEQ ID NO: 233882 - RNA, 18 nt, Artificial Sequence
  Synthetic
cggaaugguuuucaaaua

SEQ ID NO: 233883 - RNA, 19 nt, Artificial Sequence
  Synthetic
ccggaaugguuuucaaaua

SEQ ID NO: 233884 - RNA, 20 nt, Artificial Sequence
  Synthetic
cccggaaugguuuucaaaua

SEQ ID NO: 233885 - RNA, 21 nt, Artificial Sequence
  Synthetic
ccccggaaugguuuucaaaua

SEQ ID NO: 233886 - RNA, 22 nt, Artificial Sequence
  Synthetic
cccccggaaugguuuucaaaua

SEQ ID NO: 233887 - RNA, 23 nt, Artificial Sequence
  Synthetic
ccccccggaaugguuuucaaaua

SEQ ID NO: 233888 - RNA, 24 nt, Artificial Sequence
  Synthetic
gccccccggaaugguuuucaaaua

SEQ ID NO: 233889 - RNA, 18 nt, Artificial Sequence
  Synthetic
ggagacauuuuucaaaua

SEQ ID NO: 233890 - RNA, 19 nt, Artificial Sequence
  Synthetic
gggagacauuuuucaaaua

SEQ ID NO: 233891 - RNA, 20 nt, Artificial Sequence
  Synthetic
agggagacauuuuucaaaua

SEQ ID NO: 233892 - RNA, 21 nt, Artificial Sequence
  Synthetic
aagggagacauuuuucaaaua

SEQ ID NO: 233893 - RNA, 22 nt, Artificial Sequence
  Synthetic
aaagggagacauuuuucaaaua

SEQ ID NO: 233894 - RNA, 23 nt, Artificial Sequence
  Synthetic
aaaagggagacauuuuucaaaua

SEQ ID NO: 233895 - RNA, 24 nt, Artificial Sequence
  Synthetic
aaaaagggagacauuuuucaaaua

SEQ ID NO: 233896 - RNA, 18 nt, Artificial Sequence
  Synthetic
ugcgaaacaaaagaaaua

SEQ ID NO: 233897 - RNA, 19 nt, Artificial Sequence
  Synthetic
gugcgaaacaaaagaaaua

SEQ ID NO: 233898 - RNA, 20 nt, Artificial Sequence
  Synthetic
ggugcgaaacaaaagaaaua

SEQ ID NO: 233899 - RNA, 21 nt, Artificial Sequence
  Synthetic
aggugcgaaacaaaagaaaua

SEQ ID NO: 233900 - RNA, 22 nt, Artificial Sequence
  Synthetic
gaggugcgaaacaaaagaaaua

SEQ ID NO: 233901 - RNA, 23 nt, Artificial Sequence
  Synthetic
ugaggugcgaaacaaaagaaaua

SEQ ID NO: 233902 - RNA, 24 nt, Artificial Sequence
  Synthetic
uugaggugcgaaacaaaagaaaua

SEQ ID NO: 233903 - RNA, 18 nt, Artificial Sequence
  Synthetic
cauuacuacaaagaaaua

SEQ ID NO: 233904 - RNA, 19 nt, Artificial Sequence
  Synthetic
acauuacuacaaagaaaua

SEQ ID NO: 233905 - RNA, 20 nt, Artificial Sequence
  Synthetic
aacauuacuacaaagaaaua

SEQ ID NO: 233906 - RNA, 21 nt, Artificial Sequence
  Synthetic
aaacauuacuacaaagaaaua

SEQ ID NO: 233907 - RNA, 22 nt, Artificial Sequence
  Synthetic
gaaacauuacuacaaagaaaua

SEQ ID NO: 233908 - RNA, 23 nt, Artificial Sequence
  Synthetic
ugaaacauuacuacaaagaaaua

SEQ ID NO: 233909 - RNA, 24 nt, Artificial Sequence
  Synthetic
uugaaacauuacuacaaagaaaua

SEQ ID NO: 233910 - RNA, 18 nt, Artificial Sequence
  Synthetic
caaagccuucaagaaaua

SEQ ID NO: 233911 - RNA, 19 nt, Artificial Sequence
  Synthetic
acaaagccuucaagaaaua

SEQ ID NO: 233912 - RNA, 20 nt, Artificial Sequence
  Synthetic
aacaaagccuucaagaaaua

SEQ ID NO: 233913 - RNA, 21 nt, Artificial Sequence
  Synthetic
aaacaaagccuucaagaaaua

SEQ ID NO: 233914 - RNA, 22 nt, Artificial Sequence
  Synthetic
caaacaaagccuucaagaaaua

SEQ ID NO: 233915 - RNA, 23 nt, Artificial Sequence
  Synthetic
acaaacaaagccuucaagaaaua

SEQ ID NO: 233916 - RNA, 24 nt, Artificial Sequence
  Synthetic
aacaaacaaagccuucaagaaaua

SEQ ID NO: 233917 - RNA, 18 nt, Artificial Sequence
  Synthetic
cuacauuuggaagaaaua

SEQ ID NO: 233918 - RNA, 19 nt, Artificial Sequence
  Synthetic
acuacauuuggaagaaaua

SEQ ID NO: 233919 - RNA, 20 nt, Artificial Sequence
  Synthetic
cacuacauuuggaagaaaua

SEQ ID NO: 233920 - RNA, 21 nt, Artificial Sequence
  Synthetic
acacuacauuuggaagaaaua

SEQ ID NO: 233921 - RNA, 22 nt, Artificial Sequence
  Synthetic
aacacuacauuuggaagaaaua

SEQ ID NO: 233922 - RNA, 23 nt, Artificial Sequence
  Synthetic
aaacacuacauuuggaagaaaua

SEQ ID NO: 233923 - RNA, 24 nt, Artificial Sequence
  Synthetic
uaaacacuacauuuggaagaaaua

SEQ ID NO: 233924 - RNA, 18 nt, Artificial Sequence
  Synthetic
gauauuuuauaagaaaua

SEQ ID NO: 233925 - RNA, 19 nt, Artificial Sequence
  Synthetic
agauauuuuauaagaaaua

SEQ ID NO: 233926 - RNA, 20 nt, Artificial Sequence
  Synthetic
gagauauuuuauaagaaaua

SEQ ID NO: 233927 - RNA, 21 nt, Artificial Sequence
  Synthetic
ggagauauuuuauaagaaaua

SEQ ID NO: 233928 - RNA, 22 nt, Artificial Sequence
  Synthetic
uggagauauuuuauaagaaaua

SEQ ID NO: 233929 - RNA, 23 nt, Artificial Sequence
  Synthetic
uuggagauauuuuauaagaaaua

SEQ ID NO: 233930 - RNA, 24 nt, Artificial Sequence
  Synthetic
auuggagauauuuuauaagaaaua

SEQ ID NO: 233931 - RNA, 18 nt, Artificial Sequence
  Synthetic
auuauauugccagaaaua

SEQ ID NO: 233932 - RNA, 19 nt, Artificial Sequence
  Synthetic
aauuauauugccagaaaua

SEQ ID NO: 233933 - RNA, 20 nt, Artificial Sequence
  Synthetic
uaauuauauugccagaaaua

SEQ ID NO: 233934 - RNA, 21 nt, Artificial Sequence
  Synthetic
uuaauuauauugccagaaaua

SEQ ID NO: 233935 - RNA, 22 nt, Artificial Sequence
  Synthetic
cuuaauuauauugccagaaaua

SEQ ID NO: 233936 - RNA, 23 nt, Artificial Sequence
  Synthetic
acuuaauuauauugccagaaaua

SEQ ID NO: 233937 - RNA, 24 nt, Artificial Sequence
  Synthetic
aacuuaauuauauugccagaaaua

SEQ ID NO: 233938 - RNA, 18 nt, Artificial Sequence
  Synthetic
aaacaaaaagcagaaaua

SEQ ID NO: 233939 - RNA, 19 nt, Artificial Sequence
  Synthetic
aaaacaaaaagcagaaaua

SEQ ID NO: 233940 - RNA, 20 nt, Artificial Sequence
  Synthetic
aaaaacaaaaagcagaaaua

SEQ ID NO: 233941 - RNA, 21 nt, Artificial Sequence
  Synthetic
uaaaaacaaaaagcagaaaua

SEQ ID NO: 233942 - RNA, 22 nt, Artificial Sequence
  Synthetic
auaaaaacaaaaagcagaaaua

SEQ ID NO: 233943 - RNA, 23 nt, Artificial Sequence
  Synthetic
cauaaaaacaaaaagcagaaaua

SEQ ID NO: 233944 - RNA, 24 nt, Artificial Sequence
  Synthetic
acauaaaaacaaaaagcagaaaua

SEQ ID NO: 233945 - RNA, 18 nt, Artificial Sequence
  Synthetic
ccugcgugggcagaaaua

SEQ ID NO: 233946 - RNA, 19 nt, Artificial Sequence
  Synthetic
accugcgugggcagaaaua

SEQ ID NO: 233947 - RNA, 20 nt, Artificial Sequence
  Synthetic
gaccugcgugggcagaaaua

SEQ ID NO: 233948 - RNA, 21 nt, Artificial Sequence
  Synthetic
agaccugcgugggcagaaaua

SEQ ID NO: 233949 - RNA, 22 nt, Artificial Sequence
  Synthetic
uagaccugcgugggcagaaaua

SEQ ID NO: 233950 - RNA, 23 nt, Artificial Sequence
  Synthetic
auagaccugcgugggcagaaaua

SEQ ID NO: 233951 - RNA, 24 nt, Artificial Sequence
  Synthetic
gauagaccugcgugggcagaaaua

SEQ ID NO: 233952 - RNA, 18 nt, Artificial Sequence
  Synthetic
uuccaccccucagaaaua

SEQ ID NO: 233953 - RNA, 19 nt, Artificial Sequence
  Synthetic
auuccaccccucagaaaua

SEQ ID NO: 233954 - RNA, 20 nt, Artificial Sequence
  Synthetic
uauuccaccccucagaaaua

SEQ ID NO: 233955 - RNA, 21 nt, Artificial Sequence
  Synthetic
uuauuccaccccucagaaaua

SEQ ID NO: 233956 - RNA, 22 nt, Artificial Sequence
  Synthetic
guuauuccaccccucagaaaua

SEQ ID NO: 233957 - RNA, 23 nt, Artificial Sequence
  Synthetic
gguuauuccaccccucagaaaua

SEQ ID NO: 233958 - RNA, 24 nt, Artificial Sequence
  Synthetic
ugguuauuccaccccucagaaaua

SEQ ID NO: 233959 - RNA, 18 nt, Artificial Sequence
  Synthetic
ggaagaauacgagaaaua

SEQ ID NO: 233960 - RNA, 19 nt, Artificial Sequence
  Synthetic
uggaagaauacgagaaaua

SEQ ID NO: 233961 - RNA, 20 nt, Artificial Sequence
  Synthetic
uuggaagaauacgagaaaua

SEQ ID NO: 233962 - RNA, 21 nt, Artificial Sequence
  Synthetic
auuggaagaauacgagaaaua

SEQ ID NO: 233963 - RNA, 22 nt, Artificial Sequence
  Synthetic
aauuggaagaauacgagaaaua

SEQ ID NO: 233964 - RNA, 23 nt, Artificial Sequence
  Synthetic
caauuggaagaauacgagaaaua

SEQ ID NO: 233965 - RNA, 24 nt, Artificial Sequence
  Synthetic
gcaauuggaagaauacgagaaaua

SEQ ID NO: 233966 - RNA, 18 nt, Artificial Sequence
  Synthetic
agagaagaaugagaaaua

SEQ ID NO: 233967 - RNA, 19 nt, Artificial Sequence
  Synthetic
aagagaagaaugagaaaua

SEQ ID NO: 233968 - RNA, 20 nt, Artificial Sequence
  Synthetic
aaagagaagaaugagaaaua

SEQ ID NO: 233969 - RNA, 21 nt, Artificial Sequence
  Synthetic
gaaagagaagaaugagaaaua

SEQ ID NO: 233970 - RNA, 22 nt, Artificial Sequence
  Synthetic
agaaagagaagaaugagaaaua

SEQ ID NO: 233971 - RNA, 23 nt, Artificial Sequence
  Synthetic
aagaaagagaagaaugagaaaua

SEQ ID NO: 233972 - RNA, 24 nt, Artificial Sequence
  Synthetic
aaagaaagagaagaaugagaaaua

SEQ ID NO: 233973 - RNA, 18 nt, Artificial Sequence
  Synthetic
gugaaguuaugagaaaua

SEQ ID NO: 233974 - RNA, 19 nt, Artificial Sequence
  Synthetic
agugaaguuaugagaaaua

SEQ ID NO: 233975 - RNA, 20 nt, Artificial Sequence
  Synthetic
aagugaaguuaugagaaaua

SEQ ID NO: 233976 - RNA, 21 nt, Artificial Sequence
  Synthetic
uaagugaaguuaugagaaaua

SEQ ID NO: 233977 - RNA, 22 nt, Artificial Sequence
  Synthetic
auaagugaaguuaugagaaaua

SEQ ID NO: 233978 - RNA, 23 nt, Artificial Sequence
  Synthetic
aauaagugaaguuaugagaaaua

SEQ ID NO: 233979 - RNA, 24 nt, Artificial Sequence
  Synthetic
caauaagugaaguuaugagaaaua

SEQ ID NO: 233980 - RNA, 18 nt, Artificial Sequence
  Synthetic
ucaagggccugagaaaua

SEQ ID NO: 233981 - RNA, 19 nt, Artificial Sequence
  Synthetic
gucaagggccugagaaaua

SEQ ID NO: 233982 - RNA, 20 nt, Artificial Sequence
  Synthetic
ugucaagggccugagaaaua

SEQ ID NO: 233983 - RNA, 21 nt, Artificial Sequence
  Synthetic
uugucaagggccugagaaaua

SEQ ID NO: 233984 - RNA, 22 nt, Artificial Sequence
  Synthetic
uuugucaagggccugagaaaua

SEQ ID NO: 233985 - RNA, 23 nt, Artificial Sequence
  Synthetic
uuuugucaagggccugagaaaua

SEQ ID NO: 233986 - RNA, 24 nt, Artificial Sequence
  Synthetic
cuuuugucaagggccugagaaaua

SEQ ID NO: 233987 - RNA, 18 nt, Artificial Sequence
  Synthetic
uuucuugccugagaaaua

SEQ ID NO: 233988 - RNA, 19 nt, Artificial Sequence
  Synthetic
guuucuugccugagaaaua

SEQ ID NO: 233989 - RNA, 20 nt, Artificial Sequence
  Synthetic
aguuucuugccugagaaaua

SEQ ID NO: 233990 - RNA, 21 nt, Artificial Sequence
  Synthetic
caguuucuugccugagaaaua

SEQ ID NO: 233991 - RNA, 22 nt, Artificial Sequence
  Synthetic
ucaguuucuugccugagaaaua

SEQ ID NO: 233992 - RNA, 23 nt, Artificial Sequence
  Synthetic
aucaguuucuugccugagaaaua

SEQ ID NO: 233993 - RNA, 24 nt, Artificial Sequence
  Synthetic
gaucaguuucuugccugagaaaua

SEQ ID NO: 233994 - RNA, 18 nt, Artificial Sequence
  Synthetic
cagaauaucaucgaaaua

SEQ ID NO: 233995 - RNA, 19 nt, Artificial Sequence
  Synthetic
ccagaauaucaucgaaaua

SEQ ID NO: 233996 - RNA, 20 nt, Artificial Sequence
  Synthetic
accagaauaucaucgaaaua

SEQ ID NO: 233997 - RNA, 21 nt, Artificial Sequence
  Synthetic
aaccagaauaucaucgaaaua

SEQ ID NO: 233998 - RNA, 22 nt, Artificial Sequence
  Synthetic
aaaccagaauaucaucgaaaua

SEQ ID NO: 233999 - RNA, 23 nt, Artificial Sequence
  Synthetic
caaaccagaauaucaucgaaaua

SEQ ID NO: 234000 - RNA, 24 nt, Artificial Sequence
  Synthetic
ucaaaccagaauaucaucgaaaua

SEQ ID NO: 234001 - RNA, 18 nt, Artificial Sequence
  Synthetic
agcauaaggaaggaaaua

SEQ ID NO: 234002 - RNA, 19 nt, Artificial Sequence
  Synthetic
aagcauaaggaaggaaaua

SEQ ID NO: 234003 - RNA, 20 nt, Artificial Sequence
  Synthetic
gaagcauaaggaaggaaaua

SEQ ID NO: 234004 - RNA, 21 nt, Artificial Sequence
  Synthetic
ggaagcauaaggaaggaaaua

SEQ ID NO: 234005 - RNA, 22 nt, Artificial Sequence
  Synthetic
aggaagcauaaggaaggaaaua

SEQ ID NO: 234006 - RNA, 23 nt, Artificial Sequence
  Synthetic
aaggaagcauaaggaaggaaaua

SEQ ID NO: 234007 - RNA, 24 nt, Artificial Sequence
  Synthetic
gaaggaagcauaaggaaggaaaua

SEQ ID NO: 234008 - RNA, 18 nt, Artificial Sequence
  Synthetic
aaaaauauuaaggaaaua

SEQ ID NO: 234009 - RNA, 19 nt, Artificial Sequence
  Synthetic
aaaaaauauuaaggaaaua

SEQ ID NO: 234010 - RNA, 20 nt, Artificial Sequence
  Synthetic
gaaaaaauauuaaggaaaua

SEQ ID NO: 234011 - RNA, 21 nt, Artificial Sequence
  Synthetic
agaaaaaauauuaaggaaaua

SEQ ID NO: 234012 - RNA, 22 nt, Artificial Sequence
  Synthetic
aagaaaaaauauuaaggaaaua

SEQ ID NO: 234013 - RNA, 23 nt, Artificial Sequence
  Synthetic
aaagaaaaaauauuaaggaaaua

SEQ ID NO: 234014 - RNA, 24 nt, Artificial Sequence
  Synthetic
gaaagaaaaaauauuaaggaaaua

SEQ ID NO: 234015 - RNA, 18 nt, Artificial Sequence
  Synthetic
cccuaagaucaggaaaua

SEQ ID NO: 234016 - RNA, 19 nt, Artificial Sequence
  Synthetic
ccccuaagaucaggaaaua

SEQ ID NO: 234017 - RNA, 20 nt, Artificial Sequence
  Synthetic
uccccuaagaucaggaaaua

SEQ ID NO: 234018 - RNA, 21 nt, Artificial Sequence
  Synthetic
uuccccuaagaucaggaaaua

SEQ ID NO: 234019 - RNA, 22 nt, Artificial Sequence
  Synthetic
uuuccccuaagaucaggaaaua

SEQ ID NO: 234020 - RNA, 23 nt, Artificial Sequence
  Synthetic
cuuuccccuaagaucaggaaaua

SEQ ID NO: 234021 - RNA, 24 nt, Artificial Sequence
  Synthetic
gcuuuccccuaagaucaggaaaua

SEQ ID NO: 234022 - RNA, 18 nt, Artificial Sequence
  Synthetic
auucaaauucaggaaaua

SEQ ID NO: 234023 - RNA, 19 nt, Artificial Sequence
  Synthetic
cauucaaauucaggaaaua

SEQ ID NO: 234024 - RNA, 20 nt, Artificial Sequence
  Synthetic
acauucaaauucaggaaaua

SEQ ID NO: 234025 - RNA, 21 nt, Artificial Sequence
  Synthetic
aacauucaaauucaggaaaua

SEQ ID NO: 234026 - RNA, 22 nt, Artificial Sequence
  Synthetic
caacauucaaauucaggaaaua

SEQ ID NO: 234027 - RNA, 23 nt, Artificial Sequence
  Synthetic
ccaacauucaaauucaggaaaua

SEQ ID NO: 234028 - RNA, 24 nt, Artificial Sequence
  Synthetic
gccaacauucaaauucaggaaaua

SEQ ID NO: 234029 - RNA, 18 nt, Artificial Sequence
  Synthetic
cgagaggggcuggaaaua

SEQ ID NO: 234030 - RNA, 19 nt, Artificial Sequence
  Synthetic
ccgagaggggcuggaaaua

SEQ ID NO: 234031 - RNA, 20 nt, Artificial Sequence
  Synthetic
cccgagaggggcuggaaaua

SEQ ID NO: 234032 - RNA, 21 nt, Artificial Sequence
  Synthetic
ucccgagaggggcuggaaaua

SEQ ID NO: 234033 - RNA, 22 nt, Artificial Sequence
  Synthetic
uucccgagaggggcuggaaaua

SEQ ID NO: 234034 - RNA, 23 nt, Artificial Sequence
  Synthetic
auucccgagaggggcuggaaaua

SEQ ID NO: 234035 - RNA, 24 nt, Artificial Sequence
  Synthetic
uauucccgagaggggcuggaaaua

SEQ ID NO: 234036 - RNA, 18 nt, Artificial Sequence
  Synthetic
aaaauccgaaaugaaaua

SEQ ID NO: 234037 - RNA, 19 nt, Artificial Sequence
  Synthetic
gaaaauccgaaaugaaaua

SEQ ID NO: 234038 - RNA, 20 nt, Artificial Sequence
  Synthetic
agaaaauccgaaaugaaaua

SEQ ID NO: 234039 - RNA, 21 nt, Artificial Sequence
  Synthetic
gagaaaauccgaaaugaaaua

SEQ ID NO: 234040 - RNA, 22 nt, Artificial Sequence
  Synthetic
agagaaaauccgaaaugaaaua

SEQ ID NO: 234041 - RNA, 23 nt, Artificial Sequence
  Synthetic
cagagaaaauccgaaaugaaaua

SEQ ID NO: 234042 - RNA, 24 nt, Artificial Sequence
  Synthetic
ucagagaaaauccgaaaugaaaua

SEQ ID NO: 234043 - RNA, 18 nt, Artificial Sequence
  Synthetic
aaugcuuaugaugaaaua

SEQ ID NO: 234044 - RNA, 19 nt, Artificial Sequence
  Synthetic
aaaugcuuaugaugaaaua

SEQ ID NO: 234045 - RNA, 20 nt, Artificial Sequence
  Synthetic
aaaaugcuuaugaugaaaua

SEQ ID NO: 234046 - RNA, 21 nt, Artificial Sequence
  Synthetic
uaaaaugcuuaugaugaaaua

SEQ ID NO: 234047 - RNA, 22 nt, Artificial Sequence
  Synthetic
guaaaaugcuuaugaugaaaua

SEQ ID NO: 234048 - RNA, 23 nt, Artificial Sequence
  Synthetic
uguaaaaugcuuaugaugaaaua

SEQ ID NO: 234049 - RNA, 24 nt, Artificial Sequence
  Synthetic
guguaaaaugcuuaugaugaaaua

SEQ ID NO: 234050 - RNA, 18 nt, Artificial Sequence
  Synthetic
cauaucagguaugaaaua

SEQ ID NO: 234051 - RNA, 19 nt, Artificial Sequence
  Synthetic
acauaucagguaugaaaua

SEQ ID NO: 234052 - RNA, 20 nt, Artificial Sequence
  Synthetic
uacauaucagguaugaaaua

SEQ ID NO: 234053 - RNA, 21 nt, Artificial Sequence
  Synthetic
uuacauaucagguaugaaaua

SEQ ID NO: 234054 - RNA, 22 nt, Artificial Sequence
  Synthetic
auuacauaucagguaugaaaua

SEQ ID NO: 234055 - RNA, 23 nt, Artificial Sequence
  Synthetic
uauuacauaucagguaugaaaua

SEQ ID NO: 234056 - RNA, 24 nt, Artificial Sequence
  Synthetic
guauuacauaucagguaugaaaua

SEQ ID NO: 234057 - RNA, 18 nt, Artificial Sequence
  Synthetic
auuucuagguaugaaaua

SEQ ID NO: 234058 - RNA, 19 nt, Artificial Sequence
  Synthetic
uauuucuagguaugaaaua

SEQ ID NO: 234059 - RNA, 20 nt, Artificial Sequence
  Synthetic
uuauuucuagguaugaaaua

SEQ ID NO: 234060 - RNA, 21 nt, Artificial Sequence
  Synthetic
cuuauuucuagguaugaaaua

SEQ ID NO: 234061 - RNA, 22 nt, Artificial Sequence
  Synthetic
gcuuauuucuagguaugaaaua

SEQ ID NO: 234062 - RNA, 23 nt, Artificial Sequence
  Synthetic
agcuuauuucuagguaugaaaua

SEQ ID NO: 234063 - RNA, 24 nt, Artificial Sequence
  Synthetic
gagcuuauuucuagguaugaaaua

SEQ ID NO: 234064 - RNA, 18 nt, Artificial Sequence
  Synthetic
uuucaucccacugaaaua

SEQ ID NO: 234065 - RNA, 19 nt, Artificial Sequence
  Synthetic
uuuucaucccacugaaaua

SEQ ID NO: 234066 - RNA, 20 nt, Artificial Sequence
  Synthetic
guuuucaucccacugaaaua

SEQ ID NO: 234067 - RNA, 21 nt, Artificial Sequence
  Synthetic
uguuuucaucccacugaaaua

SEQ ID NO: 234068 - RNA, 22 nt, Artificial Sequence
  Synthetic
cuguuuucaucccacugaaaua

SEQ ID NO: 234069 - RNA, 23 nt, Artificial Sequence
  Synthetic
gcuguuuucaucccacugaaaua

SEQ ID NO: 234070 - RNA, 24 nt, Artificial Sequence
  Synthetic
agcuguuuucaucccacugaaaua

SEQ ID NO: 234071 - RNA, 18 nt, Artificial Sequence
  Synthetic
uuuacgucuacugaaaua

SEQ ID NO: 234072 - RNA, 19 nt, Artificial Sequence
  Synthetic
auuuacgucuacugaaaua

SEQ ID NO: 234073 - RNA, 20 nt, Artificial Sequence
  Synthetic
uauuuacgucuacugaaaua

SEQ ID NO: 234074 - RNA, 21 nt, Artificial Sequence
  Synthetic
uuauuuacgucuacugaaaua

SEQ ID NO: 234075 - RNA, 22 nt, Artificial Sequence
  Synthetic
auuauuuacgucuacugaaaua

SEQ ID NO: 234076 - RNA, 23 nt, Artificial Sequence
  Synthetic
aauuauuuacgucuacugaaaua

SEQ ID NO: 234077 - RNA, 24 nt, Artificial Sequence
  Synthetic
aaauuauuuacgucuacugaaaua

SEQ ID NO: 234078 - RNA, 18 nt, Artificial Sequence
  Synthetic
ucacccccuccugaaaua

SEQ ID NO: 234079 - RNA, 19 nt, Artificial Sequence
  Synthetic
uucacccccuccugaaaua

SEQ ID NO: 234080 - RNA, 20 nt, Artificial Sequence
  Synthetic
cuucacccccuccugaaaua

SEQ ID NO: 234081 - RNA, 21 nt, Artificial Sequence
  Synthetic
acuucacccccuccugaaaua

SEQ ID NO: 234082 - RNA, 22 nt, Artificial Sequence
  Synthetic
uacuucacccccuccugaaaua

SEQ ID NO: 234083 - RNA, 23 nt, Artificial Sequence
  Synthetic
uuacuucacccccuccugaaaua

SEQ ID NO: 234084 - RNA, 24 nt, Artificial Sequence
  Synthetic
guuacuucacccccuccugaaaua

SEQ ID NO: 234085 - RNA, 18 nt, Artificial Sequence
  Synthetic
auaaugacuggugaaaua

SEQ ID NO: 234086 - RNA, 19 nt, Artificial Sequence
  Synthetic
aauaaugacuggugaaaua

SEQ ID NO: 234087 - RNA, 20 nt, Artificial Sequence
  Synthetic
uaauaaugacuggugaaaua

SEQ ID NO: 234088 - RNA, 21 nt, Artificial Sequence
  Synthetic
guaauaaugacuggugaaaua

SEQ ID NO: 234089 - RNA, 22 nt, Artificial Sequence
  Synthetic
cguaauaaugacuggugaaaua

SEQ ID NO: 234090 - RNA, 23 nt, Artificial Sequence
  Synthetic
acguaauaaugacuggugaaaua

SEQ ID NO: 234091 - RNA, 24 nt, Artificial Sequence
  Synthetic
aacguaauaaugacuggugaaaua

SEQ ID NO: 234092 - RNA, 18 nt, Artificial Sequence
  Synthetic
guuauuuucugugaaaua

SEQ ID NO: 234093 - RNA, 19 nt, Artificial Sequence
  Synthetic
uguuauuuucugugaaaua

SEQ ID NO: 234094 - RNA, 20 nt, Artificial Sequence
  Synthetic
uuguuauuuucugugaaaua

SEQ ID NO: 234095 - RNA, 21 nt, Artificial Sequence
  Synthetic
uuuguuauuuucugugaaaua

SEQ ID NO: 234096 - RNA, 22 nt, Artificial Sequence
  Synthetic
auuuguuauuuucugugaaaua

SEQ ID NO: 234097 - RNA, 23 nt, Artificial Sequence
  Synthetic
aauuuguuauuuucugugaaaua

SEQ ID NO: 234098 - RNA, 24 nt, Artificial Sequence
  Synthetic
aaauuuguuauuuucugugaaaua

SEQ ID NO: 234099 - RNA, 18 nt, Artificial Sequence
  Synthetic
uaaggaagaauugaaaua

SEQ ID NO: 234100 - RNA, 19 nt, Artificial Sequence
  Synthetic
guaaggaagaauugaaaua

SEQ ID NO: 234101 - RNA, 20 nt, Artificial Sequence
  Synthetic
gguaaggaagaauugaaaua

SEQ ID NO: 234102 - RNA, 21 nt, Artificial Sequence
  Synthetic
agguaaggaagaauugaaaua

SEQ ID NO: 234103 - RNA, 22 nt, Artificial Sequence
  Synthetic
gagguaaggaagaauugaaaua

SEQ ID NO: 234104 - RNA, 23 nt, Artificial Sequence
  Synthetic
ggagguaaggaagaauugaaaua

SEQ ID NO: 234105 - RNA, 24 nt, Artificial Sequence
  Synthetic
aggagguaaggaagaauugaaaua

SEQ ID NO: 234106 - RNA, 18 nt, Artificial Sequence
  Synthetic
caaaugauaauugaaaua

SEQ ID NO: 234107 - RNA, 19 nt, Artificial Sequence
  Synthetic
ucaaaugauaauugaaaua

SEQ ID NO: 234108 - RNA, 20 nt, Artificial Sequence
  Synthetic
gucaaaugauaauugaaaua

SEQ ID NO: 234109 - RNA, 21 nt, Artificial Sequence
  Synthetic
agucaaaugauaauugaaaua

SEQ ID NO: 234110 - RNA, 22 nt, Artificial Sequence
  Synthetic
cagucaaaugauaauugaaaua

SEQ ID NO: 234111 - RNA, 23 nt, Artificial Sequence
  Synthetic
acagucaaaugauaauugaaaua

SEQ ID NO: 234112 - RNA, 24 nt, Artificial Sequence
  Synthetic
uacagucaaaugauaauugaaaua

SEQ ID NO: 234113 - RNA, 18 nt, Artificial Sequence
  Synthetic
uuagagauucuugaaaua

SEQ ID NO: 234114 - RNA, 19 nt, Artificial Sequence
  Synthetic
uuuagagauucuugaaaua

SEQ ID NO: 234115 - RNA, 20 nt, Artificial Sequence
  Synthetic
auuuagagauucuugaaaua

SEQ ID NO: 234116 - RNA, 21 nt, Artificial Sequence
  Synthetic
cauuuagagauucuugaaaua

SEQ ID NO: 234117 - RNA, 22 nt, Artificial Sequence
  Synthetic
ucauuuagagauucuugaaaua

SEQ ID NO: 234118 - RNA, 23 nt, Artificial Sequence
  Synthetic
aucauuuagagauucuugaaaua

SEQ ID NO: 234119 - RNA, 24 nt, Artificial Sequence
  Synthetic
uaucauuuagagauucuugaaaua

SEQ ID NO: 234120 - RNA, 18 nt, Artificial Sequence
  Synthetic
auaaaauaaaaauaaaua

SEQ ID NO: 234121 - RNA, 19 nt, Artificial Sequence
  Synthetic
aauaaaauaaaaauaaaua

SEQ ID NO: 234122 - RNA, 20 nt, Artificial Sequence
  Synthetic
aaauaaaauaaaaauaaaua

SEQ ID NO: 234123 - RNA, 21 nt, Artificial Sequence
  Synthetic
aaaauaaaauaaaaauaaaua

SEQ ID NO: 234124 - RNA, 22 nt, Artificial Sequence
  Synthetic
aaaaauaaaauaaaaauaaaua

SEQ ID NO: 234125 - RNA, 23 nt, Artificial Sequence
  Synthetic
gaaaaauaaaauaaaaauaaaua

SEQ ID NO: 234126 - RNA, 24 nt, Artificial Sequence
  Synthetic
ugaaaaauaaaauaaaaauaaaua

SEQ ID NO: 234127 - RNA, 18 nt, Artificial Sequence
  Synthetic
uggucaucacaauaaaua

SEQ ID NO: 234128 - RNA, 19 nt, Artificial Sequence
  Synthetic
auggucaucacaauaaaua

SEQ ID NO: 234129 - RNA, 20 nt, Artificial Sequence
  Synthetic
uauggucaucacaauaaaua

SEQ ID NO: 234130 - RNA, 21 nt, Artificial Sequence
  Synthetic
guauggucaucacaauaaaua

SEQ ID NO: 234131 - RNA, 22 nt, Artificial Sequence
  Synthetic
cguauggucaucacaauaaaua

SEQ ID NO: 234132 - RNA, 23 nt, Artificial Sequence
  Synthetic
ucguauggucaucacaauaaaua

SEQ ID NO: 234133 - RNA, 24 nt, Artificial Sequence
  Synthetic
aucguauggucaucacaauaaaua

SEQ ID NO: 234134 - RNA, 18 nt, Artificial Sequence
  Synthetic
gagacacaucaauaaaua

SEQ ID NO: 234135 - RNA, 19 nt, Artificial Sequence
  Synthetic
agagacacaucaauaaaua

SEQ ID NO: 234136 - RNA, 20 nt, Artificial Sequence
  Synthetic
uagagacacaucaauaaaua

SEQ ID NO: 234137 - RNA, 21 nt, Artificial Sequence
  Synthetic
cuagagacacaucaauaaaua

SEQ ID NO: 234138 - RNA, 22 nt, Artificial Sequence
  Synthetic
acuagagacacaucaauaaaua

SEQ ID NO: 234139 - RNA, 23 nt, Artificial Sequence
  Synthetic
cacuagagacacaucaauaaaua

SEQ ID NO: 234140 - RNA, 24 nt, Artificial Sequence
  Synthetic
acacuagagacacaucaauaaaua

SEQ ID NO: 234141 - RNA, 18 nt, Artificial Sequence
  Synthetic
aguuacaaaacauaaaua

SEQ ID NO: 234142 - RNA, 19 nt, Artificial Sequence
  Synthetic
gaguuacaaaacauaaaua

SEQ ID NO: 234143 - RNA, 20 nt, Artificial Sequence
  Synthetic
agaguuacaaaacauaaaua

SEQ ID NO: 234144 - RNA, 21 nt, Artificial Sequence
  Synthetic
gagaguuacaaaacauaaaua

SEQ ID NO: 234145 - RNA, 22 nt, Artificial Sequence
  Synthetic
ugagaguuacaaaacauaaaua

SEQ ID NO: 234146 - RNA, 23 nt, Artificial Sequence
  Synthetic
augagaguuacaaaacauaaaua

SEQ ID NO: 234147 - RNA, 24 nt, Artificial Sequence
  Synthetic
aaugagaguuacaaaacauaaaua

SEQ ID NO: 234148 - RNA, 18 nt, Artificial Sequence
  Synthetic
cucaaaaauacauaaaua

SEQ ID NO: 234149 - RNA, 19 nt, Artificial Sequence
  Synthetic
ucucaaaaauacauaaaua

SEQ ID NO: 234150 - RNA, 20 nt, Artificial Sequence
  Synthetic
gucucaaaaauacauaaaua

SEQ ID NO: 234151 - RNA, 21 nt, Artificial Sequence
  Synthetic
ugucucaaaaauacauaaaua

SEQ ID NO: 234152 - RNA, 22 nt, Artificial Sequence
  Synthetic
cugucucaaaaauacauaaaua

SEQ ID NO: 234153 - RNA, 23 nt, Artificial Sequence
  Synthetic
ucugucucaaaaauacauaaaua

SEQ ID NO: 234154 - RNA, 24 nt, Artificial Sequence
  Synthetic
cucugucucaaaaauacauaaaua

SEQ ID NO: 234155 - RNA, 18 nt, Artificial Sequence
  Synthetic
augacugcuggauaaaua

SEQ ID NO: 234156 - RNA, 19 nt, Artificial Sequence
  Synthetic
aaugacugcuggauaaaua

SEQ ID NO: 234157 - RNA, 20 nt, Artificial Sequence
  Synthetic
gaaugacugcuggauaaaua

SEQ ID NO: 234158 - RNA, 21 nt, Artificial Sequence
  Synthetic
ugaaugacugcuggauaaaua

SEQ ID NO: 234159 - RNA, 22 nt, Artificial Sequence
  Synthetic
cugaaugacugcuggauaaaua

SEQ ID NO: 234160 - RNA, 23 nt, Artificial Sequence
  Synthetic
ccugaaugacugcuggauaaaua

SEQ ID NO: 234161 - RNA, 24 nt, Artificial Sequence
  Synthetic
uccugaaugacugcuggauaaaua

SEQ ID NO: 234162 - RNA, 18 nt, Artificial Sequence
  Synthetic
ugcacaguuugauaaaua

SEQ ID NO: 234163 - RNA, 19 nt, Artificial Sequence
  Synthetic
augcacaguuugauaaaua

SEQ ID NO: 234164 - RNA, 20 nt, Artificial Sequence
  Synthetic
aaugcacaguuugauaaaua

SEQ ID NO: 234165 - RNA, 21 nt, Artificial Sequence
  Synthetic
aaaugcacaguuugauaaaua

SEQ ID NO: 234166 - RNA, 22 nt, Artificial Sequence
  Synthetic
uaaaugcacaguuugauaaaua

SEQ ID NO: 234167 - RNA, 23 nt, Artificial Sequence
  Synthetic
guaaaugcacaguuugauaaaua

SEQ ID NO: 234168 - RNA, 24 nt, Artificial Sequence
  Synthetic
cguaaaugcacaguuugauaaaua

SEQ ID NO: 234169 - RNA, 18 nt, Artificial Sequence
  Synthetic
aguaauucuuuauaaaua

SEQ ID NO: 234170 - RNA, 19 nt, Artificial Sequence
  Synthetic
caguaauucuuuauaaaua

SEQ ID NO: 234171 - RNA, 20 nt, Artificial Sequence
  Synthetic
acaguaauucuuuauaaaua

SEQ ID NO: 234172 - RNA, 21 nt, Artificial Sequence
  Synthetic
uacaguaauucuuuauaaaua

SEQ ID NO: 234173 - RNA, 22 nt, Artificial Sequence
  Synthetic
guacaguaauucuuuauaaaua

SEQ ID NO: 234174 - RNA, 23 nt, Artificial Sequence
  Synthetic
uguacaguaauucuuuauaaaua

SEQ ID NO: 234175 - RNA, 24 nt, Artificial Sequence
  Synthetic
auguacaguaauucuuuauaaaua

SEQ ID NO: 234176 - RNA, 18 nt, Artificial Sequence
  Synthetic
ugaaggaagcacuaaaua

SEQ ID NO: 234177 - RNA, 19 nt, Artificial Sequence
  Synthetic
augaaggaagcacuaaaua

SEQ ID NO: 234178 - RNA, 20 nt, Artificial Sequence
  Synthetic
aaugaaggaagcacuaaaua

SEQ ID NO: 234179 - RNA, 21 nt, Artificial Sequence
  Synthetic
uaaugaaggaagcacuaaaua

SEQ ID NO: 234180 - RNA, 22 nt, Artificial Sequence
  Synthetic
cuaaugaaggaagcacuaaaua

SEQ ID NO: 234181 - RNA, 23 nt, Artificial Sequence
  Synthetic
ucuaaugaaggaagcacuaaaua

SEQ ID NO: 234182 - RNA, 24 nt, Artificial Sequence
  Synthetic
uucuaaugaaggaagcacuaaaua

SEQ ID NO: 234183 - RNA, 18 nt, Artificial Sequence
  Synthetic
aaaugauuucacuaaaua

SEQ ID NO: 234184 - RNA, 19 nt, Artificial Sequence
  Synthetic
gaaaugauuucacuaaaua

SEQ ID NO: 234185 - RNA, 20 nt, Artificial Sequence
  Synthetic
ugaaaugauuucacuaaaua

SEQ ID NO: 234186 - RNA, 21 nt, Artificial Sequence
  Synthetic
gugaaaugauuucacuaaaua

SEQ ID NO: 234187 - RNA, 22 nt, Artificial Sequence
  Synthetic
cgugaaaugauuucacuaaaua

SEQ ID NO: 234188 - RNA, 23 nt, Artificial Sequence
  Synthetic
ccgugaaaugauuucacuaaaua

SEQ ID NO: 234189 - RNA, 24 nt, Artificial Sequence
  Synthetic
uccgugaaaugauuucacuaaaua

SEQ ID NO: 234190 - RNA, 18 nt, Artificial Sequence
  Synthetic
acagacaauaccuaaaua

SEQ ID NO: 234191 - RNA, 19 nt, Artificial Sequence
  Synthetic
cacagacaauaccuaaaua

SEQ ID NO: 234192 - RNA, 20 nt, Artificial Sequence
  Synthetic
ccacagacaauaccuaaaua

SEQ ID NO: 234193 - RNA, 21 nt, Artificial Sequence
  Synthetic
gccacagacaauaccuaaaua

SEQ ID NO: 234194 - RNA, 22 nt, Artificial Sequence
  Synthetic
agccacagacaauaccuaaaua

SEQ ID NO: 234195 - RNA, 23 nt, Artificial Sequence
  Synthetic
aagccacagacaauaccuaaaua

SEQ ID NO: 234196 - RNA, 24 nt, Artificial Sequence
  Synthetic
aaagccacagacaauaccuaaaua

SEQ ID NO: 234197 - RNA, 18 nt, Artificial Sequence
  Synthetic
aaagaaaucagcuaaaua

SEQ ID NO: 234198 - RNA, 19 nt, Artificial Sequence
  Synthetic
aaaagaaaucagcuaaaua

SEQ ID NO: 234199 - RNA, 20 nt, Artificial Sequence
  Synthetic
aaaaagaaaucagcuaaaua

SEQ ID NO: 234200 - RNA, 21 nt, Artificial Sequence
  Synthetic
caaaaagaaaucagcuaaaua

SEQ ID NO: 234201 - RNA, 22 nt, Artificial Sequence
  Synthetic
ucaaaaagaaaucagcuaaaua

SEQ ID NO: 234202 - RNA, 23 nt, Artificial Sequence
  Synthetic
cucaaaaagaaaucagcuaaaua

SEQ ID NO: 234203 - RNA, 24 nt, Artificial Sequence
  Synthetic
gcucaaaaagaaaucagcuaaaua

SEQ ID NO: 234204 - RNA, 18 nt, Artificial Sequence
  Synthetic
gaggacuggggcuaaaua

SEQ ID NO: 234205 - RNA, 19 nt, Artificial Sequence
  Synthetic
agaggacuggggcuaaaua

SEQ ID NO: 234206 - RNA, 20 nt, Artificial Sequence
  Synthetic
gagaggacuggggcuaaaua

SEQ ID NO: 234207 - RNA, 21 nt, Artificial Sequence
  Synthetic
agagaggacuggggcuaaaua

SEQ ID NO: 234208 - RNA, 22 nt, Artificial Sequence
  Synthetic
uagagaggacuggggcuaaaua

SEQ ID NO: 234209 - RNA, 23 nt, Artificial Sequence
  Synthetic
auagagaggacuggggcuaaaua

SEQ ID NO: 234210 - RNA, 24 nt, Artificial Sequence
  Synthetic
aauagagaggacuggggcuaaaua

SEQ ID NO: 234211 - RNA, 18 nt, Artificial Sequence
  Synthetic
aacugagauugcuaaaua

SEQ ID NO: 234212 - RNA, 19 nt, Artificial Sequence
  Synthetic
gaacugagauugcuaaaua

SEQ ID NO: 234213 - RNA, 20 nt, Artificial Sequence
  Synthetic
agaacugagauugcuaaaua

SEQ ID NO: 234214 - RNA, 21 nt, Artificial Sequence
  Synthetic
cagaacugagauugcuaaaua

SEQ ID NO: 234215 - RNA, 22 nt, Artificial Sequence
  Synthetic
ccagaacugagauugcuaaaua

SEQ ID NO: 234216 - RNA, 23 nt, Artificial Sequence
  Synthetic
cccagaacugagauugcuaaaua

SEQ ID NO: 234217 - RNA, 24 nt, Artificial Sequence
  Synthetic
acccagaacugagauugcuaaaua

SEQ ID NO: 234218 - RNA, 18 nt, Artificial Sequence
  Synthetic
aaaugauuucucuaaaua

SEQ ID NO: 234219 - RNA, 19 nt, Artificial Sequence
  Synthetic
aaaaugauuucucuaaaua

SEQ ID NO: 234220 - RNA, 20 nt, Artificial Sequence
  Synthetic
gaaaaugauuucucuaaaua

SEQ ID NO: 234221 - RNA, 21 nt, Artificial Sequence
  Synthetic
agaaaaugauuucucuaaaua

SEQ ID NO: 234222 - RNA, 22 nt, Artificial Sequence
  Synthetic
cagaaaaugauuucucuaaaua

SEQ ID NO: 234223 - RNA, 23 nt, Artificial Sequence
  Synthetic
acagaaaaugauuucucuaaaua

SEQ ID NO: 234224 - RNA, 24 nt, Artificial Sequence
  Synthetic
uacagaaaaugauuucucuaaaua

SEQ ID NO: 234225 - RNA, 18 nt, Artificial Sequence
  Synthetic
aggucugguuucuaaaua

SEQ ID NO: 234226 - RNA, 19 nt, Artificial Sequence
  Synthetic
caggucugguuucuaaaua

SEQ ID NO: 234227 - RNA, 20 nt, Artificial Sequence
  Synthetic
ccaggucugguuucuaaaua

SEQ ID NO: 234228 - RNA, 21 nt, Artificial Sequence
  Synthetic
uccaggucugguuucuaaaua

SEQ ID NO: 234229 - RNA, 22 nt, Artificial Sequence
  Synthetic
cuccaggucugguuucuaaaua

SEQ ID NO: 234230 - RNA, 23 nt, Artificial Sequence
  Synthetic
acuccaggucugguuucuaaaua

SEQ ID NO: 234231 - RNA, 24 nt, Artificial Sequence
  Synthetic
cacuccaggucugguuucuaaaua

SEQ ID NO: 234232 - RNA, 18 nt, Artificial Sequence
  Synthetic
caaaaauaauaguaaaua

SEQ ID NO: 234233 - RNA, 19 nt, Artificial Sequence
  Synthetic
gcaaaaauaauaguaaaua

SEQ ID NO: 234234 - RNA, 20 nt, Artificial Sequence
  Synthetic
ugcaaaaauaauaguaaaua

SEQ ID NO: 234235 - RNA, 21 nt, Artificial Sequence
  Synthetic
augcaaaaauaauaguaaaua

SEQ ID NO: 234236 - RNA, 22 nt, Artificial Sequence
  Synthetic
caugcaaaaauaauaguaaaua

SEQ ID NO: 234237 - RNA, 23 nt, Artificial Sequence
  Synthetic
acaugcaaaaauaauaguaaaua

SEQ ID NO: 234238 - RNA, 24 nt, Artificial Sequence
  Synthetic
uacaugcaaaaauaauaguaaaua

SEQ ID NO: 234239 - RNA, 18 nt, Artificial Sequence
  Synthetic
aaguuucagggguaaaua

SEQ ID NO: 234240 - RNA, 19 nt, Artificial Sequence
  Synthetic
aaaguuucagggguaaaua

SEQ ID NO: 234241 - RNA, 20 nt, Artificial Sequence
  Synthetic
caaaguuucagggguaaaua

SEQ ID NO: 234242 - RNA, 21 nt, Artificial Sequence
  Synthetic
gcaaaguuucagggguaaaua

SEQ ID NO: 234243 - RNA, 22 nt, Artificial Sequence
  Synthetic
ggcaaaguuucagggguaaaua

SEQ ID NO: 234244 - RNA, 23 nt, Artificial Sequence
  Synthetic
uggcaaaguuucagggguaaaua

SEQ ID NO: 234245 - RNA, 24 nt, Artificial Sequence
  Synthetic
auggcaaaguuucagggguaaaua

SEQ ID NO: 234246 - RNA, 18 nt, Artificial Sequence
  Synthetic
ccaagaacacuguaaaua

SEQ ID NO: 234247 - RNA, 19 nt, Artificial Sequence
  Synthetic
uccaagaacacuguaaaua

SEQ ID NO: 234248 - RNA, 20 nt, Artificial Sequence
  Synthetic
guccaagaacacuguaaaua

SEQ ID NO: 234249 - RNA, 21 nt, Artificial Sequence
  Synthetic
uguccaagaacacuguaaaua

SEQ ID NO: 234250 - RNA, 22 nt, Artificial Sequence
  Synthetic
guguccaagaacacuguaaaua

SEQ ID NO: 234251 - RNA, 23 nt, Artificial Sequence
  Synthetic
uguguccaagaacacuguaaaua

SEQ ID NO: 234252 - RNA, 24 nt, Artificial Sequence
  Synthetic
cuguguccaagaacacuguaaaua

SEQ ID NO: 234253 - RNA, 18 nt, Artificial Sequence
  Synthetic
aacagcaccuauuaaaua

SEQ ID NO: 234254 - RNA, 19 nt, Artificial Sequence
  Synthetic
uaacagcaccuauuaaaua

SEQ ID NO: 234255 - RNA, 20 nt, Artificial Sequence
  Synthetic
uuaacagcaccuauuaaaua

SEQ ID NO: 234256 - RNA, 21 nt, Artificial Sequence
  Synthetic
auuaacagcaccuauuaaaua

SEQ ID NO: 234257 - RNA, 22 nt, Artificial Sequence
  Synthetic
uauuaacagcaccuauuaaaua

SEQ ID NO: 234258 - RNA, 23 nt, Artificial Sequence
  Synthetic
cuauuaacagcaccuauuaaaua

SEQ ID NO: 234259 - RNA, 24 nt, Artificial Sequence
  Synthetic
gcuauuaacagcaccuauuaaaua

SEQ ID NO: 234260 - RNA, 18 nt, Artificial Sequence
  Synthetic
uuaaacugagguuaaaua

SEQ ID NO: 234261 - RNA, 19 nt, Artificial Sequence
  Synthetic
cuuaaacugagguuaaaua

SEQ ID NO: 234262 - RNA, 20 nt, Artificial Sequence
  Synthetic
ccuuaaacugagguuaaaua

SEQ ID NO: 234263 - RNA, 21 nt, Artificial Sequence
  Synthetic
uccuuaaacugagguuaaaua

SEQ ID NO: 234264 - RNA, 22 nt, Artificial Sequence
  Synthetic
cuccuuaaacugagguuaaaua

SEQ ID NO: 234265 - RNA, 23 nt, Artificial Sequence
  Synthetic
acuccuuaaacugagguuaaaua

SEQ ID NO: 234266 - RNA, 24 nt, Artificial Sequence
  Synthetic
aacuccuuaaacugagguuaaaua

SEQ ID NO: 234267 - RNA, 18 nt, Artificial Sequence
  Synthetic
uuuuguauaauuuaaaua

SEQ ID NO: 234268 - RNA, 19 nt, Artificial Sequence
  Synthetic
guuuuguauaauuuaaaua

SEQ ID NO: 234269 - RNA, 20 nt, Artificial Sequence
  Synthetic
uguuuuguauaauuuaaaua

SEQ ID NO: 234270 - RNA, 21 nt, Artificial Sequence
  Synthetic
cuguuuuguauaauuuaaaua

SEQ ID NO: 234271 - RNA, 22 nt, Artificial Sequence
  Synthetic
acuguuuuguauaauuuaaaua

SEQ ID NO: 234272 - RNA, 23 nt, Artificial Sequence
  Synthetic
aacuguuuuguauaauuuaaaua

SEQ ID NO: 234273 - RNA, 24 nt, Artificial Sequence
  Synthetic
aaacuguuuuguauaauuuaaaua

SEQ ID NO: 234274 - RNA, 18 nt, Artificial Sequence
  Synthetic
augguggcucuuuaaaua

SEQ ID NO: 234275 - RNA, 19 nt, Artificial Sequence
  Synthetic
uaugguggcucuuuaaaua

SEQ ID NO: 234276 - RNA, 20 nt, Artificial Sequence
  Synthetic
auaugguggcucuuuaaaua

SEQ ID NO: 234277 - RNA, 21 nt, Artificial Sequence
  Synthetic
aauaugguggcucuuuaaaua

SEQ ID NO: 234278 - RNA, 22 nt, Artificial Sequence
  Synthetic
aaauaugguggcucuuuaaaua

SEQ ID NO: 234279 - RNA, 23 nt, Artificial Sequence
  Synthetic
uaaauaugguggcucuuuaaaua

SEQ ID NO: 234280 - RNA, 24 nt, Artificial Sequence
  Synthetic
auaaauaugguggcucuuuaaaua

SEQ ID NO: 234281 - RNA, 18 nt, Artificial Sequence
  Synthetic
ucagacauagaaacaaua

SEQ ID NO: 234282 - RNA, 19 nt, Artificial Sequence
  Synthetic
gucagacauagaaacaaua

SEQ ID NO: 234283 - RNA, 20 nt, Artificial Sequence
  Synthetic
ugucagacauagaaacaaua

SEQ ID NO: 234284 - RNA, 21 nt, Artificial Sequence
  Synthetic
uugucagacauagaaacaaua

SEQ ID NO: 234285 - RNA, 22 nt, Artificial Sequence
  Synthetic
cuugucagacauagaaacaaua

SEQ ID NO: 234286 - RNA, 23 nt, Artificial Sequence
  Synthetic
ucuugucagacauagaaacaaua

SEQ ID NO: 234287 - RNA, 24 nt, Artificial Sequence
  Synthetic
uucuugucagacauagaaacaaua

SEQ ID NO: 234288 - RNA, 18 nt, Artificial Sequence
  Synthetic
ggaguuagggaaacaaua

SEQ ID NO: 234289 - RNA, 19 nt, Artificial Sequence
  Synthetic
uggaguuagggaaacaaua

SEQ ID NO: 234290 - RNA, 20 nt, Artificial Sequence
  Synthetic
uuggaguuagggaaacaaua

SEQ ID NO: 234291 - RNA, 21 nt, Artificial Sequence
  Synthetic
auuggaguuagggaaacaaua

SEQ ID NO: 234292 - RNA, 22 nt, Artificial Sequence
  Synthetic
uauuggaguuagggaaacaaua

SEQ ID NO: 234293 - RNA, 23 nt, Artificial Sequence
  Synthetic
guauuggaguuagggaaacaaua

SEQ ID NO: 234294 - RNA, 24 nt, Artificial Sequence
  Synthetic
uguauuggaguuagggaaacaaua

SEQ ID NO: 234295 - RNA, 18 nt, Artificial Sequence
  Synthetic
aaauucauauaaacaaua

SEQ ID NO: 234296 - RNA, 19 nt, Artificial Sequence
  Synthetic
uaaauucauauaaacaaua

SEQ ID NO: 234297 - RNA, 20 nt, Artificial Sequence
  Synthetic
auaaauucauauaaacaaua

SEQ ID NO: 234298 - RNA, 21 nt, Artificial Sequence
  Synthetic
uauaaauucauauaaacaaua

SEQ ID NO: 234299 - RNA, 22 nt, Artificial Sequence
  Synthetic
auauaaauucauauaaacaaua

SEQ ID NO: 234300 - RNA, 23 nt, Artificial Sequence
  Synthetic
aauauaaauucauauaaacaaua

SEQ ID NO: 234301 - RNA, 24 nt, Artificial Sequence
  Synthetic
aaauauaaauucauauaaacaaua

SEQ ID NO: 234302 - RNA, 18 nt, Artificial Sequence
  Synthetic
cccugagacacaacaaua

SEQ ID NO: 234303 - RNA, 19 nt, Artificial Sequence
  Synthetic
ucccugagacacaacaaua

SEQ ID NO: 234304 - RNA, 20 nt, Artificial Sequence
  Synthetic
uucccugagacacaacaaua

SEQ ID NO: 234305 - RNA, 21 nt, Artificial Sequence
  Synthetic
auucccugagacacaacaaua

SEQ ID NO: 234306 - RNA, 22 nt, Artificial Sequence
  Synthetic
uauucccugagacacaacaaua

SEQ ID NO: 234307 - RNA, 23 nt, Artificial Sequence
  Synthetic
cuauucccugagacacaacaaua

SEQ ID NO: 234308 - RNA, 24 nt, Artificial Sequence
  Synthetic
ccuauucccugagacacaacaaua

SEQ ID NO: 234309 - RNA, 18 nt, Artificial Sequence
  Synthetic
agaaaaauagcaacaaua

SEQ ID NO: 234310 - RNA, 19 nt, Artificial Sequence
  Synthetic
cagaaaaauagcaacaaua

SEQ ID NO: 234311 - RNA, 20 nt, Artificial Sequence
  Synthetic
acagaaaaauagcaacaaua

SEQ ID NO: 234312 - RNA, 21 nt, Artificial Sequence
  Synthetic
gacagaaaaauagcaacaaua

SEQ ID NO: 234313 - RNA, 22 nt, Artificial Sequence
  Synthetic
agacagaaaaauagcaacaaua

SEQ ID NO: 234314 - RNA, 23 nt, Artificial Sequence
  Synthetic
uagacagaaaaauagcaacaaua

SEQ ID NO: 234315 - RNA, 24 nt, Artificial Sequence
  Synthetic
uuagacagaaaaauagcaacaaua

SEQ ID NO: 234316 - RNA, 18 nt, Artificial Sequence
  Synthetic
aaugaguuaggaacaaua

SEQ ID NO: 234317 - RNA, 19 nt, Artificial Sequence
  Synthetic
gaaugaguuaggaacaaua

SEQ ID NO: 234318 - RNA, 20 nt, Artificial Sequence
  Synthetic
ugaaugaguuaggaacaaua

SEQ ID NO: 234319 - RNA, 21 nt, Artificial Sequence
  Synthetic
uugaaugaguuaggaacaaua

SEQ ID NO: 234320 - RNA, 22 nt, Artificial Sequence
  Synthetic
uuugaaugaguuaggaacaaua

SEQ ID NO: 234321 - RNA, 23 nt, Artificial Sequence
  Synthetic
cuuugaaugaguuaggaacaaua

SEQ ID NO: 234322 - RNA, 24 nt, Artificial Sequence
  Synthetic
ucuuugaaugaguuaggaacaaua

SEQ ID NO: 234323 - RNA, 18 nt, Artificial Sequence
  Synthetic
auacuaauaaacacaaua

SEQ ID NO: 234324 - RNA, 19 nt, Artificial Sequence
  Synthetic
uauacuaauaaacacaaua

SEQ ID NO: 234325 - RNA, 20 nt, Artificial Sequence
  Synthetic
uuauacuaauaaacacaaua

SEQ ID NO: 234326 - RNA, 21 nt, Artificial Sequence
  Synthetic
auuauacuaauaaacacaaua

SEQ ID NO: 234327 - RNA, 22 nt, Artificial Sequence
  Synthetic
uauuauacuaauaaacacaaua

SEQ ID NO: 234328 - RNA, 23 nt, Artificial Sequence
  Synthetic
uuauuauacuaauaaacacaaua

SEQ ID NO: 234329 - RNA, 24 nt, Artificial Sequence
  Synthetic
uuuauuauacuaauaaacacaaua

SEQ ID NO: 234330 - RNA, 18 nt, Artificial Sequence
  Synthetic
ggugacugaggcacaaua

SEQ ID NO: 234331 - RNA, 19 nt, Artificial Sequence
  Synthetic
gggugacugaggcacaaua

SEQ ID NO: 234332 - RNA, 20 nt, Artificial Sequence
  Synthetic
ggggugacugaggcacaaua

SEQ ID NO: 234333 - RNA, 21 nt, Artificial Sequence
  Synthetic
gggggugacugaggcacaaua

SEQ ID NO: 234334 - RNA, 22 nt, Artificial Sequence
  Synthetic
agggggugacugaggcacaaua

SEQ ID NO: 234335 - RNA, 23 nt, Artificial Sequence
  Synthetic
uagggggugacugaggcacaaua

SEQ ID NO: 234336 - RNA, 24 nt, Artificial Sequence
  Synthetic
cuagggggugacugaggcacaaua

SEQ ID NO: 234337 - RNA, 18 nt, Artificial Sequence
  Synthetic
uauauaugagagacaaua

SEQ ID NO: 234338 - RNA, 19 nt, Artificial Sequence
  Synthetic
guauauaugagagacaaua

SEQ ID NO: 234339 - RNA, 20 nt, Artificial Sequence
  Synthetic
uguauauaugagagacaaua

SEQ ID NO: 234340 - RNA, 21 nt, Artificial Sequence
  Synthetic
auguauauaugagagacaaua

SEQ ID NO: 234341 - RNA, 22 nt, Artificial Sequence
  Synthetic
uauguauauaugagagacaaua

SEQ ID NO: 234342 - RNA, 23 nt, Artificial Sequence
  Synthetic
auauguauauaugagagacaaua

SEQ ID NO: 234343 - RNA, 24 nt, Artificial Sequence
  Synthetic
uauauguauauaugagagacaaua

SEQ ID NO: 234344 - RNA, 18 nt, Artificial Sequence
  Synthetic
aagcagucauagacaaua

SEQ ID NO: 234345 - RNA, 19 nt, Artificial Sequence
  Synthetic
gaagcagucauagacaaua

SEQ ID NO: 234346 - RNA, 20 nt, Artificial Sequence
  Synthetic
ugaagcagucauagacaaua

SEQ ID NO: 234347 - RNA, 21 nt, Artificial Sequence
  Synthetic
uugaagcagucauagacaaua

SEQ ID NO: 234348 - RNA, 22 nt, Artificial Sequence
  Synthetic
guugaagcagucauagacaaua

SEQ ID NO: 234349 - RNA, 23 nt, Artificial Sequence
  Synthetic
uguugaagcagucauagacaaua

SEQ ID NO: 234350 - RNA, 24 nt, Artificial Sequence
  Synthetic
auguugaagcagucauagacaaua

SEQ ID NO: 234351 - RNA, 18 nt, Artificial Sequence
  Synthetic
aaugacugaaugacaaua

SEQ ID NO: 234352 - RNA, 19 nt, Artificial Sequence
  Synthetic
aaaugacugaaugacaaua

SEQ ID NO: 234353 - RNA, 20 nt, Artificial Sequence
  Synthetic
gaaaugacugaaugacaaua

SEQ ID NO: 234354 - RNA, 21 nt, Artificial Sequence
  Synthetic
agaaaugacugaaugacaaua

SEQ ID NO: 234355 - RNA, 22 nt, Artificial Sequence
  Synthetic
cagaaaugacugaaugacaaua

SEQ ID NO: 234356 - RNA, 23 nt, Artificial Sequence
  Synthetic
acagaaaugacugaaugacaaua

SEQ ID NO: 234357 - RNA, 24 nt, Artificial Sequence
  Synthetic
uacagaaaugacugaaugacaaua

SEQ ID NO: 234358 - RNA, 18 nt, Artificial Sequence
  Synthetic
cuucaaaggaugacaaua

SEQ ID NO: 234359 - RNA, 19 nt, Artificial Sequence
  Synthetic
acuucaaaggaugacaaua

SEQ ID NO: 234360 - RNA, 20 nt, Artificial Sequence
  Synthetic
aacuucaaaggaugacaaua

SEQ ID NO: 234361 - RNA, 21 nt, Artificial Sequence
  Synthetic
aaacuucaaaggaugacaaua

SEQ ID NO: 234362 - RNA, 22 nt, Artificial Sequence
  Synthetic
uaaacuucaaaggaugacaaua

SEQ ID NO: 234363 - RNA, 23 nt, Artificial Sequence
  Synthetic
guaaacuucaaaggaugacaaua

SEQ ID NO: 234364 - RNA, 24 nt, Artificial Sequence
  Synthetic
uguaaacuucaaaggaugacaaua

SEQ ID NO: 234365 - RNA, 18 nt, Artificial Sequence
  Synthetic
uggguuucugguacaaua

SEQ ID NO: 234366 - RNA, 19 nt, Artificial Sequence
  Synthetic
uuggguuucugguacaaua

SEQ ID NO: 234367 - RNA, 20 nt, Artificial Sequence
  Synthetic
uuuggguuucugguacaaua

SEQ ID NO: 234368 - RNA, 21 nt, Artificial Sequence
  Synthetic
guuuggguuucugguacaaua

SEQ ID NO: 234369 - RNA, 22 nt, Artificial Sequence
  Synthetic
gguuuggguuucugguacaaua

SEQ ID NO: 234370 - RNA, 23 nt, Artificial Sequence
  Synthetic
agguuuggguuucugguacaaua

SEQ ID NO: 234371 - RNA, 24 nt, Artificial Sequence
  Synthetic
gagguuuggguuucugguacaaua

SEQ ID NO: 234372 - RNA, 18 nt, Artificial Sequence
  Synthetic
cccugccaacuuacaaua

SEQ ID NO: 234373 - RNA, 19 nt, Artificial Sequence
  Synthetic
acccugccaacuuacaaua

SEQ ID NO: 234374 - RNA, 20 nt, Artificial Sequence
  Synthetic
aacccugccaacuuacaaua

SEQ ID NO: 234375 - RNA, 21 nt, Artificial Sequence
  Synthetic
caacccugccaacuuacaaua

SEQ ID NO: 234376 - RNA, 22 nt, Artificial Sequence
  Synthetic
ccaacccugccaacuuacaaua

SEQ ID NO: 234377 - RNA, 23 nt, Artificial Sequence
  Synthetic
cccaacccugccaacuuacaaua

SEQ ID NO: 234378 - RNA, 24 nt, Artificial Sequence
  Synthetic
ccccaacccugccaacuuacaaua

SEQ ID NO: 234379 - RNA, 18 nt, Artificial Sequence
  Synthetic
agcaagacucaaccaaua

SEQ ID NO: 234380 - RNA, 19 nt, Artificial Sequence
  Synthetic
gagcaagacucaaccaaua

SEQ ID NO: 234381 - RNA, 20 nt, Artificial Sequence
  Synthetic
ggagcaagacucaaccaaua

SEQ ID NO: 234382 - RNA, 21 nt, Artificial Sequence
  Synthetic
aggagcaagacucaaccaaua

SEQ ID NO: 234383 - RNA, 22 nt, Artificial Sequence
  Synthetic
caggagcaagacucaaccaaua

SEQ ID NO: 234384 - RNA, 23 nt, Artificial Sequence
  Synthetic
acaggagcaagacucaaccaaua

SEQ ID NO: 234385 - RNA, 24 nt, Artificial Sequence
  Synthetic
aacaggagcaagacucaaccaaua

SEQ ID NO: 234386 - RNA, 18 nt, Artificial Sequence
  Synthetic
uuggguauauaaccaaua

SEQ ID NO: 234387 - RNA, 19 nt, Artificial Sequence
  Synthetic
uuuggguauauaaccaaua

SEQ ID NO: 234388 - RNA, 20 nt, Artificial Sequence
  Synthetic
cuuuggguauauaaccaaua

SEQ ID NO: 234389 - RNA, 21 nt, Artificial Sequence
  Synthetic
ccuuuggguauauaaccaaua

SEQ ID NO: 234390 - RNA, 22 nt, Artificial Sequence
  Synthetic
uccuuuggguauauaaccaaua

SEQ ID NO: 234391 - RNA, 23 nt, Artificial Sequence
  Synthetic
uuccuuuggguauauaaccaaua

SEQ ID NO: 234392 - RNA, 24 nt, Artificial Sequence
  Synthetic
auuccuuuggguauauaaccaaua

SEQ ID NO: 234393 - RNA, 18 nt, Artificial Sequence
  Synthetic
cuuuuacuaucaccaaua

SEQ ID NO: 234394 - RNA, 19 nt, Artificial Sequence
  Synthetic
ucuuuuacuaucaccaaua

SEQ ID NO: 234395 - RNA, 20 nt, Artificial Sequence
  Synthetic
gucuuuuacuaucaccaaua

SEQ ID NO: 234396 - RNA, 21 nt, Artificial Sequence
  Synthetic
ugucuuuuacuaucaccaaua

SEQ ID NO: 234397 - RNA, 22 nt, Artificial Sequence
  Synthetic
uugucuuuuacuaucaccaaua

SEQ ID NO: 234398 - RNA, 23 nt, Artificial Sequence
  Synthetic
uuugucuuuuacuaucaccaaua

SEQ ID NO: 234399 - RNA, 24 nt, Artificial Sequence
  Synthetic
auuugucuuuuacuaucaccaaua

SEQ ID NO: 234400 - RNA, 21 nt, Artificial Sequence
  Synthetic
uaaauauauaugcacccaaua

SEQ ID NO: 234401 - RNA, 22 nt, Artificial Sequence
  Synthetic
cuaaauauauaugcacccaaua

SEQ ID NO: 234402 - RNA, 23 nt, Artificial Sequence
  Synthetic
ccuaaauauauaugcacccaaua

SEQ ID NO: 234403 - RNA, 24 nt, Artificial Sequence
  Synthetic
uccuaaauauauaugcacccaaua

SEQ ID NO: 234404 - RNA, 23 nt, Artificial Sequence
  Synthetic
ucuaaauauauaugcacccaaua

SEQ ID NO: 234405 - RNA, 24 nt, Artificial Sequence
  Synthetic
uucuaaauauauaugcacccaaua

SEQ ID NO: 234406 - RNA, 18 nt, Artificial Sequence
  Synthetic
accacgcccagcccaaua

SEQ ID NO: 234407 - RNA, 19 nt, Artificial Sequence
  Synthetic
caccacgcccagcccaaua

SEQ ID NO: 234408 - RNA, 20 nt, Artificial Sequence
  Synthetic
ccaccacgcccagcccaaua

SEQ ID NO: 234409 - RNA, 21 nt, Artificial Sequence
  Synthetic
gccaccacgcccagcccaaua

SEQ ID NO: 234410 - RNA, 22 nt, Artificial Sequence
  Synthetic
agccaccacgcccagcccaaua

SEQ ID NO: 234411 - RNA, 23 nt, Artificial Sequence
  Synthetic
gagccaccacgcccagcccaaua

SEQ ID NO: 234412 - RNA, 24 nt, Artificial Sequence
  Synthetic
ugagccaccacgcccagcccaaua

SEQ ID NO: 234413 - RNA, 18 nt, Artificial Sequence
  Synthetic
uaagccccaccuccaaua

SEQ ID NO: 234414 - RNA, 19 nt, Artificial Sequence
  Synthetic
uuaagccccaccuccaaua

SEQ ID NO: 234415 - RNA, 20 nt, Artificial Sequence
  Synthetic
guuaagccccaccuccaaua

SEQ ID NO: 234416 - RNA, 21 nt, Artificial Sequence
  Synthetic
cguuaagccccaccuccaaua

SEQ ID NO: 234417 - RNA, 22 nt, Artificial Sequence
  Synthetic
ccguuaagccccaccuccaaua

SEQ ID NO: 234418 - RNA, 23 nt, Artificial Sequence
  Synthetic
cccguuaagccccaccuccaaua

SEQ ID NO: 234419 - RNA, 24 nt, Artificial Sequence
  Synthetic
ucccguuaagccccaccuccaaua

SEQ ID NO: 234420 - RNA, 18 nt, Artificial Sequence
  Synthetic
ggacuuaucucuccaaua

SEQ ID NO: 234421 - RNA, 19 nt, Artificial Sequence
  Synthetic
uggacuuaucucuccaaua

SEQ ID NO: 234422 - RNA, 20 nt, Artificial Sequence
  Synthetic
auggacuuaucucuccaaua

SEQ ID NO: 234423 - RNA, 21 nt, Artificial Sequence
  Synthetic
cauggacuuaucucuccaaua

SEQ ID NO: 234424 - RNA, 22 nt, Artificial Sequence
  Synthetic
ucauggacuuaucucuccaaua

SEQ ID NO: 234425 - RNA, 23 nt, Artificial Sequence
  Synthetic
uucauggacuuaucucuccaaua

SEQ ID NO: 234426 - RNA, 24 nt, Artificial Sequence
  Synthetic
guucauggacuuaucucuccaaua

SEQ ID NO: 234427 - RNA, 18 nt, Artificial Sequence
  Synthetic
ucaacuacagaagcaaua

SEQ ID NO: 234428 - RNA, 19 nt, Artificial Sequence
  Synthetic
gucaacuacagaagcaaua

SEQ ID NO: 234429 - RNA, 20 nt, Artificial Sequence
  Synthetic
agucaacuacagaagcaaua

SEQ ID NO: 234430 - RNA, 21 nt, Artificial Sequence
  Synthetic
cagucaacuacagaagcaaua

SEQ ID NO: 234431 - RNA, 22 nt, Artificial Sequence
  Synthetic
ucagucaacuacagaagcaaua

SEQ ID NO: 234432 - RNA, 23 nt, Artificial Sequence
  Synthetic
uucagucaacuacagaagcaaua

SEQ ID NO: 234433 - RNA, 24 nt, Artificial Sequence
  Synthetic
cuucagucaacuacagaagcaaua

SEQ ID NO: 234434 - RNA, 18 nt, Artificial Sequence
  Synthetic
aaaugaaacacagcaaua

SEQ ID NO: 234435 - RNA, 19 nt, Artificial Sequence
  Synthetic
aaaaugaaacacagcaaua

SEQ ID NO: 234436 - RNA, 20 nt, Artificial Sequence
  Synthetic
gaaaaugaaacacagcaaua

SEQ ID NO: 234437 - RNA, 21 nt, Artificial Sequence
  Synthetic
ugaaaaugaaacacagcaaua

SEQ ID NO: 234438 - RNA, 22 nt, Artificial Sequence
  Synthetic
augaaaaugaaacacagcaaua

SEQ ID NO: 234439 - RNA, 23 nt, Artificial Sequence
  Synthetic
aaugaaaaugaaacacagcaaua

SEQ ID NO: 234440 - RNA, 24 nt, Artificial Sequence
  Synthetic
gaaugaaaaugaaacacagcaaua

SEQ ID NO: 234441 - RNA, 18 nt, Artificial Sequence
  Synthetic
ccuucuauucaugcaaua

SEQ ID NO: 234442 - RNA, 19 nt, Artificial Sequence
  Synthetic
gccuucuauucaugcaaua

SEQ ID NO: 234443 - RNA, 20 nt, Artificial Sequence
  Synthetic
ugccuucuauucaugcaaua

SEQ ID NO: 234444 - RNA, 21 nt, Artificial Sequence
  Synthetic
uugccuucuauucaugcaaua

SEQ ID NO: 234445 - RNA, 22 nt, Artificial Sequence
  Synthetic
auugccuucuauucaugcaaua

SEQ ID NO: 234446 - RNA, 23 nt, Artificial Sequence
  Synthetic
gauugccuucuauucaugcaaua

SEQ ID NO: 234447 - RNA, 24 nt, Artificial Sequence
  Synthetic
agauugccuucuauucaugcaaua

SEQ ID NO: 234448 - RNA, 18 nt, Artificial Sequence
  Synthetic
uuuccuaugacugcaaua

SEQ ID NO: 234449 - RNA, 19 nt, Artificial Sequence
  Synthetic
guuuccuaugacugcaaua

SEQ ID NO: 234450 - RNA, 20 nt, Artificial Sequence
  Synthetic
uguuuccuaugacugcaaua

SEQ ID NO: 234451 - RNA, 21 nt, Artificial Sequence
  Synthetic
uuguuuccuaugacugcaaua

SEQ ID NO: 234452 - RNA, 22 nt, Artificial Sequence
  Synthetic
uuuguuuccuaugacugcaaua

SEQ ID NO: 234453 - RNA, 23 nt, Artificial Sequence
  Synthetic
auuuguuuccuaugacugcaaua

SEQ ID NO: 234454 - RNA, 24 nt, Artificial Sequence
  Synthetic
uauuuguuuccuaugacugcaaua

SEQ ID NO: 234455 - RNA, 18 nt, Artificial Sequence
  Synthetic
uucaaaacuuuugcaaua

SEQ ID NO: 234456 - RNA, 19 nt, Artificial Sequence
  Synthetic
guucaaaacuuuugcaaua

SEQ ID NO: 234457 - RNA, 20 nt, Artificial Sequence
  Synthetic
uguucaaaacuuuugcaaua

SEQ ID NO: 234458 - RNA, 21 nt, Artificial Sequence
  Synthetic
guguucaaaacuuuugcaaua

SEQ ID NO: 234459 - RNA, 22 nt, Artificial Sequence
  Synthetic
uguguucaaaacuuuugcaaua

SEQ ID NO: 234460 - RNA, 23 nt, Artificial Sequence
  Synthetic
cuguguucaaaacuuuugcaaua

SEQ ID NO: 234461 - RNA, 24 nt, Artificial Sequence
  Synthetic
acuguguucaaaacuuuugcaaua

SEQ ID NO: 234462 - RNA, 18 nt, Artificial Sequence
  Synthetic
gcuuuaccuuuugcaaua

SEQ ID NO: 234463 - RNA, 19 nt, Artificial Sequence
  Synthetic
ugcuuuaccuuuugcaaua

SEQ ID NO: 234464 - RNA, 20 nt, Artificial Sequence
  Synthetic
augcuuuaccuuuugcaaua

SEQ ID NO: 234465 - RNA, 21 nt, Artificial Sequence
  Synthetic
uaugcuuuaccuuuugcaaua

SEQ ID NO: 234466 - RNA, 22 nt, Artificial Sequence
  Synthetic
cuaugcuuuaccuuuugcaaua

SEQ ID NO: 234467 - RNA, 23 nt, Artificial Sequence
  Synthetic
acuaugcuuuaccuuuugcaaua

SEQ ID NO: 234468 - RNA, 24 nt, Artificial Sequence
  Synthetic
aacuaugcuuuaccuuuugcaaua

SEQ ID NO: 234469 - RNA, 18 nt, Artificial Sequence
  Synthetic
ccauuggguuuugcaaua

SEQ ID NO: 234470 - RNA, 19 nt, Artificial Sequence
  Synthetic
accauuggguuuugcaaua

SEQ ID NO: 234471 - RNA, 20 nt, Artificial Sequence
  Synthetic
gaccauuggguuuugcaaua

SEQ ID NO: 234472 - RNA, 21 nt, Artificial Sequence
  Synthetic
agaccauuggguuuugcaaua

SEQ ID NO: 234473 - RNA, 22 nt, Artificial Sequence
  Synthetic
uagaccauuggguuuugcaaua

SEQ ID NO: 234474 - RNA, 23 nt, Artificial Sequence
  Synthetic
auagaccauuggguuuugcaaua

SEQ ID NO: 234475 - RNA, 24 nt, Artificial Sequence
  Synthetic
aauagaccauuggguuuugcaaua

SEQ ID NO: 234476 - RNA, 18 nt, Artificial Sequence
  Synthetic
uagcaacagaaaucaaua

SEQ ID NO: 234477 - RNA, 19 nt, Artificial Sequence
  Synthetic
guagcaacagaaaucaaua

SEQ ID NO: 234478 - RNA, 20 nt, Artificial Sequence
  Synthetic
uguagcaacagaaaucaaua

SEQ ID NO: 234479 - RNA, 21 nt, Artificial Sequence
  Synthetic
uuguagcaacagaaaucaaua

SEQ ID NO: 234480 - RNA, 22 nt, Artificial Sequence
  Synthetic
cuuguagcaacagaaaucaaua

SEQ ID NO: 234481 - RNA, 23 nt, Artificial Sequence
  Synthetic
acuuguagcaacagaaaucaaua

SEQ ID NO: 234482 - RNA, 24 nt, Artificial Sequence
  Synthetic
cacuuguagcaacagaaaucaaua

SEQ ID NO: 234483 - RNA, 18 nt, Artificial Sequence
  Synthetic
agcccucuucaaucaaua

SEQ ID NO: 234484 - RNA, 19 nt, Artificial Sequence
  Synthetic
cagcccucuucaaucaaua

SEQ ID NO: 234485 - RNA, 20 nt, Artificial Sequence
  Synthetic
ucagcccucuucaaucaaua

SEQ ID NO: 234486 - RNA, 21 nt, Artificial Sequence
  Synthetic
uucagcccucuucaaucaaua

SEQ ID NO: 234487 - RNA, 22 nt, Artificial Sequence
  Synthetic
guucagcccucuucaaucaaua

SEQ ID NO: 234488 - RNA, 23 nt, Artificial Sequence
  Synthetic
aguucagcccucuucaaucaaua

SEQ ID NO: 234489 - RNA, 24 nt, Artificial Sequence
  Synthetic
aaguucagcccucuucaaucaaua

SEQ ID NO: 234490 - RNA, 18 nt, Artificial Sequence
  Synthetic
aaauagagaguaucaaua

SEQ ID NO: 234491 - RNA, 19 nt, Artificial Sequence
  Synthetic
caaauagagaguaucaaua

SEQ ID NO: 234492 - RNA, 20 nt, Artificial Sequence
  Synthetic
acaaauagagaguaucaaua

SEQ ID NO: 234493 - RNA, 21 nt, Artificial Sequence
  Synthetic
aacaaauagagaguaucaaua

SEQ ID NO: 234494 - RNA, 22 nt, Artificial Sequence
  Synthetic
uaacaaauagagaguaucaaua

SEQ ID NO: 234495 - RNA, 23 nt, Artificial Sequence
  Synthetic
uuaacaaauagagaguaucaaua

SEQ ID NO: 234496 - RNA, 24 nt, Artificial Sequence
  Synthetic
cuuaacaaauagagaguaucaaua

SEQ ID NO: 234497 - RNA, 18 nt, Artificial Sequence
  Synthetic
uauguuaagaacucaaua

SEQ ID NO: 234498 - RNA, 19 nt, Artificial Sequence
  Synthetic
uuauguuaagaacucaaua

SEQ ID NO: 234499 - RNA, 20 nt, Artificial Sequence
  Synthetic
uuuauguuaagaacucaaua

SEQ ID NO: 234500 - RNA, 21 nt, Artificial Sequence
  Synthetic
auuuauguuaagaacucaaua

SEQ ID NO: 234501 - RNA, 22 nt, Artificial Sequence
  Synthetic
cauuuauguuaagaacucaaua

SEQ ID NO: 234502 - RNA, 23 nt, Artificial Sequence
  Synthetic
ucauuuauguuaagaacucaaua

SEQ ID NO: 234503 - RNA, 24 nt, Artificial Sequence
  Synthetic
cucauuuauguuaagaacucaaua

SEQ ID NO: 234504 - RNA, 18 nt, Artificial Sequence
  Synthetic
aggcccccauugucaaua

SEQ ID NO: 234505 - RNA, 19 nt, Artificial Sequence
  Synthetic
caggcccccauugucaaua

SEQ ID NO: 234506 - RNA, 20 nt, Artificial Sequence
  Synthetic
acaggcccccauugucaaua

SEQ ID NO: 234507 - RNA, 21 nt, Artificial Sequence
  Synthetic
cacaggcccccauugucaaua

SEQ ID NO: 234508 - RNA, 22 nt, Artificial Sequence
  Synthetic
ccacaggcccccauugucaaua

SEQ ID NO: 234509 - RNA, 23 nt, Artificial Sequence
  Synthetic
gccacaggcccccauugucaaua

SEQ ID NO: 234510 - RNA, 24 nt, Artificial Sequence
  Synthetic
agccacaggcccccauugucaaua

SEQ ID NO: 234511 - RNA, 18 nt, Artificial Sequence
  Synthetic
aaucuagguuugucaaua

SEQ ID NO: 234512 - RNA, 19 nt, Artificial Sequence
  Synthetic
gaaucuagguuugucaaua

SEQ ID NO: 234513 - RNA, 20 nt, Artificial Sequence
  Synthetic
agaaucuagguuugucaaua

SEQ ID NO: 234514 - RNA, 21 nt, Artificial Sequence
  Synthetic
aagaaucuagguuugucaaua

SEQ ID NO: 234515 - RNA, 22 nt, Artificial Sequence
  Synthetic
uaagaaucuagguuugucaaua

SEQ ID NO: 234516 - RNA, 23 nt, Artificial Sequence
  Synthetic
uuaagaaucuagguuugucaaua

SEQ ID NO: 234517 - RNA, 24 nt, Artificial Sequence
  Synthetic
auuaagaaucuagguuugucaaua

SEQ ID NO: 234518 - RNA, 18 nt, Artificial Sequence
  Synthetic
aacagaggaaauucaaua

SEQ ID NO: 234519 - RNA, 19 nt, Artificial Sequence
  Synthetic
aaacagaggaaauucaaua

SEQ ID NO: 234520 - RNA, 20 nt, Artificial Sequence
  Synthetic
caaacagaggaaauucaaua

SEQ ID NO: 234521 - RNA, 21 nt, Artificial Sequence
  Synthetic
ucaaacagaggaaauucaaua

SEQ ID NO: 234522 - RNA, 22 nt, Artificial Sequence
  Synthetic
uucaaacagaggaaauucaaua

SEQ ID NO: 234523 - RNA, 23 nt, Artificial Sequence
  Synthetic
uuucaaacagaggaaauucaaua

SEQ ID NO: 234524 - RNA, 24 nt, Artificial Sequence
  Synthetic
auuucaaacagaggaaauucaaua

SEQ ID NO: 234525 - RNA, 18 nt, Artificial Sequence
  Synthetic
ugcaaaagcaauucaaua

SEQ ID NO: 234526 - RNA, 19 nt, Artificial Sequence
  Synthetic
uugcaaaagcaauucaaua

SEQ ID NO: 234527 - RNA, 20 nt, Artificial Sequence
  Synthetic
guugcaaaagcaauucaaua

SEQ ID NO: 234528 - RNA, 21 nt, Artificial Sequence
  Synthetic
aguugcaaaagcaauucaaua

SEQ ID NO: 234529 - RNA, 22 nt, Artificial Sequence
  Synthetic
aaguugcaaaagcaauucaaua

SEQ ID NO: 234530 - RNA, 23 nt, Artificial Sequence
  Synthetic
aaaguugcaaaagcaauucaaua

SEQ ID NO: 234531 - RNA, 24 nt, Artificial Sequence
  Synthetic
uaaaguugcaaaagcaauucaaua

SEQ ID NO: 234532 - RNA, 18 nt, Artificial Sequence
  Synthetic
gaguacaugaauucaaua

SEQ ID NO: 234533 - RNA, 19 nt, Artificial Sequence
  Synthetic
agaguacaugaauucaaua

SEQ ID NO: 234534 - RNA, 20 nt, Artificial Sequence
  Synthetic
aagaguacaugaauucaaua

SEQ ID NO: 234535 - RNA, 21 nt, Artificial Sequence
  Synthetic
uaagaguacaugaauucaaua

SEQ ID NO: 234536 - RNA, 22 nt, Artificial Sequence
  Synthetic
cuaagaguacaugaauucaaua

SEQ ID NO: 234537 - RNA, 23 nt, Artificial Sequence
  Synthetic
gcuaagaguacaugaauucaaua

SEQ ID NO: 234538 - RNA, 24 nt, Artificial Sequence
  Synthetic
agcuaagaguacaugaauucaaua

SEQ ID NO: 234539 - RNA, 18 nt, Artificial Sequence
  Synthetic
auucaacacucuucaaua

SEQ ID NO: 234540 - RNA, 19 nt, Artificial Sequence
  Synthetic
uauucaacacucuucaaua

SEQ ID NO: 234541 - RNA, 20 nt, Artificial Sequence
  Synthetic
auauucaacacucuucaaua

SEQ ID NO: 234542 - RNA, 21 nt, Artificial Sequence
  Synthetic
aauauucaacacucuucaaua

SEQ ID NO: 234543 - RNA, 22 nt, Artificial Sequence
  Synthetic
caauauucaacacucuucaaua

SEQ ID NO: 234544 - RNA, 23 nt, Artificial Sequence
  Synthetic
ccaauauucaacacucuucaaua

SEQ ID NO: 234545 - RNA, 24 nt, Artificial Sequence
  Synthetic
gccaauauucaacacucuucaaua

SEQ ID NO: 234546 - RNA, 18 nt, Artificial Sequence
  Synthetic
acacaugguaguucaaua

SEQ ID NO: 234547 - RNA, 19 nt, Artificial Sequence
  Synthetic
gacacaugguaguucaaua

SEQ ID NO: 234548 - RNA, 20 nt, Artificial Sequence
  Synthetic
ugacacaugguaguucaaua

SEQ ID NO: 234549 - RNA, 21 nt, Artificial Sequence
  Synthetic
cugacacaugguaguucaaua

SEQ ID NO: 234550 - RNA, 22 nt, Artificial Sequence
  Synthetic
acugacacaugguaguucaaua

SEQ ID NO: 234551 - RNA, 23 nt, Artificial Sequence
  Synthetic
cacugacacaugguaguucaaua

SEQ ID NO: 234552 - RNA, 24 nt, Artificial Sequence
  Synthetic
ccacugacacaugguaguucaaua

SEQ ID NO: 234553 - RNA, 18 nt, Artificial Sequence
  Synthetic
ucagcguauuguucaaua

SEQ ID NO: 234554 - RNA, 19 nt, Artificial Sequence
  Synthetic
aucagcguauuguucaaua

SEQ ID NO: 234555 - RNA, 20 nt, Artificial Sequence
  Synthetic
aaucagcguauuguucaaua

SEQ ID NO: 234556 - RNA, 21 nt, Artificial Sequence
  Synthetic
aaaucagcguauuguucaaua

SEQ ID NO: 234557 - RNA, 22 nt, Artificial Sequence
  Synthetic
gaaaucagcguauuguucaaua

SEQ ID NO: 234558 - RNA, 23 nt, Artificial Sequence
  Synthetic
agaaaucagcguauuguucaaua

SEQ ID NO: 234559 - RNA, 24 nt, Artificial Sequence
  Synthetic
uagaaaucagcguauuguucaaua

SEQ ID NO: 234560 - RNA, 18 nt, Artificial Sequence
  Synthetic
auaggaaacauuucaaua

SEQ ID NO: 234561 - RNA, 19 nt, Artificial Sequence
  Synthetic
aauaggaaacauuucaaua

SEQ ID NO: 234562 - RNA, 20 nt, Artificial Sequence
  Synthetic
uaauaggaaacauuucaaua

SEQ ID NO: 234563 - RNA, 21 nt, Artificial Sequence
  Synthetic
guaauaggaaacauuucaaua

SEQ ID NO: 234564 - RNA, 22 nt, Artificial Sequence
  Synthetic
gguaauaggaaacauuucaaua

SEQ ID NO: 234565 - RNA, 23 nt, Artificial Sequence
  Synthetic
cgguaauaggaaacauuucaaua

SEQ ID NO: 234566 - RNA, 24 nt, Artificial Sequence
  Synthetic
acgguaauaggaaacauuucaaua

SEQ ID NO: 234567 - RNA, 18 nt, Artificial Sequence
  Synthetic
uaaugaaugcuuucaaua

SEQ ID NO: 234568 - RNA, 19 nt, Artificial Sequence
  Synthetic
uuaaugaaugcuuucaaua

SEQ ID NO: 234569 - RNA, 20 nt, Artificial Sequence
  Synthetic
uuuaaugaaugcuuucaaua

SEQ ID NO: 234570 - RNA, 21 nt, Artificial Sequence
  Synthetic
cuuuaaugaaugcuuucaaua

SEQ ID NO: 234571 - RNA, 22 nt, Artificial Sequence
  Synthetic
ccuuuaaugaaugcuuucaaua

SEQ ID NO: 234572 - RNA, 23 nt, Artificial Sequence
  Synthetic
accuuuaaugaaugcuuucaaua

SEQ ID NO: 234573 - RNA, 24 nt, Artificial Sequence
  Synthetic
aaccuuuaaugaaugcuuucaaua

SEQ ID NO: 234574 - RNA, 18 nt, Artificial Sequence
  Synthetic
cccuccaauuuuucaaua

SEQ ID NO: 234575 - RNA, 19 nt, Artificial Sequence
  Synthetic
ccccuccaauuuuucaaua

SEQ ID NO: 234576 - RNA, 20 nt, Artificial Sequence
  Synthetic
gccccuccaauuuuucaaua

SEQ ID NO: 234577 - RNA, 21 nt, Artificial Sequence
  Synthetic
agccccuccaauuuuucaaua

SEQ ID NO: 234578 - RNA, 22 nt, Artificial Sequence
  Synthetic
uagccccuccaauuuuucaaua

SEQ ID NO: 234579 - RNA, 23 nt, Artificial Sequence
  Synthetic
uuagccccuccaauuuuucaaua

SEQ ID NO: 234580 - RNA, 24 nt, Artificial Sequence
  Synthetic
guuagccccuccaauuuuucaaua

SEQ ID NO: 234581 - RNA, 18 nt, Artificial Sequence
  Synthetic
aaaaaaaaaaaaagaaua

SEQ ID NO: 234582 - RNA, 19 nt, Artificial Sequence
  Synthetic
gaaaaaaaaaaaaagaaua

SEQ ID NO: 234583 - RNA, 20 nt, Artificial Sequence
  Synthetic
ugaaaaaaaaaaaaagaaua

SEQ ID NO: 234584 - RNA, 21 nt, Artificial Sequence
  Synthetic
augaaaaaaaaaaaaagaaua

SEQ ID NO: 234585 - RNA, 22 nt, Artificial Sequence
  Synthetic
caugaaaaaaaaaaaaagaaua

SEQ ID NO: 234586 - RNA, 23 nt, Artificial Sequence
  Synthetic
ucaugaaaaaaaaaaaaagaaua

SEQ ID NO: 234587 - RNA, 24 nt, Artificial Sequence
  Synthetic
gucaugaaaaaaaaaaaaagaaua

SEQ ID NO: 234588 - RNA, 18 nt, Artificial Sequence
  Synthetic
ccacucauggaaagaaua

SEQ ID NO: 234589 - RNA, 19 nt, Artificial Sequence
  Synthetic
gccacucauggaaagaaua

SEQ ID NO: 234590 - RNA, 20 nt, Artificial Sequence
  Synthetic
agccacucauggaaagaaua

SEQ ID NO: 234591 - RNA, 21 nt, Artificial Sequence
  Synthetic
aagccacucauggaaagaaua

SEQ ID NO: 234592 - RNA, 22 nt, Artificial Sequence
  Synthetic
aaagccacucauggaaagaaua

SEQ ID NO: 234593 - RNA, 23 nt, Artificial Sequence
  Synthetic
uaaagccacucauggaaagaaua

SEQ ID NO: 234594 - RNA, 24 nt, Artificial Sequence
  Synthetic
auaaagccacucauggaaagaaua

SEQ ID NO: 234595 - RNA, 18 nt, Artificial Sequence
  Synthetic
uuaacuagugaaagaaua

SEQ ID NO: 234596 - RNA, 19 nt, Artificial Sequence
  Synthetic
uuuaacuagugaaagaaua

SEQ ID NO: 234597 - RNA, 20 nt, Artificial Sequence
  Synthetic
uuuuaacuagugaaagaaua

SEQ ID NO: 234598 - RNA, 21 nt, Artificial Sequence
  Synthetic
auuuuaacuagugaaagaaua

SEQ ID NO: 234599 - RNA, 22 nt, Artificial Sequence
  Synthetic
cauuuuaacuagugaaagaaua

SEQ ID NO: 234600 - RNA, 23 nt, Artificial Sequence
  Synthetic
acauuuuaacuagugaaagaaua

SEQ ID NO: 234601 - RNA, 24 nt, Artificial Sequence
  Synthetic
uacauuuuaacuagugaaagaaua

SEQ ID NO: 234602 - RNA, 18 nt, Artificial Sequence
  Synthetic
ucagagauugaaagaaua

SEQ ID NO: 234603 - RNA, 19 nt, Artificial Sequence
  Synthetic
uucagagauugaaagaaua

SEQ ID NO: 234604 - RNA, 20 nt, Artificial Sequence
  Synthetic
auucagagauugaaagaaua

SEQ ID NO: 234605 - RNA, 21 nt, Artificial Sequence
  Synthetic
cauucagagauugaaagaaua

SEQ ID NO: 234606 - RNA, 22 nt, Artificial Sequence
  Synthetic
acauucagagauugaaagaaua

SEQ ID NO: 234607 - RNA, 23 nt, Artificial Sequence
  Synthetic
aacauucagagauugaaagaaua

SEQ ID NO: 234608 - RNA, 24 nt, Artificial Sequence
  Synthetic
uaacauucagagauugaaagaaua

SEQ ID NO: 234609 - RNA, 18 nt, Artificial Sequence
  Synthetic
uugcucuuauaaagaaua

SEQ ID NO: 234610 - RNA, 19 nt, Artificial Sequence
  Synthetic
uuugcucuuauaaagaaua

SEQ ID NO: 234611 - RNA, 20 nt, Artificial Sequence
  Synthetic
uuuugcucuuauaaagaaua

SEQ ID NO: 234612 - RNA, 21 nt, Artificial Sequence
  Synthetic
uuuuugcucuuauaaagaaua

SEQ ID NO: 234613 - RNA, 22 nt, Artificial Sequence
  Synthetic
uuuuuugcucuuauaaagaaua

SEQ ID NO: 234614 - RNA, 23 nt, Artificial Sequence
  Synthetic
auuuuuugcucuuauaaagaaua

SEQ ID NO: 234615 - RNA, 24 nt, Artificial Sequence
  Synthetic
uauuuuuugcucuuauaaagaaua

SEQ ID NO: 234616 - RNA, 18 nt, Artificial Sequence
  Synthetic
aauagcuagagaagaaua

SEQ ID NO: 234617 - RNA, 19 nt, Artificial Sequence
  Synthetic
caauagcuagagaagaaua

SEQ ID NO: 234618 - RNA, 20 nt, Artificial Sequence
  Synthetic
gcaauagcuagagaagaaua

SEQ ID NO: 234619 - RNA, 21 nt, Artificial Sequence
  Synthetic
ggcaauagcuagagaagaaua

SEQ ID NO: 234620 - RNA, 22 nt, Artificial Sequence
  Synthetic
aggcaauagcuagagaagaaua

SEQ ID NO: 234621 - RNA, 23 nt, Artificial Sequence
  Synthetic
gaggcaauagcuagagaagaaua

SEQ ID NO: 234622 - RNA, 24 nt, Artificial Sequence
  Synthetic
ugaggcaauagcuagagaagaaua

SEQ ID NO: 234623 - RNA, 18 nt, Artificial Sequence
  Synthetic
aggaggagaaacagaaua

SEQ ID NO: 234624 - RNA, 19 nt, Artificial Sequence
  Synthetic
gaggaggagaaacagaaua

SEQ ID NO: 234625 - RNA, 20 nt, Artificial Sequence
  Synthetic
agaggaggagaaacagaaua

SEQ ID NO: 234626 - RNA, 21 nt, Artificial Sequence
  Synthetic
cagaggaggagaaacagaaua

SEQ ID NO: 234627 - RNA, 22 nt, Artificial Sequence
  Synthetic
ucagaggaggagaaacagaaua

SEQ ID NO: 234628 - RNA, 23 nt, Artificial Sequence
  Synthetic
uucagaggaggagaaacagaaua

SEQ ID NO: 234629 - RNA, 24 nt, Artificial Sequence
  Synthetic
cuucagaggaggagaaacagaaua

SEQ ID NO: 234630 - RNA, 18 nt, Artificial Sequence
  Synthetic
accaaaugaaacagaaua

SEQ ID NO: 234631 - RNA, 19 nt, Artificial Sequence
  Synthetic
gaccaaaugaaacagaaua

SEQ ID NO: 234632 - RNA, 20 nt, Artificial Sequence
  Synthetic
agaccaaaugaaacagaaua

SEQ ID NO: 234633 - RNA, 21 nt, Artificial Sequence
  Synthetic
uagaccaaaugaaacagaaua

SEQ ID NO: 234634 - RNA, 22 nt, Artificial Sequence
  Synthetic
auagaccaaaugaaacagaaua

SEQ ID NO: 234635 - RNA, 23 nt, Artificial Sequence
  Synthetic
cauagaccaaaugaaacagaaua

SEQ ID NO: 234636 - RNA, 24 nt, Artificial Sequence
  Synthetic
ucauagaccaaaugaaacagaaua

SEQ ID NO: 234637 - RNA, 18 nt, Artificial Sequence
  Synthetic
auaaaugccaacagaaua

SEQ ID NO: 234638 - RNA, 19 nt, Artificial Sequence
  Synthetic
gauaaaugccaacagaaua

SEQ ID NO: 234639 - RNA, 20 nt, Artificial Sequence
  Synthetic
ugauaaaugccaacagaaua

SEQ ID NO: 234640 - RNA, 21 nt, Artificial Sequence
  Synthetic
cugauaaaugccaacagaaua

SEQ ID NO: 234641 - RNA, 22 nt, Artificial Sequence
  Synthetic
ucugauaaaugccaacagaaua

SEQ ID NO: 234642 - RNA, 23 nt, Artificial Sequence
  Synthetic
uucugauaaaugccaacagaaua

SEQ ID NO: 234643 - RNA, 24 nt, Artificial Sequence
  Synthetic
auucugauaaaugccaacagaaua

SEQ ID NO: 234644 - RNA, 18 nt, Artificial Sequence
  Synthetic
gaccaauagaacagaaua

SEQ ID NO: 234645 - RNA, 19 nt, Artificial Sequence
  Synthetic
agaccaauagaacagaaua

SEQ ID NO: 234646 - RNA, 20 nt, Artificial Sequence
  Synthetic
uagaccaauagaacagaaua

SEQ ID NO: 234647 - RNA, 21 nt, Artificial Sequence
  Synthetic
auagaccaauagaacagaaua

SEQ ID NO: 234648 - RNA, 22 nt, Artificial Sequence
  Synthetic
cauagaccaauagaacagaaua

SEQ ID NO: 234649 - RNA, 23 nt, Artificial Sequence
  Synthetic
acauagaccaauagaacagaaua

SEQ ID NO: 234650 - RNA, 24 nt, Artificial Sequence
  Synthetic
cacauagaccaauagaacagaaua

SEQ ID NO: 234651 - RNA, 18 nt, Artificial Sequence
  Synthetic
gaccaguagaacagaaua

SEQ ID NO: 234652 - RNA, 19 nt, Artificial Sequence
  Synthetic
ggaccaguagaacagaaua

SEQ ID NO: 234653 - RNA, 20 nt, Artificial Sequence
  Synthetic
uggaccaguagaacagaaua

SEQ ID NO: 234654 - RNA, 21 nt, Artificial Sequence
  Synthetic
uuggaccaguagaacagaaua

SEQ ID NO: 234655 - RNA, 22 nt, Artificial Sequence
  Synthetic
cuuggaccaguagaacagaaua

SEQ ID NO: 234656 - RNA, 23 nt, Artificial Sequence
  Synthetic
acuuggaccaguagaacagaaua

SEQ ID NO: 234657 - RNA, 24 nt, Artificial Sequence
  Synthetic
aacuuggaccaguagaacagaaua

SEQ ID NO: 234658 - RNA, 18 nt, Artificial Sequence
  Synthetic
guuuaauuuaccagaaua

SEQ ID NO: 234659 - RNA, 19 nt, Artificial Sequence
  Synthetic
uguuuaauuuaccagaaua

SEQ ID NO: 234660 - RNA, 20 nt, Artificial Sequence
  Synthetic
cuguuuaauuuaccagaaua

SEQ ID NO: 234661 - RNA, 21 nt, Artificial Sequence
  Synthetic
ucuguuuaauuuaccagaaua

SEQ ID NO: 234662 - RNA, 22 nt, Artificial Sequence
  Synthetic
cucuguuuaauuuaccagaaua

SEQ ID NO: 234663 - RNA, 23 nt, Artificial Sequence
  Synthetic
acucuguuuaauuuaccagaaua

SEQ ID NO: 234664 - RNA, 24 nt, Artificial Sequence
  Synthetic
uacucuguuuaauuuaccagaaua

SEQ ID NO: 234665 - RNA, 18 nt, Artificial Sequence
  Synthetic
uuacuuaguaucagaaua

SEQ ID NO: 234666 - RNA, 19 nt, Artificial Sequence
  Synthetic
guuacuuaguaucagaaua

SEQ ID NO: 234667 - RNA, 20 nt, Artificial Sequence
  Synthetic
uguuacuuaguaucagaaua

SEQ ID NO: 234668 - RNA, 21 nt, Artificial Sequence
  Synthetic
guguuacuuaguaucagaaua

SEQ ID NO: 234669 - RNA, 22 nt, Artificial Sequence
  Synthetic
uguguuacuuaguaucagaaua

SEQ ID NO: 234670 - RNA, 23 nt, Artificial Sequence
  Synthetic
uuguguuacuuaguaucagaaua

SEQ ID NO: 234671 - RNA, 24 nt, Artificial Sequence
  Synthetic
cuuguguuacuuaguaucagaaua

SEQ ID NO: 234672 - RNA, 18 nt, Artificial Sequence
  Synthetic
acgcugaaucucagaaua

SEQ ID NO: 234673 - RNA, 19 nt, Artificial Sequence
  Synthetic
aacgcugaaucucagaaua

SEQ ID NO: 234674 - RNA, 20 nt, Artificial Sequence
  Synthetic
uaacgcugaaucucagaaua

SEQ ID NO: 234675 - RNA, 21 nt, Artificial Sequence
  Synthetic
auaacgcugaaucucagaaua

SEQ ID NO: 234676 - RNA, 22 nt, Artificial Sequence
  Synthetic
uauaacgcugaaucucagaaua

SEQ ID NO: 234677 - RNA, 23 nt, Artificial Sequence
  Synthetic
guauaacgcugaaucucagaaua

SEQ ID NO: 234678 - RNA, 24 nt, Artificial Sequence
  Synthetic
uguauaacgcugaaucucagaaua

SEQ ID NO: 234679 - RNA, 18 nt, Artificial Sequence
  Synthetic
uuguugugucucagaaua

SEQ ID NO: 234680 - RNA, 19 nt, Artificial Sequence
  Synthetic
auuguugugucucagaaua

SEQ ID NO: 234681 - RNA, 20 nt, Artificial Sequence
  Synthetic
uauuguugugucucagaaua

SEQ ID NO: 234682 - RNA, 21 nt, Artificial Sequence
  Synthetic
auauuguugugucucagaaua

SEQ ID NO: 234683 - RNA, 22 nt, Artificial Sequence
  Synthetic
aauauuguugugucucagaaua

SEQ ID NO: 234684 - RNA, 23 nt, Artificial Sequence
  Synthetic
caauauuguugugucucagaaua

SEQ ID NO: 234685 - RNA, 24 nt, Artificial Sequence
  Synthetic
ucaauauuguugugucucagaaua

SEQ ID NO: 234686 - RNA, 18 nt, Artificial Sequence
  Synthetic
uugaacacucagagaaua

SEQ ID NO: 234687 - RNA, 19 nt, Artificial Sequence
  Synthetic
cuugaacacucagagaaua

SEQ ID NO: 234688 - RNA, 20 nt, Artificial Sequence
  Synthetic
gcuugaacacucagagaaua

SEQ ID NO: 234689 - RNA, 21 nt, Artificial Sequence
  Synthetic
agcuugaacacucagagaaua

SEQ ID NO: 234690 - RNA, 22 nt, Artificial Sequence
  Synthetic
aagcuugaacacucagagaaua

SEQ ID NO: 234691 - RNA, 23 nt, Artificial Sequence
  Synthetic
aaagcuugaacacucagagaaua

SEQ ID NO: 234692 - RNA, 24 nt, Artificial Sequence
  Synthetic
aaaagcuugaacacucagagaaua

SEQ ID NO: 234693 - RNA, 18 nt, Artificial Sequence
  Synthetic
gagucaagguagagaaua

SEQ ID NO: 234694 - RNA, 19 nt, Artificial Sequence
  Synthetic
ugagucaagguagagaaua

SEQ ID NO: 234695 - RNA, 20 nt, Artificial Sequence
  Synthetic
uugagucaagguagagaaua

SEQ ID NO: 234696 - RNA, 21 nt, Artificial Sequence
  Synthetic
uuugagucaagguagagaaua

SEQ ID NO: 234697 - RNA, 22 nt, Artificial Sequence
  Synthetic
uuuugagucaagguagagaaua

SEQ ID NO: 234698 - RNA, 23 nt, Artificial Sequence
  Synthetic
cuuuugagucaagguagagaaua

SEQ ID NO: 234699 - RNA, 24 nt, Artificial Sequence
  Synthetic
acuuuugagucaagguagagaaua

SEQ ID NO: 234700 - RNA, 18 nt, Artificial Sequence
  Synthetic
cauuuucuuuagagaaua

SEQ ID NO: 234701 - RNA, 19 nt, Artificial Sequence
  Synthetic
ccauuuucuuuagagaaua

SEQ ID NO: 234702 - RNA, 20 nt, Artificial Sequence
  Synthetic
uccauuuucuuuagagaaua

SEQ ID NO: 234703 - RNA, 21 nt, Artificial Sequence
  Synthetic
guccauuuucuuuagagaaua

SEQ ID NO: 234704 - RNA, 22 nt, Artificial Sequence
  Synthetic
uguccauuuucuuuagagaaua

SEQ ID NO: 234705 - RNA, 23 nt, Artificial Sequence
  Synthetic
cuguccauuuucuuuagagaaua

SEQ ID NO: 234706 - RNA, 24 nt, Artificial Sequence
  Synthetic
ucuguccauuuucuuuagagaaua

SEQ ID NO: 234707 - RNA, 18 nt, Artificial Sequence
  Synthetic
guaaauaagaggagaaua

SEQ ID NO: 234708 - RNA, 19 nt, Artificial Sequence
  Synthetic
aguaaauaagaggagaaua

SEQ ID NO: 234709 - RNA, 20 nt, Artificial Sequence
  Synthetic
gaguaaauaagaggagaaua

SEQ ID NO: 234710 - RNA, 21 nt, Artificial Sequence
  Synthetic
ugaguaaauaagaggagaaua

SEQ ID NO: 234711 - RNA, 22 nt, Artificial Sequence
  Synthetic
gugaguaaauaagaggagaaua

SEQ ID NO: 234712 - RNA, 23 nt, Artificial Sequence
  Synthetic
ggugaguaaauaagaggagaaua

SEQ ID NO: 234713 - RNA, 24 nt, Artificial Sequence
  Synthetic
gggugaguaaauaagaggagaaua

SEQ ID NO: 234714 - RNA, 18 nt, Artificial Sequence
  Synthetic
ggggaaugguggagaaua

SEQ ID NO: 234715 - RNA, 19 nt, Artificial Sequence
  Synthetic
uggggaaugguggagaaua

SEQ ID NO: 234716 - RNA, 20 nt, Artificial Sequence
  Synthetic
uuggggaaugguggagaaua

SEQ ID NO: 234717 - RNA, 21 nt, Artificial Sequence
  Synthetic
cuuggggaaugguggagaaua

SEQ ID NO: 234718 - RNA, 22 nt, Artificial Sequence
  Synthetic
ccuuggggaaugguggagaaua

SEQ ID NO: 234719 - RNA, 23 nt, Artificial Sequence
  Synthetic
cccuuggggaaugguggagaaua

SEQ ID NO: 234720 - RNA, 24 nt, Artificial Sequence
  Synthetic
acccuuggggaaugguggagaaua

SEQ ID NO: 234721 - RNA, 18 nt, Artificial Sequence
  Synthetic
uucacuaaaaugagaaua

SEQ ID NO: 234722 - RNA, 19 nt, Artificial Sequence
  Synthetic
cuucacuaaaaugagaaua

SEQ ID NO: 234723 - RNA, 20 nt, Artificial Sequence
  Synthetic
ccuucacuaaaaugagaaua

SEQ ID NO: 234724 - RNA, 21 nt, Artificial Sequence
  Synthetic
accuucacuaaaaugagaaua

SEQ ID NO: 234725 - RNA, 22 nt, Artificial Sequence
  Synthetic
aaccuucacuaaaaugagaaua

SEQ ID NO: 234726 - RNA, 23 nt, Artificial Sequence
  Synthetic
uaaccuucacuaaaaugagaaua

SEQ ID NO: 234727 - RNA, 24 nt, Artificial Sequence
  Synthetic
uuaaccuucacuaaaaugagaaua

SEQ ID NO: 234728 - RNA, 18 nt, Artificial Sequence
  Synthetic
cccuguaaaaauagaaua

SEQ ID NO: 234729 - RNA, 19 nt, Artificial Sequence
  Synthetic
ccccuguaaaaauagaaua

SEQ ID NO: 234730 - RNA, 20 nt, Artificial Sequence
  Synthetic
cccccuguaaaaauagaaua

SEQ ID NO: 234731 - RNA, 21 nt, Artificial Sequence
  Synthetic
gcccccuguaaaaauagaaua

SEQ ID NO: 234732 - RNA, 22 nt, Artificial Sequence
  Synthetic
ugcccccuguaaaaauagaaua

SEQ ID NO: 234733 - RNA, 23 nt, Artificial Sequence
  Synthetic
augcccccuguaaaaauagaaua

SEQ ID NO: 234734 - RNA, 24 nt, Artificial Sequence
  Synthetic
aaugcccccuguaaaaauagaaua

SEQ ID NO: 234735 - RNA, 18 nt, Artificial Sequence
  Synthetic
uucaaaguaaauagaaua

SEQ ID NO: 234736 - RNA, 19 nt, Artificial Sequence
  Synthetic
guucaaaguaaauagaaua

SEQ ID NO: 234737 - RNA, 20 nt, Artificial Sequence
  Synthetic
uguucaaaguaaauagaaua

SEQ ID NO: 234738 - RNA, 21 nt, Artificial Sequence
  Synthetic
auguucaaaguaaauagaaua

SEQ ID NO: 234739 - RNA, 22 nt, Artificial Sequence
  Synthetic
aauguucaaaguaaauagaaua

SEQ ID NO: 234740 - RNA, 23 nt, Artificial Sequence
  Synthetic
uaauguucaaaguaaauagaaua

SEQ ID NO: 234741 - RNA, 24 nt, Artificial Sequence
  Synthetic
uuaauguucaaaguaaauagaaua

SEQ ID NO: 234742 - RNA, 18 nt, Artificial Sequence
  Synthetic
uaccauaucaauagaaua

SEQ ID NO: 234743 - RNA, 19 nt, Artificial Sequence
  Synthetic
auaccauaucaauagaaua

SEQ ID NO: 234744 - RNA, 20 nt, Artificial Sequence
  Synthetic
uauaccauaucaauagaaua

SEQ ID NO: 234745 - RNA, 21 nt, Artificial Sequence
  Synthetic
uuauaccauaucaauagaaua

SEQ ID NO: 234746 - RNA, 22 nt, Artificial Sequence
  Synthetic
auuauaccauaucaauagaaua

SEQ ID NO: 234747 - RNA, 23 nt, Artificial Sequence
  Synthetic
uauuauaccauaucaauagaaua

SEQ ID NO: 234748 - RNA, 24 nt, Artificial Sequence
  Synthetic
guauuauaccauaucaauagaaua

SEQ ID NO: 234749 - RNA, 18 nt, Artificial Sequence
  Synthetic
cuuccagauaauagaaua

SEQ ID NO: 234750 - RNA, 19 nt, Artificial Sequence
  Synthetic
acuuccagauaauagaaua

SEQ ID NO: 234751 - RNA, 20 nt, Artificial Sequence
  Synthetic
uacuuccagauaauagaaua

SEQ ID NO: 234752 - RNA, 21 nt, Artificial Sequence
  Synthetic
uuacuuccagauaauagaaua

SEQ ID NO: 234753 - RNA, 22 nt, Artificial Sequence
  Synthetic
cuuacuuccagauaauagaaua

SEQ ID NO: 234754 - RNA, 23 nt, Artificial Sequence
  Synthetic
acuuacuuccagauaauagaaua

SEQ ID NO: 234755 - RNA, 24 nt, Artificial Sequence
  Synthetic
aacuuacuuccagauaauagaaua

SEQ ID NO: 234756 - RNA, 18 nt, Artificial Sequence
  Synthetic
uaaggaauuacuagaaua

SEQ ID NO: 234757 - RNA, 19 nt, Artificial Sequence
  Synthetic
uuaaggaauuacuagaaua

SEQ ID NO: 234758 - RNA, 20 nt, Artificial Sequence
  Synthetic
auuaaggaauuacuagaaua

SEQ ID NO: 234759 - RNA, 21 nt, Artificial Sequence
  Synthetic
uauuaaggaauuacuagaaua

SEQ ID NO: 234760 - RNA, 22 nt, Artificial Sequence
  Synthetic
cuauuaaggaauuacuagaaua

SEQ ID NO: 234761 - RNA, 23 nt, Artificial Sequence
  Synthetic
ucuauuaaggaauuacuagaaua

SEQ ID NO: 234762 - RNA, 24 nt, Artificial Sequence
  Synthetic
uucuauuaaggaauuacuagaaua

SEQ ID NO: 234763 - RNA, 18 nt, Artificial Sequence
  Synthetic
cacucgaagucuagaaua

SEQ ID NO: 234764 - RNA, 19 nt, Artificial Sequence
  Synthetic
ucacucgaagucuagaaua

SEQ ID NO: 234765 - RNA, 20 nt, Artificial Sequence
  Synthetic
gucacucgaagucuagaaua

SEQ ID NO: 234766 - RNA, 21 nt, Artificial Sequence
  Synthetic
ggucacucgaagucuagaaua

SEQ ID NO: 234767 - RNA, 22 nt, Artificial Sequence
  Synthetic
gggucacucgaagucuagaaua

SEQ ID NO: 234768 - RNA, 23 nt, Artificial Sequence
  Synthetic
ugggucacucgaagucuagaaua

SEQ ID NO: 234769 - RNA, 24 nt, Artificial Sequence
  Synthetic
augggucacucgaagucuagaaua

SEQ ID NO: 234770 - RNA, 18 nt, Artificial Sequence
  Synthetic
caaagaauuucuagaaua

SEQ ID NO: 234771 - RNA, 19 nt, Artificial Sequence
  Synthetic
acaaagaauuucuagaaua

SEQ ID NO: 234772 - RNA, 20 nt, Artificial Sequence
  Synthetic
aacaaagaauuucuagaaua

SEQ ID NO: 234773 - RNA, 21 nt, Artificial Sequence
  Synthetic
aaacaaagaauuucuagaaua

SEQ ID NO: 234774 - RNA, 22 nt, Artificial Sequence
  Synthetic
gaaacaaagaauuucuagaaua

SEQ ID NO: 234775 - RNA, 23 nt, Artificial Sequence
  Synthetic
ggaaacaaagaauuucuagaaua

SEQ ID NO: 234776 - RNA, 24 nt, Artificial Sequence
  Synthetic
uggaaacaaagaauuucuagaaua

SEQ ID NO: 234777 - RNA, 18 nt, Artificial Sequence
  Synthetic
uuuaauggcuuuagaaua

SEQ ID NO: 234778 - RNA, 19 nt, Artificial Sequence
  Synthetic
uuuuaauggcuuuagaaua

SEQ ID NO: 234779 - RNA, 20 nt, Artificial Sequence
  Synthetic
uuuuuaauggcuuuagaaua

SEQ ID NO: 234780 - RNA, 21 nt, Artificial Sequence
  Synthetic
auuuuuaauggcuuuagaaua

SEQ ID NO: 234781 - RNA, 22 nt, Artificial Sequence
  Synthetic
gauuuuuaauggcuuuagaaua

SEQ ID NO: 234782 - RNA, 23 nt, Artificial Sequence
  Synthetic
agauuuuuaauggcuuuagaaua

SEQ ID NO: 234783 - RNA, 24 nt, Artificial Sequence
  Synthetic
aagauuuuuaauggcuuuagaaua

SEQ ID NO: 234784 - RNA, 18 nt, Artificial Sequence
  Synthetic
agcccgaggaaacgaaua

SEQ ID NO: 234785 - RNA, 19 nt, Artificial Sequence
  Synthetic
aagcccgaggaaacgaaua

SEQ ID NO: 234786 - RNA, 20 nt, Artificial Sequence
  Synthetic
gaagcccgaggaaacgaaua

SEQ ID NO: 234787 - RNA, 21 nt, Artificial Sequence
  Synthetic
agaagcccgaggaaacgaaua

SEQ ID NO: 234788 - RNA, 22 nt, Artificial Sequence
  Synthetic
cagaagcccgaggaaacgaaua

SEQ ID NO: 234789 - RNA, 23 nt, Artificial Sequence
  Synthetic
acagaagcccgaggaaacgaaua

SEQ ID NO: 234790 - RNA, 24 nt, Artificial Sequence
  Synthetic
uacagaagcccgaggaaacgaaua

SEQ ID NO: 234791 - RNA, 18 nt, Artificial Sequence
  Synthetic
aagagccaguaccgaaua

SEQ ID NO: 234792 - RNA, 19 nt, Artificial Sequence
  Synthetic
aaagagccaguaccgaaua

SEQ ID NO: 234793 - RNA, 20 nt, Artificial Sequence
  Synthetic
aaaagagccaguaccgaaua

SEQ ID NO: 234794 - RNA, 21 nt, Artificial Sequence
  Synthetic
gaaaagagccaguaccgaaua

SEQ ID NO: 234795 - RNA, 22 nt, Artificial Sequence
  Synthetic
agaaaagagccaguaccgaaua

SEQ ID NO: 234796 - RNA, 23 nt, Artificial Sequence
  Synthetic
cagaaaagagccaguaccgaaua

SEQ ID NO: 234797 - RNA, 24 nt, Artificial Sequence
  Synthetic
ucagaaaagagccaguaccgaaua

SEQ ID NO: 234798 - RNA, 18 nt, Artificial Sequence
  Synthetic
uucuggagacaaggaaua

SEQ ID NO: 234799 - RNA, 19 nt, Artificial Sequence
  Synthetic
uuucuggagacaaggaaua

SEQ ID NO: 234800 - RNA, 20 nt, Artificial Sequence
  Synthetic
cuuucuggagacaaggaaua

SEQ ID NO: 234801 - RNA, 21 nt, Artificial Sequence
  Synthetic
ucuuucuggagacaaggaaua

SEQ ID NO: 234802 - RNA, 22 nt, Artificial Sequence
  Synthetic
uucuuucuggagacaaggaaua

SEQ ID NO: 234803 - RNA, 23 nt, Artificial Sequence
  Synthetic
uuucuuucuggagacaaggaaua

SEQ ID NO: 234804 - RNA, 24 nt, Artificial Sequence
  Synthetic
uuuucuuucuggagacaaggaaua

SEQ ID NO: 234805 - RNA, 18 nt, Artificial Sequence
  Synthetic
ugcuugcugcuaggaaua

SEQ ID NO: 234806 - RNA, 19 nt, Artificial Sequence
  Synthetic
cugcuugcugcuaggaaua

SEQ ID NO: 234807 - RNA, 20 nt, Artificial Sequence
  Synthetic
acugcuugcugcuaggaaua

SEQ ID NO: 234808 - RNA, 21 nt, Artificial Sequence
  Synthetic
uacugcuugcugcuaggaaua

SEQ ID NO: 234809 - RNA, 22 nt, Artificial Sequence
  Synthetic
auacugcuugcugcuaggaaua

SEQ ID NO: 234810 - RNA, 23 nt, Artificial Sequence
  Synthetic
gauacugcuugcugcuaggaaua

SEQ ID NO: 234811 - RNA, 24 nt, Artificial Sequence
  Synthetic
agauacugcuugcugcuaggaaua

SEQ ID NO: 234812 - RNA, 18 nt, Artificial Sequence
  Synthetic
cagaauuucagcggaaua

SEQ ID NO: 234813 - RNA, 19 nt, Artificial Sequence
  Synthetic
acagaauuucagcggaaua

SEQ ID NO: 234814 - RNA, 20 nt, Artificial Sequence
  Synthetic
uacagaauuucagcggaaua

SEQ ID NO: 234815 - RNA, 21 nt, Artificial Sequence
  Synthetic
uuacagaauuucagcggaaua

SEQ ID NO: 234816 - RNA, 22 nt, Artificial Sequence
  Synthetic
cuuacagaauuucagcggaaua

SEQ ID NO: 234817 - RNA, 23 nt, Artificial Sequence
  Synthetic
ucuuacagaauuucagcggaaua

SEQ ID NO: 234818 - RNA, 24 nt, Artificial Sequence
  Synthetic
aucuuacagaauuucagcggaaua

SEQ ID NO: 234819 - RNA, 18 nt, Artificial Sequence
  Synthetic
cuggcggauaauggaaua

SEQ ID NO: 234820 - RNA, 19 nt, Artificial Sequence
  Synthetic
acuggcggauaauggaaua

SEQ ID NO: 234821 - RNA, 20 nt, Artificial Sequence
  Synthetic
gacuggcggauaauggaaua

SEQ ID NO: 234822 - RNA, 21 nt, Artificial Sequence
  Synthetic
agacuggcggauaauggaaua

SEQ ID NO: 234823 - RNA, 22 nt, Artificial Sequence
  Synthetic
cagacuggcggauaauggaaua

SEQ ID NO: 234824 - RNA, 23 nt, Artificial Sequence
  Synthetic
acagacuggcggauaauggaaua

SEQ ID NO: 234825 - RNA, 24 nt, Artificial Sequence
  Synthetic
aacagacuggcggauaauggaaua

SEQ ID NO: 234826 - RNA, 18 nt, Artificial Sequence
  Synthetic
auugcuuaaaguggaaua

SEQ ID NO: 234827 - RNA, 19 nt, Artificial Sequence
  Synthetic
uauugcuuaaaguggaaua

SEQ ID NO: 234828 - RNA, 20 nt, Artificial Sequence
  Synthetic
cuauugcuuaaaguggaaua

SEQ ID NO: 234829 - RNA, 21 nt, Artificial Sequence
  Synthetic
ucuauugcuuaaaguggaaua

SEQ ID NO: 234830 - RNA, 22 nt, Artificial Sequence
  Synthetic
gucuauugcuuaaaguggaaua

SEQ ID NO: 234831 - RNA, 23 nt, Artificial Sequence
  Synthetic
ugucuauugcuuaaaguggaaua

SEQ ID NO: 234832 - RNA, 24 nt, Artificial Sequence
  Synthetic
cugucuauugcuuaaaguggaaua

SEQ ID NO: 234833 - RNA, 18 nt, Artificial Sequence
  Synthetic
caaauggaccguggaaua

SEQ ID NO: 234834 - RNA, 19 nt, Artificial Sequence
  Synthetic
ucaaauggaccguggaaua

SEQ ID NO: 234835 - RNA, 20 nt, Artificial Sequence
  Synthetic
uucaaauggaccguggaaua

SEQ ID NO: 234836 - RNA, 21 nt, Artificial Sequence
  Synthetic
uuucaaauggaccguggaaua

SEQ ID NO: 234837 - RNA, 22 nt, Artificial Sequence
  Synthetic
cuuucaaauggaccguggaaua

SEQ ID NO: 234838 - RNA, 23 nt, Artificial Sequence
  Synthetic
gcuuucaaauggaccguggaaua

SEQ ID NO: 234839 - RNA, 24 nt, Artificial Sequence
  Synthetic
ugcuuucaaauggaccguggaaua

SEQ ID NO: 234840 - RNA, 18 nt, Artificial Sequence
  Synthetic
acaugaaaaauuggaaua

SEQ ID NO: 234841 - RNA, 19 nt, Artificial Sequence
  Synthetic
aacaugaaaaauuggaaua

SEQ ID NO: 234842 - RNA, 20 nt, Artificial Sequence
  Synthetic
gaacaugaaaaauuggaaua

SEQ ID NO: 234843 - RNA, 21 nt, Artificial Sequence
  Synthetic
agaacaugaaaaauuggaaua

SEQ ID NO: 234844 - RNA, 22 nt, Artificial Sequence
  Synthetic
cagaacaugaaaaauuggaaua

SEQ ID NO: 234845 - RNA, 23 nt, Artificial Sequence
  Synthetic
gcagaacaugaaaaauuggaaua

SEQ ID NO: 234846 - RNA, 24 nt, Artificial Sequence
  Synthetic
ugcagaacaugaaaaauuggaaua

SEQ ID NO: 234847 - RNA, 18 nt, Artificial Sequence
  Synthetic
uuaauaaggaaaugaaua

SEQ ID NO: 234848 - RNA, 19 nt, Artificial Sequence
  Synthetic
auuaauaaggaaaugaaua

SEQ ID NO: 234849 - RNA, 20 nt, Artificial Sequence
  Synthetic
cauuaauaaggaaaugaaua

SEQ ID NO: 234850 - RNA, 21 nt, Artificial Sequence
  Synthetic
gcauuaauaaggaaaugaaua

SEQ ID NO: 234851 - RNA, 22 nt, Artificial Sequence
  Synthetic
agcauuaauaaggaaaugaaua

SEQ ID NO: 234852 - RNA, 23 nt, Artificial Sequence
  Synthetic
gagcauuaauaaggaaaugaaua

SEQ ID NO: 234853 - RNA, 24 nt, Artificial Sequence
  Synthetic
ugagcauuaauaaggaaaugaaua

SEQ ID NO: 234854 - RNA, 18 nt, Artificial Sequence
  Synthetic
aaugaaauccaaugaaua

SEQ ID NO: 234855 - RNA, 19 nt, Artificial Sequence
  Synthetic
gaaugaaauccaaugaaua

SEQ ID NO: 234856 - RNA, 20 nt, Artificial Sequence
  Synthetic
agaaugaaauccaaugaaua

SEQ ID NO: 234857 - RNA, 21 nt, Artificial Sequence
  Synthetic
gagaaugaaauccaaugaaua

SEQ ID NO: 234858 - RNA, 22 nt, Artificial Sequence
  Synthetic
agagaaugaaauccaaugaaua

SEQ ID NO: 234859 - RNA, 23 nt, Artificial Sequence
  Synthetic
uagagaaugaaauccaaugaaua

SEQ ID NO: 234860 - RNA, 24 nt, Artificial Sequence
  Synthetic
cuagagaaugaaauccaaugaaua

SEQ ID NO: 234861 - RNA, 18 nt, Artificial Sequence
  Synthetic
auauccucuccaugaaua

SEQ ID NO: 234862 - RNA, 19 nt, Artificial Sequence
  Synthetic
cauauccucuccaugaaua

SEQ ID NO: 234863 - RNA, 20 nt, Artificial Sequence
  Synthetic
ucauauccucuccaugaaua

SEQ ID NO: 234864 - RNA, 21 nt, Artificial Sequence
  Synthetic
aucauauccucuccaugaaua

SEQ ID NO: 234865 - RNA, 22 nt, Artificial Sequence
  Synthetic
aaucauauccucuccaugaaua

SEQ ID NO: 234866 - RNA, 23 nt, Artificial Sequence
  Synthetic
uaaucauauccucuccaugaaua

SEQ ID NO: 234867 - RNA, 24 nt, Artificial Sequence
  Synthetic
cuaaucauauccucuccaugaaua

SEQ ID NO: 234868 - RNA, 18 nt, Artificial Sequence
  Synthetic
auaaacaaagcaugaaua

SEQ ID NO: 234869 - RNA, 19 nt, Artificial Sequence
  Synthetic
aauaaacaaagcaugaaua

SEQ ID NO: 234870 - RNA, 20 nt, Artificial Sequence
  Synthetic
aaauaaacaaagcaugaaua

SEQ ID NO: 234871 - RNA, 21 nt, Artificial Sequence
  Synthetic
aaaauaaacaaagcaugaaua

SEQ ID NO: 234872 - RNA, 22 nt, Artificial Sequence
  Synthetic
gaaaauaaacaaagcaugaaua

SEQ ID NO: 234873 - RNA, 23 nt, Artificial Sequence
  Synthetic
agaaaauaaacaaagcaugaaua

SEQ ID NO: 234874 - RNA, 24 nt, Artificial Sequence
  Synthetic
gagaaaauaaacaaagcaugaaua

SEQ ID NO: 234875 - RNA, 18 nt, Artificial Sequence
  Synthetic
caaugaacagacugaaua

SEQ ID NO: 234876 - RNA, 19 nt, Artificial Sequence
  Synthetic
ucaaugaacagacugaaua

SEQ ID NO: 234877 - RNA, 20 nt, Artificial Sequence
  Synthetic
aucaaugaacagacugaaua

SEQ ID NO: 234878 - RNA, 21 nt, Artificial Sequence
  Synthetic
uaucaaugaacagacugaaua

SEQ ID NO: 234879 - RNA, 22 nt, Artificial Sequence
  Synthetic
cuaucaaugaacagacugaaua

SEQ ID NO: 234880 - RNA, 23 nt, Artificial Sequence
  Synthetic
ccuaucaaugaacagacugaaua

SEQ ID NO: 234881 - RNA, 24 nt, Artificial Sequence
  Synthetic
gccuaucaaugaacagacugaaua

SEQ ID NO: 234882 - RNA, 18 nt, Artificial Sequence
  Synthetic
ggacugguaggcugaaua

SEQ ID NO: 234883 - RNA, 19 nt, Artificial Sequence
  Synthetic
uggacugguaggcugaaua

SEQ ID NO: 234884 - RNA, 20 nt, Artificial Sequence
  Synthetic
uuggacugguaggcugaaua

SEQ ID NO: 234885 - RNA, 21 nt, Artificial Sequence
  Synthetic
guuggacugguaggcugaaua

SEQ ID NO: 234886 - RNA, 22 nt, Artificial Sequence
  Synthetic
aguuggacugguaggcugaaua

SEQ ID NO: 234887 - RNA, 23 nt, Artificial Sequence
  Synthetic
aaguuggacugguaggcugaaua

SEQ ID NO: 234888 - RNA, 24 nt, Artificial Sequence
  Synthetic
caaguuggacugguaggcugaaua

SEQ ID NO: 234889 - RNA, 18 nt, Artificial Sequence
  Synthetic
acagacacaugcugaaua

SEQ ID NO: 234890 - RNA, 19 nt, Artificial Sequence
  Synthetic
uacagacacaugcugaaua

SEQ ID NO: 234891 - RNA, 20 nt, Artificial Sequence
  Synthetic
guacagacacaugcugaaua

SEQ ID NO: 234892 - RNA, 21 nt, Artificial Sequence
  Synthetic
uguacagacacaugcugaaua

SEQ ID NO: 234893 - RNA, 22 nt, Artificial Sequence
  Synthetic
auguacagacacaugcugaaua

SEQ ID NO: 234894 - RNA, 23 nt, Artificial Sequence
  Synthetic
uauguacagacacaugcugaaua

SEQ ID NO: 234895 - RNA, 24 nt, Artificial Sequence
  Synthetic
auauguacagacacaugcugaaua

SEQ ID NO: 234896 - RNA, 18 nt, Artificial Sequence
  Synthetic
ucucuugcuugcugaaua

SEQ ID NO: 234897 - RNA, 19 nt, Artificial Sequence
  Synthetic
uucucuugcuugcugaaua

SEQ ID NO: 234898 - RNA, 20 nt, Artificial Sequence
  Synthetic
cuucucuugcuugcugaaua

SEQ ID NO: 234899 - RNA, 21 nt, Artificial Sequence
  Synthetic
ccuucucuugcuugcugaaua

SEQ ID NO: 234900 - RNA, 22 nt, Artificial Sequence
  Synthetic
cccuucucuugcuugcugaaua

SEQ ID NO: 234901 - RNA, 23 nt, Artificial Sequence
  Synthetic
ucccuucucuugcuugcugaaua

SEQ ID NO: 234902 - RNA, 24 nt, Artificial Sequence
  Synthetic
cucccuucucuugcuugcugaaua

SEQ ID NO: 234903 - RNA, 18 nt, Artificial Sequence
  Synthetic
cagguguaauucugaaua

SEQ ID NO: 234904 - RNA, 19 nt, Artificial Sequence
  Synthetic
gcagguguaauucugaaua

SEQ ID NO: 234905 - RNA, 20 nt, Artificial Sequence
  Synthetic
ggcagguguaauucugaaua

SEQ ID NO: 234906 - RNA, 21 nt, Artificial Sequence
  Synthetic
gggcagguguaauucugaaua

SEQ ID NO: 234907 - RNA, 22 nt, Artificial Sequence
  Synthetic
ugggcagguguaauucugaaua

SEQ ID NO: 234908 - RNA, 23 nt, Artificial Sequence
  Synthetic
augggcagguguaauucugaaua

SEQ ID NO: 234909 - RNA, 24 nt, Artificial Sequence
  Synthetic
aaugggcagguguaauucugaaua

SEQ ID NO: 234910 - RNA, 18 nt, Artificial Sequence
  Synthetic
uuuacucggcagugaaua

SEQ ID NO: 234911 - RNA, 19 nt, Artificial Sequence
  Synthetic
uuuuacucggcagugaaua

SEQ ID NO: 234912 - RNA, 20 nt, Artificial Sequence
  Synthetic
auuuuacucggcagugaaua

SEQ ID NO: 234913 - RNA, 21 nt, Artificial Sequence
  Synthetic
aauuuuacucggcagugaaua

SEQ ID NO: 234914 - RNA, 22 nt, Artificial Sequence
  Synthetic
gaauuuuacucggcagugaaua

SEQ ID NO: 234915 - RNA, 23 nt, Artificial Sequence
  Synthetic
ggaauuuuacucggcagugaaua

SEQ ID NO: 234916 - RNA, 24 nt, Artificial Sequence
  Synthetic
uggaauuuuacucggcagugaaua

SEQ ID NO: 234917 - RNA, 18 nt, Artificial Sequence
  Synthetic
guauuuauucagugaaua

SEQ ID NO: 234918 - RNA, 19 nt, Artificial Sequence
  Synthetic
aguauuuauucagugaaua

SEQ ID NO: 234919 - RNA, 20 nt, Artificial Sequence
  Synthetic
aaguauuuauucagugaaua

SEQ ID NO: 234920 - RNA, 21 nt, Artificial Sequence
  Synthetic
aaaguauuuauucagugaaua

SEQ ID NO: 234921 - RNA, 22 nt, Artificial Sequence
  Synthetic
uaaaguauuuauucagugaaua

SEQ ID NO: 234922 - RNA, 23 nt, Artificial Sequence
  Synthetic
auaaaguauuuauucagugaaua

SEQ ID NO: 234923 - RNA, 24 nt, Artificial Sequence
  Synthetic
uauaaaguauuuauucagugaaua

SEQ ID NO: 234924 - RNA, 18 nt, Artificial Sequence
  Synthetic
uggaagcaauagugaaua

SEQ ID NO: 234925 - RNA, 19 nt, Artificial Sequence
  Synthetic
auggaagcaauagugaaua

SEQ ID NO: 234926 - RNA, 20 nt, Artificial Sequence
  Synthetic
aauggaagcaauagugaaua

SEQ ID NO: 234927 - RNA, 21 nt, Artificial Sequence
  Synthetic
aaauggaagcaauagugaaua

SEQ ID NO: 234928 - RNA, 22 nt, Artificial Sequence
  Synthetic
gaaauggaagcaauagugaaua

SEQ ID NO: 234929 - RNA, 23 nt, Artificial Sequence
  Synthetic
ugaaauggaagcaauagugaaua

SEQ ID NO: 234930 - RNA, 24 nt, Artificial Sequence
  Synthetic
cugaaauggaagcaauagugaaua

SEQ ID NO: 234931 - RNA, 18 nt, Artificial Sequence
  Synthetic
gugcuaaaaaugugaaua

SEQ ID NO: 234932 - RNA, 19 nt, Artificial Sequence
  Synthetic
ugugcuaaaaaugugaaua

SEQ ID NO: 234933 - RNA, 20 nt, Artificial Sequence
  Synthetic
uugugcuaaaaaugugaaua

SEQ ID NO: 234934 - RNA, 21 nt, Artificial Sequence
  Synthetic
uuugugcuaaaaaugugaaua

SEQ ID NO: 234935 - RNA, 22 nt, Artificial Sequence
  Synthetic
uuuugugcuaaaaaugugaaua

SEQ ID NO: 234936 - RNA, 23 nt, Artificial Sequence
  Synthetic
cuuuugugcuaaaaaugugaaua

SEQ ID NO: 234937 - RNA, 24 nt, Artificial Sequence
  Synthetic
gcuuuugugcuaaaaaugugaaua

SEQ ID NO: 234938 - RNA, 18 nt, Artificial Sequence
  Synthetic
uaaggauauaugugaaua

SEQ ID NO: 234939 - RNA, 19 nt, Artificial Sequence
  Synthetic
uuaaggauauaugugaaua

SEQ ID NO: 234940 - RNA, 20 nt, Artificial Sequence
  Synthetic
auuaaggauauaugugaaua

SEQ ID NO: 234941 - RNA, 21 nt, Artificial Sequence
  Synthetic
gauuaaggauauaugugaaua

SEQ ID NO: 234942 - RNA, 22 nt, Artificial Sequence
  Synthetic
ugauuaaggauauaugugaaua

SEQ ID NO: 234943 - RNA, 23 nt, Artificial Sequence
  Synthetic
augauuaaggauauaugugaaua

SEQ ID NO: 234944 - RNA, 24 nt, Artificial Sequence
  Synthetic
uaugauuaaggauauaugugaaua

SEQ ID NO: 234945 - RNA, 18 nt, Artificial Sequence
  Synthetic
aaagggcaaacuugaaua

SEQ ID NO: 234946 - RNA, 19 nt, Artificial Sequence
  Synthetic
gaaagggcaaacuugaaua

SEQ ID NO: 234947 - RNA, 20 nt, Artificial Sequence
  Synthetic
agaaagggcaaacuugaaua

SEQ ID NO: 234948 - RNA, 21 nt, Artificial Sequence
  Synthetic
gagaaagggcaaacuugaaua

SEQ ID NO: 234949 - RNA, 22 nt, Artificial Sequence
  Synthetic
ggagaaagggcaaacuugaaua

SEQ ID NO: 234950 - RNA, 23 nt, Artificial Sequence
  Synthetic
uggagaaagggcaaacuugaaua

SEQ ID NO: 234951 - RNA, 24 nt, Artificial Sequence
  Synthetic
guggagaaagggcaaacuugaaua

SEQ ID NO: 234952 - RNA, 18 nt, Artificial Sequence
  Synthetic
aggccuugagcuugaaua

SEQ ID NO: 234953 - RNA, 19 nt, Artificial Sequence
  Synthetic
aaggccuugagcuugaaua

SEQ ID NO: 234954 - RNA, 20 nt, Artificial Sequence
  Synthetic
aaaggccuugagcuugaaua

SEQ ID NO: 234955 - RNA, 21 nt, Artificial Sequence
  Synthetic
uaaaggccuugagcuugaaua

SEQ ID NO: 234956 - RNA, 22 nt, Artificial Sequence
  Synthetic
uuaaaggccuugagcuugaaua

SEQ ID NO: 234957 - RNA, 23 nt, Artificial Sequence
  Synthetic
uuuaaaggccuugagcuugaaua

SEQ ID NO: 234958 - RNA, 24 nt, Artificial Sequence
  Synthetic
auuuaaaggccuugagcuugaaua

SEQ ID NO: 234959 - RNA, 18 nt, Artificial Sequence
  Synthetic
aauugaugagguugaaua

SEQ ID NO: 234960 - RNA, 19 nt, Artificial Sequence
  Synthetic
aaauugaugagguugaaua

SEQ ID NO: 234961 - RNA, 20 nt, Artificial Sequence
  Synthetic
gaaauugaugagguugaaua

SEQ ID NO: 234962 - RNA, 21 nt, Artificial Sequence
  Synthetic
agaaauugaugagguugaaua

SEQ ID NO: 234963 - RNA, 22 nt, Artificial Sequence
  Synthetic
aagaaauugaugagguugaaua

SEQ ID NO: 234964 - RNA, 23 nt, Artificial Sequence
  Synthetic
gaagaaauugaugagguugaaua

SEQ ID NO: 234965 - RNA, 24 nt, Artificial Sequence
  Synthetic
ggaagaaauugaugagguugaaua

SEQ ID NO: 234966 - RNA, 18 nt, Artificial Sequence
  Synthetic
ugcccaauaauuugaaua

SEQ ID NO: 234967 - RNA, 19 nt, Artificial Sequence
  Synthetic
uugcccaauaauuugaaua

SEQ ID NO: 234968 - RNA, 20 nt, Artificial Sequence
  Synthetic
uuugcccaauaauuugaaua

SEQ ID NO: 234969 - RNA, 21 nt, Artificial Sequence
  Synthetic
auuugcccaauaauuugaaua

SEQ ID NO: 234970 - RNA, 22 nt, Artificial Sequence
  Synthetic
cauuugcccaauaauuugaaua

SEQ ID NO: 234971 - RNA, 23 nt, Artificial Sequence
  Synthetic
acauuugcccaauaauuugaaua

SEQ ID NO: 234972 - RNA, 24 nt, Artificial Sequence
  Synthetic
aacauuugcccaauaauuugaaua

SEQ ID NO: 234973 - RNA, 18 nt, Artificial Sequence
  Synthetic
cuggggacauuuugaaua

SEQ ID NO: 234974 - RNA, 19 nt, Artificial Sequence
  Synthetic
acuggggacauuuugaaua

SEQ ID NO: 234975 - RNA, 20 nt, Artificial Sequence
  Synthetic
uacuggggacauuuugaaua

SEQ ID NO: 234976 - RNA, 21 nt, Artificial Sequence
  Synthetic
auacuggggacauuuugaaua

SEQ ID NO: 234977 - RNA, 22 nt, Artificial Sequence
  Synthetic
uauacuggggacauuuugaaua

SEQ ID NO: 234978 - RNA, 23 nt, Artificial Sequence
  Synthetic
guauacuggggacauuuugaaua

SEQ ID NO: 234979 - RNA, 24 nt, Artificial Sequence
  Synthetic
aguauacuggggacauuuugaaua

SEQ ID NO: 234980 - RNA, 18 nt, Artificial Sequence
  Synthetic
auagacuacaaaauaaua

SEQ ID NO: 234981 - RNA, 19 nt, Artificial Sequence
  Synthetic
uauagacuacaaaauaaua

SEQ ID NO: 234982 - RNA, 20 nt, Artificial Sequence
  Synthetic
uuauagacuacaaaauaaua

SEQ ID NO: 234983 - RNA, 21 nt, Artificial Sequence
  Synthetic
auuauagacuacaaaauaaua

SEQ ID NO: 234984 - RNA, 22 nt, Artificial Sequence
  Synthetic
uauuauagacuacaaaauaaua

SEQ ID NO: 234985 - RNA, 23 nt, Artificial Sequence
  Synthetic
uuauuauagacuacaaaauaaua

SEQ ID NO: 234986 - RNA, 24 nt, Artificial Sequence
  Synthetic
auuauuauagacuacaaaauaaua

SEQ ID NO: 234987 - RNA, 18 nt, Artificial Sequence
  Synthetic
caaguauuccaaauaaua

SEQ ID NO: 234988 - RNA, 19 nt, Artificial Sequence
  Synthetic
acaaguauuccaaauaaua

SEQ ID NO: 234989 - RNA, 20 nt, Artificial Sequence
  Synthetic
aacaaguauuccaaauaaua

SEQ ID NO: 234990 - RNA, 21 nt, Artificial Sequence
  Synthetic
uaacaaguauuccaaauaaua

SEQ ID NO: 234991 - RNA, 22 nt, Artificial Sequence
  Synthetic
cuaacaaguauuccaaauaaua

SEQ ID NO: 234992 - RNA, 23 nt, Artificial Sequence
  Synthetic
gcuaacaaguauuccaaauaaua

SEQ ID NO: 234993 - RNA, 24 nt, Artificial Sequence
  Synthetic
agcuaacaaguauuccaaauaaua

SEQ ID NO: 234994 - RNA, 18 nt, Artificial Sequence
  Synthetic
ucaaaaguucaaauaaua

SEQ ID NO: 234995 - RNA, 19 nt, Artificial Sequence
  Synthetic
cucaaaaguucaaauaaua

SEQ ID NO: 234996 - RNA, 20 nt, Artificial Sequence
  Synthetic
ucucaaaaguucaaauaaua

SEQ ID NO: 234997 - RNA, 21 nt, Artificial Sequence
  Synthetic
aucucaaaaguucaaauaaua

SEQ ID NO: 234998 - RNA, 22 nt, Artificial Sequence
  Synthetic
aaucucaaaaguucaaauaaua

SEQ ID NO: 234999 - RNA, 23 nt, Artificial Sequence
  Synthetic
aaaucucaaaaguucaaauaaua

SEQ ID NO: 235000 - RNA, 24 nt, Artificial Sequence
  Synthetic
aaaaucucaaaaguucaaauaaua

SEQ ID NO: 235001 - RNA, 18 nt, Artificial Sequence
  Synthetic
ccagaaauguaaauaaua

SEQ ID NO: 235002 - RNA, 19 nt, Artificial Sequence
  Synthetic
uccagaaauguaaauaaua

SEQ ID NO: 235003 - RNA, 20 nt, Artificial Sequence
  Synthetic
uuccagaaauguaaauaaua

SEQ ID NO: 235004 - RNA, 21 nt, Artificial Sequence
  Synthetic
cuuccagaaauguaaauaaua

SEQ ID NO: 235005 - RNA, 22 nt, Artificial Sequence
  Synthetic
gcuuccagaaauguaaauaaua

SEQ ID NO: 235006 - RNA, 23 nt, Artificial Sequence
  Synthetic
ugcuuccagaaauguaaauaaua

SEQ ID NO: 235007 - RNA, 24 nt, Artificial Sequence
  Synthetic
uugcuuccagaaauguaaauaaua

SEQ ID NO: 235008 - RNA, 18 nt, Artificial Sequence
  Synthetic
ccaguaacaacaauaaua

SEQ ID NO: 235009 - RNA, 19 nt, Artificial Sequence
  Synthetic
accaguaacaacaauaaua

SEQ ID NO: 235010 - RNA, 20 nt, Artificial Sequence
  Synthetic
caccaguaacaacaauaaua

SEQ ID NO: 235011 - RNA, 21 nt, Artificial Sequence
  Synthetic
ccaccaguaacaacaauaaua

SEQ ID NO: 235012 - RNA, 22 nt, Artificial Sequence
  Synthetic
accaccaguaacaacaauaaua

SEQ ID NO: 235013 - RNA, 23 nt, Artificial Sequence
  Synthetic
uaccaccaguaacaacaauaaua

SEQ ID NO: 235014 - RNA, 24 nt, Artificial Sequence
  Synthetic
uuaccaccaguaacaacaauaaua

SEQ ID NO: 235015 - RNA, 18 nt, Artificial Sequence
  Synthetic
gaugcccauacaauaaua

SEQ ID NO: 235016 - RNA, 19 nt, Artificial Sequence
  Synthetic
agaugcccauacaauaaua

SEQ ID NO: 235017 - RNA, 20 nt, Artificial Sequence
  Synthetic
uagaugcccauacaauaaua

SEQ ID NO: 235018 - RNA, 21 nt, Artificial Sequence
  Synthetic
auagaugcccauacaauaaua

SEQ ID NO: 235019 - RNA, 22 nt, Artificial Sequence
  Synthetic
cauagaugcccauacaauaaua

SEQ ID NO: 235020 - RNA, 23 nt, Artificial Sequence
  Synthetic
acauagaugcccauacaauaaua

SEQ ID NO: 235021 - RNA, 24 nt, Artificial Sequence
  Synthetic
gacauagaugcccauacaauaaua

SEQ ID NO: 235022 - RNA, 18 nt, Artificial Sequence
  Synthetic
gucucugcaucaauaaua

SEQ ID NO: 235023 - RNA, 19 nt, Artificial Sequence
  Synthetic
ugucucugcaucaauaaua

SEQ ID NO: 235024 - RNA, 20 nt, Artificial Sequence
  Synthetic
augucucugcaucaauaaua

SEQ ID NO: 235025 - RNA, 21 nt, Artificial Sequence
  Synthetic
aaugucucugcaucaauaaua

SEQ ID NO: 235026 - RNA, 22 nt, Artificial Sequence
  Synthetic
aaaugucucugcaucaauaaua

SEQ ID NO: 235027 - RNA, 23 nt, Artificial Sequence
  Synthetic
uaaaugucucugcaucaauaaua

SEQ ID NO: 235028 - RNA, 24 nt, Artificial Sequence
  Synthetic
auaaaugucucugcaucaauaaua

SEQ ID NO: 235029 - RNA, 18 nt, Artificial Sequence
  Synthetic
gccaaauguucaauaaua

SEQ ID NO: 235030 - RNA, 19 nt, Artificial Sequence
  Synthetic
ggccaaauguucaauaaua

SEQ ID NO: 235031 - RNA, 20 nt, Artificial Sequence
  Synthetic
uggccaaauguucaauaaua

SEQ ID NO: 235032 - RNA, 21 nt, Artificial Sequence
  Synthetic
auggccaaauguucaauaaua

SEQ ID NO: 235033 - RNA, 22 nt, Artificial Sequence
  Synthetic
uauggccaaauguucaauaaua

SEQ ID NO: 235034 - RNA, 23 nt, Artificial Sequence
  Synthetic
auauggccaaauguucaauaaua

SEQ ID NO: 235035 - RNA, 24 nt, Artificial Sequence
  Synthetic
gauauggccaaauguucaauaaua

SEQ ID NO: 235036 - RNA, 18 nt, Artificial Sequence
  Synthetic
uuuggaucaagaauaaua

SEQ ID NO: 235037 - RNA, 19 nt, Artificial Sequence
  Synthetic
uuuuggaucaagaauaaua

SEQ ID NO: 235038 - RNA, 20 nt, Artificial Sequence
  Synthetic
guuuuggaucaagaauaaua

SEQ ID NO: 235039 - RNA, 21 nt, Artificial Sequence
  Synthetic
aguuuuggaucaagaauaaua

SEQ ID NO: 235040 - RNA, 22 nt, Artificial Sequence
  Synthetic
caguuuuggaucaagaauaaua

SEQ ID NO: 235041 - RNA, 23 nt, Artificial Sequence
  Synthetic
gcaguuuuggaucaagaauaaua

SEQ ID NO: 235042 - RNA, 24 nt, Artificial Sequence
  Synthetic
ggcaguuuuggaucaagaauaaua

SEQ ID NO: 235043 - RNA, 18 nt, Artificial Sequence
  Synthetic
aguugaaguagaauaaua

SEQ ID NO: 235044 - RNA, 19 nt, Artificial Sequence
  Synthetic
gaguugaaguagaauaaua

SEQ ID NO: 235045 - RNA, 20 nt, Artificial Sequence
  Synthetic
ugaguugaaguagaauaaua

SEQ ID NO: 235046 - RNA, 21 nt, Artificial Sequence
  Synthetic
cugaguugaaguagaauaaua

SEQ ID NO: 235047 - RNA, 22 nt, Artificial Sequence
  Synthetic
gcugaguugaaguagaauaaua

SEQ ID NO: 235048 - RNA, 23 nt, Artificial Sequence
  Synthetic
ugcugaguugaaguagaauaaua

SEQ ID NO: 235049 - RNA, 24 nt, Artificial Sequence
  Synthetic
uugcugaguugaaguagaauaaua

SEQ ID NO: 235050 - RNA, 18 nt, Artificial Sequence
  Synthetic
gagaggaaaugaauaaua

SEQ ID NO: 235051 - RNA, 19 nt, Artificial Sequence
  Synthetic
agagaggaaaugaauaaua

SEQ ID NO: 235052 - RNA, 20 nt, Artificial Sequence
  Synthetic
aagagaggaaaugaauaaua

SEQ ID NO: 235053 - RNA, 21 nt, Artificial Sequence
  Synthetic
uaagagaggaaaugaauaaua

SEQ ID NO: 235054 - RNA, 22 nt, Artificial Sequence
  Synthetic
uuaagagaggaaaugaauaaua

SEQ ID NO: 235055 - RNA, 23 nt, Artificial Sequence
  Synthetic
auuaagagaggaaaugaauaaua

SEQ ID NO: 235056 - RNA, 24 nt, Artificial Sequence
  Synthetic
uauuaagagaggaaaugaauaaua

SEQ ID NO: 235057 - RNA, 18 nt, Artificial Sequence
  Synthetic
uaaaaaacaauaauaaua

SEQ ID NO: 235058 - RNA, 19 nt, Artificial Sequence
  Synthetic
uuaaaaaacaauaauaaua

SEQ ID NO: 235059 - RNA, 20 nt, Artificial Sequence
  Synthetic
guuaaaaaacaauaauaaua

SEQ ID NO: 235060 - RNA, 21 nt, Artificial Sequence
  Synthetic
gguuaaaaaacaauaauaaua

SEQ ID NO: 235061 - RNA, 22 nt, Artificial Sequence
  Synthetic
ugguuaaaaaacaauaauaaua

SEQ ID NO: 235062 - RNA, 23 nt, Artificial Sequence
  Synthetic
augguuaaaaaacaauaauaaua

SEQ ID NO: 235063 - RNA, 24 nt, Artificial Sequence
  Synthetic
aaugguuaaaaaacaauaauaaua

SEQ ID NO: 235064 - RNA, 18 nt, Artificial Sequence
  Synthetic
aauaauaacauaauaaua

SEQ ID NO: 235065 - RNA, 19 nt, Artificial Sequence
  Synthetic
aaauaauaacauaauaaua

SEQ ID NO: 235066 - RNA, 20 nt, Artificial Sequence
  Synthetic
uaaauaauaacauaauaaua

SEQ ID NO: 235067 - RNA, 21 nt, Artificial Sequence
  Synthetic
guaaauaauaacauaauaaua

SEQ ID NO: 235068 - RNA, 22 nt, Artificial Sequence
  Synthetic
aguaaauaauaacauaauaaua

SEQ ID NO: 235069 - RNA, 23 nt, Artificial Sequence
  Synthetic
caguaaauaauaacauaauaaua

SEQ ID NO: 235070 - RNA, 24 nt, Artificial Sequence
  Synthetic
acaguaaauaauaacauaauaaua

SEQ ID NO: 235071 - RNA, 18 nt, Artificial Sequence
  Synthetic
ugaagaccuauaauaaua

SEQ ID NO: 235072 - RNA, 19 nt, Artificial Sequence
  Synthetic
cugaagaccuauaauaaua

SEQ ID NO: 235073 - RNA, 20 nt, Artificial Sequence
  Synthetic
acugaagaccuauaauaaua

SEQ ID NO: 235074 - RNA, 21 nt, Artificial Sequence
  Synthetic
aacugaagaccuauaauaaua

SEQ ID NO: 235075 - RNA, 22 nt, Artificial Sequence
  Synthetic
aaacugaagaccuauaauaaua

SEQ ID NO: 235076 - RNA, 23 nt, Artificial Sequence
  Synthetic
gaaacugaagaccuauaauaaua

SEQ ID NO: 235077 - RNA, 24 nt, Artificial Sequence
  Synthetic
agaaacugaagaccuauaauaaua

SEQ ID NO: 235078 - RNA, 18 nt, Artificial Sequence
  Synthetic
uuaucauuauuaauaaua

SEQ ID NO: 235079 - RNA, 19 nt, Artificial Sequence
  Synthetic
auuaucauuauuaauaaua

SEQ ID NO: 235080 - RNA, 20 nt, Artificial Sequence
  Synthetic
uauuaucauuauuaauaaua

SEQ ID NO: 235081 - RNA, 21 nt, Artificial Sequence
  Synthetic
uuauuaucauuauuaauaaua

SEQ ID NO: 235082 - RNA, 22 nt, Artificial Sequence
  Synthetic
uuuauuaucauuauuaauaaua

SEQ ID NO: 235083 - RNA, 23 nt, Artificial Sequence
  Synthetic
uuuuauuaucauuauuaauaaua

SEQ ID NO: 235084 - RNA, 24 nt, Artificial Sequence
  Synthetic
auuuuauuaucauuauuaauaaua

SEQ ID NO: 235085 - RNA, 18 nt, Artificial Sequence
  Synthetic
cagggguauuuaauaaua

SEQ ID NO: 235086 - RNA, 19 nt, Artificial Sequence
  Synthetic
acagggguauuuaauaaua

SEQ ID NO: 235087 - RNA, 20 nt, Artificial Sequence
  Synthetic
uacagggguauuuaauaaua

SEQ ID NO: 235088 - RNA, 21 nt, Artificial Sequence
  Synthetic
auacagggguauuuaauaaua

SEQ ID NO: 235089 - RNA, 22 nt, Artificial Sequence
  Synthetic
aauacagggguauuuaauaaua

SEQ ID NO: 235090 - RNA, 23 nt, Artificial Sequence
  Synthetic
uaauacagggguauuuaauaaua

SEQ ID NO: 235091 - RNA, 24 nt, Artificial Sequence
  Synthetic
guaauacagggguauuuaauaaua

SEQ ID NO: 235092 - RNA, 18 nt, Artificial Sequence
  Synthetic
cucguauucaacauaaua

SEQ ID NO: 235093 - RNA, 19 nt, Artificial Sequence
  Synthetic
acucguauucaacauaaua

SEQ ID NO: 235094 - RNA, 20 nt, Artificial Sequence
  Synthetic
cacucguauucaacauaaua

SEQ ID NO: 235095 - RNA, 21 nt, Artificial Sequence
  Synthetic
ccacucguauucaacauaaua

SEQ ID NO: 235096 - RNA, 22 nt, Artificial Sequence
  Synthetic
accacucguauucaacauaaua

SEQ ID NO: 235097 - RNA, 23 nt, Artificial Sequence
  Synthetic
caccacucguauucaacauaaua

SEQ ID NO: 235098 - RNA, 24 nt, Artificial Sequence
  Synthetic
ccaccacucguauucaacauaaua

SEQ ID NO: 235099 - RNA, 18 nt, Artificial Sequence
  Synthetic
cuucaacaacacauaaua

SEQ ID NO: 235100 - RNA, 19 nt, Artificial Sequence
  Synthetic
ccuucaacaacacauaaua

SEQ ID NO: 235101 - RNA, 20 nt, Artificial Sequence
  Synthetic
accuucaacaacacauaaua

SEQ ID NO: 235102 - RNA, 21 nt, Artificial Sequence
  Synthetic
gaccuucaacaacacauaaua

SEQ ID NO: 235103 - RNA, 22 nt, Artificial Sequence
  Synthetic
ugaccuucaacaacacauaaua

SEQ ID NO: 235104 - RNA, 23 nt, Artificial Sequence
  Synthetic
gugaccuucaacaacacauaaua

SEQ ID NO: 235105 - RNA, 24 nt, Artificial Sequence
  Synthetic
ugugaccuucaacaacacauaaua

SEQ ID NO: 235106 - RNA, 18 nt, Artificial Sequence
  Synthetic
gucuaugcuuccauaaua

SEQ ID NO: 235107 - RNA, 19 nt, Artificial Sequence
  Synthetic
agucuaugcuuccauaaua

SEQ ID NO: 235108 - RNA, 20 nt, Artificial Sequence
  Synthetic
uagucuaugcuuccauaaua

SEQ ID NO: 235109 - RNA, 21 nt, Artificial Sequence
  Synthetic
uuagucuaugcuuccauaaua

SEQ ID NO: 235110 - RNA, 22 nt, Artificial Sequence
  Synthetic
cuuagucuaugcuuccauaaua

SEQ ID NO: 235111 - RNA, 23 nt, Artificial Sequence
  Synthetic
ucuuagucuaugcuuccauaaua

SEQ ID NO: 235112 - RNA, 24 nt, Artificial Sequence
  Synthetic
gucuuagucuaugcuuccauaaua

SEQ ID NO: 235113 - RNA, 18 nt, Artificial Sequence
  Synthetic
aaggacgauaagauaaua

SEQ ID NO: 235114 - RNA, 19 nt, Artificial Sequence
  Synthetic
caaggacgauaagauaaua

SEQ ID NO: 235115 - RNA, 20 nt, Artificial Sequence
  Synthetic
acaaggacgauaagauaaua

SEQ ID NO: 235116 - RNA, 21 nt, Artificial Sequence
  Synthetic
gacaaggacgauaagauaaua

SEQ ID NO: 235117 - RNA, 22 nt, Artificial Sequence
  Synthetic
ggacaaggacgauaagauaaua

SEQ ID NO: 235118 - RNA, 23 nt, Artificial Sequence
  Synthetic
uggacaaggacgauaagauaaua

SEQ ID NO: 235119 - RNA, 24 nt, Artificial Sequence
  Synthetic
auggacaaggacgauaagauaaua

SEQ ID NO: 235120 - RNA, 18 nt, Artificial Sequence
  Synthetic
ugagcauauuagauaaua

SEQ ID NO: 235121 - RNA, 19 nt, Artificial Sequence
  Synthetic
cugagcauauuagauaaua

SEQ ID NO: 235122 - RNA, 20 nt, Artificial Sequence
  Synthetic
ccugagcauauuagauaaua

SEQ ID NO: 235123 - RNA, 21 nt, Artificial Sequence
  Synthetic
cccugagcauauuagauaaua

SEQ ID NO: 235124 - RNA, 22 nt, Artificial Sequence
  Synthetic
ucccugagcauauuagauaaua

SEQ ID NO: 235125 - RNA, 23 nt, Artificial Sequence
  Synthetic
aucccugagcauauuagauaaua

SEQ ID NO: 235126 - RNA, 24 nt, Artificial Sequence
  Synthetic
gaucccugagcauauuagauaaua

SEQ ID NO: 235127 - RNA, 18 nt, Artificial Sequence
  Synthetic
gacuagucauugauaaua

SEQ ID NO: 235128 - RNA, 19 nt, Artificial Sequence
  Synthetic
ggacuagucauugauaaua

SEQ ID NO: 235129 - RNA, 20 nt, Artificial Sequence
  Synthetic
uggacuagucauugauaaua

SEQ ID NO: 235130 - RNA, 21 nt, Artificial Sequence
  Synthetic
cuggacuagucauugauaaua

SEQ ID NO: 235131 - RNA, 22 nt, Artificial Sequence
  Synthetic
acuggacuagucauugauaaua

SEQ ID NO: 235132 - RNA, 23 nt, Artificial Sequence
  Synthetic
cacuggacuagucauugauaaua

SEQ ID NO: 235133 - RNA, 24 nt, Artificial Sequence
  Synthetic
gcacuggacuagucauugauaaua

SEQ ID NO: 235134 - RNA, 18 nt, Artificial Sequence
  Synthetic
aauauuaguaauauaaua

SEQ ID NO: 235135 - RNA, 19 nt, Artificial Sequence
  Synthetic
aaauauuaguaauauaaua

SEQ ID NO: 235136 - RNA, 20 nt, Artificial Sequence
  Synthetic
uaaauauuaguaauauaaua

SEQ ID NO: 235137 - RNA, 21 nt, Artificial Sequence
  Synthetic
guaaauauuaguaauauaaua

SEQ ID NO: 235138 - RNA, 22 nt, Artificial Sequence
  Synthetic
uguaaauauuaguaauauaaua

SEQ ID NO: 235139 - RNA, 23 nt, Artificial Sequence
  Synthetic
auguaaauauuaguaauauaaua

SEQ ID NO: 235140 - RNA, 24 nt, Artificial Sequence
  Synthetic
uauguaaauauuaguaauauaaua

SEQ ID NO: 235141 - RNA, 18 nt, Artificial Sequence
  Synthetic
uauuauccccauauaaua

SEQ ID NO: 235142 - RNA, 19 nt, Artificial Sequence
  Synthetic
uuauuauccccauauaaua

SEQ ID NO: 235143 - RNA, 20 nt, Artificial Sequence
  Synthetic
guuauuauccccauauaaua

SEQ ID NO: 235144 - RNA, 21 nt, Artificial Sequence
  Synthetic
uguuauuauccccauauaaua

SEQ ID NO: 235145 - RNA, 22 nt, Artificial Sequence
  Synthetic
uuguuauuauccccauauaaua

SEQ ID NO: 235146 - RNA, 23 nt, Artificial Sequence
  Synthetic
cuuguuauuauccccauauaaua

SEQ ID NO: 235147 - RNA, 24 nt, Artificial Sequence
  Synthetic
ucuuguuauuauccccauauaaua

SEQ ID NO: 235148 - RNA, 18 nt, Artificial Sequence
  Synthetic
gaaccacgugauauaaua

SEQ ID NO: 235149 - RNA, 19 nt, Artificial Sequence
  Synthetic
ugaaccacgugauauaaua

SEQ ID NO: 235150 - RNA, 20 nt, Artificial Sequence
  Synthetic
cugaaccacgugauauaaua

SEQ ID NO: 235151 - RNA, 21 nt, Artificial Sequence
  Synthetic
ccugaaccacgugauauaaua

SEQ ID NO: 235152 - RNA, 22 nt, Artificial Sequence
  Synthetic
uccugaaccacgugauauaaua

SEQ ID NO: 235153 - RNA, 23 nt, Artificial Sequence
  Synthetic
guccugaaccacgugauauaaua

SEQ ID NO: 235154 - RNA, 24 nt, Artificial Sequence
  Synthetic
gguccugaaccacgugauauaaua

SEQ ID NO: 235155 - RNA, 18 nt, Artificial Sequence
  Synthetic
augauauuugauauaaua

SEQ ID NO: 235156 - RNA, 19 nt, Artificial Sequence
  Synthetic
aaugauauuugauauaaua

SEQ ID NO: 235157 - RNA, 20 nt, Artificial Sequence
  Synthetic
aaaugauauuugauauaaua

SEQ ID NO: 235158 - RNA, 21 nt, Artificial Sequence
  Synthetic
aaaaugauauuugauauaaua

SEQ ID NO: 235159 - RNA, 22 nt, Artificial Sequence
  Synthetic
aaaaaugauauuugauauaaua

SEQ ID NO: 235160 - RNA, 23 nt, Artificial Sequence
  Synthetic
gaaaaaugauauuugauauaaua

SEQ ID NO: 235161 - RNA, 24 nt, Artificial Sequence
  Synthetic
agaaaaaugauauuugauauaaua

SEQ ID NO: 235162 - RNA, 18 nt, Artificial Sequence
  Synthetic
ugauuuggcuauauaaua

SEQ ID NO: 235163 - RNA, 19 nt, Artificial Sequence
  Synthetic
cugauuuggcuauauaaua

SEQ ID NO: 235164 - RNA, 20 nt, Artificial Sequence
  Synthetic
gcugauuuggcuauauaaua

SEQ ID NO: 235165 - RNA, 21 nt, Artificial Sequence
  Synthetic
ggcugauuuggcuauauaaua

SEQ ID NO: 235166 - RNA, 22 nt, Artificial Sequence
  Synthetic
uggcugauuuggcuauauaaua

SEQ ID NO: 235167 - RNA, 23 nt, Artificial Sequence
  Synthetic
cuggcugauuuggcuauauaaua

SEQ ID NO: 235168 - RNA, 24 nt, Artificial Sequence
  Synthetic
ccuggcugauuuggcuauauaaua

SEQ ID NO: 235169 - RNA, 18 nt, Artificial Sequence
  Synthetic
cacuaccacaguauaaua

SEQ ID NO: 235170 - RNA, 19 nt, Artificial Sequence
  Synthetic
ucacuaccacaguauaaua

SEQ ID NO: 235171 - RNA, 20 nt, Artificial Sequence
  Synthetic
uucacuaccacaguauaaua

SEQ ID NO: 235172 - RNA, 21 nt, Artificial Sequence
  Synthetic
guucacuaccacaguauaaua

SEQ ID NO: 235173 - RNA, 22 nt, Artificial Sequence
  Synthetic
cguucacuaccacaguauaaua

SEQ ID NO: 235174 - RNA, 23 nt, Artificial Sequence
  Synthetic
acguucacuaccacaguauaaua

SEQ ID NO: 235175 - RNA, 24 nt, Artificial Sequence
  Synthetic
cacguucacuaccacaguauaaua

SEQ ID NO: 235176 - RNA, 18 nt, Artificial Sequence
  Synthetic
uuaaagucauuuauaaua

SEQ ID NO: 235177 - RNA, 19 nt, Artificial Sequence
  Synthetic
auuaaagucauuuauaaua

SEQ ID NO: 235178 - RNA, 20 nt, Artificial Sequence
  Synthetic
uauuaaagucauuuauaaua

SEQ ID NO: 235179 - RNA, 21 nt, Artificial Sequence
  Synthetic
auauuaaagucauuuauaaua

SEQ ID NO: 235180 - RNA, 22 nt, Artificial Sequence
  Synthetic
uauauuaaagucauuuauaaua

SEQ ID NO: 235181 - RNA, 23 nt, Artificial Sequence
  Synthetic
cuauauuaaagucauuuauaaua

SEQ ID NO: 235182 - RNA, 24 nt, Artificial Sequence
  Synthetic
gcuauauuaaagucauuuauaaua

SEQ ID NO: 235183 - RNA, 18 nt, Artificial Sequence
  Synthetic
cugcuagccagacuaaua

SEQ ID NO: 235184 - RNA, 19 nt, Artificial Sequence
  Synthetic
acugcuagccagacuaaua

SEQ ID NO: 235185 - RNA, 20 nt, Artificial Sequence
  Synthetic
gacugcuagccagacuaaua

SEQ ID NO: 235186 - RNA, 21 nt, Artificial Sequence
  Synthetic
agacugcuagccagacuaaua

SEQ ID NO: 235187 - RNA, 22 nt, Artificial Sequence
  Synthetic
uagacugcuagccagacuaaua

SEQ ID NO: 235188 - RNA, 23 nt, Artificial Sequence
  Synthetic
auagacugcuagccagacuaaua

SEQ ID NO: 235189 - RNA, 24 nt, Artificial Sequence
  Synthetic
gauagacugcuagccagacuaaua

SEQ ID NO: 235190 - RNA, 18 nt, Artificial Sequence
  Synthetic
acagccauacuccuaaua

SEQ ID NO: 235191 - RNA, 19 nt, Artificial Sequence
  Synthetic
uacagccauacuccuaaua

SEQ ID NO: 235192 - RNA, 20 nt, Artificial Sequence
  Synthetic
uuacagccauacuccuaaua

SEQ ID NO: 235193 - RNA, 21 nt, Artificial Sequence
  Synthetic
cuuacagccauacuccuaaua

SEQ ID NO: 235194 - RNA, 22 nt, Artificial Sequence
  Synthetic
ccuuacagccauacuccuaaua

SEQ ID NO: 235195 - RNA, 23 nt, Artificial Sequence
  Synthetic
gccuuacagccauacuccuaaua

SEQ ID NO: 235196 - RNA, 24 nt, Artificial Sequence
  Synthetic
agccuuacagccauacuccuaaua

SEQ ID NO: 235197 - RNA, 18 nt, Artificial Sequence
  Synthetic
gauuccuuguagcuaaua

SEQ ID NO: 235198 - RNA, 19 nt, Artificial Sequence
  Synthetic
agauuccuuguagcuaaua

SEQ ID NO: 235199 - RNA, 20 nt, Artificial Sequence
  Synthetic
uagauuccuuguagcuaaua

SEQ ID NO: 235200 - RNA, 21 nt, Artificial Sequence
  Synthetic
auagauuccuuguagcuaaua

SEQ ID NO: 235201 - RNA, 22 nt, Artificial Sequence
  Synthetic
aauagauuccuuguagcuaaua

SEQ ID NO: 235202 - RNA, 23 nt, Artificial Sequence
  Synthetic
caauagauuccuuguagcuaaua

SEQ ID NO: 235203 - RNA, 24 nt, Artificial Sequence
  Synthetic
ucaauagauuccuuguagcuaaua

SEQ ID NO: 235204 - RNA, 18 nt, Artificial Sequence
  Synthetic
auuacauccuggcuaaua

SEQ ID NO: 235205 - RNA, 19 nt, Artificial Sequence
  Synthetic
aauuacauccuggcuaaua

SEQ ID NO: 235206 - RNA, 20 nt, Artificial Sequence
  Synthetic
caauuacauccuggcuaaua

SEQ ID NO: 235207 - RNA, 21 nt, Artificial Sequence
  Synthetic
ucaauuacauccuggcuaaua

SEQ ID NO: 235208 - RNA, 22 nt, Artificial Sequence
  Synthetic
uucaauuacauccuggcuaaua

SEQ ID NO: 235209 - RNA, 23 nt, Artificial Sequence
  Synthetic
uuucaauuacauccuggcuaaua

SEQ ID NO: 235210 - RNA, 24 nt, Artificial Sequence
  Synthetic
uuuucaauuacauccuggcuaaua

SEQ ID NO: 235211 - RNA, 18 nt, Artificial Sequence
  Synthetic
aucauuauguggcuaaua

SEQ ID NO: 235212 - RNA, 19 nt, Artificial Sequence
  Synthetic
caucauuauguggcuaaua

SEQ ID NO: 235213 - RNA, 20 nt, Artificial Sequence
  Synthetic
ucaucauuauguggcuaaua

SEQ ID NO: 235214 - RNA, 21 nt, Artificial Sequence
  Synthetic
uucaucauuauguggcuaaua

SEQ ID NO: 235215 - RNA, 22 nt, Artificial Sequence
  Synthetic
uuucaucauuauguggcuaaua

SEQ ID NO: 235216 - RNA, 23 nt, Artificial Sequence
  Synthetic
uuuucaucauuauguggcuaaua

SEQ ID NO: 235217 - RNA, 24 nt, Artificial Sequence
  Synthetic
guuuucaucauuauguggcuaaua

SEQ ID NO: 235218 - RNA, 18 nt, Artificial Sequence
  Synthetic
uuaaaaaaacugcuaaua

SEQ ID NO: 235219 - RNA, 19 nt, Artificial Sequence
  Synthetic
uuuaaaaaaacugcuaaua

SEQ ID NO: 235220 - RNA, 20 nt, Artificial Sequence
  Synthetic
auuuaaaaaaacugcuaaua

SEQ ID NO: 235221 - RNA, 21 nt, Artificial Sequence
  Synthetic
uauuuaaaaaaacugcuaaua

SEQ ID NO: 235222 - RNA, 22 nt, Artificial Sequence
  Synthetic
uuauuuaaaaaaacugcuaaua

SEQ ID NO: 235223 - RNA, 23 nt, Artificial Sequence
  Synthetic
auuauuuaaaaaaacugcuaaua

SEQ ID NO: 235224 - RNA, 24 nt, Artificial Sequence
  Synthetic
uauuauuuaaaaaaacugcuaaua

SEQ ID NO: 235225 - RNA, 18 nt, Artificial Sequence
  Synthetic
cgggaaaaucaucuaaua

SEQ ID NO: 235226 - RNA, 19 nt, Artificial Sequence
  Synthetic
ucgggaaaaucaucuaaua

SEQ ID NO: 235227 - RNA, 20 nt, Artificial Sequence
  Synthetic
cucgggaaaaucaucuaaua

SEQ ID NO: 235228 - RNA, 21 nt, Artificial Sequence
  Synthetic
acucgggaaaaucaucuaaua

SEQ ID NO: 235229 - RNA, 22 nt, Artificial Sequence
  Synthetic
gacucgggaaaaucaucuaaua

SEQ ID NO: 235230 - RNA, 23 nt, Artificial Sequence
  Synthetic
agacucgggaaaaucaucuaaua

SEQ ID NO: 235231 - RNA, 24 nt, Artificial Sequence
  Synthetic
aagacucgggaaaaucaucuaaua

SEQ ID NO: 235232 - RNA, 18 nt, Artificial Sequence
  Synthetic
aggaaaaagacucuaaua

SEQ ID NO: 235233 - RNA, 19 nt, Artificial Sequence
  Synthetic
aaggaaaaagacucuaaua

SEQ ID NO: 235234 - RNA, 20 nt, Artificial Sequence
  Synthetic
aaaggaaaaagacucuaaua

SEQ ID NO: 235235 - RNA, 21 nt, Artificial Sequence
  Synthetic
caaaggaaaaagacucuaaua

SEQ ID NO: 235236 - RNA, 22 nt, Artificial Sequence
  Synthetic
ucaaaggaaaaagacucuaaua

SEQ ID NO: 235237 - RNA, 23 nt, Artificial Sequence
  Synthetic
gucaaaggaaaaagacucuaaua

SEQ ID NO: 235238 - RNA, 24 nt, Artificial Sequence
  Synthetic
ugucaaaggaaaaagacucuaaua

SEQ ID NO: 235239 - RNA, 18 nt, Artificial Sequence
  Synthetic
agaaacaggauucuaaua

SEQ ID NO: 235240 - RNA, 19 nt, Artificial Sequence
  Synthetic
aagaaacaggauucuaaua

SEQ ID NO: 235241 - RNA, 20 nt, Artificial Sequence
  Synthetic
caagaaacaggauucuaaua

SEQ ID NO: 235242 - RNA, 21 nt, Artificial Sequence
  Synthetic
gcaagaaacaggauucuaaua

SEQ ID NO: 235243 - RNA, 22 nt, Artificial Sequence
  Synthetic
ugcaagaaacaggauucuaaua

SEQ ID NO: 235244 - RNA, 23 nt, Artificial Sequence
  Synthetic
augcaagaaacaggauucuaaua

SEQ ID NO: 235245 - RNA, 24 nt, Artificial Sequence
  Synthetic
caugcaagaaacaggauucuaaua

SEQ ID NO: 235246 - RNA, 18 nt, Artificial Sequence
  Synthetic
cuguaacuucuucuaaua

SEQ ID NO: 235247 - RNA, 19 nt, Artificial Sequence
  Synthetic
ccuguaacuucuucuaaua

SEQ ID NO: 235248 - RNA, 20 nt, Artificial Sequence
  Synthetic
accuguaacuucuucuaaua

SEQ ID NO: 235249 - RNA, 21 nt, Artificial Sequence
  Synthetic
aaccuguaacuucuucuaaua

SEQ ID NO: 235250 - RNA, 22 nt, Artificial Sequence
  Synthetic
aaaccuguaacuucuucuaaua

SEQ ID NO: 235251 - RNA, 23 nt, Artificial Sequence
  Synthetic
aaaaccuguaacuucuucuaaua

SEQ ID NO: 235252 - RNA, 24 nt, Artificial Sequence
  Synthetic
caaaaccuguaacuucuucuaaua

SEQ ID NO: 235253 - RNA, 18 nt, Artificial Sequence
  Synthetic
uaaacuaaagaaguaaua

SEQ ID NO: 235254 - RNA, 19 nt, Artificial Sequence
  Synthetic
cuaaacuaaagaaguaaua

SEQ ID NO: 235255 - RNA, 20 nt, Artificial Sequence
  Synthetic
ccuaaacuaaagaaguaaua

SEQ ID NO: 235256 - RNA, 21 nt, Artificial Sequence
  Synthetic
accuaaacuaaagaaguaaua

SEQ ID NO: 235257 - RNA, 22 nt, Artificial Sequence
  Synthetic
gaccuaaacuaaagaaguaaua

SEQ ID NO: 235258 - RNA, 23 nt, Artificial Sequence
  Synthetic
ugaccuaaacuaaagaaguaaua

SEQ ID NO: 235259 - RNA, 24 nt, Artificial Sequence
  Synthetic
augaccuaaacuaaagaaguaaua

SEQ ID NO: 235260 - RNA, 18 nt, Artificial Sequence
  Synthetic
cacuccuacacaguaaua

SEQ ID NO: 235261 - RNA, 19 nt, Artificial Sequence
  Synthetic
acacuccuacacaguaaua

SEQ ID NO: 235262 - RNA, 20 nt, Artificial Sequence
  Synthetic
uacacuccuacacaguaaua

SEQ ID NO: 235263 - RNA, 21 nt, Artificial Sequence
  Synthetic
uuacacuccuacacaguaaua

SEQ ID NO: 235264 - RNA, 22 nt, Artificial Sequence
  Synthetic
cuuacacuccuacacaguaaua

SEQ ID NO: 235265 - RNA, 23 nt, Artificial Sequence
  Synthetic
acuuacacuccuacacaguaaua

SEQ ID NO: 235266 - RNA, 24 nt, Artificial Sequence
  Synthetic
gacuuacacuccuacacaguaaua

SEQ ID NO: 235267 - RNA, 18 nt, Artificial Sequence
  Synthetic
ugaaaauacugaguaaua

SEQ ID NO: 235268 - RNA, 19 nt, Artificial Sequence
  Synthetic
cugaaaauacugaguaaua

SEQ ID NO: 235269 - RNA, 20 nt, Artificial Sequence
  Synthetic
ccugaaaauacugaguaaua

SEQ ID NO: 235270 - RNA, 21 nt, Artificial Sequence
  Synthetic
gccugaaaauacugaguaaua

SEQ ID NO: 235271 - RNA, 22 nt, Artificial Sequence
  Synthetic
ugccugaaaauacugaguaaua

SEQ ID NO: 235272 - RNA, 23 nt, Artificial Sequence
  Synthetic
augccugaaaauacugaguaaua

SEQ ID NO: 235273 - RNA, 24 nt, Artificial Sequence
  Synthetic
caugccugaaaauacugaguaaua

SEQ ID NO: 235274 - RNA, 18 nt, Artificial Sequence
  Synthetic
ggugugacaaauguaaua

SEQ ID NO: 235275 - RNA, 19 nt, Artificial Sequence
  Synthetic
gggugugacaaauguaaua

SEQ ID NO: 235276 - RNA, 20 nt, Artificial Sequence
  Synthetic
ggggugugacaaauguaaua

SEQ ID NO: 235277 - RNA, 21 nt, Artificial Sequence
  Synthetic
aggggugugacaaauguaaua

SEQ ID NO: 235278 - RNA, 22 nt, Artificial Sequence
  Synthetic
gaggggugugacaaauguaaua

SEQ ID NO: 235279 - RNA, 23 nt, Artificial Sequence
  Synthetic
ugaggggugugacaaauguaaua

SEQ ID NO: 235280 - RNA, 24 nt, Artificial Sequence
  Synthetic
cugaggggugugacaaauguaaua

SEQ ID NO: 235281 - RNA, 18 nt, Artificial Sequence
  Synthetic
cuacuguuggcuguaaua

SEQ ID NO: 235282 - RNA, 19 nt, Artificial Sequence
  Synthetic
acuacuguuggcuguaaua

SEQ ID NO: 235283 - RNA, 20 nt, Artificial Sequence
  Synthetic
aacuacuguuggcuguaaua

SEQ ID NO: 235284 - RNA, 21 nt, Artificial Sequence
  Synthetic
aaacuacuguuggcuguaaua

SEQ ID NO: 235285 - RNA, 22 nt, Artificial Sequence
  Synthetic
aaaacuacuguuggcuguaaua

SEQ ID NO: 235286 - RNA, 23 nt, Artificial Sequence
  Synthetic
uaaaacuacuguuggcuguaaua

SEQ ID NO: 235287 - RNA, 24 nt, Artificial Sequence
  Synthetic
cuaaaacuacuguuggcuguaaua

SEQ ID NO: 235288 - RNA, 18 nt, Artificial Sequence
  Synthetic
auuuucuccucuguaaua

SEQ ID NO: 235289 - RNA, 19 nt, Artificial Sequence
  Synthetic
cauuuucuccucuguaaua

SEQ ID NO: 235290 - RNA, 20 nt, Artificial Sequence
  Synthetic
ccauuuucuccucuguaaua

SEQ ID NO: 235291 - RNA, 21 nt, Artificial Sequence
  Synthetic
accauuuucuccucuguaaua

SEQ ID NO: 235292 - RNA, 22 nt, Artificial Sequence
  Synthetic
caccauuuucuccucuguaaua

SEQ ID NO: 235293 - RNA, 23 nt, Artificial Sequence
  Synthetic
ccaccauuuucuccucuguaaua

SEQ ID NO: 235294 - RNA, 24 nt, Artificial Sequence
  Synthetic
gccaccauuuucuccucuguaaua

SEQ ID NO: 235295 - RNA, 18 nt, Artificial Sequence
  Synthetic
uuaagagcuucuguaaua

SEQ ID NO: 235296 - RNA, 19 nt, Artificial Sequence
  Synthetic
guuaagagcuucuguaaua

SEQ ID NO: 235297 - RNA, 20 nt, Artificial Sequence
  Synthetic
aguuaagagcuucuguaaua

SEQ ID NO: 235298 - RNA, 21 nt, Artificial Sequence
  Synthetic
caguuaagagcuucuguaaua

SEQ ID NO: 235299 - RNA, 22 nt, Artificial Sequence
  Synthetic
ucaguuaagagcuucuguaaua

SEQ ID NO: 235300 - RNA, 23 nt, Artificial Sequence
  Synthetic
cucaguuaagagcuucuguaaua

SEQ ID NO: 235301 - RNA, 24 nt, Artificial Sequence
  Synthetic
acucaguuaagagcuucuguaaua

SEQ ID NO: 235302 - RNA, 18 nt, Artificial Sequence
  Synthetic
uauaugcauauuguaaua

SEQ ID NO: 235303 - RNA, 19 nt, Artificial Sequence
  Synthetic
uuauaugcauauuguaaua

SEQ ID NO: 235304 - RNA, 20 nt, Artificial Sequence
  Synthetic
uuuauaugcauauuguaaua

SEQ ID NO: 235305 - RNA, 21 nt, Artificial Sequence
  Synthetic
guuuauaugcauauuguaaua

SEQ ID NO: 235306 - RNA, 22 nt, Artificial Sequence
  Synthetic
uguuuauaugcauauuguaaua

SEQ ID NO: 235307 - RNA, 23 nt, Artificial Sequence
  Synthetic
uuguuuauaugcauauuguaaua

SEQ ID NO: 235308 - RNA, 24 nt, Artificial Sequence
  Synthetic
auuguuuauaugcauauuguaaua

SEQ ID NO: 235309 - RNA, 18 nt, Artificial Sequence
  Synthetic
uauaugcguauuguaaua

SEQ ID NO: 235310 - RNA, 19 nt, Artificial Sequence
  Synthetic
uuauaugcguauuguaaua

SEQ ID NO: 235311 - RNA, 20 nt, Artificial Sequence
  Synthetic
uuuauaugcguauuguaaua

SEQ ID NO: 235312 - RNA, 21 nt, Artificial Sequence
  Synthetic
guuuauaugcguauuguaaua

SEQ ID NO: 235313 - RNA, 22 nt, Artificial Sequence
  Synthetic
uguuuauaugcguauuguaaua

SEQ ID NO: 235314 - RNA, 23 nt, Artificial Sequence
  Synthetic
uuguuuauaugcguauuguaaua

SEQ ID NO: 235315 - RNA, 24 nt, Artificial Sequence
  Synthetic
auuguuuauaugcguauuguaaua

SEQ ID NO: 235316 - RNA, 18 nt, Artificial Sequence
  Synthetic
uagaacaagaaauuaaua

SEQ ID NO: 235317 - RNA, 19 nt, Artificial Sequence
  Synthetic
guagaacaagaaauuaaua

SEQ ID NO: 235318 - RNA, 20 nt, Artificial Sequence
  Synthetic
gguagaacaagaaauuaaua

SEQ ID NO: 235319 - RNA, 21 nt, Artificial Sequence
  Synthetic
agguagaacaagaaauuaaua

SEQ ID NO: 235320 - RNA, 22 nt, Artificial Sequence
  Synthetic
aagguagaacaagaaauuaaua

SEQ ID NO: 235321 - RNA, 23 nt, Artificial Sequence
  Synthetic
caagguagaacaagaaauuaaua

SEQ ID NO: 235322 - RNA, 24 nt, Artificial Sequence
  Synthetic
ucaagguagaacaagaaauuaaua

SEQ ID NO: 235323 - RNA, 18 nt, Artificial Sequence
  Synthetic
cuucugugagcauuaaua

SEQ ID NO: 235324 - RNA, 19 nt, Artificial Sequence
  Synthetic
gcuucugugagcauuaaua

SEQ ID NO: 235325 - RNA, 20 nt, Artificial Sequence
  Synthetic
ugcuucugugagcauuaaua

SEQ ID NO: 235326 - RNA, 21 nt, Artificial Sequence
  Synthetic
augcuucugugagcauuaaua

SEQ ID NO: 235327 - RNA, 22 nt, Artificial Sequence
  Synthetic
uaugcuucugugagcauuaaua

SEQ ID NO: 235328 - RNA, 23 nt, Artificial Sequence
  Synthetic
cuaugcuucugugagcauuaaua

SEQ ID NO: 235329 - RNA, 24 nt, Artificial Sequence
  Synthetic
acuaugcuucugugagcauuaaua

SEQ ID NO: 235330 - RNA, 18 nt, Artificial Sequence
  Synthetic
gcucaaaagucauuaaua

SEQ ID NO: 235331 - RNA, 19 nt, Artificial Sequence
  Synthetic
ugcucaaaagucauuaaua

SEQ ID NO: 235332 - RNA, 20 nt, Artificial Sequence
  Synthetic
cugcucaaaagucauuaaua

SEQ ID NO: 235333 - RNA, 21 nt, Artificial Sequence
  Synthetic
gcugcucaaaagucauuaaua

SEQ ID NO: 235334 - RNA, 22 nt, Artificial Sequence
  Synthetic
ggcugcucaaaagucauuaaua

SEQ ID NO: 235335 - RNA, 23 nt, Artificial Sequence
  Synthetic
uggcugcucaaaagucauuaaua

SEQ ID NO: 235336 - RNA, 24 nt, Artificial Sequence
  Synthetic
guggcugcucaaaagucauuaaua

SEQ ID NO: 235337 - RNA, 18 nt, Artificial Sequence
  Synthetic
caguugucaugauuaaua

SEQ ID NO: 235338 - RNA, 19 nt, Artificial Sequence
  Synthetic
acaguugucaugauuaaua

SEQ ID NO: 235339 - RNA, 20 nt, Artificial Sequence
  Synthetic
uacaguugucaugauuaaua

SEQ ID NO: 235340 - RNA, 21 nt, Artificial Sequence
  Synthetic
cuacaguugucaugauuaaua

SEQ ID NO: 235341 - RNA, 22 nt, Artificial Sequence
  Synthetic
acuacaguugucaugauuaaua

SEQ ID NO: 235342 - RNA, 23 nt, Artificial Sequence
  Synthetic
cacuacaguugucaugauuaaua

SEQ ID NO: 235343 - RNA, 24 nt, Artificial Sequence
  Synthetic
ccacuacaguugucaugauuaaua

SEQ ID NO: 235344 - RNA, 18 nt, Artificial Sequence
  Synthetic
auuaggagauuauuaaua

SEQ ID NO: 235345 - RNA, 19 nt, Artificial Sequence
  Synthetic
cauuaggagauuauuaaua

SEQ ID NO: 235346 - RNA, 20 nt, Artificial Sequence
  Synthetic
ucauuaggagauuauuaaua

SEQ ID NO: 235347 - RNA, 21 nt, Artificial Sequence
  Synthetic
gucauuaggagauuauuaaua

SEQ ID NO: 235348 - RNA, 22 nt, Artificial Sequence
  Synthetic
ugucauuaggagauuauuaaua

SEQ ID NO: 235349 - RNA, 23 nt, Artificial Sequence
  Synthetic
augucauuaggagauuauuaaua

SEQ ID NO: 235350 - RNA, 24 nt, Artificial Sequence
  Synthetic
gaugucauuaggagauuauuaaua

SEQ ID NO: 235351 - RNA, 18 nt, Artificial Sequence
  Synthetic
cuaaucauuuccuuaaua

SEQ ID NO: 235352 - RNA, 19 nt, Artificial Sequence
  Synthetic
gcuaaucauuuccuuaaua

SEQ ID NO: 235353 - RNA, 20 nt, Artificial Sequence
  Synthetic
ugcuaaucauuuccuuaaua

SEQ ID NO: 235354 - RNA, 21 nt, Artificial Sequence
  Synthetic
uugcuaaucauuuccuuaaua

SEQ ID NO: 235355 - RNA, 22 nt, Artificial Sequence
  Synthetic
guugcuaaucauuuccuuaaua

SEQ ID NO: 235356 - RNA, 23 nt, Artificial Sequence
  Synthetic
aguugcuaaucauuuccuuaaua

SEQ ID NO: 235357 - RNA, 24 nt, Artificial Sequence
  Synthetic
aaguugcuaaucauuuccuuaaua

SEQ ID NO: 235358 - RNA, 18 nt, Artificial Sequence
  Synthetic
guauauuucagcuuaaua

SEQ ID NO: 235359 - RNA, 19 nt, Artificial Sequence
  Synthetic
cguauauuucagcuuaaua

SEQ ID NO: 235360 - RNA, 20 nt, Artificial Sequence
  Synthetic
acguauauuucagcuuaaua

SEQ ID NO: 235361 - RNA, 21 nt, Artificial Sequence
  Synthetic
aacguauauuucagcuuaaua

SEQ ID NO: 235362 - RNA, 22 nt, Artificial Sequence
  Synthetic
gaacguauauuucagcuuaaua

SEQ ID NO: 235363 - RNA, 23 nt, Artificial Sequence
  Synthetic
agaacguauauuucagcuuaaua

SEQ ID NO: 235364 - RNA, 24 nt, Artificial Sequence
  Synthetic
aagaacguauauuucagcuuaaua

SEQ ID NO: 235365 - RNA, 18 nt, Artificial Sequence
  Synthetic
aagaaugaaugcuuaaua

SEQ ID NO: 235366 - RNA, 19 nt, Artificial Sequence
  Synthetic
uaagaaugaaugcuuaaua

SEQ ID NO: 235367 - RNA, 20 nt, Artificial Sequence
  Synthetic
uuaagaaugaaugcuuaaua

SEQ ID NO: 235368 - RNA, 21 nt, Artificial Sequence
  Synthetic
auuaagaaugaaugcuuaaua

SEQ ID NO: 235369 - RNA, 22 nt, Artificial Sequence
  Synthetic
uauuaagaaugaaugcuuaaua

SEQ ID NO: 235370 - RNA, 23 nt, Artificial Sequence
  Synthetic
uuauuaagaaugaaugcuuaaua

SEQ ID NO: 235371 - RNA, 24 nt, Artificial Sequence
  Synthetic
cuuauuaagaaugaaugcuuaaua

SEQ ID NO: 235372 - RNA, 18 nt, Artificial Sequence
  Synthetic
uuguccuuuaucuuaaua

SEQ ID NO: 235373 - RNA, 19 nt, Artificial Sequence
  Synthetic
guuguccuuuaucuuaaua

SEQ ID NO: 235374 - RNA, 20 nt, Artificial Sequence
  Synthetic
aguuguccuuuaucuuaaua

SEQ ID NO: 235375 - RNA, 21 nt, Artificial Sequence
  Synthetic
aaguuguccuuuaucuuaaua

SEQ ID NO: 235376 - RNA, 22 nt, Artificial Sequence
  Synthetic
uaaguuguccuuuaucuuaaua

SEQ ID NO: 235377 - RNA, 23 nt, Artificial Sequence
  Synthetic
uuaaguuguccuuuaucuuaaua

SEQ ID NO: 235378 - RNA, 24 nt, Artificial Sequence
  Synthetic
auuaaguuguccuuuaucuuaaua

SEQ ID NO: 235379 - RNA, 18 nt, Artificial Sequence
  Synthetic
aaaugcuuuaucuuaaua

SEQ ID NO: 235380 - RNA, 19 nt, Artificial Sequence
  Synthetic
caaaugcuuuaucuuaaua

SEQ ID NO: 235381 - RNA, 20 nt, Artificial Sequence
  Synthetic
ucaaaugcuuuaucuuaaua

SEQ ID NO: 235382 - RNA, 21 nt, Artificial Sequence
  Synthetic
cucaaaugcuuuaucuuaaua

SEQ ID NO: 235383 - RNA, 22 nt, Artificial Sequence
  Synthetic
ccucaaaugcuuuaucuuaaua

SEQ ID NO: 235384 - RNA, 23 nt, Artificial Sequence
  Synthetic
accucaaaugcuuuaucuuaaua

SEQ ID NO: 235385 - RNA, 24 nt, Artificial Sequence
  Synthetic
gaccucaaaugcuuuaucuuaaua

SEQ ID NO: 235386 - RNA, 18 nt, Artificial Sequence
  Synthetic
uuguuuugcuucuuaaua

SEQ ID NO: 235387 - RNA, 19 nt, Artificial Sequence
  Synthetic
uuuguuuugcuucuuaaua

SEQ ID NO: 235388 - RNA, 20 nt, Artificial Sequence
  Synthetic
cuuuguuuugcuucuuaaua

SEQ ID NO: 235389 - RNA, 21 nt, Artificial Sequence
  Synthetic
acuuuguuuugcuucuuaaua

SEQ ID NO: 235390 - RNA, 22 nt, Artificial Sequence
  Synthetic
uacuuuguuuugcuucuuaaua

SEQ ID NO: 235391 - RNA, 23 nt, Artificial Sequence
  Synthetic
uuacuuuguuuugcuucuuaaua

SEQ ID NO: 235392 - RNA, 24 nt, Artificial Sequence
  Synthetic
uuuacuuuguuuugcuucuuaaua

SEQ ID NO: 235393 - RNA, 18 nt, Artificial Sequence
  Synthetic
cagaauguuuucuuaaua

SEQ ID NO: 235394 - RNA, 19 nt, Artificial Sequence
  Synthetic
gcagaauguuuucuuaaua

SEQ ID NO: 235395 - RNA, 20 nt, Artificial Sequence
  Synthetic
agcagaauguuuucuuaaua

SEQ ID NO: 235396 - RNA, 21 nt, Artificial Sequence
  Synthetic
aagcagaauguuuucuuaaua

SEQ ID NO: 235397 - RNA, 22 nt, Artificial Sequence
  Synthetic
uaagcagaauguuuucuuaaua

SEQ ID NO: 235398 - RNA, 23 nt, Artificial Sequence
  Synthetic
auaagcagaauguuuucuuaaua

SEQ ID NO: 235399 - RNA, 24 nt, Artificial Sequence
  Synthetic
aauaagcagaauguuuucuuaaua

SEQ ID NO: 235400 - RNA, 18 nt, Artificial Sequence
  Synthetic
gagaagagcauguuaaua

SEQ ID NO: 235401 - RNA, 19 nt, Artificial Sequence
  Synthetic
ugagaagagcauguuaaua

SEQ ID NO: 235402 - RNA, 20 nt, Artificial Sequence
  Synthetic
gugagaagagcauguuaaua

SEQ ID NO: 235403 - RNA, 21 nt, Artificial Sequence
  Synthetic
agugagaagagcauguuaaua

SEQ ID NO: 235404 - RNA, 22 nt, Artificial Sequence
  Synthetic
aagugagaagagcauguuaaua

SEQ ID NO: 235405 - RNA, 23 nt, Artificial Sequence
  Synthetic
uaagugagaagagcauguuaaua

SEQ ID NO: 235406 - RNA, 24 nt, Artificial Sequence
  Synthetic
uuaagugagaagagcauguuaaua

SEQ ID NO: 235407 - RNA, 18 nt, Artificial Sequence
  Synthetic
uuaugguuuauguuaaua

SEQ ID NO: 235408 - RNA, 19 nt, Artificial Sequence
  Synthetic
uuuaugguuuauguuaaua

SEQ ID NO: 235409 - RNA, 20 nt, Artificial Sequence
  Synthetic
uuuuaugguuuauguuaaua

SEQ ID NO: 235410 - RNA, 21 nt, Artificial Sequence
  Synthetic
auuuuaugguuuauguuaaua

SEQ ID NO: 235411 - RNA, 22 nt, Artificial Sequence
  Synthetic
cauuuuaugguuuauguuaaua

SEQ ID NO: 235412 - RNA, 23 nt, Artificial Sequence
  Synthetic
acauuuuaugguuuauguuaaua

SEQ ID NO: 235413 - RNA, 24 nt, Artificial Sequence
  Synthetic
gacauuuuaugguuuauguuaaua

SEQ ID NO: 235414 - RNA, 18 nt, Artificial Sequence
  Synthetic
ugaaaacacguguuaaua

SEQ ID NO: 235415 - RNA, 19 nt, Artificial Sequence
  Synthetic
augaaaacacguguuaaua

SEQ ID NO: 235416 - RNA, 20 nt, Artificial Sequence
  Synthetic
gaugaaaacacguguuaaua

SEQ ID NO: 235417 - RNA, 21 nt, Artificial Sequence
  Synthetic
cgaugaaaacacguguuaaua

SEQ ID NO: 235418 - RNA, 22 nt, Artificial Sequence
  Synthetic
gcgaugaaaacacguguuaaua

SEQ ID NO: 235419 - RNA, 23 nt, Artificial Sequence
  Synthetic
agcgaugaaaacacguguuaaua

SEQ ID NO: 235420 - RNA, 24 nt, Artificial Sequence
  Synthetic
aagcgaugaaaacacguguuaaua

SEQ ID NO: 235421 - RNA, 18 nt, Artificial Sequence
  Synthetic
uguugaugcuauuuaaua

SEQ ID NO: 235422 - RNA, 19 nt, Artificial Sequence
  Synthetic
auguugaugcuauuuaaua

SEQ ID NO: 235423 - RNA, 20 nt, Artificial Sequence
  Synthetic
gauguugaugcuauuuaaua

SEQ ID NO: 235424 - RNA, 21 nt, Artificial Sequence
  Synthetic
agauguugaugcuauuuaaua

SEQ ID NO: 235425 - RNA, 22 nt, Artificial Sequence
  Synthetic
cagauguugaugcuauuuaaua

SEQ ID NO: 235426 - RNA, 23 nt, Artificial Sequence
  Synthetic
ucagauguugaugcuauuuaaua

SEQ ID NO: 235427 - RNA, 24 nt, Artificial Sequence
  Synthetic
uucagauguugaugcuauuuaaua

SEQ ID NO: 235428 - RNA, 18 nt, Artificial Sequence
  Synthetic
aaagccauuuauuuaaua

SEQ ID NO: 235429 - RNA, 19 nt, Artificial Sequence
  Synthetic
uaaagccauuuauuuaaua

SEQ ID NO: 235430 - RNA, 20 nt, Artificial Sequence
  Synthetic
auaaagccauuuauuuaaua

SEQ ID NO: 235431 - RNA, 21 nt, Artificial Sequence
  Synthetic
cauaaagccauuuauuuaaua

SEQ ID NO: 235432 - RNA, 22 nt, Artificial Sequence
  Synthetic
gcauaaagccauuuauuuaaua

SEQ ID NO: 235433 - RNA, 23 nt, Artificial Sequence
  Synthetic
agcauaaagccauuuauuuaaua

SEQ ID NO: 235434 - RNA, 24 nt, Artificial Sequence
  Synthetic
aagcauaaagccauuuauuuaaua

SEQ ID NO: 235435 - RNA, 18 nt, Artificial Sequence
  Synthetic
uauaacaaaccuuuaaua

SEQ ID NO: 235436 - RNA, 19 nt, Artificial Sequence
  Synthetic
auauaacaaaccuuuaaua

SEQ ID NO: 235437 - RNA, 20 nt, Artificial Sequence
  Synthetic
uauauaacaaaccuuuaaua

SEQ ID NO: 235438 - RNA, 21 nt, Artificial Sequence
  Synthetic
auauauaacaaaccuuuaaua

SEQ ID NO: 235439 - RNA, 22 nt, Artificial Sequence
  Synthetic
cauauauaacaaaccuuuaaua

SEQ ID NO: 235440 - RNA, 23 nt, Artificial Sequence
  Synthetic
acauauauaacaaaccuuuaaua

SEQ ID NO: 235441 - RNA, 24 nt, Artificial Sequence
  Synthetic
aacauauauaacaaaccuuuaaua

SEQ ID NO: 235442 - RNA, 18 nt, Artificial Sequence
  Synthetic
ucccaaucugcuuuaaua

SEQ ID NO: 235443 - RNA, 19 nt, Artificial Sequence
  Synthetic
uucccaaucugcuuuaaua

SEQ ID NO: 235444 - RNA, 20 nt, Artificial Sequence
  Synthetic
auucccaaucugcuuuaaua

SEQ ID NO: 235445 - RNA, 21 nt, Artificial Sequence
  Synthetic
gauucccaaucugcuuuaaua

SEQ ID NO: 235446 - RNA, 22 nt, Artificial Sequence
  Synthetic
ggauucccaaucugcuuuaaua

SEQ ID NO: 235447 - RNA, 23 nt, Artificial Sequence
  Synthetic
uggauucccaaucugcuuuaaua

SEQ ID NO: 235448 - RNA, 24 nt, Artificial Sequence
  Synthetic
auggauucccaaucugcuuuaaua

SEQ ID NO: 235449 - RNA, 18 nt, Artificial Sequence
  Synthetic
aagggagggaguuuaaua

SEQ ID NO: 235450 - RNA, 19 nt, Artificial Sequence
  Synthetic
caagggagggaguuuaaua

SEQ ID NO: 235451 - RNA, 20 nt, Artificial Sequence
  Synthetic
ccaagggagggaguuuaaua

SEQ ID NO: 235452 - RNA, 21 nt, Artificial Sequence
  Synthetic
accaagggagggaguuuaaua

SEQ ID NO: 235453 - RNA, 22 nt, Artificial Sequence
  Synthetic
uaccaagggagggaguuuaaua

SEQ ID NO: 235454 - RNA, 23 nt, Artificial Sequence
  Synthetic
guaccaagggagggaguuuaaua

SEQ ID NO: 235455 - RNA, 24 nt, Artificial Sequence
  Synthetic
aguaccaagggagggaguuuaaua

SEQ ID NO: 235456 - RNA, 18 nt, Artificial Sequence
  Synthetic
aauagcauaauuuuaaua

SEQ ID NO: 235457 - RNA, 19 nt, Artificial Sequence
  Synthetic
uaauagcauaauuuuaaua

SEQ ID NO: 235458 - RNA, 20 nt, Artificial Sequence
  Synthetic
uuaauagcauaauuuuaaua

SEQ ID NO: 235459 - RNA, 21 nt, Artificial Sequence
  Synthetic
guuaauagcauaauuuuaaua

SEQ ID NO: 235460 - RNA, 22 nt, Artificial Sequence
  Synthetic
aguuaauagcauaauuuuaaua

SEQ ID NO: 235461 - RNA, 23 nt, Artificial Sequence
  Synthetic
caguuaauagcauaauuuuaaua

SEQ ID NO: 235462 - RNA, 24 nt, Artificial Sequence
  Synthetic
acaguuaauagcauaauuuuaaua

SEQ ID NO: 235463 - RNA, 18 nt, Artificial Sequence
  Synthetic
gcugcucugcuuuuaaua

SEQ ID NO: 235464 - RNA, 19 nt, Artificial Sequence
  Synthetic
ggcugcucugcuuuuaaua

SEQ ID NO: 235465 - RNA, 20 nt, Artificial Sequence
  Synthetic
aggcugcucugcuuuuaaua

SEQ ID NO: 235466 - RNA, 21 nt, Artificial Sequence
  Synthetic
uaggcugcucugcuuuuaaua

SEQ ID NO: 235467 - RNA, 22 nt, Artificial Sequence
  Synthetic
auaggcugcucugcuuuuaaua

SEQ ID NO: 235468 - RNA, 23 nt, Artificial Sequence
  Synthetic
cauaggcugcucugcuuuuaaua

SEQ ID NO: 235469 - RNA, 24 nt, Artificial Sequence
  Synthetic
ccauaggcugcucugcuuuuaaua

SEQ ID NO: 235470 - RNA, 18 nt, Artificial Sequence
  Synthetic
guaugcuguguuuuaaua

SEQ ID NO: 235471 - RNA, 19 nt, Artificial Sequence
  Synthetic
uguaugcuguguuuuaaua

SEQ ID NO: 235472 - RNA, 20 nt, Artificial Sequence
  Synthetic
guguaugcuguguuuuaaua

SEQ ID NO: 235473 - RNA, 21 nt, Artificial Sequence
  Synthetic
gguguaugcuguguuuuaaua

SEQ ID NO: 235474 - RNA, 22 nt, Artificial Sequence
  Synthetic
ugguguaugcuguguuuuaaua

SEQ ID NO: 235475 - RNA, 23 nt, Artificial Sequence
  Synthetic
augguguaugcuguguuuuaaua

SEQ ID NO: 235476 - RNA, 24 nt, Artificial Sequence
  Synthetic
uaugguguaugcuguguuuuaaua

SEQ ID NO: 235477 - RNA, 18 nt, Artificial Sequence
  Synthetic
aucauaauuguuuuaaua

SEQ ID NO: 235478 - RNA, 19 nt, Artificial Sequence
  Synthetic
aaucauaauuguuuuaaua

SEQ ID NO: 235479 - RNA, 20 nt, Artificial Sequence
  Synthetic
aaaucauaauuguuuuaaua

SEQ ID NO: 235480 - RNA, 21 nt, Artificial Sequence
  Synthetic
uaaaucauaauuguuuuaaua

SEQ ID NO: 235481 - RNA, 22 nt, Artificial Sequence
  Synthetic
auaaaucauaauuguuuuaaua

SEQ ID NO: 235482 - RNA, 23 nt, Artificial Sequence
  Synthetic
cauaaaucauaauuguuuuaaua

SEQ ID NO: 235483 - RNA, 24 nt, Artificial Sequence
  Synthetic
acauaaaucauaauuguuuuaaua

SEQ ID NO: 235484 - RNA, 18 nt, Artificial Sequence
  Synthetic
acggccuuauuuuuaaua

SEQ ID NO: 235485 - RNA, 19 nt, Artificial Sequence
  Synthetic
aacggccuuauuuuuaaua

SEQ ID NO: 235486 - RNA, 20 nt, Artificial Sequence
  Synthetic
gaacggccuuauuuuuaaua

SEQ ID NO: 235487 - RNA, 21 nt, Artificial Sequence
  Synthetic
ggaacggccuuauuuuuaaua

SEQ ID NO: 235488 - RNA, 22 nt, Artificial Sequence
  Synthetic
uggaacggccuuauuuuuaaua

SEQ ID NO: 235489 - RNA, 23 nt, Artificial Sequence
  Synthetic
guggaacggccuuauuuuuaaua

SEQ ID NO: 235490 - RNA, 24 nt, Artificial Sequence
  Synthetic
aguggaacggccuuauuuuuaaua

SEQ ID NO: 235491 - RNA, 18 nt, Artificial Sequence
  Synthetic
uguuacugcaaaaacaua

SEQ ID NO: 235492 - RNA, 19 nt, Artificial Sequence
  Synthetic
cuguuacugcaaaaacaua

SEQ ID NO: 235493 - RNA, 20 nt, Artificial Sequence
  Synthetic
ccuguuacugcaaaaacaua

SEQ ID NO: 235494 - RNA, 21 nt, Artificial Sequence
  Synthetic
accuguuacugcaaaaacaua

SEQ ID NO: 235495 - RNA, 22 nt, Artificial Sequence
  Synthetic
gaccuguuacugcaaaaacaua

SEQ ID NO: 235496 - RNA, 23 nt, Artificial Sequence
  Synthetic
ugaccuguuacugcaaaaacaua

SEQ ID NO: 235497 - RNA, 24 nt, Artificial Sequence
  Synthetic
augaccuguuacugcaaaaacaua

SEQ ID NO: 235498 - RNA, 18 nt, Artificial Sequence
  Synthetic
accagccuggaaaacaua

SEQ ID NO: 235499 - RNA, 19 nt, Artificial Sequence
  Synthetic
gaccagccuggaaaacaua

SEQ ID NO: 235500 - RNA, 20 nt, Artificial Sequence
  Synthetic
agaccagccuggaaaacaua

SEQ ID NO: 235501 - RNA, 21 nt, Artificial Sequence
  Synthetic
gagaccagccuggaaaacaua

SEQ ID NO: 235502 - RNA, 22 nt, Artificial Sequence
  Synthetic
ugagaccagccuggaaaacaua

SEQ ID NO: 235503 - RNA, 23 nt, Artificial Sequence
  Synthetic
uugagaccagccuggaaaacaua

SEQ ID NO: 235504 - RNA, 24 nt, Artificial Sequence
  Synthetic
uuugagaccagccuggaaaacaua

SEQ ID NO: 235505 - RNA, 18 nt, Artificial Sequence
  Synthetic
aaugaggauuaaaacaua

SEQ ID NO: 235506 - RNA, 19 nt, Artificial Sequence
  Synthetic
gaaugaggauuaaaacaua

SEQ ID NO: 235507 - RNA, 20 nt, Artificial Sequence
  Synthetic
agaaugaggauuaaaacaua

SEQ ID NO: 235508 - RNA, 21 nt, Artificial Sequence
  Synthetic
gagaaugaggauuaaaacaua

SEQ ID NO: 235509 - RNA, 22 nt, Artificial Sequence
  Synthetic
agagaaugaggauuaaaacaua

SEQ ID NO: 235510 - RNA, 23 nt, Artificial Sequence
  Synthetic
aagagaaugaggauuaaaacaua

SEQ ID NO: 235511 - RNA, 24 nt, Artificial Sequence
  Synthetic
gaagagaaugaggauuaaaacaua

SEQ ID NO: 235512 - RNA, 18 nt, Artificial Sequence
  Synthetic
cccaauugaccaaacaua

SEQ ID NO: 235513 - RNA, 19 nt, Artificial Sequence
  Synthetic
ucccaauugaccaaacaua

SEQ ID NO: 235514 - RNA, 20 nt, Artificial Sequence
  Synthetic
uucccaauugaccaaacaua

SEQ ID NO: 235515 - RNA, 21 nt, Artificial Sequence
  Synthetic
uuucccaauugaccaaacaua

SEQ ID NO: 235516 - RNA, 22 nt, Artificial Sequence
  Synthetic
guuucccaauugaccaaacaua

SEQ ID NO: 235517 - RNA, 23 nt, Artificial Sequence
  Synthetic
uguuucccaauugaccaaacaua

SEQ ID NO: 235518 - RNA, 24 nt, Artificial Sequence
  Synthetic
cuguuucccaauugaccaaacaua

SEQ ID NO: 235519 - RNA, 18 nt, Artificial Sequence
  Synthetic
ugaaaaauuucaaacaua

SEQ ID NO: 235520 - RNA, 19 nt, Artificial Sequence
  Synthetic
gugaaaaauuucaaacaua

SEQ ID NO: 235521 - RNA, 20 nt, Artificial Sequence
  Synthetic
ugugaaaaauuucaaacaua

SEQ ID NO: 235522 - RNA, 21 nt, Artificial Sequence
  Synthetic
uugugaaaaauuucaaacaua

SEQ ID NO: 235523 - RNA, 22 nt, Artificial Sequence
  Synthetic
uuugugaaaaauuucaaacaua

SEQ ID NO: 235524 - RNA, 23 nt, Artificial Sequence
  Synthetic
uuuugugaaaaauuucaaacaua

SEQ ID NO: 235525 - RNA, 24 nt, Artificial Sequence
  Synthetic
uuuuugugaaaaauuucaaacaua

SEQ ID NO: 235526 - RNA, 18 nt, Artificial Sequence
  Synthetic
gggaacaugagaaacaua

SEQ ID NO: 235527 - RNA, 19 nt, Artificial Sequence
  Synthetic
agggaacaugagaaacaua

SEQ ID NO: 235528 - RNA, 20 nt, Artificial Sequence
  Synthetic
aagggaacaugagaaacaua

SEQ ID NO: 235529 - RNA, 21 nt, Artificial Sequence
  Synthetic
caagggaacaugagaaacaua

SEQ ID NO: 235530 - RNA, 22 nt, Artificial Sequence
  Synthetic
ucaagggaacaugagaaacaua

SEQ ID NO: 235531 - RNA, 23 nt, Artificial Sequence
  Synthetic
cucaagggaacaugagaaacaua

SEQ ID NO: 235532 - RNA, 24 nt, Artificial Sequence
  Synthetic
ccucaagggaacaugagaaacaua

SEQ ID NO: 235533 - RNA, 18 nt, Artificial Sequence
  Synthetic
aucacccagggaaacaua

SEQ ID NO: 235534 - RNA, 19 nt, Artificial Sequence
  Synthetic
uaucacccagggaaacaua

SEQ ID NO: 235535 - RNA, 20 nt, Artificial Sequence
  Synthetic
auaucacccagggaaacaua

SEQ ID NO: 235536 - RNA, 21 nt, Artificial Sequence
  Synthetic
gauaucacccagggaaacaua

SEQ ID NO: 235537 - RNA, 22 nt, Artificial Sequence
  Synthetic
ugauaucacccagggaaacaua

SEQ ID NO: 235538 - RNA, 23 nt, Artificial Sequence
  Synthetic
gugauaucacccagggaaacaua

SEQ ID NO: 235539 - RNA, 24 nt, Artificial Sequence
  Synthetic
ggugauaucacccagggaaacaua

SEQ ID NO: 235540 - RNA, 18 nt, Artificial Sequence
  Synthetic
ucaguuuucguaaacaua

SEQ ID NO: 235541 - RNA, 19 nt, Artificial Sequence
  Synthetic
uucaguuuucguaaacaua

SEQ ID NO: 235542 - RNA, 20 nt, Artificial Sequence
  Synthetic
cuucaguuuucguaaacaua

SEQ ID NO: 235543 - RNA, 21 nt, Artificial Sequence
  Synthetic
ccuucaguuuucguaaacaua

SEQ ID NO: 235544 - RNA, 22 nt, Artificial Sequence
  Synthetic
cccuucaguuuucguaaacaua

SEQ ID NO: 235545 - RNA, 23 nt, Artificial Sequence
  Synthetic
ucccuucaguuuucguaaacaua

SEQ ID NO: 235546 - RNA, 24 nt, Artificial Sequence
  Synthetic
cucccuucaguuuucguaaacaua

SEQ ID NO: 235547 - RNA, 18 nt, Artificial Sequence
  Synthetic
agcuuaaaauuaaacaua

SEQ ID NO: 235548 - RNA, 19 nt, Artificial Sequence
  Synthetic
uagcuuaaaauuaaacaua

SEQ ID NO: 235549 - RNA, 20 nt, Artificial Sequence
  Synthetic
auagcuuaaaauuaaacaua

SEQ ID NO: 235550 - RNA, 21 nt, Artificial Sequence
  Synthetic
gauagcuuaaaauuaaacaua

SEQ ID NO: 235551 - RNA, 22 nt, Artificial Sequence
  Synthetic
ugauagcuuaaaauuaaacaua

SEQ ID NO: 235552 - RNA, 23 nt, Artificial Sequence
  Synthetic
augauagcuuaaaauuaaacaua

SEQ ID NO: 235553 - RNA, 24 nt, Artificial Sequence
  Synthetic
aaugauagcuuaaaauuaaacaua

SEQ ID NO: 235554 - RNA, 18 nt, Artificial Sequence
  Synthetic
uuuucauuuuuaaacaua

SEQ ID NO: 235555 - RNA, 19 nt, Artificial Sequence
  Synthetic
guuuucauuuuuaaacaua

SEQ ID NO: 235556 - RNA, 20 nt, Artificial Sequence
  Synthetic
aguuuucauuuuuaaacaua

SEQ ID NO: 235557 - RNA, 21 nt, Artificial Sequence
  Synthetic
gaguuuucauuuuuaaacaua

SEQ ID NO: 235558 - RNA, 22 nt, Artificial Sequence
  Synthetic
agaguuuucauuuuuaaacaua

SEQ ID NO: 235559 - RNA, 23 nt, Artificial Sequence
  Synthetic
aagaguuuucauuuuuaaacaua

SEQ ID NO: 235560 - RNA, 24 nt, Artificial Sequence
  Synthetic
gaagaguuuucauuuuuaaacaua

SEQ ID NO: 235561 - RNA, 18 nt, Artificial Sequence
  Synthetic
aaaaccuaccacaacaua

SEQ ID NO: 235562 - RNA, 19 nt, Artificial Sequence
  Synthetic
gaaaaccuaccacaacaua

SEQ ID NO: 235563 - RNA, 20 nt, Artificial Sequence
  Synthetic
ggaaaaccuaccacaacaua

SEQ ID NO: 235564 - RNA, 21 nt, Artificial Sequence
  Synthetic
gggaaaaccuaccacaacaua

SEQ ID NO: 235565 - RNA, 22 nt, Artificial Sequence
  Synthetic
agggaaaaccuaccacaacaua

SEQ ID NO: 235566 - RNA, 23 nt, Artificial Sequence
  Synthetic
cagggaaaaccuaccacaacaua

SEQ ID NO: 235567 - RNA, 24 nt, Artificial Sequence
  Synthetic
ucagggaaaaccuaccacaacaua

SEQ ID NO: 235568 - RNA, 18 nt, Artificial Sequence
  Synthetic
accagccuggacaacaua

SEQ ID NO: 235569 - RNA, 19 nt, Artificial Sequence
  Synthetic
gaccagccuggacaacaua

SEQ ID NO: 235570 - RNA, 20 nt, Artificial Sequence
  Synthetic
agaccagccuggacaacaua

SEQ ID NO: 235571 - RNA, 21 nt, Artificial Sequence
  Synthetic
aagaccagccuggacaacaua

SEQ ID NO: 235572 - RNA, 22 nt, Artificial Sequence
  Synthetic
uaagaccagccuggacaacaua

SEQ ID NO: 235573 - RNA, 23 nt, Artificial Sequence
  Synthetic
uuaagaccagccuggacaacaua

SEQ ID NO: 235574 - RNA, 24 nt, Artificial Sequence
  Synthetic
uuuaagaccagccuggacaacaua

SEQ ID NO: 235575 - RNA, 18 nt, Artificial Sequence
  Synthetic
uggauugcugacaacaua

SEQ ID NO: 235576 - RNA, 19 nt, Artificial Sequence
  Synthetic
auggauugcugacaacaua

SEQ ID NO: 235577 - RNA, 20 nt, Artificial Sequence
  Synthetic
aauggauugcugacaacaua

SEQ ID NO: 235578 - RNA, 21 nt, Artificial Sequence
  Synthetic
caauggauugcugacaacaua

SEQ ID NO: 235579 - RNA, 22 nt, Artificial Sequence
  Synthetic
gcaauggauugcugacaacaua

SEQ ID NO: 235580 - RNA, 23 nt, Artificial Sequence
  Synthetic
agcaauggauugcugacaacaua

SEQ ID NO: 235581 - RNA, 24 nt, Artificial Sequence
  Synthetic
aagcaauggauugcugacaacaua

SEQ ID NO: 235582 - RNA, 18 nt, Artificial Sequence
  Synthetic
accagcuugcccaacaua

SEQ ID NO: 235583 - RNA, 19 nt, Artificial Sequence
  Synthetic
gaccagcuugcccaacaua

SEQ ID NO: 235584 - RNA, 20 nt, Artificial Sequence
  Synthetic
agaccagcuugcccaacaua

SEQ ID NO: 235585 - RNA, 21 nt, Artificial Sequence
  Synthetic
gagaccagcuugcccaacaua

SEQ ID NO: 235586 - RNA, 22 nt, Artificial Sequence
  Synthetic
ugagaccagcuugcccaacaua

SEQ ID NO: 235587 - RNA, 23 nt, Artificial Sequence
  Synthetic
uugagaccagcuugcccaacaua

SEQ ID NO: 235588 - RNA, 24 nt, Artificial Sequence
  Synthetic
uuugagaccagcuugcccaacaua

SEQ ID NO: 235589 - RNA, 19 nt, Artificial Sequence
  Synthetic
aaccagccuggccaacaua

SEQ ID NO: 235590 - RNA, 20 nt, Artificial Sequence
  Synthetic
aaaccagccuggccaacaua

SEQ ID NO: 235591 - RNA, 21 nt, Artificial Sequence
  Synthetic
gaaaccagccuggccaacaua

SEQ ID NO: 235592 - RNA, 22 nt, Artificial Sequence
  Synthetic
cgaaaccagccuggccaacaua

SEQ ID NO: 235593 - RNA, 23 nt, Artificial Sequence
  Synthetic
ucgaaaccagccuggccaacaua

SEQ ID NO: 235594 - RNA, 24 nt, Artificial Sequence
  Synthetic
uucgaaaccagccuggccaacaua

SEQ ID NO: 235595 - RNA, 18 nt, Artificial Sequence
  Synthetic
accagccugggcaacaua

SEQ ID NO: 235596 - RNA, 19 nt, Artificial Sequence
  Synthetic
gaccagccugggcaacaua

SEQ ID NO: 235597 - RNA, 20 nt, Artificial Sequence
  Synthetic
agaccagccugggcaacaua

SEQ ID NO: 235598 - RNA, 21 nt, Artificial Sequence
  Synthetic
gagaccagccugggcaacaua

SEQ ID NO: 235599 - RNA, 22 nt, Artificial Sequence
  Synthetic
ugagaccagccugggcaacaua

SEQ ID NO: 235600 - RNA, 23 nt, Artificial Sequence
  Synthetic
uugagaccagccugggcaacaua

SEQ ID NO: 235601 - RNA, 24 nt, Artificial Sequence
  Synthetic
uuugagaccagccugggcaacaua

SEQ ID NO: 235602 - RNA, 18 nt, Artificial Sequence
  Synthetic
ucaggacaaaucaacaua

SEQ ID NO: 235603 - RNA, 19 nt, Artificial Sequence
  Synthetic
aucaggacaaaucaacaua

SEQ ID NO: 235604 - RNA, 20 nt, Artificial Sequence
  Synthetic
uaucaggacaaaucaacaua

SEQ ID NO: 235605 - RNA, 21 nt, Artificial Sequence
  Synthetic
uuaucaggacaaaucaacaua

SEQ ID NO: 235606 - RNA, 22 nt, Artificial Sequence
  Synthetic
auuaucaggacaaaucaacaua

SEQ ID NO: 235607 - RNA, 23 nt, Artificial Sequence
  Synthetic
aauuaucaggacaaaucaacaua

SEQ ID NO: 235608 - RNA, 24 nt, Artificial Sequence
  Synthetic
uaauuaucaggacaaaucaacaua

SEQ ID NO: 235609 - RNA, 18 nt, Artificial Sequence
  Synthetic
aaugguuuuaucaacaua

SEQ ID NO: 235610 - RNA, 19 nt, Artificial Sequence
  Synthetic
caaugguuuuaucaacaua

SEQ ID NO: 235611 - RNA, 20 nt, Artificial Sequence
  Synthetic
ccaaugguuuuaucaacaua

SEQ ID NO: 235612 - RNA, 21 nt, Artificial Sequence
  Synthetic
accaaugguuuuaucaacaua

SEQ ID NO: 235613 - RNA, 22 nt, Artificial Sequence
  Synthetic
aaccaaugguuuuaucaacaua

SEQ ID NO: 235614 - RNA, 23 nt, Artificial Sequence
  Synthetic
uaaccaaugguuuuaucaacaua

SEQ ID NO: 235615 - RNA, 24 nt, Artificial Sequence
  Synthetic
guaaccaaugguuuuaucaacaua

SEQ ID NO: 235616 - RNA, 18 nt, Artificial Sequence
  Synthetic
ccaggcugguucaacaua

SEQ ID NO: 235617 - RNA, 19 nt, Artificial Sequence
  Synthetic
gccaggcugguucaacaua

SEQ ID NO: 235618 - RNA, 20 nt, Artificial Sequence
  Synthetic
ugccaggcugguucaacaua

SEQ ID NO: 235619 - RNA, 21 nt, Artificial Sequence
  Synthetic
augccaggcugguucaacaua

SEQ ID NO: 235620 - RNA, 22 nt, Artificial Sequence
  Synthetic
gaugccaggcugguucaacaua

SEQ ID NO: 235621 - RNA, 23 nt, Artificial Sequence
  Synthetic
ggaugccaggcugguucaacaua

SEQ ID NO: 235622 - RNA, 24 nt, Artificial Sequence
  Synthetic
gggaugccaggcugguucaacaua

SEQ ID NO: 235623 - RNA, 18 nt, Artificial Sequence
  Synthetic
auauguucccagaacaua

SEQ ID NO: 235624 - RNA, 19 nt, Artificial Sequence
  Synthetic
uauauguucccagaacaua

SEQ ID NO: 235625 - RNA, 20 nt, Artificial Sequence
  Synthetic
uuauauguucccagaacaua

SEQ ID NO: 235626 - RNA, 21 nt, Artificial Sequence
  Synthetic
cuuauauguucccagaacaua

SEQ ID NO: 235627 - RNA, 22 nt, Artificial Sequence
  Synthetic
acuuauauguucccagaacaua

SEQ ID NO: 235628 - RNA, 23 nt, Artificial Sequence
  Synthetic
aacuuauauguucccagaacaua

SEQ ID NO: 235629 - RNA, 24 nt, Artificial Sequence
  Synthetic
caacuuauauguucccagaacaua

SEQ ID NO: 235630 - RNA, 18 nt, Artificial Sequence
  Synthetic
gcuacuuaguggaacaua

SEQ ID NO: 235631 - RNA, 19 nt, Artificial Sequence
  Synthetic
ggcuacuuaguggaacaua

SEQ ID NO: 235632 - RNA, 20 nt, Artificial Sequence
  Synthetic
uggcuacuuaguggaacaua

SEQ ID NO: 235633 - RNA, 21 nt, Artificial Sequence
  Synthetic
auggcuacuuaguggaacaua

SEQ ID NO: 235634 - RNA, 22 nt, Artificial Sequence
  Synthetic
aauggcuacuuaguggaacaua

SEQ ID NO: 235635 - RNA, 23 nt, Artificial Sequence
  Synthetic
aaauggcuacuuaguggaacaua

SEQ ID NO: 235636 - RNA, 24 nt, Artificial Sequence
  Synthetic
aaaauggcuacuuaguggaacaua

SEQ ID NO: 235637 - RNA, 18 nt, Artificial Sequence
  Synthetic
aacagugcuuggaacaua

SEQ ID NO: 235638 - RNA, 19 nt, Artificial Sequence
  Synthetic
gaacagugcuuggaacaua

SEQ ID NO: 235639 - RNA, 20 nt, Artificial Sequence
  Synthetic
ggaacagugcuuggaacaua

SEQ ID NO: 235640 - RNA, 21 nt, Artificial Sequence
  Synthetic
uggaacagugcuuggaacaua

SEQ ID NO: 235641 - RNA, 22 nt, Artificial Sequence
  Synthetic
auggaacagugcuuggaacaua

SEQ ID NO: 235642 - RNA, 23 nt, Artificial Sequence
  Synthetic
cauggaacagugcuuggaacaua

SEQ ID NO: 235643 - RNA, 24 nt, Artificial Sequence
  Synthetic
acauggaacagugcuuggaacaua

SEQ ID NO: 235644 - RNA, 18 nt, Artificial Sequence
  Synthetic
cagcauuuaaguaacaua

SEQ ID NO: 235645 - RNA, 19 nt, Artificial Sequence
  Synthetic
acagcauuuaaguaacaua

SEQ ID NO: 235646 - RNA, 20 nt, Artificial Sequence
  Synthetic
gacagcauuuaaguaacaua

SEQ ID NO: 235647 - RNA, 21 nt, Artificial Sequence
  Synthetic
agacagcauuuaaguaacaua

SEQ ID NO: 235648 - RNA, 22 nt, Artificial Sequence
  Synthetic
cagacagcauuuaaguaacaua

SEQ ID NO: 235649 - RNA, 23 nt, Artificial Sequence
  Synthetic
acagacagcauuuaaguaacaua

SEQ ID NO: 235650 - RNA, 24 nt, Artificial Sequence
  Synthetic
uacagacagcauuuaaguaacaua

SEQ ID NO: 235651 - RNA, 18 nt, Artificial Sequence
  Synthetic
ucuauaauuuuuaacaua

SEQ ID NO: 235652 - RNA, 19 nt, Artificial Sequence
  Synthetic
cucuauaauuuuuaacaua

SEQ ID NO: 235653 - RNA, 20 nt, Artificial Sequence
  Synthetic
ucucuauaauuuuuaacaua

SEQ ID NO: 235654 - RNA, 21 nt, Artificial Sequence
  Synthetic
cucucuauaauuuuuaacaua

SEQ ID NO: 235655 - RNA, 22 nt, Artificial Sequence
  Synthetic
gcucucuauaauuuuuaacaua

SEQ ID NO: 235656 - RNA, 23 nt, Artificial Sequence
  Synthetic
ugcucucuauaauuuuuaacaua

SEQ ID NO: 235657 - RNA, 24 nt, Artificial Sequence
  Synthetic
uugcucucuauaauuuuuaacaua

SEQ ID NO: 235658 - RNA, 18 nt, Artificial Sequence
  Synthetic
auacuaaauuaacacaua

SEQ ID NO: 235659 - RNA, 19 nt, Artificial Sequence
  Synthetic
gauacuaaauuaacacaua

SEQ ID NO: 235660 - RNA, 20 nt, Artificial Sequence
  Synthetic
agauacuaaauuaacacaua

SEQ ID NO: 235661 - RNA, 21 nt, Artificial Sequence
  Synthetic
uagauacuaaauuaacacaua

SEQ ID NO: 235662 - RNA, 22 nt, Artificial Sequence
  Synthetic
uuagauacuaaauuaacacaua

SEQ ID NO: 235663 - RNA, 23 nt, Artificial Sequence
  Synthetic
cuuagauacuaaauuaacacaua

SEQ ID NO: 235664 - RNA, 24 nt, Artificial Sequence
  Synthetic
gcuuagauacuaaauuaacacaua

SEQ ID NO: 235665 - RNA, 18 nt, Artificial Sequence
  Synthetic
uauauauauacacacaua

SEQ ID NO: 235666 - RNA, 19 nt, Artificial Sequence
  Synthetic
uuauauauauacacacaua

SEQ ID NO: 235667 - RNA, 20 nt, Artificial Sequence
  Synthetic
auuauauauauacacacaua

SEQ ID NO: 235668 - RNA, 21 nt, Artificial Sequence
  Synthetic
uauuauauauauacacacaua

SEQ ID NO: 235669 - RNA, 22 nt, Artificial Sequence
  Synthetic
auauuauauauauacacacaua

SEQ ID NO: 235670 - RNA, 23 nt, Artificial Sequence
  Synthetic
aauauuauauauauacacacaua

SEQ ID NO: 235671 - RNA, 24 nt, Artificial Sequence
  Synthetic
uaauauuauauauauacacacaua

SEQ ID NO: 235672 - RNA, 18 nt, Artificial Sequence
  Synthetic
agaacacauggacacaua

SEQ ID NO: 235673 - RNA, 19 nt, Artificial Sequence
  Synthetic
gagaacacauggacacaua

SEQ ID NO: 235674 - RNA, 20 nt, Artificial Sequence
  Synthetic
ugagaacacauggacacaua

SEQ ID NO: 235675 - RNA, 21 nt, Artificial Sequence
  Synthetic
augagaacacauggacacaua

SEQ ID NO: 235676 - RNA, 22 nt, Artificial Sequence
  Synthetic
gaugagaacacauggacacaua

SEQ ID NO: 235677 - RNA, 23 nt, Artificial Sequence
  Synthetic
ugaugagaacacauggacacaua

SEQ ID NO: 235678 - RNA, 24 nt, Artificial Sequence
  Synthetic
gugaugagaacacauggacacaua

SEQ ID NO: 235679 - RNA, 18 nt, Artificial Sequence
  Synthetic
auauuuuauauacacaua

SEQ ID NO: 235680 - RNA, 19 nt, Artificial Sequence
  Synthetic
aauauuuuauauacacaua

SEQ ID NO: 235681 - RNA, 20 nt, Artificial Sequence
  Synthetic
gaauauuuuauauacacaua

SEQ ID NO: 235682 - RNA, 21 nt, Artificial Sequence
  Synthetic
ugaauauuuuauauacacaua

SEQ ID NO: 235683 - RNA, 22 nt, Artificial Sequence
  Synthetic
augaauauuuuauauacacaua

SEQ ID NO: 235684 - RNA, 23 nt, Artificial Sequence
  Synthetic
uaugaauauuuuauauacacaua

SEQ ID NO: 235685 - RNA, 24 nt, Artificial Sequence
  Synthetic
cuaugaauauuuuauauacacaua

SEQ ID NO: 235686 - RNA, 18 nt, Artificial Sequence
  Synthetic
gcuuuacacucccacaua

SEQ ID NO: 235687 - RNA, 19 nt, Artificial Sequence
  Synthetic
agcuuuacacucccacaua

SEQ ID NO: 235688 - RNA, 20 nt, Artificial Sequence
  Synthetic
aagcuuuacacucccacaua

SEQ ID NO: 235689 - RNA, 21 nt, Artificial Sequence
  Synthetic
gaagcuuuacacucccacaua

SEQ ID NO: 235690 - RNA, 22 nt, Artificial Sequence
  Synthetic
ugaagcuuuacacucccacaua

SEQ ID NO: 235691 - RNA, 23 nt, Artificial Sequence
  Synthetic
augaagcuuuacacucccacaua

SEQ ID NO: 235692 - RNA, 24 nt, Artificial Sequence
  Synthetic
caugaagcuuuacacucccacaua

SEQ ID NO: 235693 - RNA, 18 nt, Artificial Sequence
  Synthetic
uauaaccaaagccacaua

SEQ ID NO: 235694 - RNA, 19 nt, Artificial Sequence
  Synthetic
auauaaccaaagccacaua

SEQ ID NO: 235695 - RNA, 20 nt, Artificial Sequence
  Synthetic
uauauaaccaaagccacaua

SEQ ID NO: 235696 - RNA, 21 nt, Artificial Sequence
  Synthetic
auauauaaccaaagccacaua

SEQ ID NO: 235697 - RNA, 22 nt, Artificial Sequence
  Synthetic
aauauauaaccaaagccacaua

SEQ ID NO: 235698 - RNA, 23 nt, Artificial Sequence
  Synthetic
caauauauaaccaaagccacaua

SEQ ID NO: 235699 - RNA, 24 nt, Artificial Sequence
  Synthetic
ucaauauauaaccaaagccacaua

SEQ ID NO: 235700 - RNA, 18 nt, Artificial Sequence
  Synthetic
auaucacacauccacaua

SEQ ID NO: 235701 - RNA, 19 nt, Artificial Sequence
  Synthetic
cauaucacacauccacaua

SEQ ID NO: 235702 - RNA, 20 nt, Artificial Sequence
  Synthetic
ucauaucacacauccacaua

SEQ ID NO: 235703 - RNA, 21 nt, Artificial Sequence
  Synthetic
gucauaucacacauccacaua

SEQ ID NO: 235704 - RNA, 22 nt, Artificial Sequence
  Synthetic
agucauaucacacauccacaua

SEQ ID NO: 235705 - RNA, 23 nt, Artificial Sequence
  Synthetic
cagucauaucacacauccacaua

SEQ ID NO: 235706 - RNA, 24 nt, Artificial Sequence
  Synthetic
ucagucauaucacacauccacaua

SEQ ID NO: 235707 - RNA, 18 nt, Artificial Sequence
  Synthetic
uguggcaaacagcacaua

SEQ ID NO: 235708 - RNA, 19 nt, Artificial Sequence
  Synthetic
uuguggcaaacagcacaua

SEQ ID NO: 235709 - RNA, 20 nt, Artificial Sequence
  Synthetic
auuguggcaaacagcacaua

SEQ ID NO: 235710 - RNA, 21 nt, Artificial Sequence
  Synthetic
uauuguggcaaacagcacaua

SEQ ID NO: 235711 - RNA, 22 nt, Artificial Sequence
  Synthetic
uuauuguggcaaacagcacaua

SEQ ID NO: 235712 - RNA, 23 nt, Artificial Sequence
  Synthetic
uuuauuguggcaaacagcacaua

SEQ ID NO: 235713 - RNA, 24 nt, Artificial Sequence
  Synthetic
uuuuauuguggcaaacagcacaua

SEQ ID NO: 235714 - RNA, 18 nt, Artificial Sequence
  Synthetic
cuguuuugugggcacaua

SEQ ID NO: 235715 - RNA, 19 nt, Artificial Sequence
  Synthetic
acuguuuugugggcacaua

SEQ ID NO: 235716 - RNA, 20 nt, Artificial Sequence
  Synthetic
uacuguuuugugggcacaua

SEQ ID NO: 235717 - RNA, 21 nt, Artificial Sequence
  Synthetic
auacuguuuugugggcacaua

SEQ ID NO: 235718 - RNA, 22 nt, Artificial Sequence
  Synthetic
uauacuguuuugugggcacaua

SEQ ID NO: 235719 - RNA, 23 nt, Artificial Sequence
  Synthetic
guauacuguuuugugggcacaua

SEQ ID NO: 235720 - RNA, 24 nt, Artificial Sequence
  Synthetic
uguauacuguuuugugggcacaua

SEQ ID NO: 235721 - RNA, 18 nt, Artificial Sequence
  Synthetic
uuguacucauggcacaua

SEQ ID NO: 235722 - RNA, 19 nt, Artificial Sequence
  Synthetic
uuuguacucauggcacaua

SEQ ID NO: 235723 - RNA, 20 nt, Artificial Sequence
  Synthetic
uuuuguacucauggcacaua

SEQ ID NO: 235724 - RNA, 21 nt, Artificial Sequence
  Synthetic
cuuuuguacucauggcacaua

SEQ ID NO: 235725 - RNA, 22 nt, Artificial Sequence
  Synthetic
gcuuuuguacucauggcacaua

SEQ ID NO: 235726 - RNA, 23 nt, Artificial Sequence
  Synthetic
ugcuuuuguacucauggcacaua

SEQ ID NO: 235727 - RNA, 24 nt, Artificial Sequence
  Synthetic
uugcuuuuguacucauggcacaua

SEQ ID NO: 235728 - RNA, 18 nt, Artificial Sequence
  Synthetic
aguuacagcaugcacaua

SEQ ID NO: 235729 - RNA, 19 nt, Artificial Sequence
  Synthetic
gaguuacagcaugcacaua

SEQ ID NO: 235730 - RNA, 20 nt, Artificial Sequence
  Synthetic
ggaguuacagcaugcacaua

SEQ ID NO: 235731 - RNA, 21 nt, Artificial Sequence
  Synthetic
uggaguuacagcaugcacaua

SEQ ID NO: 235732 - RNA, 22 nt, Artificial Sequence
  Synthetic
guggaguuacagcaugcacaua

SEQ ID NO: 235733 - RNA, 23 nt, Artificial Sequence
  Synthetic
gguggaguuacagcaugcacaua

SEQ ID NO: 235734 - RNA, 24 nt, Artificial Sequence
  Synthetic
ugguggaguuacagcaugcacaua

SEQ ID NO: 235735 - RNA, 18 nt, Artificial Sequence
  Synthetic
uauaaaauggugcacaua

SEQ ID NO: 235736 - RNA, 19 nt, Artificial Sequence
  Synthetic
guauaaaauggugcacaua

SEQ ID NO: 235737 - RNA, 20 nt, Artificial Sequence
  Synthetic
aguauaaaauggugcacaua

SEQ ID NO: 235738 - RNA, 21 nt, Artificial Sequence
  Synthetic
caguauaaaauggugcacaua

SEQ ID NO: 235739 - RNA, 22 nt, Artificial Sequence
  Synthetic
acaguauaaaauggugcacaua

SEQ ID NO: 235740 - RNA, 23 nt, Artificial Sequence
  Synthetic
gacaguauaaaauggugcacaua

SEQ ID NO: 235741 - RNA, 24 nt, Artificial Sequence
  Synthetic
agacaguauaaaauggugcacaua

SEQ ID NO: 235742 - RNA, 18 nt, Artificial Sequence
  Synthetic
cuuuucuaucaucacaua

SEQ ID NO: 235743 - RNA, 19 nt, Artificial Sequence
  Synthetic
ccuuuucuaucaucacaua

SEQ ID NO: 235744 - RNA, 20 nt, Artificial Sequence
  Synthetic
accuuuucuaucaucacaua

SEQ ID NO: 235745 - RNA, 21 nt, Artificial Sequence
  Synthetic
uaccuuuucuaucaucacaua

SEQ ID NO: 235746 - RNA, 22 nt, Artificial Sequence
  Synthetic
auaccuuuucuaucaucacaua

SEQ ID NO: 235747 - RNA, 23 nt, Artificial Sequence
  Synthetic
gauaccuuuucuaucaucacaua

SEQ ID NO: 235748 - RNA, 24 nt, Artificial Sequence
  Synthetic
ugauaccuuuucuaucaucacaua

SEQ ID NO: 235749 - RNA, 18 nt, Artificial Sequence
  Synthetic
acaggauggagucacaua

SEQ ID NO: 235750 - RNA, 19 nt, Artificial Sequence
  Synthetic
aacaggauggagucacaua

SEQ ID NO: 235751 - RNA, 20 nt, Artificial Sequence
  Synthetic
aaacaggauggagucacaua

SEQ ID NO: 235752 - RNA, 21 nt, Artificial Sequence
  Synthetic
gaaacaggauggagucacaua

SEQ ID NO: 235753 - RNA, 22 nt, Artificial Sequence
  Synthetic
ugaaacaggauggagucacaua

SEQ ID NO: 235754 - RNA, 23 nt, Artificial Sequence
  Synthetic
augaaacaggauggagucacaua

SEQ ID NO: 235755 - RNA, 24 nt, Artificial Sequence
  Synthetic
aaugaaacaggauggagucacaua

SEQ ID NO: 235756 - RNA, 18 nt, Artificial Sequence
  Synthetic
uuaaauuuccuucacaua

SEQ ID NO: 235757 - RNA, 19 nt, Artificial Sequence
  Synthetic
auuaaauuuccuucacaua

SEQ ID NO: 235758 - RNA, 20 nt, Artificial Sequence
  Synthetic
uauuaaauuuccuucacaua

SEQ ID NO: 235759 - RNA, 21 nt, Artificial Sequence
  Synthetic
cuauuaaauuuccuucacaua

SEQ ID NO: 235760 - RNA, 22 nt, Artificial Sequence
  Synthetic
acuauuaaauuuccuucacaua

SEQ ID NO: 235761 - RNA, 23 nt, Artificial Sequence
  Synthetic
uacuauuaaauuuccuucacaua

SEQ ID NO: 235762 - RNA, 24 nt, Artificial Sequence
  Synthetic
auacuauuaaauuuccuucacaua

SEQ ID NO: 235763 - RNA, 18 nt, Artificial Sequence
  Synthetic
gugagagagacagacaua

SEQ ID NO: 235764 - RNA, 19 nt, Artificial Sequence
  Synthetic
agugagagagacagacaua

SEQ ID NO: 235765 - RNA, 20 nt, Artificial Sequence
  Synthetic
aagugagagagacagacaua

SEQ ID NO: 235766 - RNA, 21 nt, Artificial Sequence
  Synthetic
aaagugagagagacagacaua

SEQ ID NO: 235767 - RNA, 22 nt, Artificial Sequence
  Synthetic
gaaagugagagagacagacaua

SEQ ID NO: 235768 - RNA, 23 nt, Artificial Sequence
  Synthetic
agaaagugagagagacagacaua

SEQ ID NO: 235769 - RNA, 24 nt, Artificial Sequence
  Synthetic
gagaaagugagagagacagacaua

SEQ ID NO: 235770 - RNA, 18 nt, Artificial Sequence
  Synthetic
gaaagcaaaucagacaua

SEQ ID NO: 235771 - RNA, 19 nt, Artificial Sequence
  Synthetic
ggaaagcaaaucagacaua

SEQ ID NO: 235772 - RNA, 20 nt, Artificial Sequence
  Synthetic
aggaaagcaaaucagacaua

SEQ ID NO: 235773 - RNA, 21 nt, Artificial Sequence
  Synthetic
gaggaaagcaaaucagacaua

SEQ ID NO: 235774 - RNA, 22 nt, Artificial Sequence
  Synthetic
agaggaaagcaaaucagacaua

SEQ ID NO: 235775 - RNA, 23 nt, Artificial Sequence
  Synthetic
aagaggaaagcaaaucagacaua

SEQ ID NO: 235776 - RNA, 24 nt, Artificial Sequence
  Synthetic
aaagaggaaagcaaaucagacaua

SEQ ID NO: 235777 - RNA, 18 nt, Artificial Sequence
  Synthetic
uugaagaaaugcgacaua

SEQ ID NO: 235778 - RNA, 19 nt, Artificial Sequence
  Synthetic
auugaagaaaugcgacaua

SEQ ID NO: 235779 - RNA, 20 nt, Artificial Sequence
  Synthetic
aauugaagaaaugcgacaua

SEQ ID NO: 235780 - RNA, 21 nt, Artificial Sequence
  Synthetic
gaauugaagaaaugcgacaua

SEQ ID NO: 235781 - RNA, 22 nt, Artificial Sequence
  Synthetic
ugaauugaagaaaugcgacaua

SEQ ID NO: 235782 - RNA, 23 nt, Artificial Sequence
  Synthetic
augaauugaagaaaugcgacaua

SEQ ID NO: 235783 - RNA, 24 nt, Artificial Sequence
  Synthetic
uaugaauugaagaaaugcgacaua

SEQ ID NO: 235784 - RNA, 18 nt, Artificial Sequence
  Synthetic
aguaggccauaggacaua

SEQ ID NO: 235785 - RNA, 19 nt, Artificial Sequence
  Synthetic
gaguaggccauaggacaua

SEQ ID NO: 235786 - RNA, 20 nt, Artificial Sequence
  Synthetic
agaguaggccauaggacaua

SEQ ID NO: 235787 - RNA, 21 nt, Artificial Sequence
  Synthetic
gagaguaggccauaggacaua

SEQ ID NO: 235788 - RNA, 22 nt, Artificial Sequence
  Synthetic
ugagaguaggccauaggacaua

SEQ ID NO: 235789 - RNA, 23 nt, Artificial Sequence
  Synthetic
augagaguaggccauaggacaua

SEQ ID NO: 235790 - RNA, 24 nt, Artificial Sequence
  Synthetic
caugagaguaggccauaggacaua

SEQ ID NO: 235791 - RNA, 18 nt, Artificial Sequence
  Synthetic
ccauuguauauggacaua

SEQ ID NO: 235792 - RNA, 19 nt, Artificial Sequence
  Synthetic
cccauuguauauggacaua

SEQ ID NO: 235793 - RNA, 20 nt, Artificial Sequence
  Synthetic
acccauuguauauggacaua

SEQ ID NO: 235794 - RNA, 21 nt, Artificial Sequence
  Synthetic
aacccauuguauauggacaua

SEQ ID NO: 235795 - RNA, 22 nt, Artificial Sequence
  Synthetic
uaacccauuguauauggacaua

SEQ ID NO: 235796 - RNA, 23 nt, Artificial Sequence
  Synthetic
auaacccauuguauauggacaua

SEQ ID NO: 235797 - RNA, 24 nt, Artificial Sequence
  Synthetic
aauaacccauuguauauggacaua

SEQ ID NO: 235798 - RNA, 18 nt, Artificial Sequence
  Synthetic
gaaaaaggaagugacaua

SEQ ID NO: 235799 - RNA, 19 nt, Artificial Sequence
  Synthetic
agaaaaaggaagugacaua

SEQ ID NO: 235800 - RNA, 20 nt, Artificial Sequence
  Synthetic
uagaaaaaggaagugacaua

SEQ ID NO: 235801 - RNA, 21 nt, Artificial Sequence
  Synthetic
auagaaaaaggaagugacaua

SEQ ID NO: 235802 - RNA, 22 nt, Artificial Sequence
  Synthetic
gauagaaaaaggaagugacaua

SEQ ID NO: 235803 - RNA, 23 nt, Artificial Sequence
  Synthetic
agauagaaaaaggaagugacaua

SEQ ID NO: 235804 - RNA, 24 nt, Artificial Sequence
  Synthetic
uagauagaaaaaggaagugacaua

SEQ ID NO: 235805 - RNA, 18 nt, Artificial Sequence
  Synthetic
uucgcaacaugugacaua

SEQ ID NO: 235806 - RNA, 19 nt, Artificial Sequence
  Synthetic
auucgcaacaugugacaua

SEQ ID NO: 235807 - RNA, 20 nt, Artificial Sequence
  Synthetic
uauucgcaacaugugacaua

SEQ ID NO: 235808 - RNA, 21 nt, Artificial Sequence
  Synthetic
guauucgcaacaugugacaua

SEQ ID NO: 235809 - RNA, 22 nt, Artificial Sequence
  Synthetic
uguauucgcaacaugugacaua

SEQ ID NO: 235810 - RNA, 23 nt, Artificial Sequence
  Synthetic
auguauucgcaacaugugacaua

SEQ ID NO: 235811 - RNA, 24 nt, Artificial Sequence
  Synthetic
gauguauucgcaacaugugacaua

SEQ ID NO: 235812 - RNA, 18 nt, Artificial Sequence
  Synthetic
uaagauaagcaauacaua

SEQ ID NO: 235813 - RNA, 19 nt, Artificial Sequence
  Synthetic
uuaagauaagcaauacaua

SEQ ID NO: 235814 - RNA, 20 nt, Artificial Sequence
  Synthetic
auuaagauaagcaauacaua

SEQ ID NO: 235815 - RNA, 21 nt, Artificial Sequence
  Synthetic
uauuaagauaagcaauacaua

SEQ ID NO: 235816 - RNA, 22 nt, Artificial Sequence
  Synthetic
uuauuaagauaagcaauacaua

SEQ ID NO: 235817 - RNA, 23 nt, Artificial Sequence
  Synthetic
cuuauuaagauaagcaauacaua

SEQ ID NO: 235818 - RNA, 24 nt, Artificial Sequence
  Synthetic
acuuauuaagauaagcaauacaua

SEQ ID NO: 235819 - RNA, 18 nt, Artificial Sequence
  Synthetic
gugaugaaugcauacaua

SEQ ID NO: 235820 - RNA, 19 nt, Artificial Sequence
  Synthetic
ugugaugaaugcauacaua

SEQ ID NO: 235821 - RNA, 20 nt, Artificial Sequence
  Synthetic
uugugaugaaugcauacaua

SEQ ID NO: 235822 - RNA, 21 nt, Artificial Sequence
  Synthetic
uuugugaugaaugcauacaua

SEQ ID NO: 235823 - RNA, 22 nt, Artificial Sequence
  Synthetic
guuugugaugaaugcauacaua

SEQ ID NO: 235824 - RNA, 23 nt, Artificial Sequence
  Synthetic
aguuugugaugaaugcauacaua

SEQ ID NO: 235825 - RNA, 24 nt, Artificial Sequence
  Synthetic
aaguuugugaugaaugcauacaua

SEQ ID NO: 235826 - RNA, 18 nt, Artificial Sequence
  Synthetic
gcuauguacugauacaua

SEQ ID NO: 235827 - RNA, 19 nt, Artificial Sequence
  Synthetic
ugcuauguacugauacaua

SEQ ID NO: 235828 - RNA, 20 nt, Artificial Sequence
  Synthetic
uugcuauguacugauacaua

SEQ ID NO: 235829 - RNA, 21 nt, Artificial Sequence
  Synthetic
guugcuauguacugauacaua

SEQ ID NO: 235830 - RNA, 22 nt, Artificial Sequence
  Synthetic
gguugcuauguacugauacaua

SEQ ID NO: 235831 - RNA, 23 nt, Artificial Sequence
  Synthetic
ugguugcuauguacugauacaua

SEQ ID NO: 235832 - RNA, 24 nt, Artificial Sequence
  Synthetic
augguugcuauguacugauacaua

SEQ ID NO: 235833 - RNA, 18 nt, Artificial Sequence
  Synthetic
aacuagaaaauauacaua

SEQ ID NO: 235834 - RNA, 19 nt, Artificial Sequence
  Synthetic
uaacuagaaaauauacaua

SEQ ID NO: 235835 - RNA, 20 nt, Artificial Sequence
  Synthetic
auaacuagaaaauauacaua

SEQ ID NO: 235836 - RNA, 21 nt, Artificial Sequence
  Synthetic
aauaacuagaaaauauacaua

SEQ ID NO: 235837 - RNA, 22 nt, Artificial Sequence
  Synthetic
aaauaacuagaaaauauacaua

SEQ ID NO: 235838 - RNA, 23 nt, Artificial Sequence
  Synthetic
aaaauaacuagaaaauauacaua

SEQ ID NO: 235839 - RNA, 24 nt, Artificial Sequence
  Synthetic
caaaauaacuagaaaauauacaua

SEQ ID NO: 235840 - RNA, 18 nt, Artificial Sequence
  Synthetic
gugcacauuugcuacaua

SEQ ID NO: 235841 - RNA, 19 nt, Artificial Sequence
  Synthetic
ugugcacauuugcuacaua

SEQ ID NO: 235842 - RNA, 20 nt, Artificial Sequence
  Synthetic
cugugcacauuugcuacaua

SEQ ID NO: 235843 - RNA, 21 nt, Artificial Sequence
  Synthetic
acugugcacauuugcuacaua

SEQ ID NO: 235844 - RNA, 22 nt, Artificial Sequence
  Synthetic
uacugugcacauuugcuacaua

SEQ ID NO: 235845 - RNA, 23 nt, Artificial Sequence
  Synthetic
uuacugugcacauuugcuacaua

SEQ ID NO: 235846 - RNA, 24 nt, Artificial Sequence
  Synthetic
auuacugugcacauuugcuacaua

SEQ ID NO: 235847 - RNA, 18 nt, Artificial Sequence
  Synthetic
guugccacuaucuacaua

SEQ ID NO: 235848 - RNA, 19 nt, Artificial Sequence
  Synthetic
uguugccacuaucuacaua

SEQ ID NO: 235849 - RNA, 20 nt, Artificial Sequence
  Synthetic
uuguugccacuaucuacaua

SEQ ID NO: 235850 - RNA, 21 nt, Artificial Sequence
  Synthetic
auuguugccacuaucuacaua

SEQ ID NO: 235851 - RNA, 22 nt, Artificial Sequence
  Synthetic
cauuguugccacuaucuacaua

SEQ ID NO: 235852 - RNA, 23 nt, Artificial Sequence
  Synthetic
ucauuguugccacuaucuacaua

SEQ ID NO: 235853 - RNA, 24 nt, Artificial Sequence
  Synthetic
uucauuguugccacuaucuacaua

SEQ ID NO: 235854 - RNA, 18 nt, Artificial Sequence
  Synthetic
agauggcaacaguacaua

SEQ ID NO: 235855 - RNA, 19 nt, Artificial Sequence
  Synthetic
aagauggcaacaguacaua

SEQ ID NO: 235856 - RNA, 20 nt, Artificial Sequence
  Synthetic
aaagauggcaacaguacaua

SEQ ID NO: 235857 - RNA, 21 nt, Artificial Sequence
  Synthetic
uaaagauggcaacaguacaua

SEQ ID NO: 235858 - RNA, 22 nt, Artificial Sequence
  Synthetic
auaaagauggcaacaguacaua

SEQ ID NO: 235859 - RNA, 23 nt, Artificial Sequence
  Synthetic
cauaaagauggcaacaguacaua

SEQ ID NO: 235860 - RNA, 24 nt, Artificial Sequence
  Synthetic
acauaaagauggcaacaguacaua

SEQ ID NO: 235861 - RNA, 18 nt, Artificial Sequence
  Synthetic
uugguuuccugguacaua

SEQ ID NO: 235862 - RNA, 19 nt, Artificial Sequence
  Synthetic
uuugguuuccugguacaua

SEQ ID NO: 235863 - RNA, 20 nt, Artificial Sequence
  Synthetic
uuuugguuuccugguacaua

SEQ ID NO: 235864 - RNA, 21 nt, Artificial Sequence
  Synthetic
uuuuugguuuccugguacaua

SEQ ID NO: 235865 - RNA, 22 nt, Artificial Sequence
  Synthetic
cuuuuugguuuccugguacaua

SEQ ID NO: 235866 - RNA, 23 nt, Artificial Sequence
  Synthetic
acuuuuugguuuccugguacaua

SEQ ID NO: 235867 - RNA, 24 nt, Artificial Sequence
  Synthetic
aacuuuuugguuuccugguacaua

SEQ ID NO: 235868 - RNA, 18 nt, Artificial Sequence
  Synthetic
aacacucugguguacaua

SEQ ID NO: 235869 - RNA, 19 nt, Artificial Sequence
  Synthetic
aaacacucugguguacaua

SEQ ID NO: 235870 - RNA, 20 nt, Artificial Sequence
  Synthetic
aaaacacucugguguacaua

SEQ ID NO: 235871 - RNA, 21 nt, Artificial Sequence
  Synthetic
caaaacacucugguguacaua

SEQ ID NO: 235872 - RNA, 22 nt, Artificial Sequence
  Synthetic
ccaaaacacucugguguacaua

SEQ ID NO: 235873 - RNA, 23 nt, Artificial Sequence
  Synthetic
gccaaaacacucugguguacaua

SEQ ID NO: 235874 - RNA, 24 nt, Artificial Sequence
  Synthetic
agccaaaacacucugguguacaua

SEQ ID NO: 235875 - RNA, 18 nt, Artificial Sequence
  Synthetic
uucacaggcuauuacaua

SEQ ID NO: 235876 - RNA, 19 nt, Artificial Sequence
  Synthetic
auucacaggcuauuacaua

SEQ ID NO: 235877 - RNA, 20 nt, Artificial Sequence
  Synthetic
uauucacaggcuauuacaua

SEQ ID NO: 235878 - RNA, 21 nt, Artificial Sequence
  Synthetic
uuauucacaggcuauuacaua

SEQ ID NO: 235879 - RNA, 22 nt, Artificial Sequence
  Synthetic
uuuauucacaggcuauuacaua

SEQ ID NO: 235880 - RNA, 23 nt, Artificial Sequence
  Synthetic
auuuauucacaggcuauuacaua

SEQ ID NO: 235881 - RNA, 24 nt, Artificial Sequence
  Synthetic
cauuuauucacaggcuauuacaua

SEQ ID NO: 235882 - RNA, 18 nt, Artificial Sequence
  Synthetic
cauauuggguauuacaua

SEQ ID NO: 235883 - RNA, 19 nt, Artificial Sequence
  Synthetic
gcauauuggguauuacaua

SEQ ID NO: 235884 - RNA, 20 nt, Artificial Sequence
  Synthetic
agcauauuggguauuacaua

SEQ ID NO: 235885 - RNA, 21 nt, Artificial Sequence
  Synthetic
aagcauauuggguauuacaua

SEQ ID NO: 235886 - RNA, 22 nt, Artificial Sequence
  Synthetic
aaagcauauuggguauuacaua

SEQ ID NO: 235887 - RNA, 23 nt, Artificial Sequence
  Synthetic
gaaagcauauuggguauuacaua

SEQ ID NO: 235888 - RNA, 24 nt, Artificial Sequence
  Synthetic
ugaaagcauauuggguauuacaua

SEQ ID NO: 235889 - RNA, 18 nt, Artificial Sequence
  Synthetic
auucacaaaauuuacaua

SEQ ID NO: 235890 - RNA, 19 nt, Artificial Sequence
  Synthetic
uauucacaaaauuuacaua

SEQ ID NO: 235891 - RNA, 20 nt, Artificial Sequence
  Synthetic
cuauucacaaaauuuacaua

SEQ ID NO: 235892 - RNA, 21 nt, Artificial Sequence
  Synthetic
ccuauucacaaaauuuacaua

SEQ ID NO: 235893 - RNA, 22 nt, Artificial Sequence
  Synthetic
accuauucacaaaauuuacaua

SEQ ID NO: 235894 - RNA, 23 nt, Artificial Sequence
  Synthetic
aaccuauucacaaaauuuacaua

SEQ ID NO: 235895 - RNA, 24 nt, Artificial Sequence
  Synthetic
aaaccuauucacaaaauuuacaua

SEQ ID NO: 235896 - RNA, 18 nt, Artificial Sequence
  Synthetic
gcugcccuuauuuacaua

SEQ ID NO: 235897 - RNA, 19 nt, Artificial Sequence
  Synthetic
ugcugcccuuauuuacaua

SEQ ID NO: 235898 - RNA, 20 nt, Artificial Sequence
  Synthetic
augcugcccuuauuuacaua

SEQ ID NO: 235899 - RNA, 21 nt, Artificial Sequence
  Synthetic
caugcugcccuuauuuacaua

SEQ ID NO: 235900 - RNA, 22 nt, Artificial Sequence
  Synthetic
ucaugcugcccuuauuuacaua

SEQ ID NO: 235901 - RNA, 23 nt, Artificial Sequence
  Synthetic
uucaugcugcccuuauuuacaua

SEQ ID NO: 235902 - RNA, 24 nt, Artificial Sequence
  Synthetic
uuucaugcugcccuuauuuacaua

SEQ ID NO: 235903 - RNA, 18 nt, Artificial Sequence
  Synthetic
ugcugugaggaaaccaua

SEQ ID NO: 235904 - RNA, 19 nt, Artificial Sequence
  Synthetic
gugcugugaggaaaccaua

SEQ ID NO: 235905 - RNA, 20 nt, Artificial Sequence
  Synthetic
ugugcugugaggaaaccaua

SEQ ID NO: 235906 - RNA, 21 nt, Artificial Sequence
  Synthetic
augugcugugaggaaaccaua

SEQ ID NO: 235907 - RNA, 22 nt, Artificial Sequence
  Synthetic
aaugugcugugaggaaaccaua

SEQ ID NO: 235908 - RNA, 23 nt, Artificial Sequence
  Synthetic
uaaugugcugugaggaaaccaua

SEQ ID NO: 235909 - RNA, 24 nt, Artificial Sequence
  Synthetic
cuaaugugcugugaggaaaccaua

SEQ ID NO: 235910 - RNA, 18 nt, Artificial Sequence
  Synthetic
gaagagagagccaccaua

SEQ ID NO: 235911 - RNA, 19 nt, Artificial Sequence
  Synthetic
ggaagagagagccaccaua

SEQ ID NO: 235912 - RNA, 20 nt, Artificial Sequence
  Synthetic
uggaagagagagccaccaua

SEQ ID NO: 235913 - RNA, 21 nt, Artificial Sequence
  Synthetic
auggaagagagagccaccaua

SEQ ID NO: 235914 - RNA, 22 nt, Artificial Sequence
  Synthetic
gauggaagagagagccaccaua

SEQ ID NO: 235915 - RNA, 23 nt, Artificial Sequence
  Synthetic
ugauggaagagagagccaccaua

SEQ ID NO: 235916 - RNA, 24 nt, Artificial Sequence
  Synthetic
uugauggaagagagagccaccaua

SEQ ID NO: 235917 - RNA, 18 nt, Artificial Sequence
  Synthetic
gagcauuccuccaccaua

SEQ ID NO: 235918 - RNA, 19 nt, Artificial Sequence
  Synthetic
agagcauuccuccaccaua

SEQ ID NO: 235919 - RNA, 20 nt, Artificial Sequence
  Synthetic
cagagcauuccuccaccaua

SEQ ID NO: 235920 - RNA, 21 nt, Artificial Sequence
  Synthetic
gcagagcauuccuccaccaua

SEQ ID NO: 235921 - RNA, 22 nt, Artificial Sequence
  Synthetic
agcagagcauuccuccaccaua

SEQ ID NO: 235922 - RNA, 23 nt, Artificial Sequence
  Synthetic
uagcagagcauuccuccaccaua

SEQ ID NO: 235923 - RNA, 24 nt, Artificial Sequence
  Synthetic
uuagcagagcauuccuccaccaua

SEQ ID NO: 235924 - RNA, 18 nt, Artificial Sequence
  Synthetic
guaauaaacaucaccaua

SEQ ID NO: 235925 - RNA, 19 nt, Artificial Sequence
  Synthetic
uguaauaaacaucaccaua

SEQ ID NO: 235926 - RNA, 20 nt, Artificial Sequence
  Synthetic
uuguaauaaacaucaccaua

SEQ ID NO: 235927 - RNA, 21 nt, Artificial Sequence
  Synthetic
uuuguaauaaacaucaccaua

SEQ ID NO: 235928 - RNA, 22 nt, Artificial Sequence
  Synthetic
cuuuguaauaaacaucaccaua

SEQ ID NO: 235929 - RNA, 23 nt, Artificial Sequence
  Synthetic
ucuuuguaauaaacaucaccaua

SEQ ID NO: 235930 - RNA, 24 nt, Artificial Sequence
  Synthetic
cucuuuguaauaaacaucaccaua

SEQ ID NO: 235931 - RNA, 18 nt, Artificial Sequence
  Synthetic
ugaagcuagaugaccaua

SEQ ID NO: 235932 - RNA, 19 nt, Artificial Sequence
  Synthetic
augaagcuagaugaccaua

SEQ ID NO: 235933 - RNA, 20 nt, Artificial Sequence
  Synthetic
caugaagcuagaugaccaua

SEQ ID NO: 235934 - RNA, 21 nt, Artificial Sequence
  Synthetic
acaugaagcuagaugaccaua

SEQ ID NO: 235935 - RNA, 22 nt, Artificial Sequence
  Synthetic
aacaugaagcuagaugaccaua

SEQ ID NO: 235936 - RNA, 23 nt, Artificial Sequence
  Synthetic
uaacaugaagcuagaugaccaua

SEQ ID NO: 235937 - RNA, 24 nt, Artificial Sequence
  Synthetic
uuaacaugaagcuagaugaccaua

SEQ ID NO: 235938 - RNA, 18 nt, Artificial Sequence
  Synthetic
gcagauuuuaugaccaua

SEQ ID NO: 235939 - RNA, 19 nt, Artificial Sequence
  Synthetic
ugcagauuuuaugaccaua

SEQ ID NO: 235940 - RNA, 20 nt, Artificial Sequence
  Synthetic
augcagauuuuaugaccaua

SEQ ID NO: 235941 - RNA, 21 nt, Artificial Sequence
  Synthetic
aaugcagauuuuaugaccaua

SEQ ID NO: 235942 - RNA, 22 nt, Artificial Sequence
  Synthetic
caaugcagauuuuaugaccaua

SEQ ID NO: 235943 - RNA, 23 nt, Artificial Sequence
  Synthetic
acaaugcagauuuuaugaccaua

SEQ ID NO: 235944 - RNA, 24 nt, Artificial Sequence
  Synthetic
uacaaugcagauuuuaugaccaua

SEQ ID NO: 235945 - RNA, 18 nt, Artificial Sequence
  Synthetic
uuaaaugagauuaccaua

SEQ ID NO: 235946 - RNA, 19 nt, Artificial Sequence
  Synthetic
cuuaaaugagauuaccaua

SEQ ID NO: 235947 - RNA, 20 nt, Artificial Sequence
  Synthetic
gcuuaaaugagauuaccaua

SEQ ID NO: 235948 - RNA, 21 nt, Artificial Sequence
  Synthetic
ggcuuaaaugagauuaccaua

SEQ ID NO: 235949 - RNA, 22 nt, Artificial Sequence
  Synthetic
gggcuuaaaugagauuaccaua

SEQ ID NO: 235950 - RNA, 23 nt, Artificial Sequence
  Synthetic
agggcuuaaaugagauuaccaua

SEQ ID NO: 235951 - RNA, 24 nt, Artificial Sequence
  Synthetic
aagggcuuaaaugagauuaccaua

SEQ ID NO: 235952 - RNA, 18 nt, Artificial Sequence
  Synthetic
ucucuugaccaacccaua

SEQ ID NO: 235953 - RNA, 19 nt, Artificial Sequence
  Synthetic
cucucuugaccaacccaua

SEQ ID NO: 235954 - RNA, 20 nt, Artificial Sequence
  Synthetic
gcucucuugaccaacccaua

SEQ ID NO: 235955 - RNA, 21 nt, Artificial Sequence
  Synthetic
ggcucucuugaccaacccaua

SEQ ID NO: 235956 - RNA, 22 nt, Artificial Sequence
  Synthetic
aggcucucuugaccaacccaua

SEQ ID NO: 235957 - RNA, 23 nt, Artificial Sequence
  Synthetic
aaggcucucuugaccaacccaua

SEQ ID NO: 235958 - RNA, 24 nt, Artificial Sequence
  Synthetic
uaaggcucucuugaccaacccaua

SEQ ID NO: 235959 - RNA, 18 nt, Artificial Sequence
  Synthetic
gagccccagaugcccaua

SEQ ID NO: 235960 - RNA, 19 nt, Artificial Sequence
  Synthetic
ugagccccagaugcccaua

SEQ ID NO: 235961 - RNA, 20 nt, Artificial Sequence
  Synthetic
gugagccccagaugcccaua

SEQ ID NO: 235962 - RNA, 21 nt, Artificial Sequence
  Synthetic
ugugagccccagaugcccaua

SEQ ID NO: 235963 - RNA, 22 nt, Artificial Sequence
  Synthetic
uugugagccccagaugcccaua

SEQ ID NO: 235964 - RNA, 23 nt, Artificial Sequence
  Synthetic
uuugugagccccagaugcccaua

SEQ ID NO: 235965 - RNA, 24 nt, Artificial Sequence
  Synthetic
uuuugugagccccagaugcccaua

SEQ ID NO: 235966 - RNA, 18 nt, Artificial Sequence
  Synthetic
ucauaacccuuucccaua

SEQ ID NO: 235967 - RNA, 19 nt, Artificial Sequence
  Synthetic
uucauaacccuuucccaua

SEQ ID NO: 235968 - RNA, 20 nt, Artificial Sequence
  Synthetic
cuucauaacccuuucccaua

SEQ ID NO: 235969 - RNA, 21 nt, Artificial Sequence
  Synthetic
ucuucauaacccuuucccaua

SEQ ID NO: 235970 - RNA, 22 nt, Artificial Sequence
  Synthetic
aucuucauaacccuuucccaua

SEQ ID NO: 235971 - RNA, 23 nt, Artificial Sequence
  Synthetic
gaucuucauaacccuuucccaua

SEQ ID NO: 235972 - RNA, 24 nt, Artificial Sequence
  Synthetic
ugaucuucauaacccuuucccaua

SEQ ID NO: 235973 - RNA, 18 nt, Artificial Sequence
  Synthetic
gaauacuaugcagccaua

SEQ ID NO: 235974 - RNA, 19 nt, Artificial Sequence
  Synthetic
ggaauacuaugcagccaua

SEQ ID NO: 235975 - RNA, 20 nt, Artificial Sequence
  Synthetic
uggaauacuaugcagccaua

SEQ ID NO: 235976 - RNA, 21 nt, Artificial Sequence
  Synthetic
auggaauacuaugcagccaua

SEQ ID NO: 235977 - RNA, 22 nt, Artificial Sequence
  Synthetic
cauggaauacuaugcagccaua

SEQ ID NO: 235978 - RNA, 23 nt, Artificial Sequence
  Synthetic
ucauggaauacuaugcagccaua

SEQ ID NO: 235979 - RNA, 24 nt, Artificial Sequence
  Synthetic
aucauggaauacuaugcagccaua

SEQ ID NO: 235980 - RNA, 18 nt, Artificial Sequence
  Synthetic
uaacaaugccaggccaua

SEQ ID NO: 235981 - RNA, 19 nt, Artificial Sequence
  Synthetic
auaacaaugccaggccaua

SEQ ID NO: 235982 - RNA, 20 nt, Artificial Sequence
  Synthetic
uauaacaaugccaggccaua

SEQ ID NO: 235983 - RNA, 21 nt, Artificial Sequence
  Synthetic
cuauaacaaugccaggccaua

SEQ ID NO: 235984 - RNA, 22 nt, Artificial Sequence
  Synthetic
ucuauaacaaugccaggccaua

SEQ ID NO: 235985 - RNA, 23 nt, Artificial Sequence
  Synthetic
cucuauaacaaugccaggccaua

SEQ ID NO: 235986 - RNA, 24 nt, Artificial Sequence
  Synthetic
acucuauaacaaugccaggccaua

SEQ ID NO: 235987 - RNA, 18 nt, Artificial Sequence
  Synthetic
uucuauuauaaauccaua

SEQ ID NO: 235988 - RNA, 19 nt, Artificial Sequence
  Synthetic
uuucuauuauaaauccaua

SEQ ID NO: 235989 - RNA, 20 nt, Artificial Sequence
  Synthetic
auuucuauuauaaauccaua

SEQ ID NO: 235990 - RNA, 21 nt, Artificial Sequence
  Synthetic
cauuucuauuauaaauccaua

SEQ ID NO: 235991 - RNA, 22 nt, Artificial Sequence
  Synthetic
acauuucuauuauaaauccaua

SEQ ID NO: 235992 - RNA, 23 nt, Artificial Sequence
  Synthetic
aacauuucuauuauaaauccaua

SEQ ID NO: 235993 - RNA, 24 nt, Artificial Sequence
  Synthetic
uaacauuucuauuauaaauccaua

SEQ ID NO: 235994 - RNA, 18 nt, Artificial Sequence
  Synthetic
agauugaaagaauccaua

SEQ ID NO: 235995 - RNA, 19 nt, Artificial Sequence
  Synthetic
cagauugaaagaauccaua

SEQ ID NO: 235996 - RNA, 20 nt, Artificial Sequence
  Synthetic
ucagauugaaagaauccaua

SEQ ID NO: 235997 - RNA, 21 nt, Artificial Sequence
  Synthetic
uucagauugaaagaauccaua

SEQ ID NO: 235998 - RNA, 22 nt, Artificial Sequence
  Synthetic
auucagauugaaagaauccaua

SEQ ID NO: 235999 - RNA, 23 nt, Artificial Sequence
  Synthetic
uauucagauugaaagaauccaua

SEQ ID NO: 236000 - RNA, 24 nt, Artificial Sequence
  Synthetic
guauucagauugaaagaauccaua

SEQ ID NO: 236001 - RNA, 18 nt, Artificial Sequence
  Synthetic
accagguauccauccaua

SEQ ID NO: 236002 - RNA, 19 nt, Artificial Sequence
  Synthetic
uaccagguauccauccaua

SEQ ID NO: 236003 - RNA, 20 nt, Artificial Sequence
  Synthetic
guaccagguauccauccaua

SEQ ID NO: 236004 - RNA, 21 nt, Artificial Sequence
  Synthetic
gguaccagguauccauccaua

SEQ ID NO: 236005 - RNA, 22 nt, Artificial Sequence
  Synthetic
agguaccagguauccauccaua

SEQ ID NO: 236006 - RNA, 23 nt, Artificial Sequence
  Synthetic
cagguaccagguauccauccaua

SEQ ID NO: 236007 - RNA, 24 nt, Artificial Sequence
  Synthetic
gcagguaccagguauccauccaua

SEQ ID NO: 236008 - RNA, 18 nt, Artificial Sequence
  Synthetic
uucagauagugauccaua

SEQ ID NO: 236009 - RNA, 19 nt, Artificial Sequence
  Synthetic
uuucagauagugauccaua

SEQ ID NO: 236010 - RNA, 20 nt, Artificial Sequence
  Synthetic
auuucagauagugauccaua

SEQ ID NO: 236011 - RNA, 21 nt, Artificial Sequence
  Synthetic
gauuucagauagugauccaua

SEQ ID NO: 236012 - RNA, 22 nt, Artificial Sequence
  Synthetic
ugauuucagauagugauccaua

SEQ ID NO: 236013 - RNA, 23 nt, Artificial Sequence
  Synthetic
augauuucagauagugauccaua

SEQ ID NO: 236014 - RNA, 24 nt, Artificial Sequence
  Synthetic
uaugauuucagauagugauccaua

SEQ ID NO: 236015 - RNA, 18 nt, Artificial Sequence
  Synthetic
uauucagugauauccaua

SEQ ID NO: 236016 - RNA, 19 nt, Artificial Sequence
  Synthetic
cuauucagugauauccaua

SEQ ID NO: 236017 - RNA, 20 nt, Artificial Sequence
  Synthetic
ucuauucagugauauccaua

SEQ ID NO: 236018 - RNA, 21 nt, Artificial Sequence
  Synthetic
uucuauucagugauauccaua

SEQ ID NO: 236019 - RNA, 22 nt, Artificial Sequence
  Synthetic
auucuauucagugauauccaua

SEQ ID NO: 236020 - RNA, 23 nt, Artificial Sequence
  Synthetic
aauucuauucagugauauccaua

SEQ ID NO: 236021 - RNA, 24 nt, Artificial Sequence
  Synthetic
gaauucuauucagugauauccaua

SEQ ID NO: 236022 - RNA, 18 nt, Artificial Sequence
  Synthetic
gaacugcugguauccaua

SEQ ID NO: 236023 - RNA, 19 nt, Artificial Sequence
  Synthetic
ugaacugcugguauccaua

SEQ ID NO: 236024 - RNA, 20 nt, Artificial Sequence
  Synthetic
uugaacugcugguauccaua

SEQ ID NO: 236025 - RNA, 21 nt, Artificial Sequence
  Synthetic
guugaacugcugguauccaua

SEQ ID NO: 236026 - RNA, 22 nt, Artificial Sequence
  Synthetic
aguugaacugcugguauccaua

SEQ ID NO: 236027 - RNA, 23 nt, Artificial Sequence
  Synthetic
aaguugaacugcugguauccaua

SEQ ID NO: 236028 - RNA, 24 nt, Artificial Sequence
  Synthetic
aaaguugaacugcugguauccaua

SEQ ID NO: 236029 - RNA, 18 nt, Artificial Sequence
  Synthetic
aauccuucuagguccaua

SEQ ID NO: 236030 - RNA, 19 nt, Artificial Sequence
  Synthetic
uaauccuucuagguccaua

SEQ ID NO: 236031 - RNA, 20 nt, Artificial Sequence
  Synthetic
auaauccuucuagguccaua

SEQ ID NO: 236032 - RNA, 21 nt, Artificial Sequence
  Synthetic
gauaauccuucuagguccaua

SEQ ID NO: 236033 - RNA, 22 nt, Artificial Sequence
  Synthetic
ugauaauccuucuagguccaua

SEQ ID NO: 236034 - RNA, 23 nt, Artificial Sequence
  Synthetic
augauaauccuucuagguccaua

SEQ ID NO: 236035 - RNA, 24 nt, Artificial Sequence
  Synthetic
gaugauaauccuucuagguccaua

SEQ ID NO: 236036 - RNA, 18 nt, Artificial Sequence
  Synthetic
aguuuucaaugguccaua

SEQ ID NO: 236037 - RNA, 19 nt, Artificial Sequence
  Synthetic
aaguuuucaaugguccaua

SEQ ID NO: 236038 - RNA, 20 nt, Artificial Sequence
  Synthetic
gaaguuuucaaugguccaua

SEQ ID NO: 236039 - RNA, 21 nt, Artificial Sequence
  Synthetic
agaaguuuucaaugguccaua

SEQ ID NO: 236040 - RNA, 22 nt, Artificial Sequence
  Synthetic
cagaaguuuucaaugguccaua

SEQ ID NO: 236041 - RNA, 23 nt, Artificial Sequence
  Synthetic
ccagaaguuuucaaugguccaua

SEQ ID NO: 236042 - RNA, 24 nt, Artificial Sequence
  Synthetic
uccagaaguuuucaaugguccaua

SEQ ID NO: 236043 - RNA, 18 nt, Artificial Sequence
  Synthetic
aacauuauuccuuccaua

SEQ ID NO: 236044 - RNA, 19 nt, Artificial Sequence
  Synthetic
aaacauuauuccuuccaua

SEQ ID NO: 236045 - RNA, 20 nt, Artificial Sequence
  Synthetic
aaaacauuauuccuuccaua

SEQ ID NO: 236046 - RNA, 21 nt, Artificial Sequence
  Synthetic
gaaaacauuauuccuuccaua

SEQ ID NO: 236047 - RNA, 22 nt, Artificial Sequence
  Synthetic
ugaaaacauuauuccuuccaua

SEQ ID NO: 236048 - RNA, 23 nt, Artificial Sequence
  Synthetic
cugaaaacauuauuccuuccaua

SEQ ID NO: 236049 - RNA, 24 nt, Artificial Sequence
  Synthetic
ccugaaaacauuauuccuuccaua

SEQ ID NO: 236050 - RNA, 18 nt, Artificial Sequence
  Synthetic
augucuauuucuuccaua

SEQ ID NO: 236051 - RNA, 19 nt, Artificial Sequence
  Synthetic
caugucuauuucuuccaua

SEQ ID NO: 236052 - RNA, 20 nt, Artificial Sequence
  Synthetic
ccaugucuauuucuuccaua

SEQ ID NO: 236053 - RNA, 21 nt, Artificial Sequence
  Synthetic
cccaugucuauuucuuccaua

SEQ ID NO: 236054 - RNA, 22 nt, Artificial Sequence
  Synthetic
ucccaugucuauuucuuccaua

SEQ ID NO: 236055 - RNA, 23 nt, Artificial Sequence
  Synthetic
uucccaugucuauuucuuccaua

SEQ ID NO: 236056 - RNA, 24 nt, Artificial Sequence
  Synthetic
auucccaugucuauuucuuccaua

SEQ ID NO: 236057 - RNA, 18 nt, Artificial Sequence
  Synthetic
caggugugauguuccaua

SEQ ID NO: 236058 - RNA, 19 nt, Artificial Sequence
  Synthetic
ccaggugugauguuccaua

SEQ ID NO: 236059 - RNA, 20 nt, Artificial Sequence
  Synthetic
accaggugugauguuccaua

SEQ ID NO: 236060 - RNA, 21 nt, Artificial Sequence
  Synthetic
caccaggugugauguuccaua

SEQ ID NO: 236061 - RNA, 22 nt, Artificial Sequence
  Synthetic
acaccaggugugauguuccaua

SEQ ID NO: 236062 - RNA, 23 nt, Artificial Sequence
  Synthetic
uacaccaggugugauguuccaua

SEQ ID NO: 236063 - RNA, 24 nt, Artificial Sequence
  Synthetic
guacaccaggugugauguuccaua

SEQ ID NO: 236064 - RNA, 18 nt, Artificial Sequence
  Synthetic
gccacgggaauuuccaua

SEQ ID NO: 236065 - RNA, 19 nt, Artificial Sequence
  Synthetic
agccacgggaauuuccaua

SEQ ID NO: 236066 - RNA, 20 nt, Artificial Sequence
  Synthetic
uagccacgggaauuuccaua

SEQ ID NO: 236067 - RNA, 21 nt, Artificial Sequence
  Synthetic
uuagccacgggaauuuccaua

SEQ ID NO: 236068 - RNA, 22 nt, Artificial Sequence
  Synthetic
uuuagccacgggaauuuccaua

SEQ ID NO: 236069 - RNA, 23 nt, Artificial Sequence
  Synthetic
cuuuagccacgggaauuuccaua

SEQ ID NO: 236070 - RNA, 24 nt, Artificial Sequence
  Synthetic
ucuuuagccacgggaauuuccaua

SEQ ID NO: 236071 - RNA, 18 nt, Artificial Sequence
  Synthetic
uaacaacuaauuuccaua

SEQ ID NO: 236072 - RNA, 19 nt, Artificial Sequence
  Synthetic
guaacaacuaauuuccaua

SEQ ID NO: 236073 - RNA, 20 nt, Artificial Sequence
  Synthetic
uguaacaacuaauuuccaua

SEQ ID NO: 236074 - RNA, 21 nt, Artificial Sequence
  Synthetic
guguaacaacuaauuuccaua

SEQ ID NO: 236075 - RNA, 22 nt, Artificial Sequence
  Synthetic
uguguaacaacuaauuuccaua

SEQ ID NO: 236076 - RNA, 23 nt, Artificial Sequence
  Synthetic
uuguguaacaacuaauuuccaua

SEQ ID NO: 236077 - RNA, 24 nt, Artificial Sequence
  Synthetic
cuuguguaacaacuaauuuccaua

SEQ ID NO: 236078 - RNA, 18 nt, Artificial Sequence
  Synthetic
aagcucgaaggaagcaua

SEQ ID NO: 236079 - RNA, 19 nt, Artificial Sequence
  Synthetic
uaagcucgaaggaagcaua

SEQ ID NO: 236080 - RNA, 20 nt, Artificial Sequence
  Synthetic
guaagcucgaaggaagcaua

SEQ ID NO: 236081 - RNA, 21 nt, Artificial Sequence
  Synthetic
aguaagcucgaaggaagcaua

SEQ ID NO: 236082 - RNA, 22 nt, Artificial Sequence
  Synthetic
caguaagcucgaaggaagcaua

SEQ ID NO: 236083 - RNA, 23 nt, Artificial Sequence
  Synthetic
acaguaagcucgaaggaagcaua

SEQ ID NO: 236084 - RNA, 24 nt, Artificial Sequence
  Synthetic
cacaguaagcucgaaggaagcaua

SEQ ID NO: 236085 - RNA, 18 nt, Artificial Sequence
  Synthetic
guggaaaauggaagcaua

SEQ ID NO: 236086 - RNA, 19 nt, Artificial Sequence
  Synthetic
aguggaaaauggaagcaua

SEQ ID NO: 236087 - RNA, 20 nt, Artificial Sequence
  Synthetic
aaguggaaaauggaagcaua

SEQ ID NO: 236088 - RNA, 21 nt, Artificial Sequence
  Synthetic
gaaguggaaaauggaagcaua

SEQ ID NO: 236089 - RNA, 22 nt, Artificial Sequence
  Synthetic
agaaguggaaaauggaagcaua

SEQ ID NO: 236090 - RNA, 23 nt, Artificial Sequence
  Synthetic
cagaaguggaaaauggaagcaua

SEQ ID NO: 236091 - RNA, 24 nt, Artificial Sequence
  Synthetic
ucagaaguggaaaauggaagcaua

SEQ ID NO: 236092 - RNA, 18 nt, Artificial Sequence
  Synthetic
cugugaagaaacagcaua

SEQ ID NO: 236093 - RNA, 19 nt, Artificial Sequence
  Synthetic
ccugugaagaaacagcaua

SEQ ID NO: 236094 - RNA, 20 nt, Artificial Sequence
  Synthetic
uccugugaagaaacagcaua

SEQ ID NO: 236095 - RNA, 21 nt, Artificial Sequence
  Synthetic
uuccugugaagaaacagcaua

SEQ ID NO: 236096 - RNA, 22 nt, Artificial Sequence
  Synthetic
auuccugugaagaaacagcaua

SEQ ID NO: 236097 - RNA, 23 nt, Artificial Sequence
  Synthetic
cauuccugugaagaaacagcaua

SEQ ID NO: 236098 - RNA, 24 nt, Artificial Sequence
  Synthetic
ucauuccugugaagaaacagcaua

SEQ ID NO: 236099 - RNA, 18 nt, Artificial Sequence
  Synthetic
aaagauuuguagagcaua

SEQ ID NO: 236100 - RNA, 19 nt, Artificial Sequence
  Synthetic
aaaagauuuguagagcaua

SEQ ID NO: 236101 - RNA, 20 nt, Artificial Sequence
  Synthetic
aaaaagauuuguagagcaua

SEQ ID NO: 236102 - RNA, 21 nt, Artificial Sequence
  Synthetic
aaaaaagauuuguagagcaua

SEQ ID NO: 236103 - RNA, 22 nt, Artificial Sequence
  Synthetic
aaaaaaagauuuguagagcaua

SEQ ID NO: 236104 - RNA, 23 nt, Artificial Sequence
  Synthetic
aaaaaaaagauuuguagagcaua

SEQ ID NO: 236105 - RNA, 24 nt, Artificial Sequence
  Synthetic
aaaaaaaaagauuuguagagcaua

SEQ ID NO: 236106 - RNA, 18 nt, Artificial Sequence
  Synthetic
aacaagagagggagcaua

SEQ ID NO: 236107 - RNA, 19 nt, Artificial Sequence
  Synthetic
gaacaagagagggagcaua

SEQ ID NO: 236108 - RNA, 20 nt, Artificial Sequence
  Synthetic
ugaacaagagagggagcaua

SEQ ID NO: 236109 - RNA, 21 nt, Artificial Sequence
  Synthetic
gugaacaagagagggagcaua

SEQ ID NO: 236110 - RNA, 22 nt, Artificial Sequence
  Synthetic
ggugaacaagagagggagcaua

SEQ ID NO: 236111 - RNA, 23 nt, Artificial Sequence
  Synthetic
aggugaacaagagagggagcaua

SEQ ID NO: 236112 - RNA, 24 nt, Artificial Sequence
  Synthetic
gaggugaacaagagagggagcaua

SEQ ID NO: 236113 - RNA, 18 nt, Artificial Sequence
  Synthetic
ggcugauagaugagcaua

SEQ ID NO: 236114 - RNA, 19 nt, Artificial Sequence
  Synthetic
aggcugauagaugagcaua

SEQ ID NO: 236115 - RNA, 20 nt, Artificial Sequence
  Synthetic
uaggcugauagaugagcaua

SEQ ID NO: 236116 - RNA, 21 nt, Artificial Sequence
  Synthetic
auaggcugauagaugagcaua

SEQ ID NO: 236117 - RNA, 22 nt, Artificial Sequence
  Synthetic
uauaggcugauagaugagcaua

SEQ ID NO: 236118 - RNA, 23 nt, Artificial Sequence
  Synthetic
guauaggcugauagaugagcaua

SEQ ID NO: 236119 - RNA, 24 nt, Artificial Sequence
  Synthetic
uguauaggcugauagaugagcaua

SEQ ID NO: 236120 - RNA, 18 nt, Artificial Sequence
  Synthetic
aauuaacugaugagcaua

SEQ ID NO: 236121 - RNA, 19 nt, Artificial Sequence
  Synthetic
aaauuaacugaugagcaua

SEQ ID NO: 236122 - RNA, 20 nt, Artificial Sequence
  Synthetic
caaauuaacugaugagcaua

SEQ ID NO: 236123 - RNA, 21 nt, Artificial Sequence
  Synthetic
acaaauuaacugaugagcaua

SEQ ID NO: 236124 - RNA, 22 nt, Artificial Sequence
  Synthetic
aacaaauuaacugaugagcaua

SEQ ID NO: 236125 - RNA, 23 nt, Artificial Sequence
  Synthetic
gaacaaauuaacugaugagcaua

SEQ ID NO: 236126 - RNA, 24 nt, Artificial Sequence
  Synthetic
agaacaaauuaacugaugagcaua

SEQ ID NO: 236127 - RNA, 18 nt, Artificial Sequence
  Synthetic
aacuagaugcugagcaua

SEQ ID NO: 236128 - RNA, 19 nt, Artificial Sequence
  Synthetic
uaacuagaugcugagcaua

SEQ ID NO: 236129 - RNA, 20 nt, Artificial Sequence
  Synthetic
auaacuagaugcugagcaua

SEQ ID NO: 236130 - RNA, 21 nt, Artificial Sequence
  Synthetic
uauaacuagaugcugagcaua

SEQ ID NO: 236131 - RNA, 22 nt, Artificial Sequence
  Synthetic
uuauaacuagaugcugagcaua

SEQ ID NO: 236132 - RNA, 23 nt, Artificial Sequence
  Synthetic
auuauaacuagaugcugagcaua

SEQ ID NO: 236133 - RNA, 24 nt, Artificial Sequence
  Synthetic
aauuauaacuagaugcugagcaua

SEQ ID NO: 236134 - RNA, 18 nt, Artificial Sequence
  Synthetic
ucauugucauugagcaua

SEQ ID NO: 236135 - RNA, 19 nt, Artificial Sequence
  Synthetic
uucauugucauugagcaua

SEQ ID NO: 236136 - RNA, 20 nt, Artificial Sequence
  Synthetic
auucauugucauugagcaua

SEQ ID NO: 236137 - RNA, 21 nt, Artificial Sequence
  Synthetic
uauucauugucauugagcaua

SEQ ID NO: 236138 - RNA, 22 nt, Artificial Sequence
  Synthetic
uuauucauugucauugagcaua

SEQ ID NO: 236139 - RNA, 23 nt, Artificial Sequence
  Synthetic
uuuauucauugucauugagcaua

SEQ ID NO: 236140 - RNA, 24 nt, Artificial Sequence
  Synthetic
auuuauucauugucauugagcaua

SEQ ID NO: 236141 - RNA, 18 nt, Artificial Sequence
  Synthetic
aagacauacacuagcaua

SEQ ID NO: 236142 - RNA, 19 nt, Artificial Sequence
  Synthetic
gaagacauacacuagcaua

SEQ ID NO: 236143 - RNA, 20 nt, Artificial Sequence
  Synthetic
agaagacauacacuagcaua

SEQ ID NO: 236144 - RNA, 21 nt, Artificial Sequence
  Synthetic
uagaagacauacacuagcaua

SEQ ID NO: 236145 - RNA, 22 nt, Artificial Sequence
  Synthetic
cuagaagacauacacuagcaua

SEQ ID NO: 236146 - RNA, 23 nt, Artificial Sequence
  Synthetic
acuagaagacauacacuagcaua

SEQ ID NO: 236147 - RNA, 24 nt, Artificial Sequence
  Synthetic
aacuagaagacauacacuagcaua

SEQ ID NO: 236148 - RNA, 18 nt, Artificial Sequence
  Synthetic
uugggcuaauguagcaua

SEQ ID NO: 236149 - RNA, 19 nt, Artificial Sequence
  Synthetic
uuugggcuaauguagcaua

SEQ ID NO: 236150 - RNA, 20 nt, Artificial Sequence
  Synthetic
uuuugggcuaauguagcaua

SEQ ID NO: 236151 - RNA, 21 nt, Artificial Sequence
  Synthetic
auuuugggcuaauguagcaua

SEQ ID NO: 236152 - RNA, 22 nt, Artificial Sequence
  Synthetic
aauuuugggcuaauguagcaua

SEQ ID NO: 236153 - RNA, 23 nt, Artificial Sequence
  Synthetic
gaauuuugggcuaauguagcaua

SEQ ID NO: 236154 - RNA, 24 nt, Artificial Sequence
  Synthetic
ugaauuuugggcuaauguagcaua

SEQ ID NO: 236155 - RNA, 18 nt, Artificial Sequence
  Synthetic
gccaguuguauuagcaua

SEQ ID NO: 236156 - RNA, 19 nt, Artificial Sequence
  Synthetic
ugccaguuguauuagcaua

SEQ ID NO: 236157 - RNA, 20 nt, Artificial Sequence
  Synthetic
uugccaguuguauuagcaua

SEQ ID NO: 236158 - RNA, 21 nt, Artificial Sequence
  Synthetic
cuugccaguuguauuagcaua

SEQ ID NO: 236159 - RNA, 22 nt, Artificial Sequence
  Synthetic
acuugccaguuguauuagcaua

SEQ ID NO: 236160 - RNA, 23 nt, Artificial Sequence
  Synthetic
gacuugccaguuguauuagcaua

SEQ ID NO: 236161 - RNA, 24 nt, Artificial Sequence
  Synthetic
ugacuugccaguuguauuagcaua

SEQ ID NO: 236162 - RNA, 18 nt, Artificial Sequence
  Synthetic
uucccuuuucuuagcaua

SEQ ID NO: 236163 - RNA, 19 nt, Artificial Sequence
  Synthetic
auucccuuuucuuagcaua

SEQ ID NO: 236164 - RNA, 20 nt, Artificial Sequence
  Synthetic
cauucccuuuucuuagcaua

SEQ ID NO: 236165 - RNA, 21 nt, Artificial Sequence
  Synthetic
ccauucccuuuucuuagcaua

SEQ ID NO: 236166 - RNA, 22 nt, Artificial Sequence
  Synthetic
uccauucccuuuucuuagcaua

SEQ ID NO: 236167 - RNA, 23 nt, Artificial Sequence
  Synthetic
uuccauucccuuuucuuagcaua

SEQ ID NO: 236168 - RNA, 24 nt, Artificial Sequence
  Synthetic
cuuccauucccuuuucuuagcaua

SEQ ID NO: 236169 - RNA, 18 nt, Artificial Sequence
  Synthetic
acaacaaaaaaaggcaua

SEQ ID NO: 236170 - RNA, 19 nt, Artificial Sequence
  Synthetic
gacaacaaaaaaaggcaua

SEQ ID NO: 236171 - RNA, 20 nt, Artificial Sequence
  Synthetic
agacaacaaaaaaaggcaua

SEQ ID NO: 236172 - RNA, 21 nt, Artificial Sequence
  Synthetic
aagacaacaaaaaaaggcaua

SEQ ID NO: 236173 - RNA, 22 nt, Artificial Sequence
  Synthetic
gaagacaacaaaaaaaggcaua

SEQ ID NO: 236174 - RNA, 23 nt, Artificial Sequence
  Synthetic
agaagacaacaaaaaaaggcaua

SEQ ID NO: 236175 - RNA, 24 nt, Artificial Sequence
  Synthetic
aagaagacaacaaaaaaaggcaua

SEQ ID NO: 236176 - RNA, 18 nt, Artificial Sequence
  Synthetic
aacaucguacaaggcaua

SEQ ID NO: 236177 - RNA, 19 nt, Artificial Sequence
  Synthetic
aaacaucguacaaggcaua

SEQ ID NO: 236178 - RNA, 20 nt, Artificial Sequence
  Synthetic
aaaacaucguacaaggcaua

SEQ ID NO: 236179 - RNA, 21 nt, Artificial Sequence
  Synthetic
gaaaacaucguacaaggcaua

SEQ ID NO: 236180 - RNA, 22 nt, Artificial Sequence
  Synthetic
agaaaacaucguacaaggcaua

SEQ ID NO: 236181 - RNA, 23 nt, Artificial Sequence
  Synthetic
aagaaaacaucguacaaggcaua

SEQ ID NO: 236182 - RNA, 24 nt, Artificial Sequence
  Synthetic
aaagaaaacaucguacaaggcaua

SEQ ID NO: 236183 - RNA, 18 nt, Artificial Sequence
  Synthetic
gauaauuaacuuggcaua

SEQ ID NO: 236184 - RNA, 19 nt, Artificial Sequence
  Synthetic
ugauaauuaacuuggcaua

SEQ ID NO: 236185 - RNA, 20 nt, Artificial Sequence
  Synthetic
uugauaauuaacuuggcaua

SEQ ID NO: 236186 - RNA, 21 nt, Artificial Sequence
  Synthetic
cuugauaauuaacuuggcaua

SEQ ID NO: 236187 - RNA, 22 nt, Artificial Sequence
  Synthetic
ucuugauaauuaacuuggcaua

SEQ ID NO: 236188 - RNA, 23 nt, Artificial Sequence
  Synthetic
uucuugauaauuaacuuggcaua

SEQ ID NO: 236189 - RNA, 24 nt, Artificial Sequence
  Synthetic
auucuugauaauuaacuuggcaua

SEQ ID NO: 236190 - RNA, 18 nt, Artificial Sequence
  Synthetic
guuuuuccuaaaugcaua

SEQ ID NO: 236191 - RNA, 19 nt, Artificial Sequence
  Synthetic
gguuuuuccuaaaugcaua

SEQ ID NO: 236192 - RNA, 20 nt, Artificial Sequence
  Synthetic
ugguuuuuccuaaaugcaua

SEQ ID NO: 236193 - RNA, 21 nt, Artificial Sequence
  Synthetic
uugguuuuuccuaaaugcaua

SEQ ID NO: 236194 - RNA, 22 nt, Artificial Sequence
  Synthetic
uuugguuuuuccuaaaugcaua

SEQ ID NO: 236195 - RNA, 23 nt, Artificial Sequence
  Synthetic
cuuugguuuuuccuaaaugcaua

SEQ ID NO: 236196 - RNA, 24 nt, Artificial Sequence
  Synthetic
acuuugguuuuuccuaaaugcaua

SEQ ID NO: 236197 - RNA, 18 nt, Artificial Sequence
  Synthetic
ugaaugguuaaaugcaua

SEQ ID NO: 236198 - RNA, 19 nt, Artificial Sequence
  Synthetic
augaaugguuaaaugcaua

SEQ ID NO: 236199 - RNA, 20 nt, Artificial Sequence
  Synthetic
aaugaaugguuaaaugcaua

SEQ ID NO: 236200 - RNA, 21 nt, Artificial Sequence
  Synthetic
uaaugaaugguuaaaugcaua

SEQ ID NO: 236201 - RNA, 22 nt, Artificial Sequence
  Synthetic
auaaugaaugguuaaaugcaua

SEQ ID NO: 236202 - RNA, 23 nt, Artificial Sequence
  Synthetic
aauaaugaaugguuaaaugcaua

SEQ ID NO: 236203 - RNA, 24 nt, Artificial Sequence
  Synthetic
aaauaaugaaugguuaaaugcaua

SEQ ID NO: 236204 - RNA, 18 nt, Artificial Sequence
  Synthetic
ucaaugugaacaugcaua

SEQ ID NO: 236205 - RNA, 19 nt, Artificial Sequence
  Synthetic
cucaaugugaacaugcaua

SEQ ID NO: 236206 - RNA, 20 nt, Artificial Sequence
  Synthetic
ucucaaugugaacaugcaua

SEQ ID NO: 236207 - RNA, 21 nt, Artificial Sequence
  Synthetic
uucucaaugugaacaugcaua

SEQ ID NO: 236208 - RNA, 22 nt, Artificial Sequence
  Synthetic
uuucucaaugugaacaugcaua

SEQ ID NO: 236209 - RNA, 23 nt, Artificial Sequence
  Synthetic
uuuucucaaugugaacaugcaua

SEQ ID NO: 236210 - RNA, 24 nt, Artificial Sequence
  Synthetic
uuuuucucaaugugaacaugcaua

SEQ ID NO: 236211 - RNA, 18 nt, Artificial Sequence
  Synthetic
aacaauaaagcaugcaua

SEQ ID NO: 236212 - RNA, 19 nt, Artificial Sequence
  Synthetic
aaacaauaaagcaugcaua

SEQ ID NO: 236213 - RNA, 20 nt, Artificial Sequence
  Synthetic
aaaacaauaaagcaugcaua

SEQ ID NO: 236214 - RNA, 21 nt, Artificial Sequence
  Synthetic
aaaaacaauaaagcaugcaua

SEQ ID NO: 236215 - RNA, 22 nt, Artificial Sequence
  Synthetic
gaaaaacaauaaagcaugcaua

SEQ ID NO: 236216 - RNA, 23 nt, Artificial Sequence
  Synthetic
ggaaaaacaauaaagcaugcaua

SEQ ID NO: 236217 - RNA, 24 nt, Artificial Sequence
  Synthetic
aggaaaaacaauaaagcaugcaua

SEQ ID NO: 236218 - RNA, 18 nt, Artificial Sequence
  Synthetic
uccauguauauaugcaua

SEQ ID NO: 236219 - RNA, 19 nt, Artificial Sequence
  Synthetic
uuccauguauauaugcaua

SEQ ID NO: 236220 - RNA, 20 nt, Artificial Sequence
  Synthetic
guuccauguauauaugcaua

SEQ ID NO: 236221 - RNA, 21 nt, Artificial Sequence
  Synthetic
aguuccauguauauaugcaua

SEQ ID NO: 236222 - RNA, 22 nt, Artificial Sequence
  Synthetic
uaguuccauguauauaugcaua

SEQ ID NO: 236223 - RNA, 23 nt, Artificial Sequence
  Synthetic
cuaguuccauguauauaugcaua

SEQ ID NO: 236224 - RNA, 24 nt, Artificial Sequence
  Synthetic
acuaguuccauguauauaugcaua

SEQ ID NO: 236225 - RNA, 18 nt, Artificial Sequence
  Synthetic
aucaaagggguaugcaua

SEQ ID NO: 236226 - RNA, 19 nt, Artificial Sequence
  Synthetic
uaucaaagggguaugcaua

SEQ ID NO: 236227 - RNA, 20 nt, Artificial Sequence
  Synthetic
auaucaaagggguaugcaua

SEQ ID NO: 236228 - RNA, 21 nt, Artificial Sequence
  Synthetic
cauaucaaagggguaugcaua

SEQ ID NO: 236229 - RNA, 22 nt, Artificial Sequence
  Synthetic
gcauaucaaagggguaugcaua

SEQ ID NO: 236230 - RNA, 23 nt, Artificial Sequence
  Synthetic
cgcauaucaaagggguaugcaua

SEQ ID NO: 236231 - RNA, 24 nt, Artificial Sequence
  Synthetic
ucgcauaucaaagggguaugcaua

SEQ ID NO: 236232 - RNA, 18 nt, Artificial Sequence
  Synthetic
uucaggaaggacugcaua

SEQ ID NO: 236233 - RNA, 19 nt, Artificial Sequence
  Synthetic
uuucaggaaggacugcaua

SEQ ID NO: 236234 - RNA, 20 nt, Artificial Sequence
  Synthetic
auuucaggaaggacugcaua

SEQ ID NO: 236235 - RNA, 21 nt, Artificial Sequence
  Synthetic
cauuucaggaaggacugcaua

SEQ ID NO: 236236 - RNA, 22 nt, Artificial Sequence
  Synthetic
ucauuucaggaaggacugcaua

SEQ ID NO: 236237 - RNA, 23 nt, Artificial Sequence
  Synthetic
aucauuucaggaaggacugcaua

SEQ ID NO: 236238 - RNA, 24 nt, Artificial Sequence
  Synthetic
aaucauuucaggaaggacugcaua

SEQ ID NO: 236239 - RNA, 18 nt, Artificial Sequence
  Synthetic
cacagauauaccugcaua

SEQ ID NO: 236240 - RNA, 19 nt, Artificial Sequence
  Synthetic
acacagauauaccugcaua

SEQ ID NO: 236241 - RNA, 20 nt, Artificial Sequence
  Synthetic
aacacagauauaccugcaua

SEQ ID NO: 236242 - RNA, 21 nt, Artificial Sequence
  Synthetic
caacacagauauaccugcaua

SEQ ID NO: 236243 - RNA, 22 nt, Artificial Sequence
  Synthetic
acaacacagauauaccugcaua

SEQ ID NO: 236244 - RNA, 23 nt, Artificial Sequence
  Synthetic
aacaacacagauauaccugcaua

SEQ ID NO: 236245 - RNA, 24 nt, Artificial Sequence
  Synthetic
aaacaacacagauauaccugcaua

SEQ ID NO: 236246 - RNA, 18 nt, Artificial Sequence
  Synthetic
cauuaacugcagugcaua

SEQ ID NO: 236247 - RNA, 19 nt, Artificial Sequence
  Synthetic
ucauuaacugcagugcaua

SEQ ID NO: 236248 - RNA, 20 nt, Artificial Sequence
  Synthetic
uucauuaacugcagugcaua

SEQ ID NO: 236249 - RNA, 21 nt, Artificial Sequence
  Synthetic
uuucauuaacugcagugcaua

SEQ ID NO: 236250 - RNA, 22 nt, Artificial Sequence
  Synthetic
guuucauuaacugcagugcaua

SEQ ID NO: 236251 - RNA, 23 nt, Artificial Sequence
  Synthetic
uguuucauuaacugcagugcaua

SEQ ID NO: 236252 - RNA, 24 nt, Artificial Sequence
  Synthetic
uuguuucauuaacugcagugcaua

SEQ ID NO: 236253 - RNA, 18 nt, Artificial Sequence
  Synthetic
ugcaaaaagaugugcaua

SEQ ID NO: 236254 - RNA, 19 nt, Artificial Sequence
  Synthetic
uugcaaaaagaugugcaua

SEQ ID NO: 236255 - RNA, 20 nt, Artificial Sequence
  Synthetic
auugcaaaaagaugugcaua

SEQ ID NO: 236256 - RNA, 21 nt, Artificial Sequence
  Synthetic
cauugcaaaaagaugugcaua

SEQ ID NO: 236257 - RNA, 22 nt, Artificial Sequence
  Synthetic
acauugcaaaaagaugugcaua

SEQ ID NO: 236258 - RNA, 23 nt, Artificial Sequence
  Synthetic
cacauugcaaaaagaugugcaua

SEQ ID NO: 236259 - RNA, 24 nt, Artificial Sequence
  Synthetic
ucacauugcaaaaagaugugcaua

SEQ ID NO: 236260 - RNA, 18 nt, Artificial Sequence
  Synthetic
aagaagacacugugcaua

SEQ ID NO: 236261 - RNA, 19 nt, Artificial Sequence
  Synthetic
uaagaagacacugugcaua

SEQ ID NO: 236262 - RNA, 20 nt, Artificial Sequence
  Synthetic
guaagaagacacugugcaua

SEQ ID NO: 236263 - RNA, 21 nt, Artificial Sequence
  Synthetic
gguaagaagacacugugcaua

SEQ ID NO: 236264 - RNA, 22 nt, Artificial Sequence
  Synthetic
ugguaagaagacacugugcaua

SEQ ID NO: 236265 - RNA, 23 nt, Artificial Sequence
  Synthetic
uugguaagaagacacugugcaua

SEQ ID NO: 236266 - RNA, 24 nt, Artificial Sequence
  Synthetic
auugguaagaagacacugugcaua

SEQ ID NO: 236267 - RNA, 18 nt, Artificial Sequence
  Synthetic
uauauguaucugugcaua

SEQ ID NO: 236268 - RNA, 19 nt, Artificial Sequence
  Synthetic
auauauguaucugugcaua

SEQ ID NO: 236269 - RNA, 20 nt, Artificial Sequence
  Synthetic
gauauauguaucugugcaua

SEQ ID NO: 236270 - RNA, 21 nt, Artificial Sequence
  Synthetic
ugauauauguaucugugcaua

SEQ ID NO: 236271 - RNA, 22 nt, Artificial Sequence
  Synthetic
augauauauguaucugugcaua

SEQ ID NO: 236272 - RNA, 23 nt, Artificial Sequence
  Synthetic
uaugauauauguaucugugcaua

SEQ ID NO: 236273 - RNA, 24 nt, Artificial Sequence
  Synthetic
auaugauauauguaucugugcaua

SEQ ID NO: 236274 - RNA, 18 nt, Artificial Sequence
  Synthetic
uucacauuauauugcaua

SEQ ID NO: 236275 - RNA, 19 nt, Artificial Sequence
  Synthetic
auucacauuauauugcaua

SEQ ID NO: 236276 - RNA, 20 nt, Artificial Sequence
  Synthetic
aauucacauuauauugcaua

SEQ ID NO: 236277 - RNA, 21 nt, Artificial Sequence
  Synthetic
gaauucacauuauauugcaua

SEQ ID NO: 236278 - RNA, 22 nt, Artificial Sequence
  Synthetic
ggaauucacauuauauugcaua

SEQ ID NO: 236279 - RNA, 23 nt, Artificial Sequence
  Synthetic
aggaauucacauuauauugcaua

SEQ ID NO: 236280 - RNA, 24 nt, Artificial Sequence
  Synthetic
aaggaauucacauuauauugcaua

SEQ ID NO: 236281 - RNA, 18 nt, Artificial Sequence
  Synthetic
ccagggccugcuugcaua

SEQ ID NO: 236282 - RNA, 19 nt, Artificial Sequence
  Synthetic
cccagggccugcuugcaua

SEQ ID NO: 236283 - RNA, 20 nt, Artificial Sequence
  Synthetic
ccccagggccugcuugcaua

SEQ ID NO: 236284 - RNA, 21 nt, Artificial Sequence
  Synthetic
cccccagggccugcuugcaua

SEQ ID NO: 236285 - RNA, 22 nt, Artificial Sequence
  Synthetic
ucccccagggccugcuugcaua

SEQ ID NO: 236286 - RNA, 23 nt, Artificial Sequence
  Synthetic
aucccccagggccugcuugcaua

SEQ ID NO: 236287 - RNA, 24 nt, Artificial Sequence
  Synthetic
aaucccccagggccugcuugcaua

SEQ ID NO: 236288 - RNA, 18 nt, Artificial Sequence
  Synthetic
cuucacuauguuugcaua

SEQ ID NO: 236289 - RNA, 19 nt, Artificial Sequence
  Synthetic
ccuucacuauguuugcaua

SEQ ID NO: 236290 - RNA, 20 nt, Artificial Sequence
  Synthetic
uccuucacuauguuugcaua

SEQ ID NO: 236291 - RNA, 21 nt, Artificial Sequence
  Synthetic
guccuucacuauguuugcaua

SEQ ID NO: 236292 - RNA, 22 nt, Artificial Sequence
  Synthetic
uguccuucacuauguuugcaua

SEQ ID NO: 236293 - RNA, 23 nt, Artificial Sequence
  Synthetic
cuguccuucacuauguuugcaua

SEQ ID NO: 236294 - RNA, 24 nt, Artificial Sequence
  Synthetic
gcuguccuucacuauguuugcaua

SEQ ID NO: 236295 - RNA, 18 nt, Artificial Sequence
  Synthetic
guaccuggauuuugcaua

SEQ ID NO: 236296 - RNA, 19 nt, Artificial Sequence
  Synthetic
aguaccuggauuuugcaua

SEQ ID NO: 236297 - RNA, 20 nt, Artificial Sequence
  Synthetic
gaguaccuggauuuugcaua

SEQ ID NO: 236298 - RNA, 21 nt, Artificial Sequence
  Synthetic
ugaguaccuggauuuugcaua

SEQ ID NO: 236299 - RNA, 22 nt, Artificial Sequence
  Synthetic
augaguaccuggauuuugcaua

SEQ ID NO: 236300 - RNA, 23 nt, Artificial Sequence
  Synthetic
aaugaguaccuggauuuugcaua

SEQ ID NO: 236301 - RNA, 24 nt, Artificial Sequence
  Synthetic
gaaugaguaccuggauuuugcaua

SEQ ID NO: 236302 - RNA, 18 nt, Artificial Sequence
  Synthetic
agaauuaccaaaaucaua

SEQ ID NO: 236303 - RNA, 19 nt, Artificial Sequence
  Synthetic
aagaauuaccaaaaucaua

SEQ ID NO: 236304 - RNA, 20 nt, Artificial Sequence
  Synthetic
aaagaauuaccaaaaucaua

SEQ ID NO: 236305 - RNA, 21 nt, Artificial Sequence
  Synthetic
aaaagaauuaccaaaaucaua

SEQ ID NO: 236306 - RNA, 22 nt, Artificial Sequence
  Synthetic
aaaaagaauuaccaaaaucaua

SEQ ID NO: 236307 - RNA, 23 nt, Artificial Sequence
  Synthetic
aaaaaagaauuaccaaaaucaua

SEQ ID NO: 236308 - RNA, 24 nt, Artificial Sequence
  Synthetic
aaaaaaagaauuaccaaaaucaua

SEQ ID NO: 236309 - RNA, 18 nt, Artificial Sequence
  Synthetic
guuacuaagaaaaucaua

SEQ ID NO: 236310 - RNA, 19 nt, Artificial Sequence
  Synthetic
uguuacuaagaaaaucaua

SEQ ID NO: 236311 - RNA, 20 nt, Artificial Sequence
  Synthetic
auguuacuaagaaaaucaua

SEQ ID NO: 236312 - RNA, 21 nt, Artificial Sequence
  Synthetic
gauguuacuaagaaaaucaua

SEQ ID NO: 236313 - RNA, 22 nt, Artificial Sequence
  Synthetic
cgauguuacuaagaaaaucaua

SEQ ID NO: 236314 - RNA, 23 nt, Artificial Sequence
  Synthetic
acgauguuacuaagaaaaucaua

SEQ ID NO: 236315 - RNA, 24 nt, Artificial Sequence
  Synthetic
uacgauguuacuaagaaaaucaua

SEQ ID NO: 236316 - RNA, 18 nt, Artificial Sequence
  Synthetic
uuaaaggagcaaaucaua

SEQ ID NO: 236317 - RNA, 19 nt, Artificial Sequence
  Synthetic
uuuaaaggagcaaaucaua

SEQ ID NO: 236318 - RNA, 20 nt, Artificial Sequence
  Synthetic
uuuuaaaggagcaaaucaua

SEQ ID NO: 236319 - RNA, 21 nt, Artificial Sequence
  Synthetic
guuuuaaaggagcaaaucaua

SEQ ID NO: 236320 - RNA, 22 nt, Artificial Sequence
  Synthetic
aguuuuaaaggagcaaaucaua

SEQ ID NO: 236321 - RNA, 23 nt, Artificial Sequence
  Synthetic
gaguuuuaaaggagcaaaucaua

SEQ ID NO: 236322 - RNA, 24 nt, Artificial Sequence
  Synthetic
agaguuuuaaaggagcaaaucaua

SEQ ID NO: 236323 - RNA, 18 nt, Artificial Sequence
  Synthetic
auuuucauguaaaucaua

SEQ ID NO: 236324 - RNA, 19 nt, Artificial Sequence
  Synthetic
aauuuucauguaaaucaua

SEQ ID NO: 236325 - RNA, 20 nt, Artificial Sequence
  Synthetic
uaauuuucauguaaaucaua

SEQ ID NO: 236326 - RNA, 21 nt, Artificial Sequence
  Synthetic
auaauuuucauguaaaucaua

SEQ ID NO: 236327 - RNA, 22 nt, Artificial Sequence
  Synthetic
cauaauuuucauguaaaucaua

SEQ ID NO: 236328 - RNA, 23 nt, Artificial Sequence
  Synthetic
acauaauuuucauguaaaucaua

SEQ ID NO: 236329 - RNA, 24 nt, Artificial Sequence
  Synthetic
aacauaauuuucauguaaaucaua

SEQ ID NO: 236330 - RNA, 18 nt, Artificial Sequence
  Synthetic
uaaugcacuugaaucaua

SEQ ID NO: 236331 - RNA, 19 nt, Artificial Sequence
  Synthetic
guaaugcacuugaaucaua

SEQ ID NO: 236332 - RNA, 20 nt, Artificial Sequence
  Synthetic
uguaaugcacuugaaucaua

SEQ ID NO: 236333 - RNA, 21 nt, Artificial Sequence
  Synthetic
cuguaaugcacuugaaucaua

SEQ ID NO: 236334 - RNA, 22 nt, Artificial Sequence
  Synthetic
acuguaaugcacuugaaucaua

SEQ ID NO: 236335 - RNA, 23 nt, Artificial Sequence
  Synthetic
aacuguaaugcacuugaaucaua

SEQ ID NO: 236336 - RNA, 24 nt, Artificial Sequence
  Synthetic
uaacuguaaugcacuugaaucaua

SEQ ID NO: 236337 - RNA, 18 nt, Artificial Sequence
  Synthetic
agauaugggagcaucaua

SEQ ID NO: 236338 - RNA, 19 nt, Artificial Sequence
  Synthetic
uagauaugggagcaucaua

SEQ ID NO: 236339 - RNA, 20 nt, Artificial Sequence
  Synthetic
uuagauaugggagcaucaua

SEQ ID NO: 236340 - RNA, 21 nt, Artificial Sequence
  Synthetic
uuuagauaugggagcaucaua

SEQ ID NO: 236341 - RNA, 22 nt, Artificial Sequence
  Synthetic
guuuagauaugggagcaucaua

SEQ ID NO: 236342 - RNA, 23 nt, Artificial Sequence
  Synthetic
aguuuagauaugggagcaucaua

SEQ ID NO: 236343 - RNA, 24 nt, Artificial Sequence
  Synthetic
uaguuuagauaugggagcaucaua

SEQ ID NO: 236344 - RNA, 18 nt, Artificial Sequence
  Synthetic
uuuggcuaugucaucaua

SEQ ID NO: 236345 - RNA, 19 nt, Artificial Sequence
  Synthetic
auuuggcuaugucaucaua

SEQ ID NO: 236346 - RNA, 20 nt, Artificial Sequence
  Synthetic
uauuuggcuaugucaucaua

SEQ ID NO: 236347 - RNA, 21 nt, Artificial Sequence
  Synthetic
auauuuggcuaugucaucaua

SEQ ID NO: 236348 - RNA, 22 nt, Artificial Sequence
  Synthetic
aauauuuggcuaugucaucaua

SEQ ID NO: 236349 - RNA, 23 nt, Artificial Sequence
  Synthetic
aaauauuuggcuaugucaucaua

SEQ ID NO: 236350 - RNA, 24 nt, Artificial Sequence
  Synthetic
uaaauauuuggcuaugucaucaua

SEQ ID NO: 236351 - RNA, 18 nt, Artificial Sequence
  Synthetic
ugggauugcuggaucaua

SEQ ID NO: 236352 - RNA, 19 nt, Artificial Sequence
  Synthetic
gugggauugcuggaucaua

SEQ ID NO: 236353 - RNA, 20 nt, Artificial Sequence
  Synthetic
agugggauugcuggaucaua

SEQ ID NO: 236354 - RNA, 21 nt, Artificial Sequence
  Synthetic
cagugggauugcuggaucaua

SEQ ID NO: 236355 - RNA, 22 nt, Artificial Sequence
  Synthetic
gcagugggauugcuggaucaua

SEQ ID NO: 236356 - RNA, 23 nt, Artificial Sequence
  Synthetic
agcagugggauugcuggaucaua

SEQ ID NO: 236357 - RNA, 24 nt, Artificial Sequence
  Synthetic
cagcagugggauugcuggaucaua

SEQ ID NO: 236358 - RNA, 18 nt, Artificial Sequence
  Synthetic
ggaccauaugugaucaua

SEQ ID NO: 236359 - RNA, 19 nt, Artificial Sequence
  Synthetic
uggaccauaugugaucaua

SEQ ID NO: 236360 - RNA, 20 nt, Artificial Sequence
  Synthetic
guggaccauaugugaucaua

SEQ ID NO: 236361 - RNA, 21 nt, Artificial Sequence
  Synthetic
aguggaccauaugugaucaua

SEQ ID NO: 236362 - RNA, 22 nt, Artificial Sequence
  Synthetic
uaguggaccauaugugaucaua

SEQ ID NO: 236363 - RNA, 23 nt, Artificial Sequence
  Synthetic
uuaguggaccauaugugaucaua

SEQ ID NO: 236364 - RNA, 24 nt, Artificial Sequence
  Synthetic
cuuaguggaccauaugugaucaua

SEQ ID NO: 236365 - RNA, 18 nt, Artificial Sequence
  Synthetic
gaacaggcucuuaucaua

SEQ ID NO: 236366 - RNA, 19 nt, Artificial Sequence
  Synthetic
ugaacaggcucuuaucaua

SEQ ID NO: 236367 - RNA, 20 nt, Artificial Sequence
  Synthetic
uugaacaggcucuuaucaua

SEQ ID NO: 236368 - RNA, 21 nt, Artificial Sequence
  Synthetic
uuugaacaggcucuuaucaua

SEQ ID NO: 236369 - RNA, 22 nt, Artificial Sequence
  Synthetic
cuuugaacaggcucuuaucaua

SEQ ID NO: 236370 - RNA, 23 nt, Artificial Sequence
  Synthetic
acuuugaacaggcucuuaucaua

SEQ ID NO: 236371 - RNA, 24 nt, Artificial Sequence
  Synthetic
gacuuugaacaggcucuuaucaua

SEQ ID NO: 236372 - RNA, 18 nt, Artificial Sequence
  Synthetic
cgggagcuuuuacucaua

SEQ ID NO: 236373 - RNA, 19 nt, Artificial Sequence
  Synthetic
ccgggagcuuuuacucaua

SEQ ID NO: 236374 - RNA, 20 nt, Artificial Sequence
  Synthetic
uccgggagcuuuuacucaua

SEQ ID NO: 236375 - RNA, 21 nt, Artificial Sequence
  Synthetic
cuccgggagcuuuuacucaua

SEQ ID NO: 236376 - RNA, 22 nt, Artificial Sequence
  Synthetic
ccuccgggagcuuuuacucaua

SEQ ID NO: 236377 - RNA, 23 nt, Artificial Sequence
  Synthetic
gccuccgggagcuuuuacucaua

SEQ ID NO: 236378 - RNA, 24 nt, Artificial Sequence
  Synthetic
ggccuccgggagcuuuuacucaua

SEQ ID NO: 236379 - RNA, 18 nt, Artificial Sequence
  Synthetic
uugacagacacccucaua

SEQ ID NO: 236380 - RNA, 19 nt, Artificial Sequence
  Synthetic
guugacagacacccucaua

SEQ ID NO: 236381 - RNA, 20 nt, Artificial Sequence
  Synthetic
gguugacagacacccucaua

SEQ ID NO: 236382 - RNA, 21 nt, Artificial Sequence
  Synthetic
ggguugacagacacccucaua

SEQ ID NO: 236383 - RNA, 22 nt, Artificial Sequence
  Synthetic
gggguugacagacacccucaua

SEQ ID NO: 236384 - RNA, 23 nt, Artificial Sequence
  Synthetic
agggguugacagacacccucaua

SEQ ID NO: 236385 - RNA, 24 nt, Artificial Sequence
  Synthetic
cagggguugacagacacccucaua

SEQ ID NO: 236386 - RNA, 18 nt, Artificial Sequence
  Synthetic
caugaacagucucucaua

SEQ ID NO: 236387 - RNA, 19 nt, Artificial Sequence
  Synthetic
acaugaacagucucucaua

SEQ ID NO: 236388 - RNA, 20 nt, Artificial Sequence
  Synthetic
uacaugaacagucucucaua

SEQ ID NO: 236389 - RNA, 21 nt, Artificial Sequence
  Synthetic
auacaugaacagucucucaua

SEQ ID NO: 236390 - RNA, 22 nt, Artificial Sequence
  Synthetic
gauacaugaacagucucucaua

SEQ ID NO: 236391 - RNA, 23 nt, Artificial Sequence
  Synthetic
agauacaugaacagucucucaua

SEQ ID NO: 236392 - RNA, 24 nt, Artificial Sequence
  Synthetic
gagauacaugaacagucucucaua

SEQ ID NO: 236393 - RNA, 18 nt, Artificial Sequence
  Synthetic
uuuaaggacagagucaua

SEQ ID NO: 236394 - RNA, 19 nt, Artificial Sequence
  Synthetic
uuuuaaggacagagucaua

SEQ ID NO: 236395 - RNA, 20 nt, Artificial Sequence
  Synthetic
cuuuuaaggacagagucaua

SEQ ID NO: 236396 - RNA, 21 nt, Artificial Sequence
  Synthetic
ccuuuuaaggacagagucaua

SEQ ID NO: 236397 - RNA, 22 nt, Artificial Sequence
  Synthetic
cccuuuuaaggacagagucaua

SEQ ID NO: 236398 - RNA, 23 nt, Artificial Sequence
  Synthetic
ccccuuuuaaggacagagucaua

SEQ ID NO: 236399 - RNA, 24 nt, Artificial Sequence
  Synthetic
uccccuuuuaaggacagagucaua

SEQ ID NO: 236400 - RNA, 18 nt, Artificial Sequence
  Synthetic
agagauuuauaggucaua

SEQ ID NO: 236401 - RNA, 19 nt, Artificial Sequence
  Synthetic
uagagauuuauaggucaua

SEQ ID NO: 236402 - RNA, 20 nt, Artificial Sequence
  Synthetic
guagagauuuauaggucaua

SEQ ID NO: 236403 - RNA, 21 nt, Artificial Sequence
  Synthetic
uguagagauuuauaggucaua

SEQ ID NO: 236404 - RNA, 22 nt, Artificial Sequence
  Synthetic
auguagagauuuauaggucaua

SEQ ID NO: 236405 - RNA, 23 nt, Artificial Sequence
  Synthetic
cauguagagauuuauaggucaua

SEQ ID NO: 236406 - RNA, 24 nt, Artificial Sequence
  Synthetic
ucauguagagauuuauaggucaua

SEQ ID NO: 236407 - RNA, 18 nt, Artificial Sequence
  Synthetic
uauauuucucuggucaua

SEQ ID NO: 236408 - RNA, 19 nt, Artificial Sequence
  Synthetic
auauauuucucuggucaua

SEQ ID NO: 236409 - RNA, 20 nt, Artificial Sequence
  Synthetic
gauauauuucucuggucaua

SEQ ID NO: 236410 - RNA, 21 nt, Artificial Sequence
  Synthetic
agauauauuucucuggucaua

SEQ ID NO: 236411 - RNA, 22 nt, Artificial Sequence
  Synthetic
cagauauauuucucuggucaua

SEQ ID NO: 236412 - RNA, 23 nt, Artificial Sequence
  Synthetic
gcagauauauuucucuggucaua

SEQ ID NO: 236413 - RNA, 24 nt, Artificial Sequence
  Synthetic
agcagauauauuucucuggucaua

SEQ ID NO: 236414 - RNA, 18 nt, Artificial Sequence
  Synthetic
gcuuucaaaaaugucaua

SEQ ID NO: 236415 - RNA, 19 nt, Artificial Sequence
  Synthetic
ugcuuucaaaaaugucaua

SEQ ID NO: 236416 - RNA, 20 nt, Artificial Sequence
  Synthetic
augcuuucaaaaaugucaua

SEQ ID NO: 236417 - RNA, 21 nt, Artificial Sequence
  Synthetic
aaugcuuucaaaaaugucaua

SEQ ID NO: 236418 - RNA, 22 nt, Artificial Sequence
  Synthetic
gaaugcuuucaaaaaugucaua

SEQ ID NO: 236419 - RNA, 23 nt, Artificial Sequence
  Synthetic
agaaugcuuucaaaaaugucaua

SEQ ID NO: 236420 - RNA, 24 nt, Artificial Sequence
  Synthetic
gagaaugcuuucaaaaaugucaua

SEQ ID NO: 236421 - RNA, 18 nt, Artificial Sequence
  Synthetic
aauaguuuucuugucaua

SEQ ID NO: 236422 - RNA, 19 nt, Artificial Sequence
  Synthetic
uaauaguuuucuugucaua

SEQ ID NO: 236423 - RNA, 20 nt, Artificial Sequence
  Synthetic
auaauaguuuucuugucaua

SEQ ID NO: 236424 - RNA, 21 nt, Artificial Sequence
  Synthetic
uauaauaguuuucuugucaua

SEQ ID NO: 236425 - RNA, 22 nt, Artificial Sequence
  Synthetic
uuauaauaguuuucuugucaua

SEQ ID NO: 236426 - RNA, 23 nt, Artificial Sequence
  Synthetic
auuauaauaguuuucuugucaua

SEQ ID NO: 236427 - RNA, 24 nt, Artificial Sequence
  Synthetic
gauuauaauaguuuucuugucaua

SEQ ID NO: 236428 - RNA, 18 nt, Artificial Sequence
  Synthetic
aaaugugguguauucaua

SEQ ID NO: 236429 - RNA, 19 nt, Artificial Sequence
  Synthetic
aaaaugugguguauucaua

SEQ ID NO: 236430 - RNA, 20 nt, Artificial Sequence
  Synthetic
gaaaaugugguguauucaua

SEQ ID NO: 236431 - RNA, 21 nt, Artificial Sequence
  Synthetic
agaaaaugugguguauucaua

SEQ ID NO: 236432 - RNA, 22 nt, Artificial Sequence
  Synthetic
aagaaaaugugguguauucaua

SEQ ID NO: 236433 - RNA, 23 nt, Artificial Sequence
  Synthetic
aaagaaaaugugguguauucaua

SEQ ID NO: 236434 - RNA, 24 nt, Artificial Sequence
  Synthetic
uaaagaaaaugugguguauucaua

SEQ ID NO: 236435 - RNA, 18 nt, Artificial Sequence
  Synthetic
uccauguauuuauucaua

SEQ ID NO: 236436 - RNA, 19 nt, Artificial Sequence
  Synthetic
auccauguauuuauucaua

SEQ ID NO: 236437 - RNA, 20 nt, Artificial Sequence
  Synthetic
aauccauguauuuauucaua

SEQ ID NO: 236438 - RNA, 21 nt, Artificial Sequence
  Synthetic
uaauccauguauuuauucaua

SEQ ID NO: 236439 - RNA, 22 nt, Artificial Sequence
  Synthetic
uuaauccauguauuuauucaua

SEQ ID NO: 236440 - RNA, 23 nt, Artificial Sequence
  Synthetic
uuuaauccauguauuuauucaua

SEQ ID NO: 236441 - RNA, 24 nt, Artificial Sequence
  Synthetic
uuuuaauccauguauuuauucaua

SEQ ID NO: 236442 - RNA, 18 nt, Artificial Sequence
  Synthetic
cucauccaaaccuucaua

SEQ ID NO: 236443 - RNA, 19 nt, Artificial Sequence
  Synthetic
ucucauccaaaccuucaua

SEQ ID NO: 236444 - RNA, 20 nt, Artificial Sequence
  Synthetic
gucucauccaaaccuucaua

SEQ ID NO: 236445 - RNA, 21 nt, Artificial Sequence
  Synthetic
agucucauccaaaccuucaua

SEQ ID NO: 236446 - RNA, 22 nt, Artificial Sequence
  Synthetic
aagucucauccaaaccuucaua

SEQ ID NO: 236447 - RNA, 23 nt, Artificial Sequence
  Synthetic
aaagucucauccaaaccuucaua

SEQ ID NO: 236448 - RNA, 24 nt, Artificial Sequence
  Synthetic
aaaagucucauccaaaccuucaua

SEQ ID NO: 236449 - RNA, 18 nt, Artificial Sequence
  Synthetic
aauugggaaagcuucaua

SEQ ID NO: 236450 - RNA, 19 nt, Artificial Sequence
  Synthetic
gaauugggaaagcuucaua

SEQ ID NO: 236451 - RNA, 20 nt, Artificial Sequence
  Synthetic
agaauugggaaagcuucaua

SEQ ID NO: 236452 - RNA, 21 nt, Artificial Sequence
  Synthetic
aagaauugggaaagcuucaua

SEQ ID NO: 236453 - RNA, 22 nt, Artificial Sequence
  Synthetic
gaagaauugggaaagcuucaua

SEQ ID NO: 236454 - RNA, 23 nt, Artificial Sequence
  Synthetic
agaagaauugggaaagcuucaua

SEQ ID NO: 236455 - RNA, 24 nt, Artificial Sequence
  Synthetic
cagaagaauugggaaagcuucaua

SEQ ID NO: 236456 - RNA, 18 nt, Artificial Sequence
  Synthetic
gugaauaaaugcuucaua

SEQ ID NO: 236457 - RNA, 19 nt, Artificial Sequence
  Synthetic
ggugaauaaaugcuucaua

SEQ ID NO: 236458 - RNA, 20 nt, Artificial Sequence
  Synthetic
gggugaauaaaugcuucaua

SEQ ID NO: 236459 - RNA, 21 nt, Artificial Sequence
  Synthetic
ugggugaauaaaugcuucaua

SEQ ID NO: 236460 - RNA, 22 nt, Artificial Sequence
  Synthetic
cugggugaauaaaugcuucaua

SEQ ID NO: 236461 - RNA, 23 nt, Artificial Sequence
  Synthetic
ucugggugaauaaaugcuucaua

SEQ ID NO: 236462 - RNA, 24 nt, Artificial Sequence
  Synthetic
aucugggugaauaaaugcuucaua

SEQ ID NO: 236463 - RNA, 18 nt, Artificial Sequence
  Synthetic
acuacuuuaaaguucaua

SEQ ID NO: 236464 - RNA, 19 nt, Artificial Sequence
  Synthetic
aacuacuuuaaaguucaua

SEQ ID NO: 236465 - RNA, 20 nt, Artificial Sequence
  Synthetic
aaacuacuuuaaaguucaua

SEQ ID NO: 236466 - RNA, 21 nt, Artificial Sequence
  Synthetic
aaaacuacuuuaaaguucaua

SEQ ID NO: 236467 - RNA, 22 nt, Artificial Sequence
  Synthetic
aaaaacuacuuuaaaguucaua

SEQ ID NO: 236468 - RNA, 23 nt, Artificial Sequence
  Synthetic
aaaaaacuacuuuaaaguucaua

SEQ ID NO: 236469 - RNA, 24 nt, Artificial Sequence
  Synthetic
gaaaaaacuacuuuaaaguucaua

SEQ ID NO: 236470 - RNA, 18 nt, Artificial Sequence
  Synthetic
agcaaaaauaaguucaua

SEQ ID NO: 236471 - RNA, 19 nt, Artificial Sequence
  Synthetic
cagcaaaaauaaguucaua

SEQ ID NO: 236472 - RNA, 20 nt, Artificial Sequence
  Synthetic
gcagcaaaaauaaguucaua

SEQ ID NO: 236473 - RNA, 21 nt, Artificial Sequence
  Synthetic
agcagcaaaaauaaguucaua

SEQ ID NO: 236474 - RNA, 22 nt, Artificial Sequence
  Synthetic
aagcagcaaaaauaaguucaua

SEQ ID NO: 236475 - RNA, 23 nt, Artificial Sequence
  Synthetic
uaagcagcaaaaauaaguucaua

SEQ ID NO: 236476 - RNA, 24 nt, Artificial Sequence
  Synthetic
guaagcagcaaaaauaaguucaua

SEQ ID NO: 236477 - RNA, 18 nt, Artificial Sequence
  Synthetic
cccaguaaaugguucaua

SEQ ID NO: 236478 - RNA, 19 nt, Artificial Sequence
  Synthetic
ccccaguaaaugguucaua

SEQ ID NO: 236479 - RNA, 20 nt, Artificial Sequence
  Synthetic
cccccaguaaaugguucaua

SEQ ID NO: 236480 - RNA, 21 nt, Artificial Sequence
  Synthetic
ucccccaguaaaugguucaua

SEQ ID NO: 236481 - RNA, 22 nt, Artificial Sequence
  Synthetic
uucccccaguaaaugguucaua

SEQ ID NO: 236482 - RNA, 23 nt, Artificial Sequence
  Synthetic
uuucccccaguaaaugguucaua

SEQ ID NO: 236483 - RNA, 24 nt, Artificial Sequence
  Synthetic
uuuucccccaguaaaugguucaua

SEQ ID NO: 236484 - RNA, 18 nt, Artificial Sequence
  Synthetic
uugaaauuauuguucaua

SEQ ID NO: 236485 - RNA, 19 nt, Artificial Sequence
  Synthetic
auugaaauuauuguucaua

SEQ ID NO: 236486 - RNA, 20 nt, Artificial Sequence
  Synthetic
uauugaaauuauuguucaua

SEQ ID NO: 236487 - RNA, 21 nt, Artificial Sequence
  Synthetic
guauugaaauuauuguucaua

SEQ ID NO: 236488 - RNA, 22 nt, Artificial Sequence
  Synthetic
gguauugaaauuauuguucaua

SEQ ID NO: 236489 - RNA, 23 nt, Artificial Sequence
  Synthetic
agguauugaaauuauuguucaua

SEQ ID NO: 236490 - RNA, 24 nt, Artificial Sequence
  Synthetic
aagguauugaaauuauuguucaua

SEQ ID NO: 236491 - RNA, 18 nt, Artificial Sequence
  Synthetic
acuacuuuaaauuucaua

SEQ ID NO: 236492 - RNA, 19 nt, Artificial Sequence
  Synthetic
aacuacuuuaaauuucaua

SEQ ID NO: 236493 - RNA, 20 nt, Artificial Sequence
  Synthetic
aaacuacuuuaaauuucaua

SEQ ID NO: 236494 - RNA, 21 nt, Artificial Sequence
  Synthetic
aaaacuacuuuaaauuucaua

SEQ ID NO: 236495 - RNA, 22 nt, Artificial Sequence
  Synthetic
aaaaacuacuuuaaauuucaua

SEQ ID NO: 236496 - RNA, 23 nt, Artificial Sequence
  Synthetic
gaaaaacuacuuuaaauuucaua

SEQ ID NO: 236497 - RNA, 24 nt, Artificial Sequence
  Synthetic
agaaaaacuacuuuaaauuucaua

SEQ ID NO: 236498 - RNA, 18 nt, Artificial Sequence
  Synthetic
cuuugguaguauuucaua

SEQ ID NO: 236499 - RNA, 19 nt, Artificial Sequence
  Synthetic
gcuuugguaguauuucaua

SEQ ID NO: 236500 - RNA, 20 nt, Artificial Sequence
  Synthetic
agcuuugguaguauuucaua

SEQ ID NO: 236501 - RNA, 21 nt, Artificial Sequence
  Synthetic
aagcuuugguaguauuucaua

SEQ ID NO: 236502 - RNA, 22 nt, Artificial Sequence
  Synthetic
aaagcuuugguaguauuucaua

SEQ ID NO: 236503 - RNA, 23 nt, Artificial Sequence
  Synthetic
caaagcuuugguaguauuucaua

SEQ ID NO: 236504 - RNA, 24 nt, Artificial Sequence
  Synthetic
acaaagcuuugguaguauuucaua

SEQ ID NO: 236505 - RNA, 18 nt, Artificial Sequence
  Synthetic
cucaguauaccuuucaua

SEQ ID NO: 236506 - RNA, 19 nt, Artificial Sequence
  Synthetic
acucaguauaccuuucaua

SEQ ID NO: 236507 - RNA, 20 nt, Artificial Sequence
  Synthetic
uacucaguauaccuuucaua

SEQ ID NO: 236508 - RNA, 21 nt, Artificial Sequence
  Synthetic
guacucaguauaccuuucaua

SEQ ID NO: 236509 - RNA, 22 nt, Artificial Sequence
  Synthetic
gguacucaguauaccuuucaua

SEQ ID NO: 236510 - RNA, 23 nt, Artificial Sequence
  Synthetic
ugguacucaguauaccuuucaua

SEQ ID NO: 236511 - RNA, 24 nt, Artificial Sequence
  Synthetic
uugguacucaguauaccuuucaua

SEQ ID NO: 236512 - RNA, 18 nt, Artificial Sequence
  Synthetic
agauuuuucucuuucaua

SEQ ID NO: 236513 - RNA, 19 nt, Artificial Sequence
  Synthetic
cagauuuuucucuuucaua

SEQ ID NO: 236514 - RNA, 20 nt, Artificial Sequence
  Synthetic
ucagauuuuucucuuucaua

SEQ ID NO: 236515 - RNA, 21 nt, Artificial Sequence
  Synthetic
gucagauuuuucucuuucaua

SEQ ID NO: 236516 - RNA, 22 nt, Artificial Sequence
  Synthetic
agucagauuuuucucuuucaua

SEQ ID NO: 236517 - RNA, 23 nt, Artificial Sequence
  Synthetic
gagucagauuuuucucuuucaua

SEQ ID NO: 236518 - RNA, 24 nt, Artificial Sequence
  Synthetic
ggagucagauuuuucucuuucaua

SEQ ID NO: 236519 - RNA, 18 nt, Artificial Sequence
  Synthetic
gggcaugucaguuucaua

SEQ ID NO: 236520 - RNA, 19 nt, Artificial Sequence
  Synthetic
ugggcaugucaguuucaua

SEQ ID NO: 236521 - RNA, 20 nt, Artificial Sequence
  Synthetic
augggcaugucaguuucaua

SEQ ID NO: 236522 - RNA, 21 nt, Artificial Sequence
  Synthetic
uaugggcaugucaguuucaua

SEQ ID NO: 236523 - RNA, 22 nt, Artificial Sequence
  Synthetic
auaugggcaugucaguuucaua

SEQ ID NO: 236524 - RNA, 23 nt, Artificial Sequence
  Synthetic
gauaugggcaugucaguuucaua

SEQ ID NO: 236525 - RNA, 24 nt, Artificial Sequence
  Synthetic
ggauaugggcaugucaguuucaua

SEQ ID NO: 236526 - RNA, 18 nt, Artificial Sequence
  Synthetic
ucauccuaguguuucaua

SEQ ID NO: 236527 - RNA, 19 nt, Artificial Sequence
  Synthetic
cucauccuaguguuucaua

SEQ ID NO: 236528 - RNA, 20 nt, Artificial Sequence
  Synthetic
gcucauccuaguguuucaua

SEQ ID NO: 236529 - RNA, 21 nt, Artificial Sequence
  Synthetic
agcucauccuaguguuucaua

SEQ ID NO: 236530 - RNA, 22 nt, Artificial Sequence
  Synthetic
aagcucauccuaguguuucaua

SEQ ID NO: 236531 - RNA, 23 nt, Artificial Sequence
  Synthetic
aaagcucauccuaguguuucaua

SEQ ID NO: 236532 - RNA, 24 nt, Artificial Sequence
  Synthetic
gaaagcucauccuaguguuucaua

SEQ ID NO: 236533 - RNA, 18 nt, Artificial Sequence
  Synthetic
gaacauagcauuuucaua

SEQ ID NO: 236534 - RNA, 19 nt, Artificial Sequence
  Synthetic
ugaacauagcauuuucaua

SEQ ID NO: 236535 - RNA, 20 nt, Artificial Sequence
  Synthetic
uugaacauagcauuuucaua

SEQ ID NO: 236536 - RNA, 21 nt, Artificial Sequence
  Synthetic
uuugaacauagcauuuucaua

SEQ ID NO: 236537 - RNA, 22 nt, Artificial Sequence
  Synthetic
auuugaacauagcauuuucaua

SEQ ID NO: 236538 - RNA, 23 nt, Artificial Sequence
  Synthetic
cauuugaacauagcauuuucaua

SEQ ID NO: 236539 - RNA, 24 nt, Artificial Sequence
  Synthetic
ucauuugaacauagcauuuucaua

SEQ ID NO: 236540 - RNA, 18 nt, Artificial Sequence
  Synthetic
uguguuaaucuuuucaua

SEQ ID NO: 236541 - RNA, 19 nt, Artificial Sequence
  Synthetic
auguguuaaucuuuucaua

SEQ ID NO: 236542 - RNA, 20 nt, Artificial Sequence
  Synthetic
cauguguuaaucuuuucaua

SEQ ID NO: 236543 - RNA, 21 nt, Artificial Sequence
  Synthetic
acauguguuaaucuuuucaua

SEQ ID NO: 236544 - RNA, 22 nt, Artificial Sequence
  Synthetic
aacauguguuaaucuuuucaua

SEQ ID NO: 236545 - RNA, 23 nt, Artificial Sequence
  Synthetic
aaacauguguuaaucuuuucaua

SEQ ID NO: 236546 - RNA, 24 nt, Artificial Sequence
  Synthetic
aaaacauguguuaaucuuuucaua

SEQ ID NO: 236547 - RNA, 18 nt, Artificial Sequence
  Synthetic
aauggaauguuuuucaua

SEQ ID NO: 236548 - RNA, 19 nt, Artificial Sequence
  Synthetic
gaauggaauguuuuucaua

SEQ ID NO: 236549 - RNA, 20 nt, Artificial Sequence
  Synthetic
ggaauggaauguuuuucaua

SEQ ID NO: 236550 - RNA, 21 nt, Artificial Sequence
  Synthetic
aggaauggaauguuuuucaua

SEQ ID NO: 236551 - RNA, 22 nt, Artificial Sequence
  Synthetic
caggaauggaauguuuuucaua

SEQ ID NO: 236552 - RNA, 23 nt, Artificial Sequence
  Synthetic
ccaggaauggaauguuuuucaua

SEQ ID NO: 236553 - RNA, 24 nt, Artificial Sequence
  Synthetic
gccaggaauggaauguuuuucaua

SEQ ID NO: 236554 - RNA, 18 nt, Artificial Sequence
  Synthetic
agaccauagcaaaagaua

SEQ ID NO: 236555 - RNA, 19 nt, Artificial Sequence
  Synthetic
cagaccauagcaaaagaua

SEQ ID NO: 236556 - RNA, 20 nt, Artificial Sequence
  Synthetic
acagaccauagcaaaagaua

SEQ ID NO: 236557 - RNA, 21 nt, Artificial Sequence
  Synthetic
gacagaccauagcaaaagaua

SEQ ID NO: 236558 - RNA, 22 nt, Artificial Sequence
  Synthetic
ugacagaccauagcaaaagaua

SEQ ID NO: 236559 - RNA, 23 nt, Artificial Sequence
  Synthetic
cugacagaccauagcaaaagaua

SEQ ID NO: 236560 - RNA, 24 nt, Artificial Sequence
  Synthetic
gcugacagaccauagcaaaagaua

SEQ ID NO: 236561 - RNA, 18 nt, Artificial Sequence
  Synthetic
uucacaguugcaaagaua

SEQ ID NO: 236562 - RNA, 19 nt, Artificial Sequence
  Synthetic
auucacaguugcaaagaua

SEQ ID NO: 236563 - RNA, 20 nt, Artificial Sequence
  Synthetic
aauucacaguugcaaagaua

SEQ ID NO: 236564 - RNA, 21 nt, Artificial Sequence
  Synthetic
caauucacaguugcaaagaua

SEQ ID NO: 236565 - RNA, 22 nt, Artificial Sequence
  Synthetic
acaauucacaguugcaaagaua

SEQ ID NO: 236566 - RNA, 23 nt, Artificial Sequence
  Synthetic
cacaauucacaguugcaaagaua

SEQ ID NO: 236567 - RNA, 24 nt, Artificial Sequence
  Synthetic
gcacaauucacaguugcaaagaua

SEQ ID NO: 236568 - RNA, 18 nt, Artificial Sequence
  Synthetic
auagcauuuucaaagaua

SEQ ID NO: 236569 - RNA, 19 nt, Artificial Sequence
  Synthetic
aauagcauuuucaaagaua

SEQ ID NO: 236570 - RNA, 20 nt, Artificial Sequence
  Synthetic
caauagcauuuucaaagaua

SEQ ID NO: 236571 - RNA, 21 nt, Artificial Sequence
  Synthetic
gcaauagcauuuucaaagaua

SEQ ID NO: 236572 - RNA, 22 nt, Artificial Sequence
  Synthetic
ggcaauagcauuuucaaagaua

SEQ ID NO: 236573 - RNA, 23 nt, Artificial Sequence
  Synthetic
uggcaauagcauuuucaaagaua

SEQ ID NO: 236574 - RNA, 24 nt, Artificial Sequence
  Synthetic
auggcaauagcauuuucaaagaua

SEQ ID NO: 236575 - RNA, 18 nt, Artificial Sequence
  Synthetic
agaucaucaagaaagaua

SEQ ID NO: 236576 - RNA, 19 nt, Artificial Sequence
  Synthetic
gagaucaucaagaaagaua

SEQ ID NO: 236577 - RNA, 20 nt, Artificial Sequence
  Synthetic
agagaucaucaagaaagaua

SEQ ID NO: 236578 - RNA, 21 nt, Artificial Sequence
  Synthetic
gagagaucaucaagaaagaua

SEQ ID NO: 236579 - RNA, 22 nt, Artificial Sequence
  Synthetic
ugagagaucaucaagaaagaua

SEQ ID NO: 236580 - RNA, 23 nt, Artificial Sequence
  Synthetic
augagagaucaucaagaaagaua

SEQ ID NO: 236581 - RNA, 24 nt, Artificial Sequence
  Synthetic
caugagagaucaucaagaaagaua

SEQ ID NO: 236582 - RNA, 18 nt, Artificial Sequence
  Synthetic
ugucaauuuugaaagaua

SEQ ID NO: 236583 - RNA, 19 nt, Artificial Sequence
  Synthetic
augucaauuuugaaagaua

SEQ ID NO: 236584 - RNA, 20 nt, Artificial Sequence
  Synthetic
gaugucaauuuugaaagaua

SEQ ID NO: 236585 - RNA, 21 nt, Artificial Sequence
  Synthetic
ugaugucaauuuugaaagaua

SEQ ID NO: 236586 - RNA, 22 nt, Artificial Sequence
  Synthetic
augaugucaauuuugaaagaua

SEQ ID NO: 236587 - RNA, 23 nt, Artificial Sequence
  Synthetic
gaugaugucaauuuugaaagaua

SEQ ID NO: 236588 - RNA, 24 nt, Artificial Sequence
  Synthetic
agaugaugucaauuuugaaagaua

SEQ ID NO: 236589 - RNA, 18 nt, Artificial Sequence
  Synthetic
gggacuucccuaaagaua

SEQ ID NO: 236590 - RNA, 19 nt, Artificial Sequence
  Synthetic
agggacuucccuaaagaua

SEQ ID NO: 236591 - RNA, 20 nt, Artificial Sequence
  Synthetic
aagggacuucccuaaagaua

SEQ ID NO: 236592 - RNA, 21 nt, Artificial Sequence
  Synthetic
uaagggacuucccuaaagaua

SEQ ID NO: 236593 - RNA, 22 nt, Artificial Sequence
  Synthetic
guaagggacuucccuaaagaua

SEQ ID NO: 236594 - RNA, 23 nt, Artificial Sequence
  Synthetic
gguaagggacuucccuaaagaua

SEQ ID NO: 236595 - RNA, 24 nt, Artificial Sequence
  Synthetic
agguaagggacuucccuaaagaua

SEQ ID NO: 236596 - RNA, 18 nt, Artificial Sequence
  Synthetic
auuuuauauuuaaagaua

SEQ ID NO: 236597 - RNA, 19 nt, Artificial Sequence
  Synthetic
uauuuuauauuuaaagaua

SEQ ID NO: 236598 - RNA, 20 nt, Artificial Sequence
  Synthetic
uuauuuuauauuuaaagaua

SEQ ID NO: 236599 - RNA, 21 nt, Artificial Sequence
  Synthetic
uuuauuuuauauuuaaagaua

SEQ ID NO: 236600 - RNA, 22 nt, Artificial Sequence
  Synthetic
auuuauuuuauauuuaaagaua

SEQ ID NO: 236601 - RNA, 23 nt, Artificial Sequence
  Synthetic
cauuuauuuuauauuuaaagaua

SEQ ID NO: 236602 - RNA, 24 nt, Artificial Sequence
  Synthetic
ucauuuauuuuauauuuaaagaua

SEQ ID NO: 236603 - RNA, 18 nt, Artificial Sequence
  Synthetic
agagaaacuaacaagaua

SEQ ID NO: 236604 - RNA, 19 nt, Artificial Sequence
  Synthetic
aagagaaacuaacaagaua

SEQ ID NO: 236605 - RNA, 20 nt, Artificial Sequence
  Synthetic
aaagagaaacuaacaagaua

SEQ ID NO: 236606 - RNA, 21 nt, Artificial Sequence
  Synthetic
aaaagagaaacuaacaagaua

SEQ ID NO: 236607 - RNA, 22 nt, Artificial Sequence
  Synthetic
gaaaagagaaacuaacaagaua

SEQ ID NO: 236608 - RNA, 23 nt, Artificial Sequence
  Synthetic
agaaaagagaaacuaacaagaua

SEQ ID NO: 236609 - RNA, 24 nt, Artificial Sequence
  Synthetic
aagaaaagagaaacuaacaagaua

SEQ ID NO: 236610 - RNA, 18 nt, Artificial Sequence
  Synthetic
uccuguagaagcaagaua

SEQ ID NO: 236611 - RNA, 19 nt, Artificial Sequence
  Synthetic
cuccuguagaagcaagaua

SEQ ID NO: 236612 - RNA, 20 nt, Artificial Sequence
  Synthetic
gcuccuguagaagcaagaua

SEQ ID NO: 236613 - RNA, 21 nt, Artificial Sequence
  Synthetic
agcuccuguagaagcaagaua

SEQ ID NO: 236614 - RNA, 22 nt, Artificial Sequence
  Synthetic
uagcuccuguagaagcaagaua

SEQ ID NO: 236615 - RNA, 23 nt, Artificial Sequence
  Synthetic
guagcuccuguagaagcaagaua

SEQ ID NO: 236616 - RNA, 24 nt, Artificial Sequence
  Synthetic
gguagcuccuguagaagcaagaua

SEQ ID NO: 236617 - RNA, 18 nt, Artificial Sequence
  Synthetic
cugaucauaggcaagaua

SEQ ID NO: 236618 - RNA, 19 nt, Artificial Sequence
  Synthetic
ccugaucauaggcaagaua

SEQ ID NO: 236619 - RNA, 20 nt, Artificial Sequence
  Synthetic
accugaucauaggcaagaua

SEQ ID NO: 236620 - RNA, 21 nt, Artificial Sequence
  Synthetic
uaccugaucauaggcaagaua

SEQ ID NO: 236621 - RNA, 22 nt, Artificial Sequence
  Synthetic
auaccugaucauaggcaagaua

SEQ ID NO: 236622 - RNA, 23 nt, Artificial Sequence
  Synthetic
gauaccugaucauaggcaagaua

SEQ ID NO: 236623 - RNA, 24 nt, Artificial Sequence
  Synthetic
ugauaccugaucauaggcaagaua

SEQ ID NO: 236624 - RNA, 18 nt, Artificial Sequence
  Synthetic
acuaccacuaucaagaua

SEQ ID NO: 236625 - RNA, 19 nt, Artificial Sequence
  Synthetic
uacuaccacuaucaagaua

SEQ ID NO: 236626 - RNA, 20 nt, Artificial Sequence
  Synthetic
uuacuaccacuaucaagaua

SEQ ID NO: 236627 - RNA, 21 nt, Artificial Sequence
  Synthetic
guuacuaccacuaucaagaua

SEQ ID NO: 236628 - RNA, 22 nt, Artificial Sequence
  Synthetic
aguuacuaccacuaucaagaua

SEQ ID NO: 236629 - RNA, 23 nt, Artificial Sequence
  Synthetic
uaguuacuaccacuaucaagaua

SEQ ID NO: 236630 - RNA, 24 nt, Artificial Sequence
  Synthetic
auaguuacuaccacuaucaagaua

SEQ ID NO: 236631 - RNA, 18 nt, Artificial Sequence
  Synthetic
uagaaaugaaagaagaua

SEQ ID NO: 236632 - RNA, 19 nt, Artificial Sequence
  Synthetic
auagaaaugaaagaagaua

SEQ ID NO: 236633 - RNA, 20 nt, Artificial Sequence
  Synthetic
aauagaaaugaaagaagaua

SEQ ID NO: 236634 - RNA, 21 nt, Artificial Sequence
  Synthetic
gaauagaaaugaaagaagaua

SEQ ID NO: 236635 - RNA, 22 nt, Artificial Sequence
  Synthetic
agaauagaaaugaaagaagaua

SEQ ID NO: 236636 - RNA, 23 nt, Artificial Sequence
  Synthetic
gagaauagaaaugaaagaagaua

SEQ ID NO: 236637 - RNA, 24 nt, Artificial Sequence
  Synthetic
ugagaauagaaaugaaagaagaua

SEQ ID NO: 236638 - RNA, 18 nt, Artificial Sequence
  Synthetic
auuaucaucaagaagaua

SEQ ID NO: 236639 - RNA, 19 nt, Artificial Sequence
  Synthetic
cauuaucaucaagaagaua

SEQ ID NO: 236640 - RNA, 20 nt, Artificial Sequence
  Synthetic
ucauuaucaucaagaagaua

SEQ ID NO: 236641 - RNA, 21 nt, Artificial Sequence
  Synthetic
cucauuaucaucaagaagaua

SEQ ID NO: 236642 - RNA, 22 nt, Artificial Sequence
  Synthetic
ccucauuaucaucaagaagaua

SEQ ID NO: 236643 - RNA, 23 nt, Artificial Sequence
  Synthetic
accucauuaucaucaagaagaua

SEQ ID NO: 236644 - RNA, 24 nt, Artificial Sequence
  Synthetic
caccucauuaucaucaagaagaua

SEQ ID NO: 236645 - RNA, 18 nt, Artificial Sequence
  Synthetic
cugcuggcuuugaagaua

SEQ ID NO: 236646 - RNA, 19 nt, Artificial Sequence
  Synthetic
ccugcuggcuuugaagaua

SEQ ID NO: 236647 - RNA, 20 nt, Artificial Sequence
  Synthetic
cccugcuggcuuugaagaua

SEQ ID NO: 236648 - RNA, 21 nt, Artificial Sequence
  Synthetic
ccccugcuggcuuugaagaua

SEQ ID NO: 236649 - RNA, 22 nt, Artificial Sequence
  Synthetic
gccccugcuggcuuugaagaua

SEQ ID NO: 236650 - RNA, 23 nt, Artificial Sequence
  Synthetic
agccccugcuggcuuugaagaua

SEQ ID NO: 236651 - RNA, 24 nt, Artificial Sequence
  Synthetic
uagccccugcuggcuuugaagaua

SEQ ID NO: 236652 - RNA, 18 nt, Artificial Sequence
  Synthetic
aaugguguaaauaagaua

SEQ ID NO: 236653 - RNA, 19 nt, Artificial Sequence
  Synthetic
uaaugguguaaauaagaua

SEQ ID NO: 236654 - RNA, 20 nt, Artificial Sequence
  Synthetic
uuaaugguguaaauaagaua

SEQ ID NO: 236655 - RNA, 21 nt, Artificial Sequence
  Synthetic
auuaaugguguaaauaagaua

SEQ ID NO: 236656 - RNA, 22 nt, Artificial Sequence
  Synthetic
aauuaaugguguaaauaagaua

SEQ ID NO: 236657 - RNA, 23 nt, Artificial Sequence
  Synthetic
aaauuaaugguguaaauaagaua

SEQ ID NO: 236658 - RNA, 24 nt, Artificial Sequence
  Synthetic
caaauuaaugguguaaauaagaua

SEQ ID NO: 236659 - RNA, 18 nt, Artificial Sequence
  Synthetic
cccuagccacauaagaua

SEQ ID NO: 236660 - RNA, 19 nt, Artificial Sequence
  Synthetic
ccccuagccacauaagaua

SEQ ID NO: 236661 - RNA, 20 nt, Artificial Sequence
  Synthetic
cccccuagccacauaagaua

SEQ ID NO: 236662 - RNA, 21 nt, Artificial Sequence
  Synthetic
gcccccuagccacauaagaua

SEQ ID NO: 236663 - RNA, 22 nt, Artificial Sequence
  Synthetic
ugcccccuagccacauaagaua

SEQ ID NO: 236664 - RNA, 23 nt, Artificial Sequence
  Synthetic
gugcccccuagccacauaagaua

SEQ ID NO: 236665 - RNA, 24 nt, Artificial Sequence
  Synthetic
agugcccccuagccacauaagaua

SEQ ID NO: 236666 - RNA, 18 nt, Artificial Sequence
  Synthetic
auauuuucagauaagaua

SEQ ID NO: 236667 - RNA, 19 nt, Artificial Sequence
  Synthetic
cauauuuucagauaagaua

SEQ ID NO: 236668 - RNA, 20 nt, Artificial Sequence
  Synthetic
ucauauuuucagauaagaua

SEQ ID NO: 236669 - RNA, 21 nt, Artificial Sequence
  Synthetic
aucauauuuucagauaagaua

SEQ ID NO: 236670 - RNA, 22 nt, Artificial Sequence
  Synthetic
caucauauuuucagauaagaua

SEQ ID NO: 236671 - RNA, 23 nt, Artificial Sequence
  Synthetic
acaucauauuuucagauaagaua

SEQ ID NO: 236672 - RNA, 24 nt, Artificial Sequence
  Synthetic
gacaucauauuuucagauaagaua

SEQ ID NO: 236673 - RNA, 18 nt, Artificial Sequence
  Synthetic
auacaaguugauaagaua

SEQ ID NO: 236674 - RNA, 19 nt, Artificial Sequence
  Synthetic
uauacaaguugauaagaua

SEQ ID NO: 236675 - RNA, 20 nt, Artificial Sequence
  Synthetic
auauacaaguugauaagaua

SEQ ID NO: 236676 - RNA, 21 nt, Artificial Sequence
  Synthetic
aauauacaaguugauaagaua

SEQ ID NO: 236677 - RNA, 22 nt, Artificial Sequence
  Synthetic
aaauauacaaguugauaagaua

SEQ ID NO: 236678 - RNA, 23 nt, Artificial Sequence
  Synthetic
aaaauauacaaguugauaagaua

SEQ ID NO: 236679 - RNA, 24 nt, Artificial Sequence
  Synthetic
gaaaauauacaaguugauaagaua

SEQ ID NO: 236680 - RNA, 18 nt, Artificial Sequence
  Synthetic
aaugaguugaguaagaua

SEQ ID NO: 236681 - RNA, 19 nt, Artificial Sequence
  Synthetic
caaugaguugaguaagaua

SEQ ID NO: 236682 - RNA, 20 nt, Artificial Sequence
  Synthetic
acaaugaguugaguaagaua

SEQ ID NO: 236683 - RNA, 21 nt, Artificial Sequence
  Synthetic
cacaaugaguugaguaagaua

SEQ ID NO: 236684 - RNA, 22 nt, Artificial Sequence
  Synthetic
acacaaugaguugaguaagaua

SEQ ID NO: 236685 - RNA, 23 nt, Artificial Sequence
  Synthetic
uacacaaugaguugaguaagaua

SEQ ID NO: 236686 - RNA, 24 nt, Artificial Sequence
  Synthetic
uuacacaaugaguugaguaagaua

SEQ ID NO: 236687 - RNA, 18 nt, Artificial Sequence
  Synthetic
ugaaugugagguaagaua

SEQ ID NO: 236688 - RNA, 19 nt, Artificial Sequence
  Synthetic
augaaugugagguaagaua

SEQ ID NO: 236689 - RNA, 20 nt, Artificial Sequence
  Synthetic
gaugaaugugagguaagaua

SEQ ID NO: 236690 - RNA, 21 nt, Artificial Sequence
  Synthetic
agaugaaugugagguaagaua

SEQ ID NO: 236691 - RNA, 22 nt, Artificial Sequence
  Synthetic
gagaugaaugugagguaagaua

SEQ ID NO: 236692 - RNA, 23 nt, Artificial Sequence
  Synthetic
agagaugaaugugagguaagaua

SEQ ID NO: 236693 - RNA, 24 nt, Artificial Sequence
  Synthetic
cagagaugaaugugagguaagaua

SEQ ID NO: 236694 - RNA, 18 nt, Artificial Sequence
  Synthetic
gcuauugcauuuaagaua

SEQ ID NO: 236695 - RNA, 19 nt, Artificial Sequence
  Synthetic
ugcuauugcauuuaagaua

SEQ ID NO: 236696 - RNA, 20 nt, Artificial Sequence
  Synthetic
gugcuauugcauuuaagaua

SEQ ID NO: 236697 - RNA, 21 nt, Artificial Sequence
  Synthetic
agugcuauugcauuuaagaua

SEQ ID NO: 236698 - RNA, 22 nt, Artificial Sequence
  Synthetic
uagugcuauugcauuuaagaua

SEQ ID NO: 236699 - RNA, 23 nt, Artificial Sequence
  Synthetic
uuagugcuauugcauuuaagaua

SEQ ID NO: 236700 - RNA, 24 nt, Artificial Sequence
  Synthetic
auuagugcuauugcauuuaagaua

SEQ ID NO: 236701 - RNA, 18 nt, Artificial Sequence
  Synthetic
aagucugauuuuaagaua

SEQ ID NO: 236702 - RNA, 19 nt, Artificial Sequence
  Synthetic
caagucugauuuuaagaua

SEQ ID NO: 236703 - RNA, 20 nt, Artificial Sequence
  Synthetic
acaagucugauuuuaagaua

SEQ ID NO: 236704 - RNA, 21 nt, Artificial Sequence
  Synthetic
cacaagucugauuuuaagaua

SEQ ID NO: 236705 - RNA, 22 nt, Artificial Sequence
  Synthetic
ucacaagucugauuuuaagaua

SEQ ID NO: 236706 - RNA, 23 nt, Artificial Sequence
  Synthetic
uucacaagucugauuuuaagaua

SEQ ID NO: 236707 - RNA, 24 nt, Artificial Sequence
  Synthetic
cuucacaagucugauuuuaagaua

SEQ ID NO: 236708 - RNA, 18 nt, Artificial Sequence
  Synthetic
cauaagaucacacagaua

SEQ ID NO: 236709 - RNA, 19 nt, Artificial Sequence
  Synthetic
gcauaagaucacacagaua

SEQ ID NO: 236710 - RNA, 20 nt, Artificial Sequence
  Synthetic
ugcauaagaucacacagaua

SEQ ID NO: 236711 - RNA, 21 nt, Artificial Sequence
  Synthetic
uugcauaagaucacacagaua

SEQ ID NO: 236712 - RNA, 22 nt, Artificial Sequence
  Synthetic
uuugcauaagaucacacagaua

SEQ ID NO: 236713 - RNA, 23 nt, Artificial Sequence
  Synthetic
uuuugcauaagaucacacagaua

SEQ ID NO: 236714 - RNA, 24 nt, Artificial Sequence
  Synthetic
auuuugcauaagaucacacagaua

SEQ ID NO: 236715 - RNA, 18 nt, Artificial Sequence
  Synthetic
auguugaaugcacagaua

SEQ ID NO: 236716 - RNA, 19 nt, Artificial Sequence
  Synthetic
cauguugaaugcacagaua

SEQ ID NO: 236717 - RNA, 20 nt, Artificial Sequence
  Synthetic
gcauguugaaugcacagaua

SEQ ID NO: 236718 - RNA, 21 nt, Artificial Sequence
  Synthetic
agcauguugaaugcacagaua

SEQ ID NO: 236719 - RNA, 22 nt, Artificial Sequence
  Synthetic
gagcauguugaaugcacagaua

SEQ ID NO: 236720 - RNA, 23 nt, Artificial Sequence
  Synthetic
agagcauguugaaugcacagaua

SEQ ID NO: 236721 - RNA, 24 nt, Artificial Sequence
  Synthetic
uagagcauguugaaugcacagaua

SEQ ID NO: 236722 - RNA, 18 nt, Artificial Sequence
  Synthetic
ggagaaauuaaccagaua

SEQ ID NO: 236723 - RNA, 19 nt, Artificial Sequence
  Synthetic
aggagaaauuaaccagaua

SEQ ID NO: 236724 - RNA, 20 nt, Artificial Sequence
  Synthetic
uaggagaaauuaaccagaua

SEQ ID NO: 236725 - RNA, 21 nt, Artificial Sequence
  Synthetic
uuaggagaaauuaaccagaua

SEQ ID NO: 236726 - RNA, 22 nt, Artificial Sequence
  Synthetic
uuuaggagaaauuaaccagaua

SEQ ID NO: 236727 - RNA, 23 nt, Artificial Sequence
  Synthetic
guuuaggagaaauuaaccagaua

SEQ ID NO: 236728 - RNA, 24 nt, Artificial Sequence
  Synthetic
aguuuaggagaaauuaaccagaua

SEQ ID NO: 236729 - RNA, 18 nt, Artificial Sequence
  Synthetic
caauuccugacccagaua

SEQ ID NO: 236730 - RNA, 19 nt, Artificial Sequence
  Synthetic
ccaauuccugacccagaua

SEQ ID NO: 236731 - RNA, 20 nt, Artificial Sequence
  Synthetic
accaauuccugacccagaua

SEQ ID NO: 236732 - RNA, 21 nt, Artificial Sequence
  Synthetic
aaccaauuccugacccagaua

SEQ ID NO: 236733 - RNA, 22 nt, Artificial Sequence
  Synthetic
caaccaauuccugacccagaua

SEQ ID NO: 236734 - RNA, 23 nt, Artificial Sequence
  Synthetic
acaaccaauuccugacccagaua

SEQ ID NO: 236735 - RNA, 24 nt, Artificial Sequence
  Synthetic
aacaaccaauuccugacccagaua

SEQ ID NO: 236736 - RNA, 18 nt, Artificial Sequence
  Synthetic
aaagagagagcccagaua

SEQ ID NO: 236737 - RNA, 19 nt, Artificial Sequence
  Synthetic
uaaagagagagcccagaua

SEQ ID NO: 236738 - RNA, 20 nt, Artificial Sequence
  Synthetic
uuaaagagagagcccagaua

SEQ ID NO: 236739 - RNA, 21 nt, Artificial Sequence
  Synthetic
auuaaagagagagcccagaua

SEQ ID NO: 236740 - RNA, 22 nt, Artificial Sequence
  Synthetic
aauuaaagagagagcccagaua

SEQ ID NO: 236741 - RNA, 23 nt, Artificial Sequence
  Synthetic
aaauuaaagagagagcccagaua

SEQ ID NO: 236742 - RNA, 24 nt, Artificial Sequence
  Synthetic
caaauuaaagagagagcccagaua

SEQ ID NO: 236743 - RNA, 18 nt, Artificial Sequence
  Synthetic
auaagcagaggccagaua

SEQ ID NO: 236744 - RNA, 19 nt, Artificial Sequence
  Synthetic
uauaagcagaggccagaua

SEQ ID NO: 236745 - RNA, 20 nt, Artificial Sequence
  Synthetic
guauaagcagaggccagaua

SEQ ID NO: 236746 - RNA, 21 nt, Artificial Sequence
  Synthetic
aguauaagcagaggccagaua

SEQ ID NO: 236747 - RNA, 22 nt, Artificial Sequence
  Synthetic
aaguauaagcagaggccagaua

SEQ ID NO: 236748 - RNA, 23 nt, Artificial Sequence
  Synthetic
aaaguauaagcagaggccagaua

SEQ ID NO: 236749 - RNA, 24 nt, Artificial Sequence
  Synthetic
caaaguauaagcagaggccagaua

SEQ ID NO: 236750 - RNA, 18 nt, Artificial Sequence
  Synthetic
ggagaaauuauccagaua

SEQ ID NO: 236751 - RNA, 19 nt, Artificial Sequence
  Synthetic
aggagaaauuauccagaua

SEQ ID NO: 236752 - RNA, 20 nt, Artificial Sequence
  Synthetic
gaggagaaauuauccagaua

SEQ ID NO: 236753 - RNA, 21 nt, Artificial Sequence
  Synthetic
ugaggagaaauuauccagaua

SEQ ID NO: 236754 - RNA, 22 nt, Artificial Sequence
  Synthetic
augaggagaaauuauccagaua

SEQ ID NO: 236755 - RNA, 23 nt, Artificial Sequence
  Synthetic
aaugaggagaaauuauccagaua

SEQ ID NO: 236756 - RNA, 24 nt, Artificial Sequence
  Synthetic
aaaugaggagaaauuauccagaua

SEQ ID NO: 236757 - RNA, 18 nt, Artificial Sequence
  Synthetic
uuuuuaaaggagcagaua

SEQ ID NO: 236758 - RNA, 19 nt, Artificial Sequence
  Synthetic
uuuuuuaaaggagcagaua

SEQ ID NO: 236759 - RNA, 20 nt, Artificial Sequence
  Synthetic
auuuuuuaaaggagcagaua

SEQ ID NO: 236760 - RNA, 21 nt, Artificial Sequence
  Synthetic
cauuuuuuaaaggagcagaua

SEQ ID NO: 236761 - RNA, 22 nt, Artificial Sequence
  Synthetic
acauuuuuuaaaggagcagaua

SEQ ID NO: 236762 - RNA, 23 nt, Artificial Sequence
  Synthetic
uacauuuuuuaaaggagcagaua

SEQ ID NO: 236763 - RNA, 24 nt, Artificial Sequence
  Synthetic
auacauuuuuuaaaggagcagaua

SEQ ID NO: 236764 - RNA, 18 nt, Artificial Sequence
  Synthetic
uuugcuuuuaggcagaua

SEQ ID NO: 236765 - RNA, 19 nt, Artificial Sequence
  Synthetic
cuuugcuuuuaggcagaua

SEQ ID NO: 236766 - RNA, 20 nt, Artificial Sequence
  Synthetic
ucuuugcuuuuaggcagaua

SEQ ID NO: 236767 - RNA, 21 nt, Artificial Sequence
  Synthetic
aucuuugcuuuuaggcagaua

SEQ ID NO: 236768 - RNA, 22 nt, Artificial Sequence
  Synthetic
aaucuuugcuuuuaggcagaua

SEQ ID NO: 236769 - RNA, 23 nt, Artificial Sequence
  Synthetic
aaaucuuugcuuuuaggcagaua

SEQ ID NO: 236770 - RNA, 24 nt, Artificial Sequence
  Synthetic
gaaaucuuugcuuuuaggcagaua

SEQ ID NO: 236771 - RNA, 18 nt, Artificial Sequence
  Synthetic
ugugaaaaaaaucagaua

SEQ ID NO: 236772 - RNA, 19 nt, Artificial Sequence
  Synthetic
gugugaaaaaaaucagaua

SEQ ID NO: 236773 - RNA, 20 nt, Artificial Sequence
  Synthetic
agugugaaaaaaaucagaua

SEQ ID NO: 236774 - RNA, 21 nt, Artificial Sequence
  Synthetic
uagugugaaaaaaaucagaua

SEQ ID NO: 236775 - RNA, 22 nt, Artificial Sequence
  Synthetic
uuagugugaaaaaaaucagaua

SEQ ID NO: 236776 - RNA, 23 nt, Artificial Sequence
  Synthetic
auuagugugaaaaaaaucagaua

SEQ ID NO: 236777 - RNA, 24 nt, Artificial Sequence
  Synthetic
aauuagugugaaaaaaaucagaua

SEQ ID NO: 236778 - RNA, 18 nt, Artificial Sequence
  Synthetic
uggaaguauaaagagaua

SEQ ID NO: 236779 - RNA, 19 nt, Artificial Sequence
  Synthetic
auggaaguauaaagagaua

SEQ ID NO: 236780 - RNA, 20 nt, Artificial Sequence
  Synthetic
uauggaaguauaaagagaua

SEQ ID NO: 236781 - RNA, 21 nt, Artificial Sequence
  Synthetic
uuauggaaguauaaagagaua

SEQ ID NO: 236782 - RNA, 22 nt, Artificial Sequence
  Synthetic
cuuauggaaguauaaagagaua

SEQ ID NO: 236783 - RNA, 23 nt, Artificial Sequence
  Synthetic
ucuuauggaaguauaaagagaua

SEQ ID NO: 236784 - RNA, 24 nt, Artificial Sequence
  Synthetic
uucuuauggaaguauaaagagaua

SEQ ID NO: 236785 - RNA, 18 nt, Artificial Sequence
  Synthetic
cuaguaggggaagagaua

SEQ ID NO: 236786 - RNA, 19 nt, Artificial Sequence
  Synthetic
acuaguaggggaagagaua

SEQ ID NO: 236787 - RNA, 20 nt, Artificial Sequence
  Synthetic
aacuaguaggggaagagaua

SEQ ID NO: 236788 - RNA, 21 nt, Artificial Sequence
  Synthetic
aaacuaguaggggaagagaua

SEQ ID NO: 236789 - RNA, 22 nt, Artificial Sequence
  Synthetic
gaaacuaguaggggaagagaua

SEQ ID NO: 236790 - RNA, 23 nt, Artificial Sequence
  Synthetic
ggaaacuaguaggggaagagaua

SEQ ID NO: 236791 - RNA, 24 nt, Artificial Sequence
  Synthetic
uggaaacuaguaggggaagagaua

SEQ ID NO: 236792 - RNA, 18 nt, Artificial Sequence
  Synthetic
cugagagugucagagaua

SEQ ID NO: 236793 - RNA, 19 nt, Artificial Sequence
  Synthetic
ccugagagugucagagaua

SEQ ID NO: 236794 - RNA, 20 nt, Artificial Sequence
  Synthetic
gccugagagugucagagaua

SEQ ID NO: 236795 - RNA, 21 nt, Artificial Sequence
  Synthetic
agccugagagugucagagaua

SEQ ID NO: 236796 - RNA, 22 nt, Artificial Sequence
  Synthetic
aagccugagagugucagagaua

SEQ ID NO: 236797 - RNA, 23 nt, Artificial Sequence
  Synthetic
uaagccugagagugucagagaua

SEQ ID NO: 236798 - RNA, 24 nt, Artificial Sequence
  Synthetic
cuaagccugagagugucagagaua

SEQ ID NO: 236799 - RNA, 18 nt, Artificial Sequence
  Synthetic
acauaaaauggagagaua

SEQ ID NO: 236800 - RNA, 19 nt, Artificial Sequence
  Synthetic
gacauaaaauggagagaua

SEQ ID NO: 236801 - RNA, 20 nt, Artificial Sequence
  Synthetic
ggacauaaaauggagagaua

SEQ ID NO: 236802 - RNA, 21 nt, Artificial Sequence
  Synthetic
uggacauaaaauggagagaua

SEQ ID NO: 236803 - RNA, 22 nt, Artificial Sequence
  Synthetic
uuggacauaaaauggagagaua

SEQ ID NO: 236804 - RNA, 23 nt, Artificial Sequence
  Synthetic
auuggacauaaaauggagagaua

SEQ ID NO: 236805 - RNA, 24 nt, Artificial Sequence
  Synthetic
gauuggacauaaaauggagagaua

SEQ ID NO: 236806 - RNA, 18 nt, Artificial Sequence
  Synthetic
uaagaguacugagagaua

SEQ ID NO: 236807 - RNA, 19 nt, Artificial Sequence
  Synthetic
cuaagaguacugagagaua

SEQ ID NO: 236808 - RNA, 20 nt, Artificial Sequence
  Synthetic
ccuaagaguacugagagaua

SEQ ID NO: 236809 - RNA, 21 nt, Artificial Sequence
  Synthetic
accuaagaguacugagagaua

SEQ ID NO: 236810 - RNA, 22 nt, Artificial Sequence
  Synthetic
gaccuaagaguacugagagaua

SEQ ID NO: 236811 - RNA, 23 nt, Artificial Sequence
  Synthetic
agaccuaagaguacugagagaua

SEQ ID NO: 236812 - RNA, 24 nt, Artificial Sequence
  Synthetic
gagaccuaagaguacugagagaua

SEQ ID NO: 236813 - RNA, 18 nt, Artificial Sequence
  Synthetic
gugguucagcuagagaua

SEQ ID NO: 236814 - RNA, 19 nt, Artificial Sequence
  Synthetic
ggugguucagcuagagaua

SEQ ID NO: 236815 - RNA, 20 nt, Artificial Sequence
  Synthetic
uggugguucagcuagagaua

SEQ ID NO: 236816 - RNA, 21 nt, Artificial Sequence
  Synthetic
cuggugguucagcuagagaua

SEQ ID NO: 236817 - RNA, 22 nt, Artificial Sequence
  Synthetic
acuggugguucagcuagagaua

SEQ ID NO: 236818 - RNA, 23 nt, Artificial Sequence
  Synthetic
aacuggugguucagcuagagaua

SEQ ID NO: 236819 - RNA, 24 nt, Artificial Sequence
  Synthetic
gaacuggugguucagcuagagaua

SEQ ID NO: 236820 - RNA, 18 nt, Artificial Sequence
  Synthetic
augaguaacaaggagaua

SEQ ID NO: 236821 - RNA, 19 nt, Artificial Sequence
  Synthetic
caugaguaacaaggagaua

SEQ ID NO: 236822 - RNA, 20 nt, Artificial Sequence
  Synthetic
gcaugaguaacaaggagaua

SEQ ID NO: 236823 - RNA, 21 nt, Artificial Sequence
  Synthetic
ggcaugaguaacaaggagaua

SEQ ID NO: 236824 - RNA, 22 nt, Artificial Sequence
  Synthetic
gggcaugaguaacaaggagaua

SEQ ID NO: 236825 - RNA, 23 nt, Artificial Sequence
  Synthetic
ugggcaugaguaacaaggagaua

SEQ ID NO: 236826 - RNA, 24 nt, Artificial Sequence
  Synthetic
augggcaugaguaacaaggagaua

SEQ ID NO: 236827 - RNA, 18 nt, Artificial Sequence
  Synthetic
acaguguguucugagaua

SEQ ID NO: 236828 - RNA, 19 nt, Artificial Sequence
  Synthetic
uacaguguguucugagaua

SEQ ID NO: 236829 - RNA, 20 nt, Artificial Sequence
  Synthetic
auacaguguguucugagaua

SEQ ID NO: 236830 - RNA, 21 nt, Artificial Sequence
  Synthetic
cauacaguguguucugagaua

SEQ ID NO: 236831 - RNA, 22 nt, Artificial Sequence
  Synthetic
gcauacaguguguucugagaua

SEQ ID NO: 236832 - RNA, 23 nt, Artificial Sequence
  Synthetic
ugcauacaguguguucugagaua

SEQ ID NO: 236833 - RNA, 24 nt, Artificial Sequence
  Synthetic
augcauacaguguguucugagaua

SEQ ID NO: 236834 - RNA, 18 nt, Artificial Sequence
  Synthetic
uuucagcagcuugagaua

SEQ ID NO: 236835 - RNA, 19 nt, Artificial Sequence
  Synthetic
guuucagcagcuugagaua

SEQ ID NO: 236836 - RNA, 20 nt, Artificial Sequence
  Synthetic
uguuucagcagcuugagaua

SEQ ID NO: 236837 - RNA, 21 nt, Artificial Sequence
  Synthetic
uuguuucagcagcuugagaua

SEQ ID NO: 236838 - RNA, 22 nt, Artificial Sequence
  Synthetic
uuuguuucagcagcuugagaua

SEQ ID NO: 236839 - RNA, 23 nt, Artificial Sequence
  Synthetic
auuuguuucagcagcuugagaua

SEQ ID NO: 236840 - RNA, 24 nt, Artificial Sequence
  Synthetic
aauuuguuucagcagcuugagaua

SEQ ID NO: 236841 - RNA, 18 nt, Artificial Sequence
  Synthetic
cagauacugcaauagaua

SEQ ID NO: 236842 - RNA, 19 nt, Artificial Sequence
  Synthetic
ccagauacugcaauagaua

SEQ ID NO: 236843 - RNA, 20 nt, Artificial Sequence
  Synthetic
gccagauacugcaauagaua

SEQ ID NO: 236844 - RNA, 21 nt, Artificial Sequence
  Synthetic
ugccagauacugcaauagaua

SEQ ID NO: 236845 - RNA, 22 nt, Artificial Sequence
  Synthetic
uugccagauacugcaauagaua

SEQ ID NO: 236846 - RNA, 23 nt, Artificial Sequence
  Synthetic
uuugccagauacugcaauagaua

SEQ ID NO: 236847 - RNA, 24 nt, Artificial Sequence
  Synthetic
cuuugccagauacugcaauagaua

SEQ ID NO: 236848 - RNA, 18 nt, Artificial Sequence
  Synthetic
agaauuucagaauagaua

SEQ ID NO: 236849 - RNA, 19 nt, Artificial Sequence
  Synthetic
aagaauuucagaauagaua

SEQ ID NO: 236850 - RNA, 20 nt, Artificial Sequence
  Synthetic
caagaauuucagaauagaua

SEQ ID NO: 236851 - RNA, 21 nt, Artificial Sequence
  Synthetic
ccaagaauuucagaauagaua

SEQ ID NO: 236852 - RNA, 22 nt, Artificial Sequence
  Synthetic
cccaagaauuucagaauagaua

SEQ ID NO: 236853 - RNA, 23 nt, Artificial Sequence
  Synthetic
acccaagaauuucagaauagaua

SEQ ID NO: 236854 - RNA, 24 nt, Artificial Sequence
  Synthetic
aacccaagaauuucagaauagaua

SEQ ID NO: 236855 - RNA, 18 nt, Artificial Sequence
  Synthetic
uauucuaugucauagaua

SEQ ID NO: 236856 - RNA, 19 nt, Artificial Sequence
  Synthetic
cuauucuaugucauagaua

SEQ ID NO: 236857 - RNA, 20 nt, Artificial Sequence
  Synthetic
ccuauucuaugucauagaua

SEQ ID NO: 236858 - RNA, 21 nt, Artificial Sequence
  Synthetic
uccuauucuaugucauagaua

SEQ ID NO: 236859 - RNA, 22 nt, Artificial Sequence
  Synthetic
uuccuauucuaugucauagaua

SEQ ID NO: 236860 - RNA, 23 nt, Artificial Sequence
  Synthetic
uuuccuauucuaugucauagaua

SEQ ID NO: 236861 - RNA, 24 nt, Artificial Sequence
  Synthetic
auuuccuauucuaugucauagaua

SEQ ID NO: 236862 - RNA, 18 nt, Artificial Sequence
  Synthetic
uuuccucauucauagaua

SEQ ID NO: 236863 - RNA, 19 nt, Artificial Sequence
  Synthetic
uuuuccucauucauagaua

SEQ ID NO: 236864 - RNA, 20 nt, Artificial Sequence
  Synthetic
auuuuccucauucauagaua

SEQ ID NO: 236865 - RNA, 21 nt, Artificial Sequence
  Synthetic
uauuuuccucauucauagaua

SEQ ID NO: 236866 - RNA, 22 nt, Artificial Sequence
  Synthetic
auauuuuccucauucauagaua

SEQ ID NO: 236867 - RNA, 23 nt, Artificial Sequence
  Synthetic
cauauuuuccucauucauagaua

SEQ ID NO: 236868 - RNA, 24 nt, Artificial Sequence
  Synthetic
acauauuuuccucauucauagaua

SEQ ID NO: 236869 - RNA, 18 nt, Artificial Sequence
  Synthetic
ugaacuuuccuauagaua

SEQ ID NO: 236870 - RNA, 19 nt, Artificial Sequence
  Synthetic
gugaacuuuccuauagaua

SEQ ID NO: 236871 - RNA, 20 nt, Artificial Sequence
  Synthetic
agugaacuuuccuauagaua

SEQ ID NO: 236872 - RNA, 21 nt, Artificial Sequence
  Synthetic
cagugaacuuuccuauagaua

SEQ ID NO: 236873 - RNA, 22 nt, Artificial Sequence
  Synthetic
ucagugaacuuuccuauagaua

SEQ ID NO: 236874 - RNA, 23 nt, Artificial Sequence
  Synthetic
cucagugaacuuuccuauagaua

SEQ ID NO: 236875 - RNA, 24 nt, Artificial Sequence
  Synthetic
ucucagugaacuuuccuauagaua

SEQ ID NO: 236876 - RNA, 18 nt, Artificial Sequence
  Synthetic
ugugucacccacuagaua

SEQ ID NO: 236877 - RNA, 19 nt, Artificial Sequence
  Synthetic
cugugucacccacuagaua

SEQ ID NO: 236878 - RNA, 20 nt, Artificial Sequence
  Synthetic
ucugugucacccacuagaua

SEQ ID NO: 236879 - RNA, 21 nt, Artificial Sequence
  Synthetic
aucugugucacccacuagaua

SEQ ID NO: 236880 - RNA, 22 nt, Artificial Sequence
  Synthetic
uaucugugucacccacuagaua

SEQ ID NO: 236881 - RNA, 23 nt, Artificial Sequence
  Synthetic
uuaucugugucacccacuagaua

SEQ ID NO: 236882 - RNA, 24 nt, Artificial Sequence
  Synthetic
auuaucugugucacccacuagaua

SEQ ID NO: 236883 - RNA, 18 nt, Artificial Sequence
  Synthetic
auuacugugagguagaua

SEQ ID NO: 236884 - RNA, 19 nt, Artificial Sequence
  Synthetic
cauuacugugagguagaua

SEQ ID NO: 236885 - RNA, 20 nt, Artificial Sequence
  Synthetic
acauuacugugagguagaua

SEQ ID NO: 236886 - RNA, 21 nt, Artificial Sequence
  Synthetic
aacauuacugugagguagaua

SEQ ID NO: 236887 - RNA, 22 nt, Artificial Sequence
  Synthetic
caacauuacugugagguagaua

SEQ ID NO: 236888 - RNA, 23 nt, Artificial Sequence
  Synthetic
acaacauuacugugagguagaua

SEQ ID NO: 236889 - RNA, 24 nt, Artificial Sequence
  Synthetic
uacaacauuacugugagguagaua

SEQ ID NO: 236890 - RNA, 18 nt, Artificial Sequence
  Synthetic
aauguuuugggguagaua

SEQ ID NO: 236891 - RNA, 19 nt, Artificial Sequence
  Synthetic
aaauguuuugggguagaua

SEQ ID NO: 236892 - RNA, 20 nt, Artificial Sequence
  Synthetic
aaaauguuuugggguagaua

SEQ ID NO: 236893 - RNA, 21 nt, Artificial Sequence
  Synthetic
uaaaauguuuugggguagaua

SEQ ID NO: 236894 - RNA, 22 nt, Artificial Sequence
  Synthetic
auaaaauguuuugggguagaua

SEQ ID NO: 236895 - RNA, 23 nt, Artificial Sequence
  Synthetic
uauaaaauguuuugggguagaua

SEQ ID NO: 236896 - RNA, 24 nt, Artificial Sequence
  Synthetic
auauaaaauguuuugggguagaua

SEQ ID NO: 236897 - RNA, 18 nt, Artificial Sequence
  Synthetic
uugacgguuggguagaua

SEQ ID NO: 236898 - RNA, 19 nt, Artificial Sequence
  Synthetic
auugacgguuggguagaua

SEQ ID NO: 236899 - RNA, 20 nt, Artificial Sequence
  Synthetic
aauugacgguuggguagaua

SEQ ID NO: 236900 - RNA, 21 nt, Artificial Sequence
  Synthetic
uaauugacgguuggguagaua

SEQ ID NO: 236901 - RNA, 22 nt, Artificial Sequence
  Synthetic
guaauugacgguuggguagaua

SEQ ID NO: 236902 - RNA, 23 nt, Artificial Sequence
  Synthetic
aguaauugacgguuggguagaua

SEQ ID NO: 236903 - RNA, 24 nt, Artificial Sequence
  Synthetic
uaguaauugacgguuggguagaua

SEQ ID NO: 236904 - RNA, 18 nt, Artificial Sequence
  Synthetic
uaaaagaacuauuagaua

SEQ ID NO: 236905 - RNA, 19 nt, Artificial Sequence
  Synthetic
auaaaagaacuauuagaua

SEQ ID NO: 236906 - RNA, 20 nt, Artificial Sequence
  Synthetic
aauaaaagaacuauuagaua

SEQ ID NO: 236907 - RNA, 21 nt, Artificial Sequence
  Synthetic
aaauaaaagaacuauuagaua

SEQ ID NO: 236908 - RNA, 22 nt, Artificial Sequence
  Synthetic
uaaauaaaagaacuauuagaua

SEQ ID NO: 236909 - RNA, 23 nt, Artificial Sequence
  Synthetic
uuaaauaaaagaacuauuagaua

SEQ ID NO: 236910 - RNA, 24 nt, Artificial Sequence
  Synthetic
guuaaauaaaagaacuauuagaua

SEQ ID NO: 236911 - RNA, 18 nt, Artificial Sequence
  Synthetic
auggugaguuauuagaua

SEQ ID NO: 236912 - RNA, 19 nt, Artificial Sequence
  Synthetic
uauggugaguuauuagaua

SEQ ID NO: 236913 - RNA, 20 nt, Artificial Sequence
  Synthetic
uuauggugaguuauuagaua

SEQ ID NO: 236914 - RNA, 21 nt, Artificial Sequence
  Synthetic
uuuauggugaguuauuagaua

SEQ ID NO: 236915 - RNA, 22 nt, Artificial Sequence
  Synthetic
guuuauggugaguuauuagaua

SEQ ID NO: 236916 - RNA, 23 nt, Artificial Sequence
  Synthetic
aguuuauggugaguuauuagaua

SEQ ID NO: 236917 - RNA, 24 nt, Artificial Sequence
  Synthetic
caguuuauggugaguuauuagaua

SEQ ID NO: 236918 - RNA, 18 nt, Artificial Sequence
  Synthetic
cacuggaagaguuagaua

SEQ ID NO: 236919 - RNA, 19 nt, Artificial Sequence
  Synthetic
acacuggaagaguuagaua

SEQ ID NO: 236920 - RNA, 20 nt, Artificial Sequence
  Synthetic
aacacuggaagaguuagaua

SEQ ID NO: 236921 - RNA, 21 nt, Artificial Sequence
  Synthetic
uaacacuggaagaguuagaua

SEQ ID NO: 236922 - RNA, 22 nt, Artificial Sequence
  Synthetic
auaacacuggaagaguuagaua

SEQ ID NO: 236923 - RNA, 23 nt, Artificial Sequence
  Synthetic
aauaacacuggaagaguuagaua

SEQ ID NO: 236924 - RNA, 24 nt, Artificial Sequence
  Synthetic
gaauaacacuggaagaguuagaua

SEQ ID NO: 236925 - RNA, 18 nt, Artificial Sequence
  Synthetic
guagacacugguuagaua

SEQ ID NO: 236926 - RNA, 19 nt, Artificial Sequence
  Synthetic
aguagacacugguuagaua

SEQ ID NO: 236927 - RNA, 20 nt, Artificial Sequence
  Synthetic
caguagacacugguuagaua

SEQ ID NO: 236928 - RNA, 21 nt, Artificial Sequence
  Synthetic
acaguagacacugguuagaua

SEQ ID NO: 236929 - RNA, 22 nt, Artificial Sequence
  Synthetic
uacaguagacacugguuagaua

SEQ ID NO: 236930 - RNA, 23 nt, Artificial Sequence
  Synthetic
auacaguagacacugguuagaua

SEQ ID NO: 236931 - RNA, 24 nt, Artificial Sequence
  Synthetic
uauacaguagacacugguuagaua

SEQ ID NO: 236932 - RNA, 18 nt, Artificial Sequence
  Synthetic
gucccauauauuuagaua

SEQ ID NO: 236933 - RNA, 19 nt, Artificial Sequence
  Synthetic
agucccauauauuuagaua

SEQ ID NO: 236934 - RNA, 20 nt, Artificial Sequence
  Synthetic
aagucccauauauuuagaua

SEQ ID NO: 236935 - RNA, 21 nt, Artificial Sequence
  Synthetic
uaagucccauauauuuagaua

SEQ ID NO: 236936 - RNA, 22 nt, Artificial Sequence
  Synthetic
auaagucccauauauuuagaua

SEQ ID NO: 236937 - RNA, 23 nt, Artificial Sequence
  Synthetic
uauaagucccauauauuuagaua

SEQ ID NO: 236938 - RNA, 24 nt, Artificial Sequence
  Synthetic
cuauaagucccauauauuuagaua

SEQ ID NO: 236939 - RNA, 18 nt, Artificial Sequence
  Synthetic
guuucaugucuuuagaua

SEQ ID NO: 236940 - RNA, 19 nt, Artificial Sequence
  Synthetic
uguuucaugucuuuagaua

SEQ ID NO: 236941 - RNA, 20 nt, Artificial Sequence
  Synthetic
guguuucaugucuuuagaua

SEQ ID NO: 236942 - RNA, 21 nt, Artificial Sequence
  Synthetic
uguguuucaugucuuuagaua

SEQ ID NO: 236943 - RNA, 22 nt, Artificial Sequence
  Synthetic
auguguuucaugucuuuagaua

SEQ ID NO: 236944 - RNA, 23 nt, Artificial Sequence
  Synthetic
uauguguuucaugucuuuagaua

SEQ ID NO: 236945 - RNA, 24 nt, Artificial Sequence
  Synthetic
auauguguuucaugucuuuagaua

SEQ ID NO: 236946 - RNA, 18 nt, Artificial Sequence
  Synthetic
ugauuaauaguuuagaua

SEQ ID NO: 236947 - RNA, 19 nt, Artificial Sequence
  Synthetic
uugauuaauaguuuagaua

SEQ ID NO: 236948 - RNA, 20 nt, Artificial Sequence
  Synthetic
auugauuaauaguuuagaua

SEQ ID NO: 236949 - RNA, 21 nt, Artificial Sequence
  Synthetic
gauugauuaauaguuuagaua

SEQ ID NO: 236950 - RNA, 22 nt, Artificial Sequence
  Synthetic
ggauugauuaauaguuuagaua

SEQ ID NO: 236951 - RNA, 23 nt, Artificial Sequence
  Synthetic
uggauugauuaauaguuuagaua

SEQ ID NO: 236952 - RNA, 24 nt, Artificial Sequence
  Synthetic
uuggauugauuaauaguuuagaua

SEQ ID NO: 236953 - RNA, 18 nt, Artificial Sequence
  Synthetic
aauuucaacuuuuagaua

SEQ ID NO: 236954 - RNA, 19 nt, Artificial Sequence
  Synthetic
uaauuucaacuuuuagaua

SEQ ID NO: 236955 - RNA, 20 nt, Artificial Sequence
  Synthetic
uuaauuucaacuuuuagaua

SEQ ID NO: 236956 - RNA, 21 nt, Artificial Sequence
  Synthetic
uuuaauuucaacuuuuagaua

SEQ ID NO: 236957 - RNA, 22 nt, Artificial Sequence
  Synthetic
uuuuaauuucaacuuuuagaua

SEQ ID NO: 236958 - RNA, 23 nt, Artificial Sequence
  Synthetic
uuuuuaauuucaacuuuuagaua

SEQ ID NO: 236959 - RNA, 24 nt, Artificial Sequence
  Synthetic
uuuuuuaauuucaacuuuuagaua

SEQ ID NO: 236960 - RNA, 18 nt, Artificial Sequence
  Synthetic
uauauagacuuuuagaua

SEQ ID NO: 236961 - RNA, 19 nt, Artificial Sequence
  Synthetic
cuauauagacuuuuagaua

SEQ ID NO: 236962 - RNA, 20 nt, Artificial Sequence
  Synthetic
ucuauauagacuuuuagaua

SEQ ID NO: 236963 - RNA, 21 nt, Artificial Sequence
  Synthetic
gucuauauagacuuuuagaua

SEQ ID NO: 236964 - RNA, 22 nt, Artificial Sequence
  Synthetic
ugucuauauagacuuuuagaua

SEQ ID NO: 236965 - RNA, 23 nt, Artificial Sequence
  Synthetic
uugucuauauagacuuuuagaua

SEQ ID NO: 236966 - RNA, 24 nt, Artificial Sequence
  Synthetic
cuugucuauauagacuuuuagaua

SEQ ID NO: 236967 - RNA, 18 nt, Artificial Sequence
  Synthetic
aaagacugagcaacgaua

SEQ ID NO: 236968 - RNA, 19 nt, Artificial Sequence
  Synthetic
aaaagacugagcaacgaua

SEQ ID NO: 236969 - RNA, 20 nt, Artificial Sequence
  Synthetic
gaaaagacugagcaacgaua

SEQ ID NO: 236970 - RNA, 21 nt, Artificial Sequence
  Synthetic
agaaaagacugagcaacgaua

SEQ ID NO: 236971 - RNA, 22 nt, Artificial Sequence
  Synthetic
gagaaaagacugagcaacgaua

SEQ ID NO: 236972 - RNA, 23 nt, Artificial Sequence
  Synthetic
agagaaaagacugagcaacgaua

SEQ ID NO: 236973 - RNA, 24 nt, Artificial Sequence
  Synthetic
gagagaaaagacugagcaacgaua

SEQ ID NO: 236974 - RNA, 18 nt, Artificial Sequence
  Synthetic
acugaggugcucacgaua

SEQ ID NO: 236975 - RNA, 19 nt, Artificial Sequence
  Synthetic
uacugaggugcucacgaua

SEQ ID NO: 236976 - RNA, 20 nt, Artificial Sequence
  Synthetic
auacugaggugcucacgaua

SEQ ID NO: 236977 - RNA, 21 nt, Artificial Sequence
  Synthetic
aauacugaggugcucacgaua

SEQ ID NO: 236978 - RNA, 22 nt, Artificial Sequence
  Synthetic
gaauacugaggugcucacgaua

SEQ ID NO: 236979 - RNA, 23 nt, Artificial Sequence
  Synthetic
ggaauacugaggugcucacgaua

SEQ ID NO: 236980 - RNA, 24 nt, Artificial Sequence
  Synthetic
aggaauacugaggugcucacgaua

SEQ ID NO: 236981 - RNA, 18 nt, Artificial Sequence
  Synthetic
acauuuuuuucaccgaua

SEQ ID NO: 236982 - RNA, 19 nt, Artificial Sequence
  Synthetic
cacauuuuuuucaccgaua

SEQ ID NO: 236983 - RNA, 20 nt, Artificial Sequence
  Synthetic
ccacauuuuuuucaccgaua

SEQ ID NO: 236984 - RNA, 21 nt, Artificial Sequence
  Synthetic
uccacauuuuuuucaccgaua

SEQ ID NO: 236985 - RNA, 22 nt, Artificial Sequence
  Synthetic
uuccacauuuuuuucaccgaua

SEQ ID NO: 236986 - RNA, 23 nt, Artificial Sequence
  Synthetic
cuuccacauuuuuuucaccgaua

SEQ ID NO: 236987 - RNA, 24 nt, Artificial Sequence
  Synthetic
ccuuccacauuuuuuucaccgaua

SEQ ID NO: 236988 - RNA, 18 nt, Artificial Sequence
  Synthetic
cagaaguuaaaagcgaua

SEQ ID NO: 236989 - RNA, 19 nt, Artificial Sequence
  Synthetic
acagaaguuaaaagcgaua

SEQ ID NO: 236990 - RNA, 20 nt, Artificial Sequence
  Synthetic
aacagaaguuaaaagcgaua

SEQ ID NO: 236991 - RNA, 21 nt, Artificial Sequence
  Synthetic
caacagaaguuaaaagcgaua

SEQ ID NO: 236992 - RNA, 22 nt, Artificial Sequence
  Synthetic
gcaacagaaguuaaaagcgaua

SEQ ID NO: 236993 - RNA, 23 nt, Artificial Sequence
  Synthetic
ggcaacagaaguuaaaagcgaua

SEQ ID NO: 236994 - RNA, 24 nt, Artificial Sequence
  Synthetic
aggcaacagaaguuaaaagcgaua

SEQ ID NO: 236995 - RNA, 18 nt, Artificial Sequence
  Synthetic
aauuuuaaugucucgaua

SEQ ID NO: 236996 - RNA, 19 nt, Artificial Sequence
  Synthetic
uaauuuuaaugucucgaua

SEQ ID NO: 236997 - RNA, 20 nt, Artificial Sequence
  Synthetic
cuaauuuuaaugucucgaua

SEQ ID NO: 236998 - RNA, 21 nt, Artificial Sequence
  Synthetic
ucuaauuuuaaugucucgaua

SEQ ID NO: 236999 - RNA, 22 nt, Artificial Sequence
  Synthetic
uucuaauuuuaaugucucgaua

SEQ ID NO: 237000 - RNA, 23 nt, Artificial Sequence
  Synthetic
auucuaauuuuaaugucucgaua

SEQ ID NO: 237001 - RNA, 24 nt, Artificial Sequence
  Synthetic
uauucuaauuuuaaugucucgaua

SEQ ID NO: 237002 - RNA, 18 nt, Artificial Sequence
  Synthetic
guuuuauaugugucgaua

SEQ ID NO: 237003 - RNA, 19 nt, Artificial Sequence
  Synthetic
aguuuuauaugugucgaua

SEQ ID NO: 237004 - RNA, 20 nt, Artificial Sequence
  Synthetic
gaguuuuauaugugucgaua

SEQ ID NO: 237005 - RNA, 21 nt, Artificial Sequence
  Synthetic
agaguuuuauaugugucgaua

SEQ ID NO: 237006 - RNA, 22 nt, Artificial Sequence
  Synthetic
aagaguuuuauaugugucgaua

SEQ ID NO: 237007 - RNA, 23 nt, Artificial Sequence
  Synthetic
gaagaguuuuauaugugucgaua

SEQ ID NO: 237008 - RNA, 24 nt, Artificial Sequence
  Synthetic
ggaagaguuuuauaugugucgaua

SEQ ID NO: 237009 - RNA, 18 nt, Artificial Sequence
  Synthetic
augacagagaaaaggaua

SEQ ID NO: 237010 - RNA, 19 nt, Artificial Sequence
  Synthetic
uaugacagagaaaaggaua

SEQ ID NO: 237011 - RNA, 20 nt, Artificial Sequence
  Synthetic
uuaugacagagaaaaggaua

SEQ ID NO: 237012 - RNA, 21 nt, Artificial Sequence
  Synthetic
uuuaugacagagaaaaggaua

SEQ ID NO: 237013 - RNA, 22 nt, Artificial Sequence
  Synthetic
auuuaugacagagaaaaggaua

SEQ ID NO: 237014 - RNA, 23 nt, Artificial Sequence
  Synthetic
uauuuaugacagagaaaaggaua

SEQ ID NO: 237015 - RNA, 24 nt, Artificial Sequence
  Synthetic
auauuuaugacagagaaaaggaua

SEQ ID NO: 237016 - RNA, 18 nt, Artificial Sequence
  Synthetic
caagcugaacaaaggaua

SEQ ID NO: 237017 - RNA, 19 nt, Artificial Sequence
  Synthetic
acaagcugaacaaaggaua

SEQ ID NO: 237018 - RNA, 20 nt, Artificial Sequence
  Synthetic
aacaagcugaacaaaggaua

SEQ ID NO: 237019 - RNA, 21 nt, Artificial Sequence
  Synthetic
uaacaagcugaacaaaggaua

SEQ ID NO: 237020 - RNA, 22 nt, Artificial Sequence
  Synthetic
uuaacaagcugaacaaaggaua

SEQ ID NO: 237021 - RNA, 23 nt, Artificial Sequence
  Synthetic
uuuaacaagcugaacaaaggaua

SEQ ID NO: 237022 - RNA, 24 nt, Artificial Sequence
  Synthetic
auuuaacaagcugaacaaaggaua

SEQ ID NO: 237023 - RNA, 18 nt, Artificial Sequence
  Synthetic
aaguguugaucaaggaua

SEQ ID NO: 237024 - RNA, 19 nt, Artificial Sequence
  Synthetic
caaguguugaucaaggaua

SEQ ID NO: 237025 - RNA, 20 nt, Artificial Sequence
  Synthetic
acaaguguugaucaaggaua

SEQ ID NO: 237026 - RNA, 21 nt, Artificial Sequence
  Synthetic
aacaaguguugaucaaggaua

SEQ ID NO: 237027 - RNA, 22 nt, Artificial Sequence
  Synthetic
uaacaaguguugaucaaggaua

SEQ ID NO: 237028 - RNA, 23 nt, Artificial Sequence
  Synthetic
auaacaaguguugaucaaggaua

SEQ ID NO: 237029 - RNA, 24 nt, Artificial Sequence
  Synthetic
gauaacaaguguugaucaaggaua

SEQ ID NO: 237030 - RNA, 18 nt, Artificial Sequence
  Synthetic
ucccacaggucaaggaua

SEQ ID NO: 237031 - RNA, 19 nt, Artificial Sequence
  Synthetic
cucccacaggucaaggaua

SEQ ID NO: 237032 - RNA, 20 nt, Artificial Sequence
  Synthetic
acucccacaggucaaggaua

SEQ ID NO: 237033 - RNA, 21 nt, Artificial Sequence
  Synthetic
aacucccacaggucaaggaua

SEQ ID NO: 237034 - RNA, 22 nt, Artificial Sequence
  Synthetic
aaacucccacaggucaaggaua

SEQ ID NO: 237035 - RNA, 23 nt, Artificial Sequence
  Synthetic
caaacucccacaggucaaggaua

SEQ ID NO: 237036 - RNA, 24 nt, Artificial Sequence
  Synthetic
ucaaacucccacaggucaaggaua

SEQ ID NO: 237037 - RNA, 18 nt, Artificial Sequence
  Synthetic
aaaggaaggagaaggaua

SEQ ID NO: 237038 - RNA, 19 nt, Artificial Sequence
  Synthetic
aaaaggaaggagaaggaua

SEQ ID NO: 237039 - RNA, 20 nt, Artificial Sequence
  Synthetic
uaaaaggaaggagaaggaua

SEQ ID NO: 237040 - RNA, 21 nt, Artificial Sequence
  Synthetic
guaaaaggaaggagaaggaua

SEQ ID NO: 237041 - RNA, 22 nt, Artificial Sequence
  Synthetic
aguaaaaggaaggagaaggaua

SEQ ID NO: 237042 - RNA, 23 nt, Artificial Sequence
  Synthetic
uaguaaaaggaaggagaaggaua

SEQ ID NO: 237043 - RNA, 24 nt, Artificial Sequence
  Synthetic
guaguaaaaggaaggagaaggaua

SEQ ID NO: 237044 - RNA, 18 nt, Artificial Sequence
  Synthetic
guauguuggagaaggaua

SEQ ID NO: 237045 - RNA, 19 nt, Artificial Sequence
  Synthetic
uguauguuggagaaggaua

SEQ ID NO: 237046 - RNA, 20 nt, Artificial Sequence
  Synthetic
uuguauguuggagaaggaua

SEQ ID NO: 237047 - RNA, 21 nt, Artificial Sequence
  Synthetic
uuuguauguuggagaaggaua

SEQ ID NO: 237048 - RNA, 22 nt, Artificial Sequence
  Synthetic
cuuuguauguuggagaaggaua

SEQ ID NO: 237049 - RNA, 23 nt, Artificial Sequence
  Synthetic
gcuuuguauguuggagaaggaua

SEQ ID NO: 237050 - RNA, 24 nt, Artificial Sequence
  Synthetic
agcuuuguauguuggagaaggaua

SEQ ID NO: 237051 - RNA, 18 nt, Artificial Sequence
  Synthetic
aaggcacuuagaaggaua

SEQ ID NO: 237052 - RNA, 19 nt, Artificial Sequence
  Synthetic
aaaggcacuuagaaggaua

SEQ ID NO: 237053 - RNA, 20 nt, Artificial Sequence
  Synthetic
caaaggcacuuagaaggaua

SEQ ID NO: 237054 - RNA, 21 nt, Artificial Sequence
  Synthetic
gcaaaggcacuuagaaggaua

SEQ ID NO: 237055 - RNA, 22 nt, Artificial Sequence
  Synthetic
agcaaaggcacuuagaaggaua

SEQ ID NO: 237056 - RNA, 23 nt, Artificial Sequence
  Synthetic
uagcaaaggcacuuagaaggaua

SEQ ID NO: 237057 - RNA, 24 nt, Artificial Sequence
  Synthetic
guagcaaaggcacuuagaaggaua

SEQ ID NO: 237058 - RNA, 18 nt, Artificial Sequence
  Synthetic
auuucuaguuuaaggaua

SEQ ID NO: 237059 - RNA, 19 nt, Artificial Sequence
  Synthetic
cauuucuaguuuaaggaua

SEQ ID NO: 237060 - RNA, 20 nt, Artificial Sequence
  Synthetic
gcauuucuaguuuaaggaua

SEQ ID NO: 237061 - RNA, 21 nt, Artificial Sequence
  Synthetic
ggcauuucuaguuuaaggaua

SEQ ID NO: 237062 - RNA, 22 nt, Artificial Sequence
  Synthetic
cggcauuucuaguuuaaggaua

SEQ ID NO: 237063 - RNA, 23 nt, Artificial Sequence
  Synthetic
gcggcauuucuaguuuaaggaua

SEQ ID NO: 237064 - RNA, 24 nt, Artificial Sequence
  Synthetic
agcggcauuucuaguuuaaggaua

SEQ ID NO: 237065 - RNA, 18 nt, Artificial Sequence
  Synthetic
agaaaacagcacaggaua

SEQ ID NO: 237066 - RNA, 19 nt, Artificial Sequence
  Synthetic
gagaaaacagcacaggaua

SEQ ID NO: 237067 - RNA, 20 nt, Artificial Sequence
  Synthetic
ggagaaaacagcacaggaua

SEQ ID NO: 237068 - RNA, 21 nt, Artificial Sequence
  Synthetic
aggagaaaacagcacaggaua

SEQ ID NO: 237069 - RNA, 22 nt, Artificial Sequence
  Synthetic
aaggagaaaacagcacaggaua

SEQ ID NO: 237070 - RNA, 23 nt, Artificial Sequence
  Synthetic
aaaggagaaaacagcacaggaua

SEQ ID NO: 237071 - RNA, 24 nt, Artificial Sequence
  Synthetic
caaaggagaaaacagcacaggaua

SEQ ID NO: 237072 - RNA, 18 nt, Artificial Sequence
  Synthetic
uauuucauucacaggaua

SEQ ID NO: 237073 - RNA, 19 nt, Artificial Sequence
  Synthetic
guauuucauucacaggaua

SEQ ID NO: 237074 - RNA, 20 nt, Artificial Sequence
  Synthetic
aguauuucauucacaggaua

SEQ ID NO: 237075 - RNA, 21 nt, Artificial Sequence
  Synthetic
caguauuucauucacaggaua

SEQ ID NO: 237076 - RNA, 22 nt, Artificial Sequence
  Synthetic
ucaguauuucauucacaggaua

SEQ ID NO: 237077 - RNA, 23 nt, Artificial Sequence
  Synthetic
aucaguauuucauucacaggaua

SEQ ID NO: 237078 - RNA, 24 nt, Artificial Sequence
  Synthetic
gaucaguauuucauucacaggaua

SEQ ID NO: 237079 - RNA, 18 nt, Artificial Sequence
  Synthetic
cugugcuuuugcaggaua

SEQ ID NO: 237080 - RNA, 19 nt, Artificial Sequence
  Synthetic
ucugugcuuuugcaggaua

SEQ ID NO: 237081 - RNA, 20 nt, Artificial Sequence
  Synthetic
cucugugcuuuugcaggaua

SEQ ID NO: 237082 - RNA, 21 nt, Artificial Sequence
  Synthetic
ucucugugcuuuugcaggaua

SEQ ID NO: 237083 - RNA, 22 nt, Artificial Sequence
  Synthetic
gucucugugcuuuugcaggaua

SEQ ID NO: 237084 - RNA, 23 nt, Artificial Sequence
  Synthetic
agucucugugcuuuugcaggaua

SEQ ID NO: 237085 - RNA, 24 nt, Artificial Sequence
  Synthetic
gagucucugugcuuuugcaggaua

SEQ ID NO: 237086 - RNA, 18 nt, Artificial Sequence
  Synthetic
ugcuaggugcucaggaua

SEQ ID NO: 237087 - RNA, 19 nt, Artificial Sequence
  Synthetic
augcuaggugcucaggaua

SEQ ID NO: 237088 - RNA, 20 nt, Artificial Sequence
  Synthetic
uaugcuaggugcucaggaua

SEQ ID NO: 237089 - RNA, 21 nt, Artificial Sequence
  Synthetic
cuaugcuaggugcucaggaua

SEQ ID NO: 237090 - RNA, 22 nt, Artificial Sequence
  Synthetic
ucuaugcuaggugcucaggaua

SEQ ID NO: 237091 - RNA, 23 nt, Artificial Sequence
  Synthetic
cucuaugcuaggugcucaggaua

SEQ ID NO: 237092 - RNA, 24 nt, Artificial Sequence
  Synthetic
gcucuaugcuaggugcucaggaua

SEQ ID NO: 237093 - RNA, 18 nt, Artificial Sequence
  Synthetic
aagaaaugagucaggaua

SEQ ID NO: 237094 - RNA, 19 nt, Artificial Sequence
  Synthetic
aaagaaaugagucaggaua

SEQ ID NO: 237095 - RNA, 20 nt, Artificial Sequence
  Synthetic
uaaagaaaugagucaggaua

SEQ ID NO: 237096 - RNA, 21 nt, Artificial Sequence
  Synthetic
cuaaagaaaugagucaggaua

SEQ ID NO: 237097 - RNA, 22 nt, Artificial Sequence
  Synthetic
ucuaaagaaaugagucaggaua

SEQ ID NO: 237098 - RNA, 23 nt, Artificial Sequence
  Synthetic
aucuaaagaaaugagucaggaua

SEQ ID NO: 237099 - RNA, 24 nt, Artificial Sequence
  Synthetic
uaucuaaagaaaugagucaggaua

SEQ ID NO: 237100 - RNA, 18 nt, Artificial Sequence
  Synthetic
gcagaagaggucaggaua

SEQ ID NO: 237101 - RNA, 19 nt, Artificial Sequence
  Synthetic
agcagaagaggucaggaua

SEQ ID NO: 237102 - RNA, 20 nt, Artificial Sequence
  Synthetic
aagcagaagaggucaggaua

SEQ ID NO: 237103 - RNA, 21 nt, Artificial Sequence
  Synthetic
aaagcagaagaggucaggaua

SEQ ID NO: 237104 - RNA, 22 nt, Artificial Sequence
  Synthetic
gaaagcagaagaggucaggaua

SEQ ID NO: 237105 - RNA, 23 nt, Artificial Sequence
  Synthetic
ggaaagcagaagaggucaggaua

SEQ ID NO: 237106 - RNA, 24 nt, Artificial Sequence
  Synthetic
aggaaagcagaagaggucaggaua

SEQ ID NO: 237107 - RNA, 18 nt, Artificial Sequence
  Synthetic
uccuuguacuucaggaua

SEQ ID NO: 237108 - RNA, 19 nt, Artificial Sequence
  Synthetic
guccuuguacuucaggaua

SEQ ID NO: 237109 - RNA, 20 nt, Artificial Sequence
  Synthetic
cguccuuguacuucaggaua

SEQ ID NO: 237110 - RNA, 21 nt, Artificial Sequence
  Synthetic
ucguccuuguacuucaggaua

SEQ ID NO: 237111 - RNA, 22 nt, Artificial Sequence
  Synthetic
gucguccuuguacuucaggaua

SEQ ID NO: 237112 - RNA, 23 nt, Artificial Sequence
  Synthetic
cgucguccuuguacuucaggaua

SEQ ID NO: 237113 - RNA, 24 nt, Artificial Sequence
  Synthetic
ccgucguccuuguacuucaggaua

SEQ ID NO: 237114 - RNA, 18 nt, Artificial Sequence
  Synthetic
auucuggagaagaggaua

SEQ ID NO: 237115 - RNA, 19 nt, Artificial Sequence
  Synthetic
uauucuggagaagaggaua

SEQ ID NO: 237116 - RNA, 20 nt, Artificial Sequence
  Synthetic
uuauucuggagaagaggaua

SEQ ID NO: 237117 - RNA, 21 nt, Artificial Sequence
  Synthetic
auuauucuggagaagaggaua

SEQ ID NO: 237118 - RNA, 22 nt, Artificial Sequence
  Synthetic
uauuauucuggagaagaggaua

SEQ ID NO: 237119 - RNA, 23 nt, Artificial Sequence
  Synthetic
auauuauucuggagaagaggaua

SEQ ID NO: 237120 - RNA, 24 nt, Artificial Sequence
  Synthetic
uauauuauucuggagaagaggaua

SEQ ID NO: 237121 - RNA, 18 nt, Artificial Sequence
  Synthetic
guuuggggugagaggaua

SEQ ID NO: 237122 - RNA, 19 nt, Artificial Sequence
  Synthetic
uguuuggggugagaggaua

SEQ ID NO: 237123 - RNA, 20 nt, Artificial Sequence
  Synthetic
auguuuggggugagaggaua

SEQ ID NO: 237124 - RNA, 21 nt, Artificial Sequence
  Synthetic
gauguuuggggugagaggaua

SEQ ID NO: 237125 - RNA, 22 nt, Artificial Sequence
  Synthetic
ugauguuuggggugagaggaua

SEQ ID NO: 237126 - RNA, 23 nt, Artificial Sequence
  Synthetic
augauguuuggggugagaggaua

SEQ ID NO: 237127 - RNA, 24 nt, Artificial Sequence
  Synthetic
aaugauguuuggggugagaggaua

SEQ ID NO: 237128 - RNA, 18 nt, Artificial Sequence
  Synthetic
uguguguuguggaggaua

SEQ ID NO: 237129 - RNA, 19 nt, Artificial Sequence
  Synthetic
guguguguuguggaggaua

SEQ ID NO: 237130 - RNA, 20 nt, Artificial Sequence
  Synthetic
uguguguguuguggaggaua

SEQ ID NO: 237131 - RNA, 21 nt, Artificial Sequence
  Synthetic
guguguguguuguggaggaua

SEQ ID NO: 237132 - RNA, 22 nt, Artificial Sequence
  Synthetic
uguguguguguuguggaggaua

SEQ ID NO: 237133 - RNA, 23 nt, Artificial Sequence
  Synthetic
guguguguguguuguggaggaua

SEQ ID NO: 237134 - RNA, 24 nt, Artificial Sequence
  Synthetic
uguguguguguguuguggaggaua

SEQ ID NO: 237135 - RNA, 18 nt, Artificial Sequence
  Synthetic
uagaaagagaugaggaua

SEQ ID NO: 237136 - RNA, 19 nt, Artificial Sequence
  Synthetic
guagaaagagaugaggaua

SEQ ID NO: 237137 - RNA, 20 nt, Artificial Sequence
  Synthetic
gguagaaagagaugaggaua

SEQ ID NO: 237138 - RNA, 21 nt, Artificial Sequence
  Synthetic
ggguagaaagagaugaggaua

SEQ ID NO: 237139 - RNA, 22 nt, Artificial Sequence
  Synthetic
aggguagaaagagaugaggaua

SEQ ID NO: 237140 - RNA, 23 nt, Artificial Sequence
  Synthetic
aaggguagaaagagaugaggaua

SEQ ID NO: 237141 - RNA, 24 nt, Artificial Sequence
  Synthetic
gaaggguagaaagagaugaggaua

SEQ ID NO: 237142 - RNA, 18 nt, Artificial Sequence
  Synthetic
uugugugacuauaggaua

SEQ ID NO: 237143 - RNA, 19 nt, Artificial Sequence
  Synthetic
auugugugacuauaggaua

SEQ ID NO: 237144 - RNA, 20 nt, Artificial Sequence
  Synthetic
uauugugugacuauaggaua

SEQ ID NO: 237145 - RNA, 21 nt, Artificial Sequence
  Synthetic
cuauugugugacuauaggaua

SEQ ID NO: 237146 - RNA, 22 nt, Artificial Sequence
  Synthetic
gcuauugugugacuauaggaua

SEQ ID NO: 237147 - RNA, 23 nt, Artificial Sequence
  Synthetic
ggcuauugugugacuauaggaua

SEQ ID NO: 237148 - RNA, 24 nt, Artificial Sequence
  Synthetic
uggcuauugugugacuauaggaua

SEQ ID NO: 237149 - RNA, 18 nt, Artificial Sequence
  Synthetic
ggaacagacuggcggaua

SEQ ID NO: 237150 - RNA, 19 nt, Artificial Sequence
  Synthetic
uggaacagacuggcggaua

SEQ ID NO: 237151 - RNA, 20 nt, Artificial Sequence
  Synthetic
cuggaacagacuggcggaua

SEQ ID NO: 237152 - RNA, 21 nt, Artificial Sequence
  Synthetic
ucuggaacagacuggcggaua

SEQ ID NO: 237153 - RNA, 22 nt, Artificial Sequence
  Synthetic
aucuggaacagacuggcggaua

SEQ ID NO: 237154 - RNA, 23 nt, Artificial Sequence
  Synthetic
gaucuggaacagacuggcggaua

SEQ ID NO: 237155 - RNA, 24 nt, Artificial Sequence
  Synthetic
cgaucuggaacagacuggcggaua

SEQ ID NO: 237156 - RNA, 18 nt, Artificial Sequence
  Synthetic
aucuccauucugcggaua

SEQ ID NO: 237157 - RNA, 19 nt, Artificial Sequence
  Synthetic
caucuccauucugcggaua

SEQ ID NO: 237158 - RNA, 20 nt, Artificial Sequence
  Synthetic
ucaucuccauucugcggaua

SEQ ID NO: 237159 - RNA, 21 nt, Artificial Sequence
  Synthetic
aucaucuccauucugcggaua

SEQ ID NO: 237160 - RNA, 22 nt, Artificial Sequence
  Synthetic
uaucaucuccauucugcggaua

SEQ ID NO: 237161 - RNA, 23 nt, Artificial Sequence
  Synthetic
uuaucaucuccauucugcggaua

SEQ ID NO: 237162 - RNA, 24 nt, Artificial Sequence
  Synthetic
auuaucaucuccauucugcggaua

SEQ ID NO: 237163 - RNA, 18 nt, Artificial Sequence
  Synthetic
uucaccacagaagggaua

SEQ ID NO: 237164 - RNA, 19 nt, Artificial Sequence
  Synthetic
cuucaccacagaagggaua

SEQ ID NO: 237165 - RNA, 20 nt, Artificial Sequence
  Synthetic
ucuucaccacagaagggaua

SEQ ID NO: 237166 - RNA, 21 nt, Artificial Sequence
  Synthetic
uucuucaccacagaagggaua

SEQ ID NO: 237167 - RNA, 22 nt, Artificial Sequence
  Synthetic
uuucuucaccacagaagggaua

SEQ ID NO: 237168 - RNA, 23 nt, Artificial Sequence
  Synthetic
uuuucuucaccacagaagggaua

SEQ ID NO: 237169 - RNA, 24 nt, Artificial Sequence
  Synthetic
auuuucuucaccacagaagggaua

SEQ ID NO: 237170 - RNA, 18 nt, Artificial Sequence
  Synthetic
auccaaagaucagggaua

SEQ ID NO: 237171 - RNA, 19 nt, Artificial Sequence
  Synthetic
uauccaaagaucagggaua

SEQ ID NO: 237172 - RNA, 20 nt, Artificial Sequence
  Synthetic
auauccaaagaucagggaua

SEQ ID NO: 237173 - RNA, 21 nt, Artificial Sequence
  Synthetic
cauauccaaagaucagggaua

SEQ ID NO: 237174 - RNA, 22 nt, Artificial Sequence
  Synthetic
gcauauccaaagaucagggaua

SEQ ID NO: 237175 - RNA, 23 nt, Artificial Sequence
  Synthetic
ggcauauccaaagaucagggaua

SEQ ID NO: 237176 - RNA, 24 nt, Artificial Sequence
  Synthetic
uggcauauccaaagaucagggaua

SEQ ID NO: 237177 - RNA, 18 nt, Artificial Sequence
  Synthetic
uugcaugacaacgggaua

SEQ ID NO: 237178 - RNA, 19 nt, Artificial Sequence
  Synthetic
guugcaugacaacgggaua

SEQ ID NO: 237179 - RNA, 20 nt, Artificial Sequence
  Synthetic
uguugcaugacaacgggaua

SEQ ID NO: 237180 - RNA, 21 nt, Artificial Sequence
  Synthetic
guguugcaugacaacgggaua

SEQ ID NO: 237181 - RNA, 22 nt, Artificial Sequence
  Synthetic
aguguugcaugacaacgggaua

SEQ ID NO: 237182 - RNA, 23 nt, Artificial Sequence
  Synthetic
aaguguugcaugacaacgggaua

SEQ ID NO: 237183 - RNA, 24 nt, Artificial Sequence
  Synthetic
aaaguguugcaugacaacgggaua

SEQ ID NO: 237184 - RNA, 18 nt, Artificial Sequence
  Synthetic
gaaucuguuaaggggaua

SEQ ID NO: 237185 - RNA, 19 nt, Artificial Sequence
  Synthetic
agaaucuguuaaggggaua

SEQ ID NO: 237186 - RNA, 20 nt, Artificial Sequence
  Synthetic
cagaaucuguuaaggggaua

SEQ ID NO: 237187 - RNA, 21 nt, Artificial Sequence
  Synthetic
ccagaaucuguuaaggggaua

SEQ ID NO: 237188 - RNA, 22 nt, Artificial Sequence
  Synthetic
accagaaucuguuaaggggaua

SEQ ID NO: 237189 - RNA, 23 nt, Artificial Sequence
  Synthetic
aaccagaaucuguuaaggggaua

SEQ ID NO: 237190 - RNA, 24 nt, Artificial Sequence
  Synthetic
aaaccagaaucuguuaaggggaua

SEQ ID NO: 237191 - RNA, 18 nt, Artificial Sequence
  Synthetic
gagaugguagaggggaua

SEQ ID NO: 237192 - RNA, 19 nt, Artificial Sequence
  Synthetic
agagaugguagaggggaua

SEQ ID NO: 237193 - RNA, 20 nt, Artificial Sequence
  Synthetic
cagagaugguagaggggaua

SEQ ID NO: 237194 - RNA, 21 nt, Artificial Sequence
  Synthetic
ucagagaugguagaggggaua

SEQ ID NO: 237195 - RNA, 22 nt, Artificial Sequence
  Synthetic
aucagagaugguagaggggaua

SEQ ID NO: 237196 - RNA, 23 nt, Artificial Sequence
  Synthetic
uaucagagaugguagaggggaua

SEQ ID NO: 237197 - RNA, 24 nt, Artificial Sequence
  Synthetic
auaucagagaugguagaggggaua

SEQ ID NO: 237198 - RNA, 18 nt, Artificial Sequence
  Synthetic
uuuccucgauaggggaua

SEQ ID NO: 237199 - RNA, 19 nt, Artificial Sequence
  Synthetic
guuuccucgauaggggaua

SEQ ID NO: 237200 - RNA, 20 nt, Artificial Sequence
  Synthetic
gguuuccucgauaggggaua

SEQ ID NO: 237201 - RNA, 21 nt, Artificial Sequence
  Synthetic
ugguuuccucgauaggggaua

SEQ ID NO: 237202 - RNA, 22 nt, Artificial Sequence
  Synthetic
gugguuuccucgauaggggaua

SEQ ID NO: 237203 - RNA, 23 nt, Artificial Sequence
  Synthetic
cgugguuuccucgauaggggaua

SEQ ID NO: 237204 - RNA, 24 nt, Artificial Sequence
  Synthetic
ucgugguuuccucgauaggggaua

SEQ ID NO: 237205 - RNA, 18 nt, Artificial Sequence
  Synthetic
gagucuuuuuaggggaua

SEQ ID NO: 237206 - RNA, 19 nt, Artificial Sequence
  Synthetic
agagucuuuuuaggggaua

SEQ ID NO: 237207 - RNA, 20 nt, Artificial Sequence
  Synthetic
aagagucuuuuuaggggaua

SEQ ID NO: 237208 - RNA, 21 nt, Artificial Sequence
  Synthetic
caagagucuuuuuaggggaua

SEQ ID NO: 237209 - RNA, 22 nt, Artificial Sequence
  Synthetic
ucaagagucuuuuuaggggaua

SEQ ID NO: 237210 - RNA, 23 nt, Artificial Sequence
  Synthetic
uucaagagucuuuuuaggggaua

SEQ ID NO: 237211 - RNA, 24 nt, Artificial Sequence
  Synthetic
uuucaagagucuuuuuaggggaua

SEQ ID NO: 237212 - RNA, 18 nt, Artificial Sequence
  Synthetic
aaagagaaaguggggaua

SEQ ID NO: 237213 - RNA, 19 nt, Artificial Sequence
  Synthetic
uaaagagaaaguggggaua

SEQ ID NO: 237214 - RNA, 20 nt, Artificial Sequence
  Synthetic
auaaagagaaaguggggaua

SEQ ID NO: 237215 - RNA, 21 nt, Artificial Sequence
  Synthetic
uauaaagagaaaguggggaua

SEQ ID NO: 237216 - RNA, 22 nt, Artificial Sequence
  Synthetic
uuauaaagagaaaguggggaua

SEQ ID NO: 237217 - RNA, 23 nt, Artificial Sequence
  Synthetic
auuauaaagagaaaguggggaua

SEQ ID NO: 237218 - RNA, 24 nt, Artificial Sequence
  Synthetic
cauuauaaagagaaaguggggaua

SEQ ID NO: 237219 - RNA, 18 nt, Artificial Sequence
  Synthetic
uaauucagauaugggaua

SEQ ID NO: 237220 - RNA, 19 nt, Artificial Sequence
  Synthetic
auaauucagauaugggaua

SEQ ID NO: 237221 - RNA, 20 nt, Artificial Sequence
  Synthetic
aauaauucagauaugggaua

SEQ ID NO: 237222 - RNA, 21 nt, Artificial Sequence
  Synthetic
aaauaauucagauaugggaua

SEQ ID NO: 237223 - RNA, 22 nt, Artificial Sequence
  Synthetic
uaaauaauucagauaugggaua

SEQ ID NO: 237224 - RNA, 23 nt, Artificial Sequence
  Synthetic
auaaauaauucagauaugggaua

SEQ ID NO: 237225 - RNA, 24 nt, Artificial Sequence
  Synthetic
uauaaauaauucagauaugggaua

SEQ ID NO: 237226 - RNA, 18 nt, Artificial Sequence
  Synthetic
auauauauuuaugggaua

SEQ ID NO: 237227 - RNA, 19 nt, Artificial Sequence
  Synthetic
uauauauauuuaugggaua

SEQ ID NO: 237228 - RNA, 20 nt, Artificial Sequence
  Synthetic
guauauauauuuaugggaua

SEQ ID NO: 237229 - RNA, 21 nt, Artificial Sequence
  Synthetic
gguauauauauuuaugggaua

SEQ ID NO: 237230 - RNA, 22 nt, Artificial Sequence
  Synthetic
agguauauauauuuaugggaua

SEQ ID NO: 237231 - RNA, 23 nt, Artificial Sequence
  Synthetic
uagguauauauauuuaugggaua

SEQ ID NO: 237232 - RNA, 24 nt, Artificial Sequence
  Synthetic
guagguauauauauuuaugggaua

SEQ ID NO: 237233 - RNA, 18 nt, Artificial Sequence
  Synthetic
uccaucacacaauggaua

SEQ ID NO: 237234 - RNA, 19 nt, Artificial Sequence
  Synthetic
cuccaucacacaauggaua

SEQ ID NO: 237235 - RNA, 20 nt, Artificial Sequence
  Synthetic
ccuccaucacacaauggaua

SEQ ID NO: 237236 - RNA, 21 nt, Artificial Sequence
  Synthetic
gccuccaucacacaauggaua

SEQ ID NO: 237237 - RNA, 22 nt, Artificial Sequence
  Synthetic
agccuccaucacacaauggaua

SEQ ID NO: 237238 - RNA, 23 nt, Artificial Sequence
  Synthetic
gagccuccaucacacaauggaua

SEQ ID NO: 237239 - RNA, 24 nt, Artificial Sequence
  Synthetic
ggagccuccaucacacaauggaua

SEQ ID NO: 237240 - RNA, 18 nt, Artificial Sequence
  Synthetic
ucaguggaugaauggaua

SEQ ID NO: 237241 - RNA, 19 nt, Artificial Sequence
  Synthetic
aucaguggaugaauggaua

SEQ ID NO: 237242 - RNA, 20 nt, Artificial Sequence
  Synthetic
caucaguggaugaauggaua

SEQ ID NO: 237243 - RNA, 21 nt, Artificial Sequence
  Synthetic
ccaucaguggaugaauggaua

SEQ ID NO: 237244 - RNA, 22 nt, Artificial Sequence
  Synthetic
uccaucaguggaugaauggaua

SEQ ID NO: 237245 - RNA, 23 nt, Artificial Sequence
  Synthetic
uuccaucaguggaugaauggaua

SEQ ID NO: 237246 - RNA, 24 nt, Artificial Sequence
  Synthetic
uuuccaucaguggaugaauggaua

SEQ ID NO: 237247 - RNA, 18 nt, Artificial Sequence
  Synthetic
ugagaagcaacauggaua

SEQ ID NO: 237248 - RNA, 19 nt, Artificial Sequence
  Synthetic
uugagaagcaacauggaua

SEQ ID NO: 237249 - RNA, 20 nt, Artificial Sequence
  Synthetic
auugagaagcaacauggaua

SEQ ID NO: 237250 - RNA, 21 nt, Artificial Sequence
  Synthetic
gauugagaagcaacauggaua

SEQ ID NO: 237251 - RNA, 22 nt, Artificial Sequence
  Synthetic
ugauugagaagcaacauggaua

SEQ ID NO: 237252 - RNA, 23 nt, Artificial Sequence
  Synthetic
uugauugagaagcaacauggaua

SEQ ID NO: 237253 - RNA, 24 nt, Artificial Sequence
  Synthetic
auugauugagaagcaacauggaua

SEQ ID NO: 237254 - RNA, 18 nt, Artificial Sequence
  Synthetic
auguggaacccauggaua

SEQ ID NO: 237255 - RNA, 19 nt, Artificial Sequence
  Synthetic
aauguggaacccauggaua

SEQ ID NO: 237256 - RNA, 20 nt, Artificial Sequence
  Synthetic
aaauguggaacccauggaua

SEQ ID NO: 237257 - RNA, 21 nt, Artificial Sequence
  Synthetic
caaauguggaacccauggaua

SEQ ID NO: 237258 - RNA, 22 nt, Artificial Sequence
  Synthetic
acaaauguggaacccauggaua

SEQ ID NO: 237259 - RNA, 23 nt, Artificial Sequence
  Synthetic
cacaaauguggaacccauggaua

SEQ ID NO: 237260 - RNA, 24 nt, Artificial Sequence
  Synthetic
ccacaaauguggaacccauggaua

SEQ ID NO: 237261 - RNA, 18 nt, Artificial Sequence
  Synthetic
accaaucccccauggaua

SEQ ID NO: 237262 - RNA, 19 nt, Artificial Sequence
  Synthetic
aaccaaucccccauggaua

SEQ ID NO: 237263 - RNA, 20 nt, Artificial Sequence
  Synthetic
gaaccaaucccccauggaua

SEQ ID NO: 237264 - RNA, 21 nt, Artificial Sequence
  Synthetic
ggaaccaaucccccauggaua

SEQ ID NO: 237265 - RNA, 22 nt, Artificial Sequence
  Synthetic
uggaaccaaucccccauggaua

SEQ ID NO: 237266 - RNA, 23 nt, Artificial Sequence
  Synthetic
cuggaaccaaucccccauggaua

SEQ ID NO: 237267 - RNA, 24 nt, Artificial Sequence
  Synthetic
ccuggaaccaaucccccauggaua

SEQ ID NO: 237268 - RNA, 18 nt, Artificial Sequence
  Synthetic
uagcaaagggcauggaua

SEQ ID NO: 237269 - RNA, 19 nt, Artificial Sequence
  Synthetic
uuagcaaagggcauggaua

SEQ ID NO: 237270 - RNA, 20 nt, Artificial Sequence
  Synthetic
cuuagcaaagggcauggaua

SEQ ID NO: 237271 - RNA, 21 nt, Artificial Sequence
  Synthetic
acuuagcaaagggcauggaua

SEQ ID NO: 237272 - RNA, 22 nt, Artificial Sequence
  Synthetic
uacuuagcaaagggcauggaua

SEQ ID NO: 237273 - RNA, 23 nt, Artificial Sequence
  Synthetic
uuacuuagcaaagggcauggaua

SEQ ID NO: 237274 - RNA, 24 nt, Artificial Sequence
  Synthetic
guuacuuagcaaagggcauggaua

SEQ ID NO: 237275 - RNA, 18 nt, Artificial Sequence
  Synthetic
uggaagaaugcauggaua

SEQ ID NO: 237276 - RNA, 19 nt, Artificial Sequence
  Synthetic
auggaagaaugcauggaua

SEQ ID NO: 237277 - RNA, 20 nt, Artificial Sequence
  Synthetic
cauggaagaaugcauggaua

SEQ ID NO: 237278 - RNA, 21 nt, Artificial Sequence
  Synthetic
gcauggaagaaugcauggaua

SEQ ID NO: 237279 - RNA, 22 nt, Artificial Sequence
  Synthetic
ugcauggaagaaugcauggaua

SEQ ID NO: 237280 - RNA, 23 nt, Artificial Sequence
  Synthetic
gugcauggaagaaugcauggaua

SEQ ID NO: 237281 - RNA, 24 nt, Artificial Sequence
  Synthetic
ugugcauggaagaaugcauggaua

SEQ ID NO: 237282 - RNA, 18 nt, Artificial Sequence
  Synthetic
ggcuacacaggauggaua

SEQ ID NO: 237283 - RNA, 19 nt, Artificial Sequence
  Synthetic
gggcuacacaggauggaua

SEQ ID NO: 237284 - RNA, 20 nt, Artificial Sequence
  Synthetic
agggcuacacaggauggaua

SEQ ID NO: 237285 - RNA, 21 nt, Artificial Sequence
  Synthetic
aagggcuacacaggauggaua

SEQ ID NO: 237286 - RNA, 22 nt, Artificial Sequence
  Synthetic
gaagggcuacacaggauggaua

SEQ ID NO: 237287 - RNA, 23 nt, Artificial Sequence
  Synthetic
agaagggcuacacaggauggaua

SEQ ID NO: 237288 - RNA, 24 nt, Artificial Sequence
  Synthetic
uagaagggcuacacaggauggaua

SEQ ID NO: 237289 - RNA, 18 nt, Artificial Sequence
  Synthetic
ucauugaagggauggaua

SEQ ID NO: 237290 - RNA, 19 nt, Artificial Sequence
  Synthetic
uucauugaagggauggaua

SEQ ID NO: 237291 - RNA, 20 nt, Artificial Sequence
  Synthetic
uuucauugaagggauggaua

SEQ ID NO: 237292 - RNA, 21 nt, Artificial Sequence
  Synthetic
guuucauugaagggauggaua

SEQ ID NO: 237293 - RNA, 22 nt, Artificial Sequence
  Synthetic
uguuucauugaagggauggaua

SEQ ID NO: 237294 - RNA, 23 nt, Artificial Sequence
  Synthetic
uuguuucauugaagggauggaua

SEQ ID NO: 237295 - RNA, 24 nt, Artificial Sequence
  Synthetic
uuuguuucauugaagggauggaua

SEQ ID NO: 237296 - RNA, 18 nt, Artificial Sequence
  Synthetic
ugaacagaaugauggaua

SEQ ID NO: 237297 - RNA, 19 nt, Artificial Sequence
  Synthetic
uugaacagaaugauggaua

SEQ ID NO: 237298 - RNA, 20 nt, Artificial Sequence
  Synthetic
uuugaacagaaugauggaua

SEQ ID NO: 237299 - RNA, 21 nt, Artificial Sequence
  Synthetic
auuugaacagaaugauggaua

SEQ ID NO: 237300 - RNA, 22 nt, Artificial Sequence
  Synthetic
aauuugaacagaaugauggaua

SEQ ID NO: 237301 - RNA, 23 nt, Artificial Sequence
  Synthetic
caauuugaacagaaugauggaua

SEQ ID NO: 237302 - RNA, 24 nt, Artificial Sequence
  Synthetic
gcaauuugaacagaaugauggaua

SEQ ID NO: 237303 - RNA, 18 nt, Artificial Sequence
  Synthetic
ggcuugaaacuauggaua

SEQ ID NO: 237304 - RNA, 19 nt, Artificial Sequence
  Synthetic
aggcuugaaacuauggaua

SEQ ID NO: 237305 - RNA, 20 nt, Artificial Sequence
  Synthetic
uaggcuugaaacuauggaua

SEQ ID NO: 237306 - RNA, 21 nt, Artificial Sequence
  Synthetic
cuaggcuugaaacuauggaua

SEQ ID NO: 237307 - RNA, 22 nt, Artificial Sequence
  Synthetic
ucuaggcuugaaacuauggaua

SEQ ID NO: 237308 - RNA, 23 nt, Artificial Sequence
  Synthetic
aucuaggcuugaaacuauggaua

SEQ ID NO: 237309 - RNA, 24 nt, Artificial Sequence
  Synthetic
aaucuaggcuugaaacuauggaua

SEQ ID NO: 237310 - RNA, 18 nt, Artificial Sequence
  Synthetic
gcugacgcccacuggaua

SEQ ID NO: 237311 - RNA, 19 nt, Artificial Sequence
  Synthetic
ugcugacgcccacuggaua

SEQ ID NO: 237312 - RNA, 20 nt, Artificial Sequence
  Synthetic
cugcugacgcccacuggaua

SEQ ID NO: 237313 - RNA, 21 nt, Artificial Sequence
  Synthetic
ucugcugacgcccacuggaua

SEQ ID NO: 237314 - RNA, 22 nt, Artificial Sequence
  Synthetic
cucugcugacgcccacuggaua

SEQ ID NO: 237315 - RNA, 23 nt, Artificial Sequence
  Synthetic
gcucugcugacgcccacuggaua

SEQ ID NO: 237316 - RNA, 24 nt, Artificial Sequence
  Synthetic
agcucugcugacgcccacuggaua

SEQ ID NO: 237317 - RNA, 18 nt, Artificial Sequence
  Synthetic
ucaauaauagacuggaua

SEQ ID NO: 237318 - RNA, 19 nt, Artificial Sequence
  Synthetic
aucaauaauagacuggaua

SEQ ID NO: 237319 - RNA, 20 nt, Artificial Sequence
  Synthetic
caucaauaauagacuggaua

SEQ ID NO: 237320 - RNA, 21 nt, Artificial Sequence
  Synthetic
ccaucaauaauagacuggaua

SEQ ID NO: 237321 - RNA, 22 nt, Artificial Sequence
  Synthetic
uccaucaauaauagacuggaua

SEQ ID NO: 237322 - RNA, 23 nt, Artificial Sequence
  Synthetic
guccaucaauaauagacuggaua

SEQ ID NO: 237323 - RNA, 24 nt, Artificial Sequence
  Synthetic
uguccaucaauaauagacuggaua

SEQ ID NO: 237324 - RNA, 18 nt, Artificial Sequence
  Synthetic
ucaaugauagacuggaua

SEQ ID NO: 237325 - RNA, 19 nt, Artificial Sequence
  Synthetic
aucaaugauagacuggaua

SEQ ID NO: 237326 - RNA, 20 nt, Artificial Sequence
  Synthetic
caucaaugauagacuggaua

SEQ ID NO: 237327 - RNA, 21 nt, Artificial Sequence
  Synthetic
ucaucaaugauagacuggaua

SEQ ID NO: 237328 - RNA, 22 nt, Artificial Sequence
  Synthetic
cucaucaaugauagacuggaua

SEQ ID NO: 237329 - RNA, 23 nt, Artificial Sequence
  Synthetic
gcucaucaaugauagacuggaua

SEQ ID NO: 237330 - RNA, 24 nt, Artificial Sequence
  Synthetic
ugcucaucaaugauagacuggaua

SEQ ID NO: 237331 - RNA, 18 nt, Artificial Sequence
  Synthetic
ucagugauggacuggaua

SEQ ID NO: 237332 - RNA, 19 nt, Artificial Sequence
  Synthetic
aucagugauggacuggaua

SEQ ID NO: 237333 - RNA, 20 nt, Artificial Sequence
  Synthetic
caucagugauggacuggaua

SEQ ID NO: 237334 - RNA, 21 nt, Artificial Sequence
  Synthetic
ccaucagugauggacuggaua

SEQ ID NO: 237335 - RNA, 22 nt, Artificial Sequence
  Synthetic
cccaucagugauggacuggaua

SEQ ID NO: 237336 - RNA, 23 nt, Artificial Sequence
  Synthetic
gcccaucagugauggacuggaua

SEQ ID NO: 237337 - RNA, 24 nt, Artificial Sequence
  Synthetic
ugcccaucagugauggacuggaua

SEQ ID NO: 237338 - RNA, 18 nt, Artificial Sequence
  Synthetic
acauugagauacuggaua

SEQ ID NO: 237339 - RNA, 19 nt, Artificial Sequence
  Synthetic
aacauugagauacuggaua

SEQ ID NO: 237340 - RNA, 20 nt, Artificial Sequence
  Synthetic
gaacauugagauacuggaua

SEQ ID NO: 237341 - RNA, 21 nt, Artificial Sequence
  Synthetic
agaacauugagauacuggaua

SEQ ID NO: 237342 - RNA, 22 nt, Artificial Sequence
  Synthetic
gagaacauugagauacuggaua

SEQ ID NO: 237343 - RNA, 23 nt, Artificial Sequence
  Synthetic
agagaacauugagauacuggaua

SEQ ID NO: 237344 - RNA, 24 nt, Artificial Sequence
  Synthetic
cagagaacauugagauacuggaua

SEQ ID NO: 237345 - RNA, 18 nt, Artificial Sequence
  Synthetic
agucaggaguacuggaua

SEQ ID NO: 237346 - RNA, 19 nt, Artificial Sequence
  Synthetic
gagucaggaguacuggaua

SEQ ID NO: 237347 - RNA, 20 nt, Artificial Sequence
  Synthetic
agagucaggaguacuggaua

SEQ ID NO: 237348 - RNA, 21 nt, Artificial Sequence
  Synthetic
cagagucaggaguacuggaua

SEQ ID NO: 237349 - RNA, 22 nt, Artificial Sequence
  Synthetic
gcagagucaggaguacuggaua

SEQ ID NO: 237350 - RNA, 23 nt, Artificial Sequence
  Synthetic
ugcagagucaggaguacuggaua

SEQ ID NO: 237351 - RNA, 24 nt, Artificial Sequence
  Synthetic
uugcagagucaggaguacuggaua

SEQ ID NO: 237352 - RNA, 18 nt, Artificial Sequence
  Synthetic
cucuugauccccuggaua

SEQ ID NO: 237353 - RNA, 19 nt, Artificial Sequence
  Synthetic
ucucuugauccccuggaua

SEQ ID NO: 237354 - RNA, 20 nt, Artificial Sequence
  Synthetic
uucucuugauccccuggaua

SEQ ID NO: 237355 - RNA, 21 nt, Artificial Sequence
  Synthetic
uuucucuugauccccuggaua

SEQ ID NO: 237356 - RNA, 22 nt, Artificial Sequence
  Synthetic
uuuucucuugauccccuggaua

SEQ ID NO: 237357 - RNA, 23 nt, Artificial Sequence
  Synthetic
uuuuucucuugauccccuggaua

SEQ ID NO: 237358 - RNA, 24 nt, Artificial Sequence
  Synthetic
guuuuucucuugauccccuggaua

SEQ ID NO: 237359 - RNA, 18 nt, Artificial Sequence
  Synthetic
caaguagucaaguggaua

SEQ ID NO: 237360 - RNA, 19 nt, Artificial Sequence
  Synthetic
acaaguagucaaguggaua

SEQ ID NO: 237361 - RNA, 20 nt, Artificial Sequence
  Synthetic
gacaaguagucaaguggaua

SEQ ID NO: 237362 - RNA, 21 nt, Artificial Sequence
  Synthetic
ugacaaguagucaaguggaua

SEQ ID NO: 237363 - RNA, 22 nt, Artificial Sequence
  Synthetic
augacaaguagucaaguggaua

SEQ ID NO: 237364 - RNA, 23 nt, Artificial Sequence
  Synthetic
aaugacaaguagucaaguggaua

SEQ ID NO: 237365 - RNA, 24 nt, Artificial Sequence
  Synthetic
aaaugacaaguagucaaguggaua

SEQ ID NO: 237366 - RNA, 18 nt, Artificial Sequence
  Synthetic
aagaauauggaguggaua

SEQ ID NO: 237367 - RNA, 19 nt, Artificial Sequence
  Synthetic
gaagaauauggaguggaua

SEQ ID NO: 237368 - RNA, 20 nt, Artificial Sequence
  Synthetic
ugaagaauauggaguggaua

SEQ ID NO: 237369 - RNA, 21 nt, Artificial Sequence
  Synthetic
uugaagaauauggaguggaua

SEQ ID NO: 237370 - RNA, 22 nt, Artificial Sequence
  Synthetic
auugaagaauauggaguggaua

SEQ ID NO: 237371 - RNA, 23 nt, Artificial Sequence
  Synthetic
gauugaagaauauggaguggaua

SEQ ID NO: 237372 - RNA, 24 nt, Artificial Sequence
  Synthetic
ugauugaagaauauggaguggaua

SEQ ID NO: 237373 - RNA, 18 nt, Artificial Sequence
  Synthetic
ccgaccaaugaguggaua

SEQ ID NO: 237374 - RNA, 19 nt, Artificial Sequence
  Synthetic
gccgaccaaugaguggaua

SEQ ID NO: 237375 - RNA, 20 nt, Artificial Sequence
  Synthetic
agccgaccaaugaguggaua

SEQ ID NO: 237376 - RNA, 21 nt, Artificial Sequence
  Synthetic
cagccgaccaaugaguggaua

SEQ ID NO: 237377 - RNA, 22 nt, Artificial Sequence
  Synthetic
ccagccgaccaaugaguggaua

SEQ ID NO: 237378 - RNA, 23 nt, Artificial Sequence
  Synthetic
gccagccgaccaaugaguggaua

SEQ ID NO: 237379 - RNA, 24 nt, Artificial Sequence
  Synthetic
ugccagccgaccaaugaguggaua

SEQ ID NO: 237380 - RNA, 18 nt, Artificial Sequence
  Synthetic
gguucaaacuaguggaua

SEQ ID NO: 237381 - RNA, 19 nt, Artificial Sequence
  Synthetic
agguucaaacuaguggaua

SEQ ID NO: 237382 - RNA, 20 nt, Artificial Sequence
  Synthetic
uagguucaaacuaguggaua

SEQ ID NO: 237383 - RNA, 21 nt, Artificial Sequence
  Synthetic
auagguucaaacuaguggaua

SEQ ID NO: 237384 - RNA, 22 nt, Artificial Sequence
  Synthetic
cauagguucaaacuaguggaua

SEQ ID NO: 237385 - RNA, 23 nt, Artificial Sequence
  Synthetic
ccauagguucaaacuaguggaua

SEQ ID NO: 237386 - RNA, 24 nt, Artificial Sequence
  Synthetic
cccauagguucaaacuaguggaua

SEQ ID NO: 237387 - RNA, 18 nt, Artificial Sequence
  Synthetic
uucuggaugaauuggaua

SEQ ID NO: 237388 - RNA, 19 nt, Artificial Sequence
  Synthetic
uuucuggaugaauuggaua

SEQ ID NO: 237389 - RNA, 20 nt, Artificial Sequence
  Synthetic
auuucuggaugaauuggaua

SEQ ID NO: 237390 - RNA, 21 nt, Artificial Sequence
  Synthetic
gauuucuggaugaauuggaua

SEQ ID NO: 237391 - RNA, 22 nt, Artificial Sequence
  Synthetic
ggauuucuggaugaauuggaua

SEQ ID NO: 237392 - RNA, 23 nt, Artificial Sequence
  Synthetic
aggauuucuggaugaauuggaua

SEQ ID NO: 237393 - RNA, 24 nt, Artificial Sequence
  Synthetic
aaggauuucuggaugaauuggaua

SEQ ID NO: 237394 - RNA, 18 nt, Artificial Sequence
  Synthetic
auuacaggagguuggaua

SEQ ID NO: 237395 - RNA, 19 nt, Artificial Sequence
  Synthetic
uauuacaggagguuggaua

SEQ ID NO: 237396 - RNA, 20 nt, Artificial Sequence
  Synthetic
guauuacaggagguuggaua

SEQ ID NO: 237397 - RNA, 21 nt, Artificial Sequence
  Synthetic
aguauuacaggagguuggaua

SEQ ID NO: 237398 - RNA, 22 nt, Artificial Sequence
  Synthetic
gaguauuacaggagguuggaua

SEQ ID NO: 237399 - RNA, 23 nt, Artificial Sequence
  Synthetic
ggaguauuacaggagguuggaua

SEQ ID NO: 237400 - RNA, 24 nt, Artificial Sequence
  Synthetic
uggaguauuacaggagguuggaua

SEQ ID NO: 237401 - RNA, 18 nt, Artificial Sequence
  Synthetic
acacaagaaaaaaugaua

SEQ ID NO: 237402 - RNA, 19 nt, Artificial Sequence
  Synthetic
gacacaagaaaaaaugaua

SEQ ID NO: 237403 - RNA, 20 nt, Artificial Sequence
  Synthetic
agacacaagaaaaaaugaua

SEQ ID NO: 237404 - RNA, 21 nt, Artificial Sequence
  Synthetic
cagacacaagaaaaaaugaua

SEQ ID NO: 237405 - RNA, 22 nt, Artificial Sequence
  Synthetic
acagacacaagaaaaaaugaua

SEQ ID NO: 237406 - RNA, 23 nt, Artificial Sequence
  Synthetic
gacagacacaagaaaaaaugaua

SEQ ID NO: 237407 - RNA, 24 nt, Artificial Sequence
  Synthetic
agacagacacaagaaaaaaugaua

SEQ ID NO: 237408 - RNA, 18 nt, Artificial Sequence
  Synthetic
agggaauagaaaaugaua

SEQ ID NO: 237409 - RNA, 19 nt, Artificial Sequence
  Synthetic
aagggaauagaaaaugaua

SEQ ID NO: 237410 - RNA, 20 nt, Artificial Sequence
  Synthetic
uaagggaauagaaaaugaua

SEQ ID NO: 237411 - RNA, 21 nt, Artificial Sequence
  Synthetic
uuaagggaauagaaaaugaua

SEQ ID NO: 237412 - RNA, 22 nt, Artificial Sequence
  Synthetic
guuaagggaauagaaaaugaua

SEQ ID NO: 237413 - RNA, 23 nt, Artificial Sequence
  Synthetic
gguuaagggaauagaaaaugaua

SEQ ID NO: 237414 - RNA, 24 nt, Artificial Sequence
  Synthetic
ugguuaagggaauagaaaaugaua

SEQ ID NO: 237415 - RNA, 18 nt, Artificial Sequence
  Synthetic
gagaacuaauaaaugaua

SEQ ID NO: 237416 - RNA, 19 nt, Artificial Sequence
  Synthetic
agagaacuaauaaaugaua

SEQ ID NO: 237417 - RNA, 20 nt, Artificial Sequence
  Synthetic
uagagaacuaauaaaugaua

SEQ ID NO: 237418 - RNA, 21 nt, Artificial Sequence
  Synthetic
uuagagaacuaauaaaugaua

SEQ ID NO: 237419 - RNA, 22 nt, Artificial Sequence
  Synthetic
guuagagaacuaauaaaugaua

SEQ ID NO: 237420 - RNA, 23 nt, Artificial Sequence
  Synthetic
gguuagagaacuaauaaaugaua

SEQ ID NO: 237421 - RNA, 24 nt, Artificial Sequence
  Synthetic
agguuagagaacuaauaaaugaua

SEQ ID NO: 237422 - RNA, 18 nt, Artificial Sequence
  Synthetic
uguugacauggaaugaua

SEQ ID NO: 237423 - RNA, 19 nt, Artificial Sequence
  Synthetic
cuguugacauggaaugaua

SEQ ID NO: 237424 - RNA, 20 nt, Artificial Sequence
  Synthetic
ccuguugacauggaaugaua

SEQ ID NO: 237425 - RNA, 21 nt, Artificial Sequence
  Synthetic
uccuguugacauggaaugaua

SEQ ID NO: 237426 - RNA, 22 nt, Artificial Sequence
  Synthetic
cuccuguugacauggaaugaua

SEQ ID NO: 237427 - RNA, 23 nt, Artificial Sequence
  Synthetic
ucuccuguugacauggaaugaua

SEQ ID NO: 237428 - RNA, 24 nt, Artificial Sequence
  Synthetic
cucuccuguugacauggaaugaua

SEQ ID NO: 237429 - RNA, 18 nt, Artificial Sequence
  Synthetic
agagagagaugaaugaua

SEQ ID NO: 237430 - RNA, 19 nt, Artificial Sequence
  Synthetic
aagagagagaugaaugaua

SEQ ID NO: 237431 - RNA, 20 nt, Artificial Sequence
  Synthetic
gaagagagagaugaaugaua

SEQ ID NO: 237432 - RNA, 21 nt, Artificial Sequence
  Synthetic
ggaagagagagaugaaugaua

SEQ ID NO: 237433 - RNA, 22 nt, Artificial Sequence
  Synthetic
gggaagagagagaugaaugaua

SEQ ID NO: 237434 - RNA, 23 nt, Artificial Sequence
  Synthetic
agggaagagagagaugaaugaua

SEQ ID NO: 237435 - RNA, 24 nt, Artificial Sequence
  Synthetic
uagggaagagagagaugaaugaua

SEQ ID NO: 237436 - RNA, 18 nt, Artificial Sequence
  Synthetic
aaauaguauuuaaugaua

SEQ ID NO: 237437 - RNA, 19 nt, Artificial Sequence
  Synthetic
caaauaguauuuaaugaua

SEQ ID NO: 237438 - RNA, 20 nt, Artificial Sequence
  Synthetic
ucaaauaguauuuaaugaua

SEQ ID NO: 237439 - RNA, 21 nt, Artificial Sequence
  Synthetic
uucaaauaguauuuaaugaua

SEQ ID NO: 237440 - RNA, 22 nt, Artificial Sequence
  Synthetic
uuucaaauaguauuuaaugaua

SEQ ID NO: 237441 - RNA, 23 nt, Artificial Sequence
  Synthetic
guuucaaauaguauuuaaugaua

SEQ ID NO: 237442 - RNA, 24 nt, Artificial Sequence
  Synthetic
aguuucaaauaguauuuaaugaua

SEQ ID NO: 237443 - RNA, 18 nt, Artificial Sequence
  Synthetic
ugcccagggggcaugaua

SEQ ID NO: 237444 - RNA, 19 nt, Artificial Sequence
  Synthetic
uugcccagggggcaugaua

SEQ ID NO: 237445 - RNA, 20 nt, Artificial Sequence
  Synthetic
uuugcccagggggcaugaua

SEQ ID NO: 237446 - RNA, 21 nt, Artificial Sequence
  Synthetic
cuuugcccagggggcaugaua

SEQ ID NO: 237447 - RNA, 22 nt, Artificial Sequence
  Synthetic
ucuuugcccagggggcaugaua

SEQ ID NO: 237448 - RNA, 23 nt, Artificial Sequence
  Synthetic
uucuuugcccagggggcaugaua

SEQ ID NO: 237449 - RNA, 24 nt, Artificial Sequence
  Synthetic
uuucuuugcccagggggcaugaua

SEQ ID NO: 237450 - RNA, 18 nt, Artificial Sequence
  Synthetic
uaaacgcugggcaugaua

SEQ ID NO: 237451 - RNA, 19 nt, Artificial Sequence
  Synthetic
guaaacgcugggcaugaua

SEQ ID NO: 237452 - RNA, 20 nt, Artificial Sequence
  Synthetic
aguaaacgcugggcaugaua

SEQ ID NO: 237453 - RNA, 21 nt, Artificial Sequence
  Synthetic
gaguaaacgcugggcaugaua

SEQ ID NO: 237454 - RNA, 22 nt, Artificial Sequence
  Synthetic
agaguaaacgcugggcaugaua

SEQ ID NO: 237455 - RNA, 23 nt, Artificial Sequence
  Synthetic
cagaguaaacgcugggcaugaua

SEQ ID NO: 237456 - RNA, 24 nt, Artificial Sequence
  Synthetic
acagaguaaacgcugggcaugaua

SEQ ID NO: 237457 - RNA, 18 nt, Artificial Sequence
  Synthetic
aguaugugauucaugaua

SEQ ID NO: 237458 - RNA, 19 nt, Artificial Sequence
  Synthetic
caguaugugauucaugaua

SEQ ID NO: 237459 - RNA, 20 nt, Artificial Sequence
  Synthetic
ucaguaugugauucaugaua

SEQ ID NO: 237460 - RNA, 21 nt, Artificial Sequence
  Synthetic
aucaguaugugauucaugaua

SEQ ID NO: 237461 - RNA, 22 nt, Artificial Sequence
  Synthetic
aaucaguaugugauucaugaua

SEQ ID NO: 237462 - RNA, 23 nt, Artificial Sequence
  Synthetic
gaaucaguaugugauucaugaua

SEQ ID NO: 237463 - RNA, 24 nt, Artificial Sequence
  Synthetic
ugaaucaguaugugauucaugaua

SEQ ID NO: 237464 - RNA, 18 nt, Artificial Sequence
  Synthetic
gcaaaccuggagaugaua

SEQ ID NO: 237465 - RNA, 19 nt, Artificial Sequence
  Synthetic
ggcaaaccuggagaugaua

SEQ ID NO: 237466 - RNA, 20 nt, Artificial Sequence
  Synthetic
gggcaaaccuggagaugaua

SEQ ID NO: 237467 - RNA, 21 nt, Artificial Sequence
  Synthetic
agggcaaaccuggagaugaua

SEQ ID NO: 237468 - RNA, 22 nt, Artificial Sequence
  Synthetic
cagggcaaaccuggagaugaua

SEQ ID NO: 237469 - RNA, 23 nt, Artificial Sequence
  Synthetic
ucagggcaaaccuggagaugaua

SEQ ID NO: 237470 - RNA, 24 nt, Artificial Sequence
  Synthetic
cucagggcaaaccuggagaugaua

SEQ ID NO: 237471 - RNA, 18 nt, Artificial Sequence
  Synthetic
uaguaugggaggaugaua

SEQ ID NO: 237472 - RNA, 19 nt, Artificial Sequence
  Synthetic
auaguaugggaggaugaua

SEQ ID NO: 237473 - RNA, 20 nt, Artificial Sequence
  Synthetic
gauaguaugggaggaugaua

SEQ ID NO: 237474 - RNA, 21 nt, Artificial Sequence
  Synthetic
ggauaguaugggaggaugaua

SEQ ID NO: 237475 - RNA, 22 nt, Artificial Sequence
  Synthetic
gggauaguaugggaggaugaua

SEQ ID NO: 237476 - RNA, 23 nt, Artificial Sequence
  Synthetic
agggauaguaugggaggaugaua

SEQ ID NO: 237477 - RNA, 24 nt, Artificial Sequence
  Synthetic
aagggauaguaugggaggaugaua

SEQ ID NO: 237478 - RNA, 18 nt, Artificial Sequence
  Synthetic
gggucugggaggaugaua

SEQ ID NO: 237479 - RNA, 19 nt, Artificial Sequence
  Synthetic
ugggucugggaggaugaua

SEQ ID NO: 237480 - RNA, 20 nt, Artificial Sequence
  Synthetic
uugggucugggaggaugaua

SEQ ID NO: 237481 - RNA, 21 nt, Artificial Sequence
  Synthetic
uuugggucugggaggaugaua

SEQ ID NO: 237482 - RNA, 22 nt, Artificial Sequence
  Synthetic
auuugggucugggaggaugaua

SEQ ID NO: 237483 - RNA, 23 nt, Artificial Sequence
  Synthetic
gauuugggucugggaggaugaua

SEQ ID NO: 237484 - RNA, 24 nt, Artificial Sequence
  Synthetic
agauuugggucugggaggaugaua

SEQ ID NO: 237485 - RNA, 18 nt, Artificial Sequence
  Synthetic
agaaggcagaugaugaua

SEQ ID NO: 237486 - RNA, 19 nt, Artificial Sequence
  Synthetic
gagaaggcagaugaugaua

SEQ ID NO: 237487 - RNA, 20 nt, Artificial Sequence
  Synthetic
agagaaggcagaugaugaua

SEQ ID NO: 237488 - RNA, 21 nt, Artificial Sequence
  Synthetic
gagagaaggcagaugaugaua

SEQ ID NO: 237489 - RNA, 22 nt, Artificial Sequence
  Synthetic
ggagagaaggcagaugaugaua

SEQ ID NO: 237490 - RNA, 23 nt, Artificial Sequence
  Synthetic
gggagagaaggcagaugaugaua

SEQ ID NO: 237491 - RNA, 24 nt, Artificial Sequence
  Synthetic
ugggagagaaggcagaugaugaua

SEQ ID NO: 237492 - RNA, 18 nt, Artificial Sequence
  Synthetic
uuaacccuugugaugaua

SEQ ID NO: 237493 - RNA, 19 nt, Artificial Sequence
  Synthetic
uuuaacccuugugaugaua

SEQ ID NO: 237494 - RNA, 20 nt, Artificial Sequence
  Synthetic
guuuaacccuugugaugaua

SEQ ID NO: 237495 - RNA, 21 nt, Artificial Sequence
  Synthetic
gguuuaacccuugugaugaua

SEQ ID NO: 237496 - RNA, 22 nt, Artificial Sequence
  Synthetic
ugguuuaacccuugugaugaua

SEQ ID NO: 237497 - RNA, 23 nt, Artificial Sequence
  Synthetic
cugguuuaacccuugugaugaua

SEQ ID NO: 237498 - RNA, 24 nt, Artificial Sequence
  Synthetic
ucugguuuaacccuugugaugaua

SEQ ID NO: 237499 - RNA, 18 nt, Artificial Sequence
  Synthetic
auuuuuuagacuaugaua

SEQ ID NO: 237500 - RNA, 19 nt, Artificial Sequence
  Synthetic
uauuuuuuagacuaugaua

SEQ ID NO: 237501 - RNA, 20 nt, Artificial Sequence
  Synthetic
uuauuuuuuagacuaugaua

SEQ ID NO: 237502 - RNA, 21 nt, Artificial Sequence
  Synthetic
uuuauuuuuuagacuaugaua

SEQ ID NO: 237503 - RNA, 22 nt, Artificial Sequence
  Synthetic
cuuuauuuuuuagacuaugaua

SEQ ID NO: 237504 - RNA, 23 nt, Artificial Sequence
  Synthetic
ccuuuauuuuuuagacuaugaua

SEQ ID NO: 237505 - RNA, 24 nt, Artificial Sequence
  Synthetic
accuuuauuuuuuagacuaugaua

SEQ ID NO: 237506 - RNA, 18 nt, Artificial Sequence
  Synthetic
agauucuuuccuaugaua

SEQ ID NO: 237507 - RNA, 19 nt, Artificial Sequence
  Synthetic
aagauucuuuccuaugaua

SEQ ID NO: 237508 - RNA, 20 nt, Artificial Sequence
  Synthetic
uaagauucuuuccuaugaua

SEQ ID NO: 237509 - RNA, 21 nt, Artificial Sequence
  Synthetic
uuaagauucuuuccuaugaua

SEQ ID NO: 237510 - RNA, 22 nt, Artificial Sequence
  Synthetic
uuuaagauucuuuccuaugaua

SEQ ID NO: 237511 - RNA, 23 nt, Artificial Sequence
  Synthetic
guuuaagauucuuuccuaugaua

SEQ ID NO: 237512 - RNA, 24 nt, Artificial Sequence
  Synthetic
uguuuaagauucuuuccuaugaua

SEQ ID NO: 237513 - RNA, 18 nt, Artificial Sequence
  Synthetic
gauacaauacaacugaua

SEQ ID NO: 237514 - RNA, 19 nt, Artificial Sequence
  Synthetic
agauacaauacaacugaua

SEQ ID NO: 237515 - RNA, 20 nt, Artificial Sequence
  Synthetic
aagauacaauacaacugaua

SEQ ID NO: 237516 - RNA, 21 nt, Artificial Sequence
  Synthetic
caagauacaauacaacugaua

SEQ ID NO: 237517 - RNA, 22 nt, Artificial Sequence
  Synthetic
ucaagauacaauacaacugaua

SEQ ID NO: 237518 - RNA, 23 nt, Artificial Sequence
  Synthetic
gucaagauacaauacaacugaua

SEQ ID NO: 237519 - RNA, 24 nt, Artificial Sequence
  Synthetic
ugucaagauacaauacaacugaua

SEQ ID NO: 237520 - RNA, 18 nt, Artificial Sequence
  Synthetic
uuguacaauguacugaua

SEQ ID NO: 237521 - RNA, 19 nt, Artificial Sequence
  Synthetic
auuguacaauguacugaua

SEQ ID NO: 237522 - RNA, 20 nt, Artificial Sequence
  Synthetic
uauuguacaauguacugaua

SEQ ID NO: 237523 - RNA, 21 nt, Artificial Sequence
  Synthetic
auauuguacaauguacugaua

SEQ ID NO: 237524 - RNA, 22 nt, Artificial Sequence
  Synthetic
gauauuguacaauguacugaua

SEQ ID NO: 237525 - RNA, 23 nt, Artificial Sequence
  Synthetic
ugauauuguacaauguacugaua

SEQ ID NO: 237526 - RNA, 24 nt, Artificial Sequence
  Synthetic
uugauauuguacaauguacugaua

SEQ ID NO: 237527 - RNA, 18 nt, Artificial Sequence
  Synthetic
guaacaauauuacugaua

SEQ ID NO: 237528 - RNA, 19 nt, Artificial Sequence
  Synthetic
aguaacaauauuacugaua

SEQ ID NO: 237529 - RNA, 20 nt, Artificial Sequence
  Synthetic
uaguaacaauauuacugaua

SEQ ID NO: 237530 - RNA, 21 nt, Artificial Sequence
  Synthetic
cuaguaacaauauuacugaua

SEQ ID NO: 237531 - RNA, 22 nt, Artificial Sequence
  Synthetic
acuaguaacaauauuacugaua

SEQ ID NO: 237532 - RNA, 23 nt, Artificial Sequence
  Synthetic
uacuaguaacaauauuacugaua

SEQ ID NO: 237533 - RNA, 24 nt, Artificial Sequence
  Synthetic
auacuaguaacaauauuacugaua

SEQ ID NO: 237534 - RNA, 18 nt, Artificial Sequence
  Synthetic
guagaaguaaaccugaua

SEQ ID NO: 237535 - RNA, 19 nt, Artificial Sequence
  Synthetic
uguagaaguaaaccugaua

SEQ ID NO: 237536 - RNA, 20 nt, Artificial Sequence
  Synthetic
uuguagaaguaaaccugaua

SEQ ID NO: 237537 - RNA, 21 nt, Artificial Sequence
  Synthetic
cuuguagaaguaaaccugaua

SEQ ID NO: 237538 - RNA, 22 nt, Artificial Sequence
  Synthetic
gcuuguagaaguaaaccugaua

SEQ ID NO: 237539 - RNA, 23 nt, Artificial Sequence
  Synthetic
ggcuuguagaaguaaaccugaua

SEQ ID NO: 237540 - RNA, 24 nt, Artificial Sequence
  Synthetic
aggcuuguagaaguaaaccugaua

SEQ ID NO: 237541 - RNA, 18 nt, Artificial Sequence
  Synthetic
uuucauuucaugcugaua

SEQ ID NO: 237542 - RNA, 19 nt, Artificial Sequence
  Synthetic
cuuucauuucaugcugaua

SEQ ID NO: 237543 - RNA, 20 nt, Artificial Sequence
  Synthetic
ucuuucauuucaugcugaua

SEQ ID NO: 237544 - RNA, 21 nt, Artificial Sequence
  Synthetic
cucuuucauuucaugcugaua

SEQ ID NO: 237545 - RNA, 22 nt, Artificial Sequence
  Synthetic
ccucuuucauuucaugcugaua

SEQ ID NO: 237546 - RNA, 23 nt, Artificial Sequence
  Synthetic
uccucuuucauuucaugcugaua

SEQ ID NO: 237547 - RNA, 24 nt, Artificial Sequence
  Synthetic
auccucuuucauuucaugcugaua

SEQ ID NO: 237548 - RNA, 18 nt, Artificial Sequence
  Synthetic
caaccuacucaucugaua

SEQ ID NO: 237549 - RNA, 19 nt, Artificial Sequence
  Synthetic
gcaaccuacucaucugaua

SEQ ID NO: 237550 - RNA, 20 nt, Artificial Sequence
  Synthetic
cgcaaccuacucaucugaua

SEQ ID NO: 237551 - RNA, 21 nt, Artificial Sequence
  Synthetic
ucgcaaccuacucaucugaua

SEQ ID NO: 237552 - RNA, 22 nt, Artificial Sequence
  Synthetic
uucgcaaccuacucaucugaua

SEQ ID NO: 237553 - RNA, 23 nt, Artificial Sequence
  Synthetic
uuucgcaaccuacucaucugaua

SEQ ID NO: 237554 - RNA, 24 nt, Artificial Sequence
  Synthetic
uuuucgcaaccuacucaucugaua

SEQ ID NO: 237555 - RNA, 18 nt, Artificial Sequence
  Synthetic
accagugggauucugaua

SEQ ID NO: 237556 - RNA, 19 nt, Artificial Sequence
  Synthetic
uaccagugggauucugaua

SEQ ID NO: 237557 - RNA, 20 nt, Artificial Sequence
  Synthetic
auaccagugggauucugaua

SEQ ID NO: 237558 - RNA, 21 nt, Artificial Sequence
  Synthetic
aauaccagugggauucugaua

SEQ ID NO: 237559 - RNA, 22 nt, Artificial Sequence
  Synthetic
aaauaccagugggauucugaua

SEQ ID NO: 237560 - RNA, 23 nt, Artificial Sequence
  Synthetic
aaaauaccagugggauucugaua

SEQ ID NO: 237561 - RNA, 24 nt, Artificial Sequence
  Synthetic
uaaaauaccagugggauucugaua

SEQ ID NO: 237562 - RNA, 18 nt, Artificial Sequence
  Synthetic
gaauuauuucuucugaua

SEQ ID NO: 237563 - RNA, 19 nt, Artificial Sequence
  Synthetic
ugaauuauuucuucugaua

SEQ ID NO: 237564 - RNA, 20 nt, Artificial Sequence
  Synthetic
uugaauuauuucuucugaua

SEQ ID NO: 237565 - RNA, 21 nt, Artificial Sequence
  Synthetic
uuugaauuauuucuucugaua

SEQ ID NO: 237566 - RNA, 22 nt, Artificial Sequence
  Synthetic
auuugaauuauuucuucugaua

SEQ ID NO: 237567 - RNA, 23 nt, Artificial Sequence
  Synthetic
aauuugaauuauuucuucugaua

SEQ ID NO: 237568 - RNA, 24 nt, Artificial Sequence
  Synthetic
uaauuugaauuauuucuucugaua

SEQ ID NO: 237569 - RNA, 18 nt, Artificial Sequence
  Synthetic
auuguucuauuucugaua

SEQ ID NO: 237570 - RNA, 19 nt, Artificial Sequence
  Synthetic
cauuguucuauuucugaua

SEQ ID NO: 237571 - RNA, 20 nt, Artificial Sequence
  Synthetic
acauuguucuauuucugaua

SEQ ID NO: 237572 - RNA, 21 nt, Artificial Sequence
  Synthetic
cacauuguucuauuucugaua

SEQ ID NO: 237573 - RNA, 22 nt, Artificial Sequence
  Synthetic
ucacauuguucuauuucugaua

SEQ ID NO: 237574 - RNA, 23 nt, Artificial Sequence
  Synthetic
uucacauuguucuauuucugaua

SEQ ID NO: 237575 - RNA, 24 nt, Artificial Sequence
  Synthetic
guucacauuguucuauuucugaua

SEQ ID NO: 237576 - RNA, 18 nt, Artificial Sequence
  Synthetic
ucuagagaaaaagugaua

SEQ ID NO: 237577 - RNA, 19 nt, Artificial Sequence
  Synthetic
gucuagagaaaaagugaua

SEQ ID NO: 237578 - RNA, 20 nt, Artificial Sequence
  Synthetic
ugucuagagaaaaagugaua

SEQ ID NO: 237579 - RNA, 21 nt, Artificial Sequence
  Synthetic
gugucuagagaaaaagugaua

SEQ ID NO: 237580 - RNA, 22 nt, Artificial Sequence
  Synthetic
ugugucuagagaaaaagugaua

SEQ ID NO: 237581 - RNA, 23 nt, Artificial Sequence
  Synthetic
cugugucuagagaaaaagugaua

SEQ ID NO: 237582 - RNA, 24 nt, Artificial Sequence
  Synthetic
ucugugucuagagaaaaagugaua

SEQ ID NO: 237583 - RNA, 18 nt, Artificial Sequence
  Synthetic
cucuaaugaccagugaua

SEQ ID NO: 237584 - RNA, 19 nt, Artificial Sequence
  Synthetic
ccucuaaugaccagugaua

SEQ ID NO: 237585 - RNA, 20 nt, Artificial Sequence
  Synthetic
uccucuaaugaccagugaua

SEQ ID NO: 237586 - RNA, 21 nt, Artificial Sequence
  Synthetic
uuccucuaaugaccagugaua

SEQ ID NO: 237587 - RNA, 22 nt, Artificial Sequence
  Synthetic
auuccucuaaugaccagugaua

SEQ ID NO: 237588 - RNA, 23 nt, Artificial Sequence
  Synthetic
cauuccucuaaugaccagugaua

SEQ ID NO: 237589 - RNA, 24 nt, Artificial Sequence
  Synthetic
gcauuccucuaaugaccagugaua

SEQ ID NO: 237590 - RNA, 18 nt, Artificial Sequence
  Synthetic
aaaagagcauucgugaua

SEQ ID NO: 237591 - RNA, 19 nt, Artificial Sequence
  Synthetic
gaaaagagcauucgugaua

SEQ ID NO: 237592 - RNA, 20 nt, Artificial Sequence
  Synthetic
ugaaaagagcauucgugaua

SEQ ID NO: 237593 - RNA, 21 nt, Artificial Sequence
  Synthetic
uugaaaagagcauucgugaua

SEQ ID NO: 237594 - RNA, 22 nt, Artificial Sequence
  Synthetic
guugaaaagagcauucgugaua

SEQ ID NO: 237595 - RNA, 23 nt, Artificial Sequence
  Synthetic
gguugaaaagagcauucgugaua

SEQ ID NO: 237596 - RNA, 24 nt, Artificial Sequence
  Synthetic
ggguugaaaagagcauucgugaua

SEQ ID NO: 237597 - RNA, 18 nt, Artificial Sequence
  Synthetic
ugcaauaugcuggugaua

SEQ ID NO: 237598 - RNA, 19 nt, Artificial Sequence
  Synthetic
gugcaauaugcuggugaua

SEQ ID NO: 237599 - RNA, 20 nt, Artificial Sequence
  Synthetic
ugugcaauaugcuggugaua

SEQ ID NO: 237600 - RNA, 21 nt, Artificial Sequence
  Synthetic
cugugcaauaugcuggugaua

SEQ ID NO: 237601 - RNA, 22 nt, Artificial Sequence
  Synthetic
acugugcaauaugcuggugaua

SEQ ID NO: 237602 - RNA, 23 nt, Artificial Sequence
  Synthetic
aacugugcaauaugcuggugaua

SEQ ID NO: 237603 - RNA, 24 nt, Artificial Sequence
  Synthetic
gaacugugcaauaugcuggugaua

SEQ ID NO: 237604 - RNA, 18 nt, Artificial Sequence
  Synthetic
gcgcuguacuuggugaua

SEQ ID NO: 237605 - RNA, 19 nt, Artificial Sequence
  Synthetic
agcgcuguacuuggugaua

SEQ ID NO: 237606 - RNA, 20 nt, Artificial Sequence
  Synthetic
cagcgcuguacuuggugaua

SEQ ID NO: 237607 - RNA, 21 nt, Artificial Sequence
  Synthetic
ucagcgcuguacuuggugaua

SEQ ID NO: 237608 - RNA, 22 nt, Artificial Sequence
  Synthetic
cucagcgcuguacuuggugaua

SEQ ID NO: 237609 - RNA, 23 nt, Artificial Sequence
  Synthetic
gcucagcgcuguacuuggugaua

SEQ ID NO: 237610 - RNA, 24 nt, Artificial Sequence
  Synthetic
ugcucagcgcuguacuuggugaua

SEQ ID NO: 237611 - RNA, 18 nt, Artificial Sequence
  Synthetic
ugugaaugcaaugugaua

SEQ ID NO: 237612 - RNA, 19 nt, Artificial Sequence
  Synthetic
augugaaugcaaugugaua

SEQ ID NO: 237613 - RNA, 20 nt, Artificial Sequence
  Synthetic
aaugugaaugcaaugugaua

SEQ ID NO: 237614 - RNA, 21 nt, Artificial Sequence
  Synthetic
uaaugugaaugcaaugugaua

SEQ ID NO: 237615 - RNA, 22 nt, Artificial Sequence
  Synthetic
auaaugugaaugcaaugugaua

SEQ ID NO: 237616 - RNA, 23 nt, Artificial Sequence
  Synthetic
gauaaugugaaugcaaugugaua

SEQ ID NO: 237617 - RNA, 24 nt, Artificial Sequence
  Synthetic
ggauaaugugaaugcaaugugaua

SEQ ID NO: 237618 - RNA, 18 nt, Artificial Sequence
  Synthetic
caucacccaugugugaua

SEQ ID NO: 237619 - RNA, 19 nt, Artificial Sequence
  Synthetic
ucaucacccaugugugaua

SEQ ID NO: 237620 - RNA, 20 nt, Artificial Sequence
  Synthetic
gucaucacccaugugugaua

SEQ ID NO: 237621 - RNA, 21 nt, Artificial Sequence
  Synthetic
cgucaucacccaugugugaua

SEQ ID NO: 237622 - RNA, 22 nt, Artificial Sequence
  Synthetic
acgucaucacccaugugugaua

SEQ ID NO: 237623 - RNA, 23 nt, Artificial Sequence
  Synthetic
aacgucaucacccaugugugaua

SEQ ID NO: 237624 - RNA, 24 nt, Artificial Sequence
  Synthetic
caacgucaucacccaugugugaua

SEQ ID NO: 237625 - RNA, 18 nt, Artificial Sequence
  Synthetic
ugaaacaucgcauugaua

SEQ ID NO: 237626 - RNA, 19 nt, Artificial Sequence
  Synthetic
augaaacaucgcauugaua

SEQ ID NO: 237627 - RNA, 20 nt, Artificial Sequence
  Synthetic
caugaaacaucgcauugaua

SEQ ID NO: 237628 - RNA, 21 nt, Artificial Sequence
  Synthetic
gcaugaaacaucgcauugaua

SEQ ID NO: 237629 - RNA, 22 nt, Artificial Sequence
  Synthetic
agcaugaaacaucgcauugaua

SEQ ID NO: 237630 - RNA, 23 nt, Artificial Sequence
  Synthetic
aagcaugaaacaucgcauugaua

SEQ ID NO: 237631 - RNA, 24 nt, Artificial Sequence
  Synthetic
aaagcaugaaacaucgcauugaua

SEQ ID NO: 237632 - RNA, 18 nt, Artificial Sequence
  Synthetic
aucaauuuuagauugaua

SEQ ID NO: 237633 - RNA, 19 nt, Artificial Sequence
  Synthetic
aaucaauuuuagauugaua

SEQ ID NO: 237634 - RNA, 20 nt, Artificial Sequence
  Synthetic
aaaucaauuuuagauugaua

SEQ ID NO: 237635 - RNA, 21 nt, Artificial Sequence
  Synthetic
uaaaucaauuuuagauugaua

SEQ ID NO: 237636 - RNA, 22 nt, Artificial Sequence
  Synthetic
uuaaaucaauuuuagauugaua

SEQ ID NO: 237637 - RNA, 23 nt, Artificial Sequence
  Synthetic
auuaaaucaauuuuagauugaua

SEQ ID NO: 237638 - RNA, 24 nt, Artificial Sequence
  Synthetic
gauuaaaucaauuuuagauugaua

SEQ ID NO: 237639 - RNA, 18 nt, Artificial Sequence
  Synthetic
agaucuauuugauugaua

SEQ ID NO: 237640 - RNA, 19 nt, Artificial Sequence
  Synthetic
aagaucuauuugauugaua

SEQ ID NO: 237641 - RNA, 20 nt, Artificial Sequence
  Synthetic
aaagaucuauuugauugaua

SEQ ID NO: 237642 - RNA, 21 nt, Artificial Sequence
  Synthetic
aaaagaucuauuugauugaua

SEQ ID NO: 237643 - RNA, 22 nt, Artificial Sequence
  Synthetic
gaaaagaucuauuugauugaua

SEQ ID NO: 237644 - RNA, 23 nt, Artificial Sequence
  Synthetic
agaaaagaucuauuugauugaua

SEQ ID NO: 237645 - RNA, 24 nt, Artificial Sequence
  Synthetic
gagaaaagaucuauuugauugaua

SEQ ID NO: 237646 - RNA, 18 nt, Artificial Sequence
  Synthetic
caugcugccuuauugaua

SEQ ID NO: 237647 - RNA, 19 nt, Artificial Sequence
  Synthetic
ucaugcugccuuauugaua

SEQ ID NO: 237648 - RNA, 20 nt, Artificial Sequence
  Synthetic
cucaugcugccuuauugaua

SEQ ID NO: 237649 - RNA, 21 nt, Artificial Sequence
  Synthetic
acucaugcugccuuauugaua

SEQ ID NO: 237650 - RNA, 22 nt, Artificial Sequence
  Synthetic
gacucaugcugccuuauugaua

SEQ ID NO: 237651 - RNA, 23 nt, Artificial Sequence
  Synthetic
ugacucaugcugccuuauugaua

SEQ ID NO: 237652 - RNA, 24 nt, Artificial Sequence
  Synthetic
augacucaugcugccuuauugaua

SEQ ID NO: 237653 - RNA, 18 nt, Artificial Sequence
  Synthetic
auucccaaguacuugaua

SEQ ID NO: 237654 - RNA, 19 nt, Artificial Sequence
  Synthetic
aauucccaaguacuugaua

SEQ ID NO: 237655 - RNA, 20 nt, Artificial Sequence
  Synthetic
uaauucccaaguacuugaua

SEQ ID NO: 237656 - RNA, 21 nt, Artificial Sequence
  Synthetic
uuaauucccaaguacuugaua

SEQ ID NO: 237657 - RNA, 22 nt, Artificial Sequence
  Synthetic
cuuaauucccaaguacuugaua

SEQ ID NO: 237658 - RNA, 23 nt, Artificial Sequence
  Synthetic
ccuuaauucccaaguacuugaua

SEQ ID NO: 237659 - RNA, 24 nt, Artificial Sequence
  Synthetic
accuuaauucccaaguacuugaua

SEQ ID NO: 237660 - RNA, 18 nt, Artificial Sequence
  Synthetic
aaugucuguuucuugaua

SEQ ID NO: 237661 - RNA, 19 nt, Artificial Sequence
  Synthetic
gaaugucuguuucuugaua

SEQ ID NO: 237662 - RNA, 20 nt, Artificial Sequence
  Synthetic
agaaugucuguuucuugaua

SEQ ID NO: 237663 - RNA, 21 nt, Artificial Sequence
  Synthetic
aagaaugucuguuucuugaua

SEQ ID NO: 237664 - RNA, 22 nt, Artificial Sequence
  Synthetic
gaagaaugucuguuucuugaua

SEQ ID NO: 237665 - RNA, 23 nt, Artificial Sequence
  Synthetic
ggaagaaugucuguuucuugaua

SEQ ID NO: 237666 - RNA, 24 nt, Artificial Sequence
  Synthetic
uggaagaaugucuguuucuugaua

SEQ ID NO: 237667 - RNA, 18 nt, Artificial Sequence
  Synthetic
uuuauuuguugguugaua

SEQ ID NO: 237668 - RNA, 19 nt, Artificial Sequence
  Synthetic
cuuuauuuguugguugaua

SEQ ID NO: 237669 - RNA, 20 nt, Artificial Sequence
  Synthetic
ccuuuauuuguugguugaua

SEQ ID NO: 237670 - RNA, 21 nt, Artificial Sequence
  Synthetic
uccuuuauuuguugguugaua

SEQ ID NO: 237671 - RNA, 22 nt, Artificial Sequence
  Synthetic
cuccuuuauuuguugguugaua

SEQ ID NO: 237672 - RNA, 23 nt, Artificial Sequence
  Synthetic
ucuccuuuauuuguugguugaua

SEQ ID NO: 237673 - RNA, 24 nt, Artificial Sequence
  Synthetic
cucuccuuuauuuguugguugaua

SEQ ID NO: 237674 - RNA, 18 nt, Artificial Sequence
  Synthetic
uggugugggauguugaua

SEQ ID NO: 237675 - RNA, 19 nt, Artificial Sequence
  Synthetic
cuggugugggauguugaua

SEQ ID NO: 237676 - RNA, 20 nt, Artificial Sequence
  Synthetic
ucuggugugggauguugaua

SEQ ID NO: 237677 - RNA, 21 nt, Artificial Sequence
  Synthetic
cucuggugugggauguugaua

SEQ ID NO: 237678 - RNA, 22 nt, Artificial Sequence
  Synthetic
acucuggugugggauguugaua

SEQ ID NO: 237679 - RNA, 23 nt, Artificial Sequence
  Synthetic
cacucuggugugggauguugaua

SEQ ID NO: 237680 - RNA, 24 nt, Artificial Sequence
  Synthetic
ccacucuggugugggauguugaua

SEQ ID NO: 237681 - RNA, 18 nt, Artificial Sequence
  Synthetic
ugaggucaaaguuugaua

SEQ ID NO: 237682 - RNA, 19 nt, Artificial Sequence
  Synthetic
augaggucaaaguuugaua

SEQ ID NO: 237683 - RNA, 20 nt, Artificial Sequence
  Synthetic
caugaggucaaaguuugaua

SEQ ID NO: 237684 - RNA, 21 nt, Artificial Sequence
  Synthetic
gcaugaggucaaaguuugaua

SEQ ID NO: 237685 - RNA, 22 nt, Artificial Sequence
  Synthetic
ggcaugaggucaaaguuugaua

SEQ ID NO: 237686 - RNA, 23 nt, Artificial Sequence
  Synthetic
gggcaugaggucaaaguuugaua

SEQ ID NO: 237687 - RNA, 24 nt, Artificial Sequence
  Synthetic
agggcaugaggucaaaguuugaua

SEQ ID NO: 237688 - RNA, 18 nt, Artificial Sequence
  Synthetic
cccuaaucaaguuugaua

SEQ ID NO: 237689 - RNA, 19 nt, Artificial Sequence
  Synthetic
acccuaaucaaguuugaua

SEQ ID NO: 237690 - RNA, 20 nt, Artificial Sequence
  Synthetic
uacccuaaucaaguuugaua

SEQ ID NO: 237691 - RNA, 21 nt, Artificial Sequence
  Synthetic
uuacccuaaucaaguuugaua

SEQ ID NO: 237692 - RNA, 22 nt, Artificial Sequence
  Synthetic
cuuacccuaaucaaguuugaua

SEQ ID NO: 237693 - RNA, 23 nt, Artificial Sequence
  Synthetic
acuuacccuaaucaaguuugaua

SEQ ID NO: 237694 - RNA, 24 nt, Artificial Sequence
  Synthetic
cacuuacccuaaucaaguuugaua

SEQ ID NO: 237695 - RNA, 18 nt, Artificial Sequence
  Synthetic
aaaaaaagaaaaaauaua

SEQ ID NO: 237696 - RNA, 19 nt, Artificial Sequence
  Synthetic
gaaaaaaagaaaaaauaua

SEQ ID NO: 237697 - RNA, 20 nt, Artificial Sequence
  Synthetic
ugaaaaaaagaaaaaauaua

SEQ ID NO: 237698 - RNA, 21 nt, Artificial Sequence
  Synthetic
uugaaaaaaagaaaaaauaua

SEQ ID NO: 237699 - RNA, 22 nt, Artificial Sequence
  Synthetic
uuugaaaaaaagaaaaaauaua

SEQ ID NO: 237700 - RNA, 23 nt, Artificial Sequence
  Synthetic
auuugaaaaaaagaaaaaauaua

SEQ ID NO: 237701 - RNA, 24 nt, Artificial Sequence
  Synthetic
gauuugaaaaaaagaaaaaauaua

SEQ ID NO: 237702 - RNA, 18 nt, Artificial Sequence
  Synthetic
acuguaauuaaaaauaua

SEQ ID NO: 237703 - RNA, 19 nt, Artificial Sequence
  Synthetic
uacuguaauuaaaaauaua

SEQ ID NO: 237704 - RNA, 20 nt, Artificial Sequence
  Synthetic
uuacuguaauuaaaaauaua

SEQ ID NO: 237705 - RNA, 21 nt, Artificial Sequence
  Synthetic
auuacuguaauuaaaaauaua

SEQ ID NO: 237706 - RNA, 22 nt, Artificial Sequence
  Synthetic
cauuacuguaauuaaaaauaua

SEQ ID NO: 237707 - RNA, 23 nt, Artificial Sequence
  Synthetic
gcauuacuguaauuaaaaauaua

SEQ ID NO: 237708 - RNA, 24 nt, Artificial Sequence
  Synthetic
agcauuacuguaauuaaaaauaua

SEQ ID NO: 237709 - RNA, 18 nt, Artificial Sequence
  Synthetic
acccagagccaaaauaua

SEQ ID NO: 237710 - RNA, 19 nt, Artificial Sequence
  Synthetic
aacccagagccaaaauaua

SEQ ID NO: 237711 - RNA, 20 nt, Artificial Sequence
  Synthetic
caacccagagccaaaauaua

SEQ ID NO: 237712 - RNA, 21 nt, Artificial Sequence
  Synthetic
acaacccagagccaaaauaua

SEQ ID NO: 237713 - RNA, 22 nt, Artificial Sequence
  Synthetic
aacaacccagagccaaaauaua

SEQ ID NO: 237714 - RNA, 23 nt, Artificial Sequence
  Synthetic
aaacaacccagagccaaaauaua

SEQ ID NO: 237715 - RNA, 24 nt, Artificial Sequence
  Synthetic
gaaacaacccagagccaaaauaua

SEQ ID NO: 237716 - RNA, 18 nt, Artificial Sequence
  Synthetic
uuuagaagauaaaauaua

SEQ ID NO: 237717 - RNA, 19 nt, Artificial Sequence
  Synthetic
cuuuagaagauaaaauaua

SEQ ID NO: 237718 - RNA, 20 nt, Artificial Sequence
  Synthetic
acuuuagaagauaaaauaua

SEQ ID NO: 237719 - RNA, 21 nt, Artificial Sequence
  Synthetic
cacuuuagaagauaaaauaua

SEQ ID NO: 237720 - RNA, 22 nt, Artificial Sequence
  Synthetic
ccacuuuagaagauaaaauaua

SEQ ID NO: 237721 - RNA, 23 nt, Artificial Sequence
  Synthetic
uccacuuuagaagauaaaauaua

SEQ ID NO: 237722 - RNA, 24 nt, Artificial Sequence
  Synthetic
uuccacuuuagaagauaaaauaua

SEQ ID NO: 237723 - RNA, 18 nt, Artificial Sequence
  Synthetic
cuucagcacccaaauaua

SEQ ID NO: 237724 - RNA, 19 nt, Artificial Sequence
  Synthetic
ucuucagcacccaaauaua

SEQ ID NO: 237725 - RNA, 20 nt, Artificial Sequence
  Synthetic
cucuucagcacccaaauaua

SEQ ID NO: 237726 - RNA, 21 nt, Artificial Sequence
  Synthetic
ucucuucagcacccaaauaua

SEQ ID NO: 237727 - RNA, 22 nt, Artificial Sequence
  Synthetic
aucucuucagcacccaaauaua

SEQ ID NO: 237728 - RNA, 23 nt, Artificial Sequence
  Synthetic
uaucucuucagcacccaaauaua

SEQ ID NO: 237729 - RNA, 24 nt, Artificial Sequence
  Synthetic
uuaucucuucagcacccaaauaua

SEQ ID NO: 237730 - RNA, 18 nt, Artificial Sequence
  Synthetic
caaauaaauucaaauaua

SEQ ID NO: 237731 - RNA, 19 nt, Artificial Sequence
  Synthetic
ucaaauaaauucaaauaua

SEQ ID NO: 237732 - RNA, 20 nt, Artificial Sequence
  Synthetic
uucaaauaaauucaaauaua

SEQ ID NO: 237733 - RNA, 21 nt, Artificial Sequence
  Synthetic
cuucaaauaaauucaaauaua

SEQ ID NO: 237734 - RNA, 22 nt, Artificial Sequence
  Synthetic
acuucaaauaaauucaaauaua

SEQ ID NO: 237735 - RNA, 23 nt, Artificial Sequence
  Synthetic
uacuucaaauaaauucaaauaua

SEQ ID NO: 237736 - RNA, 24 nt, Artificial Sequence
  Synthetic
auacuucaaauaaauucaaauaua

SEQ ID NO: 237737 - RNA, 18 nt, Artificial Sequence
  Synthetic
gagaaauaaagaaauaua

SEQ ID NO: 237738 - RNA, 19 nt, Artificial Sequence
  Synthetic
ugagaaauaaagaaauaua

SEQ ID NO: 237739 - RNA, 20 nt, Artificial Sequence
  Synthetic
cugagaaauaaagaaauaua

SEQ ID NO: 237740 - RNA, 21 nt, Artificial Sequence
  Synthetic
ccugagaaauaaagaaauaua

SEQ ID NO: 237741 - RNA, 22 nt, Artificial Sequence
  Synthetic
gccugagaaauaaagaaauaua

SEQ ID NO: 237742 - RNA, 23 nt, Artificial Sequence
  Synthetic
ggccugagaaauaaagaaauaua

SEQ ID NO: 237743 - RNA, 24 nt, Artificial Sequence
  Synthetic
gggccugagaaauaaagaaauaua

SEQ ID NO: 237744 - RNA, 18 nt, Artificial Sequence
  Synthetic
ggaagaaagagaaauaua

SEQ ID NO: 237745 - RNA, 19 nt, Artificial Sequence
  Synthetic
aggaagaaagagaaauaua

SEQ ID NO: 237746 - RNA, 20 nt, Artificial Sequence
  Synthetic
uaggaagaaagagaaauaua

SEQ ID NO: 237747 - RNA, 21 nt, Artificial Sequence
  Synthetic
uuaggaagaaagagaaauaua

SEQ ID NO: 237748 - RNA, 22 nt, Artificial Sequence
  Synthetic
guuaggaagaaagagaaauaua

SEQ ID NO: 237749 - RNA, 23 nt, Artificial Sequence
  Synthetic
gguuaggaagaaagagaaauaua

SEQ ID NO: 237750 - RNA, 24 nt, Artificial Sequence
  Synthetic
ggguuaggaagaaagagaaauaua

SEQ ID NO: 237751 - RNA, 18 nt, Artificial Sequence
  Synthetic
uguauccauagaaauaua

SEQ ID NO: 237752 - RNA, 19 nt, Artificial Sequence
  Synthetic
uuguauccauagaaauaua

SEQ ID NO: 237753 - RNA, 20 nt, Artificial Sequence
  Synthetic
uuuguauccauagaaauaua

SEQ ID NO: 237754 - RNA, 21 nt, Artificial Sequence
  Synthetic
auuuguauccauagaaauaua

SEQ ID NO: 237755 - RNA, 22 nt, Artificial Sequence
  Synthetic
aauuuguauccauagaaauaua

SEQ ID NO: 237756 - RNA, 23 nt, Artificial Sequence
  Synthetic
caauuuguauccauagaaauaua

SEQ ID NO: 237757 - RNA, 24 nt, Artificial Sequence
  Synthetic
acaauuuguauccauagaaauaua

SEQ ID NO: 237758 - RNA, 18 nt, Artificial Sequence
  Synthetic
acccccuccugaaauaua

SEQ ID NO: 237759 - RNA, 19 nt, Artificial Sequence
  Synthetic
cacccccuccugaaauaua

SEQ ID NO: 237760 - RNA, 20 nt, Artificial Sequence
  Synthetic
ucacccccuccugaaauaua

SEQ ID NO: 237761 - RNA, 21 nt, Artificial Sequence
  Synthetic
uucacccccuccugaaauaua

SEQ ID NO: 237762 - RNA, 22 nt, Artificial Sequence
  Synthetic
cuucacccccuccugaaauaua

SEQ ID NO: 237763 - RNA, 23 nt, Artificial Sequence
  Synthetic
acuucacccccuccugaaauaua

SEQ ID NO: 237764 - RNA, 24 nt, Artificial Sequence
  Synthetic
uacuucacccccuccugaaauaua

SEQ ID NO: 237765 - RNA, 18 nt, Artificial Sequence
  Synthetic
aagagugcuugaaauaua

SEQ ID NO: 237766 - RNA, 19 nt, Artificial Sequence
  Synthetic
uaagagugcuugaaauaua

SEQ ID NO: 237767 - RNA, 20 nt, Artificial Sequence
  Synthetic
guaagagugcuugaaauaua

SEQ ID NO: 237768 - RNA, 21 nt, Artificial Sequence
  Synthetic
gguaagagugcuugaaauaua

SEQ ID NO: 237769 - RNA, 22 nt, Artificial Sequence
  Synthetic
agguaagagugcuugaaauaua

SEQ ID NO: 237770 - RNA, 23 nt, Artificial Sequence
  Synthetic
gagguaagagugcuugaaauaua

SEQ ID NO: 237771 - RNA, 24 nt, Artificial Sequence
  Synthetic
ugagguaagagugcuugaaauaua

SEQ ID NO: 237772 - RNA, 18 nt, Artificial Sequence
  Synthetic
uguaggaagguaaauaua

SEQ ID NO: 237773 - RNA, 19 nt, Artificial Sequence
  Synthetic
cuguaggaagguaaauaua

SEQ ID NO: 237774 - RNA, 20 nt, Artificial Sequence
  Synthetic
acuguaggaagguaaauaua

SEQ ID NO: 237775 - RNA, 21 nt, Artificial Sequence
  Synthetic
aacuguaggaagguaaauaua

SEQ ID NO: 237776 - RNA, 22 nt, Artificial Sequence
  Synthetic
aaacuguaggaagguaaauaua

SEQ ID NO: 237777 - RNA, 23 nt, Artificial Sequence
  Synthetic
caaacuguaggaagguaaauaua

SEQ ID NO: 237778 - RNA, 24 nt, Artificial Sequence
  Synthetic
ccaaacuguaggaagguaaauaua

SEQ ID NO: 237779 - RNA, 18 nt, Artificial Sequence
  Synthetic
aagaggaaauuaaauaua

SEQ ID NO: 237780 - RNA, 19 nt, Artificial Sequence
  Synthetic
aaagaggaaauuaaauaua

SEQ ID NO: 237781 - RNA, 20 nt, Artificial Sequence
  Synthetic
caaagaggaaauuaaauaua

SEQ ID NO: 237782 - RNA, 21 nt, Artificial Sequence
  Synthetic
ucaaagaggaaauuaaauaua

SEQ ID NO: 237783 - RNA, 22 nt, Artificial Sequence
  Synthetic
uucaaagaggaaauuaaauaua

SEQ ID NO: 237784 - RNA, 23 nt, Artificial Sequence
  Synthetic
auucaaagaggaaauuaaauaua

SEQ ID NO: 237785 - RNA, 24 nt, Artificial Sequence
  Synthetic
aauucaaagaggaaauuaaauaua

SEQ ID NO: 237786 - RNA, 18 nt, Artificial Sequence
  Synthetic
uacaacagaaacaauaua

SEQ ID NO: 237787 - RNA, 19 nt, Artificial Sequence
  Synthetic
cuacaacagaaacaauaua

SEQ ID NO: 237788 - RNA, 20 nt, Artificial Sequence
  Synthetic
ucuacaacagaaacaauaua

SEQ ID NO: 237789 - RNA, 21 nt, Artificial Sequence
  Synthetic
uucuacaacagaaacaauaua

SEQ ID NO: 237790 - RNA, 22 nt, Artificial Sequence
  Synthetic
cuucuacaacagaaacaauaua

SEQ ID NO: 237791 - RNA, 23 nt, Artificial Sequence
  Synthetic
ucuucuacaacagaaacaauaua

SEQ ID NO: 237792 - RNA, 24 nt, Artificial Sequence
  Synthetic
cucuucuacaacagaaacaauaua

SEQ ID NO: 237793 - RNA, 18 nt, Artificial Sequence
  Synthetic
ugacugaaugacaauaua

SEQ ID NO: 237794 - RNA, 19 nt, Artificial Sequence
  Synthetic
augacugaaugacaauaua

SEQ ID NO: 237795 - RNA, 20 nt, Artificial Sequence
  Synthetic
aaugacugaaugacaauaua

SEQ ID NO: 237796 - RNA, 21 nt, Artificial Sequence
  Synthetic
aaaugacugaaugacaauaua

SEQ ID NO: 237797 - RNA, 22 nt, Artificial Sequence
  Synthetic
gaaaugacugaaugacaauaua

SEQ ID NO: 237798 - RNA, 23 nt, Artificial Sequence
  Synthetic
agaaaugacugaaugacaauaua

SEQ ID NO: 237799 - RNA, 24 nt, Artificial Sequence
  Synthetic
cagaaaugacugaaugacaauaua

SEQ ID NO: 237800 - RNA, 18 nt, Artificial Sequence
  Synthetic
gcccugaaggucaauaua

SEQ ID NO: 237801 - RNA, 19 nt, Artificial Sequence
  Synthetic
ggcccugaaggucaauaua

SEQ ID NO: 237802 - RNA, 20 nt, Artificial Sequence
  Synthetic
uggcccugaaggucaauaua

SEQ ID NO: 237803 - RNA, 21 nt, Artificial Sequence
  Synthetic
guggcccugaaggucaauaua

SEQ ID NO: 237804 - RNA, 22 nt, Artificial Sequence
  Synthetic
gguggcccugaaggucaauaua

SEQ ID NO: 237805 - RNA, 23 nt, Artificial Sequence
  Synthetic
agguggcccugaaggucaauaua

SEQ ID NO: 237806 - RNA, 24 nt, Artificial Sequence
  Synthetic
gagguggcccugaaggucaauaua

SEQ ID NO: 237807 - RNA, 18 nt, Artificial Sequence
  Synthetic
uccacuggcuucaauaua

SEQ ID NO: 237808 - RNA, 19 nt, Artificial Sequence
  Synthetic
auccacuggcuucaauaua

SEQ ID NO: 237809 - RNA, 20 nt, Artificial Sequence
  Synthetic
aauccacuggcuucaauaua

SEQ ID NO: 237810 - RNA, 21 nt, Artificial Sequence
  Synthetic
uaauccacuggcuucaauaua

SEQ ID NO: 237811 - RNA, 22 nt, Artificial Sequence
  Synthetic
cuaauccacuggcuucaauaua

SEQ ID NO: 237812 - RNA, 23 nt, Artificial Sequence
  Synthetic
ccuaauccacuggcuucaauaua

SEQ ID NO: 237813 - RNA, 24 nt, Artificial Sequence
  Synthetic
cccuaauccacuggcuucaauaua

SEQ ID NO: 237814 - RNA, 18 nt, Artificial Sequence
  Synthetic
augcucaacccgaauaua

SEQ ID NO: 237815 - RNA, 19 nt, Artificial Sequence
  Synthetic
gaugcucaacccgaauaua

SEQ ID NO: 237816 - RNA, 20 nt, Artificial Sequence
  Synthetic
ggaugcucaacccgaauaua

SEQ ID NO: 237817 - RNA, 21 nt, Artificial Sequence
  Synthetic
gggaugcucaacccgaauaua

SEQ ID NO: 237818 - RNA, 22 nt, Artificial Sequence
  Synthetic
ugggaugcucaacccgaauaua

SEQ ID NO: 237819 - RNA, 23 nt, Artificial Sequence
  Synthetic
uugggaugcucaacccgaauaua

SEQ ID NO: 237820 - RNA, 24 nt, Artificial Sequence
  Synthetic
uuugggaugcucaacccgaauaua

SEQ ID NO: 237821 - RNA, 18 nt, Artificial Sequence
  Synthetic
uuugcacuugggaauaua

SEQ ID NO: 237822 - RNA, 19 nt, Artificial Sequence
  Synthetic
cuuugcacuugggaauaua

SEQ ID NO: 237823 - RNA, 20 nt, Artificial Sequence
  Synthetic
gcuuugcacuugggaauaua

SEQ ID NO: 237824 - RNA, 21 nt, Artificial Sequence
  Synthetic
agcuuugcacuugggaauaua

SEQ ID NO: 237825 - RNA, 22 nt, Artificial Sequence
  Synthetic
aagcuuugcacuugggaauaua

SEQ ID NO: 237826 - RNA, 23 nt, Artificial Sequence
  Synthetic
gaagcuuugcacuugggaauaua

SEQ ID NO: 237827 - RNA, 24 nt, Artificial Sequence
  Synthetic
ugaagcuuugcacuugggaauaua

SEQ ID NO: 237828 - RNA, 18 nt, Artificial Sequence
  Synthetic
auaucagcauugaauaua

SEQ ID NO: 237829 - RNA, 19 nt, Artificial Sequence
  Synthetic
aauaucagcauugaauaua

SEQ ID NO: 237830 - RNA, 20 nt, Artificial Sequence
  Synthetic
aaauaucagcauugaauaua

SEQ ID NO: 237831 - RNA, 21 nt, Artificial Sequence
  Synthetic
aaaauaucagcauugaauaua

SEQ ID NO: 237832 - RNA, 22 nt, Artificial Sequence
  Synthetic
aaaaauaucagcauugaauaua

SEQ ID NO: 237833 - RNA, 23 nt, Artificial Sequence
  Synthetic
uaaaaauaucagcauugaauaua

SEQ ID NO: 237834 - RNA, 24 nt, Artificial Sequence
  Synthetic
guaaaaauaucagcauugaauaua

SEQ ID NO: 237835 - RNA, 18 nt, Artificial Sequence
  Synthetic
aaccuuuuaaauaauaua

SEQ ID NO: 237836 - RNA, 19 nt, Artificial Sequence
  Synthetic
gaaccuuuuaaauaauaua

SEQ ID NO: 237837 - RNA, 20 nt, Artificial Sequence
  Synthetic
agaaccuuuuaaauaauaua

SEQ ID NO: 237838 - RNA, 21 nt, Artificial Sequence
  Synthetic
aagaaccuuuuaaauaauaua

SEQ ID NO: 237839 - RNA, 22 nt, Artificial Sequence
  Synthetic
aaagaaccuuuuaaauaauaua

SEQ ID NO: 237840 - RNA, 23 nt, Artificial Sequence
  Synthetic
aaaagaaccuuuuaaauaauaua

SEQ ID NO: 237841 - RNA, 24 nt, Artificial Sequence
  Synthetic
gaaaagaaccuuuuaaauaauaua

SEQ ID NO: 237842 - RNA, 18 nt, Artificial Sequence
  Synthetic
uuauguauucauaauaua

SEQ ID NO: 237843 - RNA, 19 nt, Artificial Sequence
  Synthetic
uuuauguauucauaauaua

SEQ ID NO: 237844 - RNA, 20 nt, Artificial Sequence
  Synthetic
auuuauguauucauaauaua

SEQ ID NO: 237845 - RNA, 21 nt, Artificial Sequence
  Synthetic
cauuuauguauucauaauaua

SEQ ID NO: 237846 - RNA, 22 nt, Artificial Sequence
  Synthetic
ucauuuauguauucauaauaua

SEQ ID NO: 237847 - RNA, 23 nt, Artificial Sequence
  Synthetic
uucauuuauguauucauaauaua

SEQ ID NO: 237848 - RNA, 24 nt, Artificial Sequence
  Synthetic
uuucauuuauguauucauaauaua

SEQ ID NO: 237849 - RNA, 18 nt, Artificial Sequence
  Synthetic
ucaacaagcaguaauaua

SEQ ID NO: 237850 - RNA, 19 nt, Artificial Sequence
  Synthetic
aucaacaagcaguaauaua

SEQ ID NO: 237851 - RNA, 20 nt, Artificial Sequence
  Synthetic
uaucaacaagcaguaauaua

SEQ ID NO: 237852 - RNA, 21 nt, Artificial Sequence
  Synthetic
uuaucaacaagcaguaauaua

SEQ ID NO: 237853 - RNA, 22 nt, Artificial Sequence
  Synthetic
auuaucaacaagcaguaauaua

SEQ ID NO: 237854 - RNA, 23 nt, Artificial Sequence
  Synthetic
cauuaucaacaagcaguaauaua

SEQ ID NO: 237855 - RNA, 24 nt, Artificial Sequence
  Synthetic
gcauuaucaacaagcaguaauaua

SEQ ID NO: 237856 - RNA, 18 nt, Artificial Sequence
  Synthetic
gaaguauugauuaauaua

SEQ ID NO: 237857 - RNA, 19 nt, Artificial Sequence
  Synthetic
ugaaguauugauuaauaua

SEQ ID NO: 237858 - RNA, 20 nt, Artificial Sequence
  Synthetic
uugaaguauugauuaauaua

SEQ ID NO: 237859 - RNA, 21 nt, Artificial Sequence
  Synthetic
auugaaguauugauuaauaua

SEQ ID NO: 237860 - RNA, 22 nt, Artificial Sequence
  Synthetic
gauugaaguauugauuaauaua

SEQ ID NO: 237861 - RNA, 23 nt, Artificial Sequence
  Synthetic
agauugaaguauugauuaauaua

SEQ ID NO: 237862 - RNA, 24 nt, Artificial Sequence
  Synthetic
cagauugaaguauugauuaauaua

SEQ ID NO: 237863 - RNA, 18 nt, Artificial Sequence
  Synthetic
gaaauuauuuuuaauaua

SEQ ID NO: 237864 - RNA, 19 nt, Artificial Sequence
  Synthetic
ggaaauuauuuuuaauaua

SEQ ID NO: 237865 - RNA, 20 nt, Artificial Sequence
  Synthetic
aggaaauuauuuuuaauaua

SEQ ID NO: 237866 - RNA, 21 nt, Artificial Sequence
  Synthetic
aaggaaauuauuuuuaauaua

SEQ ID NO: 237867 - RNA, 22 nt, Artificial Sequence
  Synthetic
caaggaaauuauuuuuaauaua

SEQ ID NO: 237868 - RNA, 23 nt, Artificial Sequence
  Synthetic
ccaaggaaauuauuuuuaauaua

SEQ ID NO: 237869 - RNA, 24 nt, Artificial Sequence
  Synthetic
uccaaggaaauuauuuuuaauaua

SEQ ID NO: 237870 - RNA, 18 nt, Artificial Sequence
  Synthetic
uacccuuuaacacauaua

SEQ ID NO: 237871 - RNA, 19 nt, Artificial Sequence
  Synthetic
auacccuuuaacacauaua

SEQ ID NO: 237872 - RNA, 20 nt, Artificial Sequence
  Synthetic
uauacccuuuaacacauaua

SEQ ID NO: 237873 - RNA, 21 nt, Artificial Sequence
  Synthetic
auauacccuuuaacacauaua

SEQ ID NO: 237874 - RNA, 22 nt, Artificial Sequence
  Synthetic
aauauacccuuuaacacauaua

SEQ ID NO: 237875 - RNA, 23 nt, Artificial Sequence
  Synthetic
gaauauacccuuuaacacauaua

SEQ ID NO: 237876 - RNA, 24 nt, Artificial Sequence
  Synthetic
ugaauauacccuuuaacacauaua

SEQ ID NO: 237877 - RNA, 18 nt, Artificial Sequence
  Synthetic
ugcuucuuccaccauaua

SEQ ID NO: 237878 - RNA, 19 nt, Artificial Sequence
  Synthetic
uugcuucuuccaccauaua

SEQ ID NO: 237879 - RNA, 20 nt, Artificial Sequence
  Synthetic
uuugcuucuuccaccauaua

SEQ ID NO: 237880 - RNA, 21 nt, Artificial Sequence
  Synthetic
uuuugcuucuuccaccauaua

SEQ ID NO: 237881 - RNA, 22 nt, Artificial Sequence
  Synthetic
cuuuugcuucuuccaccauaua

SEQ ID NO: 237882 - RNA, 23 nt, Artificial Sequence
  Synthetic
gcuuuugcuucuuccaccauaua

SEQ ID NO: 237883 - RNA, 24 nt, Artificial Sequence
  Synthetic
agcuuuugcuucuuccaccauaua

SEQ ID NO: 237884 - RNA, 18 nt, Artificial Sequence
  Synthetic
gugccuaaugaccauaua

SEQ ID NO: 237885 - RNA, 19 nt, Artificial Sequence
  Synthetic
ugugccuaaugaccauaua

SEQ ID NO: 237886 - RNA, 20 nt, Artificial Sequence
  Synthetic
cugugccuaaugaccauaua

SEQ ID NO: 237887 - RNA, 21 nt, Artificial Sequence
  Synthetic
ucugugccuaaugaccauaua

SEQ ID NO: 237888 - RNA, 22 nt, Artificial Sequence
  Synthetic
aucugugccuaaugaccauaua

SEQ ID NO: 237889 - RNA, 23 nt, Artificial Sequence
  Synthetic
gaucugugccuaaugaccauaua

SEQ ID NO: 237890 - RNA, 24 nt, Artificial Sequence
  Synthetic
agaucugugccuaaugaccauaua

SEQ ID NO: 237891 - RNA, 18 nt, Artificial Sequence
  Synthetic
ccucacauuacccauaua

SEQ ID NO: 237892 - RNA, 19 nt, Artificial Sequence
  Synthetic
accucacauuacccauaua

SEQ ID NO: 237893 - RNA, 20 nt, Artificial Sequence
  Synthetic
aaccucacauuacccauaua

SEQ ID NO: 237894 - RNA, 21 nt, Artificial Sequence
  Synthetic
uaaccucacauuacccauaua

SEQ ID NO: 237895 - RNA, 22 nt, Artificial Sequence
  Synthetic
auaaccucacauuacccauaua

SEQ ID NO: 237896 - RNA, 23 nt, Artificial Sequence
  Synthetic
aauaaccucacauuacccauaua

SEQ ID NO: 237897 - RNA, 24 nt, Artificial Sequence
  Synthetic
aaauaaccucacauuacccauaua

SEQ ID NO: 237898 - RNA, 18 nt, Artificial Sequence
  Synthetic
accuaacuugcccauaua

SEQ ID NO: 237899 - RNA, 19 nt, Artificial Sequence
  Synthetic
aaccuaacuugcccauaua

SEQ ID NO: 237900 - RNA, 20 nt, Artificial Sequence
  Synthetic
caaccuaacuugcccauaua

SEQ ID NO: 237901 - RNA, 21 nt, Artificial Sequence
  Synthetic
ccaaccuaacuugcccauaua

SEQ ID NO: 237902 - RNA, 22 nt, Artificial Sequence
  Synthetic
accaaccuaacuugcccauaua

SEQ ID NO: 237903 - RNA, 23 nt, Artificial Sequence
  Synthetic
caccaaccuaacuugcccauaua

SEQ ID NO: 237904 - RNA, 24 nt, Artificial Sequence
  Synthetic
ucaccaaccuaacuugcccauaua

SEQ ID NO: 237905 - RNA, 18 nt, Artificial Sequence
  Synthetic
aagcagaaaaagcauaua

SEQ ID NO: 237906 - RNA, 19 nt, Artificial Sequence
  Synthetic
gaagcagaaaaagcauaua

SEQ ID NO: 237907 - RNA, 20 nt, Artificial Sequence
  Synthetic
agaagcagaaaaagcauaua

SEQ ID NO: 237908 - RNA, 21 nt, Artificial Sequence
  Synthetic
aagaagcagaaaaagcauaua

SEQ ID NO: 237909 - RNA, 22 nt, Artificial Sequence
  Synthetic
uaagaagcagaaaaagcauaua

SEQ ID NO: 237910 - RNA, 23 nt, Artificial Sequence
  Synthetic
auaagaagcagaaaaagcauaua

SEQ ID NO: 237911 - RNA, 24 nt, Artificial Sequence
  Synthetic
cauaagaagcagaaaaagcauaua

SEQ ID NO: 237912 - RNA, 18 nt, Artificial Sequence
  Synthetic
uaauuuuauaagcauaua

SEQ ID NO: 237913 - RNA, 19 nt, Artificial Sequence
  Synthetic
uuaauuuuauaagcauaua

SEQ ID NO: 237914 - RNA, 20 nt, Artificial Sequence
  Synthetic
cuuaauuuuauaagcauaua

SEQ ID NO: 237915 - RNA, 21 nt, Artificial Sequence
  Synthetic
acuuaauuuuauaagcauaua

SEQ ID NO: 237916 - RNA, 22 nt, Artificial Sequence
  Synthetic
aacuuaauuuuauaagcauaua

SEQ ID NO: 237917 - RNA, 23 nt, Artificial Sequence
  Synthetic
uaacuuaauuuuauaagcauaua

SEQ ID NO: 237918 - RNA, 24 nt, Artificial Sequence
  Synthetic
auaacuuaauuuuauaagcauaua

SEQ ID NO: 237919 - RNA, 18 nt, Artificial Sequence
  Synthetic
uuuucuauauagcauaua

SEQ ID NO: 237920 - RNA, 19 nt, Artificial Sequence
  Synthetic
guuuucuauauagcauaua

SEQ ID NO: 237921 - RNA, 20 nt, Artificial Sequence
  Synthetic
aguuuucuauauagcauaua

SEQ ID NO: 237922 - RNA, 21 nt, Artificial Sequence
  Synthetic
gaguuuucuauauagcauaua

SEQ ID NO: 237923 - RNA, 22 nt, Artificial Sequence
  Synthetic
ugaguuuucuauauagcauaua

SEQ ID NO: 237924 - RNA, 23 nt, Artificial Sequence
  Synthetic
cugaguuuucuauauagcauaua

SEQ ID NO: 237925 - RNA, 24 nt, Artificial Sequence
  Synthetic
ucugaguuuucuauauagcauaua

SEQ ID NO: 237926 - RNA, 18 nt, Artificial Sequence
  Synthetic
augauaccguagcauaua

SEQ ID NO: 237927 - RNA, 19 nt, Artificial Sequence
  Synthetic
uaugauaccguagcauaua

SEQ ID NO: 237928 - RNA, 20 nt, Artificial Sequence
  Synthetic
auaugauaccguagcauaua

SEQ ID NO: 237929 - RNA, 21 nt, Artificial Sequence
  Synthetic
cauaugauaccguagcauaua

SEQ ID NO: 237930 - RNA, 22 nt, Artificial Sequence
  Synthetic
ccauaugauaccguagcauaua

SEQ ID NO: 237931 - RNA, 23 nt, Artificial Sequence
  Synthetic
accauaugauaccguagcauaua

SEQ ID NO: 237932 - RNA, 24 nt, Artificial Sequence
  Synthetic
caccauaugauaccguagcauaua

SEQ ID NO: 237933 - RNA, 18 nt, Artificial Sequence
  Synthetic
cucaagcuuuagcauaua

SEQ ID NO: 237934 - RNA, 19 nt, Artificial Sequence
  Synthetic
ucucaagcuuuagcauaua

SEQ ID NO: 237935 - RNA, 20 nt, Artificial Sequence
  Synthetic
uucucaagcuuuagcauaua

SEQ ID NO: 237936 - RNA, 21 nt, Artificial Sequence
  Synthetic
auucucaagcuuuagcauaua

SEQ ID NO: 237937 - RNA, 22 nt, Artificial Sequence
  Synthetic
gauucucaagcuuuagcauaua

SEQ ID NO: 237938 - RNA, 23 nt, Artificial Sequence
  Synthetic
ugauucucaagcuuuagcauaua

SEQ ID NO: 237939 - RNA, 24 nt, Artificial Sequence
  Synthetic
gugauucucaagcuuuagcauaua

SEQ ID NO: 237940 - RNA, 18 nt, Artificial Sequence
  Synthetic
uuuauuaauuugcauaua

SEQ ID NO: 237941 - RNA, 19 nt, Artificial Sequence
  Synthetic
auuuauuaauuugcauaua

SEQ ID NO: 237942 - RNA, 20 nt, Artificial Sequence
  Synthetic
cauuuauuaauuugcauaua

SEQ ID NO: 237943 - RNA, 21 nt, Artificial Sequence
  Synthetic
acauuuauuaauuugcauaua

SEQ ID NO: 237944 - RNA, 22 nt, Artificial Sequence
  Synthetic
cacauuuauuaauuugcauaua

SEQ ID NO: 237945 - RNA, 23 nt, Artificial Sequence
  Synthetic
ucacauuuauuaauuugcauaua

SEQ ID NO: 237946 - RNA, 24 nt, Artificial Sequence
  Synthetic
aucacauuuauuaauuugcauaua

SEQ ID NO: 237947 - RNA, 18 nt, Artificial Sequence
  Synthetic
uucuguaucucucauaua

SEQ ID NO: 237948 - RNA, 19 nt, Artificial Sequence
  Synthetic
uuucuguaucucucauaua

SEQ ID NO: 237949 - RNA, 20 nt, Artificial Sequence
  Synthetic
cuuucuguaucucucauaua

SEQ ID NO: 237950 - RNA, 21 nt, Artificial Sequence
  Synthetic
ucuuucuguaucucucauaua

SEQ ID NO: 237951 - RNA, 22 nt, Artificial Sequence
  Synthetic
cucuuucuguaucucucauaua

SEQ ID NO: 237952 - RNA, 23 nt, Artificial Sequence
  Synthetic
ccucuuucuguaucucucauaua

SEQ ID NO: 237953 - RNA, 24 nt, Artificial Sequence
  Synthetic
cccucuuucuguaucucucauaua

SEQ ID NO: 237954 - RNA, 18 nt, Artificial Sequence
  Synthetic
gaaaaauugauucauaua

SEQ ID NO: 237955 - RNA, 19 nt, Artificial Sequence
  Synthetic
agaaaaauugauucauaua

SEQ ID NO: 237956 - RNA, 20 nt, Artificial Sequence
  Synthetic
uagaaaaauugauucauaua

SEQ ID NO: 237957 - RNA, 21 nt, Artificial Sequence
  Synthetic
guagaaaaauugauucauaua

SEQ ID NO: 237958 - RNA, 22 nt, Artificial Sequence
  Synthetic
cguagaaaaauugauucauaua

SEQ ID NO: 237959 - RNA, 23 nt, Artificial Sequence
  Synthetic
acguagaaaaauugauucauaua

SEQ ID NO: 237960 - RNA, 24 nt, Artificial Sequence
  Synthetic
uacguagaaaaauugauucauaua

SEQ ID NO: 237961 - RNA, 18 nt, Artificial Sequence
  Synthetic
gaucaguauauucauaua

SEQ ID NO: 237962 - RNA, 19 nt, Artificial Sequence
  Synthetic
agaucaguauauucauaua

SEQ ID NO: 237963 - RNA, 20 nt, Artificial Sequence
  Synthetic
gagaucaguauauucauaua

SEQ ID NO: 237964 - RNA, 21 nt, Artificial Sequence
  Synthetic
ggagaucaguauauucauaua

SEQ ID NO: 237965 - RNA, 22 nt, Artificial Sequence
  Synthetic
gggagaucaguauauucauaua

SEQ ID NO: 237966 - RNA, 23 nt, Artificial Sequence
  Synthetic
ugggagaucaguauauucauaua

SEQ ID NO: 237967 - RNA, 24 nt, Artificial Sequence
  Synthetic
augggagaucaguauauucauaua

SEQ ID NO: 237968 - RNA, 18 nt, Artificial Sequence
  Synthetic
gaaaaucuccaagauaua

SEQ ID NO: 237969 - RNA, 19 nt, Artificial Sequence
  Synthetic
ggaaaaucuccaagauaua

SEQ ID NO: 237970 - RNA, 20 nt, Artificial Sequence
  Synthetic
gggaaaaucuccaagauaua

SEQ ID NO: 237971 - RNA, 21 nt, Artificial Sequence
  Synthetic
agggaaaaucuccaagauaua

SEQ ID NO: 237972 - RNA, 22 nt, Artificial Sequence
  Synthetic
cagggaaaaucuccaagauaua

SEQ ID NO: 237973 - RNA, 23 nt, Artificial Sequence
  Synthetic
ccagggaaaaucuccaagauaua

SEQ ID NO: 237974 - RNA, 24 nt, Artificial Sequence
  Synthetic
gccagggaaaaucuccaagauaua

SEQ ID NO: 237975 - RNA, 18 nt, Artificial Sequence
  Synthetic
ccuugaaggcaagauaua

SEQ ID NO: 237976 - RNA, 19 nt, Artificial Sequence
  Synthetic
gccuugaaggcaagauaua

SEQ ID NO: 237977 - RNA, 20 nt, Artificial Sequence
  Synthetic
ugccuugaaggcaagauaua

SEQ ID NO: 237978 - RNA, 21 nt, Artificial Sequence
  Synthetic
gugccuugaaggcaagauaua

SEQ ID NO: 237979 - RNA, 22 nt, Artificial Sequence
  Synthetic
agugccuugaaggcaagauaua

SEQ ID NO: 237980 - RNA, 23 nt, Artificial Sequence
  Synthetic
aagugccuugaaggcaagauaua

SEQ ID NO: 237981 - RNA, 24 nt, Artificial Sequence
  Synthetic
caagugccuugaaggcaagauaua

SEQ ID NO: 237982 - RNA, 18 nt, Artificial Sequence
  Synthetic
acaggaaauucagauaua

SEQ ID NO: 237983 - RNA, 19 nt, Artificial Sequence
  Synthetic
aacaggaaauucagauaua

SEQ ID NO: 237984 - RNA, 20 nt, Artificial Sequence
  Synthetic
aaacaggaaauucagauaua

SEQ ID NO: 237985 - RNA, 21 nt, Artificial Sequence
  Synthetic
caaacaggaaauucagauaua

SEQ ID NO: 237986 - RNA, 22 nt, Artificial Sequence
  Synthetic
acaaacaggaaauucagauaua

SEQ ID NO: 237987 - RNA, 23 nt, Artificial Sequence
  Synthetic
aacaaacaggaaauucagauaua

SEQ ID NO: 237988 - RNA, 24 nt, Artificial Sequence
  Synthetic
caacaaacaggaaauucagauaua

SEQ ID NO: 237989 - RNA, 18 nt, Artificial Sequence
  Synthetic
aaugcauuaugcgauaua

SEQ ID NO: 237990 - RNA, 19 nt, Artificial Sequence
  Synthetic
aaaugcauuaugcgauaua

SEQ ID NO: 237991 - RNA, 20 nt, Artificial Sequence
  Synthetic
aaaaugcauuaugcgauaua

SEQ ID NO: 237992 - RNA, 21 nt, Artificial Sequence
  Synthetic
aaaaaugcauuaugcgauaua

SEQ ID NO: 237993 - RNA, 22 nt, Artificial Sequence
  Synthetic
aaaaaaugcauuaugcgauaua

SEQ ID NO: 237994 - RNA, 23 nt, Artificial Sequence
  Synthetic
uaaaaaaugcauuaugcgauaua

SEQ ID NO: 237995 - RNA, 24 nt, Artificial Sequence
  Synthetic
uuaaaaaaugcauuaugcgauaua

SEQ ID NO: 237996 - RNA, 18 nt, Artificial Sequence
  Synthetic
agcagcgcaagggauaua

SEQ ID NO: 237997 - RNA, 19 nt, Artificial Sequence
  Synthetic
uagcagcgcaagggauaua

SEQ ID NO: 237998 - RNA, 20 nt, Artificial Sequence
  Synthetic
guagcagcgcaagggauaua

SEQ ID NO: 237999 - RNA, 21 nt, Artificial Sequence
  Synthetic
uguagcagcgcaagggauaua

SEQ ID NO: 238000 - RNA, 22 nt, Artificial Sequence
  Synthetic
guguagcagcgcaagggauaua

SEQ ID NO: 238001 - RNA, 23 nt, Artificial Sequence
  Synthetic
uguguagcagcgcaagggauaua

SEQ ID NO: 238002 - RNA, 24 nt, Artificial Sequence
  Synthetic
guguguagcagcgcaagggauaua

SEQ ID NO: 238003 - RNA, 18 nt, Artificial Sequence
  Synthetic
agcacuagacuggauaua

SEQ ID NO: 238004 - RNA, 19 nt, Artificial Sequence
  Synthetic
aagcacuagacuggauaua

SEQ ID NO: 238005 - RNA, 20 nt, Artificial Sequence
  Synthetic
gaagcacuagacuggauaua

SEQ ID NO: 238006 - RNA, 21 nt, Artificial Sequence
  Synthetic
ggaagcacuagacuggauaua

SEQ ID NO: 238007 - RNA, 22 nt, Artificial Sequence
  Synthetic
aggaagcacuagacuggauaua

SEQ ID NO: 238008 - RNA, 23 nt, Artificial Sequence
  Synthetic
uaggaagcacuagacuggauaua

SEQ ID NO: 238009 - RNA, 24 nt, Artificial Sequence
  Synthetic
uuaggaagcacuagacuggauaua

SEQ ID NO: 238010 - RNA, 18 nt, Artificial Sequence
  Synthetic
aauaguuucaaugauaua

SEQ ID NO: 238011 - RNA, 19 nt, Artificial Sequence
  Synthetic
aaauaguuucaaugauaua

SEQ ID NO: 238012 - RNA, 20 nt, Artificial Sequence
  Synthetic
aaaauaguuucaaugauaua

SEQ ID NO: 238013 - RNA, 21 nt, Artificial Sequence
  Synthetic
aaaaauaguuucaaugauaua

SEQ ID NO: 238014 - RNA, 22 nt, Artificial Sequence
  Synthetic
aaaaaauaguuucaaugauaua

SEQ ID NO: 238015 - RNA, 23 nt, Artificial Sequence
  Synthetic
uaaaaaauaguuucaaugauaua

SEQ ID NO: 238016 - RNA, 24 nt, Artificial Sequence
  Synthetic
uuaaaaaauaguuucaaugauaua

SEQ ID NO: 238017 - RNA, 18 nt, Artificial Sequence
  Synthetic
aaaugagauaaugauaua

SEQ ID NO: 238018 - RNA, 19 nt, Artificial Sequence
  Synthetic
gaaaugagauaaugauaua

SEQ ID NO: 238019 - RNA, 20 nt, Artificial Sequence
  Synthetic
agaaaugagauaaugauaua

SEQ ID NO: 238020 - RNA, 21 nt, Artificial Sequence
  Synthetic
gagaaaugagauaaugauaua

SEQ ID NO: 238021 - RNA, 22 nt, Artificial Sequence
  Synthetic
ggagaaaugagauaaugauaua

SEQ ID NO: 238022 - RNA, 23 nt, Artificial Sequence
  Synthetic
aggagaaaugagauaaugauaua

SEQ ID NO: 238023 - RNA, 24 nt, Artificial Sequence
  Synthetic
uaggagaaaugagauaaugauaua

SEQ ID NO: 238024 - RNA, 18 nt, Artificial Sequence
  Synthetic
gagauugagucugauaua

SEQ ID NO: 238025 - RNA, 19 nt, Artificial Sequence
  Synthetic
ggagauugagucugauaua

SEQ ID NO: 238026 - RNA, 20 nt, Artificial Sequence
  Synthetic
aggagauugagucugauaua

SEQ ID NO: 238027 - RNA, 21 nt, Artificial Sequence
  Synthetic
gaggagauugagucugauaua

SEQ ID NO: 238028 - RNA, 22 nt, Artificial Sequence
  Synthetic
ugaggagauugagucugauaua

SEQ ID NO: 238029 - RNA, 23 nt, Artificial Sequence
  Synthetic
augaggagauugagucugauaua

SEQ ID NO: 238030 - RNA, 24 nt, Artificial Sequence
  Synthetic
aaugaggagauugagucugauaua

SEQ ID NO: 238031 - RNA, 18 nt, Artificial Sequence
  Synthetic
guuuguuuuggugauaua

SEQ ID NO: 238032 - RNA, 19 nt, Artificial Sequence
  Synthetic
uguuuguuuuggugauaua

SEQ ID NO: 238033 - RNA, 20 nt, Artificial Sequence
  Synthetic
uuguuuguuuuggugauaua

SEQ ID NO: 238034 - RNA, 21 nt, Artificial Sequence
  Synthetic
uuuguuuguuuuggugauaua

SEQ ID NO: 238035 - RNA, 22 nt, Artificial Sequence
  Synthetic
uuuuguuuguuuuggugauaua

SEQ ID NO: 238036 - RNA, 23 nt, Artificial Sequence
  Synthetic
uuuuuguuuguuuuggugauaua

SEQ ID NO: 238037 - RNA, 24 nt, Artificial Sequence
  Synthetic
guuuuuguuuguuuuggugauaua

SEQ ID NO: 238038 - RNA, 18 nt, Artificial Sequence
  Synthetic
uuauuucuaugugauaua

SEQ ID NO: 238039 - RNA, 19 nt, Artificial Sequence
  Synthetic
uuuauuucuaugugauaua

SEQ ID NO: 238040 - RNA, 20 nt, Artificial Sequence
  Synthetic
cuuuauuucuaugugauaua

SEQ ID NO: 238041 - RNA, 21 nt, Artificial Sequence
  Synthetic
ucuuuauuucuaugugauaua

SEQ ID NO: 238042 - RNA, 22 nt, Artificial Sequence
  Synthetic
uucuuuauuucuaugugauaua

SEQ ID NO: 238043 - RNA, 23 nt, Artificial Sequence
  Synthetic
auucuuuauuucuaugugauaua

SEQ ID NO: 238044 - RNA, 24 nt, Artificial Sequence
  Synthetic
aauucuuuauuucuaugugauaua

SEQ ID NO: 238045 - RNA, 18 nt, Artificial Sequence
  Synthetic
aaacaucgcauugauaua

SEQ ID NO: 238046 - RNA, 19 nt, Artificial Sequence
  Synthetic
gaaacaucgcauugauaua

SEQ ID NO: 238047 - RNA, 20 nt, Artificial Sequence
  Synthetic
ugaaacaucgcauugauaua

SEQ ID NO: 238048 - RNA, 21 nt, Artificial Sequence
  Synthetic
augaaacaucgcauugauaua

SEQ ID NO: 238049 - RNA, 22 nt, Artificial Sequence
  Synthetic
caugaaacaucgcauugauaua

SEQ ID NO: 238050 - RNA, 23 nt, Artificial Sequence
  Synthetic
gcaugaaacaucgcauugauaua

SEQ ID NO: 238051 - RNA, 24 nt, Artificial Sequence
  Synthetic
agcaugaaacaucgcauugauaua

SEQ ID NO: 238052 - RNA, 18 nt, Artificial Sequence
  Synthetic
aaaaagaaaaaauauaua

SEQ ID NO: 238053 - RNA, 19 nt, Artificial Sequence
  Synthetic
aaaaaagaaaaaauauaua

SEQ ID NO: 238054 - RNA, 20 nt, Artificial Sequence
  Synthetic
aaaaaaagaaaaaauauaua

SEQ ID NO: 238055 - RNA, 21 nt, Artificial Sequence
  Synthetic
gaaaaaaagaaaaaauauaua

SEQ ID NO: 238056 - RNA, 22 nt, Artificial Sequence
  Synthetic
ugaaaaaaagaaaaaauauaua

SEQ ID NO: 238057 - RNA, 23 nt, Artificial Sequence
  Synthetic
uugaaaaaaagaaaaaauauaua

SEQ ID NO: 238058 - RNA, 24 nt, Artificial Sequence
  Synthetic
uuugaaaaaaagaaaaaauauaua

SEQ ID NO: 238059 - RNA, 18 nt, Artificial Sequence
  Synthetic
uagaagauaaaauauaua

SEQ ID NO: 238060 - RNA, 19 nt, Artificial Sequence
  Synthetic
uuagaagauaaaauauaua

SEQ ID NO: 238061 - RNA, 20 nt, Artificial Sequence
  Synthetic
uuuagaagauaaaauauaua

SEQ ID NO: 238062 - RNA, 21 nt, Artificial Sequence
  Synthetic
cuuuagaagauaaaauauaua

SEQ ID NO: 238063 - RNA, 22 nt, Artificial Sequence
  Synthetic
acuuuagaagauaaaauauaua

SEQ ID NO: 238064 - RNA, 23 nt, Artificial Sequence
  Synthetic
cacuuuagaagauaaaauauaua

SEQ ID NO: 238065 - RNA, 24 nt, Artificial Sequence
  Synthetic
ccacuuuagaagauaaaauauaua

SEQ ID NO: 238066 - RNA, 18 nt, Artificial Sequence
  Synthetic
ucagcacccaaauauaua

SEQ ID NO: 238067 - RNA, 19 nt, Artificial Sequence
  Synthetic
uucagcacccaaauauaua

SEQ ID NO: 238068 - RNA, 20 nt, Artificial Sequence
  Synthetic
cuucagcacccaaauauaua

SEQ ID NO: 238069 - RNA, 21 nt, Artificial Sequence
  Synthetic
ucuucagcacccaaauauaua

SEQ ID NO: 238070 - RNA, 22 nt, Artificial Sequence
  Synthetic
cucuucagcacccaaauauaua

SEQ ID NO: 238071 - RNA, 23 nt, Artificial Sequence
  Synthetic
ucucuucagcacccaaauauaua

SEQ ID NO: 238072 - RNA, 24 nt, Artificial Sequence
  Synthetic
aucucuucagcacccaaauauaua

SEQ ID NO: 238073 - RNA, 18 nt, Artificial Sequence
  Synthetic
ucacuaacgaaauauaua

SEQ ID NO: 238074 - RNA, 19 nt, Artificial Sequence
  Synthetic
gucacuaacgaaauauaua

SEQ ID NO: 238075 - RNA, 20 nt, Artificial Sequence
  Synthetic
ugucacuaacgaaauauaua

SEQ ID NO: 238076 - RNA, 21 nt, Artificial Sequence
  Synthetic
augucacuaacgaaauauaua

SEQ ID NO: 238077 - RNA, 22 nt, Artificial Sequence
  Synthetic
gaugucacuaacgaaauauaua

SEQ ID NO: 238078 - RNA, 23 nt, Artificial Sequence
  Synthetic
agaugucacuaacgaaauauaua

SEQ ID NO: 238079 - RNA, 24 nt, Artificial Sequence
  Synthetic
uagaugucacuaacgaaauauaua

SEQ ID NO: 238080 - RNA, 18 nt, Artificial Sequence
  Synthetic
cacuggcuucaauauaua

SEQ ID NO: 238081 - RNA, 19 nt, Artificial Sequence
  Synthetic
ccacuggcuucaauauaua

SEQ ID NO: 238082 - RNA, 20 nt, Artificial Sequence
  Synthetic
uccacuggcuucaauauaua

SEQ ID NO: 238083 - RNA, 21 nt, Artificial Sequence
  Synthetic
auccacuggcuucaauauaua

SEQ ID NO: 238084 - RNA, 22 nt, Artificial Sequence
  Synthetic
aauccacuggcuucaauauaua

SEQ ID NO: 238085 - RNA, 23 nt, Artificial Sequence
  Synthetic
uaauccacuggcuucaauauaua

SEQ ID NO: 238086 - RNA, 24 nt, Artificial Sequence
  Synthetic
cuaauccacuggcuucaauauaua

SEQ ID NO: 238087 - RNA, 18 nt, Artificial Sequence
  Synthetic
ggaugucuagaauauaua

SEQ ID NO: 238088 - RNA, 19 nt, Artificial Sequence
  Synthetic
uggaugucuagaauauaua

SEQ ID NO: 238089 - RNA, 20 nt, Artificial Sequence
  Synthetic
auggaugucuagaauauaua

SEQ ID NO: 238090 - RNA, 21 nt, Artificial Sequence
  Synthetic
gauggaugucuagaauauaua

SEQ ID NO: 238091 - RNA, 22 nt, Artificial Sequence
  Synthetic
agauggaugucuagaauauaua

SEQ ID NO: 238092 - RNA, 23 nt, Artificial Sequence
  Synthetic
aagauggaugucuagaauauaua

SEQ ID NO: 238093 - RNA, 24 nt, Artificial Sequence
  Synthetic
aaagauggaugucuagaauauaua

SEQ ID NO: 238094 - RNA, 18 nt, Artificial Sequence
  Synthetic
ggggaaaauuaauauaua

SEQ ID NO: 238095 - RNA, 19 nt, Artificial Sequence
  Synthetic
uggggaaaauuaauauaua

SEQ ID NO: 238096 - RNA, 20 nt, Artificial Sequence
  Synthetic
guggggaaaauuaauauaua

SEQ ID NO: 238097 - RNA, 21 nt, Artificial Sequence
  Synthetic
aguggggaaaauuaauauaua

SEQ ID NO: 238098 - RNA, 22 nt, Artificial Sequence
  Synthetic
gaguggggaaaauuaauauaua

SEQ ID NO: 238099 - RNA, 23 nt, Artificial Sequence
  Synthetic
ggaguggggaaaauuaauauaua

SEQ ID NO: 238100 - RNA, 24 nt, Artificial Sequence
  Synthetic
gggaguggggaaaauuaauauaua

SEQ ID NO: 238101 - RNA, 18 nt, Artificial Sequence
  Synthetic
uggggcuuaccauauaua

SEQ ID NO: 238102 - RNA, 19 nt, Artificial Sequence
  Synthetic
uuggggcuuaccauauaua

SEQ ID NO: 238103 - RNA, 20 nt, Artificial Sequence
  Synthetic
uuuggggcuuaccauauaua

SEQ ID NO: 238104 - RNA, 21 nt, Artificial Sequence
  Synthetic
cuuuggggcuuaccauauaua

SEQ ID NO: 238105 - RNA, 22 nt, Artificial Sequence
  Synthetic
gcuuuggggcuuaccauauaua

SEQ ID NO: 238106 - RNA, 23 nt, Artificial Sequence
  Synthetic
ugcuuuggggcuuaccauauaua

SEQ ID NO: 238107 - RNA, 24 nt, Artificial Sequence
  Synthetic
augcuuuggggcuuaccauauaua

SEQ ID NO: 238108 - RNA, 18 nt, Artificial Sequence
  Synthetic
uacuugucaugauauaua

SEQ ID NO: 238109 - RNA, 19 nt, Artificial Sequence
  Synthetic
guacuugucaugauauaua

SEQ ID NO: 238110 - RNA, 20 nt, Artificial Sequence
  Synthetic
gguacuugucaugauauaua

SEQ ID NO: 238111 - RNA, 21 nt, Artificial Sequence
  Synthetic
agguacuugucaugauauaua

SEQ ID NO: 238112 - RNA, 22 nt, Artificial Sequence
  Synthetic
gagguacuugucaugauauaua

SEQ ID NO: 238113 - RNA, 23 nt, Artificial Sequence
  Synthetic
ugagguacuugucaugauauaua

SEQ ID NO: 238114 - RNA, 24 nt, Artificial Sequence
  Synthetic
augagguacuugucaugauauaua

SEQ ID NO: 238115 - RNA, 18 nt, Artificial Sequence
  Synthetic
acuauaaauauauauaua

SEQ ID NO: 238116 - RNA, 19 nt, Artificial Sequence
  Synthetic
uacuauaaauauauauaua

SEQ ID NO: 238117 - RNA, 20 nt, Artificial Sequence
  Synthetic
auacuauaaauauauauaua

SEQ ID NO: 238118 - RNA, 21 nt, Artificial Sequence
  Synthetic
cauacuauaaauauauauaua

SEQ ID NO: 238119 - RNA, 22 nt, Artificial Sequence
  Synthetic
ccauacuauaaauauauauaua

SEQ ID NO: 238120 - RNA, 23 nt, Artificial Sequence
  Synthetic
accauacuauaaauauauauaua

SEQ ID NO: 238121 - RNA, 24 nt, Artificial Sequence
  Synthetic
uaccauacuauaaauauauauaua

SEQ ID NO: 238122 - RNA, 21 nt, Artificial Sequence
  Synthetic
auauauauauauauauauaua

SEQ ID NO: 238123 - RNA, 22 nt, Artificial Sequence
  Synthetic
uauauauauauauauauauaua

SEQ ID NO: 238124 - RNA, 23 nt, Artificial Sequence
  Synthetic
cuauauauauauauauauauaua

SEQ ID NO: 238125 - RNA, 24 nt, Artificial Sequence
  Synthetic
gcuauauauauauauauauauaua

SEQ ID NO: 238126 - RNA, 18 nt, Artificial Sequence
  Synthetic
ggcaagaagcuauauaua

SEQ ID NO: 238127 - RNA, 19 nt, Artificial Sequence
  Synthetic
aggcaagaagcuauauaua

SEQ ID NO: 238128 - RNA, 20 nt, Artificial Sequence
  Synthetic
caggcaagaagcuauauaua

SEQ ID NO: 238129 - RNA, 21 nt, Artificial Sequence
  Synthetic
gcaggcaagaagcuauauaua

SEQ ID NO: 238130 - RNA, 22 nt, Artificial Sequence
  Synthetic
agcaggcaagaagcuauauaua

SEQ ID NO: 238131 - RNA, 23 nt, Artificial Sequence
  Synthetic
aagcaggcaagaagcuauauaua

SEQ ID NO: 238132 - RNA, 24 nt, Artificial Sequence
  Synthetic
caagcaggcaagaagcuauauaua

SEQ ID NO: 238133 - RNA, 18 nt, Artificial Sequence
  Synthetic
uuucuguauuuauauaua

SEQ ID NO: 238134 - RNA, 19 nt, Artificial Sequence
  Synthetic
auuucuguauuuauauaua

SEQ ID NO: 238135 - RNA, 20 nt, Artificial Sequence
  Synthetic
gauuucuguauuuauauaua

SEQ ID NO: 238136 - RNA, 21 nt, Artificial Sequence
  Synthetic
ugauuucuguauuuauauaua

SEQ ID NO: 238137 - RNA, 22 nt, Artificial Sequence
  Synthetic
cugauuucuguauuuauauaua

SEQ ID NO: 238138 - RNA, 23 nt, Artificial Sequence
  Synthetic
ccugauuucuguauuuauauaua

SEQ ID NO: 238139 - RNA, 24 nt, Artificial Sequence
  Synthetic
cccugauuucuguauuuauauaua

SEQ ID NO: 238140 - RNA, 18 nt, Artificial Sequence
  Synthetic
caaaaaaaaaacuauaua

SEQ ID NO: 238141 - RNA, 19 nt, Artificial Sequence
  Synthetic
ccaaaaaaaaaacuauaua

SEQ ID NO: 238142 - RNA, 20 nt, Artificial Sequence
  Synthetic
accaaaaaaaaaacuauaua

SEQ ID NO: 238143 - RNA, 21 nt, Artificial Sequence
  Synthetic
aaccaaaaaaaaaacuauaua

SEQ ID NO: 238144 - RNA, 22 nt, Artificial Sequence
  Synthetic
aaaccaaaaaaaaaacuauaua

SEQ ID NO: 238145 - RNA, 23 nt, Artificial Sequence
  Synthetic
caaaccaaaaaaaaaacuauaua

SEQ ID NO: 238146 - RNA, 24 nt, Artificial Sequence
  Synthetic
acaaaccaaaaaaaaaacuauaua

SEQ ID NO: 238147 - RNA, 18 nt, Artificial Sequence
  Synthetic
uuccaagcugacuauaua

SEQ ID NO: 238148 - RNA, 19 nt, Artificial Sequence
  Synthetic
guuccaagcugacuauaua

SEQ ID NO: 238149 - RNA, 20 nt, Artificial Sequence
  Synthetic
gguuccaagcugacuauaua

SEQ ID NO: 238150 - RNA, 21 nt, Artificial Sequence
  Synthetic
agguuccaagcugacuauaua

SEQ ID NO: 238151 - RNA, 22 nt, Artificial Sequence
  Synthetic
gagguuccaagcugacuauaua

SEQ ID NO: 238152 - RNA, 23 nt, Artificial Sequence
  Synthetic
agagguuccaagcugacuauaua

SEQ ID NO: 238153 - RNA, 24 nt, Artificial Sequence
  Synthetic
aagagguuccaagcugacuauaua

SEQ ID NO: 238154 - RNA, 18 nt, Artificial Sequence
  Synthetic
uacugugauuacuauaua

SEQ ID NO: 238155 - RNA, 19 nt, Artificial Sequence
  Synthetic
cuacugugauuacuauaua

SEQ ID NO: 238156 - RNA, 20 nt, Artificial Sequence
  Synthetic
acuacugugauuacuauaua

SEQ ID NO: 238157 - RNA, 21 nt, Artificial Sequence
  Synthetic
cacuacugugauuacuauaua

SEQ ID NO: 238158 - RNA, 22 nt, Artificial Sequence
  Synthetic
gcacuacugugauuacuauaua

SEQ ID NO: 238159 - RNA, 23 nt, Artificial Sequence
  Synthetic
ugcacuacugugauuacuauaua

SEQ ID NO: 238160 - RNA, 24 nt, Artificial Sequence
  Synthetic
augcacuacugugauuacuauaua

SEQ ID NO: 238161 - RNA, 18 nt, Artificial Sequence
  Synthetic
aauauacaauucuauaua

SEQ ID NO: 238162 - RNA, 19 nt, Artificial Sequence
  Synthetic
gaauauacaauucuauaua

SEQ ID NO: 238163 - RNA, 20 nt, Artificial Sequence
  Synthetic
ugaauauacaauucuauaua

SEQ ID NO: 238164 - RNA, 21 nt, Artificial Sequence
  Synthetic
uugaauauacaauucuauaua

SEQ ID NO: 238165 - RNA, 22 nt, Artificial Sequence
  Synthetic
cuugaauauacaauucuauaua

SEQ ID NO: 238166 - RNA, 23 nt, Artificial Sequence
  Synthetic
ucuugaauauacaauucuauaua

SEQ ID NO: 238167 - RNA, 24 nt, Artificial Sequence
  Synthetic
cucuugaauauacaauucuauaua

SEQ ID NO: 238168 - RNA, 18 nt, Artificial Sequence
  Synthetic
aauccguuuuucuauaua

SEQ ID NO: 238169 - RNA, 19 nt, Artificial Sequence
  Synthetic
caauccguuuuucuauaua

SEQ ID NO: 238170 - RNA, 20 nt, Artificial Sequence
  Synthetic
ucaauccguuuuucuauaua

SEQ ID NO: 238171 - RNA, 21 nt, Artificial Sequence
  Synthetic
gucaauccguuuuucuauaua

SEQ ID NO: 238172 - RNA, 22 nt, Artificial Sequence
  Synthetic
ugucaauccguuuuucuauaua

SEQ ID NO: 238173 - RNA, 23 nt, Artificial Sequence
  Synthetic
cugucaauccguuuuucuauaua

SEQ ID NO: 238174 - RNA, 24 nt, Artificial Sequence
  Synthetic
acugucaauccguuuuucuauaua

SEQ ID NO: 238175 - RNA, 18 nt, Artificial Sequence
  Synthetic
aaaaaaaguaaguauaua

SEQ ID NO: 238176 - RNA, 19 nt, Artificial Sequence
  Synthetic
aaaaaaaaguaaguauaua

SEQ ID NO: 238177 - RNA, 20 nt, Artificial Sequence
  Synthetic
aaaaaaaaaguaaguauaua

SEQ ID NO: 238178 - RNA, 21 nt, Artificial Sequence
  Synthetic
gaaaaaaaaaguaaguauaua

SEQ ID NO: 238179 - RNA, 22 nt, Artificial Sequence
  Synthetic
ggaaaaaaaaaguaaguauaua

SEQ ID NO: 238180 - RNA, 23 nt, Artificial Sequence
  Synthetic
aggaaaaaaaaaguaaguauaua

SEQ ID NO: 238181 - RNA, 24 nt, Artificial Sequence
  Synthetic
gaggaaaaaaaaaguaaguauaua

SEQ ID NO: 238182 - RNA, 18 nt, Artificial Sequence
  Synthetic
gugauaguacaguauaua

SEQ ID NO: 238183 - RNA, 19 nt, Artificial Sequence
  Synthetic
ggugauaguacaguauaua

SEQ ID NO: 238184 - RNA, 20 nt, Artificial Sequence
  Synthetic
uggugauaguacaguauaua

SEQ ID NO: 238185 - RNA, 21 nt, Artificial Sequence
  Synthetic
guggugauaguacaguauaua

SEQ ID NO: 238186 - RNA, 22 nt, Artificial Sequence
  Synthetic
aguggugauaguacaguauaua

SEQ ID NO: 238187 - RNA, 23 nt, Artificial Sequence
  Synthetic
uaguggugauaguacaguauaua

SEQ ID NO: 238188 - RNA, 24 nt, Artificial Sequence
  Synthetic
guaguggugauaguacaguauaua

SEQ ID NO: 238189 - RNA, 18 nt, Artificial Sequence
  Synthetic
uaucugcuguauuauaua

SEQ ID NO: 238190 - RNA, 19 nt, Artificial Sequence
  Synthetic
auaucugcuguauuauaua

SEQ ID NO: 238191 - RNA, 20 nt, Artificial Sequence
  Synthetic
uauaucugcuguauuauaua

SEQ ID NO: 238192 - RNA, 21 nt, Artificial Sequence
  Synthetic
uuauaucugcuguauuauaua

SEQ ID NO: 238193 - RNA, 22 nt, Artificial Sequence
  Synthetic
uuuauaucugcuguauuauaua

SEQ ID NO: 238194 - RNA, 23 nt, Artificial Sequence
  Synthetic
auuuauaucugcuguauuauaua

SEQ ID NO: 238195 - RNA, 24 nt, Artificial Sequence
  Synthetic
uauuuauaucugcuguauuauaua

SEQ ID NO: 238196 - RNA, 18 nt, Artificial Sequence
  Synthetic
caaauuuuauuuuauaua

SEQ ID NO: 238197 - RNA, 19 nt, Artificial Sequence
  Synthetic
ucaaauuuuauuuuauaua

SEQ ID NO: 238198 - RNA, 20 nt, Artificial Sequence
  Synthetic
aucaaauuuuauuuuauaua

SEQ ID NO: 238199 - RNA, 21 nt, Artificial Sequence
  Synthetic
aaucaaauuuuauuuuauaua

SEQ ID NO: 238200 - RNA, 22 nt, Artificial Sequence
  Synthetic
uaaucaaauuuuauuuuauaua

SEQ ID NO: 238201 - RNA, 23 nt, Artificial Sequence
  Synthetic
auaaucaaauuuuauuuuauaua

SEQ ID NO: 238202 - RNA, 24 nt, Artificial Sequence
  Synthetic
aauaaucaaauuuuauuuuauaua

SEQ ID NO: 238203 - RNA, 18 nt, Artificial Sequence
  Synthetic
cagauuucuaaaacuaua

SEQ ID NO: 238204 - RNA, 19 nt, Artificial Sequence
  Synthetic
acagauuucuaaaacuaua

SEQ ID NO: 238205 - RNA, 20 nt, Artificial Sequence
  Synthetic
gacagauuucuaaaacuaua

SEQ ID NO: 238206 - RNA, 21 nt, Artificial Sequence
  Synthetic
ggacagauuucuaaaacuaua

SEQ ID NO: 238207 - RNA, 22 nt, Artificial Sequence
  Synthetic
aggacagauuucuaaaacuaua

SEQ ID NO: 238208 - RNA, 23 nt, Artificial Sequence
  Synthetic
gaggacagauuucuaaaacuaua

SEQ ID NO: 238209 - RNA, 24 nt, Artificial Sequence
  Synthetic
cgaggacagauuucuaaaacuaua

SEQ ID NO: 238210 - RNA, 18 nt, Artificial Sequence
  Synthetic
caaugggcagaaacuaua

SEQ ID NO: 238211 - RNA, 19 nt, Artificial Sequence
  Synthetic
acaaugggcagaaacuaua

SEQ ID NO: 238212 - RNA, 20 nt, Artificial Sequence
  Synthetic
aacaaugggcagaaacuaua

SEQ ID NO: 238213 - RNA, 21 nt, Artificial Sequence
  Synthetic
uaacaaugggcagaaacuaua

SEQ ID NO: 238214 - RNA, 22 nt, Artificial Sequence
  Synthetic
uuaacaaugggcagaaacuaua

SEQ ID NO: 238215 - RNA, 23 nt, Artificial Sequence
  Synthetic
uuuaacaaugggcagaaacuaua

SEQ ID NO: 238216 - RNA, 24 nt, Artificial Sequence
  Synthetic
guuuaacaaugggcagaaacuaua

SEQ ID NO: 238217 - RNA, 18 nt, Artificial Sequence
  Synthetic
uucccauaaguaacuaua

SEQ ID NO: 238218 - RNA, 19 nt, Artificial Sequence
  Synthetic
uuucccauaaguaacuaua

SEQ ID NO: 238219 - RNA, 20 nt, Artificial Sequence
  Synthetic
uuuucccauaaguaacuaua

SEQ ID NO: 238220 - RNA, 21 nt, Artificial Sequence
  Synthetic
uuuuucccauaaguaacuaua

SEQ ID NO: 238221 - RNA, 22 nt, Artificial Sequence
  Synthetic
uuuuuucccauaaguaacuaua

SEQ ID NO: 238222 - RNA, 23 nt, Artificial Sequence
  Synthetic
auuuuuucccauaaguaacuaua

SEQ ID NO: 238223 - RNA, 24 nt, Artificial Sequence
  Synthetic
gauuuuuucccauaaguaacuaua

SEQ ID NO: 238224 - RNA, 18 nt, Artificial Sequence
  Synthetic
aaggaaaggaagacuaua

SEQ ID NO: 238225 - RNA, 19 nt, Artificial Sequence
  Synthetic
aaaggaaaggaagacuaua

SEQ ID NO: 238226 - RNA, 20 nt, Artificial Sequence
  Synthetic
aaaaggaaaggaagacuaua

SEQ ID NO: 238227 - RNA, 21 nt, Artificial Sequence
  Synthetic
aaaaaggaaaggaagacuaua

SEQ ID NO: 238228 - RNA, 22 nt, Artificial Sequence
  Synthetic
aaaaaaggaaaggaagacuaua

SEQ ID NO: 238229 - RNA, 23 nt, Artificial Sequence
  Synthetic
gaaaaaaggaaaggaagacuaua

SEQ ID NO: 238230 - RNA, 24 nt, Artificial Sequence
  Synthetic
agaaaaaaggaaaggaagacuaua

SEQ ID NO: 238231 - RNA, 18 nt, Artificial Sequence
  Synthetic
aauuuagugaauacuaua

SEQ ID NO: 238232 - RNA, 19 nt, Artificial Sequence
  Synthetic
caauuuagugaauacuaua

SEQ ID NO: 238233 - RNA, 20 nt, Artificial Sequence
  Synthetic
ucaauuuagugaauacuaua

SEQ ID NO: 238234 - RNA, 21 nt, Artificial Sequence
  Synthetic
uucaauuuagugaauacuaua

SEQ ID NO: 238235 - RNA, 22 nt, Artificial Sequence
  Synthetic
auucaauuuagugaauacuaua

SEQ ID NO: 238236 - RNA, 23 nt, Artificial Sequence
  Synthetic
cauucaauuuagugaauacuaua

SEQ ID NO: 238237 - RNA, 24 nt, Artificial Sequence
  Synthetic
ucauucaauuuagugaauacuaua

SEQ ID NO: 238238 - RNA, 18 nt, Artificial Sequence
  Synthetic
uauguauguaauacuaua

SEQ ID NO: 238239 - RNA, 19 nt, Artificial Sequence
  Synthetic
auauguauguaauacuaua

SEQ ID NO: 238240 - RNA, 20 nt, Artificial Sequence
  Synthetic
uauauguauguaauacuaua

SEQ ID NO: 238241 - RNA, 21 nt, Artificial Sequence
  Synthetic
auauauguauguaauacuaua

SEQ ID NO: 238242 - RNA, 22 nt, Artificial Sequence
  Synthetic
aauauauguauguaauacuaua

SEQ ID NO: 238243 - RNA, 23 nt, Artificial Sequence
  Synthetic
uaauauauguauguaauacuaua

SEQ ID NO: 238244 - RNA, 24 nt, Artificial Sequence
  Synthetic
uuaauauauguauguaauacuaua

SEQ ID NO: 238245 - RNA, 18 nt, Artificial Sequence
  Synthetic
aaaucugaacauacuaua

SEQ ID NO: 238246 - RNA, 19 nt, Artificial Sequence
  Synthetic
caaaucugaacauacuaua

SEQ ID NO: 238247 - RNA, 20 nt, Artificial Sequence
  Synthetic
gcaaaucugaacauacuaua

SEQ ID NO: 238248 - RNA, 21 nt, Artificial Sequence
  Synthetic
ugcaaaucugaacauacuaua

SEQ ID NO: 238249 - RNA, 22 nt, Artificial Sequence
  Synthetic
augcaaaucugaacauacuaua

SEQ ID NO: 238250 - RNA, 23 nt, Artificial Sequence
  Synthetic
uaugcaaaucugaacauacuaua

SEQ ID NO: 238251 - RNA, 24 nt, Artificial Sequence
  Synthetic
uuaugcaaaucugaacauacuaua

SEQ ID NO: 238252 - RNA, 18 nt, Artificial Sequence
  Synthetic
uuaguaauaaguacuaua

SEQ ID NO: 238253 - RNA, 19 nt, Artificial Sequence
  Synthetic
guuaguaauaaguacuaua

SEQ ID NO: 238254 - RNA, 20 nt, Artificial Sequence
  Synthetic
uguuaguaauaaguacuaua

SEQ ID NO: 238255 - RNA, 21 nt, Artificial Sequence
  Synthetic
auguuaguaauaaguacuaua

SEQ ID NO: 238256 - RNA, 22 nt, Artificial Sequence
  Synthetic
aauguuaguaauaaguacuaua

SEQ ID NO: 238257 - RNA, 23 nt, Artificial Sequence
  Synthetic
uaauguuaguaauaaguacuaua

SEQ ID NO: 238258 - RNA, 24 nt, Artificial Sequence
  Synthetic
uuaauguuaguaauaaguacuaua

SEQ ID NO: 238259 - RNA, 18 nt, Artificial Sequence
  Synthetic
ugagaaaacuguacuaua

SEQ ID NO: 238260 - RNA, 19 nt, Artificial Sequence
  Synthetic
gugagaaaacuguacuaua

SEQ ID NO: 238261 - RNA, 20 nt, Artificial Sequence
  Synthetic
ggugagaaaacuguacuaua

SEQ ID NO: 238262 - RNA, 21 nt, Artificial Sequence
  Synthetic
aggugagaaaacuguacuaua

SEQ ID NO: 238263 - RNA, 22 nt, Artificial Sequence
  Synthetic
caggugagaaaacuguacuaua

SEQ ID NO: 238264 - RNA, 23 nt, Artificial Sequence
  Synthetic
ucaggugagaaaacuguacuaua

SEQ ID NO: 238265 - RNA, 24 nt, Artificial Sequence
  Synthetic
aucaggugagaaaacuguacuaua

SEQ ID NO: 238266 - RNA, 18 nt, Artificial Sequence
  Synthetic
gaaaagauuuguacuaua

SEQ ID NO: 238267 - RNA, 19 nt, Artificial Sequence
  Synthetic
ugaaaagauuuguacuaua

SEQ ID NO: 238268 - RNA, 20 nt, Artificial Sequence
  Synthetic
augaaaagauuuguacuaua

SEQ ID NO: 238269 - RNA, 21 nt, Artificial Sequence
  Synthetic
uaugaaaagauuuguacuaua

SEQ ID NO: 238270 - RNA, 22 nt, Artificial Sequence
  Synthetic
auaugaaaagauuuguacuaua

SEQ ID NO: 238271 - RNA, 23 nt, Artificial Sequence
  Synthetic
uauaugaaaagauuuguacuaua

SEQ ID NO: 238272 - RNA, 24 nt, Artificial Sequence
  Synthetic
uuauaugaaaagauuuguacuaua

SEQ ID NO: 238273 - RNA, 18 nt, Artificial Sequence
  Synthetic
auggcugaggcaccuaua

SEQ ID NO: 238274 - RNA, 19 nt, Artificial Sequence
  Synthetic
cauggcugaggcaccuaua

SEQ ID NO: 238275 - RNA, 20 nt, Artificial Sequence
  Synthetic
ucauggcugaggcaccuaua

SEQ ID NO: 238276 - RNA, 21 nt, Artificial Sequence
  Synthetic
uucauggcugaggcaccuaua

SEQ ID NO: 238277 - RNA, 22 nt, Artificial Sequence
  Synthetic
guucauggcugaggcaccuaua

SEQ ID NO: 238278 - RNA, 23 nt, Artificial Sequence
  Synthetic
gguucauggcugaggcaccuaua

SEQ ID NO: 238279 - RNA, 24 nt, Artificial Sequence
  Synthetic
agguucauggcugaggcaccuaua

SEQ ID NO: 238280 - RNA, 18 nt, Artificial Sequence
  Synthetic
gguuagaggugaccuaua

SEQ ID NO: 238281 - RNA, 19 nt, Artificial Sequence
  Synthetic
agguuagaggugaccuaua

SEQ ID NO: 238282 - RNA, 20 nt, Artificial Sequence
  Synthetic
uagguuagaggugaccuaua

SEQ ID NO: 238283 - RNA, 21 nt, Artificial Sequence
  Synthetic
uuagguuagaggugaccuaua

SEQ ID NO: 238284 - RNA, 22 nt, Artificial Sequence
  Synthetic
guuagguuagaggugaccuaua

SEQ ID NO: 238285 - RNA, 23 nt, Artificial Sequence
  Synthetic
gguuagguuagaggugaccuaua

SEQ ID NO: 238286 - RNA, 24 nt, Artificial Sequence
  Synthetic
ugguuagguuagaggugaccuaua

SEQ ID NO: 238287 - RNA, 18 nt, Artificial Sequence
  Synthetic
guaaaaaguauaccuaua

SEQ ID NO: 238288 - RNA, 19 nt, Artificial Sequence
  Synthetic
uguaaaaaguauaccuaua

SEQ ID NO: 238289 - RNA, 20 nt, Artificial Sequence
  Synthetic
auguaaaaaguauaccuaua

SEQ ID NO: 238290 - RNA, 21 nt, Artificial Sequence
  Synthetic
cauguaaaaaguauaccuaua

SEQ ID NO: 238291 - RNA, 22 nt, Artificial Sequence
  Synthetic
gcauguaaaaaguauaccuaua

SEQ ID NO: 238292 - RNA, 23 nt, Artificial Sequence
  Synthetic
ugcauguaaaaaguauaccuaua

SEQ ID NO: 238293 - RNA, 24 nt, Artificial Sequence
  Synthetic
augcauguaaaaaguauaccuaua

SEQ ID NO: 238294 - RNA, 18 nt, Artificial Sequence
  Synthetic
guagaagaguccccuaua

SEQ ID NO: 238295 - RNA, 19 nt, Artificial Sequence
  Synthetic
aguagaagaguccccuaua

SEQ ID NO: 238296 - RNA, 20 nt, Artificial Sequence
  Synthetic
caguagaagaguccccuaua

SEQ ID NO: 238297 - RNA, 21 nt, Artificial Sequence
  Synthetic
acaguagaagaguccccuaua

SEQ ID NO: 238298 - RNA, 22 nt, Artificial Sequence
  Synthetic
cacaguagaagaguccccuaua

SEQ ID NO: 238299 - RNA, 23 nt, Artificial Sequence
  Synthetic
gcacaguagaagaguccccuaua

SEQ ID NO: 238300 - RNA, 24 nt, Artificial Sequence
  Synthetic
agcacaguagaagaguccccuaua

SEQ ID NO: 238301 - RNA, 18 nt, Artificial Sequence
  Synthetic
ccugauucuaucccuaua

SEQ ID NO: 238302 - RNA, 19 nt, Artificial Sequence
  Synthetic
gccugauucuaucccuaua

SEQ ID NO: 238303 - RNA, 20 nt, Artificial Sequence
  Synthetic
agccugauucuaucccuaua

SEQ ID NO: 238304 - RNA, 21 nt, Artificial Sequence
  Synthetic
gagccugauucuaucccuaua

SEQ ID NO: 238305 - RNA, 22 nt, Artificial Sequence
  Synthetic
ugagccugauucuaucccuaua

SEQ ID NO: 238306 - RNA, 23 nt, Artificial Sequence
  Synthetic
cugagccugauucuaucccuaua

SEQ ID NO: 238307 - RNA, 24 nt, Artificial Sequence
  Synthetic
acugagccugauucuaucccuaua

SEQ ID NO: 238308 - RNA, 18 nt, Artificial Sequence
  Synthetic
gagucaccugugccuaua

SEQ ID NO: 238309 - RNA, 19 nt, Artificial Sequence
  Synthetic
ggagucaccugugccuaua

SEQ ID NO: 238310 - RNA, 20 nt, Artificial Sequence
  Synthetic
gggagucaccugugccuaua

SEQ ID NO: 238311 - RNA, 21 nt, Artificial Sequence
  Synthetic
ugggagucaccugugccuaua

SEQ ID NO: 238312 - RNA, 22 nt, Artificial Sequence
  Synthetic
gugggagucaccugugccuaua

SEQ ID NO: 238313 - RNA, 23 nt, Artificial Sequence
  Synthetic
ggugggagucaccugugccuaua

SEQ ID NO: 238314 - RNA, 24 nt, Artificial Sequence
  Synthetic
aggugggagucaccugugccuaua

SEQ ID NO: 238315 - RNA, 18 nt, Artificial Sequence
  Synthetic
auuugcaauacuccuaua

SEQ ID NO: 238316 - RNA, 19 nt, Artificial Sequence
  Synthetic
uauuugcaauacuccuaua

SEQ ID NO: 238317 - RNA, 20 nt, Artificial Sequence
  Synthetic
auauuugcaauacuccuaua

SEQ ID NO: 238318 - RNA, 21 nt, Artificial Sequence
  Synthetic
uauauuugcaauacuccuaua

SEQ ID NO: 238319 - RNA, 22 nt, Artificial Sequence
  Synthetic
uuauauuugcaauacuccuaua

SEQ ID NO: 238320 - RNA, 23 nt, Artificial Sequence
  Synthetic
cuuauauuugcaauacuccuaua

SEQ ID NO: 238321 - RNA, 24 nt, Artificial Sequence
  Synthetic
ucuuauauuugcaauacuccuaua

SEQ ID NO: 238322 - RNA, 18 nt, Artificial Sequence
  Synthetic
ggccacugugcuccuaua

SEQ ID NO: 238323 - RNA, 19 nt, Artificial Sequence
  Synthetic
aggccacugugcuccuaua

SEQ ID NO: 238324 - RNA, 20 nt, Artificial Sequence
  Synthetic
aaggccacugugcuccuaua

SEQ ID NO: 238325 - RNA, 21 nt, Artificial Sequence
  Synthetic
aaaggccacugugcuccuaua

SEQ ID NO: 238326 - RNA, 22 nt, Artificial Sequence
  Synthetic
uaaaggccacugugcuccuaua

SEQ ID NO: 238327 - RNA, 23 nt, Artificial Sequence
  Synthetic
uuaaaggccacugugcuccuaua

SEQ ID NO: 238328 - RNA, 24 nt, Artificial Sequence
  Synthetic
guuaaaggccacugugcuccuaua

SEQ ID NO: 238329 - RNA, 18 nt, Artificial Sequence
  Synthetic
augaguguuauuccuaua

SEQ ID NO: 238330 - RNA, 19 nt, Artificial Sequence
  Synthetic
caugaguguuauuccuaua

SEQ ID NO: 238331 - RNA, 20 nt, Artificial Sequence
  Synthetic
ucaugaguguuauuccuaua

SEQ ID NO: 238332 - RNA, 21 nt, Artificial Sequence
  Synthetic
aucaugaguguuauuccuaua

SEQ ID NO: 238333 - RNA, 22 nt, Artificial Sequence
  Synthetic
caucaugaguguuauuccuaua

SEQ ID NO: 238334 - RNA, 23 nt, Artificial Sequence
  Synthetic
acaucaugaguguuauuccuaua

SEQ ID NO: 238335 - RNA, 24 nt, Artificial Sequence
  Synthetic
cacaucaugaguguuauuccuaua

SEQ ID NO: 238336 - RNA, 18 nt, Artificial Sequence
  Synthetic
cuggauggccuuccuaua

SEQ ID NO: 238337 - RNA, 19 nt, Artificial Sequence
  Synthetic
ccuggauggccuuccuaua

SEQ ID NO: 238338 - RNA, 20 nt, Artificial Sequence
  Synthetic
uccuggauggccuuccuaua

SEQ ID NO: 238339 - RNA, 21 nt, Artificial Sequence
  Synthetic
auccuggauggccuuccuaua

SEQ ID NO: 238340 - RNA, 22 nt, Artificial Sequence
  Synthetic
cauccuggauggccuuccuaua

SEQ ID NO: 238341 - RNA, 23 nt, Artificial Sequence
  Synthetic
acauccuggauggccuuccuaua

SEQ ID NO: 238342 - RNA, 24 nt, Artificial Sequence
  Synthetic
aacauccuggauggccuuccuaua

SEQ ID NO: 238343 - RNA, 18 nt, Artificial Sequence
  Synthetic
caaaacucaaaagcuaua

SEQ ID NO: 238344 - RNA, 19 nt, Artificial Sequence
  Synthetic
acaaaacucaaaagcuaua

SEQ ID NO: 238345 - RNA, 20 nt, Artificial Sequence
  Synthetic
cacaaaacucaaaagcuaua

SEQ ID NO: 238346 - RNA, 21 nt, Artificial Sequence
  Synthetic
acacaaaacucaaaagcuaua

SEQ ID NO: 238347 - RNA, 22 nt, Artificial Sequence
  Synthetic
gacacaaaacucaaaagcuaua

SEQ ID NO: 238348 - RNA, 23 nt, Artificial Sequence
  Synthetic
agacacaaaacucaaaagcuaua

SEQ ID NO: 238349 - RNA, 24 nt, Artificial Sequence
  Synthetic
aagacacaaaacucaaaagcuaua

SEQ ID NO: 238350 - RNA, 18 nt, Artificial Sequence
  Synthetic
aagaaaucauuggcuaua

SEQ ID NO: 238351 - RNA, 19 nt, Artificial Sequence
  Synthetic
aaagaaaucauuggcuaua

SEQ ID NO: 238352 - RNA, 20 nt, Artificial Sequence
  Synthetic
caaagaaaucauuggcuaua

SEQ ID NO: 238353 - RNA, 21 nt, Artificial Sequence
  Synthetic
acaaagaaaucauuggcuaua

SEQ ID NO: 238354 - RNA, 22 nt, Artificial Sequence
  Synthetic
uacaaagaaaucauuggcuaua

SEQ ID NO: 238355 - RNA, 23 nt, Artificial Sequence
  Synthetic
cuacaaagaaaucauuggcuaua

SEQ ID NO: 238356 - RNA, 24 nt, Artificial Sequence
  Synthetic
gcuacaaagaaaucauuggcuaua

SEQ ID NO: 238357 - RNA, 18 nt, Artificial Sequence
  Synthetic
ucguuucacacugcuaua

SEQ ID NO: 238358 - RNA, 19 nt, Artificial Sequence
  Synthetic
uucguuucacacugcuaua

SEQ ID NO: 238359 - RNA, 20 nt, Artificial Sequence
  Synthetic
guucguuucacacugcuaua

SEQ ID NO: 238360 - RNA, 21 nt, Artificial Sequence
  Synthetic
aguucguuucacacugcuaua

SEQ ID NO: 238361 - RNA, 22 nt, Artificial Sequence
  Synthetic
uaguucguuucacacugcuaua

SEQ ID NO: 238362 - RNA, 23 nt, Artificial Sequence
  Synthetic
uuaguucguuucacacugcuaua

SEQ ID NO: 238363 - RNA, 24 nt, Artificial Sequence
  Synthetic
auuaguucguuucacacugcuaua

SEQ ID NO: 238364 - RNA, 18 nt, Artificial Sequence
  Synthetic
cauuuucauacugcuaua

SEQ ID NO: 238365 - RNA, 19 nt, Artificial Sequence
  Synthetic
ccauuuucauacugcuaua

SEQ ID NO: 238366 - RNA, 20 nt, Artificial Sequence
  Synthetic
uccauuuucauacugcuaua

SEQ ID NO: 238367 - RNA, 18 nt, Artificial Sequence
  Synthetic
uguucucaugcugcuaua

SEQ ID NO: 238368 - RNA, 19 nt, Artificial Sequence
  Synthetic
cuguucucaugcugcuaua

SEQ ID NO: 238369 - RNA, 20 nt, Artificial Sequence
  Synthetic
ucuguucucaugcugcuaua

SEQ ID NO: 238370 - RNA, 21 nt, Artificial Sequence
  Synthetic
gucuguucucaugcugcuaua

SEQ ID NO: 238371 - RNA, 22 nt, Artificial Sequence
  Synthetic
agucuguucucaugcugcuaua

SEQ ID NO: 238372 - RNA, 23 nt, Artificial Sequence
  Synthetic
uagucuguucucaugcugcuaua

SEQ ID NO: 238373 - RNA, 24 nt, Artificial Sequence
  Synthetic
uuagucuguucucaugcugcuaua

SEQ ID NO: 238374 - RNA, 18 nt, Artificial Sequence
  Synthetic
cauucuugcauugcuaua

SEQ ID NO: 238375 - RNA, 19 nt, Artificial Sequence
  Synthetic
ccauucuugcauugcuaua

SEQ ID NO: 238376 - RNA, 20 nt, Artificial Sequence
  Synthetic
gccauucuugcauugcuaua

SEQ ID NO: 238377 - RNA, 21 nt, Artificial Sequence
  Synthetic
ggccauucuugcauugcuaua

SEQ ID NO: 238378 - RNA, 22 nt, Artificial Sequence
  Synthetic
aggccauucuugcauugcuaua

SEQ ID NO: 238379 - RNA, 23 nt, Artificial Sequence
  Synthetic
uaggccauucuugcauugcuaua

SEQ ID NO: 238380 - RNA, 24 nt, Artificial Sequence
  Synthetic
uuaggccauucuugcauugcuaua

SEQ ID NO: 238381 - RNA, 18 nt, Artificial Sequence
  Synthetic
uuuucuugcauugcuaua

SEQ ID NO: 238382 - RNA, 19 nt, Artificial Sequence
  Synthetic
cuuuucuugcauugcuaua

SEQ ID NO: 238383 - RNA, 20 nt, Artificial Sequence
  Synthetic
ucuuuucuugcauugcuaua

SEQ ID NO: 238384 - RNA, 21 nt, Artificial Sequence
  Synthetic
aucuuuucuugcauugcuaua

SEQ ID NO: 238385 - RNA, 22 nt, Artificial Sequence
  Synthetic
aaucuuuucuugcauugcuaua

SEQ ID NO: 238386 - RNA, 23 nt, Artificial Sequence
  Synthetic
uaaucuuuucuugcauugcuaua

SEQ ID NO: 238387 - RNA, 24 nt, Artificial Sequence
  Synthetic
uuaaucuuuucuugcauugcuaua

SEQ ID NO: 238388 - RNA, 18 nt, Artificial Sequence
  Synthetic
uucauguauguugcuaua

SEQ ID NO: 238389 - RNA, 19 nt, Artificial Sequence
  Synthetic
guucauguauguugcuaua

SEQ ID NO: 238390 - RNA, 20 nt, Artificial Sequence
  Synthetic
uguucauguauguugcuaua

SEQ ID NO: 238391 - RNA, 21 nt, Artificial Sequence
  Synthetic
uuguucauguauguugcuaua

SEQ ID NO: 238392 - RNA, 22 nt, Artificial Sequence
  Synthetic
uuuguucauguauguugcuaua

SEQ ID NO: 238393 - RNA, 23 nt, Artificial Sequence
  Synthetic
cuuuguucauguauguugcuaua

SEQ ID NO: 238394 - RNA, 24 nt, Artificial Sequence
  Synthetic
ucuuuguucauguauguugcuaua

SEQ ID NO: 238395 - RNA, 18 nt, Artificial Sequence
  Synthetic
uaauauccauaaucuaua

SEQ ID NO: 238396 - RNA, 19 nt, Artificial Sequence
  Synthetic
cuaauauccauaaucuaua

SEQ ID NO: 238397 - RNA, 20 nt, Artificial Sequence
  Synthetic
ucuaauauccauaaucuaua

SEQ ID NO: 238398 - RNA, 21 nt, Artificial Sequence
  Synthetic
aucuaauauccauaaucuaua

SEQ ID NO: 238399 - RNA, 22 nt, Artificial Sequence
  Synthetic
gaucuaauauccauaaucuaua

SEQ ID NO: 238400 - RNA, 23 nt, Artificial Sequence
  Synthetic
agaucuaauauccauaaucuaua

SEQ ID NO: 238401 - RNA, 24 nt, Artificial Sequence
  Synthetic
aagaucuaauauccauaaucuaua

SEQ ID NO: 238402 - RNA, 18 nt, Artificial Sequence
  Synthetic
uugaagacaaccucuaua

SEQ ID NO: 238403 - RNA, 19 nt, Artificial Sequence
  Synthetic
auugaagacaaccucuaua

SEQ ID NO: 238404 - RNA, 20 nt, Artificial Sequence
  Synthetic
aauugaagacaaccucuaua

SEQ ID NO: 238405 - RNA, 21 nt, Artificial Sequence
  Synthetic
uaauugaagacaaccucuaua

SEQ ID NO: 238406 - RNA, 22 nt, Artificial Sequence
  Synthetic
uuaauugaagacaaccucuaua

SEQ ID NO: 238407 - RNA, 23 nt, Artificial Sequence
  Synthetic
uuuaauugaagacaaccucuaua

SEQ ID NO: 238408 - RNA, 24 nt, Artificial Sequence
  Synthetic
uuuuaauugaagacaaccucuaua

SEQ ID NO: 238409 - RNA, 18 nt, Artificial Sequence
  Synthetic
ucaagcuagaugucuaua

SEQ ID NO: 238410 - RNA, 19 nt, Artificial Sequence
  Synthetic
uucaagcuagaugucuaua

SEQ ID NO: 238411 - RNA, 20 nt, Artificial Sequence
  Synthetic
auucaagcuagaugucuaua

SEQ ID NO: 238412 - RNA, 21 nt, Artificial Sequence
  Synthetic
aauucaagcuagaugucuaua

SEQ ID NO: 238413 - RNA, 22 nt, Artificial Sequence
  Synthetic
aaauucaagcuagaugucuaua

SEQ ID NO: 238414 - RNA, 23 nt, Artificial Sequence
  Synthetic
uaaauucaagcuagaugucuaua

SEQ ID NO: 238415 - RNA, 24 nt, Artificial Sequence
  Synthetic
auaaauucaagcuagaugucuaua

SEQ ID NO: 238416 - RNA, 18 nt, Artificial Sequence
  Synthetic
uguuuagucuugucuaua

SEQ ID NO: 238417 - RNA, 19 nt, Artificial Sequence
  Synthetic
uuguuuagucuugucuaua

SEQ ID NO: 238418 - RNA, 20 nt, Artificial Sequence
  Synthetic
auuguuuagucuugucuaua

SEQ ID NO: 238419 - RNA, 21 nt, Artificial Sequence
  Synthetic
cauuguuuagucuugucuaua

SEQ ID NO: 238420 - RNA, 22 nt, Artificial Sequence
  Synthetic
ucauuguuuagucuugucuaua

SEQ ID NO: 238421 - RNA, 23 nt, Artificial Sequence
  Synthetic
uucauuguuuagucuugucuaua

SEQ ID NO: 238422 - RNA, 24 nt, Artificial Sequence
  Synthetic
auucauuguuuagucuugucuaua

SEQ ID NO: 238423 - RNA, 18 nt, Artificial Sequence
  Synthetic
gcuuguuuuuugucuaua

SEQ ID NO: 238424 - RNA, 19 nt, Artificial Sequence
  Synthetic
ugcuuguuuuuugucuaua

SEQ ID NO: 238425 - RNA, 20 nt, Artificial Sequence
  Synthetic
uugcuuguuuuuugucuaua

SEQ ID NO: 238426 - RNA, 21 nt, Artificial Sequence
  Synthetic
uuugcuuguuuuuugucuaua

SEQ ID NO: 238427 - RNA, 22 nt, Artificial Sequence
  Synthetic
uuuugcuuguuuuuugucuaua

SEQ ID NO: 238428 - RNA, 23 nt, Artificial Sequence
  Synthetic
uuuuugcuuguuuuuugucuaua

SEQ ID NO: 238429 - RNA, 24 nt, Artificial Sequence
  Synthetic
uuuuuugcuuguuuuuugucuaua

SEQ ID NO: 238430 - RNA, 18 nt, Artificial Sequence
  Synthetic
uuuaaaaaaaauucuaua

SEQ ID NO: 238431 - RNA, 19 nt, Artificial Sequence
  Synthetic
uuuuaaaaaaaauucuaua

SEQ ID NO: 238432 - RNA, 20 nt, Artificial Sequence
  Synthetic
uuuuuaaaaaaaauucuaua

SEQ ID NO: 238433 - RNA, 21 nt, Artificial Sequence
  Synthetic
uuuuuuaaaaaaaauucuaua

SEQ ID NO: 238434 - RNA, 22 nt, Artificial Sequence
  Synthetic
auuuuuuaaaaaaaauucuaua

SEQ ID NO: 238435 - RNA, 23 nt, Artificial Sequence
  Synthetic
gauuuuuuaaaaaaaauucuaua

SEQ ID NO: 238436 - RNA, 24 nt, Artificial Sequence
  Synthetic
ggauuuuuuaaaaaaaauucuaua

SEQ ID NO: 238437 - RNA, 18 nt, Artificial Sequence
  Synthetic
aacauauauacuucuaua

SEQ ID NO: 238438 - RNA, 19 nt, Artificial Sequence
  Synthetic
uaacauauauacuucuaua

SEQ ID NO: 238439 - RNA, 20 nt, Artificial Sequence
  Synthetic
uuaacauauauacuucuaua

SEQ ID NO: 238440 - RNA, 21 nt, Artificial Sequence
  Synthetic
uuuaacauauauacuucuaua

SEQ ID NO: 238441 - RNA, 22 nt, Artificial Sequence
  Synthetic
uuuuaacauauauacuucuaua

SEQ ID NO: 238442 - RNA, 23 nt, Artificial Sequence
  Synthetic
auuuuaacauauauacuucuaua

SEQ ID NO: 238443 - RNA, 24 nt, Artificial Sequence
  Synthetic
aauuuuaacauauauacuucuaua

SEQ ID NO: 238444 - RNA, 18 nt, Artificial Sequence
  Synthetic
auagaauguuuuucuaua

SEQ ID NO: 238445 - RNA, 19 nt, Artificial Sequence
  Synthetic
gauagaauguuuuucuaua

SEQ ID NO: 238446 - RNA, 20 nt, Artificial Sequence
  Synthetic
ugauagaauguuuuucuaua

SEQ ID NO: 238447 - RNA, 21 nt, Artificial Sequence
  Synthetic
gugauagaauguuuuucuaua

SEQ ID NO: 238448 - RNA, 22 nt, Artificial Sequence
  Synthetic
agugauagaauguuuuucuaua

SEQ ID NO: 238449 - RNA, 23 nt, Artificial Sequence
  Synthetic
aagugauagaauguuuuucuaua

SEQ ID NO: 238450 - RNA, 24 nt, Artificial Sequence
  Synthetic
aaagugauagaauguuuuucuaua

SEQ ID NO: 238451 - RNA, 18 nt, Artificial Sequence
  Synthetic
cuaugaaugaaaaguaua

SEQ ID NO: 238452 - RNA, 19 nt, Artificial Sequence
  Synthetic
gcuaugaaugaaaaguaua

SEQ ID NO: 238453 - RNA, 20 nt, Artificial Sequence
  Synthetic
ugcuaugaaugaaaaguaua

SEQ ID NO: 238454 - RNA, 21 nt, Artificial Sequence
  Synthetic
gugcuaugaaugaaaaguaua

SEQ ID NO: 238455 - RNA, 22 nt, Artificial Sequence
  Synthetic
ggugcuaugaaugaaaaguaua

SEQ ID NO: 238456 - RNA, 23 nt, Artificial Sequence
  Synthetic
aggugcuaugaaugaaaaguaua

SEQ ID NO: 238457 - RNA, 24 nt, Artificial Sequence
  Synthetic
uaggugcuaugaaugaaaaguaua

SEQ ID NO: 238458 - RNA, 18 nt, Artificial Sequence
  Synthetic
cuucuugguuaaaguaua

SEQ ID NO: 238459 - RNA, 19 nt, Artificial Sequence
  Synthetic
ucuucuugguuaaaguaua

SEQ ID NO: 238460 - RNA, 20 nt, Artificial Sequence
  Synthetic
aucuucuugguuaaaguaua

SEQ ID NO: 238461 - RNA, 21 nt, Artificial Sequence
  Synthetic
caucuucuugguuaaaguaua

SEQ ID NO: 238462 - RNA, 22 nt, Artificial Sequence
  Synthetic
gcaucuucuugguuaaaguaua

SEQ ID NO: 238463 - RNA, 23 nt, Artificial Sequence
  Synthetic
ggcaucuucuugguuaaaguaua

SEQ ID NO: 238464 - RNA, 24 nt, Artificial Sequence
  Synthetic
cggcaucuucuugguuaaaguaua

SEQ ID NO: 238465 - RNA, 18 nt, Artificial Sequence
  Synthetic
gagauguuuuaaaguaua

SEQ ID NO: 238466 - RNA, 19 nt, Artificial Sequence
  Synthetic
agagauguuuuaaaguaua

SEQ ID NO: 238467 - RNA, 20 nt, Artificial Sequence
  Synthetic
uagagauguuuuaaaguaua

SEQ ID NO: 238468 - RNA, 21 nt, Artificial Sequence
  Synthetic
cuagagauguuuuaaaguaua

SEQ ID NO: 238469 - RNA, 22 nt, Artificial Sequence
  Synthetic
ucuagagauguuuuaaaguaua

SEQ ID NO: 238470 - RNA, 23 nt, Artificial Sequence
  Synthetic
aucuagagauguuuuaaaguaua

SEQ ID NO: 238471 - RNA, 24 nt, Artificial Sequence
  Synthetic
aaucuagagauguuuuaaaguaua

SEQ ID NO: 238472 - RNA, 18 nt, Artificial Sequence
  Synthetic
cagagaacaccaaguaua

SEQ ID NO: 238473 - RNA, 19 nt, Artificial Sequence
  Synthetic
ucagagaacaccaaguaua

SEQ ID NO: 238474 - RNA, 20 nt, Artificial Sequence
  Synthetic
uucagagaacaccaaguaua

SEQ ID NO: 238475 - RNA, 21 nt, Artificial Sequence
  Synthetic
cuucagagaacaccaaguaua

SEQ ID NO: 238476 - RNA, 22 nt, Artificial Sequence
  Synthetic
gcuucagagaacaccaaguaua

SEQ ID NO: 238477 - RNA, 23 nt, Artificial Sequence
  Synthetic
ugcuucagagaacaccaaguaua

SEQ ID NO: 238478 - RNA, 24 nt, Artificial Sequence
  Synthetic
uugcuucagagaacaccaaguaua

SEQ ID NO: 238479 - RNA, 18 nt, Artificial Sequence
  Synthetic
aauucuuauggaaguaua

SEQ ID NO: 238480 - RNA, 19 nt, Artificial Sequence
  Synthetic
aaauucuuauggaaguaua

SEQ ID NO: 238481 - RNA, 20 nt, Artificial Sequence
  Synthetic
caaauucuuauggaaguaua

SEQ ID NO: 238482 - RNA, 21 nt, Artificial Sequence
  Synthetic
acaaauucuuauggaaguaua

SEQ ID NO: 238483 - RNA, 22 nt, Artificial Sequence
  Synthetic
uacaaauucuuauggaaguaua

SEQ ID NO: 238484 - RNA, 23 nt, Artificial Sequence
  Synthetic
cuacaaauucuuauggaaguaua

SEQ ID NO: 238485 - RNA, 24 nt, Artificial Sequence
  Synthetic
ucuacaaauucuuauggaaguaua

SEQ ID NO: 238486 - RNA, 18 nt, Artificial Sequence
  Synthetic
gcucuuccuugcaguaua

SEQ ID NO: 238487 - RNA, 19 nt, Artificial Sequence
  Synthetic
ggcucuuccuugcaguaua

SEQ ID NO: 238488 - RNA, 20 nt, Artificial Sequence
  Synthetic
uggcucuuccuugcaguaua

SEQ ID NO: 238489 - RNA, 21 nt, Artificial Sequence
  Synthetic
cuggcucuuccuugcaguaua

SEQ ID NO: 238490 - RNA, 22 nt, Artificial Sequence
  Synthetic
gcuggcucuuccuugcaguaua

SEQ ID NO: 238491 - RNA, 23 nt, Artificial Sequence
  Synthetic
ugcuggcucuuccuugcaguaua

SEQ ID NO: 238492 - RNA, 24 nt, Artificial Sequence
  Synthetic
cugcuggcucuuccuugcaguaua

SEQ ID NO: 238493 - RNA, 18 nt, Artificial Sequence
  Synthetic
uaugaggggcucaguaua

SEQ ID NO: 238494 - RNA, 19 nt, Artificial Sequence
  Synthetic
uuaugaggggcucaguaua

SEQ ID NO: 238495 - RNA, 20 nt, Artificial Sequence
  Synthetic
guuaugaggggcucaguaua

SEQ ID NO: 238496 - RNA, 21 nt, Artificial Sequence
  Synthetic
uguuaugaggggcucaguaua

SEQ ID NO: 238497 - RNA, 22 nt, Artificial Sequence
  Synthetic
auguuaugaggggcucaguaua

SEQ ID NO: 238498 - RNA, 23 nt, Artificial Sequence
  Synthetic
cauguuaugaggggcucaguaua

SEQ ID NO: 238499 - RNA, 24 nt, Artificial Sequence
  Synthetic
gcauguuaugaggggcucaguaua

SEQ ID NO: 238500 - RNA, 18 nt, Artificial Sequence
  Synthetic
aauuuuguucagaguaua

SEQ ID NO: 238501 - RNA, 19 nt, Artificial Sequence
  Synthetic
uaauuuuguucagaguaua

SEQ ID NO: 238502 - RNA, 20 nt, Artificial Sequence
  Synthetic
uuaauuuuguucagaguaua

SEQ ID NO: 238503 - RNA, 21 nt, Artificial Sequence
  Synthetic
uuuaauuuuguucagaguaua

SEQ ID NO: 238504 - RNA, 22 nt, Artificial Sequence
  Synthetic
guuuaauuuuguucagaguaua

SEQ ID NO: 238505 - RNA, 23 nt, Artificial Sequence
  Synthetic
uguuuaauuuuguucagaguaua

SEQ ID NO: 238506 - RNA, 24 nt, Artificial Sequence
  Synthetic
auguuuaauuuuguucagaguaua

SEQ ID NO: 238507 - RNA, 18 nt, Artificial Sequence
  Synthetic
agggggccagagaguaua

SEQ ID NO: 238508 - RNA, 19 nt, Artificial Sequence
  Synthetic
aagggggccagagaguaua

SEQ ID NO: 238509 - RNA, 20 nt, Artificial Sequence
  Synthetic
gaagggggccagagaguaua

SEQ ID NO: 238510 - RNA, 21 nt, Artificial Sequence
  Synthetic
ggaagggggccagagaguaua

SEQ ID NO: 238511 - RNA, 22 nt, Artificial Sequence
  Synthetic
aggaagggggccagagaguaua

SEQ ID NO: 238512 - RNA, 23 nt, Artificial Sequence
  Synthetic
gaggaagggggccagagaguaua

SEQ ID NO: 238513 - RNA, 24 nt, Artificial Sequence
  Synthetic
ugaggaagggggccagagaguaua

SEQ ID NO: 238514 - RNA, 18 nt, Artificial Sequence
  Synthetic
uguguaaauuggaguaua

SEQ ID NO: 238515 - RNA, 19 nt, Artificial Sequence
  Synthetic
guguguaaauuggaguaua

SEQ ID NO: 238516 - RNA, 20 nt, Artificial Sequence
  Synthetic
gguguguaaauuggaguaua

SEQ ID NO: 238517 - RNA, 21 nt, Artificial Sequence
  Synthetic
ugguguguaaauuggaguaua

SEQ ID NO: 238518 - RNA, 22 nt, Artificial Sequence
  Synthetic
gugguguguaaauuggaguaua

SEQ ID NO: 238519 - RNA, 23 nt, Artificial Sequence
  Synthetic
ugugguguguaaauuggaguaua

SEQ ID NO: 238520 - RNA, 24 nt, Artificial Sequence
  Synthetic
uugugguguguaaauuggaguaua

SEQ ID NO: 238521 - RNA, 18 nt, Artificial Sequence
  Synthetic
agggguaauuguaguaua

SEQ ID NO: 238522 - RNA, 19 nt, Artificial Sequence
  Synthetic
uagggguaauuguaguaua

SEQ ID NO: 238523 - RNA, 20 nt, Artificial Sequence
  Synthetic
guagggguaauuguaguaua

SEQ ID NO: 238524 - RNA, 21 nt, Artificial Sequence
  Synthetic
aguagggguaauuguaguaua

SEQ ID NO: 238525 - RNA, 22 nt, Artificial Sequence
  Synthetic
aaguagggguaauuguaguaua

SEQ ID NO: 238526 - RNA, 23 nt, Artificial Sequence
  Synthetic
aaaguagggguaauuguaguaua

SEQ ID NO: 238527 - RNA, 24 nt, Artificial Sequence
  Synthetic
uaaaguagggguaauuguaguaua

SEQ ID NO: 238528 - RNA, 18 nt, Artificial Sequence
  Synthetic
uccacaauuuguaguaua

SEQ ID NO: 238529 - RNA, 19 nt, Artificial Sequence
  Synthetic
guccacaauuuguaguaua

SEQ ID NO: 238530 - RNA, 20 nt, Artificial Sequence
  Synthetic
aguccacaauuuguaguaua

SEQ ID NO: 238531 - RNA, 21 nt, Artificial Sequence
  Synthetic
gaguccacaauuuguaguaua

SEQ ID NO: 238532 - RNA, 22 nt, Artificial Sequence
  Synthetic
ugaguccacaauuuguaguaua

SEQ ID NO: 238533 - RNA, 23 nt, Artificial Sequence
  Synthetic
gugaguccacaauuuguaguaua

SEQ ID NO: 238534 - RNA, 24 nt, Artificial Sequence
  Synthetic
ugugaguccacaauuuguaguaua

SEQ ID NO: 238535 - RNA, 18 nt, Artificial Sequence
  Synthetic
uuuauugauuugcguaua

SEQ ID NO: 238536 - RNA, 19 nt, Artificial Sequence
  Synthetic
auuuauugauuugcguaua

SEQ ID NO: 238537 - RNA, 20 nt, Artificial Sequence
  Synthetic
cauuuauugauuugcguaua

SEQ ID NO: 238538 - RNA, 21 nt, Artificial Sequence
  Synthetic
acauuuauugauuugcguaua

SEQ ID NO: 238539 - RNA, 22 nt, Artificial Sequence
  Synthetic
uacauuuauugauuugcguaua

SEQ ID NO: 238540 - RNA, 23 nt, Artificial Sequence
  Synthetic
uuacauuuauugauuugcguaua

SEQ ID NO: 238541 - RNA, 24 nt, Artificial Sequence
  Synthetic
auuacauuuauugauuugcguaua

SEQ ID NO: 238542 - RNA, 18 nt, Artificial Sequence
  Synthetic
aaucuguggaaagguaua

SEQ ID NO: 238543 - RNA, 19 nt, Artificial Sequence
  Synthetic
uaaucuguggaaagguaua

SEQ ID NO: 238544 - RNA, 20 nt, Artificial Sequence
  Synthetic
auaaucuguggaaagguaua

SEQ ID NO: 238545 - RNA, 21 nt, Artificial Sequence
  Synthetic
uauaaucuguggaaagguaua

SEQ ID NO: 238546 - RNA, 22 nt, Artificial Sequence
  Synthetic
auauaaucuguggaaagguaua

SEQ ID NO: 238547 - RNA, 23 nt, Artificial Sequence
  Synthetic
aauauaaucuguggaaagguaua

SEQ ID NO: 238548 - RNA, 24 nt, Artificial Sequence
  Synthetic
caauauaaucuguggaaagguaua

SEQ ID NO: 238549 - RNA, 18 nt, Artificial Sequence
  Synthetic
uguuggccaagagguaua

SEQ ID NO: 238550 - RNA, 19 nt, Artificial Sequence
  Synthetic
auguuggccaagagguaua

SEQ ID NO: 238551 - RNA, 20 nt, Artificial Sequence
  Synthetic
cauguuggccaagagguaua

SEQ ID NO: 238552 - RNA, 21 nt, Artificial Sequence
  Synthetic
acauguuggccaagagguaua

SEQ ID NO: 238553 - RNA, 22 nt, Artificial Sequence
  Synthetic
cacauguuggccaagagguaua

SEQ ID NO: 238554 - RNA, 23 nt, Artificial Sequence
  Synthetic
ucacauguuggccaagagguaua

SEQ ID NO: 238555 - RNA, 24 nt, Artificial Sequence
  Synthetic
aucacauguuggccaagagguaua

SEQ ID NO: 238556 - RNA, 18 nt, Artificial Sequence
  Synthetic
ggugucauuaaugguaua

SEQ ID NO: 238557 - RNA, 19 nt, Artificial Sequence
  Synthetic
gggugucauuaaugguaua

SEQ ID NO: 238558 - RNA, 20 nt, Artificial Sequence
  Synthetic
ugggugucauuaaugguaua

SEQ ID NO: 238559 - RNA, 21 nt, Artificial Sequence
  Synthetic
gugggugucauuaaugguaua

SEQ ID NO: 238560 - RNA, 22 nt, Artificial Sequence
  Synthetic
ugugggugucauuaaugguaua

SEQ ID NO: 238561 - RNA, 23 nt, Artificial Sequence
  Synthetic
uugugggugucauuaaugguaua

SEQ ID NO: 238562 - RNA, 24 nt, Artificial Sequence
  Synthetic
auugugggugucauuaaugguaua

SEQ ID NO: 238563 - RNA, 18 nt, Artificial Sequence
  Synthetic
auuuuuguauaugguaua

SEQ ID NO: 238564 - RNA, 19 nt, Artificial Sequence
  Synthetic
aauuuuuguauaugguaua

SEQ ID NO: 238565 - RNA, 20 nt, Artificial Sequence
  Synthetic
uaauuuuuguauaugguaua

SEQ ID NO: 238566 - RNA, 21 nt, Artificial Sequence
  Synthetic
uuaauuuuuguauaugguaua

SEQ ID NO: 238567 - RNA, 22 nt, Artificial Sequence
  Synthetic
auuaauuuuuguauaugguaua

SEQ ID NO: 238568 - RNA, 23 nt, Artificial Sequence
  Synthetic
aauuaauuuuuguauaugguaua

SEQ ID NO: 238569 - RNA, 24 nt, Artificial Sequence
  Synthetic
gaauuaauuuuuguauaugguaua

SEQ ID NO: 238570 - RNA, 18 nt, Artificial Sequence
  Synthetic
gcauaaagaacugguaua

SEQ ID NO: 238571 - RNA, 19 nt, Artificial Sequence
  Synthetic
ugcauaaagaacugguaua

SEQ ID NO: 238572 - RNA, 20 nt, Artificial Sequence
  Synthetic
uugcauaaagaacugguaua

SEQ ID NO: 238573 - RNA, 21 nt, Artificial Sequence
  Synthetic
auugcauaaagaacugguaua

SEQ ID NO: 238574 - RNA, 22 nt, Artificial Sequence
  Synthetic
uauugcauaaagaacugguaua

SEQ ID NO: 238575 - RNA, 23 nt, Artificial Sequence
  Synthetic
auauugcauaaagaacugguaua

SEQ ID NO: 238576 - RNA, 24 nt, Artificial Sequence
  Synthetic
uauauugcauaaagaacugguaua

SEQ ID NO: 238577 - RNA, 18 nt, Artificial Sequence
  Synthetic
aagaacacgggugguaua

SEQ ID NO: 238578 - RNA, 19 nt, Artificial Sequence
  Synthetic
aaagaacacgggugguaua

SEQ ID NO: 238579 - RNA, 20 nt, Artificial Sequence
  Synthetic
caaagaacacgggugguaua

SEQ ID NO: 238580 - RNA, 21 nt, Artificial Sequence
  Synthetic
gcaaagaacacgggugguaua

SEQ ID NO: 238581 - RNA, 22 nt, Artificial Sequence
  Synthetic
cgcaaagaacacgggugguaua

SEQ ID NO: 238582 - RNA, 23 nt, Artificial Sequence
  Synthetic
ccgcaaagaacacgggugguaua

SEQ ID NO: 238583 - RNA, 24 nt, Artificial Sequence
  Synthetic
cccgcaaagaacacgggugguaua

SEQ ID NO: 238584 - RNA, 18 nt, Artificial Sequence
  Synthetic
auggaaaugaaauguaua

SEQ ID NO: 238585 - RNA, 19 nt, Artificial Sequence
  Synthetic
aauggaaaugaaauguaua

SEQ ID NO: 238586 - RNA, 20 nt, Artificial Sequence
  Synthetic
aaauggaaaugaaauguaua

SEQ ID NO: 238587 - RNA, 21 nt, Artificial Sequence
  Synthetic
aaaauggaaaugaaauguaua

SEQ ID NO: 238588 - RNA, 22 nt, Artificial Sequence
  Synthetic
caaaauggaaaugaaauguaua

SEQ ID NO: 238589 - RNA, 23 nt, Artificial Sequence
  Synthetic
gcaaaauggaaaugaaauguaua

SEQ ID NO: 238590 - RNA, 24 nt, Artificial Sequence
  Synthetic
agcaaaauggaaaugaaauguaua

SEQ ID NO: 238591 - RNA, 18 nt, Artificial Sequence
  Synthetic
aagcuuuugaaauguaua

SEQ ID NO: 238592 - RNA, 19 nt, Artificial Sequence
  Synthetic
aaagcuuuugaaauguaua

SEQ ID NO: 238593 - RNA, 20 nt, Artificial Sequence
  Synthetic
caaagcuuuugaaauguaua

SEQ ID NO: 238594 - RNA, 21 nt, Artificial Sequence
  Synthetic
gcaaagcuuuugaaauguaua

SEQ ID NO: 238595 - RNA, 22 nt, Artificial Sequence
  Synthetic
agcaaagcuuuugaaauguaua

SEQ ID NO: 238596 - RNA, 23 nt, Artificial Sequence
  Synthetic
gagcaaagcuuuugaaauguaua

SEQ ID NO: 238597 - RNA, 24 nt, Artificial Sequence
  Synthetic
agagcaaagcuuuugaaauguaua

SEQ ID NO: 238598 - RNA, 18 nt, Artificial Sequence
  Synthetic
ugagguauuuaauguaua

SEQ ID NO: 238599 - RNA, 19 nt, Artificial Sequence
  Synthetic
augagguauuuaauguaua

SEQ ID NO: 238600 - RNA, 20 nt, Artificial Sequence
  Synthetic
caugagguauuuaauguaua

SEQ ID NO: 238601 - RNA, 21 nt, Artificial Sequence
  Synthetic
ucaugagguauuuaauguaua

SEQ ID NO: 238602 - RNA, 22 nt, Artificial Sequence
  Synthetic
gucaugagguauuuaauguaua

SEQ ID NO: 238603 - RNA, 23 nt, Artificial Sequence
  Synthetic
ugucaugagguauuuaauguaua

SEQ ID NO: 238604 - RNA, 24 nt, Artificial Sequence
  Synthetic
gugucaugagguauuuaauguaua

SEQ ID NO: 238605 - RNA, 18 nt, Artificial Sequence
  Synthetic
ggguuuguuaccuguaua

SEQ ID NO: 238606 - RNA, 19 nt, Artificial Sequence
  Synthetic
cggguuuguuaccuguaua

SEQ ID NO: 238607 - RNA, 20 nt, Artificial Sequence
  Synthetic
acggguuuguuaccuguaua

SEQ ID NO: 238608 - RNA, 21 nt, Artificial Sequence
  Synthetic
uacggguuuguuaccuguaua

SEQ ID NO: 238609 - RNA, 22 nt, Artificial Sequence
  Synthetic
cuacggguuuguuaccuguaua

SEQ ID NO: 238610 - RNA, 23 nt, Artificial Sequence
  Synthetic
ucuacggguuuguuaccuguaua

SEQ ID NO: 238611 - RNA, 24 nt, Artificial Sequence
  Synthetic
aucuacggguuuguuaccuguaua

SEQ ID NO: 238612 - RNA, 18 nt, Artificial Sequence
  Synthetic
uuuuacuuuuucuguaua

SEQ ID NO: 238613 - RNA, 19 nt, Artificial Sequence
  Synthetic
cuuuuacuuuuucuguaua

SEQ ID NO: 238614 - RNA, 20 nt, Artificial Sequence
  Synthetic
acuuuuacuuuuucuguaua

SEQ ID NO: 238615 - RNA, 21 nt, Artificial Sequence
  Synthetic
aacuuuuacuuuuucuguaua

SEQ ID NO: 238616 - RNA, 22 nt, Artificial Sequence
  Synthetic
aaacuuuuacuuuuucuguaua

SEQ ID NO: 238617 - RNA, 23 nt, Artificial Sequence
  Synthetic
caaacuuuuacuuuuucuguaua

SEQ ID NO: 238618 - RNA, 24 nt, Artificial Sequence
  Synthetic
acaaacuuuuacuuuuucuguaua

SEQ ID NO: 238619 - RNA, 18 nt, Artificial Sequence
  Synthetic
cauuauaauuaguguaua

SEQ ID NO: 238620 - RNA, 19 nt, Artificial Sequence
  Synthetic
gcauuauaauuaguguaua

SEQ ID NO: 238621 - RNA, 20 nt, Artificial Sequence
  Synthetic
ugcauuauaauuaguguaua

SEQ ID NO: 238622 - RNA, 21 nt, Artificial Sequence
  Synthetic
augcauuauaauuaguguaua

SEQ ID NO: 238623 - RNA, 22 nt, Artificial Sequence
  Synthetic
aaugcauuauaauuaguguaua

SEQ ID NO: 238624 - RNA, 23 nt, Artificial Sequence
  Synthetic
uaaugcauuauaauuaguguaua

SEQ ID NO: 238625 - RNA, 24 nt, Artificial Sequence
  Synthetic
cuaaugcauuauaauuaguguaua

SEQ ID NO: 238626 - RNA, 18 nt, Artificial Sequence
  Synthetic
ugccuggcacuguguaua

SEQ ID NO: 238627 - RNA, 19 nt, Artificial Sequence
  Synthetic
gugccuggcacuguguaua

SEQ ID NO: 238628 - RNA, 20 nt, Artificial Sequence
  Synthetic
agugccuggcacuguguaua

SEQ ID NO: 238629 - RNA, 21 nt, Artificial Sequence
  Synthetic
cagugccuggcacuguguaua

SEQ ID NO: 238630 - RNA, 22 nt, Artificial Sequence
  Synthetic
acagugccuggcacuguguaua

SEQ ID NO: 238631 - RNA, 23 nt, Artificial Sequence
  Synthetic
cacagugccuggcacuguguaua

SEQ ID NO: 238632 - RNA, 24 nt, Artificial Sequence
  Synthetic
gcacagugccuggcacuguguaua

SEQ ID NO: 238633 - RNA, 18 nt, Artificial Sequence
  Synthetic
uaaaaauaguauuguaua

SEQ ID NO: 238634 - RNA, 19 nt, Artificial Sequence
  Synthetic
uuaaaaauaguauuguaua

SEQ ID NO: 238635 - RNA, 20 nt, Artificial Sequence
  Synthetic
auuaaaaauaguauuguaua

SEQ ID NO: 238636 - RNA, 21 nt, Artificial Sequence
  Synthetic
aauuaaaaauaguauuguaua

SEQ ID NO: 238637 - RNA, 22 nt, Artificial Sequence
  Synthetic
aaauuaaaaauaguauuguaua

SEQ ID NO: 238638 - RNA, 23 nt, Artificial Sequence
  Synthetic
caaauuaaaaauaguauuguaua

SEQ ID NO: 238639 - RNA, 24 nt, Artificial Sequence
  Synthetic
acaaauuaaaaauaguauuguaua

SEQ ID NO: 238640 - RNA, 18 nt, Artificial Sequence
  Synthetic
cacuucauaacuuguaua

SEQ ID NO: 238641 - RNA, 19 nt, Artificial Sequence
  Synthetic
ccacuucauaacuuguaua

SEQ ID NO: 238642 - RNA, 20 nt, Artificial Sequence
  Synthetic
uccacuucauaacuuguaua

SEQ ID NO: 238643 - RNA, 21 nt, Artificial Sequence
  Synthetic
uuccacuucauaacuuguaua

SEQ ID NO: 238644 - RNA, 22 nt, Artificial Sequence
  Synthetic
cuuccacuucauaacuuguaua

SEQ ID NO: 238645 - RNA, 23 nt, Artificial Sequence
  Synthetic
ucuuccacuucauaacuuguaua

SEQ ID NO: 238646 - RNA, 24 nt, Artificial Sequence
  Synthetic
uucuuccacuucauaacuuguaua

SEQ ID NO: 238647 - RNA, 18 nt, Artificial Sequence
  Synthetic
agaugcaaggcuuguaua

SEQ ID NO: 238648 - RNA, 19 nt, Artificial Sequence
  Synthetic
gagaugcaaggcuuguaua

SEQ ID NO: 238649 - RNA, 20 nt, Artificial Sequence
  Synthetic
agagaugcaaggcuuguaua

SEQ ID NO: 238650 - RNA, 21 nt, Artificial Sequence
  Synthetic
aagagaugcaaggcuuguaua

SEQ ID NO: 238651 - RNA, 22 nt, Artificial Sequence
  Synthetic
aaagagaugcaaggcuuguaua

SEQ ID NO: 238652 - RNA, 23 nt, Artificial Sequence
  Synthetic
aaaagagaugcaaggcuuguaua

SEQ ID NO: 238653 - RNA, 24 nt, Artificial Sequence
  Synthetic
uaaaagagaugcaaggcuuguaua

SEQ ID NO: 238654 - RNA, 18 nt, Artificial Sequence
  Synthetic
agcguuggcauuuguaua

SEQ ID NO: 238655 - RNA, 19 nt, Artificial Sequence
  Synthetic
cagcguuggcauuuguaua

SEQ ID NO: 238656 - RNA, 20 nt, Artificial Sequence
  Synthetic
ccagcguuggcauuuguaua

SEQ ID NO: 238657 - RNA, 21 nt, Artificial Sequence
  Synthetic
accagcguuggcauuuguaua

SEQ ID NO: 238658 - RNA, 22 nt, Artificial Sequence
  Synthetic
caccagcguuggcauuuguaua

SEQ ID NO: 238659 - RNA, 23 nt, Artificial Sequence
  Synthetic
acaccagcguuggcauuuguaua

SEQ ID NO: 238660 - RNA, 24 nt, Artificial Sequence
  Synthetic
cacaccagcguuggcauuuguaua

SEQ ID NO: 238661 - RNA, 18 nt, Artificial Sequence
  Synthetic
aguuagugucuuuguaua

SEQ ID NO: 238662 - RNA, 19 nt, Artificial Sequence
  Synthetic
uaguuagugucuuuguaua

SEQ ID NO: 238663 - RNA, 20 nt, Artificial Sequence
  Synthetic
auaguuagugucuuuguaua

SEQ ID NO: 238664 - RNA, 21 nt, Artificial Sequence
  Synthetic
aauaguuagugucuuuguaua

SEQ ID NO: 238665 - RNA, 22 nt, Artificial Sequence
  Synthetic
gaauaguuagugucuuuguaua

SEQ ID NO: 238666 - RNA, 23 nt, Artificial Sequence
  Synthetic
agaauaguuagugucuuuguaua

SEQ ID NO: 238667 - RNA, 24 nt, Artificial Sequence
  Synthetic
uagaauaguuagugucuuuguaua

SEQ ID NO: 238668 - RNA, 18 nt, Artificial Sequence
  Synthetic
gauuaguugguuuguaua

SEQ ID NO: 238669 - RNA, 19 nt, Artificial Sequence
  Synthetic
ggauuaguugguuuguaua

SEQ ID NO: 238670 - RNA, 20 nt, Artificial Sequence
  Synthetic
uggauuaguugguuuguaua

SEQ ID NO: 238671 - RNA, 21 nt, Artificial Sequence
  Synthetic
uuggauuaguugguuuguaua

SEQ ID NO: 238672 - RNA, 22 nt, Artificial Sequence
  Synthetic
uuuggauuaguugguuuguaua

SEQ ID NO: 238673 - RNA, 23 nt, Artificial Sequence
  Synthetic
cuuuggauuaguugguuuguaua

SEQ ID NO: 238674 - RNA, 24 nt, Artificial Sequence
  Synthetic
acuuuggauuaguugguuuguaua

SEQ ID NO: 238675 - RNA, 18 nt, Artificial Sequence
  Synthetic
ucaaaaacaaaaauuaua

SEQ ID NO: 238676 - RNA, 19 nt, Artificial Sequence
  Synthetic
uucaaaaacaaaaauuaua

SEQ ID NO: 238677 - RNA, 20 nt, Artificial Sequence
  Synthetic
uuucaaaaacaaaaauuaua

SEQ ID NO: 238678 - RNA, 21 nt, Artificial Sequence
  Synthetic
auuucaaaaacaaaaauuaua

SEQ ID NO: 238679 - RNA, 22 nt, Artificial Sequence
  Synthetic
uauuucaaaaacaaaaauuaua

SEQ ID NO: 238680 - RNA, 23 nt, Artificial Sequence
  Synthetic
uuauuucaaaaacaaaaauuaua

SEQ ID NO: 238681 - RNA, 24 nt, Artificial Sequence
  Synthetic
uuuauuucaaaaacaaaaauuaua

SEQ ID NO: 238682 - RNA, 18 nt, Artificial Sequence
  Synthetic
uaaaagagacaaauuaua

SEQ ID NO: 238683 - RNA, 19 nt, Artificial Sequence
  Synthetic
uuaaaagagacaaauuaua

SEQ ID NO: 238684 - RNA, 20 nt, Artificial Sequence
  Synthetic
guuaaaagagacaaauuaua

SEQ ID NO: 238685 - RNA, 21 nt, Artificial Sequence
  Synthetic
gguuaaaagagacaaauuaua

SEQ ID NO: 238686 - RNA, 22 nt, Artificial Sequence
  Synthetic
ugguuaaaagagacaaauuaua

SEQ ID NO: 238687 - RNA, 23 nt, Artificial Sequence
  Synthetic
uugguuaaaagagacaaauuaua

SEQ ID NO: 238688 - RNA, 24 nt, Artificial Sequence
  Synthetic
auugguuaaaagagacaaauuaua

SEQ ID NO: 238689 - RNA, 18 nt, Artificial Sequence
  Synthetic
aacagaaaggaaauuaua

SEQ ID NO: 238690 - RNA, 19 nt, Artificial Sequence
  Synthetic
aaacagaaaggaaauuaua

SEQ ID NO: 238691 - RNA, 20 nt, Artificial Sequence
  Synthetic
uaaacagaaaggaaauuaua

SEQ ID NO: 238692 - RNA, 21 nt, Artificial Sequence
  Synthetic
cuaaacagaaaggaaauuaua

SEQ ID NO: 238693 - RNA, 22 nt, Artificial Sequence
  Synthetic
ucuaaacagaaaggaaauuaua

SEQ ID NO: 238694 - RNA, 23 nt, Artificial Sequence
  Synthetic
cucuaaacagaaaggaaauuaua

SEQ ID NO: 238695 - RNA, 24 nt, Artificial Sequence
  Synthetic
ucucuaaacagaaaggaaauuaua

SEQ ID NO: 238696 - RNA, 18 nt, Artificial Sequence
  Synthetic
agaaaaccugaaauuaua

SEQ ID NO: 238697 - RNA, 19 nt, Artificial Sequence
  Synthetic
aagaaaaccugaaauuaua

SEQ ID NO: 238698 - RNA, 20 nt, Artificial Sequence
  Synthetic
gaagaaaaccugaaauuaua

SEQ ID NO: 238699 - RNA, 21 nt, Artificial Sequence
  Synthetic
ugaagaaaaccugaaauuaua

SEQ ID NO: 238700 - RNA, 22 nt, Artificial Sequence
  Synthetic
cugaagaaaaccugaaauuaua

SEQ ID NO: 238701 - RNA, 23 nt, Artificial Sequence
  Synthetic
ccugaagaaaaccugaaauuaua

SEQ ID NO: 238702 - RNA, 24 nt, Artificial Sequence
  Synthetic
uccugaagaaaaccugaaauuaua

SEQ ID NO: 238703 - RNA, 18 nt, Artificial Sequence
  Synthetic
guucugagugaaauuaua

SEQ ID NO: 238704 - RNA, 19 nt, Artificial Sequence
  Synthetic
gguucugagugaaauuaua

SEQ ID NO: 238705 - RNA, 20 nt, Artificial Sequence
  Synthetic
ugguucugagugaaauuaua

SEQ ID NO: 238706 - RNA, 21 nt, Artificial Sequence
  Synthetic
uugguucugagugaaauuaua

SEQ ID NO: 238707 - RNA, 22 nt, Artificial Sequence
  Synthetic
cuugguucugagugaaauuaua

SEQ ID NO: 238708 - RNA, 23 nt, Artificial Sequence
  Synthetic
acuugguucugagugaaauuaua

SEQ ID NO: 238709 - RNA, 24 nt, Artificial Sequence
  Synthetic
aacuugguucugagugaaauuaua

SEQ ID NO: 238710 - RNA, 18 nt, Artificial Sequence
  Synthetic
cuuaaauuauaaauuaua

SEQ ID NO: 238711 - RNA, 19 nt, Artificial Sequence
  Synthetic
acuuaaauuauaaauuaua

SEQ ID NO: 238712 - RNA, 20 nt, Artificial Sequence
  Synthetic
uacuuaaauuauaaauuaua

SEQ ID NO: 238713 - RNA, 21 nt, Artificial Sequence
  Synthetic
uuacuuaaauuauaaauuaua

SEQ ID NO: 238714 - RNA, 22 nt, Artificial Sequence
  Synthetic
cuuacuuaaauuauaaauuaua

SEQ ID NO: 238715 - RNA, 23 nt, Artificial Sequence
  Synthetic
gcuuacuuaaauuauaaauuaua

SEQ ID NO: 238716 - RNA, 24 nt, Artificial Sequence
  Synthetic
ugcuuacuuaaauuauaaauuaua

SEQ ID NO: 238717 - RNA, 18 nt, Artificial Sequence
  Synthetic
aaguuuagcagaauuaua

SEQ ID NO: 238718 - RNA, 19 nt, Artificial Sequence
  Synthetic
aaaguuuagcagaauuaua

SEQ ID NO: 238719 - RNA, 20 nt, Artificial Sequence
  Synthetic
gaaaguuuagcagaauuaua

SEQ ID NO: 238720 - RNA, 21 nt, Artificial Sequence
  Synthetic
agaaaguuuagcagaauuaua

SEQ ID NO: 238721 - RNA, 22 nt, Artificial Sequence
  Synthetic
cagaaaguuuagcagaauuaua

SEQ ID NO: 238722 - RNA, 23 nt, Artificial Sequence
  Synthetic
acagaaaguuuagcagaauuaua

SEQ ID NO: 238723 - RNA, 24 nt, Artificial Sequence
  Synthetic
uacagaaaguuuagcagaauuaua

SEQ ID NO: 238724 - RNA, 18 nt, Artificial Sequence
  Synthetic
auucgucuaauaauuaua

SEQ ID NO: 238725 - RNA, 19 nt, Artificial Sequence
  Synthetic
cauucgucuaauaauuaua

SEQ ID NO: 238726 - RNA, 20 nt, Artificial Sequence
  Synthetic
ucauucgucuaauaauuaua

SEQ ID NO: 238727 - RNA, 21 nt, Artificial Sequence
  Synthetic
aucauucgucuaauaauuaua

SEQ ID NO: 238728 - RNA, 22 nt, Artificial Sequence
  Synthetic
aaucauucgucuaauaauuaua

SEQ ID NO: 238729 - RNA, 23 nt, Artificial Sequence
  Synthetic
aaaucauucgucuaauaauuaua

SEQ ID NO: 238730 - RNA, 24 nt, Artificial Sequence
  Synthetic
caaaucauucgucuaauaauuaua

SEQ ID NO: 238731 - RNA, 18 nt, Artificial Sequence
  Synthetic
caaaauaucaccauuaua

SEQ ID NO: 238732 - RNA, 19 nt, Artificial Sequence
  Synthetic
ccaaaauaucaccauuaua

SEQ ID NO: 238733 - RNA, 20 nt, Artificial Sequence
  Synthetic
gccaaaauaucaccauuaua

SEQ ID NO: 238734 - RNA, 21 nt, Artificial Sequence
  Synthetic
ugccaaaauaucaccauuaua

SEQ ID NO: 238735 - RNA, 22 nt, Artificial Sequence
  Synthetic
augccaaaauaucaccauuaua

SEQ ID NO: 238736 - RNA, 23 nt, Artificial Sequence
  Synthetic
uaugccaaaauaucaccauuaua

SEQ ID NO: 238737 - RNA, 24 nt, Artificial Sequence
  Synthetic
auaugccaaaauaucaccauuaua

SEQ ID NO: 238738 - RNA, 18 nt, Artificial Sequence
  Synthetic
cauuuuuauaucauuaua

SEQ ID NO: 238739 - RNA, 19 nt, Artificial Sequence
  Synthetic
gcauuuuuauaucauuaua

SEQ ID NO: 238740 - RNA, 20 nt, Artificial Sequence
  Synthetic
ggcauuuuuauaucauuaua

SEQ ID NO: 238741 - RNA, 21 nt, Artificial Sequence
  Synthetic
uggcauuuuuauaucauuaua

SEQ ID NO: 238742 - RNA, 22 nt, Artificial Sequence
  Synthetic
auggcauuuuuauaucauuaua

SEQ ID NO: 238743 - RNA, 23 nt, Artificial Sequence
  Synthetic
aauggcauuuuuauaucauuaua

SEQ ID NO: 238744 - RNA, 24 nt, Artificial Sequence
  Synthetic
aaauggcauuuuuauaucauuaua

SEQ ID NO: 238745 - RNA, 18 nt, Artificial Sequence
  Synthetic
gucaauaaccucauuaua

SEQ ID NO: 238746 - RNA, 19 nt, Artificial Sequence
  Synthetic
ggucaauaaccucauuaua

SEQ ID NO: 238747 - RNA, 20 nt, Artificial Sequence
  Synthetic
aggucaauaaccucauuaua

SEQ ID NO: 238748 - RNA, 21 nt, Artificial Sequence
  Synthetic
caggucaauaaccucauuaua

SEQ ID NO: 238749 - RNA, 22 nt, Artificial Sequence
  Synthetic
ucaggucaauaaccucauuaua

SEQ ID NO: 238750 - RNA, 23 nt, Artificial Sequence
  Synthetic
uucaggucaauaaccucauuaua

SEQ ID NO: 238751 - RNA, 24 nt, Artificial Sequence
  Synthetic
guucaggucaauaaccucauuaua

SEQ ID NO: 238752 - RNA, 18 nt, Artificial Sequence
  Synthetic
uagaagcuugucauuaua

SEQ ID NO: 238753 - RNA, 19 nt, Artificial Sequence
  Synthetic
guagaagcuugucauuaua

SEQ ID NO: 238754 - RNA, 20 nt, Artificial Sequence
  Synthetic
aguagaagcuugucauuaua

SEQ ID NO: 238755 - RNA, 21 nt, Artificial Sequence
  Synthetic
gaguagaagcuugucauuaua

SEQ ID NO: 238756 - RNA, 22 nt, Artificial Sequence
  Synthetic
ugaguagaagcuugucauuaua

SEQ ID NO: 238757 - RNA, 23 nt, Artificial Sequence
  Synthetic
cugaguagaagcuugucauuaua

SEQ ID NO: 238758 - RNA, 24 nt, Artificial Sequence
  Synthetic
gcugaguagaagcuugucauuaua

SEQ ID NO: 238759 - RNA, 18 nt, Artificial Sequence
  Synthetic
uggaucuuggagauuaua

SEQ ID NO: 238760 - RNA, 19 nt, Artificial Sequence
  Synthetic
guggaucuuggagauuaua

SEQ ID NO: 238761 - RNA, 20 nt, Artificial Sequence
  Synthetic
uguggaucuuggagauuaua

SEQ ID NO: 238762 - RNA, 21 nt, Artificial Sequence
  Synthetic
uuguggaucuuggagauuaua

SEQ ID NO: 238763 - RNA, 22 nt, Artificial Sequence
  Synthetic
auuguggaucuuggagauuaua

SEQ ID NO: 238764 - RNA, 23 nt, Artificial Sequence
  Synthetic
aauuguggaucuuggagauuaua

SEQ ID NO: 238765 - RNA, 24 nt, Artificial Sequence
  Synthetic
gaauuguggaucuuggagauuaua

SEQ ID NO: 238766 - RNA, 18 nt, Artificial Sequence
  Synthetic
ucacaucauaauauuaua

SEQ ID NO: 238767 - RNA, 19 nt, Artificial Sequence
  Synthetic
aucacaucauaauauuaua

SEQ ID NO: 238768 - RNA, 20 nt, Artificial Sequence
  Synthetic
uaucacaucauaauauuaua

SEQ ID NO: 238769 - RNA, 21 nt, Artificial Sequence
  Synthetic
auaucacaucauaauauuaua

SEQ ID NO: 238770 - RNA, 22 nt, Artificial Sequence
  Synthetic
uauaucacaucauaauauuaua

SEQ ID NO: 238771 - RNA, 23 nt, Artificial Sequence
  Synthetic
guauaucacaucauaauauuaua

SEQ ID NO: 238772 - RNA, 24 nt, Artificial Sequence
  Synthetic
uguauaucacaucauaauauuaua

SEQ ID NO: 238773 - RNA, 18 nt, Artificial Sequence
  Synthetic
gauaacaaacauauuaua

SEQ ID NO: 238774 - RNA, 19 nt, Artificial Sequence
  Synthetic
ugauaacaaacauauuaua

SEQ ID NO: 238775 - RNA, 20 nt, Artificial Sequence
  Synthetic
augauaacaaacauauuaua

SEQ ID NO: 238776 - RNA, 21 nt, Artificial Sequence
  Synthetic
caugauaacaaacauauuaua

SEQ ID NO: 238777 - RNA, 22 nt, Artificial Sequence
  Synthetic
ucaugauaacaaacauauuaua

SEQ ID NO: 238778 - RNA, 23 nt, Artificial Sequence
  Synthetic
uucaugauaacaaacauauuaua

SEQ ID NO: 238779 - RNA, 24 nt, Artificial Sequence
  Synthetic
auucaugauaacaaacauauuaua

SEQ ID NO: 238780 - RNA, 18 nt, Artificial Sequence
  Synthetic
acacccaggcauauuaua

SEQ ID NO: 238781 - RNA, 19 nt, Artificial Sequence
  Synthetic
cacacccaggcauauuaua

SEQ ID NO: 238782 - RNA, 20 nt, Artificial Sequence
  Synthetic
gcacacccaggcauauuaua

SEQ ID NO: 238783 - RNA, 21 nt, Artificial Sequence
  Synthetic
ggcacacccaggcauauuaua

SEQ ID NO: 238784 - RNA, 22 nt, Artificial Sequence
  Synthetic
aggcacacccaggcauauuaua

SEQ ID NO: 238785 - RNA, 23 nt, Artificial Sequence
  Synthetic
gaggcacacccaggcauauuaua

SEQ ID NO: 238786 - RNA, 24 nt, Artificial Sequence
  Synthetic
ggaggcacacccaggcauauuaua

SEQ ID NO: 238787 - RNA, 18 nt, Artificial Sequence
  Synthetic
gaggaaugggcuauuaua

SEQ ID NO: 238788 - RNA, 19 nt, Artificial Sequence
  Synthetic
ugaggaaugggcuauuaua

SEQ ID NO: 238789 - RNA, 20 nt, Artificial Sequence
  Synthetic
cugaggaaugggcuauuaua

SEQ ID NO: 238790 - RNA, 21 nt, Artificial Sequence
  Synthetic
acugaggaaugggcuauuaua

SEQ ID NO: 238791 - RNA, 22 nt, Artificial Sequence
  Synthetic
cacugaggaaugggcuauuaua

SEQ ID NO: 238792 - RNA, 23 nt, Artificial Sequence
  Synthetic
ucacugaggaaugggcuauuaua

SEQ ID NO: 238793 - RNA, 24 nt, Artificial Sequence
  Synthetic
uucacugaggaaugggcuauuaua

SEQ ID NO: 238794 - RNA, 18 nt, Artificial Sequence
  Synthetic
agauauaaaguuauuaua

SEQ ID NO: 238795 - RNA, 19 nt, Artificial Sequence
  Synthetic
uagauauaaaguuauuaua

SEQ ID NO: 238796 - RNA, 20 nt, Artificial Sequence
  Synthetic
cuagauauaaaguuauuaua

SEQ ID NO: 238797 - RNA, 21 nt, Artificial Sequence
  Synthetic
gcuagauauaaaguuauuaua

SEQ ID NO: 238798 - RNA, 22 nt, Artificial Sequence
  Synthetic
ugcuagauauaaaguuauuaua

SEQ ID NO: 238799 - RNA, 23 nt, Artificial Sequence
  Synthetic
augcuagauauaaaguuauuaua

SEQ ID NO: 238800 - RNA, 24 nt, Artificial Sequence
  Synthetic
caugcuagauauaaaguuauuaua

SEQ ID NO: 238801 - RNA, 18 nt, Artificial Sequence
  Synthetic
auccuuagcaaacuuaua

SEQ ID NO: 238802 - RNA, 19 nt, Artificial Sequence
  Synthetic
uauccuuagcaaacuuaua

SEQ ID NO: 238803 - RNA, 20 nt, Artificial Sequence
  Synthetic
uuauccuuagcaaacuuaua

SEQ ID NO: 238804 - RNA, 21 nt, Artificial Sequence
  Synthetic
auuauccuuagcaaacuuaua

SEQ ID NO: 238805 - RNA, 22 nt, Artificial Sequence
  Synthetic
cauuauccuuagcaaacuuaua

SEQ ID NO: 238806 - RNA, 23 nt, Artificial Sequence
  Synthetic
ccauuauccuuagcaaacuuaua

SEQ ID NO: 238807 - RNA, 24 nt, Artificial Sequence
  Synthetic
gccauuauccuuagcaaacuuaua

SEQ ID NO: 238808 - RNA, 18 nt, Artificial Sequence
  Synthetic
guuaaauaaucacuuaua

SEQ ID NO: 238809 - RNA, 19 nt, Artificial Sequence
  Synthetic
uguuaaauaaucacuuaua

SEQ ID NO: 238810 - RNA, 20 nt, Artificial Sequence
  Synthetic
auguuaaauaaucacuuaua

SEQ ID NO: 238811 - RNA, 21 nt, Artificial Sequence
  Synthetic
uauguuaaauaaucacuuaua

SEQ ID NO: 238812 - RNA, 22 nt, Artificial Sequence
  Synthetic
uuauguuaaauaaucacuuaua

SEQ ID NO: 238813 - RNA, 23 nt, Artificial Sequence
  Synthetic
auuauguuaaauaaucacuuaua

SEQ ID NO: 238814 - RNA, 24 nt, Artificial Sequence
  Synthetic
gauuauguuaaauaaucacuuaua

SEQ ID NO: 238815 - RNA, 18 nt, Artificial Sequence
  Synthetic
gccguccauccccuuaua

SEQ ID NO: 238816 - RNA, 19 nt, Artificial Sequence
  Synthetic
ugccguccauccccuuaua

SEQ ID NO: 238817 - RNA, 20 nt, Artificial Sequence
  Synthetic
cugccguccauccccuuaua

SEQ ID NO: 238818 - RNA, 21 nt, Artificial Sequence
  Synthetic
ucugccguccauccccuuaua

SEQ ID NO: 238819 - RNA, 22 nt, Artificial Sequence
  Synthetic
cucugccguccauccccuuaua

SEQ ID NO: 238820 - RNA, 23 nt, Artificial Sequence
  Synthetic
ucucugccguccauccccuuaua

SEQ ID NO: 238821 - RNA, 24 nt, Artificial Sequence
  Synthetic
cucucugccguccauccccuuaua

SEQ ID NO: 238822 - RNA, 18 nt, Artificial Sequence
  Synthetic
ugguuacacuuccuuaua

SEQ ID NO: 238823 - RNA, 19 nt, Artificial Sequence
  Synthetic
uugguuacacuuccuuaua

SEQ ID NO: 238824 - RNA, 20 nt, Artificial Sequence
  Synthetic
guugguuacacuuccuuaua

SEQ ID NO: 238825 - RNA, 21 nt, Artificial Sequence
  Synthetic
aguugguuacacuuccuuaua

SEQ ID NO: 238826 - RNA, 22 nt, Artificial Sequence
  Synthetic
gaguugguuacacuuccuuaua

SEQ ID NO: 238827 - RNA, 23 nt, Artificial Sequence
  Synthetic
ggaguugguuacacuuccuuaua

SEQ ID NO: 238828 - RNA, 24 nt, Artificial Sequence
  Synthetic
aggaguugguuacacuuccuuaua

SEQ ID NO: 238829 - RNA, 18 nt, Artificial Sequence
  Synthetic
ucuucgaaucugcuuaua

SEQ ID NO: 238830 - RNA, 19 nt, Artificial Sequence
  Synthetic
gucuucgaaucugcuuaua

SEQ ID NO: 238831 - RNA, 20 nt, Artificial Sequence
  Synthetic
ugucuucgaaucugcuuaua

SEQ ID NO: 238832 - RNA, 21 nt, Artificial Sequence
  Synthetic
uugucuucgaaucugcuuaua

SEQ ID NO: 238833 - RNA, 22 nt, Artificial Sequence
  Synthetic
cuugucuucgaaucugcuuaua

SEQ ID NO: 238834 - RNA, 23 nt, Artificial Sequence
  Synthetic
ccuugucuucgaaucugcuuaua

SEQ ID NO: 238835 - RNA, 24 nt, Artificial Sequence
  Synthetic
cccuugucuucgaaucugcuuaua

SEQ ID NO: 238836 - RNA, 18 nt, Artificial Sequence
  Synthetic
ucauuuuuucugcuuaua

SEQ ID NO: 238837 - RNA, 19 nt, Artificial Sequence
  Synthetic
aucauuuuuucugcuuaua

SEQ ID NO: 238838 - RNA, 20 nt, Artificial Sequence
  Synthetic
aaucauuuuuucugcuuaua

SEQ ID NO: 238839 - RNA, 21 nt, Artificial Sequence
  Synthetic
aaaucauuuuuucugcuuaua

SEQ ID NO: 238840 - RNA, 22 nt, Artificial Sequence
  Synthetic
aaaaucauuuuuucugcuuaua

SEQ ID NO: 238841 - RNA, 23 nt, Artificial Sequence
  Synthetic
aaaaaucauuuuuucugcuuaua

SEQ ID NO: 238842 - RNA, 24 nt, Artificial Sequence
  Synthetic
gaaaaaucauuuuuucugcuuaua

SEQ ID NO: 238843 - RNA, 18 nt, Artificial Sequence
  Synthetic
ucaccuccgaaucuuaua

SEQ ID NO: 238844 - RNA, 19 nt, Artificial Sequence
  Synthetic
aucaccuccgaaucuuaua

SEQ ID NO: 238845 - RNA, 20 nt, Artificial Sequence
  Synthetic
uaucaccuccgaaucuuaua

SEQ ID NO: 238846 - RNA, 21 nt, Artificial Sequence
  Synthetic
uuaucaccuccgaaucuuaua

SEQ ID NO: 238847 - RNA, 22 nt, Artificial Sequence
  Synthetic
uuuaucaccuccgaaucuuaua

SEQ ID NO: 238848 - RNA, 23 nt, Artificial Sequence
  Synthetic
guuuaucaccuccgaaucuuaua

SEQ ID NO: 238849 - RNA, 24 nt, Artificial Sequence
  Synthetic
uguuuaucaccuccgaaucuuaua

SEQ ID NO: 238850 - RNA, 18 nt, Artificial Sequence
  Synthetic
uuuugugaggaucuuaua

SEQ ID NO: 238851 - RNA, 19 nt, Artificial Sequence
  Synthetic
cuuuugugaggaucuuaua

SEQ ID NO: 238852 - RNA, 20 nt, Artificial Sequence
  Synthetic
gcuuuugugaggaucuuaua

SEQ ID NO: 238853 - RNA, 21 nt, Artificial Sequence
  Synthetic
agcuuuugugaggaucuuaua

SEQ ID NO: 238854 - RNA, 22 nt, Artificial Sequence
  Synthetic
gagcuuuugugaggaucuuaua

SEQ ID NO: 238855 - RNA, 23 nt, Artificial Sequence
  Synthetic
agagcuuuugugaggaucuuaua

SEQ ID NO: 238856 - RNA, 24 nt, Artificial Sequence
  Synthetic
cagagcuuuugugaggaucuuaua

SEQ ID NO: 238857 - RNA, 18 nt, Artificial Sequence
  Synthetic
uaguuucauuaucuuaua

SEQ ID NO: 238858 - RNA, 19 nt, Artificial Sequence
  Synthetic
guaguuucauuaucuuaua

SEQ ID NO: 238859 - RNA, 20 nt, Artificial Sequence
  Synthetic
aguaguuucauuaucuuaua

SEQ ID NO: 238860 - RNA, 21 nt, Artificial Sequence
  Synthetic
caguaguuucauuaucuuaua

SEQ ID NO: 238861 - RNA, 22 nt, Artificial Sequence
  Synthetic
acaguaguuucauuaucuuaua

SEQ ID NO: 238862 - RNA, 23 nt, Artificial Sequence
  Synthetic
uacaguaguuucauuaucuuaua

SEQ ID NO: 238863 - RNA, 24 nt, Artificial Sequence
  Synthetic
uuacaguaguuucauuaucuuaua

SEQ ID NO: 238864 - RNA, 18 nt, Artificial Sequence
  Synthetic
auaucaauaugucuuaua

SEQ ID NO: 238865 - RNA, 19 nt, Artificial Sequence
  Synthetic
aauaucaauaugucuuaua

SEQ ID NO: 238866 - RNA, 20 nt, Artificial Sequence
  Synthetic
aaauaucaauaugucuuaua

SEQ ID NO: 238867 - RNA, 21 nt, Artificial Sequence
  Synthetic
uaaauaucaauaugucuuaua

SEQ ID NO: 238868 - RNA, 22 nt, Artificial Sequence
  Synthetic
uuaaauaucaauaugucuuaua

SEQ ID NO: 238869 - RNA, 23 nt, Artificial Sequence
  Synthetic
uuuaaauaucaauaugucuuaua

SEQ ID NO: 238870 - RNA, 24 nt, Artificial Sequence
  Synthetic
uuuuaaauaucaauaugucuuaua

SEQ ID NO: 238871 - RNA, 18 nt, Artificial Sequence
  Synthetic
ugacagcaugcaguuaua

SEQ ID NO: 238872 - RNA, 19 nt, Artificial Sequence
  Synthetic
uugacagcaugcaguuaua

SEQ ID NO: 238873 - RNA, 20 nt, Artificial Sequence
  Synthetic
cuugacagcaugcaguuaua

SEQ ID NO: 238874 - RNA, 21 nt, Artificial Sequence
  Synthetic
acuugacagcaugcaguuaua

SEQ ID NO: 238875 - RNA, 22 nt, Artificial Sequence
  Synthetic
uacuugacagcaugcaguuaua

SEQ ID NO: 238876 - RNA, 23 nt, Artificial Sequence
  Synthetic
guacuugacagcaugcaguuaua

SEQ ID NO: 238877 - RNA, 24 nt, Artificial Sequence
  Synthetic
cguacuugacagcaugcaguuaua

SEQ ID NO: 238878 - RNA, 18 nt, Artificial Sequence
  Synthetic
aaauaauaugugguuaua

SEQ ID NO: 238879 - RNA, 19 nt, Artificial Sequence
  Synthetic
gaaauaauaugugguuaua

SEQ ID NO: 238880 - RNA, 20 nt, Artificial Sequence
  Synthetic
ggaaauaauaugugguuaua

SEQ ID NO: 238881 - RNA, 21 nt, Artificial Sequence
  Synthetic
cggaaauaauaugugguuaua

SEQ ID NO: 238882 - RNA, 22 nt, Artificial Sequence
  Synthetic
gcggaaauaauaugugguuaua

SEQ ID NO: 238883 - RNA, 23 nt, Artificial Sequence
  Synthetic
ugcggaaauaauaugugguuaua

SEQ ID NO: 238884 - RNA, 24 nt, Artificial Sequence
  Synthetic
uugcggaaauaauaugugguuaua

SEQ ID NO: 238885 - RNA, 18 nt, Artificial Sequence
  Synthetic
uuguaauaaaauguuaua

SEQ ID NO: 238886 - RNA, 19 nt, Artificial Sequence
  Synthetic
auuguaauaaaauguuaua

SEQ ID NO: 238887 - RNA, 20 nt, Artificial Sequence
  Synthetic
aauuguaauaaaauguuaua

SEQ ID NO: 238888 - RNA, 21 nt, Artificial Sequence
  Synthetic
aaauuguaauaaaauguuaua

SEQ ID NO: 238889 - RNA, 22 nt, Artificial Sequence
  Synthetic
aaaauuguaauaaaauguuaua

SEQ ID NO: 238890 - RNA, 23 nt, Artificial Sequence
  Synthetic
caaaauuguaauaaaauguuaua

SEQ ID NO: 238891 - RNA, 24 nt, Artificial Sequence
  Synthetic
gcaaaauuguaauaaaauguuaua

SEQ ID NO: 238892 - RNA, 18 nt, Artificial Sequence
  Synthetic
agcuaaacuacuguuaua

SEQ ID NO: 238893 - RNA, 19 nt, Artificial Sequence
  Synthetic
uagcuaaacuacuguuaua

SEQ ID NO: 238894 - RNA, 20 nt, Artificial Sequence
  Synthetic
guagcuaaacuacuguuaua

SEQ ID NO: 238895 - RNA, 21 nt, Artificial Sequence
  Synthetic
aguagcuaaacuacuguuaua

SEQ ID NO: 238896 - RNA, 22 nt, Artificial Sequence
  Synthetic
aaguagcuaaacuacuguuaua

SEQ ID NO: 238897 - RNA, 23 nt, Artificial Sequence
  Synthetic
aaaguagcuaaacuacuguuaua

SEQ ID NO: 238898 - RNA, 24 nt, Artificial Sequence
  Synthetic
uaaaguagcuaaacuacuguuaua

SEQ ID NO: 238899 - RNA, 18 nt, Artificial Sequence
  Synthetic
acacuuccucuuguuaua

SEQ ID NO: 238900 - RNA, 19 nt, Artificial Sequence
  Synthetic
gacacuuccucuuguuaua

SEQ ID NO: 238901 - RNA, 20 nt, Artificial Sequence
  Synthetic
ugacacuuccucuuguuaua

SEQ ID NO: 238902 - RNA, 21 nt, Artificial Sequence
  Synthetic
augacacuuccucuuguuaua

SEQ ID NO: 238903 - RNA, 22 nt, Artificial Sequence
  Synthetic
gaugacacuuccucuuguuaua

SEQ ID NO: 238904 - RNA, 23 nt, Artificial Sequence
  Synthetic
ugaugacacuuccucuuguuaua

SEQ ID NO: 238905 - RNA, 24 nt, Artificial Sequence
  Synthetic
cugaugacacuuccucuuguuaua

SEQ ID NO: 238906 - RNA, 18 nt, Artificial Sequence
  Synthetic
gcauuaugggaauuuaua

SEQ ID NO: 238907 - RNA, 19 nt, Artificial Sequence
  Synthetic
ugcauuaugggaauuuaua

SEQ ID NO: 238908 - RNA, 20 nt, Artificial Sequence
  Synthetic
gugcauuaugggaauuuaua

SEQ ID NO: 238909 - RNA, 21 nt, Artificial Sequence
  Synthetic
ugugcauuaugggaauuuaua

SEQ ID NO: 238910 - RNA, 22 nt, Artificial Sequence
  Synthetic
gugugcauuaugggaauuuaua

SEQ ID NO: 238911 - RNA, 23 nt, Artificial Sequence
  Synthetic
agugugcauuaugggaauuuaua

SEQ ID NO: 238912 - RNA, 24 nt, Artificial Sequence
  Synthetic
gagugugcauuaugggaauuuaua

SEQ ID NO: 238913 - RNA, 18 nt, Artificial Sequence
  Synthetic
aagacugaauaauuuaua

SEQ ID NO: 238914 - RNA, 19 nt, Artificial Sequence
  Synthetic
caagacugaauaauuuaua

SEQ ID NO: 238915 - RNA, 20 nt, Artificial Sequence
  Synthetic
ccaagacugaauaauuuaua

SEQ ID NO: 238916 - RNA, 21 nt, Artificial Sequence
  Synthetic
cccaagacugaauaauuuaua

SEQ ID NO: 238917 - RNA, 22 nt, Artificial Sequence
  Synthetic
gcccaagacugaauaauuuaua

SEQ ID NO: 238918 - RNA, 23 nt, Artificial Sequence
  Synthetic
ugcccaagacugaauaauuuaua

SEQ ID NO: 238919 - RNA, 24 nt, Artificial Sequence
  Synthetic
cugcccaagacugaauaauuuaua

SEQ ID NO: 238920 - RNA, 18 nt, Artificial Sequence
  Synthetic
uaaacgagauaauuuaua

SEQ ID NO: 238921 - RNA, 19 nt, Artificial Sequence
  Synthetic
uuaaacgagauaauuuaua

SEQ ID NO: 238922 - RNA, 20 nt, Artificial Sequence
  Synthetic
uuuaaacgagauaauuuaua

SEQ ID NO: 238923 - RNA, 21 nt, Artificial Sequence
  Synthetic
guuuaaacgagauaauuuaua

SEQ ID NO: 238924 - RNA, 22 nt, Artificial Sequence
  Synthetic
uguuuaaacgagauaauuuaua

SEQ ID NO: 238925 - RNA, 23 nt, Artificial Sequence
  Synthetic
cuguuuaaacgagauaauuuaua

SEQ ID NO: 238926 - RNA, 24 nt, Artificial Sequence
  Synthetic
acuguuuaaacgagauaauuuaua

SEQ ID NO: 238927 - RNA, 18 nt, Artificial Sequence
  Synthetic
gagacuggauaauuuaua

SEQ ID NO: 238928 - RNA, 19 nt, Artificial Sequence
  Synthetic
cgagacuggauaauuuaua

SEQ ID NO: 238929 - RNA, 20 nt, Artificial Sequence
  Synthetic
ccgagacuggauaauuuaua

SEQ ID NO: 238930 - RNA, 21 nt, Artificial Sequence
  Synthetic
cccgagacuggauaauuuaua

SEQ ID NO: 238931 - RNA, 22 nt, Artificial Sequence
  Synthetic
acccgagacuggauaauuuaua

SEQ ID NO: 238932 - RNA, 23 nt, Artificial Sequence
  Synthetic
uacccgagacuggauaauuuaua

SEQ ID NO: 238933 - RNA, 24 nt, Artificial Sequence
  Synthetic
auacccgagacuggauaauuuaua

SEQ ID NO: 238934 - RNA, 18 nt, Artificial Sequence
  Synthetic
cagacuggguaauuuaua

SEQ ID NO: 238935 - RNA, 19 nt, Artificial Sequence
  Synthetic
acagacuggguaauuuaua

SEQ ID NO: 238936 - RNA, 20 nt, Artificial Sequence
  Synthetic
cacagacuggguaauuuaua

SEQ ID NO: 238937 - RNA, 21 nt, Artificial Sequence
  Synthetic
ccacagacuggguaauuuaua

SEQ ID NO: 238938 - RNA, 22 nt, Artificial Sequence
  Synthetic
accacagacuggguaauuuaua

SEQ ID NO: 238939 - RNA, 23 nt, Artificial Sequence
  Synthetic
uaccacagacuggguaauuuaua

SEQ ID NO: 238940 - RNA, 24 nt, Artificial Sequence
  Synthetic
auaccacagacuggguaauuuaua

SEQ ID NO: 238941 - RNA, 18 nt, Artificial Sequence
  Synthetic
gagacuggguaauuuaua

SEQ ID NO: 238942 - RNA, 19 nt, Artificial Sequence
  Synthetic
ugagacuggguaauuuaua

SEQ ID NO: 238943 - RNA, 20 nt, Artificial Sequence
  Synthetic
cugagacuggguaauuuaua

SEQ ID NO: 238944 - RNA, 21 nt, Artificial Sequence
  Synthetic
ccugagacuggguaauuuaua

SEQ ID NO: 238945 - RNA, 22 nt, Artificial Sequence
  Synthetic
accugagacuggguaauuuaua

SEQ ID NO: 238946 - RNA, 23 nt, Artificial Sequence
  Synthetic
uaccugagacuggguaauuuaua

SEQ ID NO: 238947 - RNA, 24 nt, Artificial Sequence
  Synthetic
auaccugagacuggguaauuuaua

SEQ ID NO: 238948 - RNA, 24 nt, Artificial Sequence
  Synthetic
cuaccugagacuggguaauuuaua

SEQ ID NO: 238949 - RNA, 18 nt, Artificial Sequence
  Synthetic
gagauuggguaauuuaua

SEQ ID NO: 238950 - RNA, 19 nt, Artificial Sequence
  Synthetic
cgagauuggguaauuuaua

SEQ ID NO: 238951 - RNA, 20 nt, Artificial Sequence
  Synthetic
ccgagauuggguaauuuaua

SEQ ID NO: 238952 - RNA, 21 nt, Artificial Sequence
  Synthetic
cccgagauuggguaauuuaua

SEQ ID NO: 238953 - RNA, 22 nt, Artificial Sequence
  Synthetic
gcccgagauuggguaauuuaua

SEQ ID NO: 238954 - RNA, 23 nt, Artificial Sequence
  Synthetic
ugcccgagauuggguaauuuaua

SEQ ID NO: 238955 - RNA, 24 nt, Artificial Sequence
  Synthetic
cugcccgagauuggguaauuuaua

SEQ ID NO: 238956 - RNA, 18 nt, Artificial Sequence
  Synthetic
gagacugggucauuuaua

SEQ ID NO: 238957 - RNA, 19 nt, Artificial Sequence
  Synthetic
ugagacugggucauuuaua

SEQ ID NO: 238958 - RNA, 20 nt, Artificial Sequence
  Synthetic
augagacugggucauuuaua

SEQ ID NO: 238959 - RNA, 21 nt, Artificial Sequence
  Synthetic
caugagacugggucauuuaua

SEQ ID NO: 238960 - RNA, 22 nt, Artificial Sequence
  Synthetic
acaugagacugggucauuuaua

SEQ ID NO: 238961 - RNA, 23 nt, Artificial Sequence
  Synthetic
uacaugagacugggucauuuaua

SEQ ID NO: 238962 - RNA, 24 nt, Artificial Sequence
  Synthetic
auacaugagacugggucauuuaua

SEQ ID NO: 238963 - RNA, 18 nt, Artificial Sequence
  Synthetic
cuaaucaaaagauuuaua

SEQ ID NO: 238964 - RNA, 19 nt, Artificial Sequence
  Synthetic
ccuaaucaaaagauuuaua

SEQ ID NO: 238965 - RNA, 20 nt, Artificial Sequence
  Synthetic
accuaaucaaaagauuuaua

SEQ ID NO: 238966 - RNA, 21 nt, Artificial Sequence
  Synthetic
aaccuaaucaaaagauuuaua

SEQ ID NO: 238967 - RNA, 22 nt, Artificial Sequence
  Synthetic
uaaccuaaucaaaagauuuaua

SEQ ID NO: 238968 - RNA, 23 nt, Artificial Sequence
  Synthetic
cuaaccuaaucaaaagauuuaua

SEQ ID NO: 238969 - RNA, 24 nt, Artificial Sequence
  Synthetic
ucuaaccuaaucaaaagauuuaua

SEQ ID NO: 238970 - RNA, 18 nt, Artificial Sequence
  Synthetic
caacuucugugauuuaua

SEQ ID NO: 238971 - RNA, 19 nt, Artificial Sequence
  Synthetic
gcaacuucugugauuuaua

SEQ ID NO: 238972 - RNA, 20 nt, Artificial Sequence
  Synthetic
agcaacuucugugauuuaua

SEQ ID NO: 238973 - RNA, 21 nt, Artificial Sequence
  Synthetic
aagcaacuucugugauuuaua

SEQ ID NO: 238974 - RNA, 22 nt, Artificial Sequence
  Synthetic
aaagcaacuucugugauuuaua

SEQ ID NO: 238975 - RNA, 23 nt, Artificial Sequence
  Synthetic
aaaagcaacuucugugauuuaua

SEQ ID NO: 238976 - RNA, 24 nt, Artificial Sequence
  Synthetic
caaaagcaacuucugugauuuaua

SEQ ID NO: 238977 - RNA, 18 nt, Artificial Sequence
  Synthetic
ccauucaauauauuuaua

SEQ ID NO: 238978 - RNA, 19 nt, Artificial Sequence
  Synthetic
uccauucaauauauuuaua

SEQ ID NO: 238979 - RNA, 20 nt, Artificial Sequence
  Synthetic
uuccauucaauauauuuaua

SEQ ID NO: 238980 - RNA, 21 nt, Artificial Sequence
  Synthetic
auuccauucaauauauuuaua

SEQ ID NO: 238981 - RNA, 22 nt, Artificial Sequence
  Synthetic
aauuccauucaauauauuuaua

SEQ ID NO: 238982 - RNA, 23 nt, Artificial Sequence
  Synthetic
uaauuccauucaauauauuuaua

SEQ ID NO: 238983 - RNA, 24 nt, Artificial Sequence
  Synthetic
uuaauuccauucaauauauuuaua

SEQ ID NO: 238984 - RNA, 18 nt, Artificial Sequence
  Synthetic
guauuguugcuauuuaua

SEQ ID NO: 238985 - RNA, 19 nt, Artificial Sequence
  Synthetic
aguauuguugcuauuuaua

SEQ ID NO: 238986 - RNA, 20 nt, Artificial Sequence
  Synthetic
aaguauuguugcuauuuaua

SEQ ID NO: 238987 - RNA, 21 nt, Artificial Sequence
  Synthetic
gaaguauuguugcuauuuaua

SEQ ID NO: 238988 - RNA, 22 nt, Artificial Sequence
  Synthetic
agaaguauuguugcuauuuaua

SEQ ID NO: 238989 - RNA, 23 nt, Artificial Sequence
  Synthetic
gagaaguauuguugcuauuuaua

SEQ ID NO: 238990 - RNA, 24 nt, Artificial Sequence
  Synthetic
ugagaaguauuguugcuauuuaua

SEQ ID NO: 238991 - RNA, 18 nt, Artificial Sequence
  Synthetic
cuggccuauuuauuuaua

SEQ ID NO: 238992 - RNA, 19 nt, Artificial Sequence
  Synthetic
acuggccuauuuauuuaua

SEQ ID NO: 238993 - RNA, 20 nt, Artificial Sequence
  Synthetic
gacuggccuauuuauuuaua

SEQ ID NO: 238994 - RNA, 21 nt, Artificial Sequence
  Synthetic
agacuggccuauuuauuuaua

SEQ ID NO: 238995 - RNA, 22 nt, Artificial Sequence
  Synthetic
aagacuggccuauuuauuuaua

SEQ ID NO: 238996 - RNA, 23 nt, Artificial Sequence
  Synthetic
uaagacuggccuauuuauuuaua

SEQ ID NO: 238997 - RNA, 24 nt, Artificial Sequence
  Synthetic
auaagacuggccuauuuauuuaua

SEQ ID NO: 238998 - RNA, 18 nt, Artificial Sequence
  Synthetic
aaguaucuuugcuuuaua

SEQ ID NO: 238999 - RNA, 19 nt, Artificial Sequence
  Synthetic
aaaguaucuuugcuuuaua

SEQ ID NO: 239000 - RNA, 20 nt, Artificial Sequence
  Synthetic
aaaaguaucuuugcuuuaua

SEQ ID NO: 239001 - RNA, 21 nt, Artificial Sequence
  Synthetic
gaaaaguaucuuugcuuuaua

SEQ ID NO: 239002 - RNA, 22 nt, Artificial Sequence
  Synthetic
ugaaaaguaucuuugcuuuaua

SEQ ID NO: 239003 - RNA, 23 nt, Artificial Sequence
  Synthetic
cugaaaaguaucuuugcuuuaua

SEQ ID NO: 239004 - RNA, 24 nt, Artificial Sequence
  Synthetic
gcugaaaaguaucuuugcuuuaua

SEQ ID NO: 239005 - RNA, 18 nt, Artificial Sequence
  Synthetic
uucuaauuuaucuuuaua

SEQ ID NO: 239006 - RNA, 19 nt, Artificial Sequence
  Synthetic
auucuaauuuaucuuuaua

SEQ ID NO: 239007 - RNA, 20 nt, Artificial Sequence
  Synthetic
uauucuaauuuaucuuuaua

SEQ ID NO: 239008 - RNA, 21 nt, Artificial Sequence
  Synthetic
guauucuaauuuaucuuuaua

SEQ ID NO: 239009 - RNA, 22 nt, Artificial Sequence
  Synthetic
gguauucuaauuuaucuuuaua

SEQ ID NO: 239010 - RNA, 23 nt, Artificial Sequence
  Synthetic
agguauucuaauuuaucuuuaua

SEQ ID NO: 239011 - RNA, 24 nt, Artificial Sequence
  Synthetic
cagguauucuaauuuaucuuuaua

SEQ ID NO: 239012 - RNA, 18 nt, Artificial Sequence
  Synthetic
uguaauuuaaaguuuaua

SEQ ID NO: 239013 - RNA, 19 nt, Artificial Sequence
  Synthetic
auguaauuuaaaguuuaua

SEQ ID NO: 239014 - RNA, 20 nt, Artificial Sequence
  Synthetic
gauguaauuuaaaguuuaua

SEQ ID NO: 239015 - RNA, 21 nt, Artificial Sequence
  Synthetic
ugauguaauuuaaaguuuaua

SEQ ID NO: 239016 - RNA, 22 nt, Artificial Sequence
  Synthetic
augauguaauuuaaaguuuaua

SEQ ID NO: 239017 - RNA, 23 nt, Artificial Sequence
  Synthetic
aaugauguaauuuaaaguuuaua

SEQ ID NO: 239018 - RNA, 24 nt, Artificial Sequence
  Synthetic
caaugauguaauuuaaaguuuaua

SEQ ID NO: 239019 - RNA, 18 nt, Artificial Sequence
  Synthetic
aaguacauauaguuuaua

SEQ ID NO: 239020 - RNA, 19 nt, Artificial Sequence
  Synthetic
caaguacauauaguuuaua

SEQ ID NO: 239021 - RNA, 20 nt, Artificial Sequence
  Synthetic
acaaguacauauaguuuaua

SEQ ID NO: 239022 - RNA, 21 nt, Artificial Sequence
  Synthetic
cacaaguacauauaguuuaua

SEQ ID NO: 239023 - RNA, 22 nt, Artificial Sequence
  Synthetic
ucacaaguacauauaguuuaua

SEQ ID NO: 239024 - RNA, 23 nt, Artificial Sequence
  Synthetic
aucacaaguacauauaguuuaua

SEQ ID NO: 239025 - RNA, 24 nt, Artificial Sequence
  Synthetic
uaucacaaguacauauaguuuaua

SEQ ID NO: 239026 - RNA, 18 nt, Artificial Sequence
  Synthetic
gaauagaacaauuuuaua

SEQ ID NO: 239027 - RNA, 19 nt, Artificial Sequence
  Synthetic
agaauagaacaauuuuaua

SEQ ID NO: 239028 - RNA, 20 nt, Artificial Sequence
  Synthetic
cagaauagaacaauuuuaua

SEQ ID NO: 239029 - RNA, 21 nt, Artificial Sequence
  Synthetic
acagaauagaacaauuuuaua

SEQ ID NO: 239030 - RNA, 22 nt, Artificial Sequence
  Synthetic
gacagaauagaacaauuuuaua

SEQ ID NO: 239031 - RNA, 23 nt, Artificial Sequence
  Synthetic
ggacagaauagaacaauuuuaua

SEQ ID NO: 239032 - RNA, 24 nt, Artificial Sequence
  Synthetic
uggacagaauagaacaauuuuaua

SEQ ID NO: 239033 - RNA, 18 nt, Artificial Sequence
  Synthetic
aguaauaacaauuuuaua

SEQ ID NO: 239034 - RNA, 19 nt, Artificial Sequence
  Synthetic
aaguaauaacaauuuuaua

SEQ ID NO: 239035 - RNA, 20 nt, Artificial Sequence
  Synthetic
caaguaauaacaauuuuaua

SEQ ID NO: 239036 - RNA, 21 nt, Artificial Sequence
  Synthetic
acaaguaauaacaauuuuaua

SEQ ID NO: 239037 - RNA, 22 nt, Artificial Sequence
  Synthetic
cacaaguaauaacaauuuuaua

SEQ ID NO: 239038 - RNA, 23 nt, Artificial Sequence
  Synthetic
ccacaaguaauaacaauuuuaua

SEQ ID NO: 239039 - RNA, 24 nt, Artificial Sequence
  Synthetic
gccacaaguaauaacaauuuuaua

SEQ ID NO: 239040 - RNA, 18 nt, Artificial Sequence
  Synthetic
acuaggaggaauuuuaua

SEQ ID NO: 239041 - RNA, 19 nt, Artificial Sequence
  Synthetic
aacuaggaggaauuuuaua

SEQ ID NO: 239042 - RNA, 20 nt, Artificial Sequence
  Synthetic
aaacuaggaggaauuuuaua

SEQ ID NO: 239043 - RNA, 21 nt, Artificial Sequence
  Synthetic
gaaacuaggaggaauuuuaua

SEQ ID NO: 239044 - RNA, 22 nt, Artificial Sequence
  Synthetic
agaaacuaggaggaauuuuaua

SEQ ID NO: 239045 - RNA, 23 nt, Artificial Sequence
  Synthetic
cagaaacuaggaggaauuuuaua

SEQ ID NO: 239046 - RNA, 24 nt, Artificial Sequence
  Synthetic
gcagaaacuaggaggaauuuuaua

SEQ ID NO: 239047 - RNA, 18 nt, Artificial Sequence
  Synthetic
aauuucguuaauuuuaua

SEQ ID NO: 239048 - RNA, 19 nt, Artificial Sequence
  Synthetic
gaauuucguuaauuuuaua

SEQ ID NO: 239049 - RNA, 20 nt, Artificial Sequence
  Synthetic
ugaauuucguuaauuuuaua

SEQ ID NO: 239050 - RNA, 21 nt, Artificial Sequence
  Synthetic
uugaauuucguuaauuuuaua

SEQ ID NO: 239051 - RNA, 22 nt, Artificial Sequence
  Synthetic
guugaauuucguuaauuuuaua

SEQ ID NO: 239052 - RNA, 23 nt, Artificial Sequence
  Synthetic
gguugaauuucguuaauuuuaua

SEQ ID NO: 239053 - RNA, 24 nt, Artificial Sequence
  Synthetic
ugguugaauuucguuaauuuuaua

SEQ ID NO: 239054 - RNA, 18 nt, Artificial Sequence
  Synthetic
aaaugcucacauuuuaua

SEQ ID NO: 239055 - RNA, 19 nt, Artificial Sequence
  Synthetic
uaaaugcucacauuuuaua

SEQ ID NO: 239056 - RNA, 20 nt, Artificial Sequence
  Synthetic
uuaaaugcucacauuuuaua

SEQ ID NO: 239057 - RNA, 21 nt, Artificial Sequence
  Synthetic
auuaaaugcucacauuuuaua

SEQ ID NO: 239058 - RNA, 22 nt, Artificial Sequence
  Synthetic
aauuaaaugcucacauuuuaua

SEQ ID NO: 239059 - RNA, 23 nt, Artificial Sequence
  Synthetic
caauuaaaugcucacauuuuaua

SEQ ID NO: 239060 - RNA, 24 nt, Artificial Sequence
  Synthetic
ucaauuaaaugcucacauuuuaua

SEQ ID NO: 239061 - RNA, 18 nt, Artificial Sequence
  Synthetic
agcacaacagauuuuaua

SEQ ID NO: 239062 - RNA, 19 nt, Artificial Sequence
  Synthetic
gagcacaacagauuuuaua

SEQ ID NO: 239063 - RNA, 20 nt, Artificial Sequence
  Synthetic
agagcacaacagauuuuaua

SEQ ID NO: 239064 - RNA, 21 nt, Artificial Sequence
  Synthetic
cagagcacaacagauuuuaua

SEQ ID NO: 239065 - RNA, 22 nt, Artificial Sequence
  Synthetic
acagagcacaacagauuuuaua

SEQ ID NO: 239066 - RNA, 23 nt, Artificial Sequence
  Synthetic
uacagagcacaacagauuuuaua

SEQ ID NO: 239067 - RNA, 24 nt, Artificial Sequence
  Synthetic
guacagagcacaacagauuuuaua

SEQ ID NO: 239068 - RNA, 18 nt, Artificial Sequence
  Synthetic
gcuauuuucuauuuuaua

SEQ ID NO: 239069 - RNA, 19 nt, Artificial Sequence
  Synthetic
agcuauuuucuauuuuaua

SEQ ID NO: 239070 - RNA, 20 nt, Artificial Sequence
  Synthetic
aagcuauuuucuauuuuaua

SEQ ID NO: 239071 - RNA, 21 nt, Artificial Sequence
  Synthetic
aaagcuauuuucuauuuuaua

SEQ ID NO: 239072 - RNA, 22 nt, Artificial Sequence
  Synthetic
caaagcuauuuucuauuuuaua

SEQ ID NO: 239073 - RNA, 23 nt, Artificial Sequence
  Synthetic
acaaagcuauuuucuauuuuaua

SEQ ID NO: 239074 - RNA, 24 nt, Artificial Sequence
  Synthetic
uacaaagcuauuuucuauuuuaua

SEQ ID NO: 239075 - RNA, 18 nt, Artificial Sequence
  Synthetic
cugcuucauuauuuuaua

SEQ ID NO: 239076 - RNA, 19 nt, Artificial Sequence
  Synthetic
ccugcuucauuauuuuaua

SEQ ID NO: 239077 - RNA, 20 nt, Artificial Sequence
  Synthetic
cccugcuucauuauuuuaua

SEQ ID NO: 239078 - RNA, 21 nt, Artificial Sequence
  Synthetic
gcccugcuucauuauuuuaua

SEQ ID NO: 239079 - RNA, 22 nt, Artificial Sequence
  Synthetic
ugcccugcuucauuauuuuaua

SEQ ID NO: 239080 - RNA, 23 nt, Artificial Sequence
  Synthetic
uugcccugcuucauuauuuuaua

SEQ ID NO: 239081 - RNA, 24 nt, Artificial Sequence
  Synthetic
uuugcccugcuucauuauuuuaua

SEQ ID NO: 239082 - RNA, 18 nt, Artificial Sequence
  Synthetic
aguaagucuuauuuuaua

SEQ ID NO: 239083 - RNA, 19 nt, Artificial Sequence
  Synthetic
uaguaagucuuauuuuaua

SEQ ID NO: 239084 - RNA, 20 nt, Artificial Sequence
  Synthetic
uuaguaagucuuauuuuaua

SEQ ID NO: 239085 - RNA, 21 nt, Artificial Sequence
  Synthetic
auuaguaagucuuauuuuaua

SEQ ID NO: 239086 - RNA, 22 nt, Artificial Sequence
  Synthetic
cauuaguaagucuuauuuuaua

SEQ ID NO: 239087 - RNA, 23 nt, Artificial Sequence
  Synthetic
ccauuaguaagucuuauuuuaua

SEQ ID NO: 239088 - RNA, 24 nt, Artificial Sequence
  Synthetic
accauuaguaagucuuauuuuaua

SEQ ID NO: 239089 - RNA, 18 nt, Artificial Sequence
  Synthetic
auguuacuuuauuuuaua

SEQ ID NO: 239090 - RNA, 19 nt, Artificial Sequence
  Synthetic
cauguuacuuuauuuuaua

SEQ ID NO: 239091 - RNA, 20 nt, Artificial Sequence
  Synthetic
acauguuacuuuauuuuaua

SEQ ID NO: 239092 - RNA, 21 nt, Artificial Sequence
  Synthetic
uacauguuacuuuauuuuaua

SEQ ID NO: 239093 - RNA, 22 nt, Artificial Sequence
  Synthetic
guacauguuacuuuauuuuaua

SEQ ID NO: 239094 - RNA, 23 nt, Artificial Sequence
  Synthetic
uguacauguuacuuuauuuuaua

SEQ ID NO: 239095 - RNA, 24 nt, Artificial Sequence
  Synthetic
auguacauguuacuuuauuuuaua

SEQ ID NO: 239096 - RNA, 18 nt, Artificial Sequence
  Synthetic
ugaacucccacuuuuaua

SEQ ID NO: 239097 - RNA, 19 nt, Artificial Sequence
  Synthetic
cugaacucccacuuuuaua

SEQ ID NO: 239098 - RNA, 20 nt, Artificial Sequence
  Synthetic
gcugaacucccacuuuuaua

SEQ ID NO: 239099 - RNA, 21 nt, Artificial Sequence
  Synthetic
ggcugaacucccacuuuuaua

SEQ ID NO: 239100 - RNA, 22 nt, Artificial Sequence
  Synthetic
gggcugaacucccacuuuuaua

SEQ ID NO: 239101 - RNA, 23 nt, Artificial Sequence
  Synthetic
ggggcugaacucccacuuuuaua

SEQ ID NO: 239102 - RNA, 24 nt, Artificial Sequence
  Synthetic
gggggcugaacucccacuuuuaua

SEQ ID NO: 239103 - RNA, 18 nt, Artificial Sequence
  Synthetic
uauaucauuaguuuuaua

SEQ ID NO: 239104 - RNA, 19 nt, Artificial Sequence
  Synthetic
auauaucauuaguuuuaua

SEQ ID NO: 239105 - RNA, 20 nt, Artificial Sequence
  Synthetic
gauauaucauuaguuuuaua

SEQ ID NO: 239106 - RNA, 21 nt, Artificial Sequence
  Synthetic
ggauauaucauuaguuuuaua

SEQ ID NO: 239107 - RNA, 22 nt, Artificial Sequence
  Synthetic
gggauauaucauuaguuuuaua

SEQ ID NO: 239108 - RNA, 23 nt, Artificial Sequence
  Synthetic
agggauauaucauuaguuuuaua

SEQ ID NO: 239109 - RNA, 24 nt, Artificial Sequence
  Synthetic
uagggauauaucauuaguuuuaua

SEQ ID NO: 239110 - RNA, 18 nt, Artificial Sequence
  Synthetic
agaucagaugguuuuaua

SEQ ID NO: 239111 - RNA, 19 nt, Artificial Sequence
  Synthetic
gagaucagaugguuuuaua

SEQ ID NO: 239112 - RNA, 20 nt, Artificial Sequence
  Synthetic
ugagaucagaugguuuuaua

SEQ ID NO: 239113 - RNA, 21 nt, Artificial Sequence
  Synthetic
augagaucagaugguuuuaua

SEQ ID NO: 239114 - RNA, 22 nt, Artificial Sequence
  Synthetic
caugagaucagaugguuuuaua

SEQ ID NO: 239115 - RNA, 23 nt, Artificial Sequence
  Synthetic
ucaugagaucagaugguuuuaua

SEQ ID NO: 239116 - RNA, 24 nt, Artificial Sequence
  Synthetic
aucaugagaucagaugguuuuaua

SEQ ID NO: 239117 - RNA, 18 nt, Artificial Sequence
  Synthetic
agaucugauuguuuuaua

SEQ ID NO: 239118 - RNA, 19 nt, Artificial Sequence
  Synthetic
aagaucugauuguuuuaua

SEQ ID NO: 239119 - RNA, 20 nt, Artificial Sequence
  Synthetic
caagaucugauuguuuuaua

SEQ ID NO: 239120 - RNA, 21 nt, Artificial Sequence
  Synthetic
acaagaucugauuguuuuaua

SEQ ID NO: 239121 - RNA, 22 nt, Artificial Sequence
  Synthetic
cacaagaucugauuguuuuaua

SEQ ID NO: 239122 - RNA, 23 nt, Artificial Sequence
  Synthetic
ucacaagaucugauuguuuuaua

SEQ ID NO: 239123 - RNA, 24 nt, Artificial Sequence
  Synthetic
cucacaagaucugauuguuuuaua

SEQ ID NO: 239124 - RNA, 18 nt, Artificial Sequence
  Synthetic
cucuauauaguuuuuaua

SEQ ID NO: 239125 - RNA, 19 nt, Artificial Sequence
  Synthetic
ucucuauauaguuuuuaua

SEQ ID NO: 239126 - RNA, 20 nt, Artificial Sequence
  Synthetic
aucucuauauaguuuuuaua

SEQ ID NO: 239127 - RNA, 21 nt, Artificial Sequence
  Synthetic
uaucucuauauaguuuuuaua

SEQ ID NO: 239128 - RNA, 22 nt, Artificial Sequence
  Synthetic
auaucucuauauaguuuuuaua

SEQ ID NO: 239129 - RNA, 23 nt, Artificial Sequence
  Synthetic
uauaucucuauauaguuuuuaua

SEQ ID NO: 239130 - RNA, 24 nt, Artificial Sequence
  Synthetic
cuauaucucuauauaguuuuuaua

SEQ ID NO: 239131 - RNA, 18 nt, Artificial Sequence
  Synthetic
ugauuuuauguuuuuaua

SEQ ID NO: 239132 - RNA, 19 nt, Artificial Sequence
  Synthetic
augauuuuauguuuuuaua

SEQ ID NO: 239133 - RNA, 20 nt, Artificial Sequence
  Synthetic
uaugauuuuauguuuuuaua

SEQ ID NO: 239134 - RNA, 21 nt, Artificial Sequence
  Synthetic
uuaugauuuuauguuuuuaua

SEQ ID NO: 239135 - RNA, 22 nt, Artificial Sequence
  Synthetic
uuuaugauuuuauguuuuuaua

SEQ ID NO: 239136 - RNA, 23 nt, Artificial Sequence
  Synthetic
auuuaugauuuuauguuuuuaua

SEQ ID NO: 239137 - RNA, 24 nt, Artificial Sequence
  Synthetic
uauuuaugauuuuauguuuuuaua

SEQ ID NO: 239138 - RNA, 18 nt, Artificial Sequence
  Synthetic
caaccuuguguuuuuaua

SEQ ID NO: 239139 - RNA, 19 nt, Artificial Sequence
  Synthetic
ucaaccuuguguuuuuaua

SEQ ID NO: 239140 - RNA, 20 nt, Artificial Sequence
  Synthetic
uucaaccuuguguuuuuaua

SEQ ID NO: 239141 - RNA, 21 nt, Artificial Sequence
  Synthetic
auucaaccuuguguuuuuaua

SEQ ID NO: 239142 - RNA, 22 nt, Artificial Sequence
  Synthetic
cauucaaccuuguguuuuuaua

SEQ ID NO: 239143 - RNA, 23 nt, Artificial Sequence
  Synthetic
ccauucaaccuuguguuuuuaua

SEQ ID NO: 239144 - RNA, 24 nt, Artificial Sequence
  Synthetic
cccauucaaccuuguguuuuuaua

SEQ ID NO: 239145 - RNA, 18 nt, Artificial Sequence
  Synthetic
aauguugagagaaaacua

SEQ ID NO: 239146 - RNA, 19 nt, Artificial Sequence
  Synthetic
aaauguugagagaaaacua

SEQ ID NO: 239147 - RNA, 20 nt, Artificial Sequence
  Synthetic
aaaauguugagagaaaacua

SEQ ID NO: 239148 - RNA, 21 nt, Artificial Sequence
  Synthetic
caaaauguugagagaaaacua

SEQ ID NO: 239149 - RNA, 22 nt, Artificial Sequence
  Synthetic
acaaaauguugagagaaaacua

SEQ ID NO: 239150 - RNA, 23 nt, Artificial Sequence
  Synthetic
uacaaaauguugagagaaaacua

SEQ ID NO: 239151 - RNA, 24 nt, Artificial Sequence
  Synthetic
uuacaaaauguugagagaaaacua

SEQ ID NO: 239152 - RNA, 18 nt, Artificial Sequence
  Synthetic
uaaauaucaugaaaacua

SEQ ID NO: 239153 - RNA, 19 nt, Artificial Sequence
  Synthetic
uuaaauaucaugaaaacua

SEQ ID NO: 239154 - RNA, 20 nt, Artificial Sequence
  Synthetic
auuaaauaucaugaaaacua

SEQ ID NO: 239155 - RNA, 21 nt, Artificial Sequence
  Synthetic
aauuaaauaucaugaaaacua

SEQ ID NO: 239156 - RNA, 22 nt, Artificial Sequence
  Synthetic
uaauuaaauaucaugaaaacua

SEQ ID NO: 239157 - RNA, 23 nt, Artificial Sequence
  Synthetic
uuaauuaaauaucaugaaaacua

SEQ ID NO: 239158 - RNA, 24 nt, Artificial Sequence
  Synthetic
uuuaauuaaauaucaugaaaacua

SEQ ID NO: 239159 - RNA, 18 nt, Artificial Sequence
  Synthetic
agagggaauugaaaacua

SEQ ID NO: 239160 - RNA, 19 nt, Artificial Sequence
  Synthetic
aagagggaauugaaaacua

SEQ ID NO: 239161 - RNA, 20 nt, Artificial Sequence
  Synthetic
caagagggaauugaaaacua

SEQ ID NO: 239162 - RNA, 21 nt, Artificial Sequence
  Synthetic
ucaagagggaauugaaaacua

SEQ ID NO: 239163 - RNA, 22 nt, Artificial Sequence
  Synthetic
uucaagagggaauugaaaacua

SEQ ID NO: 239164 - RNA, 23 nt, Artificial Sequence
  Synthetic
cuucaagagggaauugaaaacua

SEQ ID NO: 239165 - RNA, 24 nt, Artificial Sequence
  Synthetic
ccuucaagagggaauugaaaacua

SEQ ID NO: 239166 - RNA, 18 nt, Artificial Sequence
  Synthetic
gugaagacuugaaaacua

SEQ ID NO: 239167 - RNA, 19 nt, Artificial Sequence
  Synthetic
ugugaagacuugaaaacua

SEQ ID NO: 239168 - RNA, 20 nt, Artificial Sequence
  Synthetic
uugugaagacuugaaaacua

SEQ ID NO: 239169 - RNA, 21 nt, Artificial Sequence
  Synthetic
uuugugaagacuugaaaacua

SEQ ID NO: 239170 - RNA, 22 nt, Artificial Sequence
  Synthetic
auuugugaagacuugaaaacua

SEQ ID NO: 239171 - RNA, 23 nt, Artificial Sequence
  Synthetic
cauuugugaagacuugaaaacua

SEQ ID NO: 239172 - RNA, 24 nt, Artificial Sequence
  Synthetic
acauuugugaagacuugaaaacua

SEQ ID NO: 239173 - RNA, 18 nt, Artificial Sequence
  Synthetic
uaccauaucaacaaacua

SEQ ID NO: 239174 - RNA, 19 nt, Artificial Sequence
  Synthetic
cuaccauaucaacaaacua

SEQ ID NO: 239175 - RNA, 20 nt, Artificial Sequence
  Synthetic
ucuaccauaucaacaaacua

SEQ ID NO: 239176 - RNA, 21 nt, Artificial Sequence
  Synthetic
aucuaccauaucaacaaacua

SEQ ID NO: 239177 - RNA, 22 nt, Artificial Sequence
  Synthetic
aaucuaccauaucaacaaacua

SEQ ID NO: 239178 - RNA, 23 nt, Artificial Sequence
  Synthetic
uaaucuaccauaucaacaaacua

SEQ ID NO: 239179 - RNA, 24 nt, Artificial Sequence
  Synthetic
guaaucuaccauaucaacaaacua

SEQ ID NO: 239180 - RNA, 18 nt, Artificial Sequence
  Synthetic
ucucagcaagacaaacua

SEQ ID NO: 239181 - RNA, 19 nt, Artificial Sequence
  Synthetic
uucucagcaagacaaacua

SEQ ID NO: 239182 - RNA, 20 nt, Artificial Sequence
  Synthetic
uuucucagcaagacaaacua

SEQ ID NO: 239183 - RNA, 21 nt, Artificial Sequence
  Synthetic
uuuucucagcaagacaaacua

SEQ ID NO: 239184 - RNA, 22 nt, Artificial Sequence
  Synthetic
uuuuucucagcaagacaaacua

SEQ ID NO: 239185 - RNA, 23 nt, Artificial Sequence
  Synthetic
auuuuucucagcaagacaaacua

SEQ ID NO: 239186 - RNA, 24 nt, Artificial Sequence
  Synthetic
uauuuuucucagcaagacaaacua

SEQ ID NO: 239187 - RNA, 18 nt, Artificial Sequence
  Synthetic
aacauaagagucaaacua

SEQ ID NO: 239188 - RNA, 19 nt, Artificial Sequence
  Synthetic
aaacauaagagucaaacua

SEQ ID NO: 239189 - RNA, 20 nt, Artificial Sequence
  Synthetic
aaaacauaagagucaaacua

SEQ ID NO: 239190 - RNA, 21 nt, Artificial Sequence
  Synthetic
uaaaacauaagagucaaacua

SEQ ID NO: 239191 - RNA, 22 nt, Artificial Sequence
  Synthetic
cuaaaacauaagagucaaacua

SEQ ID NO: 239192 - RNA, 23 nt, Artificial Sequence
  Synthetic
ccuaaaacauaagagucaaacua

SEQ ID NO: 239193 - RNA, 24 nt, Artificial Sequence
  Synthetic
cccuaaaacauaagagucaaacua

SEQ ID NO: 239194 - RNA, 18 nt, Artificial Sequence
  Synthetic
uuacuuaguuucaaacua

SEQ ID NO: 239195 - RNA, 19 nt, Artificial Sequence
  Synthetic
uuuacuuaguuucaaacua

SEQ ID NO: 239196 - RNA, 20 nt, Artificial Sequence
  Synthetic
cuuuacuuaguuucaaacua

SEQ ID NO: 239197 - RNA, 21 nt, Artificial Sequence
  Synthetic
gcuuuacuuaguuucaaacua

SEQ ID NO: 239198 - RNA, 22 nt, Artificial Sequence
  Synthetic
ugcuuuacuuaguuucaaacua

SEQ ID NO: 239199 - RNA, 23 nt, Artificial Sequence
  Synthetic
uugcuuuacuuaguuucaaacua

SEQ ID NO: 239200 - RNA, 24 nt, Artificial Sequence
  Synthetic
uuugcuuuacuuaguuucaaacua

SEQ ID NO: 239201 - RNA, 18 nt, Artificial Sequence
  Synthetic
gaaauaugaaagaaacua

SEQ ID NO: 239202 - RNA, 19 nt, Artificial Sequence
  Synthetic
ggaaauaugaaagaaacua

SEQ ID NO: 239203 - RNA, 20 nt, Artificial Sequence
  Synthetic
gggaaauaugaaagaaacua

SEQ ID NO: 239204 - RNA, 21 nt, Artificial Sequence
  Synthetic
ugggaaauaugaaagaaacua

SEQ ID NO: 239205 - RNA, 22 nt, Artificial Sequence
  Synthetic
gugggaaauaugaaagaaacua

SEQ ID NO: 239206 - RNA, 23 nt, Artificial Sequence
  Synthetic
ggugggaaauaugaaagaaacua

SEQ ID NO: 239207 - RNA, 24 nt, Artificial Sequence
  Synthetic
uggugggaaauaugaaagaaacua

SEQ ID NO: 239208 - RNA, 18 nt, Artificial Sequence
  Synthetic
ucauguacugggaaacua

SEQ ID NO: 239209 - RNA, 19 nt, Artificial Sequence
  Synthetic
uucauguacugggaaacua

SEQ ID NO: 239210 - RNA, 20 nt, Artificial Sequence
  Synthetic
uuucauguacugggaaacua

SEQ ID NO: 239211 - RNA, 21 nt, Artificial Sequence
  Synthetic
auuucauguacugggaaacua

SEQ ID NO: 239212 - RNA, 22 nt, Artificial Sequence
  Synthetic
aauuucauguacugggaaacua

SEQ ID NO: 239213 - RNA, 23 nt, Artificial Sequence
  Synthetic
uaauuucauguacugggaaacua

SEQ ID NO: 239214 - RNA, 24 nt, Artificial Sequence
  Synthetic
cuaauuucauguacugggaaacua

SEQ ID NO: 239215 - RNA, 18 nt, Artificial Sequence
  Synthetic
auggaucacaauaaacua

SEQ ID NO: 239216 - RNA, 19 nt, Artificial Sequence
  Synthetic
uauggaucacaauaaacua

SEQ ID NO: 239217 - RNA, 20 nt, Artificial Sequence
  Synthetic
cuauggaucacaauaaacua

SEQ ID NO: 239218 - RNA, 21 nt, Artificial Sequence
  Synthetic
acuauggaucacaauaaacua

SEQ ID NO: 239219 - RNA, 22 nt, Artificial Sequence
  Synthetic
aacuauggaucacaauaaacua

SEQ ID NO: 239220 - RNA, 23 nt, Artificial Sequence
  Synthetic
aaacuauggaucacaauaaacua

SEQ ID NO: 239221 - RNA, 24 nt, Artificial Sequence
  Synthetic
caaacuauggaucacaauaaacua

SEQ ID NO: 239222 - RNA, 18 nt, Artificial Sequence
  Synthetic
gagaaagacaauaaacua

SEQ ID NO: 239223 - RNA, 19 nt, Artificial Sequence
  Synthetic
agagaaagacaauaaacua

SEQ ID NO: 239224 - RNA, 20 nt, Artificial Sequence
  Synthetic
aagagaaagacaauaaacua

SEQ ID NO: 239225 - RNA, 21 nt, Artificial Sequence
  Synthetic
aaagagaaagacaauaaacua

SEQ ID NO: 239226 - RNA, 22 nt, Artificial Sequence
  Synthetic
gaaagagaaagacaauaaacua

SEQ ID NO: 239227 - RNA, 23 nt, Artificial Sequence
  Synthetic
ugaaagagaaagacaauaaacua

SEQ ID NO: 239228 - RNA, 24 nt, Artificial Sequence
  Synthetic
uugaaagagaaagacaauaaacua

SEQ ID NO: 239229 - RNA, 18 nt, Artificial Sequence
  Synthetic
gaauuaugggauaaacua

SEQ ID NO: 239230 - RNA, 19 nt, Artificial Sequence
  Synthetic
agaauuaugggauaaacua

SEQ ID NO: 239231 - RNA, 20 nt, Artificial Sequence
  Synthetic
gagaauuaugggauaaacua

SEQ ID NO: 239232 - RNA, 21 nt, Artificial Sequence
  Synthetic
agagaauuaugggauaaacua

SEQ ID NO: 239233 - RNA, 22 nt, Artificial Sequence
  Synthetic
aagagaauuaugggauaaacua

SEQ ID NO: 239234 - RNA, 23 nt, Artificial Sequence
  Synthetic
aaagagaauuaugggauaaacua

SEQ ID NO: 239235 - RNA, 24 nt, Artificial Sequence
  Synthetic
aaaagagaauuaugggauaaacua

SEQ ID NO: 239236 - RNA, 18 nt, Artificial Sequence
  Synthetic
uuuagguaauauaaacua

SEQ ID NO: 239237 - RNA, 19 nt, Artificial Sequence
  Synthetic
guuuagguaauauaaacua

SEQ ID NO: 239238 - RNA, 20 nt, Artificial Sequence
  Synthetic
aguuuagguaauauaaacua

SEQ ID NO: 239239 - RNA, 21 nt, Artificial Sequence
  Synthetic
gaguuuagguaauauaaacua

SEQ ID NO: 239240 - RNA, 22 nt, Artificial Sequence
  Synthetic
ugaguuuagguaauauaaacua

SEQ ID NO: 239241 - RNA, 23 nt, Artificial Sequence
  Synthetic
augaguuuagguaauauaaacua

SEQ ID NO: 239242 - RNA, 24 nt, Artificial Sequence
  Synthetic
gaugaguuuagguaauauaaacua

SEQ ID NO: 239243 - RNA, 18 nt, Artificial Sequence
  Synthetic
ugggaucuaacuaaacua

SEQ ID NO: 239244 - RNA, 19 nt, Artificial Sequence
  Synthetic
augggaucuaacuaaacua

SEQ ID NO: 239245 - RNA, 20 nt, Artificial Sequence
  Synthetic
aaugggaucuaacuaaacua

SEQ ID NO: 239246 - RNA, 21 nt, Artificial Sequence
  Synthetic
aaaugggaucuaacuaaacua

SEQ ID NO: 239247 - RNA, 22 nt, Artificial Sequence
  Synthetic
caaaugggaucuaacuaaacua

SEQ ID NO: 239248 - RNA, 23 nt, Artificial Sequence
  Synthetic
acaaaugggaucuaacuaaacua

SEQ ID NO: 239249 - RNA, 24 nt, Artificial Sequence
  Synthetic
gacaaaugggaucuaacuaaacua

SEQ ID NO: 239250 - RNA, 18 nt, Artificial Sequence
  Synthetic
gauuaccugacuaaacua

SEQ ID NO: 239251 - RNA, 19 nt, Artificial Sequence
  Synthetic
cgauuaccugacuaaacua

SEQ ID NO: 239252 - RNA, 20 nt, Artificial Sequence
  Synthetic
ucgauuaccugacuaaacua

SEQ ID NO: 239253 - RNA, 21 nt, Artificial Sequence
  Synthetic
cucgauuaccugacuaaacua

SEQ ID NO: 239254 - RNA, 22 nt, Artificial Sequence
  Synthetic
ucucgauuaccugacuaaacua

SEQ ID NO: 239255 - RNA, 23 nt, Artificial Sequence
  Synthetic
uucucgauuaccugacuaaacua

SEQ ID NO: 239256 - RNA, 24 nt, Artificial Sequence
  Synthetic
uuucucgauuaccugacuaaacua

SEQ ID NO: 239257 - RNA, 18 nt, Artificial Sequence
  Synthetic
uaauaaugaccuaaacua

SEQ ID NO: 239258 - RNA, 19 nt, Artificial Sequence
  Synthetic
auaauaaugaccuaaacua

SEQ ID NO: 239259 - RNA, 20 nt, Artificial Sequence
  Synthetic
gauaauaaugaccuaaacua

SEQ ID NO: 239260 - RNA, 21 nt, Artificial Sequence
  Synthetic
agauaauaaugaccuaaacua

SEQ ID NO: 239261 - RNA, 22 nt, Artificial Sequence
  Synthetic
uagauaauaaugaccuaaacua

SEQ ID NO: 239262 - RNA, 23 nt, Artificial Sequence
  Synthetic
auagauaauaaugaccuaaacua

SEQ ID NO: 239263 - RNA, 24 nt, Artificial Sequence
  Synthetic
gauagauaauaaugaccuaaacua

SEQ ID NO: 239264 - RNA, 18 nt, Artificial Sequence
  Synthetic
uggaaucuaauuaaacua

SEQ ID NO: 239265 - RNA, 19 nt, Artificial Sequence
  Synthetic
auggaaucuaauuaaacua

SEQ ID NO: 239266 - RNA, 20 nt, Artificial Sequence
  Synthetic
aauggaaucuaauuaaacua

SEQ ID NO: 239267 - RNA, 21 nt, Artificial Sequence
  Synthetic
aaauggaaucuaauuaaacua

SEQ ID NO: 239268 - RNA, 22 nt, Artificial Sequence
  Synthetic
caaauggaaucuaauuaaacua

SEQ ID NO: 239269 - RNA, 23 nt, Artificial Sequence
  Synthetic
acaaauggaaucuaauuaaacua

SEQ ID NO: 239270 - RNA, 24 nt, Artificial Sequence
  Synthetic
gacaaauggaaucuaauuaaacua

SEQ ID NO: 239271 - RNA, 18 nt, Artificial Sequence
  Synthetic
ugggaucuaauuaaacua

SEQ ID NO: 239272 - RNA, 19 nt, Artificial Sequence
  Synthetic
gugggaucuaauuaaacua

SEQ ID NO: 239273 - RNA, 20 nt, Artificial Sequence
  Synthetic
agugggaucuaauuaaacua

SEQ ID NO: 239274 - RNA, 21 nt, Artificial Sequence
  Synthetic
aagugggaucuaauuaaacua

SEQ ID NO: 239275 - RNA, 22 nt, Artificial Sequence
  Synthetic
caagugggaucuaauuaaacua

SEQ ID NO: 239276 - RNA, 23 nt, Artificial Sequence
  Synthetic
acaagugggaucuaauuaaacua

SEQ ID NO: 239277 - RNA, 24 nt, Artificial Sequence
  Synthetic
aacaagugggaucuaauuaaacua

SEQ ID NO: 239278 - RNA, 18 nt, Artificial Sequence
  Synthetic
aucucugacuuuaaacua

SEQ ID NO: 239279 - RNA, 19 nt, Artificial Sequence
  Synthetic
caucucugacuuuaaacua

SEQ ID NO: 239280 - RNA, 20 nt, Artificial Sequence
  Synthetic
ucaucucugacuuuaaacua

SEQ ID NO: 239281 - RNA, 21 nt, Artificial Sequence
  Synthetic
cucaucucugacuuuaaacua

SEQ ID NO: 239282 - RNA, 22 nt, Artificial Sequence
  Synthetic
ucucaucucugacuuuaaacua

SEQ ID NO: 239283 - RNA, 23 nt, Artificial Sequence
  Synthetic
aucucaucucugacuuuaaacua

SEQ ID NO: 239284 - RNA, 24 nt, Artificial Sequence
  Synthetic
gaucucaucucugacuuuaaacua

SEQ ID NO: 239285 - RNA, 18 nt, Artificial Sequence
  Synthetic
uagagaaucacccaacua

SEQ ID NO: 239286 - RNA, 19 nt, Artificial Sequence
  Synthetic
uuagagaaucacccaacua

SEQ ID NO: 239287 - RNA, 20 nt, Artificial Sequence
  Synthetic
auuagagaaucacccaacua

SEQ ID NO: 239288 - RNA, 21 nt, Artificial Sequence
  Synthetic
aauuagagaaucacccaacua

SEQ ID NO: 239289 - RNA, 22 nt, Artificial Sequence
  Synthetic
gaauuagagaaucacccaacua

SEQ ID NO: 239290 - RNA, 23 nt, Artificial Sequence
  Synthetic
agaauuagagaaucacccaacua

SEQ ID NO: 239291 - RNA, 24 nt, Artificial Sequence
  Synthetic
cagaauuagagaaucacccaacua

SEQ ID NO: 239292 - RNA, 18 nt, Artificial Sequence
  Synthetic
augugguaagugcaacua

SEQ ID NO: 239293 - RNA, 19 nt, Artificial Sequence
  Synthetic
aaugugguaagugcaacua

SEQ ID NO: 239294 - RNA, 20 nt, Artificial Sequence
  Synthetic
aaaugugguaagugcaacua

SEQ ID NO: 239295 - RNA, 21 nt, Artificial Sequence
  Synthetic
gaaaugugguaagugcaacua

SEQ ID NO: 239296 - RNA, 22 nt, Artificial Sequence
  Synthetic
ggaaaugugguaagugcaacua

SEQ ID NO: 239297 - RNA, 23 nt, Artificial Sequence
  Synthetic
uggaaaugugguaagugcaacua

SEQ ID NO: 239298 - RNA, 24 nt, Artificial Sequence
  Synthetic
uuggaaaugugguaagugcaacua

SEQ ID NO: 239299 - RNA, 18 nt, Artificial Sequence
  Synthetic
aagaaacugcaucaacua

SEQ ID NO: 239300 - RNA, 19 nt, Artificial Sequence
  Synthetic
gaagaaacugcaucaacua

SEQ ID NO: 239301 - RNA, 20 nt, Artificial Sequence
  Synthetic
ugaagaaacugcaucaacua

SEQ ID NO: 239302 - RNA, 21 nt, Artificial Sequence
  Synthetic
augaagaaacugcaucaacua

SEQ ID NO: 239303 - RNA, 22 nt, Artificial Sequence
  Synthetic
uaugaagaaacugcaucaacua

SEQ ID NO: 239304 - RNA, 23 nt, Artificial Sequence
  Synthetic
cuaugaagaaacugcaucaacua

SEQ ID NO: 239305 - RNA, 24 nt, Artificial Sequence
  Synthetic
acuaugaagaaacugcaucaacua

SEQ ID NO: 239306 - RNA, 18 nt, Artificial Sequence
  Synthetic
cacccacacacucaacua

SEQ ID NO: 239307 - RNA, 19 nt, Artificial Sequence
  Synthetic
ccacccacacacucaacua

SEQ ID NO: 239308 - RNA, 20 nt, Artificial Sequence
  Synthetic
uccacccacacacucaacua

SEQ ID NO: 239309 - RNA, 21 nt, Artificial Sequence
  Synthetic
cuccacccacacacucaacua

SEQ ID NO: 239310 - RNA, 22 nt, Artificial Sequence
  Synthetic
ccuccacccacacacucaacua

SEQ ID NO: 239311 - RNA, 23 nt, Artificial Sequence
  Synthetic
accuccacccacacacucaacua

SEQ ID NO: 239312 - RNA, 24 nt, Artificial Sequence
  Synthetic
caccuccacccacacacucaacua

SEQ ID NO: 239313 - RNA, 18 nt, Artificial Sequence
  Synthetic
cuugcaaauccucaacua

SEQ ID NO: 239314 - RNA, 19 nt, Artificial Sequence
  Synthetic
ucuugcaaauccucaacua

SEQ ID NO: 239315 - RNA, 20 nt, Artificial Sequence
  Synthetic
aucuugcaaauccucaacua

SEQ ID NO: 239316 - RNA, 21 nt, Artificial Sequence
  Synthetic
aaucuugcaaauccucaacua
